United States Patent Application Publication US 2018/0305689 A1 - sequence listing, part 154

SEQ ID NO: 2203037 - RNA, 19 nt, Artificial Sequence
  Description of Artificial Sequence: Synthetic oligonucleotide
  Antisense strand to SEQ ID NO: 2203036
uauccucccgccuaagcuu

SEQ ID NO: 2203038 - RNA, 19 nt, Artificial Sequence
  Description of Artificial Sequence: Synthetic oligonucleotide
  Sense strand starting at position 3301 of SEQ ID NO: 1883590
ccuagaaauuauccgaacu

SEQ ID NO: 2203039 - RNA, 19 nt, Artificial Sequence
  Description of Artificial Sequence: Synthetic oligonucleotide
  Antisense strand to SEQ ID NO: 2203038
aguucggauaauuucuagg

SEQ ID NO: 2203040 - RNA, 19 nt, Artificial Sequence
  Description of Artificial Sequence: Synthetic oligonucleotide
  Sense strand starting at position 2645 of SEQ ID NO: 1883590
ccacaagucaccugggaug

SEQ ID NO: 2203041 - RNA, 19 nt, Artificial Sequence
  Description of Artificial Sequence: Synthetic oligonucleotide
  Antisense strand to SEQ ID NO: 2203040
caucccaggugacuugugg

SEQ ID NO: 2203042 - RNA, 19 nt, Artificial Sequence
  Description of Artificial Sequence: Synthetic oligonucleotide
  Sense strand starting at position 2587 of SEQ ID NO: 1883590
gagucagggcauuauauuc

SEQ ID NO: 2203043 - RNA, 19 nt, Artificial Sequence
  Description of Artificial Sequence: Synthetic oligonucleotide
  Antisense strand to SEQ ID NO: 2203042
gaauauaaugcccugacuc

SEQ ID NO: 2203044 - RNA, 19 nt, Artificial Sequence
  Description of Artificial Sequence: Synthetic oligonucleotide
  Sense strand starting at position 2542 of SEQ ID NO: 1883590
aaugaagguugagauauuu

SEQ ID NO: 2203045 - RNA, 19 nt, Artificial Sequence
  Description of Artificial Sequence: Synthetic oligonucleotide
  Antisense strand to SEQ ID NO: 2203044
aaauaucucaaccuucauu

SEQ ID NO: 2203046 - RNA, 19 nt, Artificial Sequence
  Description of Artificial Sequence: Synthetic oligonucleotide
  Sense strand starting at position 3119 of SEQ ID NO: 1883590
accagaaugaguugaguug

SEQ ID NO: 2203047 - RNA, 19 nt, Artificial Sequence
  Description of Artificial Sequence: Synthetic oligonucleotide
  Antisense strand to SEQ ID NO: 2203046
caacucaacucauucuggu

SEQ ID NO: 2203048 - RNA, 19 nt, Artificial Sequence
  Description of Artificial Sequence: Synthetic oligonucleotide
  Sense strand starting at position 2509 of SEQ ID NO: 1883590
uagugaauggcagaaguuu

SEQ ID NO: 2203049 - RNA, 19 nt, Artificial Sequence
  Description of Artificial Sequence: Synthetic oligonucleotide
  Antisense strand to SEQ ID NO: 2203048
aaacuucugccauucacua

SEQ ID NO: 2203050 - RNA, 19 nt, Artificial Sequence
  Description of Artificial Sequence: Synthetic oligonucleotide
  Sense strand starting at position 2856 of SEQ ID NO: 1883590
uucugaggucuaggaauug

SEQ ID NO: 2203051 - RNA, 19 nt, Artificial Sequence
  Description of Artificial Sequence: Synthetic oligonucleotide
  Antisense strand to SEQ ID NO: 2203050
caauuccuagaccucagaa

SEQ ID NO: 2203052 - RNA, 19 nt, Artificial Sequence
  Description of Artificial Sequence: Synthetic oligonucleotide
  Sense strand starting at position 259 of SEQ ID NO: 1883590
ggagaagugaucuggccaa

SEQ ID NO: 2203053 - RNA, 19 nt, Artificial Sequence
  Description of Artificial Sequence: Synthetic oligonucleotide
  Antisense strand to SEQ ID NO: 2203052
uuggccagaucacuucucc

SEQ ID NO: 2203054 - RNA, 19 nt, Artificial Sequence
  Description of Artificial Sequence: Synthetic oligonucleotide
  Sense strand starting at position 550 of SEQ ID NO: 1883590
ugaugugaucaagggcaga

SEQ ID NO: 2203055 - RNA, 19 nt, Artificial Sequence
  Description of Artificial Sequence: Synthetic oligonucleotide
  Antisense strand to SEQ ID NO: 2203054
ucugcccuugaucacauca

SEQ ID NO: 2203056 - RNA, 19 nt, Artificial Sequence
  Description of Artificial Sequence: Synthetic oligonucleotide
  Sense strand starting at position 55 of SEQ ID NO: 1883590
acauaauggcuauguagaa

SEQ ID NO: 2203057 - RNA, 19 nt, Artificial Sequence
  Description of Artificial Sequence: Synthetic oligonucleotide
  Antisense strand to SEQ ID NO: 2203056
uucuacauagccauuaugu

SEQ ID NO: 2203058 - RNA, 19 nt, Artificial Sequence
  Description of Artificial Sequence: Synthetic oligonucleotide
  Sense strand starting at position 224 of SEQ ID NO: 1883590
cacuguaauggugauaggu

SEQ ID NO: 2203059 - RNA, 19 nt, Artificial Sequence
  Description of Artificial Sequence: Synthetic oligonucleotide
  Antisense strand to SEQ ID NO: 2203058
accuaucaccauuacagug

SEQ ID NO: 2203060 - RNA, 19 nt, Artificial Sequence
  Description of Artificial Sequence: Synthetic oligonucleotide
  Sense strand starting at position 2619 of SEQ ID NO: 1883590
agguuuaaagaagguguga

SEQ ID NO: 2203061 - RNA, 19 nt, Artificial Sequence
  Description of Artificial Sequence: Synthetic oligonucleotide
  Antisense strand to SEQ ID NO: 2203060
ucacaccuucuuuaaaccu

SEQ ID NO: 2203062 - RNA, 19 nt, Artificial Sequence
  Description of Artificial Sequence: Synthetic oligonucleotide
  Sense strand starting at position 3531 of SEQ ID NO: 1883590
aaggauuugugagauugau

SEQ ID NO: 2203063 - RNA, 19 nt, Artificial Sequence
  Description of Artificial Sequence: Synthetic oligonucleotide
  Antisense strand to SEQ ID NO: 2203062
aucaaucucacaaauccuu

SEQ ID NO: 2203064 - RNA, 19 nt, Artificial Sequence
  Description of Artificial Sequence: Synthetic oligonucleotide
  Sense strand starting at position 814 of SEQ ID NO: 1883590
ucuacagaaccgugagaua

SEQ ID NO: 2203065 - RNA, 19 nt, Artificial Sequence
  Description of Artificial Sequence: Synthetic oligonucleotide
  Antisense strand to SEQ ID NO: 2203064
uaucucacgguucuguaga

SEQ ID NO: 2203066 - RNA, 19 nt, Artificial Sequence
  Description of Artificial Sequence: Synthetic oligonucleotide
  Sense strand starting at position 288 of SEQ ID NO: 1883590
auagauggcugaguuagau

SEQ ID NO: 2203067 - RNA, 19 nt, Artificial Sequence
  Description of Artificial Sequence: Synthetic oligonucleotide
  Antisense strand to SEQ ID NO: 2203066
aucuaacucagccaucuau

SEQ ID NO: 2203068 - RNA, 19 nt, Artificial Sequence
  Description of Artificial Sequence: Synthetic oligonucleotide
  Sense strand starting at position 504 of SEQ ID NO: 1883590
uccggaauucgugaauaua

SEQ ID NO: 2203069 - RNA, 19 nt, Artificial Sequence
  Description of Artificial Sequence: Synthetic oligonucleotide
  Antisense strand to SEQ ID NO: 2203068
uauauucacgaauuccgga

SEQ ID NO: 2203070 - RNA, 19 nt, Artificial Sequence
  Description of Artificial Sequence: Synthetic oligonucleotide
  Sense strand starting at position 3382 of SEQ ID NO: 1883590
cuguacacuuaucugagau

SEQ ID NO: 2203071 - RNA, 19 nt, Artificial Sequence
  Description of Artificial Sequence: Synthetic oligonucleotide
  Antisense strand to SEQ ID NO: 2203070
aucucagauaaguguacag

SEQ ID NO: 2203072 - RNA, 19 nt, Artificial Sequence
  Description of Artificial Sequence: Synthetic oligonucleotide
  Sense strand starting at position 56 of SEQ ID NO: 1883590
cauaauggcuauguagaau

SEQ ID NO: 2203073 - RNA, 19 nt, Artificial Sequence
  Description of Artificial Sequence: Synthetic oligonucleotide
  Antisense strand to SEQ ID NO: 2203072
auucuacauagccauuaug

SEQ ID NO: 2203074 - RNA, 19 nt, Artificial Sequence
  Description of Artificial Sequence: Synthetic oligonucleotide
  Sense strand starting at position 453 of SEQ ID NO: 1883590
acacuacuguaggcagaau

SEQ ID NO: 2203075 - RNA, 19 nt, Artificial Sequence
  Description of Artificial Sequence: Synthetic oligonucleotide
  Antisense strand to SEQ ID NO: 2203074
auucugccuacaguagugu

SEQ ID NO: 2203076 - RNA, 19 nt, Artificial Sequence
  Description of Artificial Sequence: Synthetic oligonucleotide
  Sense strand starting at position 3131 of SEQ ID NO: 1883590
ugaguugguaauuaguuua

SEQ ID NO: 2203077 - RNA, 19 nt, Artificial Sequence
  Description of Artificial Sequence: Synthetic oligonucleotide
  Antisense strand to SEQ ID NO: 2203076
uaaacuaauuaccaacuca

SEQ ID NO: 2203078 - RNA, 19 nt, Artificial Sequence
  Description of Artificial Sequence: Synthetic oligonucleotide
  Sense strand starting at position 233 of SEQ ID NO: 1883590
ggugauaggugaguacaau

SEQ ID NO: 2203079 - RNA, 19 nt, Artificial Sequence
  Description of Artificial Sequence: Synthetic oligonucleotide
  Antisense strand to SEQ ID NO: 2203078
auuguacucaccuaucacc

SEQ ID NO: 2203080 - RNA, 19 nt, Artificial Sequence
  Description of Artificial Sequence: Synthetic oligonucleotide
  Sense strand starting at position 2696 of SEQ ID NO: 1883590
auaauugugcuguauaaca

SEQ ID NO: 2203081 - RNA, 19 nt, Artificial Sequence
  Description of Artificial Sequence: Synthetic oligonucleotide
  Antisense strand to SEQ ID NO: 2203080
uguuauacagcacaauuau

SEQ ID NO: 2203082 - RNA, 19 nt, Artificial Sequence
  Description of Artificial Sequence: Synthetic oligonucleotide
  Sense strand starting at position 3298 of SEQ ID NO: 1883590
cguccuagaaauuauccga

SEQ ID NO: 2203083 - RNA, 19 nt, Artificial Sequence
  Description of Artificial Sequence: Synthetic oligonucleotide
  Antisense strand to SEQ ID NO: 2203082
ucggauaauuucuaggacg

SEQ ID NO: 2203084 - RNA, 19 nt, Artificial Sequence
  Description of Artificial Sequence: Synthetic oligonucleotide
  Sense strand starting at position 1117 of SEQ ID NO: 1883590
guucucucgcguucaacga

SEQ ID NO: 2203085 - RNA, 19 nt, Artificial Sequence
  Description of Artificial Sequence: Synthetic oligonucleotide
  Antisense strand to SEQ ID NO: 2203084
ucguugaacgcgagagaac

SEQ ID NO: 2203086 - RNA, 19 nt, Artificial Sequence
  Description of Artificial Sequence: Synthetic oligonucleotide
  Sense strand starting at position 285 of SEQ ID NO: 1883590
cacauagauggcugaguua

SEQ ID NO: 2203087 - RNA, 19 nt, Artificial Sequence
  Description of Artificial Sequence: Synthetic oligonucleotide
  Antisense strand to SEQ ID NO: 2203086
uaacucagccaucuaugug

SEQ ID NO: 2203088 - RNA, 19 nt, Artificial Sequence
  Description of Artificial Sequence: Synthetic oligonucleotide
  Sense strand starting at position 514 of SEQ ID NO: 1883590
gugaauauauuagcuuaca

SEQ ID NO: 2203089 - RNA, 19 nt, Artificial Sequence
  Description of Artificial Sequence: Synthetic oligonucleotide
  Antisense strand to SEQ ID NO: 2203088
uguaagcuaauauauucac

SEQ ID NO: 2203090 - RNA, 19 nt, Artificial Sequence
  Description of Artificial Sequence: Synthetic oligonucleotide
  Sense strand starting at position 1192 of SEQ ID NO: 1883590
uuacguuuauuugcagcaa

SEQ ID NO: 2203091 - RNA, 19 nt, Artificial Sequence
  Description of Artificial Sequence: Synthetic oligonucleotide
  Antisense strand to SEQ ID NO: 2203090
uugcugcaaauaaacguaa

SEQ ID NO: 2203092 - RNA, 19 nt, Artificial Sequence
  Description of Artificial Sequence: Synthetic oligonucleotide
  Sense strand starting at position 2524 of SEQ ID NO: 1883590
guuuguuguaaguagauaa

SEQ ID NO: 2203093 - RNA, 19 nt, Artificial Sequence
  Description of Artificial Sequence: Synthetic oligonucleotide
  Antisense strand to SEQ ID NO: 2203092
uuaucuacuuacaacaaac

SEQ ID NO: 2203094 - RNA, 19 nt, Artificial Sequence
  Description of Artificial Sequence: Synthetic oligonucleotide
  Sense strand starting at position 52 of SEQ ID NO: 1883590
cugacauaauggcuaugua

SEQ ID NO: 2203095 - RNA, 19 nt, Artificial Sequence
  Description of Artificial Sequence: Synthetic oligonucleotide
  Antisense strand to SEQ ID NO: 2203094
uacauagccauuaugucag

SEQ ID NO: 2203096 - RNA, 19 nt, Artificial Sequence
  Description of Artificial Sequence: Synthetic oligonucleotide
  Sense strand starting at position 2621 of SEQ ID NO: 1883590
guuuaaagaaggugugauu

SEQ ID NO: 2203097 - RNA, 19 nt, Artificial Sequence
  Description of Artificial Sequence: Synthetic oligonucleotide
  Antisense strand to SEQ ID NO: 2203096
aaucacaccuucuuuaaac

SEQ ID NO: 2203098 - RNA, 19 nt, Artificial Sequence
  Description of Artificial Sequence: Synthetic oligonucleotide
  Sense strand starting at position 3537 of SEQ ID NO: 1883590
uugugagauugauaauuug

SEQ ID NO: 2203099 - RNA, 19 nt, Artificial Sequence
  Description of Artificial Sequence: Synthetic oligonucleotide
  Antisense strand to SEQ ID NO: 2203098
caaauuaucaaucucacaa

SEQ ID NO: 2203100 - RNA, 19 nt, Artificial Sequence
  Description of Artificial Sequence: Synthetic oligonucleotide
  Sense strand starting at position 3006 of SEQ ID NO: 1883591
agugaaaugcuauacaacu

SEQ ID NO: 2203101 - RNA, 19 nt, Artificial Sequence
  Description of Artificial Sequence: Synthetic oligonucleotide
  Antisense strand to SEQ ID NO: 2203100
aguuguauagcauuucacu

SEQ ID NO: 2203102 - RNA, 19 nt, Artificial Sequence
  Description of Artificial Sequence: Synthetic oligonucleotide
  Sense strand starting at position 1704 of SEQ ID NO: 1883591
uaagguugauaaccaugau

SEQ ID NO: 2203103 - RNA, 19 nt, Artificial Sequence
  Description of Artificial Sequence: Synthetic oligonucleotide
  Antisense strand to SEQ ID NO: 2203102
aucaugguuaucaaccuua

SEQ ID NO: 2203104 - RNA, 19 nt, Artificial Sequence
  Description of Artificial Sequence: Synthetic oligonucleotide
  Sense strand starting at position 2889 of SEQ ID NO: 1883591
ggugaauauguggagugga

SEQ ID NO: 2203105 - RNA, 19 nt, Artificial Sequence
  Description of Artificial Sequence: Synthetic oligonucleotide
  Antisense strand to SEQ ID NO: 2203104
uccacuccacauauucacc

SEQ ID NO: 2203106 - RNA, 19 nt, Artificial Sequence
  Description of Artificial Sequence: Synthetic oligonucleotide
  Sense strand starting at position 3900 of SEQ ID NO: 1883591
gguagaaagauauggaguu

SEQ ID NO: 2203107 - RNA, 19 nt, Artificial Sequence
  Description of Artificial Sequence: Synthetic oligonucleotide
  Antisense strand to SEQ ID NO: 2203106
aacuccauaucuuucuacc

SEQ ID NO: 2203108 - RNA, 19 nt, Artificial Sequence
  Description of Artificial Sequence: Synthetic oligonucleotide
  Sense strand starting at position 2693 of SEQ ID NO: 1883591
uuagcuuguguguuccauu

SEQ ID NO: 2203109 - RNA, 19 nt, Artificial Sequence
  Description of Artificial Sequence: Synthetic oligonucleotide
  Antisense strand to SEQ ID NO: 2203108
aauggaacacacaagcuaa

SEQ ID NO: 2203110 - RNA, 19 nt, Artificial Sequence
  Description of Artificial Sequence: Synthetic oligonucleotide
  Sense strand starting at position 2742 of SEQ ID NO: 1883591
cacugauuaguugaaagca

SEQ ID NO: 2203111 - RNA, 19 nt, Artificial Sequence
  Description of Artificial Sequence: Synthetic oligonucleotide
  Antisense strand to SEQ ID NO: 2203110
ugcuuucaacuaaucagug

SEQ ID NO: 2203112 - RNA, 19 nt, Artificial Sequence
  Description of Artificial Sequence: Synthetic oligonucleotide
  Sense strand starting at position 3947 of SEQ ID NO: 1883591
gagcgagggaguuauugaa

SEQ ID NO: 2203113 - RNA, 19 nt, Artificial Sequence
  Description of Artificial Sequence: Synthetic oligonucleotide
  Antisense strand to SEQ ID NO: 2203112
uucaauaacucccucgcuc

SEQ ID NO: 2203114 - RNA, 19 nt, Artificial Sequence
  Description of Artificial Sequence: Synthetic oligonucleotide
  Sense strand starting at position 10 of SEQ ID NO: 1883591
ugcaauaucagugaugaug

SEQ ID NO: 2203115 - RNA, 19 nt, Artificial Sequence
  Description of Artificial Sequence: Synthetic oligonucleotide
  Antisense strand to SEQ ID NO: 2203114
caucaucacugauauugca

SEQ ID NO: 2203116 - RNA, 19 nt, Artificial Sequence
  Description of Artificial Sequence: Synthetic oligonucleotide
  Sense strand starting at position 2832 of SEQ ID NO: 1883591
augaaagaaugucucaagu

SEQ ID NO: 2203117 - RNA, 19 nt, Artificial Sequence
  Description of Artificial Sequence: Synthetic oligonucleotide
  Antisense strand to SEQ ID NO: 2203116
acuugagacauucuuucau

SEQ ID NO: 2203118 - RNA, 19 nt, Artificial Sequence
  Description of Artificial Sequence: Synthetic oligonucleotide
  Sense strand starting at position 305 of SEQ ID NO: 1883591
ggauguuagauugagccau

SEQ ID NO: 2203119 - RNA, 19 nt, Artificial Sequence
  Description of Artificial Sequence: Synthetic oligonucleotide
  Antisense strand to SEQ ID NO: 2203118
auggcucaaucuaacaucc

SEQ ID NO: 2203120 - RNA, 19 nt, Artificial Sequence
  Description of Artificial Sequence: Synthetic oligonucleotide
  Sense strand starting at position 2986 of SEQ ID NO: 1883591
auggcuuguggagacauua

SEQ ID NO: 2203121 - RNA, 19 nt, Artificial Sequence
  Description of Artificial Sequence: Synthetic oligonucleotide
  Antisense strand to SEQ ID NO: 2203120
uaaugucuccacaagccau

SEQ ID NO: 2203122 - RNA, 19 nt, Artificial Sequence
  Description of Artificial Sequence: Synthetic oligonucleotide
  Sense strand starting at position 67 of SEQ ID NO: 1883591
auaauuuccuguguuaugu

SEQ ID NO: 2203123 - RNA, 19 nt, Artificial Sequence
  Description of Artificial Sequence: Synthetic oligonucleotide
  Antisense strand to SEQ ID NO: 2203122
acauaacacaggaaauuau

SEQ ID NO: 2203124 - RNA, 19 nt, Artificial Sequence
  Description of Artificial Sequence: Synthetic oligonucleotide
  Sense strand starting at position 3604 of SEQ ID NO: 1883591
gcugaugucguagcucuau

SEQ ID NO: 2203125 - RNA, 19 nt, Artificial Sequence
  Description of Artificial Sequence: Synthetic oligonucleotide
  Antisense strand to SEQ ID NO: 2203124
auagagcuacgacaucagc

SEQ ID NO: 2203126 - RNA, 19 nt, Artificial Sequence
  Description of Artificial Sequence: Synthetic oligonucleotide
  Sense strand starting at position 2482 of SEQ ID NO: 1883591
augagauauuuguaagaca

SEQ ID NO: 2203127 - RNA, 19 nt, Artificial Sequence
  Description of Artificial Sequence: Synthetic oligonucleotide
  Antisense strand to SEQ ID NO: 2203126
ugucuuacaaauaucucau

SEQ ID NO: 2203128 - RNA, 19 nt, Artificial Sequence
  Description of Artificial Sequence: Synthetic oligonucleotide
  Sense strand starting at position 296 of SEQ ID NO: 1883591
uaaacauguggauguuaga

SEQ ID NO: 2203129 - RNA, 19 nt, Artificial Sequence
  Description of Artificial Sequence: Synthetic oligonucleotide
  Antisense strand to SEQ ID NO: 2203128
ucuaacauccacauguuua

SEQ ID NO: 2203130 - RNA, 19 nt, Artificial Sequence
  Description of Artificial Sequence: Synthetic oligonucleotide
  Sense strand starting at position 493 of SEQ ID NO: 1883591
auuuguauuucguaagaca

SEQ ID NO: 2203131 - RNA, 19 nt, Artificial Sequence
  Description of Artificial Sequence: Synthetic oligonucleotide
  Antisense strand to SEQ ID NO: 2203130
ugucuuacgaaauacaaau

SEQ ID NO: 2203132 - RNA, 19 nt, Artificial Sequence
  Description of Artificial Sequence: Synthetic oligonucleotide
  Sense strand starting at position 2342 of SEQ ID NO: 1883591
ggguauaccaucuaguuug

SEQ ID NO: 2203133 - RNA, 19 nt, Artificial Sequence
  Description of Artificial Sequence: Synthetic oligonucleotide
  Antisense strand to SEQ ID NO: 2203132
caaacuagaugguauaccc

SEQ ID NO: 2203134 - RNA, 19 nt, Artificial Sequence
  Description of Artificial Sequence: Synthetic oligonucleotide
  Sense strand starting at position 1170 of SEQ ID NO: 1883591
ggcauuguacuguaaggaa

SEQ ID NO: 2203135 - RNA, 19 nt, Artificial Sequence
  Description of Artificial Sequence: Synthetic oligonucleotide
  Antisense strand to SEQ ID NO: 2203134
uuccuuacaguacaaugcc

SEQ ID NO: 2203136 - RNA, 19 nt, Artificial Sequence
  Description of Artificial Sequence: Synthetic oligonucleotide
  Sense strand starting at position 2223 of SEQ ID NO: 1883591
uggauauacgcauacuuac

SEQ ID NO: 2203137 - RNA, 19 nt, Artificial Sequence
  Description of Artificial Sequence: Synthetic oligonucleotide
  Antisense strand to SEQ ID NO: 2203136
guaaguaugcguauaucca

SEQ ID NO: 2203138 - RNA, 19 nt, Artificial Sequence
  Description of Artificial Sequence: Synthetic oligonucleotide
  Sense strand starting at position 8 of SEQ ID NO: 1883591
gaugcaauaucagugauga

SEQ ID NO: 2203139 - RNA, 19 nt, Artificial Sequence
  Description of Artificial Sequence: Synthetic oligonucleotide
  Antisense strand to SEQ ID NO: 2203138
ucaucacugauauugcauc

SEQ ID NO: 2203140 - RNA, 19 nt, Artificial Sequence
  Description of Artificial Sequence: Synthetic oligonucleotide
  Sense strand starting at position 711 of SEQ ID NO: 1883591
cuauauuugugucucugua

SEQ ID NO: 2203141 - RNA, 19 nt, Artificial Sequence
  Description of Artificial Sequence: Synthetic oligonucleotide
  Antisense strand to SEQ ID NO: 2203140
uacagagacacaaauauag

SEQ ID NO: 2203142 - RNA, 19 nt, Artificial Sequence
  Description of Artificial Sequence: Synthetic oligonucleotide
  Sense strand starting at position 3811 of SEQ ID NO: 1883591
agaggaagauuugauuguu

SEQ ID NO: 2203143 - RNA, 19 nt, Artificial Sequence
  Description of Artificial Sequence: Synthetic oligonucleotide
  Antisense strand to SEQ ID NO: 2203142
aacaaucaaaucuuccucu

SEQ ID NO: 2203144 - RNA, 19 nt, Artificial Sequence
  Description of Artificial Sequence: Synthetic oligonucleotide
  Sense strand starting at position 2485 of SEQ ID NO: 1883591
agauauuuguaagacacau

SEQ ID NO: 2203145 - RNA, 19 nt, Artificial Sequence
  Description of Artificial Sequence: Synthetic oligonucleotide
  Antisense strand to SEQ ID NO: 2203144
augugucuuacaaauaucu

SEQ ID NO: 2203146 - RNA, 19 nt, Artificial Sequence
  Description of Artificial Sequence: Synthetic oligonucleotide
  Sense strand starting at position 3763 of SEQ ID NO: 1883591
ugagcaacacguuaagauu

SEQ ID NO: 2203147 - RNA, 19 nt, Artificial Sequence
  Description of Artificial Sequence: Synthetic oligonucleotide
  Antisense strand to SEQ ID NO: 2203146
aaucuuaacguguugcuca

SEQ ID NO: 2203148 - RNA, 19 nt, Artificial Sequence
  Description of Artificial Sequence: Synthetic oligonucleotide
  Sense strand starting at position 2638 of SEQ ID NO: 1883591
aacugaugcgaauaacugu

SEQ ID NO: 2203149 - RNA, 19 nt, Artificial Sequence
  Description of Artificial Sequence: Synthetic oligonucleotide
  Antisense strand to SEQ ID NO: 2203148
acaguuauucgcaucaguu

SEQ ID NO: 2203150 - RNA, 19 nt, Artificial Sequence
  Description of Artificial Sequence: Synthetic oligonucleotide
  Sense strand starting at position 1804 of SEQ ID NO: 1883591
uaugguagauaguugacau

SEQ ID NO: 2203151 - RNA, 19 nt, Artificial Sequence
  Description of Artificial Sequence: Synthetic oligonucleotide
  Antisense strand to SEQ ID NO: 2203150
augucaacuaucuaccaua

SEQ ID NO: 2203152 - RNA, 19 nt, Artificial Sequence
  Description of Artificial Sequence: Synthetic oligonucleotide
  Sense strand starting at position 971 of SEQ ID NO: 1883591
gguaacuugcaucacugau

SEQ ID NO: 2203153 - RNA, 19 nt, Artificial Sequence
  Description of Artificial Sequence: Synthetic oligonucleotide
  Antisense strand to SEQ ID NO: 2203152
aucagugaugcaaguuacc

SEQ ID NO: 2203154 - RNA, 19 nt, Artificial Sequence
  Description of Artificial Sequence: Synthetic oligonucleotide
  Sense strand starting at position 3560 of SEQ ID NO: 1883591
gucaauaaccgagauuguu

SEQ ID NO: 2203155 - RNA, 19 nt, Artificial Sequence
  Description of Artificial Sequence: Synthetic oligonucleotide
  Antisense strand to SEQ ID NO: 2203154
aacaaucucgguuauugac

SEQ ID NO: 2203156 - RNA, 19 nt, Artificial Sequence
  Description of Artificial Sequence: Synthetic oligonucleotide
  Sense strand starting at position 2668 of SEQ ID NO: 1883591
guugaaagaauacgaaguu

SEQ ID NO: 2203157 - RNA, 19 nt, Artificial Sequence
  Description of Artificial Sequence: Synthetic oligonucleotide
  Antisense strand to SEQ ID NO: 2203156
aacuucguauucuuucaac

SEQ ID NO: 2203158 - RNA, 19 nt, Artificial Sequence
  Description of Artificial Sequence: Synthetic oligonucleotide
  Sense strand starting at position 1805 of SEQ ID NO: 1883591
augguagauaguugacauu

SEQ ID NO: 2203159 - RNA, 19 nt, Artificial Sequence
  Description of Artificial Sequence: Synthetic oligonucleotide
  Antisense strand to SEQ ID NO: 2203158
aaugucaacuaucuaccau

SEQ ID NO: 2203160 - RNA, 19 nt, Artificial Sequence
  Description of Artificial Sequence: Synthetic oligonucleotide
  Sense strand starting at position 1064 of SEQ ID NO: 1883591
uguggagaguuacuuugaa

SEQ ID NO: 2203161 - RNA, 19 nt, Artificial Sequence
  Description of Artificial Sequence: Synthetic oligonucleotide
  Antisense strand to SEQ ID NO: 2203160
uucaaaguaacucuccaca

SEQ ID NO: 2203162 - RNA, 19 nt, Artificial Sequence
  Description of Artificial Sequence: Synthetic oligonucleotide
  Sense strand starting at position 2877 of SEQ ID NO: 1883591
aagagagcccuuggugaau

SEQ ID NO: 2203163 - RNA, 19 nt, Artificial Sequence
  Description of Artificial Sequence: Synthetic oligonucleotide
  Antisense strand to SEQ ID NO: 2203162
auucaccaagggcucucuu

SEQ ID NO: 2203164 - RNA, 19 nt, Artificial Sequence
  Description of Artificial Sequence: Synthetic oligonucleotide
  Sense strand starting at position 2818 of SEQ ID NO: 1883591
gguaucacuuuccuaugaa

SEQ ID NO: 2203165 - RNA, 19 nt, Artificial Sequence
  Description of Artificial Sequence: Synthetic oligonucleotide
  Antisense strand to SEQ ID NO: 2203164
uucauaggaaagugauacc

SEQ ID NO: 2203166 - RNA, 19 nt, Artificial Sequence
  Description of Artificial Sequence: Synthetic oligonucleotide
  Sense strand starting at position 2688 of SEQ ID NO: 1883591
caguguuagcuuguguguu

SEQ ID NO: 2203167 - RNA, 19 nt, Artificial Sequence
  Description of Artificial Sequence: Synthetic oligonucleotide
  Antisense strand to SEQ ID NO: 2203166
aacacacaagcuaacacug

SEQ ID NO: 2203168 - RNA, 19 nt, Artificial Sequence
  Description of Artificial Sequence: Synthetic oligonucleotide
  Sense strand starting at position 3556 of SEQ ID NO: 1883591
guaagucaauaaccgagau

SEQ ID NO: 2203169 - RNA, 19 nt, Artificial Sequence
  Description of Artificial Sequence: Synthetic oligonucleotide
  Antisense strand to SEQ ID NO: 2203168
aucucgguuauugacuuac

SEQ ID NO: 2203170 - RNA, 19 nt, Artificial Sequence
  Description of Artificial Sequence: Synthetic oligonucleotide
  Sense strand starting at position 2036 of SEQ ID NO: 1883591
guuacacuucuuuaauagu

SEQ ID NO: 2203171 - RNA, 19 nt, Artificial Sequence
  Description of Artificial Sequence: Synthetic oligonucleotide
  Antisense strand to SEQ ID NO: 2203170
acuauuaaagaaguguaac

SEQ ID NO: 2203172 - RNA, 19 nt, Artificial Sequence
  Description of Artificial Sequence: Synthetic oligonucleotide
  Sense strand starting at position 2348 of SEQ ID NO: 1883591
accaucuaguuugugaaga

SEQ ID NO: 2203173 - RNA, 19 nt, Artificial Sequence
  Description of Artificial Sequence: Synthetic oligonucleotide
  Antisense strand to SEQ ID NO: 2203172
ucuucacaaacuagauggu

SEQ ID NO: 2203174 - RNA, 19 nt, Artificial Sequence
  Description of Artificial Sequence: Synthetic oligonucleotide
  Sense strand starting at position 9 of SEQ ID NO: 1883591
augcaauaucagugaugau

SEQ ID NO: 2203175 - RNA, 19 nt, Artificial Sequence
  Description of Artificial Sequence: Synthetic oligonucleotide
  Antisense strand to SEQ ID NO: 2203174
aucaucacugauauugcau

SEQ ID NO: 2203176 - RNA, 19 nt, Artificial Sequence
  Description of Artificial Sequence: Synthetic oligonucleotide
  Sense strand starting at position 2420 of SEQ ID NO: 1883591
auaucccaucguuaaguga

SEQ ID NO: 2203177 - RNA, 19 nt, Artificial Sequence
  Description of Artificial Sequence: Synthetic oligonucleotide
  Antisense strand to SEQ ID NO: 2203176
ucacuuaacgaugggauau

SEQ ID NO: 2203178 - RNA, 19 nt, Artificial Sequence
  Description of Artificial Sequence: Synthetic oligonucleotide
  Sense strand starting at position 2649 of SEQ ID NO: 1883591
auaacugucccauggagua

SEQ ID NO: 2203179 - RNA, 19 nt, Artificial Sequence
  Description of Artificial Sequence: Synthetic oligonucleotide
  Antisense strand to SEQ ID NO: 2203178
uacuccaugggacaguuau

SEQ ID NO: 2203180 - RNA, 19 nt, Artificial Sequence
  Description of Artificial Sequence: Synthetic oligonucleotide
  Sense strand starting at position 3121 of SEQ ID NO: 1883592
auuuguguuuacucgagau

SEQ ID NO: 2203181 - RNA, 19 nt, Artificial Sequence
  Description of Artificial Sequence: Synthetic oligonucleotide
  Antisense strand to SEQ ID NO: 2203180
aucucgaguaaacacaaau

SEQ ID NO: 2203182 - RNA, 19 nt, Artificial Sequence
  Description of Artificial Sequence: Synthetic oligonucleotide
  Sense strand starting at position 3777 of SEQ ID NO: 1883592
uggagaggugucugaagaa

SEQ ID NO: 2203183 - RNA, 19 nt, Artificial Sequence
  Description of Artificial Sequence: Synthetic oligonucleotide
  Antisense strand to SEQ ID NO: 2203182
uucuucagacaccucucca

SEQ ID NO: 2203184 - RNA, 19 nt, Artificial Sequence
  Description of Artificial Sequence: Synthetic oligonucleotide
  Sense strand starting at position 234 of SEQ ID NO: 1883592
uuggaauguguuuaaacau

SEQ ID NO: 2203185 - RNA, 19 nt, Artificial Sequence
  Description of Artificial Sequence: Synthetic oligonucleotide
  Antisense strand to SEQ ID NO: 2203184
auguuuaaacacauuccaa

SEQ ID NO: 2203186 - RNA, 19 nt, Artificial Sequence
  Description of Artificial Sequence: Synthetic oligonucleotide
  Sense strand starting at position 3115 of SEQ ID NO: 1883592
gcaaacauuuguguuuacu

SEQ ID NO: 2203187 - RNA, 19 nt, Artificial Sequence
  Description of Artificial Sequence: Synthetic oligonucleotide
  Antisense strand to SEQ ID NO: 2203186
aguaaacacaaauguuugc

SEQ ID NO: 2203188 - RNA, 19 nt, Artificial Sequence
  Description of Artificial Sequence: Synthetic oligonucleotide
  Sense strand starting at position 3609 of SEQ ID NO: 1883592
acaugcugugauuaucaaa

SEQ ID NO: 2203189 - RNA, 19 nt, Artificial Sequence
  Description of Artificial Sequence: Synthetic oligonucleotide
  Antisense strand to SEQ ID NO: 2203188
uuugauaaucacagcaugu

SEQ ID NO: 2203190 - RNA, 19 nt, Artificial Sequence
  Description of Artificial Sequence: Synthetic oligonucleotide
  Sense strand starting at position 1299 of SEQ ID NO: 1883592
auggucucagucuaaauua

SEQ ID NO: 2203191 - RNA, 19 nt, Artificial Sequence
  Description of Artificial Sequence: Synthetic oligonucleotide
  Antisense strand to SEQ ID NO: 2203190
uaauuuagacugagaccau

SEQ ID NO: 2203192 - RNA, 19 nt, Artificial Sequence
  Description of Artificial Sequence: Synthetic oligonucleotide
  Sense strand starting at position 1 of SEQ ID NO: 1883592
guuaaauaucuguacacug

SEQ ID NO: 2203193 - RNA, 19 nt, Artificial Sequence
  Description of Artificial Sequence: Synthetic oligonucleotide
  Antisense strand to SEQ ID NO: 2203192
caguguacagauauuuaac

SEQ ID NO: 2203194 - RNA, 19 nt, Artificial Sequence
  Description of Artificial Sequence: Synthetic oligonucleotide
  Sense strand starting at position 86 of SEQ ID NO: 1883592
uuuaguguccaagaaucac

SEQ ID NO: 2203195 - RNA, 19 nt, Artificial Sequence
  Description of Artificial Sequence: Synthetic oligonucleotide
  Antisense strand to SEQ ID NO: 2203194
gugauucuuggacacuaaa

SEQ ID NO: 2203196 - RNA, 19 nt, Artificial Sequence
  Description of Artificial Sequence: Synthetic oligonucleotide
  Sense strand starting at position 1289 of SEQ ID NO: 1883592
gaauuauaugauggucuca

SEQ ID NO: 2203197 - RNA, 19 nt, Artificial Sequence
  Description of Artificial Sequence: Synthetic oligonucleotide
  Antisense strand to SEQ ID NO: 2203196
ugagaccaucauauaauuc

SEQ ID NO: 2203198 - RNA, 19 nt, Artificial Sequence
  Description of Artificial Sequence: Synthetic oligonucleotide
  Sense strand starting at position 2069 of SEQ ID NO: 1883592
gugaguacucacuaucaug

SEQ ID NO: 2203199 - RNA, 19 nt, Artificial Sequence
  Description of Artificial Sequence: Synthetic oligonucleotide
  Antisense strand to SEQ ID NO: 2203198
caugauagugaguacucac

SEQ ID NO: 2203200 - RNA, 19 nt, Artificial Sequence
  Description of Artificial Sequence: Synthetic oligonucleotide
  Sense strand starting at position 1452 of SEQ ID NO: 1883592
ugagaccuuguguaauuau

SEQ ID NO: 2203201 - RNA, 19 nt, Artificial Sequence
  Description of Artificial Sequence: Synthetic oligonucleotide
  Antisense strand to SEQ ID NO: 2203200
auaauuacacaaggucuca

SEQ ID NO: 2203202 - RNA, 19 nt, Artificial Sequence
  Description of Artificial Sequence: Synthetic oligonucleotide
  Sense strand starting at position 240 of SEQ ID NO: 1883592
uguguuuaaacauagaggu

SEQ ID NO: 2203203 - RNA, 19 nt, Artificial Sequence
  Description of Artificial Sequence: Synthetic oligonucleotide
  Antisense strand to SEQ ID NO: 2203202
accucuauguuuaaacaca

SEQ ID NO: 2203204 - RNA, 19 nt, Artificial Sequence
  Description of Artificial Sequence: Synthetic oligonucleotide
  Sense strand starting at position 2253 of SEQ ID NO: 1883592
ucuaucucuguuuauuaga

SEQ ID NO: 2203205 - RNA, 19 nt, Artificial Sequence
  Description of Artificial Sequence: Synthetic oligonucleotide
  Antisense strand to SEQ ID NO: 2203204
ucuaauaaacagagauaga

SEQ ID NO: 2203206 - RNA, 19 nt, Artificial Sequence
  Description of Artificial Sequence: Synthetic oligonucleotide
  Sense strand starting at position 3302 of SEQ ID NO: 1883592
aacaaauuggcagguuaca

SEQ ID NO: 2203207 - RNA, 19 nt, Artificial Sequence
  Description of Artificial Sequence: Synthetic oligonucleotide
  Antisense strand to SEQ ID NO: 2203206
uguaaccugccaauuuguu

SEQ ID NO: 2203208 - RNA, 19 nt, Artificial Sequence
  Description of Artificial Sequence: Synthetic oligonucleotide
  Sense strand starting at position 1873 of SEQ ID NO: 1883592
ucaagaauugccugagacu

SEQ ID NO: 2203209 - RNA, 19 nt, Artificial Sequence
  Description of Artificial Sequence: Synthetic oligonucleotide
  Antisense strand to SEQ ID NO: 2203208
agucucaggcaauucuuga

SEQ ID NO: 2203210 - RNA, 19 nt, Artificial Sequence
  Description of Artificial Sequence: Synthetic oligonucleotide
  Sense strand starting at position 929 of SEQ ID NO: 1883592
ugaucagcucaauaggcau

SEQ ID NO: 2203211 - RNA, 19 nt, Artificial Sequence
  Description of Artificial Sequence: Synthetic oligonucleotide
  Antisense strand to SEQ ID NO: 2203210
augccuauugagcugauca

SEQ ID NO: 2203212 - RNA, 19 nt, Artificial Sequence
  Description of Artificial Sequence: Synthetic oligonucleotide
  Sense strand starting at position 3425 of SEQ ID NO: 1883592
uuauuugucuuagugguuu

SEQ ID NO: 2203213 - RNA, 19 nt, Artificial Sequence
  Description of Artificial Sequence: Synthetic oligonucleotide
  Antisense strand to SEQ ID NO: 2203212
aaaccacuaagacaaauaa

SEQ ID NO: 2203214 - RNA, 19 nt, Artificial Sequence
  Description of Artificial Sequence: Synthetic oligonucleotide
  Sense strand starting at position 3127 of SEQ ID NO: 1883592
guuuacucgagauaaguac

SEQ ID NO: 2203215 - RNA, 19 nt, Artificial Sequence
  Description of Artificial Sequence: Synthetic oligonucleotide
  Antisense strand to SEQ ID NO: 2203214
guacuuaucucgaguaaac

SEQ ID NO: 2203216 - RNA, 19 nt, Artificial Sequence
  Description of Artificial Sequence: Synthetic oligonucleotide
  Sense strand starting at position 3484 of SEQ ID NO: 1883592
ggagcuuguuuauuuguuu

SEQ ID NO: 2203217 - RNA, 19 nt, Artificial Sequence
  Description of Artificial Sequence: Synthetic oligonucleotide
  Antisense strand to SEQ ID NO: 2203216
aaacaaauaaacaagcucc

SEQ ID NO: 2203218 - RNA, 19 nt, Artificial Sequence
  Description of Artificial Sequence: Synthetic oligonucleotide
  Sense strand starting at position 2374 of SEQ ID NO: 1883592
guauauaacgcacauauau

SEQ ID NO: 2203219 - RNA, 19 nt, Artificial Sequence
  Description of Artificial Sequence: Synthetic oligonucleotide
  Antisense strand to SEQ ID NO: 2203218
auauaugugcguuauauac

SEQ ID NO: 2203220 - RNA, 19 nt, Artificial Sequence
  Description of Artificial Sequence: Synthetic oligonucleotide
  Sense strand starting at position 840 of SEQ ID NO: 1883592
cuuuauagauguuugaauc

SEQ ID NO: 2203221 - RNA, 19 nt, Artificial Sequence
  Description of Artificial Sequence: Synthetic oligonucleotide
  Antisense strand to SEQ ID NO: 2203220
gauucaaacaucuauaaag

SEQ ID NO: 2203222 - RNA, 19 nt, Artificial Sequence
  Description of Artificial Sequence: Synthetic oligonucleotide
  Sense strand starting at position 18 of SEQ ID NO: 1883592
ugugaugaacuagguuuga

SEQ ID NO: 2203223 - RNA, 19 nt, Artificial Sequence
  Description of Artificial Sequence: Synthetic oligonucleotide
  Antisense strand to SEQ ID NO: 2203222
ucaaaccuaguucaucaca

SEQ ID NO: 2203224 - RNA, 19 nt, Artificial Sequence
  Description of Artificial Sequence: Synthetic oligonucleotide
  Sense strand starting at position 3724 of SEQ ID NO: 1883592
ugaggugacauguauagcu

SEQ ID NO: 2203225 - RNA, 19 nt, Artificial Sequence
  Description of Artificial Sequence: Synthetic oligonucleotide
  Antisense strand to SEQ ID NO: 2203224
agcuauacaugucaccuca

SEQ ID NO: 2203226 - RNA, 19 nt, Artificial Sequence
  Description of Artificial Sequence: Synthetic oligonucleotide
  Sense strand starting at position 3579 of SEQ ID NO: 1883592
acuugauguugacugaagu

SEQ ID NO: 2203227 - RNA, 19 nt, Artificial Sequence
  Description of Artificial Sequence: Synthetic oligonucleotide
  Antisense strand to SEQ ID NO: 2203226
acuucagucaacaucaagu

SEQ ID NO: 2203228 - RNA, 19 nt, Artificial Sequence
  Description of Artificial Sequence: Synthetic oligonucleotide
  Sense strand starting at position 2682 of SEQ ID NO: 1883592
uguaucuugccugagaauu

SEQ ID NO: 2203229 - RNA, 19 nt, Artificial Sequence
  Description of Artificial Sequence: Synthetic oligonucleotide
  Antisense strand to SEQ ID NO: 2203228
aauucucaggcaagauaca

SEQ ID NO: 2203230 - RNA, 19 nt, Artificial Sequence
  Description of Artificial Sequence: Synthetic oligonucleotide
  Sense strand starting at position 3123 of SEQ ID NO: 1883592
uuguguuuacucgagauaa

SEQ ID NO: 2203231 - RNA, 19 nt, Artificial Sequence
  Description of Artificial Sequence: Synthetic oligonucleotide
  Antisense strand to SEQ ID NO: 2203230
uuaucucgaguaaacacaa

SEQ ID NO: 2203232 - RNA, 19 nt, Artificial Sequence
  Description of Artificial Sequence: Synthetic oligonucleotide
  Sense strand starting at position 886 of SEQ ID NO: 1883592
caguaaguauuugaugaag

SEQ ID NO: 2203233 - RNA, 19 nt, Artificial Sequence
  Description of Artificial Sequence: Synthetic oligonucleotide
  Antisense strand to SEQ ID NO: 2203232
cuucaucaaauacuuacug

SEQ ID NO: 2203234 - RNA, 19 nt, Artificial Sequence
  Description of Artificial Sequence: Synthetic oligonucleotide
  Sense strand starting at position 1291 of SEQ ID NO: 1883592
auuauaugauggucucagu

SEQ ID NO: 2203235 - RNA, 19 nt, Artificial Sequence
  Description of Artificial Sequence: Synthetic oligonucleotide
  Antisense strand to SEQ ID NO: 2203234
acugagaccaucauauaau

SEQ ID NO: 2203236 - RNA, 19 nt, Artificial Sequence
  Description of Artificial Sequence: Synthetic oligonucleotide
  Sense strand starting at position 1451 of SEQ ID NO: 1883592
uugagaccuuguguaauua

SEQ ID NO: 2203237 - RNA, 19 nt, Artificial Sequence
  Description of Artificial Sequence: Synthetic oligonucleotide
  Antisense strand to SEQ ID NO: 2203236
uaauuacacaaggucucaa

SEQ ID NO: 2203238 - RNA, 19 nt, Artificial Sequence
  Description of Artificial Sequence: Synthetic oligonucleotide
  Sense strand starting at position 3589 of SEQ ID NO: 1883592
gacugaaguucugcugaau

SEQ ID NO: 2203239 - RNA, 19 nt, Artificial Sequence
  Description of Artificial Sequence: Synthetic oligonucleotide
  Antisense strand to SEQ ID NO: 2203238
auucagcagaacuucaguc

SEQ ID NO: 2203240 - RNA, 19 nt, Artificial Sequence
  Description of Artificial Sequence: Synthetic oligonucleotide
  Sense strand starting at position 3729 of SEQ ID NO: 1883592
ugacauguauagcuucuaa

SEQ ID NO: 2203241 - RNA, 19 nt, Artificial Sequence
  Description of Artificial Sequence: Synthetic oligonucleotide
  Antisense strand to SEQ ID NO: 2203240
uuagaagcuauacauguca

SEQ ID NO: 2203242 - RNA, 19 nt, Artificial Sequence
  Description of Artificial Sequence: Synthetic oligonucleotide
  Sense strand starting at position 3544 of SEQ ID NO: 1883592
ucagauuccgauuaguugu

SEQ ID NO: 2203243 - RNA, 19 nt, Artificial Sequence
  Description of Artificial Sequence: Synthetic oligonucleotide
  Antisense strand to SEQ ID NO: 2203242
acaacuaaucggaaucuga

SEQ ID NO: 2203244 - RNA, 19 nt, Artificial Sequence
  Description of Artificial Sequence: Synthetic oligonucleotide
  Sense strand starting at position 110 of SEQ ID NO: 1883592
auugaaucugacugugguu

SEQ ID NO: 2203245 - RNA, 19 nt, Artificial Sequence
  Description of Artificial Sequence: Synthetic oligonucleotide
  Antisense strand to SEQ ID NO: 2203244
aaccacagucagauucaau

SEQ ID NO: 2203246 - RNA, 19 nt, Artificial Sequence
  Description of Artificial Sequence: Synthetic oligonucleotide
  Sense strand starting at position 2601 of SEQ ID NO: 1883592
gugaaauaauugucuuucu

SEQ ID NO: 2203247 - RNA, 19 nt, Artificial Sequence
  Description of Artificial Sequence: Synthetic oligonucleotide
  Antisense strand to SEQ ID NO: 2203246
agaaagacaauuauuucac

SEQ ID NO: 2203248 - RNA, 19 nt, Artificial Sequence
  Description of Artificial Sequence: Synthetic oligonucleotide
  Sense strand starting at position 3125 of SEQ ID NO: 1883592
guguuuacucgagauaagu

SEQ ID NO: 2203249 - RNA, 19 nt, Artificial Sequence
  Description of Artificial Sequence: Synthetic oligonucleotide
  Antisense strand to SEQ ID NO: 2203248
acuuaucucgaguaaacac

SEQ ID NO: 2203250 - RNA, 19 nt, Artificial Sequence
  Description of Artificial Sequence: Synthetic oligonucleotide
  Sense strand starting at position 424 of SEQ ID NO: 1883592
cuaagacaagccuguacuu

SEQ ID NO: 2203251 - RNA, 19 nt, Artificial Sequence
  Description of Artificial Sequence: Synthetic oligonucleotide
  Antisense strand to SEQ ID NO: 2203250
aaguacaggcuugucuuag

SEQ ID NO: 2203252 - RNA, 19 nt, Artificial Sequence
  Description of Artificial Sequence: Synthetic oligonucleotide
  Sense strand starting at position 1238 of SEQ ID NO: 1883592
accugugcccaguaauuau

SEQ ID NO: 2203253 - RNA, 19 nt, Artificial Sequence
  Description of Artificial Sequence: Synthetic oligonucleotide
  Antisense strand to SEQ ID NO: 2203252
auaauuacugggcacaggu

SEQ ID NO: 2203254 - RNA, 19 nt, Artificial Sequence
  Description of Artificial Sequence: Synthetic oligonucleotide
  Sense strand starting at position 2681 of SEQ ID NO: 1883592
auguaucuugccugagaau

SEQ ID NO: 2203255 - RNA, 19 nt, Artificial Sequence
  Description of Artificial Sequence: Synthetic oligonucleotide
  Antisense strand to SEQ ID NO: 2203254
auucucaggcaagauacau

SEQ ID NO: 2203256 - RNA, 19 nt, Artificial Sequence
  Description of Artificial Sequence: Synthetic oligonucleotide
  Sense strand starting at position 1220 of SEQ ID NO: 1883592
ccaauuuauugguaaagua

SEQ ID NO: 2203257 - RNA, 19 nt, Artificial Sequence
  Description of Artificial Sequence: Synthetic oligonucleotide
  Antisense strand to SEQ ID NO: 2203256
uacuuuaccaauaaauugg

SEQ ID NO: 2203258 - RNA, 19 nt, Artificial Sequence
  Description of Artificial Sequence: Synthetic oligonucleotide
  Sense strand starting at position 3026 of SEQ ID NO: 1883592
gccugcuaagcauaauauu

SEQ ID NO: 2203259 - RNA, 19 nt, Artificial Sequence
  Description of Artificial Sequence: Synthetic oligonucleotide
  Antisense strand to SEQ ID NO: 2203258
aauauuaugcuuagcaggc

SEQ ID NO: 2203260 - RNA, 19 nt, Artificial Sequence
  Description of Artificial Sequence: Synthetic oligonucleotide
  Sense strand starting at position 3853 of SEQ ID NO: 1883593
gaaguuugcaugugauuug

SEQ ID NO: 2203261 - RNA, 19 nt, Artificial Sequence
  Description of Artificial Sequence: Synthetic oligonucleotide
  Antisense strand to SEQ ID NO: 2203260
caaaucacaugcaaacuuc

SEQ ID NO: 2203262 - RNA, 19 nt, Artificial Sequence
  Description of Artificial Sequence: Synthetic oligonucleotide
  Sense strand starting at position 3281 of SEQ ID NO: 1883593
uggucaugaccucaaaccu

SEQ ID NO: 2203263 - RNA, 19 nt, Artificial Sequence
  Description of Artificial Sequence: Synthetic oligonucleotide
  Antisense strand to SEQ ID NO: 2203262
agguuugaggucaugacca

SEQ ID NO: 2203264 - RNA, 19 nt, Artificial Sequence
  Description of Artificial Sequence: Synthetic oligonucleotide
  Sense strand starting at position 3783 of SEQ ID NO: 1883593
ucacgugugguagcuuuau

SEQ ID NO: 2203265 - RNA, 19 nt, Artificial Sequence
  Description of Artificial Sequence: Synthetic oligonucleotide
  Antisense strand to SEQ ID NO: 2203264
auaaagcuaccacacguga

SEQ ID NO: 2203266 - RNA, 19 nt, Artificial Sequence
  Description of Artificial Sequence: Synthetic oligonucleotide
  Sense strand starting at position 3644 of SEQ ID NO: 1883593
uugugaauggccuaaugac

SEQ ID NO: 2203267 - RNA, 19 nt, Artificial Sequence
  Description of Artificial Sequence: Synthetic oligonucleotide
  Antisense strand to SEQ ID NO: 2203266
gucauuaggccauucacaa

SEQ ID NO: 2203268 - RNA, 19 nt, Artificial Sequence
  Description of Artificial Sequence: Synthetic oligonucleotide
  Sense strand starting at position 3202 of SEQ ID NO: 1883593
agguuugcucuccaggaaa

SEQ ID NO: 2203269 - RNA, 19 nt, Artificial Sequence
  Description of Artificial Sequence: Synthetic oligonucleotide
  Antisense strand to SEQ ID NO: 2203268
uuuccuggagagcaaaccu

SEQ ID NO: 2203270 - RNA, 19 nt, Artificial Sequence
  Description of Artificial Sequence: Synthetic oligonucleotide
  Sense strand starting at position 2088 of SEQ ID NO: 1883593
cucagugacguccacagaa

SEQ ID NO: 2203271 - RNA, 19 nt, Artificial Sequence
  Description of Artificial Sequence: Synthetic oligonucleotide
  Antisense strand to SEQ ID NO: 2203270
uucuguggacgucacugag

SEQ ID NO: 2203272 - RNA, 19 nt, Artificial Sequence
  Description of Artificial Sequence: Synthetic oligonucleotide
  Sense strand starting at position 3076 of SEQ ID NO: 1883593
caaggaucccaacguggau

SEQ ID NO: 2203273 - RNA, 19 nt, Artificial Sequence
  Description of Artificial Sequence: Synthetic oligonucleotide
  Antisense strand to SEQ ID NO: 2203272
auccacguugggauccuug

SEQ ID NO: 2203274 - RNA, 19 nt, Artificial Sequence
  Description of Artificial Sequence: Synthetic oligonucleotide
  Sense strand starting at position 3606 of SEQ ID NO: 1883593
ucgugugucuggauggcaa

SEQ ID NO: 2203275 - RNA, 19 nt, Artificial Sequence
  Description of Artificial Sequence: Synthetic oligonucleotide
  Antisense strand to SEQ ID NO: 2203274
uugccauccagacacacga

SEQ ID NO: 2203276 - RNA, 19 nt, Artificial Sequence
  Description of Artificial Sequence: Synthetic oligonucleotide
  Sense strand starting at position 3688 of SEQ ID NO: 1883593
ccaagagcuaugggagguu

SEQ ID NO: 2203277 - RNA, 19 nt, Artificial Sequence
  Description of Artificial Sequence: Synthetic oligonucleotide
  Antisense strand to SEQ ID NO: 2203276
aaccucccauagcucuugg

SEQ ID NO: 2203278 - RNA, 19 nt, Artificial Sequence
  Description of Artificial Sequence: Synthetic oligonucleotide
  Sense strand starting at position 3680 of SEQ ID NO: 1883593
gugucaacccaagagcuau

SEQ ID NO: 2203279 - RNA, 19 nt, Artificial Sequence
  Description of Artificial Sequence: Synthetic oligonucleotide
  Antisense strand to SEQ ID NO: 2203278
auagcucuuggguugacac

SEQ ID NO: 2203280 - RNA, 19 nt, Artificial Sequence
  Description of Artificial Sequence: Synthetic oligonucleotide
  Sense strand starting at position 3763 of SEQ ID NO: 1883593
ccaagaaagcucugguuag

SEQ ID NO: 2203281 - RNA, 19 nt, Artificial Sequence
  Description of Artificial Sequence: Synthetic oligonucleotide
  Antisense strand to SEQ ID NO: 2203280
cuaaccagagcuuucuugg

SEQ ID NO: 2203282 - RNA, 19 nt, Artificial Sequence
  Description of Artificial Sequence: Synthetic oligonucleotide
  Sense strand starting at position 3306 of SEQ ID NO: 1883593
gcuuaaagccauuaagguu

SEQ ID NO: 2203283 - RNA, 19 nt, Artificial Sequence
  Description of Artificial Sequence: Synthetic oligonucleotide
  Antisense strand to SEQ ID NO: 2203282
aaccuuaauggcuuuaagc

SEQ ID NO: 2203284 - RNA, 19 nt, Artificial Sequence
  Description of Artificial Sequence: Synthetic oligonucleotide
  Sense strand starting at position 3201 of SEQ ID NO: 1883593
gagguuugcucuccaggaa

SEQ ID NO: 2203285 - RNA, 19 nt, Artificial Sequence
  Description of Artificial Sequence: Synthetic oligonucleotide
  Antisense strand to SEQ ID NO: 2203284
uuccuggagagcaaaccuc

SEQ ID NO: 2203286 - RNA, 19 nt, Artificial Sequence
  Description of Artificial Sequence: Synthetic oligonucleotide
  Sense strand starting at position 2393 of SEQ ID NO: 1883593
caucuacuccgugaaugug

SEQ ID NO: 2203287 - RNA, 19 nt, Artificial Sequence
  Description of Artificial Sequence: Synthetic oligonucleotide
  Antisense strand to SEQ ID NO: 2203286
cacauucacggaguagaug

SEQ ID NO: 2203288 - RNA, 19 nt, Artificial Sequence
  Description of Artificial Sequence: Synthetic oligonucleotide
  Sense strand starting at position 2818 of SEQ ID NO: 1883593
cuaugagaucuuggcagug

SEQ ID NO: 2203289 - RNA, 19 nt, Artificial Sequence
  Description of Artificial Sequence: Synthetic oligonucleotide
  Antisense strand to SEQ ID NO: 2203288
cacugccaagaucucauag

SEQ ID NO: 2203290 - RNA, 19 nt, Artificial Sequence
  Description of Artificial Sequence: Synthetic oligonucleotide
  Sense strand starting at position 3749 of SEQ ID NO: 1883593
ccaaguuaaucgucccaag

SEQ ID NO: 2203291 - RNA, 19 nt, Artificial Sequence
  Description of Artificial Sequence: Synthetic oligonucleotide
  Antisense strand to SEQ ID NO: 2203290
cuugggacgauuaacuugg

SEQ ID NO: 2203292 - RNA, 19 nt, Artificial Sequence
  Description of Artificial Sequence: Synthetic oligonucleotide
  Sense strand starting at position 2950 of SEQ ID NO: 1883593
gucugccauccuuagggua

SEQ ID NO: 2203293 - RNA, 19 nt, Artificial Sequence
  Description of Artificial Sequence: Synthetic oligonucleotide
  Antisense strand to SEQ ID NO: 2203292
uacccuaaggauggcagac

SEQ ID NO: 2203294 - RNA, 19 nt, Artificial Sequence
  Description of Artificial Sequence: Synthetic oligonucleotide
  Sense strand starting at position 2823 of SEQ ID NO: 1883593
agaucuuggcagugcuaaa

SEQ ID NO: 2203295 - RNA, 19 nt, Artificial Sequence
  Description of Artificial Sequence: Synthetic oligonucleotide
  Antisense strand to SEQ ID NO: 2203294
uuuagcacugccaagaucu

SEQ ID NO: 2203296 - RNA, 19 nt, Artificial Sequence
  Description of Artificial Sequence: Synthetic oligonucleotide
  Sense strand starting at position 3314 of SEQ ID NO: 1883593
ccauuaagguuuguuucuu

SEQ ID NO: 2203297 - RNA, 19 nt, Artificial Sequence
  Description of Artificial Sequence: Synthetic oligonucleotide
  Antisense strand to SEQ ID NO: 2203296
aagaaacaaaccuuaaugg

SEQ ID NO: 2203298 - RNA, 19 nt, Artificial Sequence
  Description of Artificial Sequence: Synthetic oligonucleotide
  Sense strand starting at position 2391 of SEQ ID NO: 1883593
ggcaucuacuccgugaaug

SEQ ID NO: 2203299 - RNA, 19 nt, Artificial Sequence
  Description of Artificial Sequence: Synthetic oligonucleotide
  Antisense strand to SEQ ID NO: 2203298
cauucacggaguagaugcc

SEQ ID NO: 2203300 - RNA, 19 nt, Artificial Sequence
  Description of Artificial Sequence: Synthetic oligonucleotide
  Sense strand starting at position 2390 of SEQ ID NO: 1883593
gggcaucuacuccgugaau

SEQ ID NO: 2203301 - RNA, 19 nt, Artificial Sequence
  Description of Artificial Sequence: Synthetic oligonucleotide
  Antisense strand to SEQ ID NO: 2203300
auucacggaguagaugccc

SEQ ID NO: 2203302 - RNA, 19 nt, Artificial Sequence
  Description of Artificial Sequence: Synthetic oligonucleotide
  Sense strand starting at position 3181 of SEQ ID NO: 1883593
cguccuaacucugcugaga

SEQ ID NO: 2203303 - RNA, 19 nt, Artificial Sequence
  Description of Artificial Sequence: Synthetic oligonucleotide
  Antisense strand to SEQ ID NO: 2203302
ucucagcagaguuaggacg

SEQ ID NO: 2203304 - RNA, 19 nt, Artificial Sequence
  Description of Artificial Sequence: Synthetic oligonucleotide
  Sense strand starting at position 3860 of SEQ ID NO: 1883593
gcaugugauuuggaaggca

SEQ ID NO: 2203305 - RNA, 19 nt, Artificial Sequence
  Description of Artificial Sequence: Synthetic oligonucleotide
  Antisense strand to SEQ ID NO: 2203304
ugccuuccaaaucacaugc

SEQ ID NO: 2203306 - RNA, 19 nt, Artificial Sequence
  Description of Artificial Sequence: Synthetic oligonucleotide
  Sense strand starting at position 3313 of SEQ ID NO: 1883593
gccauuaagguuuguuucu

SEQ ID NO: 2203307 - RNA, 19 nt, Artificial Sequence
  Description of Artificial Sequence: Synthetic oligonucleotide
  Antisense strand to SEQ ID NO: 2203306
agaaacaaaccuuaauggc

SEQ ID NO: 2203308 - RNA, 19 nt, Artificial Sequence
  Description of Artificial Sequence: Synthetic oligonucleotide
  Sense strand starting at position 3323 of SEQ ID NO: 1883593
uuuguuucuugcuccugau

SEQ ID NO: 2203309 - RNA, 19 nt, Artificial Sequence
  Description of Artificial Sequence: Synthetic oligonucleotide
  Antisense strand to SEQ ID NO: 2203308
aucaggagcaagaaacaaa

SEQ ID NO: 2203310 - RNA, 19 nt, Artificial Sequence
  Description of Artificial Sequence: Synthetic oligonucleotide
  Sense strand starting at position 2392 of SEQ ID NO: 1883593
gcaucuacuccgugaaugu

SEQ ID NO: 2203311 - RNA, 19 nt, Artificial Sequence
  Description of Artificial Sequence: Synthetic oligonucleotide
  Antisense strand to SEQ ID NO: 2203310
acauucacggaguagaugc

SEQ ID NO: 2203312 - RNA, 19 nt, Artificial Sequence
  Description of Artificial Sequence: Synthetic oligonucleotide
  Sense strand starting at position 3322 of SEQ ID NO: 1883593
guuuguuucuugcuccuga

SEQ ID NO: 2203313 - RNA, 19 nt, Artificial Sequence
  Description of Artificial Sequence: Synthetic oligonucleotide
  Antisense strand to SEQ ID NO: 2203312
ucaggagcaagaaacaaac

SEQ ID NO: 2203314 - RNA, 19 nt, Artificial Sequence
  Description of Artificial Sequence: Synthetic oligonucleotide
  Sense strand starting at position 2919 of SEQ ID NO: 1883593
ugcucaucugccugucuua

SEQ ID NO: 2203315 - RNA, 19 nt, Artificial Sequence
  Description of Artificial Sequence: Synthetic oligonucleotide
  Antisense strand to SEQ ID NO: 2203314
uaagacaggcagaugagca

SEQ ID NO: 2203316 - RNA, 19 nt, Artificial Sequence
  Description of Artificial Sequence: Synthetic oligonucleotide
  Sense strand starting at position 2863 of SEQ ID NO: 1883593
ccucaaugcgcuggcauua

SEQ ID NO: 2203317 - RNA, 19 nt, Artificial Sequence
  Description of Artificial Sequence: Synthetic oligonucleotide
  Antisense strand to SEQ ID NO: 2203316
uaaugccagcgcauugagg

SEQ ID NO: 2203318 - RNA, 19 nt, Artificial Sequence
  Description of Artificial Sequence: Synthetic oligonucleotide
  Sense strand starting at position 3269 of SEQ ID NO: 1883593
uagguugugcuguggucau

SEQ ID NO: 2203319 - RNA, 19 nt, Artificial Sequence
  Description of Artificial Sequence: Synthetic oligonucleotide
  Antisense strand to SEQ ID NO: 2203318
augaccacagcacaaccua

SEQ ID NO: 2203320 - RNA, 19 nt, Artificial Sequence
  Description of Artificial Sequence: Synthetic oligonucleotide
  Sense strand starting at position 2377 of SEQ ID NO: 1883593
uuguguucugccugggcau

SEQ ID NO: 2203321 - RNA, 19 nt, Artificial Sequence
  Description of Artificial Sequence: Synthetic oligonucleotide
  Antisense strand to SEQ ID NO: 2203320
augcccaggcagaacacaa

SEQ ID NO: 2203322 - RNA, 19 nt, Artificial Sequence
  Description of Artificial Sequence: Synthetic oligonucleotide
  Sense strand starting at position 3752 of SEQ ID NO: 1883593
aguuaaucgucccaagaaa

SEQ ID NO: 2203323 - RNA, 19 nt, Artificial Sequence
  Description of Artificial Sequence: Synthetic oligonucleotide
  Antisense strand to SEQ ID NO: 2203322
uuucuugggacgauuaacu

SEQ ID NO: 2203324 - RNA, 19 nt, Artificial Sequence
  Description of Artificial Sequence: Synthetic oligonucleotide
  Sense strand starting at position 3849 of SEQ ID NO: 1883593
cagagaaguuugcauguga

SEQ ID NO: 2203325 - RNA, 19 nt, Artificial Sequence
  Description of Artificial Sequence: Synthetic oligonucleotide
  Antisense strand to SEQ ID NO: 2203324
ucacaugcaaacuucucug

SEQ ID NO: 2203326 - RNA, 19 nt, Artificial Sequence
  Description of Artificial Sequence: Synthetic oligonucleotide
  Sense strand starting at position 2523 of SEQ ID NO: 1883593
ugccucucaugcuagacaa

SEQ ID NO: 2203327 - RNA, 19 nt, Artificial Sequence
  Description of Artificial Sequence: Synthetic oligonucleotide
  Antisense strand to SEQ ID NO: 2203326
uugucuagcaugagaggca

SEQ ID NO: 2203328 - RNA, 19 nt, Artificial Sequence
  Description of Artificial Sequence: Synthetic oligonucleotide
  Sense strand starting at position 3091 of SEQ ID NO: 1883593
ggauaagacugucgcauug

SEQ ID NO: 2203329 - RNA, 19 nt, Artificial Sequence
  Description of Artificial Sequence: Synthetic oligonucleotide
  Antisense strand to SEQ ID NO: 2203328
caaugcgacagucuuaucc

SEQ ID NO: 2203330 - RNA, 19 nt, Artificial Sequence
  Description of Artificial Sequence: Synthetic oligonucleotide
  Sense strand starting at position 3764 of SEQ ID NO: 1883593
caagaaagcucugguuagc

SEQ ID NO: 2203331 - RNA, 19 nt, Artificial Sequence
  Description of Artificial Sequence: Synthetic oligonucleotide
  Antisense strand to SEQ ID NO: 2203330
gcuaaccagagcuuucuug

SEQ ID NO: 2203332 - RNA, 19 nt, Artificial Sequence
  Description of Artificial Sequence: Synthetic oligonucleotide
  Sense strand starting at position 3093 of SEQ ID NO: 1883593
auaagacugucgcauuguu

SEQ ID NO: 2203333 - RNA, 19 nt, Artificial Sequence
  Description of Artificial Sequence: Synthetic oligonucleotide
  Antisense strand to SEQ ID NO: 2203332
aacaaugcgacagucuuau

SEQ ID NO: 2203334 - RNA, 19 nt, Artificial Sequence
  Description of Artificial Sequence: Synthetic oligonucleotide
  Sense strand starting at position 3792 of SEQ ID NO: 1883593
guagcuuuauacugaguca

SEQ ID NO: 2203335 - RNA, 19 nt, Artificial Sequence
  Description of Artificial Sequence: Synthetic oligonucleotide
  Antisense strand to SEQ ID NO: 2203334
ugacucaguauaaagcuac

SEQ ID NO: 2203336 - RNA, 19 nt, Artificial Sequence
  Description of Artificial Sequence: Synthetic oligonucleotide
  Sense strand starting at position 3326 of SEQ ID NO: 1883593
guuucuugcuccugaugca

SEQ ID NO: 2203337 - RNA, 19 nt, Artificial Sequence
  Description of Artificial Sequence: Synthetic oligonucleotide
  Antisense strand to SEQ ID NO: 2203336
ugcaucaggagcaagaaac

SEQ ID NO: 2203338 - RNA, 19 nt, Artificial Sequence
  Description of Artificial Sequence: Synthetic oligonucleotide
  Sense strand starting at position 3169 of SEQ ID NO: 1883593
ggugaaagcugccguccua

SEQ ID NO: 2203339 - RNA, 19 nt, Artificial Sequence
  Description of Artificial Sequence: Synthetic oligonucleotide
  Antisense strand to SEQ ID NO: 2203338
uaggacggcagcuuucacc

SEQ ID NO: 2203340 - RNA, 19 nt, Artificial Sequence
  Description of Artificial Sequence: Synthetic oligonucleotide
  Sense strand starting at position 2419 of SEQ ID NO: 1883594
aagauccuauggucauaga

SEQ ID NO: 2203341 - RNA, 19 nt, Artificial Sequence
  Description of Artificial Sequence: Synthetic oligonucleotide
  Antisense strand to SEQ ID NO: 2203340
ucuaugaccauaggaucuu

SEQ ID NO: 2203342 - RNA, 19 nt, Artificial Sequence
  Description of Artificial Sequence: Synthetic oligonucleotide
  Sense strand starting at position 1401 of SEQ ID NO: 1883594
cggugacgccuacagauuu

SEQ ID NO: 2203343 - RNA, 19 nt, Artificial Sequence
  Description of Artificial Sequence: Synthetic oligonucleotide
  Antisense strand to SEQ ID NO: 2203342
aaaucuguaggcgucaccg

SEQ ID NO: 2203344 - RNA, 19 nt, Artificial Sequence
  Description of Artificial Sequence: Synthetic oligonucleotide
  Sense strand starting at position 2674 of SEQ ID NO: 1883594
gggaacuuucuuuaguauc

SEQ ID NO: 2203345 - RNA, 19 nt, Artificial Sequence
  Description of Artificial Sequence: Synthetic oligonucleotide
  Antisense strand to SEQ ID NO: 2203344
gauacuaaagaaaguuccc

SEQ ID NO: 2203346 - RNA, 19 nt, Artificial Sequence
  Description of Artificial Sequence: Synthetic oligonucleotide
  Sense strand starting at position 3207 of SEQ ID NO: 1883594
ugaaaucagccuggagaug

SEQ ID NO: 2203347 - RNA, 19 nt, Artificial Sequence
  Description of Artificial Sequence: Synthetic oligonucleotide
  Antisense strand to SEQ ID NO: 2203346
caucuccaggcugauuuca

SEQ ID NO: 2203348 - RNA, 19 nt, Artificial Sequence
  Description of Artificial Sequence: Synthetic oligonucleotide
  Sense strand starting at position 3077 of SEQ ID NO: 1883594
gucugagugguuccgcauu

SEQ ID NO: 2203349 - RNA, 19 nt, Artificial Sequence
  Description of Artificial Sequence: Synthetic oligonucleotide
  Antisense strand to SEQ ID NO: 2203348
aaugcggaaccacucagac

SEQ ID NO: 2203350 - RNA, 19 nt, Artificial Sequence
  Description of Artificial Sequence: Synthetic oligonucleotide
  Sense strand starting at position 2672 of SEQ ID NO: 1883594
aagggaacuuucuuuagua

SEQ ID NO: 2203351 - RNA, 19 nt, Artificial Sequence
  Description of Artificial Sequence: Synthetic oligonucleotide
  Antisense strand to SEQ ID NO: 2203350
uacuaaagaaaguucccuu

SEQ ID NO: 2203352 - RNA, 19 nt, Artificial Sequence
  Description of Artificial Sequence: Synthetic oligonucleotide
  Sense strand starting at position 2296 of SEQ ID NO: 1883594
guccauauucugggaaaca

SEQ ID NO: 2203353 - RNA, 19 nt, Artificial Sequence
  Description of Artificial Sequence: Synthetic oligonucleotide
  Antisense strand to SEQ ID NO: 2203352
uguuucccagaauauggac

SEQ ID NO: 2203354 - RNA, 19 nt, Artificial Sequence
  Description of Artificial Sequence: Synthetic oligonucleotide
  Sense strand starting at position 1799 of SEQ ID NO: 1883594
ggaagagccuucuuagaug

SEQ ID NO: 2203355 - RNA, 19 nt, Artificial Sequence
  Description of Artificial Sequence: Synthetic oligonucleotide
  Antisense strand to SEQ ID NO: 2203354
caucuaagaaggcucuucc

SEQ ID NO: 2203356 - RNA, 19 nt, Artificial Sequence
  Description of Artificial Sequence: Synthetic oligonucleotide
  Sense strand starting at position 2870 of SEQ ID NO: 1883594
uuuguauuaacugggauga

SEQ ID NO: 2203357 - RNA, 19 nt, Artificial Sequence
  Description of Artificial Sequence: Synthetic oligonucleotide
  Antisense strand to SEQ ID NO: 2203356
ucaucccaguuaauacaaa

SEQ ID NO: 2203358 - RNA, 19 nt, Artificial Sequence
  Description of Artificial Sequence: Synthetic oligonucleotide
  Sense strand starting at position 3018 of SEQ ID NO: 1883594
uuugauuucucaucgccua

SEQ ID NO: 2203359 - RNA, 19 nt, Artificial Sequence
  Description of Artificial Sequence: Synthetic oligonucleotide
  Antisense strand to SEQ ID NO: 2203358
uaggcgaugagaaaucaaa

SEQ ID NO: 2203360 - RNA, 19 nt, Artificial Sequence
  Description of Artificial Sequence: Synthetic oligonucleotide
  Sense strand starting at position 3019 of SEQ ID NO: 1883594
uugauuucucaucgccuau

SEQ ID NO: 2203361 - RNA, 19 nt, Artificial Sequence
  Description of Artificial Sequence: Synthetic oligonucleotide
  Antisense strand to SEQ ID NO: 2203360
auaggcgaugagaaaucaa

SEQ ID NO: 2203362 - RNA, 19 nt, Artificial Sequence
  Description of Artificial Sequence: Synthetic oligonucleotide
  Sense strand starting at position 2673 of SEQ ID NO: 1883594
agggaacuuucuuuaguau

SEQ ID NO: 2203363 - RNA, 19 nt, Artificial Sequence
  Description of Artificial Sequence: Synthetic oligonucleotide
  Antisense strand to SEQ ID NO: 2203362
auacuaaagaaaguucccu

SEQ ID NO: 2203364 - RNA, 19 nt, Artificial Sequence
  Description of Artificial Sequence: Synthetic oligonucleotide
  Sense strand starting at position 2033 of SEQ ID NO: 1883594
ugagcacuuccugaauucu

SEQ ID NO: 2203365 - RNA, 19 nt, Artificial Sequence
  Description of Artificial Sequence: Synthetic oligonucleotide
  Antisense strand to SEQ ID NO: 2203364
agaauucaggaagugcuca

SEQ ID NO: 2203366 - RNA, 19 nt, Artificial Sequence
  Description of Artificial Sequence: Synthetic oligonucleotide
  Sense strand starting at position 3009 of SEQ ID NO: 1883594
auuuguuccuuugauuucu

SEQ ID NO: 2203367 - RNA, 19 nt, Artificial Sequence
  Description of Artificial Sequence: Synthetic oligonucleotide
  Antisense strand to SEQ ID NO: 2203366
agaaaucaaaggaacaaau

SEQ ID NO: 2203368 - RNA, 19 nt, Artificial Sequence
  Description of Artificial Sequence: Synthetic oligonucleotide
  Sense strand starting at position 1718 of SEQ ID NO: 1883594
gcaguuuagauagaguauc

SEQ ID NO: 2203369 - RNA, 19 nt, Artificial Sequence
  Description of Artificial Sequence: Synthetic oligonucleotide
  Antisense strand to SEQ ID NO: 2203368
gauacucuaucuaaacugc

SEQ ID NO: 2203370 - RNA, 19 nt, Artificial Sequence
  Description of Artificial Sequence: Synthetic oligonucleotide
  Sense strand starting at position 3206 of SEQ ID NO: 1883594
gugaaaucagccuggagau

SEQ ID NO: 2203371 - RNA, 19 nt, Artificial Sequence
  Description of Artificial Sequence: Synthetic oligonucleotide
  Antisense strand to SEQ ID NO: 2203370
aucuccaggcugauuucac

SEQ ID NO: 2203372 - RNA, 19 nt, Artificial Sequence
  Description of Artificial Sequence: Synthetic oligonucleotide
  Sense strand starting at position 2585 of SEQ ID NO: 1883594
uaaugaucugggugcaaag

SEQ ID NO: 2203373 - RNA, 19 nt, Artificial Sequence
  Description of Artificial Sequence: Synthetic oligonucleotide
  Antisense strand to SEQ ID NO: 2203372
cuuugcacccagaucauua

SEQ ID NO: 2203374 - RNA, 19 nt, Artificial Sequence
  Description of Artificial Sequence: Synthetic oligonucleotide
  Sense strand starting at position 2934 of SEQ ID NO: 1883594
cagguugaguuaccaacau

SEQ ID NO: 2203375 - RNA, 19 nt, Artificial Sequence
  Description of Artificial Sequence: Synthetic oligonucleotide
  Antisense strand to SEQ ID NO: 2203374
auguugguaacucaaccug

SEQ ID NO: 2203376 - RNA, 19 nt, Artificial Sequence
  Description of Artificial Sequence: Synthetic oligonucleotide
  Sense strand starting at position 3408 of SEQ ID NO: 1883594
agaaaucagugugaauuug

SEQ ID NO: 2203377 - RNA, 19 nt, Artificial Sequence
  Description of Artificial Sequence: Synthetic oligonucleotide
  Antisense strand to SEQ ID NO: 2203376
caaauucacacugauuucu

SEQ ID NO: 2203378 - RNA, 19 nt, Artificial Sequence
  Description of Artificial Sequence: Synthetic oligonucleotide
  Sense strand starting at position 2869 of SEQ ID NO: 1883594
guuuguauuaacugggaug

SEQ ID NO: 2203379 - RNA, 19 nt, Artificial Sequence
  Description of Artificial Sequence: Synthetic oligonucleotide
  Antisense strand to SEQ ID NO: 2203378
caucccaguuaauacaaac

SEQ ID NO: 2203380 - RNA, 19 nt, Artificial Sequence
  Description of Artificial Sequence: Synthetic oligonucleotide
  Sense strand starting at position 2002 of SEQ ID NO: 1883594
ggaacuuggcuccgagaug

SEQ ID NO: 2203381 - RNA, 19 nt, Artificial Sequence
  Description of Artificial Sequence: Synthetic oligonucleotide
  Antisense strand to SEQ ID NO: 2203380
caucucggagccaaguucc

SEQ ID NO: 2203382 - RNA, 19 nt, Artificial Sequence
  Description of Artificial Sequence: Synthetic oligonucleotide
  Sense strand starting at position 2583 of SEQ ID NO: 1883594
uuuaaugaucugggugcaa

SEQ ID NO: 2203383 - RNA, 19 nt, Artificial Sequence
  Description of Artificial Sequence: Synthetic oligonucleotide
  Antisense strand to SEQ ID NO: 2203382
uugcacccagaucauuaaa

SEQ ID NO: 2203384 - RNA, 19 nt, Artificial Sequence
  Description of Artificial Sequence: Synthetic oligonucleotide
  Sense strand starting at position 2461 of SEQ ID NO: 1883594
cugaauuagccauguuaac

SEQ ID NO: 2203385 - RNA, 19 nt, Artificial Sequence
  Description of Artificial Sequence: Synthetic oligonucleotide
  Antisense strand to SEQ ID NO: 2203384
guuaacauggcuaauucag

SEQ ID NO: 2203386 - RNA, 19 nt, Artificial Sequence
  Description of Artificial Sequence: Synthetic oligonucleotide
  Sense strand starting at position 3502 of SEQ ID NO: 1883594
auucuauuccagugaguca

SEQ ID NO: 2203387 - RNA, 19 nt, Artificial Sequence
  Description of Artificial Sequence: Synthetic oligonucleotide
  Antisense strand to SEQ ID NO: 2203386
ugacucacuggaauagaau

SEQ ID NO: 2203388 - RNA, 19 nt, Artificial Sequence
  Description of Artificial Sequence: Synthetic oligonucleotide
  Sense strand starting at position 2861 of SEQ ID NO: 1883594
cuuggauuguuuguauuaa

SEQ ID NO: 2203389 - RNA, 19 nt, Artificial Sequence
  Description of Artificial Sequence: Synthetic oligonucleotide
  Antisense strand to SEQ ID NO: 2203388
uuaauacaaacaauccaag

SEQ ID NO: 2203390 - RNA, 19 nt, Artificial Sequence
  Description of Artificial Sequence: Synthetic oligonucleotide
  Sense strand starting at position 1425 of SEQ ID NO: 1883594
gcaaguuacgcccagacca

SEQ ID NO: 2203391 - RNA, 19 nt, Artificial Sequence
  Description of Artificial Sequence: Synthetic oligonucleotide
  Antisense strand to SEQ ID NO: 2203390
uggucugggcguaacuugc

SEQ ID NO: 2203392 - RNA, 19 nt, Artificial Sequence
  Description of Artificial Sequence: Synthetic oligonucleotide
  Sense strand starting at position 2852 of SEQ ID NO: 1883594
agccaauuccuuggauugu

SEQ ID NO: 2203393 - RNA, 19 nt, Artificial Sequence
  Description of Artificial Sequence: Synthetic oligonucleotide
  Antisense strand to SEQ ID NO: 2203392
acaauccaaggaauuggcu

SEQ ID NO: 2203394 - RNA, 19 nt, Artificial Sequence
  Description of Artificial Sequence: Synthetic oligonucleotide
  Sense strand starting at position 1399 of SEQ ID NO: 1883594
uccggugacgccuacagau

SEQ ID NO: 2203395 - RNA, 19 nt, Artificial Sequence
  Description of Artificial Sequence: Synthetic oligonucleotide
  Antisense strand to SEQ ID NO: 2203394
aucuguaggcgucaccgga

SEQ ID NO: 2203396 - RNA, 19 nt, Artificial Sequence
  Description of Artificial Sequence: Synthetic oligonucleotide
  Sense strand starting at position 3034 of SEQ ID NO: 1883594
cuauucuuccuguguacac

SEQ ID NO: 2203397 - RNA, 19 nt, Artificial Sequence
  Description of Artificial Sequence: Synthetic oligonucleotide
  Antisense strand to SEQ ID NO: 2203396
guguacacaggaagaauag

SEQ ID NO: 2203398 - RNA, 19 nt, Artificial Sequence
  Description of Artificial Sequence: Synthetic oligonucleotide
  Sense strand starting at position 2204 of SEQ ID NO: 1883594
guuagucugccaggugaga

SEQ ID NO: 2203399 - RNA, 19 nt, Artificial Sequence
  Description of Artificial Sequence: Synthetic oligonucleotide
  Antisense strand to SEQ ID NO: 2203398
ucucaccuggcagacuaac

SEQ ID NO: 2203400 - RNA, 19 nt, Artificial Sequence
  Description of Artificial Sequence: Synthetic oligonucleotide
  Sense strand starting at position 2297 of SEQ ID NO: 1883594
uccauauucugggaaacag

SEQ ID NO: 2203401 - RNA, 19 nt, Artificial Sequence
  Description of Artificial Sequence: Synthetic oligonucleotide
  Antisense strand to SEQ ID NO: 2203400
cuguuucccagaauaugga

SEQ ID NO: 2203402 - RNA, 19 nt, Artificial Sequence
  Description of Artificial Sequence: Synthetic oligonucleotide
  Sense strand starting at position 2927 of SEQ ID NO: 1883594
gugguuucagguugaguua

SEQ ID NO: 2203403 - RNA, 19 nt, Artificial Sequence
  Description of Artificial Sequence: Synthetic oligonucleotide
  Antisense strand to SEQ ID NO: 2203402
uaacucaaccugaaaccac

SEQ ID NO: 2203404 - RNA, 19 nt, Artificial Sequence
  Description of Artificial Sequence: Synthetic oligonucleotide
  Sense strand starting at position 2200 of SEQ ID NO: 1883594
cugaguuagucugccaggu

SEQ ID NO: 2203405 - RNA, 19 nt, Artificial Sequence
  Description of Artificial Sequence: Synthetic oligonucleotide
  Antisense strand to SEQ ID NO: 2203404
accuggcagacuaacucag

SEQ ID NO: 2203406 - RNA, 19 nt, Artificial Sequence
  Description of Artificial Sequence: Synthetic oligonucleotide
  Sense strand starting at position 2422 of SEQ ID NO: 1883594
auccuauggucauagaagu

SEQ ID NO: 2203407 - RNA, 19 nt, Artificial Sequence
  Description of Artificial Sequence: Synthetic oligonucleotide
  Antisense strand to SEQ ID NO: 2203406
acuucuaugaccauaggau

SEQ ID NO: 2203408 - RNA, 19 nt, Artificial Sequence
  Description of Artificial Sequence: Synthetic oligonucleotide
  Sense strand starting at position 3031 of SEQ ID NO: 1883594
cgccuauucuuccugugua

SEQ ID NO: 2203409 - RNA, 19 nt, Artificial Sequence
  Description of Artificial Sequence: Synthetic oligonucleotide
  Antisense strand to SEQ ID NO: 2203408
uacacaggaagaauaggcg

SEQ ID NO: 2203410 - RNA, 19 nt, Artificial Sequence
  Description of Artificial Sequence: Synthetic oligonucleotide
  Sense strand starting at position 2294 of SEQ ID NO: 1883594
uuguccauauucugggaaa

SEQ ID NO: 2203411 - RNA, 19 nt, Artificial Sequence
  Description of Artificial Sequence: Synthetic oligonucleotide
  Antisense strand to SEQ ID NO: 2203410
uuucccagaauauggacaa

SEQ ID NO: 2203412 - RNA, 19 nt, Artificial Sequence
  Description of Artificial Sequence: Synthetic oligonucleotide
  Sense strand starting at position 2295 of SEQ ID NO: 1883594
uguccauauucugggaaac

SEQ ID NO: 2203413 - RNA, 19 nt, Artificial Sequence
  Description of Artificial Sequence: Synthetic oligonucleotide
  Antisense strand to SEQ ID NO: 2203412
guuucccagaauauggaca

SEQ ID NO: 2203414 - RNA, 19 nt, Artificial Sequence
  Description of Artificial Sequence: Synthetic oligonucleotide
  Sense strand starting at position 2862 of SEQ ID NO: 1883594
uuggauuguuuguauuaac

SEQ ID NO: 2203415 - RNA, 19 nt, Artificial Sequence
  Description of Artificial Sequence: Synthetic oligonucleotide
  Antisense strand to SEQ ID NO: 2203414
guuaauacaaacaauccaa

SEQ ID NO: 2203416 - RNA, 19 nt, Artificial Sequence
  Description of Artificial Sequence: Synthetic oligonucleotide
  Sense strand starting at position 2003 of SEQ ID NO: 1883594
gaacuuggcuccgagaugu

SEQ ID NO: 2203417 - RNA, 19 nt, Artificial Sequence
  Description of Artificial Sequence: Synthetic oligonucleotide
  Antisense strand to SEQ ID NO: 2203416
acaucucggagccaaguuc

SEQ ID NO: 2203418 - RNA, 19 nt, Artificial Sequence
  Description of Artificial Sequence: Synthetic oligonucleotide
  Sense strand starting at position 2853 of SEQ ID NO: 1883594
gccaauuccuuggauuguu

SEQ ID NO: 2203419 - RNA, 19 nt, Artificial Sequence
  Description of Artificial Sequence: Synthetic oligonucleotide
  Antisense strand to SEQ ID NO: 2203418
aacaauccaaggaauuggc

SEQ ID NO: 2203420 - RNA, 19 nt, Artificial Sequence
  Description of Artificial Sequence: Synthetic oligonucleotide
  Sense strand starting at position 3875 of SEQ ID NO: 1883595
gcgauaauuuaauugggcu

SEQ ID NO: 2203421 - RNA, 19 nt, Artificial Sequence
  Description of Artificial Sequence: Synthetic oligonucleotide
  Antisense strand to SEQ ID NO: 2203420
agcccaauuaaauuaucgc

SEQ ID NO: 2203422 - RNA, 19 nt, Artificial Sequence
  Description of Artificial Sequence: Synthetic oligonucleotide
  Sense strand starting at position 2694 of SEQ ID NO: 1883595
agggccugacuguacaaau

SEQ ID NO: 2203423 - RNA, 19 nt, Artificial Sequence
  Description of Artificial Sequence: Synthetic oligonucleotide
  Antisense strand to SEQ ID NO: 2203422
auuuguacagucaggcccu

SEQ ID NO: 2203424 - RNA, 19 nt, Artificial Sequence
  Description of Artificial Sequence: Synthetic oligonucleotide
  Sense strand starting at position 224 of SEQ ID NO: 1883595
cugugaucugcgucaugca

SEQ ID NO: 2203425 - RNA, 19 nt, Artificial Sequence
  Description of Artificial Sequence: Synthetic oligonucleotide
  Antisense strand to SEQ ID NO: 2203424
ugcaugacgcagaucacag

SEQ ID NO: 2203426 - RNA, 19 nt, Artificial Sequence
  Description of Artificial Sequence: Synthetic oligonucleotide
  Sense strand starting at position 168 of SEQ ID NO: 1883595
aguguauuggcauauggag

SEQ ID NO: 2203427 - RNA, 19 nt, Artificial Sequence
  Description of Artificial Sequence: Synthetic oligonucleotide
  Antisense strand to SEQ ID NO: 2203426
cuccauaugccaauacacu

SEQ ID NO: 2203428 - RNA, 19 nt, Artificial Sequence
  Description of Artificial Sequence: Synthetic oligonucleotide
  Sense strand starting at position 2566 of SEQ ID NO: 1883595
gucuguaugccugugugua

SEQ ID NO: 2203429 - RNA, 19 nt, Artificial Sequence
  Description of Artificial Sequence: Synthetic oligonucleotide
  Antisense strand to SEQ ID NO: 2203428
uacacacaggcauacagac

SEQ ID NO: 2203430 - RNA, 19 nt, Artificial Sequence
  Description of Artificial Sequence: Synthetic oligonucleotide
  Sense strand starting at position 3161 of SEQ ID NO: 1883595
ccaagucagucaucagaug

SEQ ID NO: 2203431 - RNA, 19 nt, Artificial Sequence
  Description of Artificial Sequence: Synthetic oligonucleotide
  Antisense strand to SEQ ID NO: 2203430
caucugaugacugacuugg

SEQ ID NO: 2203432 - RNA, 19 nt, Artificial Sequence
  Description of Artificial Sequence: Synthetic oligonucleotide
  Sense strand starting at position 344 of SEQ ID NO: 1883595
ggaagauccuagcucggau

SEQ ID NO: 2203433 - RNA, 19 nt, Artificial Sequence
  Description of Artificial Sequence: Synthetic oligonucleotide
  Antisense strand to SEQ ID NO: 2203432
auccgagcuaggaucuucc

SEQ ID NO: 2203434 - RNA, 19 nt, Artificial Sequence
  Description of Artificial Sequence: Synthetic oligonucleotide
  Sense strand starting at position 3704 of SEQ ID NO: 1883595
ucacguccagccuagaaua

SEQ ID NO: 2203435 - RNA, 19 nt, Artificial Sequence
  Description of Artificial Sequence: Synthetic oligonucleotide
  Antisense strand to SEQ ID NO: 2203434
uauucuaggcuggacguga

SEQ ID NO: 2203436 - RNA, 19 nt, Artificial Sequence
  Description of Artificial Sequence: Synthetic oligonucleotide
  Sense strand starting at position 3431 of SEQ ID NO: 1883595
gugaaugcucacuaguggu

SEQ ID NO: 2203437 - RNA, 19 nt, Artificial Sequence
  Description of Artificial Sequence: Synthetic oligonucleotide
  Antisense strand to SEQ ID NO: 2203436
accacuagugagcauucac

SEQ ID NO: 2203438 - RNA, 19 nt, Artificial Sequence
  Description of Artificial Sequence: Synthetic oligonucleotide
  Sense strand starting at position 535 of SEQ ID NO: 1883595
uuugaauuccguuagcuug

SEQ ID NO: 2203439 - RNA, 19 nt, Artificial Sequence
  Description of Artificial Sequence: Synthetic oligonucleotide
  Antisense strand to SEQ ID NO: 2203438
caagcuaacggaauucaaa

SEQ ID NO: 2203440 - RNA, 19 nt, Artificial Sequence
  Description of Artificial Sequence: Synthetic oligonucleotide
  Sense strand starting at position 262 of SEQ ID NO: 1883595
ggauguggucccugugaug

SEQ ID NO: 2203441 - RNA, 19 nt, Artificial Sequence
  Description of Artificial Sequence: Synthetic oligonucleotide
  Antisense strand to SEQ ID NO: 2203440
caucacagggaccacaucc

SEQ ID NO: 2203442 - RNA, 19 nt, Artificial Sequence
  Description of Artificial Sequence: Synthetic oligonucleotide
  Sense strand starting at position 2314 of SEQ ID NO: 1883595
uaauuaccgccguauuaau

SEQ ID NO: 2203443 - RNA, 19 nt, Artificial Sequence
  Description of Artificial Sequence: Synthetic oligonucleotide
  Antisense strand to SEQ ID NO: 2203442
auuaauacggcgguaauua

SEQ ID NO: 2203444 - RNA, 19 nt, Artificial Sequence
  Description of Artificial Sequence: Synthetic oligonucleotide
  Sense strand starting at position 119 of SEQ ID NO: 1883595
gugugaggaguguguggaa

SEQ ID NO: 2203445 - RNA, 19 nt, Artificial Sequence
  Description of Artificial Sequence: Synthetic oligonucleotide
  Antisense strand to SEQ ID NO: 2203444
uuccacacacuccucacac

SEQ ID NO: 2203446 - RNA, 19 nt, Artificial Sequence
  Description of Artificial Sequence: Synthetic oligonucleotide
  Sense strand starting at position 764 of SEQ ID NO: 1883595
gccagaagguucuuaguuu

SEQ ID NO: 2203447 - RNA, 19 nt, Artificial Sequence
  Description of Artificial Sequence: Synthetic oligonucleotide
  Antisense strand to SEQ ID NO: 2203446
aaacuaagaaccuucuggc

SEQ ID NO: 2203448 - RNA, 19 nt, Artificial Sequence
  Description of Artificial Sequence: Synthetic oligonucleotide
  Sense strand starting at position 3427 of SEQ ID NO: 1883595
gugugugaaugcucacuag

SEQ ID NO: 2203449 - RNA, 19 nt, Artificial Sequence
  Description of Artificial Sequence: Synthetic oligonucleotide
  Antisense strand to SEQ ID NO: 2203448
cuagugagcauucacacac

SEQ ID NO: 2203450 - RNA, 19 nt, Artificial Sequence
  Description of Artificial Sequence: Synthetic oligonucleotide
  Sense strand starting at position 2672 of SEQ ID NO: 1883595
gccaaagucuguccaaguu

SEQ ID NO: 2203451 - RNA, 19 nt, Artificial Sequence
  Description of Artificial Sequence: Synthetic oligonucleotide
  Antisense strand to SEQ ID NO: 2203450
aacuuggacagacuuuggc

SEQ ID NO: 2203452 - RNA, 19 nt, Artificial Sequence
  Description of Artificial Sequence: Synthetic oligonucleotide
  Sense strand starting at position 2006 of SEQ ID NO: 1883595
cggaaaguugugugcagau

SEQ ID NO: 2203453 - RNA, 19 nt, Artificial Sequence
  Description of Artificial Sequence: Synthetic oligonucleotide
  Antisense strand to SEQ ID NO: 2203452
aucugcacacaacuuuccg

SEQ ID NO: 2203454 - RNA, 19 nt, Artificial Sequence
  Description of Artificial Sequence: Synthetic oligonucleotide
  Sense strand starting at position 132 of SEQ ID NO: 1883595
guggaaccgucugugugau

SEQ ID NO: 2203455 - RNA, 19 nt, Artificial Sequence
  Description of Artificial Sequence: Synthetic oligonucleotide
  Antisense strand to SEQ ID NO: 2203454
aucacacagacgguuccac

SEQ ID NO: 2203456 - RNA, 19 nt, Artificial Sequence
  Description of Artificial Sequence: Synthetic oligonucleotide
  Sense strand starting at position 131 of SEQ ID NO: 1883595
uguggaaccgucuguguga

SEQ ID NO: 2203457 - RNA, 19 nt, Artificial Sequence
  Description of Artificial Sequence: Synthetic oligonucleotide
  Antisense strand to SEQ ID NO: 2203456
ucacacagacgguuccaca

SEQ ID NO: 2203458 - RNA, 19 nt, Artificial Sequence
  Description of Artificial Sequence: Synthetic oligonucleotide
  Sense strand starting at position 2312 of SEQ ID NO: 1883595
uuuaauuaccgccguauua

SEQ ID NO: 2203459 - RNA, 19 nt, Artificial Sequence
  Description of Artificial Sequence: Synthetic oligonucleotide
  Antisense strand to SEQ ID NO: 2203458
uaauacggcgguaauuaaa

SEQ ID NO: 2203460 - RNA, 19 nt, Artificial Sequence
  Description of Artificial Sequence: Synthetic oligonucleotide
  Sense strand starting at position 2005 of SEQ ID NO: 1883595
gcggaaaguugugugcaga

SEQ ID NO: 2203461 - RNA, 19 nt, Artificial Sequence
  Description of Artificial Sequence: Synthetic oligonucleotide
  Antisense strand to SEQ ID NO: 2203460
ucugcacacaacuuuccgc

SEQ ID NO: 2203462 - RNA, 19 nt, Artificial Sequence
  Description of Artificial Sequence: Synthetic oligonucleotide
  Sense strand starting at position 816 of SEQ ID NO: 1883595
gggcacuugcucuguguga

SEQ ID NO: 2203463 - RNA, 19 nt, Artificial Sequence
  Description of Artificial Sequence: Synthetic oligonucleotide
  Antisense strand to SEQ ID NO: 2203462
ucacacagagcaagugccc

SEQ ID NO: 2203464 - RNA, 19 nt, Artificial Sequence
  Description of Artificial Sequence: Synthetic oligonucleotide
  Sense strand starting at position 212 of SEQ ID NO: 1883595
gcaccuuugugccugugau

SEQ ID NO: 2203465 - RNA, 19 nt, Artificial Sequence
  Description of Artificial Sequence: Synthetic oligonucleotide
  Antisense strand to SEQ ID NO: 2203464
aucacaggcacaaaggugc

SEQ ID NO: 2203466 - RNA, 19 nt, Artificial Sequence
  Description of Artificial Sequence: Synthetic oligonucleotide
  Sense strand starting at position 818 of SEQ ID NO: 1883595
gcacuugcucugugugacu

SEQ ID NO: 2203467 - RNA, 19 nt, Artificial Sequence
  Description of Artificial Sequence: Synthetic oligonucleotide
  Antisense strand to SEQ ID NO: 2203466
agucacacagagcaagugc

SEQ ID NO: 2203468 - RNA, 19 nt, Artificial Sequence
  Description of Artificial Sequence: Synthetic oligonucleotide
  Sense strand starting at position 2412 of SEQ ID NO: 1883595
gggcugagucgugggcuuu

SEQ ID NO: 2203469 - RNA, 19 nt, Artificial Sequence
  Description of Artificial Sequence: Synthetic oligonucleotide
  Antisense strand to SEQ ID NO: 2203468
aaagcccacgacucagccc

SEQ ID NO: 2203470 - RNA, 19 nt, Artificial Sequence
  Description of Artificial Sequence: Synthetic oligonucleotide
  Sense strand starting at position 222 of SEQ ID NO: 1883595
gccugugaucugcgucaug

SEQ ID NO: 2203471 - RNA, 19 nt, Artificial Sequence
  Description of Artificial Sequence: Synthetic oligonucleotide
  Antisense strand to SEQ ID NO: 2203470
caugacgcagaucacaggc

SEQ ID NO: 2203472 - RNA, 19 nt, Artificial Sequence
  Description of Artificial Sequence: Synthetic oligonucleotide
  Sense strand starting at position 765 of SEQ ID NO: 1883595
ccagaagguucuuaguuuc

SEQ ID NO: 2203473 - RNA, 19 nt, Artificial Sequence
  Description of Artificial Sequence: Synthetic oligonucleotide
  Antisense strand to SEQ ID NO: 2203472
gaaacuaagaaccuucugg

SEQ ID NO: 2203474 - RNA, 19 nt, Artificial Sequence
  Description of Artificial Sequence: Synthetic oligonucleotide
  Sense strand starting at position 2832 of SEQ ID NO: 1883595
cgugcuguuguuuguaaca

SEQ ID NO: 2203475 - RNA, 19 nt, Artificial Sequence
  Description of Artificial Sequence: Synthetic oligonucleotide
  Antisense strand to SEQ ID NO: 2203474
uguuacaaacaacagcacg

SEQ ID NO: 2203476 - RNA, 19 nt, Artificial Sequence
  Description of Artificial Sequence: Synthetic oligonucleotide
  Sense strand starting at position 3588 of SEQ ID NO: 1883595
gccugaaucuuugauucuc

SEQ ID NO: 2203477 - RNA, 19 nt, Artificial Sequence
  Description of Artificial Sequence: Synthetic oligonucleotide
  Antisense strand to SEQ ID NO: 2203476
gagaaucaaagauucaggc

SEQ ID NO: 2203478 - RNA, 19 nt, Artificial Sequence
  Description of Artificial Sequence: Synthetic oligonucleotide
  Sense strand starting at position 163 of SEQ ID NO: 1883595
ggauaaguguauuggcaua

SEQ ID NO: 2203479 - RNA, 19 nt, Artificial Sequence
  Description of Artificial Sequence: Synthetic oligonucleotide
  Antisense strand to SEQ ID NO: 2203478
uaugccaauacacuuaucc

SEQ ID NO: 2203480 - RNA, 19 nt, Artificial Sequence
  Description of Artificial Sequence: Synthetic oligonucleotide
  Sense strand starting at position 3547 of SEQ ID NO: 1883595
cgaucaucuuagggcugau

SEQ ID NO: 2203481 - RNA, 19 nt, Artificial Sequence
  Description of Artificial Sequence: Synthetic oligonucleotide
  Antisense strand to SEQ ID NO: 2203480
aucagcccuaagaugaucg

SEQ ID NO: 2203482 - RNA, 19 nt, Artificial Sequence
  Description of Artificial Sequence: Synthetic oligonucleotide
  Sense strand starting at position 3765 of SEQ ID NO: 1883595
gaaguugugucccagccau

SEQ ID NO: 2203483 - RNA, 19 nt, Artificial Sequence
  Description of Artificial Sequence: Synthetic oligonucleotide
  Antisense strand to SEQ ID NO: 2203482
auggcugggacacaacuuc

SEQ ID NO: 2203484 - RNA, 19 nt, Artificial Sequence
  Description of Artificial Sequence: Synthetic oligonucleotide
  Sense strand starting at position 2834 of SEQ ID NO: 1883595
ugcuguuguuuguaacaau

SEQ ID NO: 2203485 - RNA, 19 nt, Artificial Sequence
  Description of Artificial Sequence: Synthetic oligonucleotide
  Antisense strand to SEQ ID NO: 2203484
auuguuacaaacaacagca

SEQ ID NO: 2203486 - RNA, 19 nt, Artificial Sequence
  Description of Artificial Sequence: Synthetic oligonucleotide
  Sense strand starting at position 2600 of SEQ ID NO: 1883595
cugugugucugucggcaau

SEQ ID NO: 2203487 - RNA, 19 nt, Artificial Sequence
  Description of Artificial Sequence: Synthetic oligonucleotide
  Antisense strand to SEQ ID NO: 2203486
auugccgacagacacacag

SEQ ID NO: 2203488 - RNA, 19 nt, Artificial Sequence
  Description of Artificial Sequence: Synthetic oligonucleotide
  Sense strand starting at position 875 of SEQ ID NO: 1883596
cuggauugugcacacaaca

SEQ ID NO: 2203489 - RNA, 19 nt, Artificial Sequence
  Description of Artificial Sequence: Synthetic oligonucleotide
  Antisense strand to SEQ ID NO: 2203488
uguugugugcacaauccag

SEQ ID NO: 2203490 - RNA, 19 nt, Artificial Sequence
  Description of Artificial Sequence: Synthetic oligonucleotide
  Sense strand starting at position 3227 of SEQ ID NO: 1883596
cagggaaggcuuugugaaa

SEQ ID NO: 2203491 - RNA, 19 nt, Artificial Sequence
  Description of Artificial Sequence: Synthetic oligonucleotide
  Antisense strand to SEQ ID NO: 2203490
uuucacaaagccuucccug

SEQ ID NO: 2203492 - RNA, 19 nt, Artificial Sequence
  Description of Artificial Sequence: Synthetic oligonucleotide
  Sense strand starting at position 3549 of SEQ ID NO: 1883597
gagugagacccuggagacu

SEQ ID NO: 2203493 - RNA, 19 nt, Artificial Sequence
  Description of Artificial Sequence: Synthetic oligonucleotide
  Antisense strand to SEQ ID NO: 2203492
agucuccagggucucacuc

SEQ ID NO: 2203494 - RNA, 19 nt, Artificial Sequence
  Description of Artificial Sequence: Synthetic oligonucleotide
  Sense strand starting at position 2411 of SEQ ID NO: 1883597
ccggaaugccuccagagaa

SEQ ID NO: 2203495 - RNA, 19 nt, Artificial Sequence
  Description of Artificial Sequence: Synthetic oligonucleotide
  Antisense strand to SEQ ID NO: 2203494
uucucuggaggcauuccgg

SEQ ID NO: 2203496 - RNA, 19 nt, Artificial Sequence
  Description of Artificial Sequence: Synthetic oligonucleotide
  Sense strand starting at position 119 of SEQ ID NO: 1883597
gguaauaaacgacgaggaa

SEQ ID NO: 2203497 - RNA, 19 nt, Artificial Sequence
  Description of Artificial Sequence: Synthetic oligonucleotide
  Antisense strand to SEQ ID NO: 2203496
uuccucgucguuuauuacc

SEQ ID NO: 2203498 - RNA, 19 nt, Artificial Sequence
  Description of Artificial Sequence: Synthetic oligonucleotide
  Sense strand starting at position 768 of SEQ ID NO: 1883597
agaccucucgaguaggauc

SEQ ID NO: 2203499 - RNA, 19 nt, Artificial Sequence
  Description of Artificial Sequence: Synthetic oligonucleotide
  Antisense strand to SEQ ID NO: 2203498
gauccuacucgagaggucu

SEQ ID NO: 2203500 - RNA, 19 nt, Artificial Sequence
  Description of Artificial Sequence: Synthetic oligonucleotide
  Sense strand starting at position 268 of SEQ ID NO: 1883597
ccugcaagaguacaucaau

SEQ ID NO: 2203501 - RNA, 19 nt, Artificial Sequence
  Description of Artificial Sequence: Synthetic oligonucleotide
  Antisense strand to SEQ ID NO: 2203500
auugauguacucuugcagg

SEQ ID NO: 2203502 - RNA, 19 nt, Artificial Sequence
  Description of Artificial Sequence: Synthetic oligonucleotide
  Sense strand starting at position 2494 of SEQ ID NO: 1883597
aucuuuauccugggacuaa

SEQ ID NO: 2203503 - RNA, 19 nt, Artificial Sequence
  Description of Artificial Sequence: Synthetic oligonucleotide
  Antisense strand to SEQ ID NO: 2203502
uuagucccaggauaaagau

SEQ ID NO: 2203504 - RNA, 19 nt, Artificial Sequence
  Description of Artificial Sequence: Synthetic oligonucleotide
  Sense strand starting at position 7 of SEQ ID NO: 1883597
agaaucuaaacccgaggua

SEQ ID NO: 2203505 - RNA, 19 nt, Artificial Sequence
  Description of Artificial Sequence: Synthetic oligonucleotide
  Antisense strand to SEQ ID NO: 2203504
uaccucggguuuagauucu

SEQ ID NO: 2203506 - RNA, 19 nt, Artificial Sequence
  Description of Artificial Sequence: Synthetic oligonucleotide
  Sense strand starting at position 2493 of SEQ ID NO: 1883597
gaucuuuauccugggacua

SEQ ID NO: 2203507 - RNA, 19 nt, Artificial Sequence
  Description of Artificial Sequence: Synthetic oligonucleotide
  Antisense strand to SEQ ID NO: 2203506
uagucccaggauaaagauc

SEQ ID NO: 2203508 - RNA, 19 nt, Artificial Sequence
  Description of Artificial Sequence: Synthetic oligonucleotide
  Sense strand starting at position 332 of SEQ ID NO: 1883597
ugauauuucugugucuagu

SEQ ID NO: 2203509 - RNA, 19 nt, Artificial Sequence
  Description of Artificial Sequence: Synthetic oligonucleotide
  Antisense strand to SEQ ID NO: 2203508
acuagacacagaaauauca

SEQ ID NO: 2203510 - RNA, 19 nt, Artificial Sequence
  Description of Artificial Sequence: Synthetic oligonucleotide
  Sense strand starting at position 330 of SEQ ID NO: 1883597
guugauauuucugugucua

SEQ ID NO: 2203511 - RNA, 19 nt, Artificial Sequence
  Description of Artificial Sequence: Synthetic oligonucleotide
  Antisense strand to SEQ ID NO: 2203510
uagacacagaaauaucaac

SEQ ID NO: 2203512 - RNA, 19 nt, Artificial Sequence
  Description of Artificial Sequence: Synthetic oligonucleotide
  Sense strand starting at position 271 of SEQ ID NO: 1883597
gcaagaguacaucaauggu

SEQ ID NO: 2203513 - RNA, 19 nt, Artificial Sequence
  Description of Artificial Sequence: Synthetic oligonucleotide
  Antisense strand to SEQ ID NO: 2203512
accauugauguacucuugc

SEQ ID NO: 2203514 - RNA, 19 nt, Artificial Sequence
  Description of Artificial Sequence: Synthetic oligonucleotide
  Sense strand starting at position 674 of SEQ ID NO: 1883597
aggaauuagucuucuaauu

SEQ ID NO: 2203515 - RNA, 19 nt, Artificial Sequence
  Description of Artificial Sequence: Synthetic oligonucleotide
  Antisense strand to SEQ ID NO: 2203514
aauuagaagacuaauuccu

SEQ ID NO: 2203516 - RNA, 19 nt, Artificial Sequence
  Description of Artificial Sequence: Synthetic oligonucleotide
  Sense strand starting at position 697 of SEQ ID NO: 1883597
gcugcauucuauuucuuga

SEQ ID NO: 2203517 - RNA, 19 nt, Artificial Sequence
  Description of Artificial Sequence: Synthetic oligonucleotide
  Antisense strand to SEQ ID NO: 2203516
ucaagaaauagaaugcagc

SEQ ID NO: 2203518 - RNA, 19 nt, Artificial Sequence
  Description of Artificial Sequence: Synthetic oligonucleotide
  Sense strand starting at position 2621 of SEQ ID NO: 1883597
gcucaaacaguuuaguaaa

SEQ ID NO: 2203519 - RNA, 19 nt, Artificial Sequence
  Description of Artificial Sequence: Synthetic oligonucleotide
  Antisense strand to SEQ ID NO: 2203518
uuuacuaaacuguuugagc

SEQ ID NO: 2203520 - RNA, 19 nt, Artificial Sequence
  Description of Artificial Sequence: Synthetic oligonucleotide
  Sense strand starting at position 1313 of SEQ ID NO: 1883597
guuuaaauucuugacagca

SEQ ID NO: 2203521 - RNA, 19 nt, Artificial Sequence
  Description of Artificial Sequence: Synthetic oligonucleotide
  Antisense strand to SEQ ID NO: 2203520
ugcugucaagaauuuaaac

SEQ ID NO: 2203522 - RNA, 19 nt, Artificial Sequence
  Description of Artificial Sequence: Synthetic oligonucleotide
  Sense strand starting at position 861 of SEQ ID NO: 1883597
gugggaauuccugacguaa

SEQ ID NO: 2203523 - RNA, 19 nt, Artificial Sequence
  Description of Artificial Sequence: Synthetic oligonucleotide
  Antisense strand to SEQ ID NO: 2203522
uuacgucaggaauucccac

SEQ ID NO: 2203524 - RNA, 19 nt, Artificial Sequence
  Description of Artificial Sequence: Synthetic oligonucleotide
  Sense strand starting at position 2824 of SEQ ID NO: 1883597
uuaggaguucgguacagac

SEQ ID NO: 2203525 - RNA, 19 nt, Artificial Sequence
  Description of Artificial Sequence: Synthetic oligonucleotide
  Antisense strand to SEQ ID NO: 2203524
gucuguaccgaacuccuaa

SEQ ID NO: 2203526 - RNA, 19 nt, Artificial Sequence
  Description of Artificial Sequence: Synthetic oligonucleotide
  Sense strand starting at position 274 of SEQ ID NO: 1883597
agaguacaucaaugguuac

SEQ ID NO: 2203527 - RNA, 19 nt, Artificial Sequence
  Description of Artificial Sequence: Synthetic oligonucleotide
  Antisense strand to SEQ ID NO: 2203526
guaaccauugauguacucu

SEQ ID NO: 2203528 - RNA, 19 nt, Artificial Sequence
  Description of Artificial Sequence: Synthetic oligonucleotide
  Sense strand starting at position 10 of SEQ ID NO: 1883597
aucuaaacccgagguauga

SEQ ID NO: 2203529 - RNA, 19 nt, Artificial Sequence
  Description of Artificial Sequence: Synthetic oligonucleotide
  Antisense strand to SEQ ID NO: 2203528
ucauaccucggguuuagau

SEQ ID NO: 2203530 - RNA, 19 nt, Artificial Sequence
  Description of Artificial Sequence: Synthetic oligonucleotide
  Sense strand starting at position 594 of SEQ ID NO: 1883597
uuuauagacuuucuaacga

SEQ ID NO: 2203531 - RNA, 19 nt, Artificial Sequence
  Description of Artificial Sequence: Synthetic oligonucleotide
  Antisense strand to SEQ ID NO: 2203530
ucguuagaaagucuauaaa

SEQ ID NO: 2203532 - RNA, 19 nt, Artificial Sequence
  Description of Artificial Sequence: Synthetic oligonucleotide
  Sense strand starting at position 850 of SEQ ID NO: 1883597
uuuguugaagggugggaau

SEQ ID NO: 2203533 - RNA, 19 nt, Artificial Sequence
  Description of Artificial Sequence: Synthetic oligonucleotide
  Antisense strand to SEQ ID NO: 2203532
auucccacccuucaacaaa

SEQ ID NO: 2203534 - RNA, 19 nt, Artificial Sequence
  Description of Artificial Sequence: Synthetic oligonucleotide
  Sense strand starting at position 2703 of SEQ ID NO: 1883597
ggugaucuuggucaguuag

SEQ ID NO: 2203535 - RNA, 19 nt, Artificial Sequence
  Description of Artificial Sequence: Synthetic oligonucleotide
  Antisense strand to SEQ ID NO: 2203534
cuaacugaccaagaucacc

SEQ ID NO: 2203536 - RNA, 19 nt, Artificial Sequence
  Description of Artificial Sequence: Synthetic oligonucleotide
  Sense strand starting at position 317 of SEQ ID NO: 1883597
auacaaauagccuguugau

SEQ ID NO: 2203537 - RNA, 19 nt, Artificial Sequence
  Description of Artificial Sequence: Synthetic oligonucleotide
  Antisense strand to SEQ ID NO: 2203536
aucaacaggcuauuuguau

SEQ ID NO: 2203538 - RNA, 19 nt, Artificial Sequence
  Description of Artificial Sequence: Synthetic oligonucleotide
  Sense strand starting at position 159 of SEQ ID NO: 1883597
ggccucuaucagcaucaca

SEQ ID NO: 2203539 - RNA, 19 nt, Artificial Sequence
  Description of Artificial Sequence: Synthetic oligonucleotide
  Antisense strand to SEQ ID NO: 2203538
ugugaugcugauagaggcc

SEQ ID NO: 2203540 - RNA, 19 nt, Artificial Sequence
  Description of Artificial Sequence: Synthetic oligonucleotide
  Sense strand starting at position 2227 of SEQ ID NO: 1883597
ggaauuguuuccucccuag

SEQ ID NO: 2203541 - RNA, 19 nt, Artificial Sequence
  Description of Artificial Sequence: Synthetic oligonucleotide
  Antisense strand to SEQ ID NO: 2203540
cuagggaggaaacaauucc

SEQ ID NO: 2203542 - RNA, 19 nt, Artificial Sequence
  Description of Artificial Sequence: Synthetic oligonucleotide
  Sense strand starting at position 2370 of SEQ ID NO: 1883597
cuguaaucauaacucaguu

SEQ ID NO: 2203543 - RNA, 19 nt, Artificial Sequence
  Description of Artificial Sequence: Synthetic oligonucleotide
  Antisense strand to SEQ ID NO: 2203542
aacugaguuaugauuacag

SEQ ID NO: 2203544 - RNA, 19 nt, Artificial Sequence
  Description of Artificial Sequence: Synthetic oligonucleotide
  Sense strand starting at position 97 of SEQ ID NO: 1883597
gaaugcguuguccacaaga

SEQ ID NO: 2203545 - RNA, 19 nt, Artificial Sequence
  Description of Artificial Sequence: Synthetic oligonucleotide
  Antisense strand to SEQ ID NO: 2203544
ucuuguggacaacgcauuc

SEQ ID NO: 2203546 - RNA, 19 nt, Artificial Sequence
  Description of Artificial Sequence: Synthetic oligonucleotide
  Sense strand starting at position 99 of SEQ ID NO: 1883597
augcguuguccacaagaga

SEQ ID NO: 2203547 - RNA, 19 nt, Artificial Sequence
  Description of Artificial Sequence: Synthetic oligonucleotide
  Antisense strand to SEQ ID NO: 2203546
ucucuuguggacaacgcau

SEQ ID NO: 2203548 - RNA, 19 nt, Artificial Sequence
  Description of Artificial Sequence: Synthetic oligonucleotide
  Sense strand starting at position 414 of SEQ ID NO: 1883597
ggccaagucgacuacaagu

SEQ ID NO: 2203549 - RNA, 19 nt, Artificial Sequence
  Description of Artificial Sequence: Synthetic oligonucleotide
  Antisense strand to SEQ ID NO: 2203548
acuuguagucgacuuggcc

SEQ ID NO: 2203550 - RNA, 19 nt, Artificial Sequence
  Description of Artificial Sequence: Synthetic oligonucleotide
  Sense strand starting at position 484 of SEQ ID NO: 1883597
aucagaaaugcaugcuauu

SEQ ID NO: 2203551 - RNA, 19 nt, Artificial Sequence
  Description of Artificial Sequence: Synthetic oligonucleotide
  Antisense strand to SEQ ID NO: 2203550
aauagcaugcauuucugau

SEQ ID NO: 2203552 - RNA, 19 nt, Artificial Sequence
  Description of Artificial Sequence: Synthetic oligonucleotide
  Sense strand starting at position 1400 of SEQ ID NO: 1883597
cccaguagucucgggaaga

SEQ ID NO: 2203553 - RNA, 19 nt, Artificial Sequence
  Description of Artificial Sequence: Synthetic oligonucleotide
  Antisense strand to SEQ ID NO: 2203552
ucuucccgagacuacuggg

SEQ ID NO: 2203554 - RNA, 19 nt, Artificial Sequence
  Description of Artificial Sequence: Synthetic oligonucleotide
  Sense strand starting at position 260 of SEQ ID NO: 1883597
uucuuucuccugcaagagu

SEQ ID NO: 2203555 - RNA, 19 nt, Artificial Sequence
  Description of Artificial Sequence: Synthetic oligonucleotide
  Antisense strand to SEQ ID NO: 2203554
acucuugcaggagaaagaa

SEQ ID NO: 2203556 - RNA, 19 nt, Artificial Sequence
  Description of Artificial Sequence: Synthetic oligonucleotide
  Sense strand starting at position 3266 of SEQ ID NO: 1883597
gggcgagucacguauggga

SEQ ID NO: 2203557 - RNA, 19 nt, Artificial Sequence
  Description of Artificial Sequence: Synthetic oligonucleotide
  Antisense strand to SEQ ID NO: 2203556
ucccauacgugacucgccc

SEQ ID NO: 2203558 - RNA, 19 nt, Artificial Sequence
  Description of Artificial Sequence: Synthetic oligonucleotide
  Sense strand starting at position 775 of SEQ ID NO: 1883597
ucgaguaggaucuguuuag

SEQ ID NO: 2203559 - RNA, 19 nt, Artificial Sequence
  Description of Artificial Sequence: Synthetic oligonucleotide
  Antisense strand to SEQ ID NO: 2203558
cuaaacagauccuacucga

SEQ ID NO: 2203560 - RNA, 19 nt, Artificial Sequence
  Description of Artificial Sequence: Synthetic oligonucleotide
  Sense strand starting at position 2702 of SEQ ID NO: 1883597
gggugaucuuggucaguua

SEQ ID NO: 2203561 - RNA, 19 nt, Artificial Sequence
  Description of Artificial Sequence: Synthetic oligonucleotide
  Antisense strand to SEQ ID NO: 2203560
uaacugaccaagaucaccc

SEQ ID NO: 2203562 - RNA, 19 nt, Artificial Sequence
  Description of Artificial Sequence: Synthetic oligonucleotide
  Sense strand starting at position 2821 of SEQ ID NO: 1883597
agguuaggaguucgguaca

SEQ ID NO: 2203563 - RNA, 19 nt, Artificial Sequence
  Description of Artificial Sequence: Synthetic oligonucleotide
  Antisense strand to SEQ ID NO: 2203562
uguaccgaacuccuaaccu

SEQ ID NO: 2203564 - RNA, 19 nt, Artificial Sequence
  Description of Artificial Sequence: Synthetic oligonucleotide
  Sense strand starting at position 300 of SEQ ID NO: 1883597
cgaaacuccuaguuagcau

SEQ ID NO: 2203565 - RNA, 19 nt, Artificial Sequence
  Description of Artificial Sequence: Synthetic oligonucleotide
  Antisense strand to SEQ ID NO: 2203564
augcuaacuaggaguuucg

SEQ ID NO: 2203566 - RNA, 19 nt, Artificial Sequence
  Description of Artificial Sequence: Synthetic oligonucleotide
  Sense strand starting at position 2226 of SEQ ID NO: 1883597
cggaauuguuuccucccua

SEQ ID NO: 2203567 - RNA, 19 nt, Artificial Sequence
  Description of Artificial Sequence: Synthetic oligonucleotide
  Antisense strand to SEQ ID NO: 2203566
uagggaggaaacaauuccg

SEQ ID NO: 2203568 - RNA, 19 nt, Artificial Sequence
  Description of Artificial Sequence: Synthetic oligonucleotide
  Sense strand starting at position 1311 of SEQ ID NO: 1883597
gcguuuaaauucuugacag

SEQ ID NO: 2203569 - RNA, 19 nt, Artificial Sequence
  Description of Artificial Sequence: Synthetic oligonucleotide
  Antisense strand to SEQ ID NO: 2203568
cugucaagaauuuaaacgc

SEQ ID NO: 2203570 - RNA, 19 nt, Artificial Sequence
  Description of Artificial Sequence: Synthetic oligonucleotide
  Sense strand starting at position 95 of SEQ ID NO: 1883597
aggaaugcguuguccacaa

SEQ ID NO: 2203571 - RNA, 19 nt, Artificial Sequence
  Description of Artificial Sequence: Synthetic oligonucleotide
  Antisense strand to SEQ ID NO: 2203570
uuguggacaacgcauuccu

SEQ ID NO: 2203572 - RNA, 19 nt, Artificial Sequence
  Description of Artificial Sequence: Synthetic oligonucleotide
  Sense strand starting at position 3757 of SEQ ID NO: 1883598
acuguuugccugcuauagu

SEQ ID NO: 2203573 - RNA, 19 nt, Artificial Sequence
  Description of Artificial Sequence: Synthetic oligonucleotide
  Antisense strand to SEQ ID NO: 2203572
acuauagcaggcaaacagu

SEQ ID NO: 2203574 - RNA, 19 nt, Artificial Sequence
  Description of Artificial Sequence: Synthetic oligonucleotide
  Sense strand starting at position 783 of SEQ ID NO: 1883598
cuuccagagccugaaucaa

SEQ ID NO: 2203575 - RNA, 19 nt, Artificial Sequence
  Description of Artificial Sequence: Synthetic oligonucleotide
  Antisense strand to SEQ ID NO: 2203574
uugauucaggcucuggaag

SEQ ID NO: 2203576 - RNA, 19 nt, Artificial Sequence
  Description of Artificial Sequence: Synthetic oligonucleotide
  Sense strand starting at position 1570 of SEQ ID NO: 1883598
cgggcuuuccuaucacguu

SEQ ID NO: 2203577 - RNA, 19 nt, Artificial Sequence
  Description of Artificial Sequence: Synthetic oligonucleotide
  Antisense strand to SEQ ID NO: 2203576
aacgugauaggaaagcccg

SEQ ID NO: 2203578 - RNA, 19 nt, Artificial Sequence
  Description of Artificial Sequence: Synthetic oligonucleotide
  Sense strand starting at position 372 of SEQ ID NO: 1883598
ugaaacacuguguaugauu

SEQ ID NO: 2203579 - RNA, 19 nt, Artificial Sequence
  Description of Artificial Sequence: Synthetic oligonucleotide
  Antisense strand to SEQ ID NO: 2203578
aaucauacacaguguuuca

SEQ ID NO: 2203580 - RNA, 19 nt, Artificial Sequence
  Description of Artificial Sequence: Synthetic oligonucleotide
  Sense strand starting at position 847 of SEQ ID NO: 1883598
uacguagaugauugagaaa

SEQ ID NO: 2203581 - RNA, 19 nt, Artificial Sequence
  Description of Artificial Sequence: Synthetic oligonucleotide
  Antisense strand to SEQ ID NO: 2203580
uuucucaaucaucuacgua

SEQ ID NO: 2203582 - RNA, 19 nt, Artificial Sequence
  Description of Artificial Sequence: Synthetic oligonucleotide
  Sense strand starting at position 3370 of SEQ ID NO: 1883598
auugguuccaaagggaauu

SEQ ID NO: 2203583 - RNA, 19 nt, Artificial Sequence
  Description of Artificial Sequence: Synthetic oligonucleotide
  Antisense strand to SEQ ID NO: 2203582
aauucccuuuggaaccaau

SEQ ID NO: 2203584 - RNA, 19 nt, Artificial Sequence
  Description of Artificial Sequence: Synthetic oligonucleotide
  Sense strand starting at position 3127 of SEQ ID NO: 1883598
uugagaauucgaggacacu

SEQ ID NO: 2203585 - RNA, 19 nt, Artificial Sequence
  Description of Artificial Sequence: Synthetic oligonucleotide
  Antisense strand to SEQ ID NO: 2203584
aguguccucgaauucucaa

SEQ ID NO: 2203586 - RNA, 19 nt, Artificial Sequence
  Description of Artificial Sequence: Synthetic oligonucleotide
  Sense strand starting at position 1104 of SEQ ID NO: 1883598
ggaacauugucuucagagg

SEQ ID NO: 2203587 - RNA, 19 nt, Artificial Sequence
  Description of Artificial Sequence: Synthetic oligonucleotide
  Antisense strand to SEQ ID NO: 2203586
ccucugaagacaauguucc

SEQ ID NO: 2203588 - RNA, 19 nt, Artificial Sequence
  Description of Artificial Sequence: Synthetic oligonucleotide
  Sense strand starting at position 2772 of SEQ ID NO: 1883598
agaagagaggcaugugauu

SEQ ID NO: 2203589 - RNA, 19 nt, Artificial Sequence
  Description of Artificial Sequence: Synthetic oligonucleotide
  Antisense strand to SEQ ID NO: 2203588
aaucacaugccucucuucu

SEQ ID NO: 2203590 - RNA, 19 nt, Artificial Sequence
  Description of Artificial Sequence: Synthetic oligonucleotide
  Sense strand starting at position 3333 of SEQ ID NO: 1883598
agagucugaguagaguuua

SEQ ID NO: 2203591 - RNA, 19 nt, Artificial Sequence
  Description of Artificial Sequence: Synthetic oligonucleotide
  Antisense strand to SEQ ID NO: 2203590
uaaacucuacucagacucu

SEQ ID NO: 2203592 - RNA, 19 nt, Artificial Sequence
  Description of Artificial Sequence: Synthetic oligonucleotide
  Sense strand starting at position 1413 of SEQ ID NO: 1883598
agagaucggcaucaacuuu

SEQ ID NO: 2203593 - RNA, 19 nt, Artificial Sequence
  Description of Artificial Sequence: Synthetic oligonucleotide
  Antisense strand to SEQ ID NO: 2203592
aaaguugaugccgaucucu

SEQ ID NO: 2203594 - RNA, 19 nt, Artificial Sequence
  Description of Artificial Sequence: Synthetic oligonucleotide
  Sense strand starting at position 3860 of SEQ ID NO: 1883598
ccacaaauguauguuaaga

SEQ ID NO: 2203595 - RNA, 19 nt, Artificial Sequence
  Description of Artificial Sequence: Synthetic oligonucleotide
  Antisense strand to SEQ ID NO: 2203594
ucuuaacauacauuugugg

SEQ ID NO: 2203596 - RNA, 19 nt, Artificial Sequence
  Description of Artificial Sequence: Synthetic oligonucleotide
  Sense strand starting at position 144 of SEQ ID NO: 1883598
aggauuuguuaugaagaac

SEQ ID NO: 2203597 - RNA, 19 nt, Artificial Sequence
  Description of Artificial Sequence: Synthetic oligonucleotide
  Antisense strand to SEQ ID NO: 2203596
guucuucauaacaaauccu

SEQ ID NO: 2203598 - RNA, 19 nt, Artificial Sequence
  Description of Artificial Sequence: Synthetic oligonucleotide
  Sense strand starting at position 2787 of SEQ ID NO: 1883598
gauuucuucgccgggaauc

SEQ ID NO: 2203599 - RNA, 19 nt, Artificial Sequence
  Description of Artificial Sequence: Synthetic oligonucleotide
  Antisense strand to SEQ ID NO: 2203598
gauucccggcgaagaaauc

SEQ ID NO: 2203600 - RNA, 19 nt, Artificial Sequence
  Description of Artificial Sequence: Synthetic oligonucleotide
  Sense strand starting at position 2786 of SEQ ID NO: 1883598
ugauuucuucgccgggaau

SEQ ID NO: 2203601 - RNA, 19 nt, Artificial Sequence
  Description of Artificial Sequence: Synthetic oligonucleotide
  Antisense strand to SEQ ID NO: 2203600
auucccggcgaagaaauca

SEQ ID NO: 2203602 - RNA, 19 nt, Artificial Sequence
  Description of Artificial Sequence: Synthetic oligonucleotide
  Sense strand starting at position 3149 of SEQ ID NO: 1883598
agacuuuggcuccagcaaa

SEQ ID NO: 2203603 - RNA, 19 nt, Artificial Sequence
  Description of Artificial Sequence: Synthetic oligonucleotide
  Antisense strand to SEQ ID NO: 2203602
uuugcuggagccaaagucu

SEQ ID NO: 2203604 - RNA, 19 nt, Artificial Sequence
  Description of Artificial Sequence: Synthetic oligonucleotide
  Sense strand starting at position 1308 of SEQ ID NO: 1883598
ucaguuucucugcaaagag

SEQ ID NO: 2203605 - RNA, 19 nt, Artificial Sequence
  Description of Artificial Sequence: Synthetic oligonucleotide
  Antisense strand to SEQ ID NO: 2203604
cucuuugcagagaaacuga

SEQ ID NO: 2203606 - RNA, 19 nt, Artificial Sequence
  Description of Artificial Sequence: Synthetic oligonucleotide
  Sense strand starting at position 1656 of SEQ ID NO: 1883598
gugccaguugcgccagaau

SEQ ID NO: 2203607 - RNA, 19 nt, Artificial Sequence
  Description of Artificial Sequence: Synthetic oligonucleotide
  Antisense strand to SEQ ID NO: 2203606
auucuggcgcaacuggcac

SEQ ID NO: 2203608 - RNA, 19 nt, Artificial Sequence
  Description of Artificial Sequence: Synthetic oligonucleotide
  Sense strand starting at position 1456 of SEQ ID NO: 1883598
ggcccacuucuagggaaau

SEQ ID NO: 2203609 - RNA, 19 nt, Artificial Sequence
  Description of Artificial Sequence: Synthetic oligonucleotide
  Antisense strand to SEQ ID NO: 2203608
auuucccuagaagugggcc

SEQ ID NO: 2203610 - RNA, 19 nt, Artificial Sequence
  Description of Artificial Sequence: Synthetic oligonucleotide
  Sense strand starting at position 846 of SEQ ID NO: 1883598
guacguagaugauugagaa

SEQ ID NO: 2203611 - RNA, 19 nt, Artificial Sequence
  Description of Artificial Sequence: Synthetic oligonucleotide
  Antisense strand to SEQ ID NO: 2203610
uucucaaucaucuacguac

SEQ ID NO: 2203612 - RNA, 19 nt, Artificial Sequence
  Description of Artificial Sequence: Synthetic oligonucleotide
  Sense strand starting at position 3628 of SEQ ID NO: 1883598
agucuugguaauggaucaa

SEQ ID NO: 2203613 - RNA, 19 nt, Artificial Sequence
  Description of Artificial Sequence: Synthetic oligonucleotide
  Antisense strand to SEQ ID NO: 2203612
uugauccauuaccaagacu

SEQ ID NO: 2203614 - RNA, 19 nt, Artificial Sequence
  Description of Artificial Sequence: Synthetic oligonucleotide
  Sense strand starting at position 3790 of SEQ ID NO: 1883598
uccagucaugugcagagaa

SEQ ID NO: 2203615 - RNA, 19 nt, Artificial Sequence
  Description of Artificial Sequence: Synthetic oligonucleotide
  Antisense strand to SEQ ID NO: 2203614
uucucugcacaugacugga

SEQ ID NO: 2203616 - RNA, 19 nt, Artificial Sequence
  Description of Artificial Sequence: Synthetic oligonucleotide
  Sense strand starting at position 1326 of SEQ ID NO: 1883598
ggacuaaggaccugcgaau

SEQ ID NO: 2203617 - RNA, 19 nt, Artificial Sequence
  Description of Artificial Sequence: Synthetic oligonucleotide
  Antisense strand to SEQ ID NO: 2203616
auucgcagguccuuagucc

SEQ ID NO: 2203618 - RNA, 19 nt, Artificial Sequence
  Description of Artificial Sequence: Synthetic oligonucleotide
  Sense strand starting at position 843 of SEQ ID NO: 1883598
agaguacguagaugauuga

SEQ ID NO: 2203619 - RNA, 19 nt, Artificial Sequence
  Description of Artificial Sequence: Synthetic oligonucleotide
  Antisense strand to SEQ ID NO: 2203618
ucaaucaucuacguacucu

SEQ ID NO: 2203620 - RNA, 19 nt, Artificial Sequence
  Description of Artificial Sequence: Synthetic oligonucleotide
  Sense strand starting at position 2785 of SEQ ID NO: 1883598
gugauuucuucgccgggaa

SEQ ID NO: 2203621 - RNA, 19 nt, Artificial Sequence
  Description of Artificial Sequence: Synthetic oligonucleotide
  Antisense strand to SEQ ID NO: 2203620
uucccggcgaagaaaucac

SEQ ID NO: 2203622 - RNA, 19 nt, Artificial Sequence
  Description of Artificial Sequence: Synthetic oligonucleotide
  Sense strand starting at position 3252 of SEQ ID NO: 1883598
ugguuaaguguggaaagca

SEQ ID NO: 2203623 - RNA, 19 nt, Artificial Sequence
  Description of Artificial Sequence: Synthetic oligonucleotide
  Antisense strand to SEQ ID NO: 2203622
ugcuuuccacacuuaacca

SEQ ID NO: 2203624 - RNA, 19 nt, Artificial Sequence
  Description of Artificial Sequence: Synthetic oligonucleotide
  Sense strand starting at position 1410 of SEQ ID NO: 1883598
gcuagagaucggcaucaac

SEQ ID NO: 2203625 - RNA, 19 nt, Artificial Sequence
  Description of Artificial Sequence: Synthetic oligonucleotide
  Antisense strand to SEQ ID NO: 2203624
guugaugccgaucucuagc

SEQ ID NO: 2203626 - RNA, 19 nt, Artificial Sequence
  Description of Artificial Sequence: Synthetic oligonucleotide
  Sense strand starting at position 143 of SEQ ID NO: 1883598
aaggauuuguuaugaagaa

SEQ ID NO: 2203627 - RNA, 19 nt, Artificial Sequence
  Description of Artificial Sequence: Synthetic oligonucleotide
  Antisense strand to SEQ ID NO: 2203626
uucuucauaacaaauccuu

SEQ ID NO: 2203628 - RNA, 19 nt, Artificial Sequence
  Description of Artificial Sequence: Synthetic oligonucleotide
  Sense strand starting at position 370 of SEQ ID NO: 1883598
ggugaaacacuguguauga

SEQ ID NO: 2203629 - RNA, 19 nt, Artificial Sequence
  Description of Artificial Sequence: Synthetic oligonucleotide
  Antisense strand to SEQ ID NO: 2203628
ucauacacaguguuucacc

SEQ ID NO: 2203630 - RNA, 19 nt, Artificial Sequence
  Description of Artificial Sequence: Synthetic oligonucleotide
  Sense strand starting at position 1289 of SEQ ID NO: 1883598
uucuuaacucugcagcaga

SEQ ID NO: 2203631 - RNA, 19 nt, Artificial Sequence
  Description of Artificial Sequence: Synthetic oligonucleotide
  Antisense strand to SEQ ID NO: 2203630
ucugcugcagaguuaagaa

SEQ ID NO: 2203632 - RNA, 19 nt, Artificial Sequence
  Description of Artificial Sequence: Synthetic oligonucleotide
  Sense strand starting at position 3330 of SEQ ID NO: 1883598
cugagagucugaguagagu

SEQ ID NO: 2203633 - RNA, 19 nt, Artificial Sequence
  Description of Artificial Sequence: Synthetic oligonucleotide
  Antisense strand to SEQ ID NO: 2203632
acucuacucagacucucag

SEQ ID NO: 2203634 - RNA, 19 nt, Artificial Sequence
  Description of Artificial Sequence: Synthetic oligonucleotide
  Sense strand starting at position 2784 of SEQ ID NO: 1883598
ugugauuucuucgccggga

SEQ ID NO: 2203635 - RNA, 19 nt, Artificial Sequence
  Description of Artificial Sequence: Synthetic oligonucleotide
  Antisense strand to SEQ ID NO: 2203634
ucccggcgaagaaaucaca

SEQ ID NO: 2203636 - RNA, 19 nt, Artificial Sequence
  Description of Artificial Sequence: Synthetic oligonucleotide
  Sense strand starting at position 1083 of SEQ ID NO: 1883598
agucaaccugcucaguuaa

SEQ ID NO: 2203637 - RNA, 19 nt, Artificial Sequence
  Description of Artificial Sequence: Synthetic oligonucleotide
  Antisense strand to SEQ ID NO: 2203636
uuaacugagcagguugacu

SEQ ID NO: 2203638 - RNA, 19 nt, Artificial Sequence
  Description of Artificial Sequence: Synthetic oligonucleotide
  Sense strand starting at position 3414 of SEQ ID NO: 1883598
cucccuccucagugauaag

SEQ ID NO: 2203639 - RNA, 19 nt, Artificial Sequence
  Description of Artificial Sequence: Synthetic oligonucleotide
  Antisense strand to SEQ ID NO: 2203638
cuuaucacugaggagggag

SEQ ID NO: 2203640 - RNA, 19 nt, Artificial Sequence
  Description of Artificial Sequence: Synthetic oligonucleotide
  Sense strand starting at position 3070 of SEQ ID NO: 1883598
acgaguuguggguauauua

SEQ ID NO: 2203641 - RNA, 19 nt, Artificial Sequence
  Description of Artificial Sequence: Synthetic oligonucleotide
  Antisense strand to SEQ ID NO: 2203640
uaauauacccacaacucgu

SEQ ID NO: 2203642 - RNA, 19 nt, Artificial Sequence
  Description of Artificial Sequence: Synthetic oligonucleotide
  Sense strand starting at position 3307 of SEQ ID NO: 1883598
gggaguuucuuccuaccca

SEQ ID NO: 2203643 - RNA, 19 nt, Artificial Sequence
  Description of Artificial Sequence: Synthetic oligonucleotide
  Antisense strand to SEQ ID NO: 2203642
uggguaggaagaaacuccc

SEQ ID NO: 2203644 - RNA, 19 nt, Artificial Sequence
  Description of Artificial Sequence: Synthetic oligonucleotide
  Sense strand starting at position 1065 of SEQ ID NO: 1883598
ggaagcugguucuucuaaa

SEQ ID NO: 2203645 - RNA, 19 nt, Artificial Sequence
  Description of Artificial Sequence: Synthetic oligonucleotide
  Antisense strand to SEQ ID NO: 2203644
uuuagaagaaccagcuucc

SEQ ID NO: 2203646 - RNA, 19 nt, Artificial Sequence
  Description of Artificial Sequence: Synthetic oligonucleotide
  Sense strand starting at position 1066 of SEQ ID NO: 1883598
gaagcugguucuucuaaag

SEQ ID NO: 2203647 - RNA, 19 nt, Artificial Sequence
  Description of Artificial Sequence: Synthetic oligonucleotide
  Antisense strand to SEQ ID NO: 2203646
cuuuagaagaaccagcuuc

SEQ ID NO: 2203648 - RNA, 19 nt, Artificial Sequence
  Description of Artificial Sequence: Synthetic oligonucleotide
  Sense strand starting at position 3250 of SEQ ID NO: 1883598
ucugguuaaguguggaaag

SEQ ID NO: 2203649 - RNA, 19 nt, Artificial Sequence
  Description of Artificial Sequence: Synthetic oligonucleotide
  Antisense strand to SEQ ID NO: 2203648
cuuuccacacuuaaccaga

SEQ ID NO: 2203650 - RNA, 19 nt, Artificial Sequence
  Description of Artificial Sequence: Synthetic oligonucleotide
  Sense strand starting at position 371 of SEQ ID NO: 1883598
gugaaacacuguguaugau

SEQ ID NO: 2203651 - RNA, 19 nt, Artificial Sequence
  Description of Artificial Sequence: Synthetic oligonucleotide
  Antisense strand to SEQ ID NO: 2203650
aucauacacaguguuucac

SEQ ID NO: 2203652 - RNA, 19 nt, Artificial Sequence
  Description of Artificial Sequence: Synthetic oligonucleotide
  Sense strand starting at position 2440 of SEQ ID NO: 1883599
agaaauucuagacgguaaa

SEQ ID NO: 2203653 - RNA, 19 nt, Artificial Sequence
  Description of Artificial Sequence: Synthetic oligonucleotide
  Antisense strand to SEQ ID NO: 2203652
uuuaccgucuagaauuucu

SEQ ID NO: 2203654 - RNA, 19 nt, Artificial Sequence
  Description of Artificial Sequence: Synthetic oligonucleotide
  Sense strand starting at position 1711 of SEQ ID NO: 1883599
gugugucucagcuuguuaa

SEQ ID NO: 2203655 - RNA, 19 nt, Artificial Sequence
  Description of Artificial Sequence: Synthetic oligonucleotide
  Antisense strand to SEQ ID NO: 2203654
uuaacaagcugagacacac

SEQ ID NO: 2203656 - RNA, 19 nt, Artificial Sequence
  Description of Artificial Sequence: Synthetic oligonucleotide
  Sense strand starting at position 2111 of SEQ ID NO: 1883599
aagccaagugaugaguaau

SEQ ID NO: 2203657 - RNA, 19 nt, Artificial Sequence
  Description of Artificial Sequence: Synthetic oligonucleotide
  Antisense strand to SEQ ID NO: 2203656
auuacucaucacuuggcuu

SEQ ID NO: 2203658 - RNA, 19 nt, Artificial Sequence
  Description of Artificial Sequence: Synthetic oligonucleotide
  Sense strand starting at position 1631 of SEQ ID NO: 1883599
cgguaauaacagcagagau

SEQ ID NO: 2203659 - RNA, 19 nt, Artificial Sequence
  Description of Artificial Sequence: Synthetic oligonucleotide
  Antisense strand to SEQ ID NO: 2203658
aucucugcuguuauuaccg

SEQ ID NO: 2203660 - RNA, 19 nt, Artificial Sequence
  Description of Artificial Sequence: Synthetic oligonucleotide
  Sense strand starting at position 1141 of SEQ ID NO: 1883599
uucucugguagauagugaa

SEQ ID NO: 2203661 - RNA, 19 nt, Artificial Sequence
  Description of Artificial Sequence: Synthetic oligonucleotide
  Antisense strand to SEQ ID NO: 2203660
uucacuaucuaccagagaa

SEQ ID NO: 2203662 - RNA, 19 nt, Artificial Sequence
  Description of Artificial Sequence: Synthetic oligonucleotide
  Sense strand starting at position 2870 of SEQ ID NO: 1883599
auagucaaucuauacugua

SEQ ID NO: 2203663 - RNA, 19 nt, Artificial Sequence
  Description of Artificial Sequence: Synthetic oligonucleotide
  Antisense strand to SEQ ID NO: 2203662
uacaguauagauugacuau

SEQ ID NO: 2203664 - RNA, 19 nt, Artificial Sequence
  Description of Artificial Sequence: Synthetic oligonucleotide
  Sense strand starting at position 1530 of SEQ ID NO: 1883599
aguugaacuccuugaaaua

SEQ ID NO: 2203665 - RNA, 19 nt, Artificial Sequence
  Description of Artificial Sequence: Synthetic oligonucleotide
  Antisense strand to SEQ ID NO: 2203664
uauuucaaggaguucaacu

SEQ ID NO: 2203666 - RNA, 19 nt, Artificial Sequence
  Description of Artificial Sequence: Synthetic oligonucleotide
  Sense strand starting at position 2996 of SEQ ID NO: 1883599
ugguaacugcuacacauaa

SEQ ID NO: 2203667 - RNA, 19 nt, Artificial Sequence
  Description of Artificial Sequence: Synthetic oligonucleotide
  Antisense strand to SEQ ID NO: 2203666
uuauguguagcaguuacca

SEQ ID NO: 2203668 - RNA, 19 nt, Artificial Sequence
  Description of Artificial Sequence: Synthetic oligonucleotide
  Sense strand starting at position 294 of SEQ ID NO: 1883599
guaugcuaacaucaacuga

SEQ ID NO: 2203669 - RNA, 19 nt, Artificial Sequence
  Description of Artificial Sequence: Synthetic oligonucleotide
  Antisense strand to SEQ ID NO: 2203668
ucaguugauguuagcauac

SEQ ID NO: 2203670 - RNA, 19 nt, Artificial Sequence
  Description of Artificial Sequence: Synthetic oligonucleotide
  Sense strand starting at position 2982 of SEQ ID NO: 1883599
uuagcacaucaauauggua

SEQ ID NO: 2203671 - RNA, 19 nt, Artificial Sequence
  Description of Artificial Sequence: Synthetic oligonucleotide
  Antisense strand to SEQ ID NO: 2203670
uaccauauugaugugcuaa

SEQ ID NO: 2203672 - RNA, 19 nt, Artificial Sequence
  Description of Artificial Sequence: Synthetic oligonucleotide
  Sense strand starting at position 3380 of SEQ ID NO: 1883599
uuaugaugccuccacugaa

SEQ ID NO: 2203673 - RNA, 19 nt, Artificial Sequence
  Description of Artificial Sequence: Synthetic oligonucleotide
  Antisense strand to SEQ ID NO: 2203672
uucaguggaggcaucauaa

SEQ ID NO: 2203674 - RNA, 19 nt, Artificial Sequence
  Description of Artificial Sequence: Synthetic oligonucleotide
  Sense strand starting at position 1000 of SEQ ID NO: 1883599
cuagaucauguguaccaau

SEQ ID NO: 2203675 - RNA, 19 nt, Artificial Sequence
  Description of Artificial Sequence: Synthetic oligonucleotide
  Antisense strand to SEQ ID NO: 2203674
auugguacacaugaucuag

SEQ ID NO: 2203676 - RNA, 19 nt, Artificial Sequence
  Description of Artificial Sequence: Synthetic oligonucleotide
  Sense strand starting at position 1761 of SEQ ID NO: 1883599
uuuaucugucaguauaaga

SEQ ID NO: 2203677 - RNA, 19 nt, Artificial Sequence
  Description of Artificial Sequence: Synthetic oligonucleotide
  Antisense strand to SEQ ID NO: 2203676
ucuuauacugacagauaaa

SEQ ID NO: 2203678 - RNA, 19 nt, Artificial Sequence
  Description of Artificial Sequence: Synthetic oligonucleotide
  Sense strand starting at position 2491 of SEQ ID NO: 1883599
uaaugacaguuuguaggaa

SEQ ID NO: 2203679 - RNA, 19 nt, Artificial Sequence
  Description of Artificial Sequence: Synthetic oligonucleotide
  Antisense strand to SEQ ID NO: 2203678
uuccuacaaacugucauua

SEQ ID NO: 2203680 - RNA, 19 nt, Artificial Sequence
  Description of Artificial Sequence: Synthetic oligonucleotide
  Sense strand starting at position 3110 of SEQ ID NO: 1883599
uuugcuuaagaguaagauu

SEQ ID NO: 2203681 - RNA, 19 nt, Artificial Sequence
  Description of Artificial Sequence: Synthetic oligonucleotide
  Antisense strand to SEQ ID NO: 2203680
aaucuuacucuuaagcaaa

SEQ ID NO: 2203682 - RNA, 19 nt, Artificial Sequence
  Description of Artificial Sequence: Synthetic oligonucleotide
  Sense strand starting at position 447 of SEQ ID NO: 1883599
agguaauauaacggaagua

SEQ ID NO: 2203683 - RNA, 19 nt, Artificial Sequence
  Description of Artificial Sequence: Synthetic oligonucleotide
  Antisense strand to SEQ ID NO: 2203682
uacuuccguuauauuaccu

SEQ ID NO: 2203684 - RNA, 19 nt, Artificial Sequence
  Description of Artificial Sequence: Synthetic oligonucleotide
  Sense strand starting at position 3220 of SEQ ID NO: 1883599
gcagccaacuauuugcuaa

SEQ ID NO: 2203685 - RNA, 19 nt, Artificial Sequence
  Description of Artificial Sequence: Synthetic oligonucleotide
  Antisense strand to SEQ ID NO: 2203684
uuagcaaauaguuggcugc

SEQ ID NO: 2203686 - RNA, 19 nt, Artificial Sequence
  Description of Artificial Sequence: Synthetic oligonucleotide
  Sense strand starting at position 2506 of SEQ ID NO: 1883599
ggaaauacagguugagcau

SEQ ID NO: 2203687 - RNA, 19 nt, Artificial Sequence
  Description of Artificial Sequence: Synthetic oligonucleotide
  Antisense strand to SEQ ID NO: 2203686
augcucaaccuguauuucc

SEQ ID NO: 2203688 - RNA, 19 nt, Artificial Sequence
  Description of Artificial Sequence: Synthetic oligonucleotide
  Sense strand starting at position 3405 of SEQ ID NO: 1883599
ucaaguguggcagaauaug

SEQ ID NO: 2203689 - RNA, 19 nt, Artificial Sequence
  Description of Artificial Sequence: Synthetic oligonucleotide
  Antisense strand to SEQ ID NO: 2203688
cauauucugccacacuuga

SEQ ID NO: 2203690 - RNA, 19 nt, Artificial Sequence
  Description of Artificial Sequence: Synthetic oligonucleotide
  Sense strand starting at position 1617 of SEQ ID NO: 1883599
gucucaguuguugucggua

SEQ ID NO: 2203691 - RNA, 19 nt, Artificial Sequence
  Description of Artificial Sequence: Synthetic oligonucleotide
  Antisense strand to SEQ ID NO: 2203690
uaccgacaacaacugagac

SEQ ID NO: 2203692 - RNA, 19 nt, Artificial Sequence
  Description of Artificial Sequence: Synthetic oligonucleotide
  Sense strand starting at position 2179 of SEQ ID NO: 1883599
cuguuaucccuugacacac

SEQ ID NO: 2203693 - RNA, 19 nt, Artificial Sequence
  Description of Artificial Sequence: Synthetic oligonucleotide
  Antisense strand to SEQ ID NO: 2203692
gugugucaagggauaacag

SEQ ID NO: 2203694 - RNA, 19 nt, Artificial Sequence
  Description of Artificial Sequence: Synthetic oligonucleotide
  Sense strand starting at position 2756 of SEQ ID NO: 1883599
gugucccauccuuaagaug

SEQ ID NO: 2203695 - RNA, 19 nt, Artificial Sequence
  Description of Artificial Sequence: Synthetic oligonucleotide
  Antisense strand to SEQ ID NO: 2203694
caucuuaaggaugggacac

SEQ ID NO: 2203696 - RNA, 19 nt, Artificial Sequence
  Description of Artificial Sequence: Synthetic oligonucleotide
  Sense strand starting at position 1570 of SEQ ID NO: 1883599
guaccaauugugggauaac

SEQ ID NO: 2203697 - RNA, 19 nt, Artificial Sequence
  Description of Artificial Sequence: Synthetic oligonucleotide
  Antisense strand to SEQ ID NO: 2203696
guuaucccacaauugguac

SEQ ID NO: 2203698 - RNA, 19 nt, Artificial Sequence
  Description of Artificial Sequence: Synthetic oligonucleotide
  Sense strand starting at position 2949 of SEQ ID NO: 1883599
guuguuauugcgguagcua

SEQ ID NO: 2203699 - RNA, 19 nt, Artificial Sequence
  Description of Artificial Sequence: Synthetic oligonucleotide
  Antisense strand to SEQ ID NO: 2203698
uagcuaccgcaauaacaac

SEQ ID NO: 2203700 - RNA, 19 nt, Artificial Sequence
  Description of Artificial Sequence: Synthetic oligonucleotide
  Sense strand starting at position 3340 of SEQ ID NO: 1883599
uuguaagucaaguaaaggu

SEQ ID NO: 2203701 - RNA, 19 nt, Artificial Sequence
  Description of Artificial Sequence: Synthetic oligonucleotide
  Antisense strand to SEQ ID NO: 2203700
accuuuacuugacuuacaa

SEQ ID NO: 2203702 - RNA, 19 nt, Artificial Sequence
  Description of Artificial Sequence: Synthetic oligonucleotide
  Sense strand starting at position 3951 of SEQ ID NO: 1883599
ggguaaggguaugcagaua

SEQ ID NO: 2203703 - RNA, 19 nt, Artificial Sequence
  Description of Artificial Sequence: Synthetic oligonucleotide
  Antisense strand to SEQ ID NO: 2203702
uaucugcauacccuuaccc

SEQ ID NO: 2203704 - RNA, 19 nt, Artificial Sequence
  Description of Artificial Sequence: Synthetic oligonucleotide
  Sense strand starting at position 2124 of SEQ ID NO: 1883599
aguaauauugcugagcuaa

SEQ ID NO: 2203705 - RNA, 19 nt, Artificial Sequence
  Description of Artificial Sequence: Synthetic oligonucleotide
  Antisense strand to SEQ ID NO: 2203704
uuagcucagcaauauuacu

SEQ ID NO: 2203706 - RNA, 19 nt, Artificial Sequence
  Description of Artificial Sequence: Synthetic oligonucleotide
  Sense strand starting at position 1430 of SEQ ID NO: 1883599
uguuaucagaaacgaaagu

SEQ ID NO: 2203707 - RNA, 19 nt, Artificial Sequence
  Description of Artificial Sequence: Synthetic oligonucleotide
  Antisense strand to SEQ ID NO: 2203706
acuuucguuucugauaaca

SEQ ID NO: 2203708 - RNA, 19 nt, Artificial Sequence
  Description of Artificial Sequence: Synthetic oligonucleotide
  Sense strand starting at position 1721 of SEQ ID NO: 1883599
gcuuguuaagguuaaauac

SEQ ID NO: 2203709 - RNA, 19 nt, Artificial Sequence
  Description of Artificial Sequence: Synthetic oligonucleotide
  Antisense strand to SEQ ID NO: 2203708
guauuuaaccuuaacaagc

SEQ ID NO: 2203710 - RNA, 19 nt, Artificial Sequence
  Description of Artificial Sequence: Synthetic oligonucleotide
  Sense strand starting at position 3838 of SEQ ID NO: 1883599
gcaugaaucucauuccuag

SEQ ID NO: 2203711 - RNA, 19 nt, Artificial Sequence
  Description of Artificial Sequence: Synthetic oligonucleotide
  Antisense strand to SEQ ID NO: 2203710
cuaggaaugagauucaugc

SEQ ID NO: 2203712 - RNA, 19 nt, Artificial Sequence
  Description of Artificial Sequence: Synthetic oligonucleotide
  Sense strand starting at position 1566 of SEQ ID NO: 1883599
cuauguaccaauuguggga

SEQ ID NO: 2203713 - RNA, 19 nt, Artificial Sequence
  Description of Artificial Sequence: Synthetic oligonucleotide
  Antisense strand to SEQ ID NO: 2203712
ucccacaauugguacauag

SEQ ID NO: 2203714 - RNA, 19 nt, Artificial Sequence
  Description of Artificial Sequence: Synthetic oligonucleotide
  Sense strand starting at position 3383 of SEQ ID NO: 1883599
ugaugccuccacugaaauu

SEQ ID NO: 2203715 - RNA, 19 nt, Artificial Sequence
  Description of Artificial Sequence: Synthetic oligonucleotide
  Antisense strand to SEQ ID NO: 2203714
aauuucaguggaggcauca

SEQ ID NO: 2203716 - RNA, 19 nt, Artificial Sequence
  Description of Artificial Sequence: Synthetic oligonucleotide
  Sense strand starting at position 3073 of SEQ ID NO: 1883599
agucaaauacaauguaugu

SEQ ID NO: 2203717 - RNA, 19 nt, Artificial Sequence
  Description of Artificial Sequence: Synthetic oligonucleotide
  Antisense strand to SEQ ID NO: 2203716
acauacauuguauuugacu

SEQ ID NO: 2203718 - RNA, 19 nt, Artificial Sequence
  Description of Artificial Sequence: Synthetic oligonucleotide
  Sense strand starting at position 3719 of SEQ ID NO: 1883599
agaacuguguggucacaua

SEQ ID NO: 2203719 - RNA, 19 nt, Artificial Sequence
  Description of Artificial Sequence: Synthetic oligonucleotide
  Antisense strand to SEQ ID NO: 2203718
uaugugaccacacaguucu

SEQ ID NO: 2203720 - RNA, 19 nt, Artificial Sequence
  Description of Artificial Sequence: Synthetic oligonucleotide
  Sense strand starting at position 3350 of SEQ ID NO: 1883599
aguaaagguuuggucuuaa

SEQ ID NO: 2203721 - RNA, 19 nt, Artificial Sequence
  Description of Artificial Sequence: Synthetic oligonucleotide
  Antisense strand to SEQ ID NO: 2203720
uuaagaccaaaccuuuacu

SEQ ID NO: 2203722 - RNA, 19 nt, Artificial Sequence
  Description of Artificial Sequence: Synthetic oligonucleotide
  Sense strand starting at position 3113 of SEQ ID NO: 1883599
gcuuaagaguaagauuuaa

SEQ ID NO: 2203723 - RNA, 19 nt, Artificial Sequence
  Description of Artificial Sequence: Synthetic oligonucleotide
  Antisense strand to SEQ ID NO: 2203722
uuaaaucuuacucuuaagc

SEQ ID NO: 2203724 - RNA, 19 nt, Artificial Sequence
  Description of Artificial Sequence: Synthetic oligonucleotide
  Sense strand starting at position 3152 of SEQ ID NO: 1883599
cugagacguuucuugagau

SEQ ID NO: 2203725 - RNA, 19 nt, Artificial Sequence
  Description of Artificial Sequence: Synthetic oligonucleotide
  Antisense strand to SEQ ID NO: 2203724
aucucaagaaacgucucag

SEQ ID NO: 2203726 - RNA, 19 nt, Artificial Sequence
  Description of Artificial Sequence: Synthetic oligonucleotide
  Sense strand starting at position 371 of SEQ ID NO: 1883599
ucaaaucccuuuguaaagu

SEQ ID NO: 2203727 - RNA, 19 nt, Artificial Sequence
  Description of Artificial Sequence: Synthetic oligonucleotide
  Antisense strand to SEQ ID NO: 2203726
acuuuacaaagggauuuga

SEQ ID NO: 2203728 - RNA, 19 nt, Artificial Sequence
  Description of Artificial Sequence: Synthetic oligonucleotide
  Sense strand starting at position 2709 of SEQ ID NO: 1883599
guguauacaguguauauua

SEQ ID NO: 2203729 - RNA, 19 nt, Artificial Sequence
  Description of Artificial Sequence: Synthetic oligonucleotide
  Antisense strand to SEQ ID NO: 2203728
uaauauacacuguauacac

SEQ ID NO: 2203730 - RNA, 19 nt, Artificial Sequence
  Description of Artificial Sequence: Synthetic oligonucleotide
  Sense strand starting at position 2089 of SEQ ID NO: 1883599
acccaucucuuggcagauu

SEQ ID NO: 2203731 - RNA, 19 nt, Artificial Sequence
  Description of Artificial Sequence: Synthetic oligonucleotide
  Antisense strand to SEQ ID NO: 2203730
aaucugccaagagaugggu

SEQ ID NO: 2203732 - RNA, 19 nt, Artificial Sequence
  Description of Artificial Sequence: Synthetic oligonucleotide
  Sense strand starting at position 609 of SEQ ID NO: 1883600
agaaguugucaagauguag

SEQ ID NO: 2203733 - RNA, 19 nt, Artificial Sequence
  Description of Artificial Sequence: Synthetic oligonucleotide
  Antisense strand to SEQ ID NO: 2203732
cuacaucuugacaacuucu

SEQ ID NO: 2203734 - RNA, 19 nt, Artificial Sequence
  Description of Artificial Sequence: Synthetic oligonucleotide
  Sense strand starting at position 1052 of SEQ ID NO: 1883600
ggguaaagaguauauguca

SEQ ID NO: 2203735 - RNA, 19 nt, Artificial Sequence
  Description of Artificial Sequence: Synthetic oligonucleotide
  Antisense strand to SEQ ID NO: 2203734
ugacauauacucuuuaccc

SEQ ID NO: 2203736 - RNA, 19 nt, Artificial Sequence
  Description of Artificial Sequence: Synthetic oligonucleotide
  Sense strand starting at position 3116 of SEQ ID NO: 1883600
gcagaugaccuccaacuua

SEQ ID NO: 2203737 - RNA, 19 nt, Artificial Sequence
  Description of Artificial Sequence: Synthetic oligonucleotide
  Antisense strand to SEQ ID NO: 2203736
uaaguuggaggucaucugc

SEQ ID NO: 2203738 - RNA, 19 nt, Artificial Sequence
  Description of Artificial Sequence: Synthetic oligonucleotide
  Sense strand starting at position 1009 of SEQ ID NO: 1883600
ugaacucuucuguacugaa

SEQ ID NO: 2203739 - RNA, 19 nt, Artificial Sequence
  Description of Artificial Sequence: Synthetic oligonucleotide
  Antisense strand to SEQ ID NO: 2203738
uucaguacagaagaguuca

SEQ ID NO: 2203740 - RNA, 19 nt, Artificial Sequence
  Description of Artificial Sequence: Synthetic oligonucleotide
  Sense strand starting at position 2315 of SEQ ID NO: 1883600
ggaacaacuguuuauccuu

SEQ ID NO: 2203741 - RNA, 19 nt, Artificial Sequence
  Description of Artificial Sequence: Synthetic oligonucleotide
  Antisense strand to SEQ ID NO: 2203740
aaggauaaacaguuguucc

SEQ ID NO: 2203742 - RNA, 19 nt, Artificial Sequence
  Description of Artificial Sequence: Synthetic oligonucleotide
  Sense strand starting at position 2507 of SEQ ID NO: 1883600
aacagauugguuuaguuua

SEQ ID NO: 2203743 - RNA, 19 nt, Artificial Sequence
  Description of Artificial Sequence: Synthetic oligonucleotide
  Antisense strand to SEQ ID NO: 2203742
uaaacuaaaccaaucuguu

SEQ ID NO: 2203744 - RNA, 19 nt, Artificial Sequence
  Description of Artificial Sequence: Synthetic oligonucleotide
  Sense strand starting at position 416 of SEQ ID NO: 1883600
uauuauguaggguaucaua

SEQ ID NO: 2203745 - RNA, 19 nt, Artificial Sequence
  Description of Artificial Sequence: Synthetic oligonucleotide
  Antisense strand to SEQ ID NO: 2203744
uaugauacccuacauaaua

SEQ ID NO: 2203746 - RNA, 19 nt, Artificial Sequence
  Description of Artificial Sequence: Synthetic oligonucleotide
  Sense strand starting at position 593 of SEQ ID NO: 1883600
auaucagauuagucuuaga

SEQ ID NO: 2203747 - RNA, 19 nt, Artificial Sequence
  Description of Artificial Sequence: Synthetic oligonucleotide
  Antisense strand to SEQ ID NO: 2203746
ucuaagacuaaucugauau

SEQ ID NO: 2203748 - RNA, 19 nt, Artificial Sequence
  Description of Artificial Sequence: Synthetic oligonucleotide
  Sense strand starting at position 3858 of SEQ ID NO: 1883600
guuuacucagacuaucuua

SEQ ID NO: 2203749 - RNA, 19 nt, Artificial Sequence
  Description of Artificial Sequence: Synthetic oligonucleotide
  Antisense strand to SEQ ID NO: 2203748
uaagauagucugaguaaac

SEQ ID NO: 2203750 - RNA, 19 nt, Artificial Sequence
  Description of Artificial Sequence: Synthetic oligonucleotide
  Sense strand starting at position 2061 of SEQ ID NO: 1883600
gguaccaaggcauauuauu

SEQ ID NO: 2203751 - RNA, 19 nt, Artificial Sequence
  Description of Artificial Sequence: Synthetic oligonucleotide
  Antisense strand to SEQ ID NO: 2203750
aauaauaugccuugguacc

SEQ ID NO: 2203752 - RNA, 19 nt, Artificial Sequence
  Description of Artificial Sequence: Synthetic oligonucleotide
  Sense strand starting at position 2712 of SEQ ID NO: 1883600
ugacuuugccaauggaaag

SEQ ID NO: 2203753 - RNA, 19 nt, Artificial Sequence
  Description of Artificial Sequence: Synthetic oligonucleotide
  Antisense strand to SEQ ID NO: 2203752
cuuuccauuggcaaaguca

SEQ ID NO: 2203754 - RNA, 19 nt, Artificial Sequence
  Description of Artificial Sequence: Synthetic oligonucleotide
  Sense strand starting at position 2364 of SEQ ID NO: 1883600
auaugcuuagcugaggaau

SEQ ID NO: 2203755 - RNA, 19 nt, Artificial Sequence
  Description of Artificial Sequence: Synthetic oligonucleotide
  Antisense strand to SEQ ID NO: 2203754
auuccucagcuaagcauau

SEQ ID NO: 2203756 - RNA, 19 nt, Artificial Sequence
  Description of Artificial Sequence: Synthetic oligonucleotide
  Sense strand starting at position 454 of SEQ ID NO: 1883600
gcuguaaauacaugaggag

SEQ ID NO: 2203757 - RNA, 19 nt, Artificial Sequence
  Description of Artificial Sequence: Synthetic oligonucleotide
  Antisense strand to SEQ ID NO: 2203756
cuccucauguauuuacagc

SEQ ID NO: 2203758 - RNA, 19 nt, Artificial Sequence
  Description of Artificial Sequence: Synthetic oligonucleotide
  Sense strand starting at position 2463 of SEQ ID NO: 1883600
ggcuauaaauauguagaca

SEQ ID NO: 2203759 - RNA, 19 nt, Artificial Sequence
  Description of Artificial Sequence: Synthetic oligonucleotide
  Antisense strand to SEQ ID NO: 2203758
ugucuacauauuuauagcc

SEQ ID NO: 2203760 - RNA, 19 nt, Artificial Sequence
  Description of Artificial Sequence: Synthetic oligonucleotide
  Sense strand starting at position 3939 of SEQ ID NO: 1883600
augagauugcugcauauua

SEQ ID NO: 2203761 - RNA, 19 nt, Artificial Sequence
  Description of Artificial Sequence: Synthetic oligonucleotide
  Antisense strand to SEQ ID NO: 2203760
uaauaugcagcaaucucau

SEQ ID NO: 2203762 - RNA, 19 nt, Artificial Sequence
  Description of Artificial Sequence: Synthetic oligonucleotide
  Sense strand starting at position 2016 of SEQ ID NO: 1883600
ucguuauggcaacauaaga

SEQ ID NO: 2203763 - RNA, 19 nt, Artificial Sequence
  Description of Artificial Sequence: Synthetic oligonucleotide
  Antisense strand to SEQ ID NO: 2203762
ucuuauguugccauaacga

SEQ ID NO: 2203764 - RNA, 19 nt, Artificial Sequence
  Description of Artificial Sequence: Synthetic oligonucleotide
  Sense strand starting at position 2505 of SEQ ID NO: 1883600
gaaacagauugguuuaguu

SEQ ID NO: 2203765 - RNA, 19 nt, Artificial Sequence
  Description of Artificial Sequence: Synthetic oligonucleotide
  Antisense strand to SEQ ID NO: 2203764
aacuaaaccaaucuguuuc

SEQ ID NO: 2203766 - RNA, 19 nt, Artificial Sequence
  Description of Artificial Sequence: Synthetic oligonucleotide
  Sense strand starting at position 2290 of SEQ ID NO: 1883600
ugggcuauuucuucuguuu

SEQ ID NO: 2203767 - RNA, 19 nt, Artificial Sequence
  Description of Artificial Sequence: Synthetic oligonucleotide
  Antisense strand to SEQ ID NO: 2203766
aaacagaagaaauagccca

SEQ ID NO: 2203768 - RNA, 19 nt, Artificial Sequence
  Description of Artificial Sequence: Synthetic oligonucleotide
  Sense strand starting at position 3522 of SEQ ID NO: 1883600
cauuuaucgcuaggagcuc

SEQ ID NO: 2203769 - RNA, 19 nt, Artificial Sequence
  Description of Artificial Sequence: Synthetic oligonucleotide
  Antisense strand to SEQ ID NO: 2203768
gagcuccuagcgauaaaug

SEQ ID NO: 2203770 - RNA, 19 nt, Artificial Sequence
  Description of Artificial Sequence: Synthetic oligonucleotide
  Sense strand starting at position 950 of SEQ ID NO: 1883600
gggugauaguuagcaagaa

SEQ ID NO: 2203771 - RNA, 19 nt, Artificial Sequence
  Description of Artificial Sequence: Synthetic oligonucleotide
  Antisense strand to SEQ ID NO: 2203770
uucuugcuaacuaucaccc

SEQ ID NO: 2203772 - RNA, 19 nt, Artificial Sequence
  Description of Artificial Sequence: Synthetic oligonucleotide
  Sense strand starting at position 1008 of SEQ ID NO: 1883600
augaacucuucuguacuga

SEQ ID NO: 2203773 - RNA, 19 nt, Artificial Sequence
  Description of Artificial Sequence: Synthetic oligonucleotide
  Antisense strand to SEQ ID NO: 2203772
ucaguacagaagaguucau

SEQ ID NO: 2203774 - RNA, 19 nt, Artificial Sequence
  Description of Artificial Sequence: Synthetic oligonucleotide
  Sense strand starting at position 2652 of SEQ ID NO: 1883600
uccugauaugcauauguau

SEQ ID NO: 2203775 - RNA, 19 nt, Artificial Sequence
  Description of Artificial Sequence: Synthetic oligonucleotide
  Antisense strand to SEQ ID NO: 2203774
auacauaugcauaucagga

SEQ ID NO: 2203776 - RNA, 19 nt, Artificial Sequence
  Description of Artificial Sequence: Synthetic oligonucleotide
  Sense strand starting at position 2229 of SEQ ID NO: 1883600
ucuuucuugcacgaagaca

SEQ ID NO: 2203777 - RNA, 19 nt, Artificial Sequence
  Description of Artificial Sequence: Synthetic oligonucleotide
  Antisense strand to SEQ ID NO: 2203776
ugucuucgugcaagaaaga

SEQ ID NO: 2203778 - RNA, 19 nt, Artificial Sequence
  Description of Artificial Sequence: Synthetic oligonucleotide
  Sense strand starting at position 544 of SEQ ID NO: 1883600
guuuaaguacuguaacuac

SEQ ID NO: 2203779 - RNA, 19 nt, Artificial Sequence
  Description of Artificial Sequence: Synthetic oligonucleotide
  Antisense strand to SEQ ID NO: 2203778
guaguuacaguacuuaaac

SEQ ID NO: 2203780 - RNA, 19 nt, Artificial Sequence
  Description of Artificial Sequence: Synthetic oligonucleotide
  Sense strand starting at position 3941 of SEQ ID NO: 1883600
gagauugcugcauauuacu

SEQ ID NO: 2203781 - RNA, 19 nt, Artificial Sequence
  Description of Artificial Sequence: Synthetic oligonucleotide
  Antisense strand to SEQ ID NO: 2203780
aguaauaugcagcaaucuc

SEQ ID NO: 2203782 - RNA, 19 nt, Artificial Sequence
  Description of Artificial Sequence: Synthetic oligonucleotide
  Sense strand starting at position 2744 of SEQ ID NO: 1883600
ggaagaauggguugcaagu

SEQ ID NO: 2203783 - RNA, 19 nt, Artificial Sequence
  Description of Artificial Sequence: Synthetic oligonucleotide
  Antisense strand to SEQ ID NO: 2203782
acuugcaacccauucuucc

SEQ ID NO: 2203784 - RNA, 19 nt, Artificial Sequence
  Description of Artificial Sequence: Synthetic oligonucleotide
  Sense strand starting at position 3907 of SEQ ID NO: 1883600
guaauuuagccaugugcua

SEQ ID NO: 2203785 - RNA, 19 nt, Artificial Sequence
  Description of Artificial Sequence: Synthetic oligonucleotide
  Antisense strand to SEQ ID NO: 2203784
uagcacauggcuaaauuac

SEQ ID NO: 2203786 - RNA, 19 nt, Artificial Sequence
  Description of Artificial Sequence: Synthetic oligonucleotide
  Sense strand starting at position 3852 of SEQ ID NO: 1883600
cuaucaguuuacucagacu

SEQ ID NO: 2203787 - RNA, 19 nt, Artificial Sequence
  Description of Artificial Sequence: Synthetic oligonucleotide
  Antisense strand to SEQ ID NO: 2203786
agucugaguaaacugauag

SEQ ID NO: 2203788 - RNA, 19 nt, Artificial Sequence
  Description of Artificial Sequence: Synthetic oligonucleotide
  Sense strand starting at position 3468 of SEQ ID NO: 1883600
gaaggagcuucuguagauu

SEQ ID NO: 2203789 - RNA, 19 nt, Artificial Sequence
  Description of Artificial Sequence: Synthetic oligonucleotide
  Antisense strand to SEQ ID NO: 2203788
aaucuacagaagcuccuuc

SEQ ID NO: 2203790 - RNA, 19 nt, Artificial Sequence
  Description of Artificial Sequence: Synthetic oligonucleotide
  Sense strand starting at position 3162 of SEQ ID NO: 1883600
ugcaauaguguggaagcaa

SEQ ID NO: 2203791 - RNA, 19 nt, Artificial Sequence
  Description of Artificial Sequence: Synthetic oligonucleotide
  Antisense strand to SEQ ID NO: 2203790
uugcuuccacacuauugca

SEQ ID NO: 2203792 - RNA, 19 nt, Artificial Sequence
  Description of Artificial Sequence: Synthetic oligonucleotide
  Sense strand starting at position 2568 of SEQ ID NO: 1883600
gacagcagugguggaaauu

SEQ ID NO: 2203793 - RNA, 19 nt, Artificial Sequence
  Description of Artificial Sequence: Synthetic oligonucleotide
  Antisense strand to SEQ ID NO: 2203792
aauuuccaccacugcuguc

SEQ ID NO: 2203794 - RNA, 19 nt, Artificial Sequence
  Description of Artificial Sequence: Synthetic oligonucleotide
  Sense strand starting at position 1060 of SEQ ID NO: 1883600
aguauaugucaucagcuca

SEQ ID NO: 2203795 - RNA, 19 nt, Artificial Sequence
  Description of Artificial Sequence: Synthetic oligonucleotide
  Antisense strand to SEQ ID NO: 2203794
ugagcugaugacauauacu

SEQ ID NO: 2203796 - RNA, 19 nt, Artificial Sequence
  Description of Artificial Sequence: Synthetic oligonucleotide
  Sense strand starting at position 803 of SEQ ID NO: 1883600
augugauguuucuuugaaa

SEQ ID NO: 2203797 - RNA, 19 nt, Artificial Sequence
  Description of Artificial Sequence: Synthetic oligonucleotide
  Antisense strand to SEQ ID NO: 2203796
uuucaaagaaacaucacau

SEQ ID NO: 2203798 - RNA, 19 nt, Artificial Sequence
  Description of Artificial Sequence: Synthetic oligonucleotide
  Sense strand starting at position 1797 of SEQ ID NO: 1883600
aucuuuaagugucuuagga

SEQ ID NO: 2203799 - RNA, 19 nt, Artificial Sequence
  Description of Artificial Sequence: Synthetic oligonucleotide
  Antisense strand to SEQ ID NO: 2203798
uccuaagacacuuaaagau

SEQ ID NO: 2203800 - RNA, 19 nt, Artificial Sequence
  Description of Artificial Sequence: Synthetic oligonucleotide
  Sense strand starting at position 704 of SEQ ID NO: 1883600
ucuccauggugauucugau

SEQ ID NO: 2203801 - RNA, 19 nt, Artificial Sequence
  Description of Artificial Sequence: Synthetic oligonucleotide
  Antisense strand to SEQ ID NO: 2203800
aucagaaucaccauggaga

SEQ ID NO: 2203802 - RNA, 19 nt, Artificial Sequence
  Description of Artificial Sequence: Synthetic oligonucleotide
  Sense strand starting at position 603 of SEQ ID NO: 1883600
agucuuagaaguugucaag

SEQ ID NO: 2203803 - RNA, 19 nt, Artificial Sequence
  Description of Artificial Sequence: Synthetic oligonucleotide
  Antisense strand to SEQ ID NO: 2203802
cuugacaacuucuaagacu

SEQ ID NO: 2203804 - RNA, 19 nt, Artificial Sequence
  Description of Artificial Sequence: Synthetic oligonucleotide
  Sense strand starting at position 3436 of SEQ ID NO: 1883600
uguguuuaucaggaugcac

SEQ ID NO: 2203805 - RNA, 19 nt, Artificial Sequence
  Description of Artificial Sequence: Synthetic oligonucleotide
  Antisense strand to SEQ ID NO: 2203804
gugcauccugauaaacaca

SEQ ID NO: 2203806 - RNA, 19 nt, Artificial Sequence
  Description of Artificial Sequence: Synthetic oligonucleotide
  Sense strand starting at position 1866 of SEQ ID NO: 1883600
cuugaaguuucuguaauua

SEQ ID NO: 2203807 - RNA, 19 nt, Artificial Sequence
  Description of Artificial Sequence: Synthetic oligonucleotide
  Antisense strand to SEQ ID NO: 2203806
uaauuacagaaacuucaag

SEQ ID NO: 2203808 - RNA, 19 nt, Artificial Sequence
  Description of Artificial Sequence: Synthetic oligonucleotide
  Sense strand starting at position 2669 of SEQ ID NO: 1883600
auguuaaaguuccuuuaug

SEQ ID NO: 2203809 - RNA, 19 nt, Artificial Sequence
  Description of Artificial Sequence: Synthetic oligonucleotide
  Antisense strand to SEQ ID NO: 2203808
cauaaaggaacuuuaacau

SEQ ID NO: 2203810 - RNA, 19 nt, Artificial Sequence
  Description of Artificial Sequence: Synthetic oligonucleotide
  Sense strand starting at position 202 of SEQ ID NO: 1883600
ugagauacauuggaagaga

SEQ ID NO: 2203811 - RNA, 19 nt, Artificial Sequence
  Description of Artificial Sequence: Synthetic oligonucleotide
  Antisense strand to SEQ ID NO: 2203810
ucucuuccaauguaucuca

SEQ ID NO: 2203812 - RNA, 19 nt, Artificial Sequence
  Description of Artificial Sequence: Synthetic oligonucleotide
  Sense strand starting at position 2370 of SEQ ID NO: 1883601
cagagaaguugaucucaua

SEQ ID NO: 2203813 - RNA, 19 nt, Artificial Sequence
  Description of Artificial Sequence: Synthetic oligonucleotide
  Antisense strand to SEQ ID NO: 2203812
uaugagaucaacuucucug

SEQ ID NO: 2203814 - RNA, 19 nt, Artificial Sequence
  Description of Artificial Sequence: Synthetic oligonucleotide
  Sense strand starting at position 1693 of SEQ ID NO: 1883601
uauuauuugugugcugaga

SEQ ID NO: 2203815 - RNA, 19 nt, Artificial Sequence
  Description of Artificial Sequence: Synthetic oligonucleotide
  Antisense strand to SEQ ID NO: 2203814
ucucagcacacaaauaaua

SEQ ID NO: 2203816 - RNA, 19 nt, Artificial Sequence
  Description of Artificial Sequence: Synthetic oligonucleotide
  Sense strand starting at position 2832 of SEQ ID NO: 1883601
auaucagggucauugggau

SEQ ID NO: 2203817 - RNA, 19 nt, Artificial Sequence
  Description of Artificial Sequence: Synthetic oligonucleotide
  Antisense strand to SEQ ID NO: 2203816
aucccaaugacccugauau

SEQ ID NO: 2203818 - RNA, 19 nt, Artificial Sequence
  Description of Artificial Sequence: Synthetic oligonucleotide
  Sense strand starting at position 2863 of SEQ ID NO: 1883601
auuuaucauuugugaugga

SEQ ID NO: 2203819 - RNA, 19 nt, Artificial Sequence
  Description of Artificial Sequence: Synthetic oligonucleotide
  Antisense strand to SEQ ID NO: 2203818
uccaucacaaaugauaaau

SEQ ID NO: 2203820 - RNA, 19 nt, Artificial Sequence
  Description of Artificial Sequence: Synthetic oligonucleotide
  Sense strand starting at position 2420 of SEQ ID NO: 1883601
gcuagagugauuggaggaa

SEQ ID NO: 2203821 - RNA, 19 nt, Artificial Sequence
  Description of Artificial Sequence: Synthetic oligonucleotide
  Antisense strand to SEQ ID NO: 2203820
uuccuccaaucacucuagc

SEQ ID NO: 2203822 - RNA, 19 nt, Artificial Sequence
  Description of Artificial Sequence: Synthetic oligonucleotide
  Sense strand starting at position 1523 of SEQ ID NO: 1883601
ucuacugaugauggguaua

SEQ ID NO: 2203823 - RNA, 19 nt, Artificial Sequence
  Description of Artificial Sequence: Synthetic oligonucleotide
  Antisense strand to SEQ ID NO: 2203822
uauacccaucaucaguaga

SEQ ID NO: 2203824 - RNA, 19 nt, Artificial Sequence
  Description of Artificial Sequence: Synthetic oligonucleotide
  Sense strand starting at position 2765 of SEQ ID NO: 1883601
auuacuauagcauagucau

SEQ ID NO: 2203825 - RNA, 19 nt, Artificial Sequence
  Description of Artificial Sequence: Synthetic oligonucleotide
  Antisense strand to SEQ ID NO: 2203824
augacuaugcuauaguaau

SEQ ID NO: 2203826 - RNA, 19 nt, Artificial Sequence
  Description of Artificial Sequence: Synthetic oligonucleotide
  Sense strand starting at position 1912 of SEQ ID NO: 1883601
ggugaaaccucuccacuaa

SEQ ID NO: 2203827 - RNA, 19 nt, Artificial Sequence
  Description of Artificial Sequence: Synthetic oligonucleotide
  Antisense strand to SEQ ID NO: 2203826
uuaguggagagguuucacc

SEQ ID NO: 2203828 - RNA, 19 nt, Artificial Sequence
  Description of Artificial Sequence: Synthetic oligonucleotide
  Sense strand starting at position 457 of SEQ ID NO: 1883601
ugugaaagaguuuaaguuu

SEQ ID NO: 2203829 - RNA, 19 nt, Artificial Sequence
  Description of Artificial Sequence: Synthetic oligonucleotide
  Antisense strand to SEQ ID NO: 2203828
aaacuuaaacucuuucaca

SEQ ID NO: 2203830 - RNA, 19 nt, Artificial Sequence
  Description of Artificial Sequence: Synthetic oligonucleotide
  Sense strand starting at position 1692 of SEQ ID NO: 1883601
uuauuauuugugugcugag

SEQ ID NO: 2203831 - RNA, 19 nt, Artificial Sequence
  Description of Artificial Sequence: Synthetic oligonucleotide
  Antisense strand to SEQ ID NO: 2203830
cucagcacacaaauaauaa

SEQ ID NO: 2203832 - RNA, 19 nt, Artificial Sequence
  Description of Artificial Sequence: Synthetic oligonucleotide
  Sense strand starting at position 2296 of SEQ ID NO: 1883601
ugggcauuagguuaaguaa

SEQ ID NO: 2203833 - RNA, 19 nt, Artificial Sequence
  Description of Artificial Sequence: Synthetic oligonucleotide
  Antisense strand to SEQ ID NO: 2203832
uuacuuaaccuaaugccca

SEQ ID NO: 2203834 - RNA, 19 nt, Artificial Sequence
  Description of Artificial Sequence: Synthetic oligonucleotide
  Sense strand starting at position 2506 of SEQ ID NO: 1883601
agcuuuauuguauaacaug

SEQ ID NO: 2203835 - RNA, 19 nt, Artificial Sequence
  Description of Artificial Sequence: Synthetic oligonucleotide
  Antisense strand to SEQ ID NO: 2203834
cauguuauacaauaaagcu

SEQ ID NO: 2203836 - RNA, 19 nt, Artificial Sequence
  Description of Artificial Sequence: Synthetic oligonucleotide
  Sense strand starting at position 77 of SEQ ID NO: 1883601
uuaugauucuaacuaggug

SEQ ID NO: 2203837 - RNA, 19 nt, Artificial Sequence
  Description of Artificial Sequence: Synthetic oligonucleotide
  Antisense strand to SEQ ID NO: 2203836
caccuaguuagaaucauaa

SEQ ID NO: 2203838 - RNA, 19 nt, Artificial Sequence
  Description of Artificial Sequence: Synthetic oligonucleotide
  Sense strand starting at position 2362 of SEQ ID NO: 1883601
guggcauccagagaaguug

SEQ ID NO: 2203839 - RNA, 19 nt, Artificial Sequence
  Description of Artificial Sequence: Synthetic oligonucleotide
  Antisense strand to SEQ ID NO: 2203838
caacuucucuggaugccac

SEQ ID NO: 2203840 - RNA, 19 nt, Artificial Sequence
  Description of Artificial Sequence: Synthetic oligonucleotide
  Sense strand starting at position 84 of SEQ ID NO: 1883601
ucuaacuaggugugaaaua

SEQ ID NO: 2203841 - RNA, 19 nt, Artificial Sequence
  Description of Artificial Sequence: Synthetic oligonucleotide
  Antisense strand to SEQ ID NO: 2203840
uauuucacaccuaguuaga

SEQ ID NO: 2203842 - RNA, 19 nt, Artificial Sequence
  Description of Artificial Sequence: Synthetic oligonucleotide
  Sense strand starting at position 273 of SEQ ID NO: 1883601
auaauaagcuagccuagaa

SEQ ID NO: 2203843 - RNA, 19 nt, Artificial Sequence
  Description of Artificial Sequence: Synthetic oligonucleotide
  Antisense strand to SEQ ID NO: 2203842
uucuaggcuagcuuauuau

SEQ ID NO: 2203844 - RNA, 19 nt, Artificial Sequence
  Description of Artificial Sequence: Synthetic oligonucleotide
  Sense strand starting at position 81 of SEQ ID NO: 1883601
gauucuaacuaggugugaa

SEQ ID NO: 2203845 - RNA, 19 nt, Artificial Sequence
  Description of Artificial Sequence: Synthetic oligonucleotide
  Antisense strand to SEQ ID NO: 2203844
uucacaccuaguuagaauc

SEQ ID NO: 2203846 - RNA, 19 nt, Artificial Sequence
  Description of Artificial Sequence: Synthetic oligonucleotide
  Sense strand starting at position 2827 of SEQ ID NO: 1883601
ugaucauaucagggucauu

SEQ ID NO: 2203847 - RNA, 19 nt, Artificial Sequence
  Description of Artificial Sequence: Synthetic oligonucleotide
  Antisense strand to SEQ ID NO: 2203846
aaugacccugauaugauca

SEQ ID NO: 2203848 - RNA, 19 nt, Artificial Sequence
  Description of Artificial Sequence: Synthetic oligonucleotide
  Sense strand starting at position 424 of SEQ ID NO: 1883601
ggcuuacuaccagaguuau

SEQ ID NO: 2203849 - RNA, 19 nt, Artificial Sequence
  Description of Artificial Sequence: Synthetic oligonucleotide
  Antisense strand to SEQ ID NO: 2203848
auaacucugguaguaagcc

SEQ ID NO: 2203850 - RNA, 19 nt, Artificial Sequence
  Description of Artificial Sequence: Synthetic oligonucleotide
  Sense strand starting at position 1528 of SEQ ID NO: 1883601
ugaugauggguauaugugu

SEQ ID NO: 2203851 - RNA, 19 nt, Artificial Sequence
  Description of Artificial Sequence: Synthetic oligonucleotide
  Antisense strand to SEQ ID NO: 2203850
acacauauacccaucauca

SEQ ID NO: 2203852 - RNA, 19 nt, Artificial Sequence
  Description of Artificial Sequence: Synthetic oligonucleotide
  Sense strand starting at position 3767 of SEQ ID NO: 1883601
agauaacuguuagcauaua

SEQ ID NO: 2203853 - RNA, 19 nt, Artificial Sequence
  Description of Artificial Sequence: Synthetic oligonucleotide
  Antisense strand to SEQ ID NO: 2203852
uauaugcuaacaguuaucu

SEQ ID NO: 2203854 - RNA, 19 nt, Artificial Sequence
  Description of Artificial Sequence: Synthetic oligonucleotide
  Sense strand starting at position 436 of SEQ ID NO: 1883601
gaguuauacuagccugaaa

SEQ ID NO: 2203855 - RNA, 19 nt, Artificial Sequence
  Description of Artificial Sequence: Synthetic oligonucleotide
  Antisense strand to SEQ ID NO: 2203854
uuucaggcuaguauaacuc

SEQ ID NO: 2203856 - RNA, 19 nt, Artificial Sequence
  Description of Artificial Sequence: Synthetic oligonucleotide
  Sense strand starting at position 3493 of SEQ ID NO: 1883601
uucccugaagaauguuauu

SEQ ID NO: 2203857 - RNA, 19 nt, Artificial Sequence
  Description of Artificial Sequence: Synthetic oligonucleotide
  Antisense strand to SEQ ID NO: 2203856
aauaacauucuucagggaa

SEQ ID NO: 2203858 - RNA, 19 nt, Artificial Sequence
  Description of Artificial Sequence: Synthetic oligonucleotide
  Sense strand starting at position 3698 of SEQ ID NO: 1883601
uugaacugauucuuagguu

SEQ ID NO: 2203859 - RNA, 19 nt, Artificial Sequence
  Description of Artificial Sequence: Synthetic oligonucleotide
  Antisense strand to SEQ ID NO: 2203858
aaccuaagaaucaguucaa

SEQ ID NO: 2203860 - RNA, 19 nt, Artificial Sequence
  Description of Artificial Sequence: Synthetic oligonucleotide
  Sense strand starting at position 3982 of SEQ ID NO: 1883601
uucguuguugaauaacaau

SEQ ID NO: 2203861 - RNA, 19 nt, Artificial Sequence
  Description of Artificial Sequence: Synthetic oligonucleotide
  Antisense strand to SEQ ID NO: 2203860
auuguuauucaacaacgaa

SEQ ID NO: 2203862 - RNA, 19 nt, Artificial Sequence
  Description of Artificial Sequence: Synthetic oligonucleotide
  Sense strand starting at position 49 of SEQ ID NO: 1883601
aucaauuucugucagagaa

SEQ ID NO: 2203863 - RNA, 19 nt, Artificial Sequence
  Description of Artificial Sequence: Synthetic oligonucleotide
  Antisense strand to SEQ ID NO: 2203862
uucucugacagaaauugau

SEQ ID NO: 2203864 - RNA, 19 nt, Artificial Sequence
  Description of Artificial Sequence: Synthetic oligonucleotide
  Sense strand starting at position 3407 of SEQ ID NO: 1883601
agaucacuguuagcauaua

SEQ ID NO: 2203865 - RNA, 19 nt, Artificial Sequence
  Description of Artificial Sequence: Synthetic oligonucleotide
  Antisense strand to SEQ ID NO: 2203864
uauaugcuaacagugaucu

SEQ ID NO: 2203866 - RNA, 19 nt, Artificial Sequence
  Description of Artificial Sequence: Synthetic oligonucleotide
  Sense strand starting at position 1691 of SEQ ID NO: 1883601
guuauuauuugugugcuga

SEQ ID NO: 2203867 - RNA, 19 nt, Artificial Sequence
  Description of Artificial Sequence: Synthetic oligonucleotide
  Antisense strand to SEQ ID NO: 2203866
ucagcacacaaauaauaac

SEQ ID NO: 2203868 - RNA, 19 nt, Artificial Sequence
  Description of Artificial Sequence: Synthetic oligonucleotide
  Sense strand starting at position 460 of SEQ ID NO: 1883601
gaaagaguuuaaguuuggu

SEQ ID NO: 2203869 - RNA, 19 nt, Artificial Sequence
  Description of Artificial Sequence: Synthetic oligonucleotide
  Antisense strand to SEQ ID NO: 2203868
accaaacuuaaacucuuuc

SEQ ID NO: 2203870 - RNA, 19 nt, Artificial Sequence
  Description of Artificial Sequence: Synthetic oligonucleotide
  Sense strand starting at position 80 of SEQ ID NO: 1883601
ugauucuaacuagguguga

SEQ ID NO: 2203871 - RNA, 19 nt, Artificial Sequence
  Description of Artificial Sequence: Synthetic oligonucleotide
  Antisense strand to SEQ ID NO: 2203870
ucacaccuaguuagaauca

SEQ ID NO: 2203872 - RNA, 19 nt, Artificial Sequence
  Description of Artificial Sequence: Synthetic oligonucleotide
  Sense strand starting at position 2517 of SEQ ID NO: 1883601
auaacauggucccuauagu

SEQ ID NO: 2203873 - RNA, 19 nt, Artificial Sequence
  Description of Artificial Sequence: Synthetic oligonucleotide
  Antisense strand to SEQ ID NO: 2203872
acuauagggaccauguuau

SEQ ID NO: 2203874 - RNA, 19 nt, Artificial Sequence
  Description of Artificial Sequence: Synthetic oligonucleotide
  Sense strand starting at position 1701 of SEQ ID NO: 1883601
gugugcugagaacaguuaa

SEQ ID NO: 2203875 - RNA, 19 nt, Artificial Sequence
  Description of Artificial Sequence: Synthetic oligonucleotide
  Antisense strand to SEQ ID NO: 2203874
uuaacuguucucagcacac

SEQ ID NO: 2203876 - RNA, 19 nt, Artificial Sequence
  Description of Artificial Sequence: Synthetic oligonucleotide
  Sense strand starting at position 3402 of SEQ ID NO: 1883601
cagauagaucacuguuagc

SEQ ID NO: 2203877 - RNA, 19 nt, Artificial Sequence
  Description of Artificial Sequence: Synthetic oligonucleotide
  Antisense strand to SEQ ID NO: 2203876
gcuaacagugaucuaucug

SEQ ID NO: 2203878 - RNA, 19 nt, Artificial Sequence
  Description of Artificial Sequence: Synthetic oligonucleotide
  Sense strand starting at position 2533 of SEQ ID NO: 1883601
aguuaaugacgauguauua

SEQ ID NO: 2203879 - RNA, 19 nt, Artificial Sequence
  Description of Artificial Sequence: Synthetic oligonucleotide
  Antisense strand to SEQ ID NO: 2203878
uaauacaucgucauuaacu

SEQ ID NO: 2203880 - RNA, 19 nt, Artificial Sequence
  Description of Artificial Sequence: Synthetic oligonucleotide
  Sense strand starting at position 157 of SEQ ID NO: 1883601
uuguuuauugagcaauagu

SEQ ID NO: 2203881 - RNA, 19 nt, Artificial Sequence
  Description of Artificial Sequence: Synthetic oligonucleotide
  Antisense strand to SEQ ID NO: 2203880
acuauugcucaauaaacaa

SEQ ID NO: 2203882 - RNA, 19 nt, Artificial Sequence
  Description of Artificial Sequence: Synthetic oligonucleotide
  Sense strand starting at position 2105 of SEQ ID NO: 1883601
gagguaucugaaugcccau

SEQ ID NO: 2203883 - RNA, 19 nt, Artificial Sequence
  Description of Artificial Sequence: Synthetic oligonucleotide
  Antisense strand to SEQ ID NO: 2203882
augggcauucagauaccuc

SEQ ID NO: 2203884 - RNA, 19 nt, Artificial Sequence
  Description of Artificial Sequence: Synthetic oligonucleotide
  Sense strand starting at position 2501 of SEQ ID NO: 1883601
ucaagagcuuuauuguaua

SEQ ID NO: 2203885 - RNA, 19 nt, Artificial Sequence
  Description of Artificial Sequence: Synthetic oligonucleotide
  Antisense strand to SEQ ID NO: 2203884
uauacaauaaagcucuuga

SEQ ID NO: 2203886 - RNA, 19 nt, Artificial Sequence
  Description of Artificial Sequence: Synthetic oligonucleotide
  Sense strand starting at position 2864 of SEQ ID NO: 1883601
uuuaucauuugugauggaa

SEQ ID NO: 2203887 - RNA, 19 nt, Artificial Sequence
  Description of Artificial Sequence: Synthetic oligonucleotide
  Antisense strand to SEQ ID NO: 2203886
uuccaucacaaaugauaaa

SEQ ID NO: 2203888 - RNA, 19 nt, Artificial Sequence
  Description of Artificial Sequence: Synthetic oligonucleotide
  Sense strand starting at position 3180 of SEQ ID NO: 1883601
acucauguuucuguaaaug

SEQ ID NO: 2203889 - RNA, 19 nt, Artificial Sequence
  Description of Artificial Sequence: Synthetic oligonucleotide
  Antisense strand to SEQ ID NO: 2203888
cauuuacagaaacaugagu

SEQ ID NO: 2203890 - RNA, 19 nt, Artificial Sequence
  Description of Artificial Sequence: Synthetic oligonucleotide
  Sense strand starting at position 2514 of SEQ ID NO: 1883601
uguauaacauggucccuau

SEQ ID NO: 2203891 - RNA, 19 nt, Artificial Sequence
  Description of Artificial Sequence: Synthetic oligonucleotide
  Antisense strand to SEQ ID NO: 2203890
auagggaccauguuauaca

SEQ ID NO: 2203892 - RNA, 19 nt, Artificial Sequence
  Description of Artificial Sequence: Synthetic oligonucleotide
  Sense strand starting at position 2722 of SEQ ID NO: 1883602
ggauuccuuccagaaaugc

SEQ ID NO: 2203893 - RNA, 19 nt, Artificial Sequence
  Description of Artificial Sequence: Synthetic oligonucleotide
  Antisense strand to SEQ ID NO: 2203892
gcauuucuggaaggaaucc

SEQ ID NO: 2203894 - RNA, 19 nt, Artificial Sequence
  Description of Artificial Sequence: Synthetic oligonucleotide
  Sense strand starting at position 3319 of SEQ ID NO: 1883602
ugcuaugugcuuguguaag

SEQ ID NO: 2203895 - RNA, 19 nt, Artificial Sequence
  Description of Artificial Sequence: Synthetic oligonucleotide
  Antisense strand to SEQ ID NO: 2203894
cuuacacaagcacauagca

SEQ ID NO: 2203896 - RNA, 19 nt, Artificial Sequence
  Description of Artificial Sequence: Synthetic oligonucleotide
  Sense strand starting at position 3979 of SEQ ID NO: 1883602
caauaaguugugggacaau

SEQ ID NO: 2203897 - RNA, 19 nt, Artificial Sequence
  Description of Artificial Sequence: Synthetic oligonucleotide
  Antisense strand to SEQ ID NO: 2203896
auugucccacaacuuauug

SEQ ID NO: 2203898 - RNA, 19 nt, Artificial Sequence
  Description of Artificial Sequence: Synthetic oligonucleotide
  Sense strand starting at position 3761 of SEQ ID NO: 1883602
aagaaagcaugaguauagu

SEQ ID NO: 2203899 - RNA, 19 nt, Artificial Sequence
  Description of Artificial Sequence: Synthetic oligonucleotide
  Antisense strand to SEQ ID NO: 2203898
acuauacucaugcuuucuu

SEQ ID NO: 2203900 - RNA, 19 nt, Artificial Sequence
  Description of Artificial Sequence: Synthetic oligonucleotide
  Sense strand starting at position 3769 of SEQ ID NO: 1883602
augaguauagucgggagaa

SEQ ID NO: 2203901 - RNA, 19 nt, Artificial Sequence
  Description of Artificial Sequence: Synthetic oligonucleotide
  Antisense strand to SEQ ID NO: 2203900
uucucccgacuauacucau

SEQ ID NO: 2203902 - RNA, 19 nt, Artificial Sequence
  Description of Artificial Sequence: Synthetic oligonucleotide
  Sense strand starting at position 94 of SEQ ID NO: 1883602
gcaguauacauauacgaug

SEQ ID NO: 2203903 - RNA, 19 nt, Artificial Sequence
  Description of Artificial Sequence: Synthetic oligonucleotide
  Antisense strand to SEQ ID NO: 2203902
caucguauauguauacugc

SEQ ID NO: 2203904 - RNA, 19 nt, Artificial Sequence
  Description of Artificial Sequence: Synthetic oligonucleotide
  Sense strand starting at position 1281 of SEQ ID NO: 1883602
ucauuauaugcccagguua

SEQ ID NO: 2203905 - RNA, 19 nt, Artificial Sequence
  Description of Artificial Sequence: Synthetic oligonucleotide
  Antisense strand to SEQ ID NO: 2203904
uaaccugggcauauaauga

SEQ ID NO: 2203906 - RNA, 19 nt, Artificial Sequence
  Description of Artificial Sequence: Synthetic oligonucleotide
  Sense strand starting at position 1270 of SEQ ID NO: 1883602
guucucuagcaucauuaua

SEQ ID NO: 2203907 - RNA, 19 nt, Artificial Sequence
  Description of Artificial Sequence: Synthetic oligonucleotide
  Antisense strand to SEQ ID NO: 2203906
uauaaugaugcuagagaac

SEQ ID NO: 2203908 - RNA, 19 nt, Artificial Sequence
  Description of Artificial Sequence: Synthetic oligonucleotide
  Sense strand starting at position 3975 of SEQ ID NO: 1883602
gcaucaauaaguuguggga

SEQ ID NO: 2203909 - RNA, 19 nt, Artificial Sequence
  Description of Artificial Sequence: Synthetic oligonucleotide
  Antisense strand to SEQ ID NO: 2203908
ucccacaacuuauugaugc

SEQ ID NO: 2203910 - RNA, 19 nt, Artificial Sequence
  Description of Artificial Sequence: Synthetic oligonucleotide
  Sense strand starting at position 1283 of SEQ ID NO: 1883602
auuauaugcccagguuaua

SEQ ID NO: 2203911 - RNA, 19 nt, Artificial Sequence
  Description of Artificial Sequence: Synthetic oligonucleotide
  Antisense strand to SEQ ID NO: 2203910
uauaaccugggcauauaau

SEQ ID NO: 2203912 - RNA, 19 nt, Artificial Sequence
  Description of Artificial Sequence: Synthetic oligonucleotide
  Sense strand starting at position 2825 of SEQ ID NO: 1883602
guauaaagguguuucucua

SEQ ID NO: 2203913 - RNA, 19 nt, Artificial Sequence
  Description of Artificial Sequence: Synthetic oligonucleotide
  Antisense strand to SEQ ID NO: 2203912
uagagaaacaccuuuauac

SEQ ID NO: 2203914 - RNA, 19 nt, Artificial Sequence
  Description of Artificial Sequence: Synthetic oligonucleotide
  Sense strand starting at position 1264 of SEQ ID NO: 1883602
uuguaaguucucuagcauc

SEQ ID NO: 2203915 - RNA, 19 nt, Artificial Sequence
  Description of Artificial Sequence: Synthetic oligonucleotide
  Antisense strand to SEQ ID NO: 2203914
gaugcuagagaacuuacaa

SEQ ID NO: 2203916 - RNA, 19 nt, Artificial Sequence
  Description of Artificial Sequence: Synthetic oligonucleotide
  Sense strand starting at position 1262 of SEQ ID NO: 1883602
gauuguaaguucucuagca

SEQ ID NO: 2203917 - RNA, 19 nt, Artificial Sequence
  Description of Artificial Sequence: Synthetic oligonucleotide
  Antisense strand to SEQ ID NO: 2203916
ugcuagagaacuuacaauc

SEQ ID NO: 2203918 - RNA, 19 nt, Artificial Sequence
  Description of Artificial Sequence: Synthetic oligonucleotide
  Sense strand starting at position 1711 of SEQ ID NO: 1883602
guaccucucccguaucacu

SEQ ID NO: 2203919 - RNA, 19 nt, Artificial Sequence
  Description of Artificial Sequence: Synthetic oligonucleotide
  Antisense strand to SEQ ID NO: 2203918
agugauacgggagagguac

SEQ ID NO: 2203920 - RNA, 19 nt, Artificial Sequence
  Description of Artificial Sequence: Synthetic oligonucleotide
  Sense strand starting at position 1263 of SEQ ID NO: 1883602
auuguaaguucucuagcau

SEQ ID NO: 2203921 - RNA, 19 nt, Artificial Sequence
  Description of Artificial Sequence: Synthetic oligonucleotide
  Antisense strand to SEQ ID NO: 2203920
augcuagagaacuuacaau

SEQ ID NO: 2203922 - RNA, 19 nt, Artificial Sequence
  Description of Artificial Sequence: Synthetic oligonucleotide
  Sense strand starting at position 3082 of SEQ ID NO: 1883602
gugagaugagccugcaagu

SEQ ID NO: 2203923 - RNA, 19 nt, Artificial Sequence
  Description of Artificial Sequence: Synthetic oligonucleotide
  Antisense strand to SEQ ID NO: 2203922
acuugcaggcucaucucac

SEQ ID NO: 2203924 - RNA, 19 nt, Artificial Sequence
  Description of Artificial Sequence: Synthetic oligonucleotide
  Sense strand starting at position 2576 of SEQ ID NO: 1883602
gcaggccaaucuuugugau

SEQ ID NO: 2203925 - RNA, 19 nt, Artificial Sequence
  Description of Artificial Sequence: Synthetic oligonucleotide
  Antisense strand to SEQ ID NO: 2203924
aucacaaagauuggccugc

SEQ ID NO: 2203926 - RNA, 19 nt, Artificial Sequence
  Description of Artificial Sequence: Synthetic oligonucleotide
  Sense strand starting at position 3321 of SEQ ID NO: 1883602
cuaugugcuuguguaagga

SEQ ID NO: 2203927 - RNA, 19 nt, Artificial Sequence
  Description of Artificial Sequence: Synthetic oligonucleotide
  Antisense strand to SEQ ID NO: 2203926
uccuuacacaagcacauag

SEQ ID NO: 2203928 - RNA, 19 nt, Artificial Sequence
  Description of Artificial Sequence: Synthetic oligonucleotide
  Sense strand starting at position 3233 of SEQ ID NO: 1883602
gaggcaaaguaucagagaa

SEQ ID NO: 2203929 - RNA, 19 nt, Artificial Sequence
  Description of Artificial Sequence: Synthetic oligonucleotide
  Antisense strand to SEQ ID NO: 2203928
uucucugauacuuugccuc

SEQ ID NO: 2203930 - RNA, 19 nt, Artificial Sequence
  Description of Artificial Sequence: Synthetic oligonucleotide
  Sense strand starting at position 1555 of SEQ ID NO: 1883602
ccugcaauguucuuugcaa

SEQ ID NO: 2203931 - RNA, 19 nt, Artificial Sequence
  Description of Artificial Sequence: Synthetic oligonucleotide
  Antisense strand to SEQ ID NO: 2203930
uugcaaagaacauugcagg

SEQ ID NO: 2203932 - RNA, 19 nt, Artificial Sequence
  Description of Artificial Sequence: Synthetic oligonucleotide
  Sense strand starting at position 3574 of SEQ ID NO: 1883602
guguacaaugucuggcauu

SEQ ID NO: 2203933 - RNA, 19 nt, Artificial Sequence
  Description of Artificial Sequence: Synthetic oligonucleotide
  Antisense strand to SEQ ID NO: 2203932
aaugccagacauuguacac

SEQ ID NO: 2203934 - RNA, 19 nt, Artificial Sequence
  Description of Artificial Sequence: Synthetic oligonucleotide
  Sense strand starting at position 2497 of SEQ ID NO: 1883602
ccuuuaaauugucaaagag

SEQ ID NO: 2203935 - RNA, 19 nt, Artificial Sequence
  Description of Artificial Sequence: Synthetic oligonucleotide
  Antisense strand to SEQ ID NO: 2203934
cucuuugacaauuuaaagg

SEQ ID NO: 2203936 - RNA, 19 nt, Artificial Sequence
  Description of Artificial Sequence: Synthetic oligonucleotide
  Sense strand starting at position 97 of SEQ ID NO: 1883602
guauacauauacgauggaa

SEQ ID NO: 2203937 - RNA, 19 nt, Artificial Sequence
  Description of Artificial Sequence: Synthetic oligonucleotide
  Antisense strand to SEQ ID NO: 2203936
uuccaucguauauguauac

SEQ ID NO: 2203938 - RNA, 19 nt, Artificial Sequence
  Description of Artificial Sequence: Synthetic oligonucleotide
  Sense strand starting at position 1145 of SEQ ID NO: 1883602
guaucacucuuacaugaga

SEQ ID NO: 2203939 - RNA, 19 nt, Artificial Sequence
  Description of Artificial Sequence: Synthetic oligonucleotide
  Antisense strand to SEQ ID NO: 2203938
ucucauguaagagugauac

SEQ ID NO: 2203940 - RNA, 19 nt, Artificial Sequence
  Description of Artificial Sequence: Synthetic oligonucleotide
  Sense strand starting at position 3312 of SEQ ID NO: 1883602
ugaguacugcuaugugcuu

SEQ ID NO: 2203941 - RNA, 19 nt, Artificial Sequence
  Description of Artificial Sequence: Synthetic oligonucleotide
  Antisense strand to SEQ ID NO: 2203940
aagcacauagcaguacuca

SEQ ID NO: 2203942 - RNA, 19 nt, Artificial Sequence
  Description of Artificial Sequence: Synthetic oligonucleotide
  Sense strand starting at position 2430 of SEQ ID NO: 1883602
agggcauugugggacaacu

SEQ ID NO: 2203943 - RNA, 19 nt, Artificial Sequence
  Description of Artificial Sequence: Synthetic oligonucleotide
  Antisense strand to SEQ ID NO: 2203942
aguugucccacaaugcccu

SEQ ID NO: 2203944 - RNA, 19 nt, Artificial Sequence
  Description of Artificial Sequence: Synthetic oligonucleotide
  Sense strand starting at position 3317 of SEQ ID NO: 1883602
acugcuaugugcuugugua

SEQ ID NO: 2203945 - RNA, 19 nt, Artificial Sequence
  Description of Artificial Sequence: Synthetic oligonucleotide
  Antisense strand to SEQ ID NO: 2203944
uacacaagcacauagcagu

SEQ ID NO: 2203946 - RNA, 19 nt, Artificial Sequence
  Description of Artificial Sequence: Synthetic oligonucleotide
  Sense strand starting at position 3978 of SEQ ID NO: 1883602
ucaauaaguugugggacaa

SEQ ID NO: 2203947 - RNA, 19 nt, Artificial Sequence
  Description of Artificial Sequence: Synthetic oligonucleotide
  Antisense strand to SEQ ID NO: 2203946
uugucccacaacuuauuga

SEQ ID NO: 2203948 - RNA, 19 nt, Artificial Sequence
  Description of Artificial Sequence: Synthetic oligonucleotide
  Sense strand starting at position 3977 of SEQ ID NO: 1883602
aucaauaaguugugggaca

SEQ ID NO: 2203949 - RNA, 19 nt, Artificial Sequence
  Description of Artificial Sequence: Synthetic oligonucleotide
  Antisense strand to SEQ ID NO: 2203948
ugucccacaacuuauugau

SEQ ID NO: 2203950 - RNA, 19 nt, Artificial Sequence
  Description of Artificial Sequence: Synthetic oligonucleotide
  Sense strand starting at position 3318 of SEQ ID NO: 1883602
cugcuaugugcuuguguaa

SEQ ID NO: 2203951 - RNA, 19 nt, Artificial Sequence
  Description of Artificial Sequence: Synthetic oligonucleotide
  Antisense strand to SEQ ID NO: 2203950
uuacacaagcacauagcag

SEQ ID NO: 2203952 - RNA, 19 nt, Artificial Sequence
  Description of Artificial Sequence: Synthetic oligonucleotide
  Sense strand starting at position 1158 of SEQ ID NO: 1883602
augagaucuuuaggcauua

SEQ ID NO: 2203953 - RNA, 19 nt, Artificial Sequence
  Description of Artificial Sequence: Synthetic oligonucleotide
  Antisense strand to SEQ ID NO: 2203952
uaaugccuaaagaucucau

SEQ ID NO: 2203954 - RNA, 19 nt, Artificial Sequence
  Description of Artificial Sequence: Synthetic oligonucleotide
  Sense strand starting at position 3770 of SEQ ID NO: 1883602
ugaguauagucgggagaaa

SEQ ID NO: 2203955 - RNA, 19 nt, Artificial Sequence
  Description of Artificial Sequence: Synthetic oligonucleotide
  Antisense strand to SEQ ID NO: 2203954
uuucucccgacuauacuca

SEQ ID NO: 2203956 - RNA, 19 nt, Artificial Sequence
  Description of Artificial Sequence: Synthetic oligonucleotide
  Sense strand starting at position 2662 of SEQ ID NO: 1883602
uuaccaucaugucagucau

SEQ ID NO: 2203957 - RNA, 19 nt, Artificial Sequence
  Description of Artificial Sequence: Synthetic oligonucleotide
  Antisense strand to SEQ ID NO: 2203956
augacugacaugaugguaa

SEQ ID NO: 2203958 - RNA, 19 nt, Artificial Sequence
  Description of Artificial Sequence: Synthetic oligonucleotide
  Sense strand starting at position 1751 of SEQ ID NO: 1883602
gcgcuucuguccugagcua

SEQ ID NO: 2203959 - RNA, 19 nt, Artificial Sequence
  Description of Artificial Sequence: Synthetic oligonucleotide
  Antisense strand to SEQ ID NO: 2203958
uagcucaggacagaagcgc

SEQ ID NO: 2203960 - RNA, 19 nt, Artificial Sequence
  Description of Artificial Sequence: Synthetic oligonucleotide
  Sense strand starting at position 2328 of SEQ ID NO: 1883603
gagggucuugauggauuga

SEQ ID NO: 2203961 - RNA, 19 nt, Artificial Sequence
  Description of Artificial Sequence: Synthetic oligonucleotide
  Antisense strand to SEQ ID NO: 2203960
ucaauccaucaagacccuc

SEQ ID NO: 2203962 - RNA, 19 nt, Artificial Sequence
  Description of Artificial Sequence: Synthetic oligonucleotide
  Sense strand starting at position 2620 of SEQ ID NO: 1883603
gagcuaucugugucugugu

SEQ ID NO: 2203963 - RNA, 19 nt, Artificial Sequence
  Description of Artificial Sequence: Synthetic oligonucleotide
  Antisense strand to SEQ ID NO: 2203962
acacagacacagauagcuc

SEQ ID NO: 2203964 - RNA, 19 nt, Artificial Sequence
  Description of Artificial Sequence: Synthetic oligonucleotide
  Sense strand starting at position 3925 of SEQ ID NO: 1883603
uuccguuucuauuucucau

SEQ ID NO: 2203965 - RNA, 19 nt, Artificial Sequence
  Description of Artificial Sequence: Synthetic oligonucleotide
  Antisense strand to SEQ ID NO: 2203964
augagaaauagaaacggaa

SEQ ID NO: 2203966 - RNA, 19 nt, Artificial Sequence
  Description of Artificial Sequence: Synthetic oligonucleotide
  Sense strand starting at position 2854 of SEQ ID NO: 1883603
gcggguccuccucagaaca

SEQ ID NO: 2203967 - RNA, 19 nt, Artificial Sequence
  Description of Artificial Sequence: Synthetic oligonucleotide
  Antisense strand to SEQ ID NO: 2203966
uguucugaggaggacccgc

SEQ ID NO: 2203968 - RNA, 19 nt, Artificial Sequence
  Description of Artificial Sequence: Synthetic oligonucleotide
  Sense strand starting at position 959 of SEQ ID NO: 1883603
cgaugacgccuggagucau

SEQ ID NO: 2203969 - RNA, 19 nt, Artificial Sequence
  Description of Artificial Sequence: Synthetic oligonucleotide
  Antisense strand to SEQ ID NO: 2203968
augacuccaggcgucaucg

SEQ ID NO: 2203970 - RNA, 19 nt, Artificial Sequence
  Description of Artificial Sequence: Synthetic oligonucleotide
  Sense strand starting at position 2607 of SEQ ID NO: 1883603
gaggucucccuuugagcua

SEQ ID NO: 2203971 - RNA, 19 nt, Artificial Sequence
  Description of Artificial Sequence: Synthetic oligonucleotide
  Antisense strand to SEQ ID NO: 2203970
uagcucaaagggagaccuc

SEQ ID NO: 2203972 - RNA, 19 nt, Artificial Sequence
  Description of Artificial Sequence: Synthetic oligonucleotide
  Sense strand starting at position 1124 of SEQ ID NO: 1883603
ugguaauagcgguaccgua

SEQ ID NO: 2203973 - RNA, 19 nt, Artificial Sequence
  Description of Artificial Sequence: Synthetic oligonucleotide
  Antisense strand to SEQ ID NO: 2203972
uacgguaccgcuauuacca

SEQ ID NO: 2203974 - RNA, 19 nt, Artificial Sequence
  Description of Artificial Sequence: Synthetic oligonucleotide
  Sense strand starting at position 2618 of SEQ ID NO: 1883603
uugagcuaucugugucugu

SEQ ID NO: 2203975 - RNA, 19 nt, Artificial Sequence
  Description of Artificial Sequence: Synthetic oligonucleotide
  Antisense strand to SEQ ID NO: 2203974
acagacacagauagcucaa

SEQ ID NO: 2203976 - RNA, 19 nt, Artificial Sequence
  Description of Artificial Sequence: Synthetic oligonucleotide
  Sense strand starting at position 1252 of SEQ ID NO: 1883603
aggaccuccuccugaagau

SEQ ID NO: 2203977 - RNA, 19 nt, Artificial Sequence
  Description of Artificial Sequence: Synthetic oligonucleotide
  Antisense strand to SEQ ID NO: 2203976
aucuucaggaggagguccu

SEQ ID NO: 2203978 - RNA, 19 nt, Artificial Sequence
  Description of Artificial Sequence: Synthetic oligonucleotide
  Sense strand starting at position 2324 of SEQ ID NO: 1883603
gugagagggucuugaugga

SEQ ID NO: 2203979 - RNA, 19 nt, Artificial Sequence
  Description of Artificial Sequence: Synthetic oligonucleotide
  Antisense strand to SEQ ID NO: 2203978
uccaucaagacccucucac

SEQ ID NO: 2203980 - RNA, 19 nt, Artificial Sequence
  Description of Artificial Sequence: Synthetic oligonucleotide
  Sense strand starting at position 808 of SEQ ID NO: 1883603
ccacauugguccugagcca

SEQ ID NO: 2203981 - RNA, 19 nt, Artificial Sequence
  Description of Artificial Sequence: Synthetic oligonucleotide
  Antisense strand to SEQ ID NO: 2203980
uggcucaggaccaaugugg

SEQ ID NO: 2203982 - RNA, 19 nt, Artificial Sequence
  Description of Artificial Sequence: Synthetic oligonucleotide
  Sense strand starting at position 2875 of SEQ ID NO: 1883603
cgacgauggugugagcauu

SEQ ID NO: 2203983 - RNA, 19 nt, Artificial Sequence
  Description of Artificial Sequence: Synthetic oligonucleotide
  Antisense strand to SEQ ID NO: 2203982
aaugcucacaccaucgucg

SEQ ID NO: 2203984 - RNA, 19 nt, Artificial Sequence
  Description of Artificial Sequence: Synthetic oligonucleotide
  Sense strand starting at position 3409 of SEQ ID NO: 1883604
cuuagcagaguuuaauaaa

SEQ ID NO: 2203985 - RNA, 19 nt, Artificial Sequence
  Description of Artificial Sequence: Synthetic oligonucleotide
  Antisense strand to SEQ ID NO: 2203984
uuuauuaaacucugcuaag

SEQ ID NO: 2203986 - RNA, 19 nt, Artificial Sequence
  Description of Artificial Sequence: Synthetic oligonucleotide
  Sense strand starting at position 1713 of SEQ ID NO: 1883604
uagauuaauuagguccaga

SEQ ID NO: 2203987 - RNA, 19 nt, Artificial Sequence
  Description of Artificial Sequence: Synthetic oligonucleotide
  Antisense strand to SEQ ID NO: 2203986
ucuggaccuaauuaaucua

SEQ ID NO: 2203988 - RNA, 19 nt, Artificial Sequence
  Description of Artificial Sequence: Synthetic oligonucleotide
  Sense strand starting at position 2633 of SEQ ID NO: 1883604
guaucuacugaguagaauu

SEQ ID NO: 2203989 - RNA, 19 nt, Artificial Sequence
  Description of Artificial Sequence: Synthetic oligonucleotide
  Antisense strand to SEQ ID NO: 2203988
aauucuacucaguagauac

SEQ ID NO: 2203990 - RNA, 19 nt, Artificial Sequence
  Description of Artificial Sequence: Synthetic oligonucleotide
  Sense strand starting at position 503 of SEQ ID NO: 1883604
gucagaauuaguggaaaca

SEQ ID NO: 2203991 - RNA, 19 nt, Artificial Sequence
  Description of Artificial Sequence: Synthetic oligonucleotide
  Antisense strand to SEQ ID NO: 2203990
uguuuccacuaauucugac

SEQ ID NO: 2203992 - RNA, 19 nt, Artificial Sequence
  Description of Artificial Sequence: Synthetic oligonucleotide
  Sense strand starting at position 524 of SEQ ID NO: 1883604
uguggaaauaugugaaaua

SEQ ID NO: 2203993 - RNA, 19 nt, Artificial Sequence
  Description of Artificial Sequence: Synthetic oligonucleotide
  Antisense strand to SEQ ID NO: 2203992
uauuucacauauuuccaca

SEQ ID NO: 2203994 - RNA, 19 nt, Artificial Sequence
  Description of Artificial Sequence: Synthetic oligonucleotide
  Sense strand starting at position 204 of SEQ ID NO: 1883604
cuauaaaugcuuggaauaa

SEQ ID NO: 2203995 - RNA, 19 nt, Artificial Sequence
  Description of Artificial Sequence: Synthetic oligonucleotide
  Antisense strand to SEQ ID NO: 2203994
uuauuccaagcauuuauag

SEQ ID NO: 2203996 - RNA, 19 nt, Artificial Sequence
  Description of Artificial Sequence: Synthetic oligonucleotide
  Sense strand starting at position 1678 of SEQ ID NO: 1883604
gcaagacucccauaagcaa

SEQ ID NO: 2203997 - RNA, 19 nt, Artificial Sequence
  Description of Artificial Sequence: Synthetic oligonucleotide
  Antisense strand to SEQ ID NO: 2203996
uugcuuaugggagucuugc

SEQ ID NO: 2203998 - RNA, 19 nt, Artificial Sequence
  Description of Artificial Sequence: Synthetic oligonucleotide
  Sense strand starting at position 2630 of SEQ ID NO: 1883604
cugguaucuacugaguaga

SEQ ID NO: 2203999 - RNA, 19 nt, Artificial Sequence
  Description of Artificial Sequence: Synthetic oligonucleotide
  Antisense strand to SEQ ID NO: 2203998
ucuacucaguagauaccag

SEQ ID NO: 2204000 - RNA, 19 nt, Artificial Sequence
  Description of Artificial Sequence: Synthetic oligonucleotide
  Sense strand starting at position 501 of SEQ ID NO: 1883604
cugucagaauuaguggaaa

SEQ ID NO: 2204001 - RNA, 19 nt, Artificial Sequence
  Description of Artificial Sequence: Synthetic oligonucleotide
  Antisense strand to SEQ ID NO: 2204000
uuuccacuaauucugacag

SEQ ID NO: 2204002 - RNA, 19 nt, Artificial Sequence
  Description of Artificial Sequence: Synthetic oligonucleotide
  Sense strand starting at position 2496 of SEQ ID NO: 1883604
auuauuaauggccagugau

SEQ ID NO: 2204003 - RNA, 19 nt, Artificial Sequence
  Description of Artificial Sequence: Synthetic oligonucleotide
  Antisense strand to SEQ ID NO: 2204002
aucacuggccauuaauaau

SEQ ID NO: 2204004 - RNA, 19 nt, Artificial Sequence
  Description of Artificial Sequence: Synthetic oligonucleotide
  Sense strand starting at position 2529 of SEQ ID NO: 1883604
uaacucugccaggauguaa

SEQ ID NO: 2204005 - RNA, 19 nt, Artificial Sequence
  Description of Artificial Sequence: Synthetic oligonucleotide
  Antisense strand to SEQ ID NO: 2204004
uuacauccuggcagaguua

SEQ ID NO: 2204006 - RNA, 19 nt, Artificial Sequence
  Description of Artificial Sequence: Synthetic oligonucleotide
  Sense strand starting at position 1133 of SEQ ID NO: 1883604
agauuuggguaauaaacca

SEQ ID NO: 2204007 - RNA, 19 nt, Artificial Sequence
  Description of Artificial Sequence: Synthetic oligonucleotide
  Antisense strand to SEQ ID NO: 2204006
ugguuuauuacccaaaucu

SEQ ID NO: 2204008 - RNA, 19 nt, Artificial Sequence
  Description of Artificial Sequence: Synthetic oligonucleotide
  Sense strand starting at position 535 of SEQ ID NO: 1883604
gugaaauaucuauagugug

SEQ ID NO: 2204009 - RNA, 19 nt, Artificial Sequence
  Description of Artificial Sequence: Synthetic oligonucleotide
  Antisense strand to SEQ ID NO: 2204008
cacacuauagauauuucac

SEQ ID NO: 2204010 - RNA, 19 nt, Artificial Sequence
  Description of Artificial Sequence: Synthetic oligonucleotide
  Sense strand starting at position 1249 of SEQ ID NO: 1883604
gcuaucuaagccuagauaa

SEQ ID NO: 2204011 - RNA, 19 nt, Artificial Sequence
  Description of Artificial Sequence: Synthetic oligonucleotide
  Antisense strand to SEQ ID NO: 2204010
uuaucuaggcuuagauagc

SEQ ID NO: 2204012 - RNA, 19 nt, Artificial Sequence
  Description of Artificial Sequence: Synthetic oligonucleotide
  Sense strand starting at position 1539 of SEQ ID NO: 1883604
ggucuuagccaauaucaua

SEQ ID NO: 2204013 - RNA, 19 nt, Artificial Sequence
  Description of Artificial Sequence: Synthetic oligonucleotide
  Antisense strand to SEQ ID NO: 2204012
uaugauauuggcuaagacc

SEQ ID NO: 2204014 - RNA, 19 nt, Artificial Sequence
  Description of Artificial Sequence: Synthetic oligonucleotide
  Sense strand starting at position 512 of SEQ ID NO: 1883604
aguggaaacaguuguggaa

SEQ ID NO: 2204015 - RNA, 19 nt, Artificial Sequence
  Description of Artificial Sequence: Synthetic oligonucleotide
  Antisense strand to SEQ ID NO: 2204014
uuccacaacuguuuccacu

SEQ ID NO: 2204016 - RNA, 19 nt, Artificial Sequence
  Description of Artificial Sequence: Synthetic oligonucleotide
  Sense strand starting at position 2632 of SEQ ID NO: 1883604
gguaucuacugaguagaau

SEQ ID NO: 2204017 - RNA, 19 nt, Artificial Sequence
  Description of Artificial Sequence: Synthetic oligonucleotide
  Antisense strand to SEQ ID NO: 2204016
auucuacucaguagauacc

SEQ ID NO: 2204018 - RNA, 19 nt, Artificial Sequence
  Description of Artificial Sequence: Synthetic oligonucleotide
  Sense strand starting at position 3015 of SEQ ID NO: 1883604
ggacuaugcaucgauuauu

SEQ ID NO: 2204019 - RNA, 19 nt, Artificial Sequence
  Description of Artificial Sequence: Synthetic oligonucleotide
  Antisense strand to SEQ ID NO: 2204018
aauaaucgaugcauagucc

SEQ ID NO: 2204020 - RNA, 19 nt, Artificial Sequence
  Description of Artificial Sequence: Synthetic oligonucleotide
  Sense strand starting at position 3235 of SEQ ID NO: 1883604
auaagauggucagugugaa

SEQ ID NO: 2204021 - RNA, 19 nt, Artificial Sequence
  Description of Artificial Sequence: Synthetic oligonucleotide
  Antisense strand to SEQ ID NO: 2204020
uucacacugaccaucuuau

SEQ ID NO: 2204022 - RNA, 19 nt, Artificial Sequence
  Description of Artificial Sequence: Synthetic oligonucleotide
  Sense strand starting at position 914 of SEQ ID NO: 1883604
auaccugucagaggucaga

SEQ ID NO: 2204023 - RNA, 19 nt, Artificial Sequence
  Description of Artificial Sequence: Synthetic oligonucleotide
  Antisense strand to SEQ ID NO: 2204022
ucugaccucugacagguau

SEQ ID NO: 2204024 - RNA, 19 nt, Artificial Sequence
  Description of Artificial Sequence: Synthetic oligonucleotide
  Sense strand starting at position 2436 of SEQ ID NO: 1883604
gagaucagguuucuaaggu

SEQ ID NO: 2204025 - RNA, 19 nt, Artificial Sequence
  Description of Artificial Sequence: Synthetic oligonucleotide
  Antisense strand to SEQ ID NO: 2204024
accuuagaaaccugaucuc

SEQ ID NO: 2204026 - RNA, 19 nt, Artificial Sequence
  Description of Artificial Sequence: Synthetic oligonucleotide
  Sense strand starting at position 3018 of SEQ ID NO: 1883604
cuaugcaucgauuauuaca

SEQ ID NO: 2204027 - RNA, 19 nt, Artificial Sequence
  Description of Artificial Sequence: Synthetic oligonucleotide
  Antisense strand to SEQ ID NO: 2204026
uguaauaaucgaugcauag

SEQ ID NO: 2204028 - RNA, 19 nt, Artificial Sequence
  Description of Artificial Sequence: Synthetic oligonucleotide
  Sense strand starting at position 965 of SEQ ID NO: 1883604
guaccaggcuaauuaugaa

SEQ ID NO: 2204029 - RNA, 19 nt, Artificial Sequence
  Description of Artificial Sequence: Synthetic oligonucleotide
  Antisense strand to SEQ ID NO: 2204028
uucauaauuagccugguac

SEQ ID NO: 2204030 - RNA, 19 nt, Artificial Sequence
  Description of Artificial Sequence: Synthetic oligonucleotide
  Sense strand starting at position 3701 of SEQ ID NO: 1883604
auugauagccauuacuugu

SEQ ID NO: 2204031 - RNA, 19 nt, Artificial Sequence
  Description of Artificial Sequence: Synthetic oligonucleotide
  Antisense strand to SEQ ID NO: 2204030
acaaguaauggcuaucaau

SEQ ID NO: 2204032 - RNA, 19 nt, Artificial Sequence
  Description of Artificial Sequence: Synthetic oligonucleotide
  Sense strand starting at position 3236 of SEQ ID NO: 1883604
uaagauggucagugugaag

SEQ ID NO: 2204033 - RNA, 19 nt, Artificial Sequence
  Description of Artificial Sequence: Synthetic oligonucleotide
  Antisense strand to SEQ ID NO: 2204032
cuucacacugaccaucuua

SEQ ID NO: 2204034 - RNA, 19 nt, Artificial Sequence
  Description of Artificial Sequence: Synthetic oligonucleotide
  Sense strand starting at position 3230 of SEQ ID NO: 1883604
acuuuauaagauggucagu

SEQ ID NO: 2204035 - RNA, 19 nt, Artificial Sequence
  Description of Artificial Sequence: Synthetic oligonucleotide
  Antisense strand to SEQ ID NO: 2204034
acugaccaucuuauaaagu

SEQ ID NO: 2204036 - RNA, 19 nt, Artificial Sequence
  Description of Artificial Sequence: Synthetic oligonucleotide
  Sense strand starting at position 2779 of SEQ ID NO: 1883604
uauacaagagugugacuuu

SEQ ID NO: 2204037 - RNA, 19 nt, Artificial Sequence
  Description of Artificial Sequence: Synthetic oligonucleotide
  Antisense strand to SEQ ID NO: 2204036
aaagucacacucuuguaua

SEQ ID NO: 2204038 - RNA, 19 nt, Artificial Sequence
  Description of Artificial Sequence: Synthetic oligonucleotide
  Sense strand starting at position 1728 of SEQ ID NO: 1883604
cagaauggauaagauagaa

SEQ ID NO: 2204039 - RNA, 19 nt, Artificial Sequence
  Description of Artificial Sequence: Synthetic oligonucleotide
  Antisense strand to SEQ ID NO: 2204038
uucuaucuuauccauucug

SEQ ID NO: 2204040 - RNA, 19 nt, Artificial Sequence
  Description of Artificial Sequence: Synthetic oligonucleotide
  Sense strand starting at position 1519 of SEQ ID NO: 1883604
agaaauaacuggcugcauu

SEQ ID NO: 2204041 - RNA, 19 nt, Artificial Sequence
  Description of Artificial Sequence: Synthetic oligonucleotide
  Antisense strand to SEQ ID NO: 2204040
aaugcagccaguuauuucu

SEQ ID NO: 2204042 - RNA, 19 nt, Artificial Sequence
  Description of Artificial Sequence: Synthetic oligonucleotide
  Sense strand starting at position 726 of SEQ ID NO: 1883604
gugggagguuuauuacacu

SEQ ID NO: 2204043 - RNA, 19 nt, Artificial Sequence
  Description of Artificial Sequence: Synthetic oligonucleotide
  Antisense strand to SEQ ID NO: 2204042
aguguaauaaaccucccac

SEQ ID NO: 2204044 - RNA, 19 nt, Artificial Sequence
  Description of Artificial Sequence: Synthetic oligonucleotide
  Sense strand starting at position 2771 of SEQ ID NO: 1883604
guguauguuauacaagagu

SEQ ID NO: 2204045 - RNA, 19 nt, Artificial Sequence
  Description of Artificial Sequence: Synthetic oligonucleotide
  Antisense strand to SEQ ID NO: 2204044
acucuuguauaacauacac

SEQ ID NO: 2204046 - RNA, 19 nt, Artificial Sequence
  Description of Artificial Sequence: Synthetic oligonucleotide
  Sense strand starting at position 2453 of SEQ ID NO: 1883604
guacuugguguguaaauaa

SEQ ID NO: 2204047 - RNA, 19 nt, Artificial Sequence
  Description of Artificial Sequence: Synthetic oligonucleotide
  Antisense strand to SEQ ID NO: 2204046
uuauuuacacaccaaguac

SEQ ID NO: 2204048 - RNA, 19 nt, Artificial Sequence
  Description of Artificial Sequence: Synthetic oligonucleotide
  Sense strand starting at position 2495 of SEQ ID NO: 1883604
uauuauuaauggccaguga

SEQ ID NO: 2204049 - RNA, 19 nt, Artificial Sequence
  Description of Artificial Sequence: Synthetic oligonucleotide
  Antisense strand to SEQ ID NO: 2204048
ucacuggccauuaauaaua

SEQ ID NO: 2204050 - RNA, 19 nt, Artificial Sequence
  Description of Artificial Sequence: Synthetic oligonucleotide
  Sense strand starting at position 203 of SEQ ID NO: 1883604
gcuauaaaugcuuggaaua

SEQ ID NO: 2204051 - RNA, 19 nt, Artificial Sequence
  Description of Artificial Sequence: Synthetic oligonucleotide
  Antisense strand to SEQ ID NO: 2204050
uauuccaagcauuuauagc

SEQ ID NO: 2204052 - RNA, 19 nt, Artificial Sequence
  Description of Artificial Sequence: Synthetic oligonucleotide
  Sense strand starting at position 1117 of SEQ ID NO: 1883604
guugauguuuacuuauaga

SEQ ID NO: 2204053 - RNA, 19 nt, Artificial Sequence
  Description of Artificial Sequence: Synthetic oligonucleotide
  Antisense strand to SEQ ID NO: 2204052
ucuauaaguaaacaucaac

SEQ ID NO: 2204054 - RNA, 19 nt, Artificial Sequence
  Description of Artificial Sequence: Synthetic oligonucleotide
  Sense strand starting at position 425 of SEQ ID NO: 1883604
gaacacaaggcuuguuauu

SEQ ID NO: 2204055 - RNA, 19 nt, Artificial Sequence
  Description of Artificial Sequence: Synthetic oligonucleotide
  Antisense strand to SEQ ID NO: 2204054
aauaacaagccuuguguuc

SEQ ID NO: 2204056 - RNA, 19 nt, Artificial Sequence
  Description of Artificial Sequence: Synthetic oligonucleotide
  Sense strand starting at position 3014 of SEQ ID NO: 1883604
gggacuaugcaucgauuau

SEQ ID NO: 2204057 - RNA, 19 nt, Artificial Sequence
  Description of Artificial Sequence: Synthetic oligonucleotide
  Antisense strand to SEQ ID NO: 2204056
auaaucgaugcauaguccc

SEQ ID NO: 2204058 - RNA, 19 nt, Artificial Sequence
  Description of Artificial Sequence: Synthetic oligonucleotide
  Sense strand starting at position 3399 of SEQ ID NO: 1883604
ccaugaugugcuuagcaga

SEQ ID NO: 2204059 - RNA, 19 nt, Artificial Sequence
  Description of Artificial Sequence: Synthetic oligonucleotide
  Antisense strand to SEQ ID NO: 2204058
ucugcuaagcacaucaugg

SEQ ID NO: 2204060 - RNA, 19 nt, Artificial Sequence
  Description of Artificial Sequence: Synthetic oligonucleotide
  Sense strand starting at position 1192 of SEQ ID NO: 1883604
uccuaauagucugcuaaag

SEQ ID NO: 2204061 - RNA, 19 nt, Artificial Sequence
  Description of Artificial Sequence: Synthetic oligonucleotide
  Antisense strand to SEQ ID NO: 2204060
cuuuagcagacuauuagga

SEQ ID NO: 2204062 - RNA, 19 nt, Artificial Sequence
  Description of Artificial Sequence: Synthetic oligonucleotide
  Sense strand starting at position 2777 of SEQ ID NO: 1883604
guuauacaagagugugacu

SEQ ID NO: 2204063 - RNA, 19 nt, Artificial Sequence
  Description of Artificial Sequence: Synthetic oligonucleotide
  Antisense strand to SEQ ID NO: 2204062
agucacacucuuguauaac

SEQ ID NO: 2204064 - RNA, 19 nt, Artificial Sequence
  Description of Artificial Sequence: Synthetic oligonucleotide
  Sense strand starting at position 1753 of SEQ ID NO: 1883605
gaaguacuuugauuagaau

SEQ ID NO: 2204065 - RNA, 19 nt, Artificial Sequence
  Description of Artificial Sequence: Synthetic oligonucleotide
  Antisense strand to SEQ ID NO: 2204064
auucuaaucaaaguacuuc

SEQ ID NO: 2204066 - RNA, 19 nt, Artificial Sequence
  Description of Artificial Sequence: Synthetic oligonucleotide
  Sense strand starting at position 2335 of SEQ ID NO: 1883605
uugucuuaacucuagacag

SEQ ID NO: 2204067 - RNA, 19 nt, Artificial Sequence
  Description of Artificial Sequence: Synthetic oligonucleotide
  Antisense strand to SEQ ID NO: 2204066
cugucuagaguuaagacaa

SEQ ID NO: 2204068 - RNA, 19 nt, Artificial Sequence
  Description of Artificial Sequence: Synthetic oligonucleotide
  Sense strand starting at position 1446 of SEQ ID NO: 1883605
agggcuccucuuuauaaag

SEQ ID NO: 2204069 - RNA, 19 nt, Artificial Sequence
  Description of Artificial Sequence: Synthetic oligonucleotide
  Antisense strand to SEQ ID NO: 2204068
cuuuauaaagaggagcccu

SEQ ID NO: 2204070 - RNA, 19 nt, Artificial Sequence
  Description of Artificial Sequence: Synthetic oligonucleotide
  Sense strand starting at position 3101 of SEQ ID NO: 1883605
uuaggaaauuggccaggau

SEQ ID NO: 2204071 - RNA, 19 nt, Artificial Sequence
  Description of Artificial Sequence: Synthetic oligonucleotide
  Antisense strand to SEQ ID NO: 2204070
auccuggccaauuuccuaa

SEQ ID NO: 2204072 - RNA, 19 nt, Artificial Sequence
  Description of Artificial Sequence: Synthetic oligonucleotide
  Sense strand starting at position 3710 of SEQ ID NO: 1883605
cuggcauuuaugcgaugaa

SEQ ID NO: 2204073 - RNA, 19 nt, Artificial Sequence
  Description of Artificial Sequence: Synthetic oligonucleotide
  Antisense strand to SEQ ID NO: 2204072
uucaucgcauaaaugccag

SEQ ID NO: 2204074 - RNA, 19 nt, Artificial Sequence
  Description of Artificial Sequence: Synthetic oligonucleotide
  Sense strand starting at position 1719 of SEQ ID NO: 1883605
guggcuauugaucaaugga

SEQ ID NO: 2204075 - RNA, 19 nt, Artificial Sequence
  Description of Artificial Sequence: Synthetic oligonucleotide
  Antisense strand to SEQ ID NO: 2204074
uccauugaucaauagccac

SEQ ID NO: 2204076 - RNA, 19 nt, Artificial Sequence
  Description of Artificial Sequence: Synthetic oligonucleotide
  Sense strand starting at position 543 of SEQ ID NO: 1883605
ggauucuauuggucaauaa

SEQ ID NO: 2204077 - RNA, 19 nt, Artificial Sequence
  Description of Artificial Sequence: Synthetic oligonucleotide
  Antisense strand to SEQ ID NO: 2204076
uuauugaccaauagaaucc

SEQ ID NO: 2204078 - RNA, 19 nt, Artificial Sequence
  Description of Artificial Sequence: Synthetic oligonucleotide
  Sense strand starting at position 1664 of SEQ ID NO: 1883605
gccaucuuuccagaagacu

SEQ ID NO: 2204079 - RNA, 19 nt, Artificial Sequence
  Description of Artificial Sequence: Synthetic oligonucleotide
  Antisense strand to SEQ ID NO: 2204078
agucuucuggaaagauggc

SEQ ID NO: 2204080 - RNA, 19 nt, Artificial Sequence
  Description of Artificial Sequence: Synthetic oligonucleotide
  Sense strand starting at position 1680 of SEQ ID NO: 1883605
acugaaguccgauacucau

SEQ ID NO: 2204081 - RNA, 19 nt, Artificial Sequence
  Description of Artificial Sequence: Synthetic oligonucleotide
  Antisense strand to SEQ ID NO: 2204080
augaguaucggacuucagu

SEQ ID NO: 2204082 - RNA, 19 nt, Artificial Sequence
  Description of Artificial Sequence: Synthetic oligonucleotide
  Sense strand starting at position 2810 of SEQ ID NO: 1883605
ucagucacuguauauuaau

SEQ ID NO: 2204083 - RNA, 19 nt, Artificial Sequence
  Description of Artificial Sequence: Synthetic oligonucleotide
  Antisense strand to SEQ ID NO: 2204082
auuaauauacagugacuga

SEQ ID NO: 2204084 - RNA, 19 nt, Artificial Sequence
  Description of Artificial Sequence: Synthetic oligonucleotide
  Sense strand starting at position 3713 of SEQ ID NO: 1883605
gcauuuaugcgaugaagug

SEQ ID NO: 2204085 - RNA, 19 nt, Artificial Sequence
  Description of Artificial Sequence: Synthetic oligonucleotide
  Antisense strand to SEQ ID NO: 2204084
cacuucaucgcauaaaugc

SEQ ID NO: 2204086 - RNA, 19 nt, Artificial Sequence
  Description of Artificial Sequence: Synthetic oligonucleotide
  Sense strand starting at position 273 of SEQ ID NO: 1883605
accauaaagcgugaacauu

SEQ ID NO: 2204087 - RNA, 19 nt, Artificial Sequence
  Description of Artificial Sequence: Synthetic oligonucleotide
  Antisense strand to SEQ ID NO: 2204086
aauguucacgcuuuauggu

SEQ ID NO: 2204088 - RNA, 19 nt, Artificial Sequence
  Description of Artificial Sequence: Synthetic oligonucleotide
  Sense strand starting at position 542 of SEQ ID NO: 1883605
uggauucuauuggucaaua

SEQ ID NO: 2204089 - RNA, 19 nt, Artificial Sequence
  Description of Artificial Sequence: Synthetic oligonucleotide
  Antisense strand to SEQ ID NO: 2204088
uauugaccaauagaaucca

SEQ ID NO: 2204090 - RNA, 19 nt, Artificial Sequence
  Description of Artificial Sequence: Synthetic oligonucleotide
  Sense strand starting at position 82 of SEQ ID NO: 1883605
auaaguguggcuuaaauua

SEQ ID NO: 2204091 - RNA, 19 nt, Artificial Sequence
  Description of Artificial Sequence: Synthetic oligonucleotide
  Antisense strand to SEQ ID NO: 2204090
uaauuuaagccacacuuau

SEQ ID NO: 2204092 - RNA, 19 nt, Artificial Sequence
  Description of Artificial Sequence: Synthetic oligonucleotide
  Sense strand starting at position 1150 of SEQ ID NO: 1883605
aagagauuccuccgaguag

SEQ ID NO: 2204093 - RNA, 19 nt, Artificial Sequence
  Description of Artificial Sequence: Synthetic oligonucleotide
  Antisense strand to SEQ ID NO: 2204092
cuacucggaggaaucucuu

SEQ ID NO: 2204094 - RNA, 19 nt, Artificial Sequence
  Description of Artificial Sequence: Synthetic oligonucleotide
  Sense strand starting at position 1380 of SEQ ID NO: 1883605
accagagaauccucuguuc

SEQ ID NO: 2204095 - RNA, 19 nt, Artificial Sequence
  Description of Artificial Sequence: Synthetic oligonucleotide
  Antisense strand to SEQ ID NO: 2204094
gaacagaggauucucuggu

SEQ ID NO: 2204096 - RNA, 19 nt, Artificial Sequence
  Description of Artificial Sequence: Synthetic oligonucleotide
  Sense strand starting at position 2671 of SEQ ID NO: 1883605
guauacaagcuauaaugca

SEQ ID NO: 2204097 - RNA, 19 nt, Artificial Sequence
  Description of Artificial Sequence: Synthetic oligonucleotide
  Antisense strand to SEQ ID NO: 2204096
ugcauuauagcuuguauac

SEQ ID NO: 2204098 - RNA, 19 nt, Artificial Sequence
  Description of Artificial Sequence: Synthetic oligonucleotide
  Sense strand starting at position 3104 of SEQ ID NO: 1883605
ggaaauuggccaggaugca

SEQ ID NO: 2204099 - RNA, 19 nt, Artificial Sequence
  Description of Artificial Sequence: Synthetic oligonucleotide
  Antisense strand to SEQ ID NO: 2204098
ugcauccuggccaauuucc

SEQ ID NO: 2204100 - RNA, 19 nt, Artificial Sequence
  Description of Artificial Sequence: Synthetic oligonucleotide
  Sense strand starting at position 1737 of SEQ ID NO: 1883605
aaguccucugguuggagaa

SEQ ID NO: 2204101 - RNA, 19 nt, Artificial Sequence
  Description of Artificial Sequence: Synthetic oligonucleotide
  Antisense strand to SEQ ID NO: 2204100
uucuccaaccagaggacuu

SEQ ID NO: 2204102 - RNA, 19 nt, Artificial Sequence
  Description of Artificial Sequence: Synthetic oligonucleotide
  Sense strand starting at position 1736 of SEQ ID NO: 1883605
gaaguccucugguuggaga

SEQ ID NO: 2204103 - RNA, 19 nt, Artificial Sequence
  Description of Artificial Sequence: Synthetic oligonucleotide
  Antisense strand to SEQ ID NO: 2204102
ucuccaaccagaggacuuc

SEQ ID NO: 2204104 - RNA, 19 nt, Artificial Sequence
  Description of Artificial Sequence: Synthetic oligonucleotide
  Sense strand starting at position 1707 of SEQ ID NO: 1883605
cagaacaucugaguggcua

SEQ ID NO: 2204105 - RNA, 19 nt, Artificial Sequence
  Description of Artificial Sequence: Synthetic oligonucleotide
  Antisense strand to SEQ ID NO: 2204104
uagccacucagauguucug

SEQ ID NO: 2204106 - RNA, 19 nt, Artificial Sequence
  Description of Artificial Sequence: Synthetic oligonucleotide
  Sense strand starting at position 363 of SEQ ID NO: 1883605
gcguaagugaaucaauaau

SEQ ID NO: 2204107 - RNA, 19 nt, Artificial Sequence
  Description of Artificial Sequence: Synthetic oligonucleotide
  Antisense strand to SEQ ID NO: 2204106
auuauugauucacuuacgc

SEQ ID NO: 2204108 - RNA, 19 nt, Artificial Sequence
  Description of Artificial Sequence: Synthetic oligonucleotide
  Sense strand starting at position 1708 of SEQ ID NO: 1883605
agaacaucugaguggcuau

SEQ ID NO: 2204109 - RNA, 19 nt, Artificial Sequence
  Description of Artificial Sequence: Synthetic oligonucleotide
  Antisense strand to SEQ ID NO: 2204108
auagccacucagauguucu

SEQ ID NO: 2204110 - RNA, 19 nt, Artificial Sequence
  Description of Artificial Sequence: Synthetic oligonucleotide
  Sense strand starting at position 1722 of SEQ ID NO: 1883605
gcuauugaucaauggaagu

SEQ ID NO: 2204111 - RNA, 19 nt, Artificial Sequence
  Description of Artificial Sequence: Synthetic oligonucleotide
  Antisense strand to SEQ ID NO: 2204110
acuuccauugaucaauagc

SEQ ID NO: 2204112 - RNA, 19 nt, Artificial Sequence
  Description of Artificial Sequence: Synthetic oligonucleotide
  Sense strand starting at position 3175 of SEQ ID NO: 1883605
cuaacuuuaaggugagguu

SEQ ID NO: 2204113 - RNA, 19 nt, Artificial Sequence
  Description of Artificial Sequence: Synthetic oligonucleotide
  Antisense strand to SEQ ID NO: 2204112
aaccucaccuuaaaguuag

SEQ ID NO: 2204114 - RNA, 19 nt, Artificial Sequence
  Description of Artificial Sequence: Synthetic oligonucleotide
  Sense strand starting at position 2027 of SEQ ID NO: 1883605
ugugguauuacggagggua

SEQ ID NO: 2204115 - RNA, 19 nt, Artificial Sequence
  Description of Artificial Sequence: Synthetic oligonucleotide
  Antisense strand to SEQ ID NO: 2204114
uacccuccguaauaccaca

SEQ ID NO: 2204116 - RNA, 19 nt, Artificial Sequence
  Description of Artificial Sequence: Synthetic oligonucleotide
  Sense strand starting at position 80 of SEQ ID NO: 1883605
aaauaaguguggcuuaaau

SEQ ID NO: 2204117 - RNA, 19 nt, Artificial Sequence
  Description of Artificial Sequence: Synthetic oligonucleotide
  Antisense strand to SEQ ID NO: 2204116
auuuaagccacacuuauuu

SEQ ID NO: 2204118 - RNA, 19 nt, Artificial Sequence
  Description of Artificial Sequence: Synthetic oligonucleotide
  Sense strand starting at position 2900 of SEQ ID NO: 1883605
gaaguuauggugugacaua

SEQ ID NO: 2204119 - RNA, 19 nt, Artificial Sequence
  Description of Artificial Sequence: Synthetic oligonucleotide
  Antisense strand to SEQ ID NO: 2204118
uaugucacaccauaacuuc

SEQ ID NO: 2204120 - RNA, 19 nt, Artificial Sequence
  Description of Artificial Sequence: Synthetic oligonucleotide
  Sense strand starting at position 77 of SEQ ID NO: 1883605
aauaaauaaguguggcuua

SEQ ID NO: 2204121 - RNA, 19 nt, Artificial Sequence
  Description of Artificial Sequence: Synthetic oligonucleotide
  Antisense strand to SEQ ID NO: 2204120
uaagccacacuuauuuauu

SEQ ID NO: 2204122 - RNA, 19 nt, Artificial Sequence
  Description of Artificial Sequence: Synthetic oligonucleotide
  Sense strand starting at position 1148 of SEQ ID NO: 1883605
ccaagagauuccuccgagu

SEQ ID NO: 2204123 - RNA, 19 nt, Artificial Sequence
  Description of Artificial Sequence: Synthetic oligonucleotide
  Antisense strand to SEQ ID NO: 2204122
acucggaggaaucucuugg

SEQ ID NO: 2204124 - RNA, 19 nt, Artificial Sequence
  Description of Artificial Sequence: Synthetic oligonucleotide
  Sense strand starting at position 272 of SEQ ID NO: 1883605
gaccauaaagcgugaacau

SEQ ID NO: 2204125 - RNA, 19 nt, Artificial Sequence
  Description of Artificial Sequence: Synthetic oligonucleotide
  Antisense strand to SEQ ID NO: 2204124
auguucacgcuuuaugguc

SEQ ID NO: 2204126 - RNA, 19 nt, Artificial Sequence
  Description of Artificial Sequence: Synthetic oligonucleotide
  Sense strand starting at position 2211 of SEQ ID NO: 1883605
cgugaugguaggcaugaau

SEQ ID NO: 2204127 - RNA, 19 nt, Artificial Sequence
  Description of Artificial Sequence: Synthetic oligonucleotide
  Antisense strand to SEQ ID NO: 2204126
auucaugccuaccaucacg

SEQ ID NO: 2204128 - RNA, 19 nt, Artificial Sequence
  Description of Artificial Sequence: Synthetic oligonucleotide
  Sense strand starting at position 3035 of SEQ ID NO: 1883605
uauauaauggguuguaucu

SEQ ID NO: 2204129 - RNA, 19 nt, Artificial Sequence
  Description of Artificial Sequence: Synthetic oligonucleotide
  Antisense strand to SEQ ID NO: 2204128
agauacaacccauuauaua

SEQ ID NO: 2204130 - RNA, 19 nt, Artificial Sequence
  Description of Artificial Sequence: Synthetic oligonucleotide
  Sense strand starting at position 3032 of SEQ ID NO: 1883605
auguauauaauggguugua

SEQ ID NO: 2204131 - RNA, 19 nt, Artificial Sequence
  Description of Artificial Sequence: Synthetic oligonucleotide
  Antisense strand to SEQ ID NO: 2204130
uacaacccauuauauacau

SEQ ID NO: 2204132 - RNA, 19 nt, Artificial Sequence
  Description of Artificial Sequence: Synthetic oligonucleotide
  Sense strand starting at position 675 of SEQ ID NO: 1883605
guccgaaagcuuuagggua

SEQ ID NO: 2204133 - RNA, 19 nt, Artificial Sequence
  Description of Artificial Sequence: Synthetic oligonucleotide
  Antisense strand to SEQ ID NO: 2204132
uacccuaaagcuuucggac

SEQ ID NO: 2204134 - RNA, 19 nt, Artificial Sequence
  Description of Artificial Sequence: Synthetic oligonucleotide
  Sense strand starting at position 3702 of SEQ ID NO: 1883605
augaauuacuggcauuuau

SEQ ID NO: 2204135 - RNA, 19 nt, Artificial Sequence
  Description of Artificial Sequence: Synthetic oligonucleotide
  Antisense strand to SEQ ID NO: 2204134
auaaaugccaguaauucau

SEQ ID NO: 2204136 - RNA, 19 nt, Artificial Sequence
  Description of Artificial Sequence: Synthetic oligonucleotide
  Sense strand starting at position 3033 of SEQ ID NO: 1883605
uguauauaauggguuguau

SEQ ID NO: 2204137 - RNA, 19 nt, Artificial Sequence
  Description of Artificial Sequence: Synthetic oligonucleotide
  Antisense strand to SEQ ID NO: 2204136
auacaacccauuauauaca

SEQ ID NO: 2204138 - RNA, 19 nt, Artificial Sequence
  Description of Artificial Sequence: Synthetic oligonucleotide
  Sense strand starting at position 2202 of SEQ ID NO: 1883605
ugcuuacaacgugauggua

SEQ ID NO: 2204139 - RNA, 19 nt, Artificial Sequence
  Description of Artificial Sequence: Synthetic oligonucleotide
  Antisense strand to SEQ ID NO: 2204138
uaccaucacguuguaagca

SEQ ID NO: 2204140 - RNA, 19 nt, Artificial Sequence
  Description of Artificial Sequence: Synthetic oligonucleotide
  Sense strand starting at position 2210 of SEQ ID NO: 1883605
acgugaugguaggcaugaa

SEQ ID NO: 2204141 - RNA, 19 nt, Artificial Sequence
  Description of Artificial Sequence: Synthetic oligonucleotide
  Antisense strand to SEQ ID NO: 2204140
uucaugccuaccaucacgu

SEQ ID NO: 2204142 - RNA, 19 nt, Artificial Sequence
  Description of Artificial Sequence: Synthetic oligonucleotide
  Sense strand starting at position 1538 of SEQ ID NO: 1883605
aaagauguuugagaggaga

SEQ ID NO: 2204143 - RNA, 19 nt, Artificial Sequence
  Description of Artificial Sequence: Synthetic oligonucleotide
  Antisense strand to SEQ ID NO: 2204142
ucuccucucaaacaucuuu

SEQ ID NO: 2204144 - RNA, 19 nt, Artificial Sequence
  Description of Artificial Sequence: Synthetic oligonucleotide
  Sense strand starting at position 3233 of SEQ ID NO: 1883606
gugauagugauguacagaa

SEQ ID NO: 2204145 - RNA, 19 nt, Artificial Sequence
  Description of Artificial Sequence: Synthetic oligonucleotide
  Antisense strand to SEQ ID NO: 2204144
uucuguacaucacuaucac

SEQ ID NO: 2204146 - RNA, 19 nt, Artificial Sequence
  Description of Artificial Sequence: Synthetic oligonucleotide
  Sense strand starting at position 2975 of SEQ ID NO: 1883606
cagcgaaaucagggacaca

SEQ ID NO: 2204147 - RNA, 19 nt, Artificial Sequence
  Description of Artificial Sequence: Synthetic oligonucleotide
  Antisense strand to SEQ ID NO: 2204146
ugugucccugauuucgcug

SEQ ID NO: 2204148 - RNA, 19 nt, Artificial Sequence
  Description of Artificial Sequence: Synthetic oligonucleotide
  Sense strand starting at position 1517 of SEQ ID NO: 1883606
guguuuguaacgguugcau

SEQ ID NO: 2204149 - RNA, 19 nt, Artificial Sequence
  Description of Artificial Sequence: Synthetic oligonucleotide
  Antisense strand to SEQ ID NO: 2204148
augcaaccguuacaaacac

SEQ ID NO: 2204150 - RNA, 19 nt, Artificial Sequence
  Description of Artificial Sequence: Synthetic oligonucleotide
  Sense strand starting at position 1276 of SEQ ID NO: 1883606
uauguaaugguguguauuu

SEQ ID NO: 2204151 - RNA, 19 nt, Artificial Sequence
  Description of Artificial Sequence: Synthetic oligonucleotide
  Antisense strand to SEQ ID NO: 2204150
aaauacacaccauuacaua

SEQ ID NO: 2204152 - RNA, 19 nt, Artificial Sequence
  Description of Artificial Sequence: Synthetic oligonucleotide
  Sense strand starting at position 2354 of SEQ ID NO: 1883606
ugaagaucauucuugaguc

SEQ ID NO: 2204153 - RNA, 19 nt, Artificial Sequence
  Description of Artificial Sequence: Synthetic oligonucleotide
  Antisense strand to SEQ ID NO: 2204152
gacucaagaaugaucuuca

SEQ ID NO: 2204154 - RNA, 19 nt, Artificial Sequence
  Description of Artificial Sequence: Synthetic oligonucleotide
  Sense strand starting at position 723 of SEQ ID NO: 1883606
agggcaucaucucuuaaua

SEQ ID NO: 2204155 - RNA, 19 nt, Artificial Sequence
  Description of Artificial Sequence: Synthetic oligonucleotide
  Antisense strand to SEQ ID NO: 2204154
uauuaagagaugaugcccu

SEQ ID NO: 2204156 - RNA, 19 nt, Artificial Sequence
  Description of Artificial Sequence: Synthetic oligonucleotide
  Sense strand starting at position 3716 of SEQ ID NO: 1883606
agagcugcuuaaccaagaa

SEQ ID NO: 2204157 - RNA, 19 nt, Artificial Sequence
  Description of Artificial Sequence: Synthetic oligonucleotide
  Antisense strand to SEQ ID NO: 2204156
uucuugguuaagcagcucu

SEQ ID NO: 2204158 - RNA, 19 nt, Artificial Sequence
  Description of Artificial Sequence: Synthetic oligonucleotide
  Sense strand starting at position 2438 of SEQ ID NO: 1883606
gaggcauuccagugacaag

SEQ ID NO: 2204159 - RNA, 19 nt, Artificial Sequence
  Description of Artificial Sequence: Synthetic oligonucleotide
  Antisense strand to SEQ ID NO: 2204158
cuugucacuggaaugccuc

SEQ ID NO: 2204160 - RNA, 19 nt, Artificial Sequence
  Description of Artificial Sequence: Synthetic oligonucleotide
  Sense strand starting at position 3463 of SEQ ID NO: 1883606
agaagccagucauugauca

SEQ ID NO: 2204161 - RNA, 19 nt, Artificial Sequence
  Description of Artificial Sequence: Synthetic oligonucleotide
  Antisense strand to SEQ ID NO: 2204160
ugaucaaugacuggcuucu

SEQ ID NO: 2204162 - RNA, 19 nt, Artificial Sequence
  Description of Artificial Sequence: Synthetic oligonucleotide
  Sense strand starting at position 3594 of SEQ ID NO: 1883606
ccugaacucccaugagcaa

SEQ ID NO: 2204163 - RNA, 19 nt, Artificial Sequence
  Description of Artificial Sequence: Synthetic oligonucleotide
  Antisense strand to SEQ ID NO: 2204162
uugcucaugggaguucagg

SEQ ID NO: 2204164 - RNA, 19 nt, Artificial Sequence
  Description of Artificial Sequence: Synthetic oligonucleotide
  Sense strand starting at position 3821 of SEQ ID NO: 1883606
aaauguugcagugagguaa

SEQ ID NO: 2204165 - RNA, 19 nt, Artificial Sequence
  Description of Artificial Sequence: Synthetic oligonucleotide
  Antisense strand to SEQ ID NO: 2204164
uuaccucacugcaacauuu

SEQ ID NO: 2204166 - RNA, 19 nt, Artificial Sequence
  Description of Artificial Sequence: Synthetic oligonucleotide
  Sense strand starting at position 3316 of SEQ ID NO: 1883606
ggccuuuguggucaggaga

SEQ ID NO: 2204167 - RNA, 19 nt, Artificial Sequence
  Description of Artificial Sequence: Synthetic oligonucleotide
  Antisense strand to SEQ ID NO: 2204166
ucuccugaccacaaaggcc

SEQ ID NO: 2204168 - RNA, 19 nt, Artificial Sequence
  Description of Artificial Sequence: Synthetic oligonucleotide
  Sense strand starting at position 1434 of SEQ ID NO: 1883606
uguguuaaacgcuaaauga

SEQ ID NO: 2204169 - RNA, 19 nt, Artificial Sequence
  Description of Artificial Sequence: Synthetic oligonucleotide
  Antisense strand to SEQ ID NO: 2204168
ucauuuagcguuuaacaca

SEQ ID NO: 2204170 - RNA, 19 nt, Artificial Sequence
  Description of Artificial Sequence: Synthetic oligonucleotide
  Sense strand starting at position 512 of SEQ ID NO: 1883606
aaugccugacuggguaauu

SEQ ID NO: 2204171 - RNA, 19 nt, Artificial Sequence
  Description of Artificial Sequence: Synthetic oligonucleotide
  Antisense strand to SEQ ID NO: 2204170
aauuacccagucaggcauu

SEQ ID NO: 2204172 - RNA, 19 nt, Artificial Sequence
  Description of Artificial Sequence: Synthetic oligonucleotide
  Sense strand starting at position 521 of SEQ ID NO: 1883606
cuggguaauuuauaguaaa

SEQ ID NO: 2204173 - RNA, 19 nt, Artificial Sequence
  Description of Artificial Sequence: Synthetic oligonucleotide
  Antisense strand to SEQ ID NO: 2204172
uuuacuauaaauuacccag

SEQ ID NO: 2204174 - RNA, 19 nt, Artificial Sequence
  Description of Artificial Sequence: Synthetic oligonucleotide
  Sense strand starting at position 1422 of SEQ ID NO: 1883606
ugguacuaaagauguguua

SEQ ID NO: 2204175 - RNA, 19 nt, Artificial Sequence
  Description of Artificial Sequence: Synthetic oligonucleotide
  Antisense strand to SEQ ID NO: 2204174
uaacacaucuuuaguacca

SEQ ID NO: 2204176 - RNA, 19 nt, Artificial Sequence
  Description of Artificial Sequence: Synthetic oligonucleotide
  Sense strand starting at position 3713 of SEQ ID NO: 1883606
ugcagagcugcuuaaccaa

SEQ ID NO: 2204177 - RNA, 19 nt, Artificial Sequence
  Description of Artificial Sequence: Synthetic oligonucleotide
  Antisense strand to SEQ ID NO: 2204176
uugguuaagcagcucugca

SEQ ID NO: 2204178 - RNA, 19 nt, Artificial Sequence
  Description of Artificial Sequence: Synthetic oligonucleotide
  Sense strand starting at position 1088 of SEQ ID NO: 1883606
cucauuaaauuagagaaag

SEQ ID NO: 2204179 - RNA, 19 nt, Artificial Sequence
  Description of Artificial Sequence: Synthetic oligonucleotide
  Antisense strand to SEQ ID NO: 2204178
cuuucucuaauuuaaugag

SEQ ID NO: 2204180 - RNA, 19 nt, Artificial Sequence
  Description of Artificial Sequence: Synthetic oligonucleotide
  Sense strand starting at position 375 of SEQ ID NO: 1883606
gagcuauagugagcuacua

SEQ ID NO: 2204181 - RNA, 19 nt, Artificial Sequence
  Description of Artificial Sequence: Synthetic oligonucleotide
  Antisense strand to SEQ ID NO: 2204180
uaguagcucacuauagcuc

SEQ ID NO: 2204182 - RNA, 19 nt, Artificial Sequence
  Description of Artificial Sequence: Synthetic oligonucleotide
  Sense strand starting at position 3067 of SEQ ID NO: 1883606
guuucuguuaggcacggaa

SEQ ID NO: 2204183 - RNA, 19 nt, Artificial Sequence
  Description of Artificial Sequence: Synthetic oligonucleotide
  Antisense strand to SEQ ID NO: 2204182
uuccgugccuaacagaaac

SEQ ID NO: 2204184 - RNA, 19 nt, Artificial Sequence
  Description of Artificial Sequence: Synthetic oligonucleotide
  Sense strand starting at position 1431 of SEQ ID NO: 1883606
agauguguuaaacgcuaaa

SEQ ID NO: 2204185 - RNA, 19 nt, Artificial Sequence
  Description of Artificial Sequence: Synthetic oligonucleotide
  Antisense strand to SEQ ID NO: 2204184
uuuagcguuuaacacaucu

SEQ ID NO: 2204186 - RNA, 19 nt, Artificial Sequence
  Description of Artificial Sequence: Synthetic oligonucleotide
  Sense strand starting at position 2368 of SEQ ID NO: 1883606
gagucugauuugcaaacua

SEQ ID NO: 2204187 - RNA, 19 nt, Artificial Sequence
  Description of Artificial Sequence: Synthetic oligonucleotide
  Antisense strand to SEQ ID NO: 2204186
uaguuugcaaaucagacuc

SEQ ID NO: 2204188 - RNA, 19 nt, Artificial Sequence
  Description of Artificial Sequence: Synthetic oligonucleotide
  Sense strand starting at position 2183 of SEQ ID NO: 1883606
ggaagugagugcucccuca

SEQ ID NO: 2204189 - RNA, 19 nt, Artificial Sequence
  Description of Artificial Sequence: Synthetic oligonucleotide
  Antisense strand to SEQ ID NO: 2204188
ugagggagcacucacuucc

SEQ ID NO: 2204190 - RNA, 19 nt, Artificial Sequence
  Description of Artificial Sequence: Synthetic oligonucleotide
  Sense strand starting at position 3493 of SEQ ID NO: 1883606
cugcuucaggguuguaaag

SEQ ID NO: 2204191 - RNA, 19 nt, Artificial Sequence
  Description of Artificial Sequence: Synthetic oligonucleotide
  Antisense strand to SEQ ID NO: 2204190
cuuuacaacccugaagcag

SEQ ID NO: 2204192 - RNA, 19 nt, Artificial Sequence
  Description of Artificial Sequence: Synthetic oligonucleotide
  Sense strand starting at position 620 of SEQ ID NO: 1883606
acgucaucucauggcuaag

SEQ ID NO: 2204193 - RNA, 19 nt, Artificial Sequence
  Description of Artificial Sequence: Synthetic oligonucleotide
  Antisense strand to SEQ ID NO: 2204192
cuuagccaugagaugacgu

SEQ ID NO: 2204194 - RNA, 19 nt, Artificial Sequence
  Description of Artificial Sequence: Synthetic oligonucleotide
  Sense strand starting at position 470 of SEQ ID NO: 1883606
ucucauauugggugccuua

SEQ ID NO: 2204195 - RNA, 19 nt, Artificial Sequence
  Description of Artificial Sequence: Synthetic oligonucleotide
  Antisense strand to SEQ ID NO: 2204194
uaaggcacccaauaugaga

SEQ ID NO: 2204196 - RNA, 19 nt, Artificial Sequence
  Description of Artificial Sequence: Synthetic oligonucleotide
  Sense strand starting at position 2277 of SEQ ID NO: 1883606
agaagcuguugugccaaua

SEQ ID NO: 2204197 - RNA, 19 nt, Artificial Sequence
  Description of Artificial Sequence: Synthetic oligonucleotide
  Antisense strand to SEQ ID NO: 2204196
uauuggcacaacagcuucu

SEQ ID NO: 2204198 - RNA, 19 nt, Artificial Sequence
  Description of Artificial Sequence: Synthetic oligonucleotide
  Sense strand starting at position 3654 of SEQ ID NO: 1883606
gaagaucuuuaggagcaaa

SEQ ID NO: 2204199 - RNA, 19 nt, Artificial Sequence
  Description of Artificial Sequence: Synthetic oligonucleotide
  Antisense strand to SEQ ID NO: 2204198
uuugcuccuaaagaucuuc

SEQ ID NO: 2204200 - RNA, 19 nt, Artificial Sequence
  Description of Artificial Sequence: Synthetic oligonucleotide
  Sense strand starting at position 2016 of SEQ ID NO: 1883606
uuaagcuuugguugugauu

SEQ ID NO: 2204201 - RNA, 19 nt, Artificial Sequence
  Description of Artificial Sequence: Synthetic oligonucleotide
  Antisense strand to SEQ ID NO: 2204200
aaucacaaccaaagcuuaa

SEQ ID NO: 2204202 - RNA, 19 nt, Artificial Sequence
  Description of Artificial Sequence: Synthetic oligonucleotide
  Sense strand starting at position 1486 of SEQ ID NO: 1883606
aggaaagcgcucuggucua

SEQ ID NO: 2204203 - RNA, 19 nt, Artificial Sequence
  Description of Artificial Sequence: Synthetic oligonucleotide
  Antisense strand to SEQ ID NO: 2204202
uagaccagagcgcuuuccu

SEQ ID NO: 2204204 - RNA, 19 nt, Artificial Sequence
  Description of Artificial Sequence: Synthetic oligonucleotide
  Sense strand starting at position 2890 of SEQ ID NO: 1883606
ccuggagugcccugagcua

SEQ ID NO: 2204205 - RNA, 19 nt, Artificial Sequence
  Description of Artificial Sequence: Synthetic oligonucleotide
  Antisense strand to SEQ ID NO: 2204204
uagcucagggcacuccagg

SEQ ID NO: 2204206 - RNA, 19 nt, Artificial Sequence
  Description of Artificial Sequence: Synthetic oligonucleotide
  Sense strand starting at position 1345 of SEQ ID NO: 1883606
agcucauaagccuguuuau

SEQ ID NO: 2204207 - RNA, 19 nt, Artificial Sequence
  Description of Artificial Sequence: Synthetic oligonucleotide
  Antisense strand to SEQ ID NO: 2204206
auaaacaggcuuaugagcu

SEQ ID NO: 2204208 - RNA, 19 nt, Artificial Sequence
  Description of Artificial Sequence: Synthetic oligonucleotide
  Sense strand starting at position 1411 of SEQ ID NO: 1883606
aguguuugccaugguacua

SEQ ID NO: 2204209 - RNA, 19 nt, Artificial Sequence
  Description of Artificial Sequence: Synthetic oligonucleotide
  Antisense strand to SEQ ID NO: 2204208
uaguaccauggcaaacacu

SEQ ID NO: 2204210 - RNA, 19 nt, Artificial Sequence
  Description of Artificial Sequence: Synthetic oligonucleotide
  Sense strand starting at position 109 of SEQ ID NO: 1883606
acuagagcuuaacauaaug

SEQ ID NO: 2204211 - RNA, 19 nt, Artificial Sequence
  Description of Artificial Sequence: Synthetic oligonucleotide
  Antisense strand to SEQ ID NO: 2204210
cauuauguuaagcucuagu

SEQ ID NO: 2204212 - RNA, 19 nt, Artificial Sequence
  Description of Artificial Sequence: Synthetic oligonucleotide
  Sense strand starting at position 2847 of SEQ ID NO: 1883606
gcgcuacuuugaucccuca

SEQ ID NO: 2204213 - RNA, 19 nt, Artificial Sequence
  Description of Artificial Sequence: Synthetic oligonucleotide
  Antisense strand to SEQ ID NO: 2204212
ugagggaucaaaguagcgc

SEQ ID NO: 2204214 - RNA, 19 nt, Artificial Sequence
  Description of Artificial Sequence: Synthetic oligonucleotide
  Sense strand starting at position 1410 of SEQ ID NO: 1883606
caguguuugccaugguacu

SEQ ID NO: 2204215 - RNA, 19 nt, Artificial Sequence
  Description of Artificial Sequence: Synthetic oligonucleotide
  Antisense strand to SEQ ID NO: 2204214
aguaccauggcaaacacug

SEQ ID NO: 2204216 - RNA, 19 nt, Artificial Sequence
  Description of Artificial Sequence: Synthetic oligonucleotide
  Sense strand starting at position 1491 of SEQ ID NO: 1883606
agcgcucuggucuauugua

SEQ ID NO: 2204217 - RNA, 19 nt, Artificial Sequence
  Description of Artificial Sequence: Synthetic oligonucleotide
  Antisense strand to SEQ ID NO: 2204216
uacaauagaccagagcgcu

SEQ ID NO: 2204218 - RNA, 19 nt, Artificial Sequence
  Description of Artificial Sequence: Synthetic oligonucleotide
  Sense strand starting at position 2404 of SEQ ID NO: 1883606
ugcaaacuguguguugcaa

SEQ ID NO: 2204219 - RNA, 19 nt, Artificial Sequence
  Description of Artificial Sequence: Synthetic oligonucleotide
  Antisense strand to SEQ ID NO: 2204218
uugcaacacacaguuugca

SEQ ID NO: 2204220 - RNA, 19 nt, Artificial Sequence
  Description of Artificial Sequence: Synthetic oligonucleotide
  Sense strand starting at position 3653 of SEQ ID NO: 1883606
agaagaucuuuaggagcaa

SEQ ID NO: 2204221 - RNA, 19 nt, Artificial Sequence
  Description of Artificial Sequence: Synthetic oligonucleotide
  Antisense strand to SEQ ID NO: 2204220
uugcuccuaaagaucuucu

SEQ ID NO: 2204222 - RNA, 19 nt, Artificial Sequence
  Description of Artificial Sequence: Synthetic oligonucleotide
  Sense strand starting at position 2049 of SEQ ID NO: 1883606
gacaaaugauauggccaga

SEQ ID NO: 2204223 - RNA, 19 nt, Artificial Sequence
  Description of Artificial Sequence: Synthetic oligonucleotide
  Antisense strand to SEQ ID NO: 2204222
ucuggccauaucauuuguc

SEQ ID NO: 2204224 - RNA, 19 nt, Artificial Sequence
  Description of Artificial Sequence: Synthetic oligonucleotide
  Sense strand starting at position 3495 of SEQ ID NO: 1883607
gcaugaaugauuggaugga

SEQ ID NO: 2204225 - RNA, 19 nt, Artificial Sequence
  Description of Artificial Sequence: Synthetic oligonucleotide
  Antisense strand to SEQ ID NO: 2204224
uccauccaaucauucaugc

SEQ ID NO: 2204226 - RNA, 19 nt, Artificial Sequence
  Description of Artificial Sequence: Synthetic oligonucleotide
  Sense strand starting at position 3754 of SEQ ID NO: 1883607
ggaauugaggcaggaaagu

SEQ ID NO: 2204227 - RNA, 19 nt, Artificial Sequence
  Description of Artificial Sequence: Synthetic oligonucleotide
  Antisense strand to SEQ ID NO: 2204226
acuuuccugccucaauucc

SEQ ID NO: 2204228 - RNA, 19 nt, Artificial Sequence
  Description of Artificial Sequence: Synthetic oligonucleotide
  Sense strand starting at position 2857 of SEQ ID NO: 1883607
gggugucaccaacaauauu

SEQ ID NO: 2204229 - RNA, 19 nt, Artificial Sequence
  Description of Artificial Sequence: Synthetic oligonucleotide
  Antisense strand to SEQ ID NO: 2204228
aauauuguuggugacaccc

SEQ ID NO: 2204230 - RNA, 19 nt, Artificial Sequence
  Description of Artificial Sequence: Synthetic oligonucleotide
  Sense strand starting at position 3430 of SEQ ID NO: 1883607
ggauggaugggugguuaaa

SEQ ID NO: 2204231 - RNA, 19 nt, Artificial Sequence
  Description of Artificial Sequence: Synthetic oligonucleotide
  Antisense strand to SEQ ID NO: 2204230
uuuaaccacccauccaucc

SEQ ID NO: 2204232 - RNA, 19 nt, Artificial Sequence
  Description of Artificial Sequence: Synthetic oligonucleotide
  Sense strand starting at position 3739 of SEQ ID NO: 1883607
gacagaugacuguguggaa

SEQ ID NO: 2204233 - RNA, 19 nt, Artificial Sequence
  Description of Artificial Sequence: Synthetic oligonucleotide
  Antisense strand to SEQ ID NO: 2204232
uuccacacagucaucuguc

SEQ ID NO: 2204234 - RNA, 19 nt, Artificial Sequence
  Description of Artificial Sequence: Synthetic oligonucleotide
  Sense strand starting at position 1986 of SEQ ID NO: 1883607
cucucugguuguccauuua

SEQ ID NO: 2204235 - RNA, 19 nt, Artificial Sequence
  Description of Artificial Sequence: Synthetic oligonucleotide
  Antisense strand to SEQ ID NO: 2204234
uaaauggacaaccagagag

SEQ ID NO: 2204236 - RNA, 19 nt, Artificial Sequence
  Description of Artificial Sequence: Synthetic oligonucleotide
  Sense strand starting at position 3432 of SEQ ID NO: 1883607
auggaugggugguuaaaug

SEQ ID NO: 2204237 - RNA, 19 nt, Artificial Sequence
  Description of Artificial Sequence: Synthetic oligonucleotide
  Antisense strand to SEQ ID NO: 2204236
cauuuaaccacccauccau

SEQ ID NO: 2204238 - RNA, 19 nt, Artificial Sequence
  Description of Artificial Sequence: Synthetic oligonucleotide
  Sense strand starting at position 1377 of SEQ ID NO: 1883607
cgauguguugcccuugcaa

SEQ ID NO: 2204239 - RNA, 19 nt, Artificial Sequence
  Description of Artificial Sequence: Synthetic oligonucleotide
  Antisense strand to SEQ ID NO: 2204238
uugcaagggcaacacaucg

SEQ ID NO: 2204240 - RNA, 19 nt, Artificial Sequence
  Description of Artificial Sequence: Synthetic oligonucleotide
  Sense strand starting at position 3740 of SEQ ID NO: 1883607
acagaugacuguguggaau

SEQ ID NO: 2204241 - RNA, 19 nt, Artificial Sequence
  Description of Artificial Sequence: Synthetic oligonucleotide
  Antisense strand to SEQ ID NO: 2204240
auuccacacagucaucugu

SEQ ID NO: 2204242 - RNA, 19 nt, Artificial Sequence
  Description of Artificial Sequence: Synthetic oligonucleotide
  Sense strand starting at position 653 of SEQ ID NO: 1883607
ugagcauuggguugaaaga

SEQ ID NO: 2204243 - RNA, 19 nt, Artificial Sequence
  Description of Artificial Sequence: Synthetic oligonucleotide
  Antisense strand to SEQ ID NO: 2204242
ucuuucaacccaaugcuca

SEQ ID NO: 2204244 - RNA, 19 nt, Artificial Sequence
  Description of Artificial Sequence: Synthetic oligonucleotide
  Sense strand starting at position 3486 of SEQ ID NO: 1883607
uggguagaugcaugaauga

SEQ ID NO: 2204245 - RNA, 19 nt, Artificial Sequence
  Description of Artificial Sequence: Synthetic oligonucleotide
  Antisense strand to SEQ ID NO: 2204244
ucauucaugcaucuaccca

SEQ ID NO: 2204246 - RNA, 19 nt, Artificial Sequence
  Description of Artificial Sequence: Synthetic oligonucleotide
  Sense strand starting at position 1600 of SEQ ID NO: 1883607
accaguucugccuacagga

SEQ ID NO: 2204247 - RNA, 19 nt, Artificial Sequence
  Description of Artificial Sequence: Synthetic oligonucleotide
  Antisense strand to SEQ ID NO: 2204246
uccuguaggcagaacuggu

SEQ ID NO: 2204248 - RNA, 19 nt, Artificial Sequence
  Description of Artificial Sequence: Synthetic oligonucleotide
  Sense strand starting at position 3676 of SEQ ID NO: 1883607
uggguagccagaugauuag

SEQ ID NO: 2204249 - RNA, 19 nt, Artificial Sequence
  Description of Artificial Sequence: Synthetic oligonucleotide
  Antisense strand to SEQ ID NO: 2204248
cuaaucaucuggcuaccca

SEQ ID NO: 2204250 - RNA, 19 nt, Artificial Sequence
  Description of Artificial Sequence: Synthetic oligonucleotide
  Sense strand starting at position 3439 of SEQ ID NO: 1883607
ggugguuaaauggguaaau

SEQ ID NO: 2204251 - RNA, 19 nt, Artificial Sequence
  Description of Artificial Sequence: Synthetic oligonucleotide
  Antisense strand to SEQ ID NO: 2204250
auuuacccauuuaaccacc

SEQ ID NO: 2204252 - RNA, 19 nt, Artificial Sequence
  Description of Artificial Sequence: Synthetic oligonucleotide
  Sense strand starting at position 2024 of SEQ ID NO: 1883607
cugggaacugggugaguuu

SEQ ID NO: 2204253 - RNA, 19 nt, Artificial Sequence
  Description of Artificial Sequence: Synthetic oligonucleotide
  Antisense strand to SEQ ID NO: 2204252
aaacucacccaguucccag

SEQ ID NO: 2204254 - RNA, 19 nt, Artificial Sequence
  Description of Artificial Sequence: Synthetic oligonucleotide
  Sense strand starting at position 2111 of SEQ ID NO: 1883607
cugaccauuccguaaagca

SEQ ID NO: 2204255 - RNA, 19 nt, Artificial Sequence
  Description of Artificial Sequence: Synthetic oligonucleotide
  Antisense strand to SEQ ID NO: 2204254
ugcuuuacggaauggucag

SEQ ID NO: 2204256 - RNA, 19 nt, Artificial Sequence
  Description of Artificial Sequence: Synthetic oligonucleotide
  Sense strand starting at position 231 of SEQ ID NO: 1883607
ucuugugaggccugaagga

SEQ ID NO: 2204257 - RNA, 19 nt, Artificial Sequence
  Description of Artificial Sequence: Synthetic oligonucleotide
  Antisense strand to SEQ ID NO: 2204256
uccuucaggccucacaaga

SEQ ID NO: 2204258 - RNA, 19 nt, Artificial Sequence
  Description of Artificial Sequence: Synthetic oligonucleotide
  Sense strand starting at position 328 of SEQ ID NO: 1883607
ggucaagagucagcaacau

SEQ ID NO: 2204259 - RNA, 19 nt, Artificial Sequence
  Description of Artificial Sequence: Synthetic oligonucleotide
  Antisense strand to SEQ ID NO: 2204258
auguugcugacucuugacc

SEQ ID NO: 2204260 - RNA, 19 nt, Artificial Sequence
  Description of Artificial Sequence: Synthetic oligonucleotide
  Sense strand starting at position 2230 of SEQ ID NO: 1883607
aauacauggucugcugacu

SEQ ID NO: 2204261 - RNA, 19 nt, Artificial Sequence
  Description of Artificial Sequence: Synthetic oligonucleotide
  Antisense strand to SEQ ID NO: 2204260
agucagcagaccauguauu

SEQ ID NO: 2204262 - RNA, 19 nt, Artificial Sequence
  Description of Artificial Sequence: Synthetic oligonucleotide
  Sense strand starting at position 2731 of SEQ ID NO: 1883607
ggaugugcaucuccuaaau

SEQ ID NO: 2204263 - RNA, 19 nt, Artificial Sequence
  Description of Artificial Sequence: Synthetic oligonucleotide
  Antisense strand to SEQ ID NO: 2204262
auuuaggagaugcacaucc

SEQ ID NO: 2204264 - RNA, 19 nt, Artificial Sequence
  Description of Artificial Sequence: Synthetic oligonucleotide
  Sense strand starting at position 3496 of SEQ ID NO: 1883607
caugaaugauuggauggaa

SEQ ID NO: 2204265 - RNA, 19 nt, Artificial Sequence
  Description of Artificial Sequence: Synthetic oligonucleotide
  Antisense strand to SEQ ID NO: 2204264
uuccauccaaucauucaug

SEQ ID NO: 2204266 - RNA, 19 nt, Artificial Sequence
  Description of Artificial Sequence: Synthetic oligonucleotide
  Sense strand starting at position 1458 of SEQ ID NO: 1883607
agacgcugucucugggaga

SEQ ID NO: 2204267 - RNA, 19 nt, Artificial Sequence
  Description of Artificial Sequence: Synthetic oligonucleotide
  Antisense strand to SEQ ID NO: 2204266
ucucccagagacagcgucu

SEQ ID NO: 2204268 - RNA, 19 nt, Artificial Sequence
  Description of Artificial Sequence: Synthetic oligonucleotide
  Sense strand starting at position 3459 of SEQ ID NO: 1883607
gauugauaauuggauggga

SEQ ID NO: 2204269 - RNA, 19 nt, Artificial Sequence
  Description of Artificial Sequence: Synthetic oligonucleotide
  Antisense strand to SEQ ID NO: 2204268
ucccauccaauuaucaauc

SEQ ID NO: 2204270 - RNA, 19 nt, Artificial Sequence
  Description of Artificial Sequence: Synthetic oligonucleotide
  Sense strand starting at position 1608 of SEQ ID NO: 1883607
ugccuacaggagugaguuu

SEQ ID NO: 2204271 - RNA, 19 nt, Artificial Sequence
  Description of Artificial Sequence: Synthetic oligonucleotide
  Antisense strand to SEQ ID NO: 2204270
aaacucacuccuguaggca

SEQ ID NO: 2204272 - RNA, 19 nt, Artificial Sequence
  Description of Artificial Sequence: Synthetic oligonucleotide
  Sense strand starting at position 1043 of SEQ ID NO: 1883607
gucauuuaaucuugacaag

SEQ ID NO: 2204273 - RNA, 19 nt, Artificial Sequence
  Description of Artificial Sequence: Synthetic oligonucleotide
  Antisense strand to SEQ ID NO: 2204272
cuugucaagauuaaaugac

SEQ ID NO: 2204274 - RNA, 19 nt, Artificial Sequence
  Description of Artificial Sequence: Synthetic oligonucleotide
  Sense strand starting at position 3349 of SEQ ID NO: 1883607
agguacauugcuugaugca

SEQ ID NO: 2204275 - RNA, 19 nt, Artificial Sequence
  Description of Artificial Sequence: Synthetic oligonucleotide
  Antisense strand to SEQ ID NO: 2204274
ugcaucaagcaauguaccu

SEQ ID NO: 2204276 - RNA, 19 nt, Artificial Sequence
  Description of Artificial Sequence: Synthetic oligonucleotide
  Sense strand starting at position 319 of SEQ ID NO: 1883607
gugucgaccggucaagagu

SEQ ID NO: 2204277 - RNA, 19 nt, Artificial Sequence
  Description of Artificial Sequence: Synthetic oligonucleotide
  Antisense strand to SEQ ID NO: 2204276
acucuugaccggucgacac

SEQ ID NO: 2204278 - RNA, 19 nt, Artificial Sequence
  Description of Artificial Sequence: Synthetic oligonucleotide
  Sense strand starting at position 1617 of SEQ ID NO: 1883607
gagugaguuugcccaggca

SEQ ID NO: 2204279 - RNA, 19 nt, Artificial Sequence
  Description of Artificial Sequence: Synthetic oligonucleotide
  Antisense strand to SEQ ID NO: 2204278
ugccugggcaaacucacuc

SEQ ID NO: 2204280 - RNA, 19 nt, Artificial Sequence
  Description of Artificial Sequence: Synthetic oligonucleotide
  Sense strand starting at position 3682 of SEQ ID NO: 1883607
gccagaugauuagauggaa

SEQ ID NO: 2204281 - RNA, 19 nt, Artificial Sequence
  Description of Artificial Sequence: Synthetic oligonucleotide
  Antisense strand to SEQ ID NO: 2204280
uuccaucuaaucaucuggc

SEQ ID NO: 2204282 - RNA, 19 nt, Artificial Sequence
  Description of Artificial Sequence: Synthetic oligonucleotide
  Sense strand starting at position 241 of SEQ ID NO: 1883607
ccugaaggaucagggcaaa

SEQ ID NO: 2204283 - RNA, 19 nt, Artificial Sequence
  Description of Artificial Sequence: Synthetic oligonucleotide
  Antisense strand to SEQ ID NO: 2204282
uuugcccugauccuucagg

SEQ ID NO: 2204284 - RNA, 19 nt, Artificial Sequence
  Description of Artificial Sequence: Synthetic oligonucleotide
  Sense strand starting at position 3399 of SEQ ID NO: 1883607
guugaacucuuacagauuc

SEQ ID NO: 2204285 - RNA, 19 nt, Artificial Sequence
  Description of Artificial Sequence: Synthetic oligonucleotide
  Antisense strand to SEQ ID NO: 2204284
gaaucuguaagaguucaac

SEQ ID NO: 2204286 - RNA, 19 nt, Artificial Sequence
  Description of Artificial Sequence: Synthetic oligonucleotide
  Sense strand starting at position 3929 of SEQ ID NO: 1883607
cuagcaagaucuggaccaa

SEQ ID NO: 2204287 - RNA, 19 nt, Artificial Sequence
  Description of Artificial Sequence: Synthetic oligonucleotide
  Antisense strand to SEQ ID NO: 2204286
uugguccagaucuugcuag

SEQ ID NO: 2204288 - RNA, 19 nt, Artificial Sequence
  Description of Artificial Sequence: Synthetic oligonucleotide
  Sense strand starting at position 650 of SEQ ID NO: 1883607
agaugagcauuggguugaa

SEQ ID NO: 2204289 - RNA, 19 nt, Artificial Sequence
  Description of Artificial Sequence: Synthetic oligonucleotide
  Antisense strand to SEQ ID NO: 2204288
uucaacccaaugcucaucu

SEQ ID NO: 2204290 - RNA, 19 nt, Artificial Sequence
  Description of Artificial Sequence: Synthetic oligonucleotide
  Sense strand starting at position 1461 of SEQ ID NO: 1883607
cgcugucucugggagauga

SEQ ID NO: 2204291 - RNA, 19 nt, Artificial Sequence
  Description of Artificial Sequence: Synthetic oligonucleotide
  Antisense strand to SEQ ID NO: 2204290
ucaucucccagagacagcg

SEQ ID NO: 2204292 - RNA, 19 nt, Artificial Sequence
  Description of Artificial Sequence: Synthetic oligonucleotide
  Sense strand starting at position 2533 of SEQ ID NO: 1883607
gucugugcuucccagggaa

SEQ ID NO: 2204293 - RNA, 19 nt, Artificial Sequence
  Description of Artificial Sequence: Synthetic oligonucleotide
  Antisense strand to SEQ ID NO: 2204292
uucccugggaagcacagac

SEQ ID NO: 2204294 - RNA, 19 nt, Artificial Sequence
  Description of Artificial Sequence: Synthetic oligonucleotide
  Sense strand starting at position 2907 of SEQ ID NO: 1883607
gccuguaacuuaugacuca

SEQ ID NO: 2204295 - RNA, 19 nt, Artificial Sequence
  Description of Artificial Sequence: Synthetic oligonucleotide
  Antisense strand to SEQ ID NO: 2204294
ugagucauaaguuacaggc

SEQ ID NO: 2204296 - RNA, 19 nt, Artificial Sequence
  Description of Artificial Sequence: Synthetic oligonucleotide
  Sense strand starting at position 1459 of SEQ ID NO: 1883607
gacgcugucucugggagau

SEQ ID NO: 2204297 - RNA, 19 nt, Artificial Sequence
  Description of Artificial Sequence: Synthetic oligonucleotide
  Antisense strand to SEQ ID NO: 2204296
aucucccagagacagcguc

SEQ ID NO: 2204298 - RNA, 19 nt, Artificial Sequence
  Description of Artificial Sequence: Synthetic oligonucleotide
  Sense strand starting at position 2748 of SEQ ID NO: 1883607
auucuagguucuuguaugu

SEQ ID NO: 2204299 - RNA, 19 nt, Artificial Sequence
  Description of Artificial Sequence: Synthetic oligonucleotide
  Antisense strand to SEQ ID NO: 2204298
acauacaagaaccuagaau

SEQ ID NO: 2204300 - RNA, 19 nt, Artificial Sequence
  Description of Artificial Sequence: Synthetic oligonucleotide
  Sense strand starting at position 2121 of SEQ ID NO: 1883607
cguaaagcauccuguuugu

SEQ ID NO: 2204301 - RNA, 19 nt, Artificial Sequence
  Description of Artificial Sequence: Synthetic oligonucleotide
  Antisense strand to SEQ ID NO: 2204300
acaaacaggaugcuuuacg

SEQ ID NO: 2204302 - RNA, 19 nt, Artificial Sequence
  Description of Artificial Sequence: Synthetic oligonucleotide
  Sense strand starting at position 2013 of SEQ ID NO: 1883608
ccgggacggccgcuuuaau

SEQ ID NO: 2204303 - RNA, 19 nt, Artificial Sequence
  Description of Artificial Sequence: Synthetic oligonucleotide
  Antisense strand to SEQ ID NO: 2204302
auuaaagcggccgucccgg

SEQ ID NO: 2204304 - RNA, 19 nt, Artificial Sequence
  Description of Artificial Sequence: Synthetic oligonucleotide
  Sense strand starting at position 2673 of SEQ ID NO: 1883608
ugcuguuggauugaaauag

SEQ ID NO: 2204305 - RNA, 19 nt, Artificial Sequence
  Description of Artificial Sequence: Synthetic oligonucleotide
  Antisense strand to SEQ ID NO: 2204304
cuauuucaauccaacagca

SEQ ID NO: 2204306 - RNA, 19 nt, Artificial Sequence
  Description of Artificial Sequence: Synthetic oligonucleotide
  Sense strand starting at position 2090 of SEQ ID NO: 1883608
acauauuaaacggagcagu

SEQ ID NO: 2204307 - RNA, 19 nt, Artificial Sequence
  Description of Artificial Sequence: Synthetic oligonucleotide
  Antisense strand to SEQ ID NO: 2204306
acugcuccguuuaauaugu

SEQ ID NO: 2204308 - RNA, 19 nt, Artificial Sequence
  Description of Artificial Sequence: Synthetic oligonucleotide
  Sense strand starting at position 3875 of SEQ ID NO: 1883608
gaguuaauggcaggaugga

SEQ ID NO: 2204309 - RNA, 19 nt, Artificial Sequence
  Description of Artificial Sequence: Synthetic oligonucleotide
  Antisense strand to SEQ ID NO: 2204308
uccauccugccauuaacuc

SEQ ID NO: 2204310 - RNA, 19 nt, Artificial Sequence
  Description of Artificial Sequence: Synthetic oligonucleotide
  Sense strand starting at position 3340 of SEQ ID NO: 1883608
uggagaaagagcugaguuu

SEQ ID NO: 2204311 - RNA, 19 nt, Artificial Sequence
  Description of Artificial Sequence: Synthetic oligonucleotide
  Antisense strand to SEQ ID NO: 2204310
aaacucagcucuuucucca

SEQ ID NO: 2204312 - RNA, 19 nt, Artificial Sequence
  Description of Artificial Sequence: Synthetic oligonucleotide
  Sense strand starting at position 201 of SEQ ID NO: 1883608
cagauaucgccauaucuga

SEQ ID NO: 2204313 - RNA, 19 nt, Artificial Sequence
  Description of Artificial Sequence: Synthetic oligonucleotide
  Antisense strand to SEQ ID NO: 2204312
ucagauauggcgauaucug

SEQ ID NO: 2204314 - RNA, 19 nt, Artificial Sequence
  Description of Artificial Sequence: Synthetic oligonucleotide
  Sense strand starting at position 2164 of SEQ ID NO: 1883608
ggaaaucaaucuucugguu

SEQ ID NO: 2204315 - RNA, 19 nt, Artificial Sequence
  Description of Artificial Sequence: Synthetic oligonucleotide
  Antisense strand to SEQ ID NO: 2204314
aaccagaagauugauuucc

SEQ ID NO: 2204316 - RNA, 19 nt, Artificial Sequence
  Description of Artificial Sequence: Synthetic oligonucleotide
  Sense strand starting at position 2752 of SEQ ID NO: 1883608
gguagaacaauguguagga

SEQ ID NO: 2204317 - RNA, 19 nt, Artificial Sequence
  Description of Artificial Sequence: Synthetic oligonucleotide
  Antisense strand to SEQ ID NO: 2204316
uccuacacauuguucuacc

SEQ ID NO: 2204318 - RNA, 19 nt, Artificial Sequence
  Description of Artificial Sequence: Synthetic oligonucleotide
  Sense strand starting at position 1704 of SEQ ID NO: 1883608
ccugcuuaucaggagcaga

SEQ ID NO: 2204319 - RNA, 19 nt, Artificial Sequence
  Description of Artificial Sequence: Synthetic oligonucleotide
  Antisense strand to SEQ ID NO: 2204318
ucugcuccugauaagcagg

SEQ ID NO: 2204320 - RNA, 19 nt, Artificial Sequence
  Description of Artificial Sequence: Synthetic oligonucleotide
  Sense strand starting at position 199 of SEQ ID NO: 1883608
uccagauaucgccauaucu

SEQ ID NO: 2204321 - RNA, 19 nt, Artificial Sequence
  Description of Artificial Sequence: Synthetic oligonucleotide
  Antisense strand to SEQ ID NO: 2204320
agauauggcgauaucugga

SEQ ID NO: 2204322 - RNA, 19 nt, Artificial Sequence
  Description of Artificial Sequence: Synthetic oligonucleotide
  Sense strand starting at position 2801 of SEQ ID NO: 1883608
uggugaauaucccucuuua

SEQ ID NO: 2204323 - RNA, 19 nt, Artificial Sequence
  Description of Artificial Sequence: Synthetic oligonucleotide
  Antisense strand to SEQ ID NO: 2204322
uaaagagggauauucacca

SEQ ID NO: 2204324 - RNA, 19 nt, Artificial Sequence
  Description of Artificial Sequence: Synthetic oligonucleotide
  Sense strand starting at position 3121 of SEQ ID NO: 1883608
cucugaauuccauggcaca

SEQ ID NO: 2204325 - RNA, 19 nt, Artificial Sequence
  Description of Artificial Sequence: Synthetic oligonucleotide
  Antisense strand to SEQ ID NO: 2204324
ugugccauggaauucagag

SEQ ID NO: 2204326 - RNA, 19 nt, Artificial Sequence
  Description of Artificial Sequence: Synthetic oligonucleotide
  Sense strand starting at position 3156 of SEQ ID NO: 1883608
cucagagagguguggcaaa

SEQ ID NO: 2204327 - RNA, 19 nt, Artificial Sequence
  Description of Artificial Sequence: Synthetic oligonucleotide
  Antisense strand to SEQ ID NO: 2204326
uuugccacaccucucugag

SEQ ID NO: 2204328 - RNA, 19 nt, Artificial Sequence
  Description of Artificial Sequence: Synthetic oligonucleotide
  Sense strand starting at position 1543 of SEQ ID NO: 1883608
cguaccaauuaaguuauaa

SEQ ID NO: 2204329 - RNA, 19 nt, Artificial Sequence
  Description of Artificial Sequence: Synthetic oligonucleotide
  Antisense strand to SEQ ID NO: 2204328
uuauaacuuaauugguacg

SEQ ID NO: 2204330 - RNA, 19 nt, Artificial Sequence
  Description of Artificial Sequence: Synthetic oligonucleotide
  Sense strand starting at position 1140 of SEQ ID NO: 1883608
cugacaaauuaggaaagau

SEQ ID NO: 2204331 - RNA, 19 nt, Artificial Sequence
  Description of Artificial Sequence: Synthetic oligonucleotide
  Antisense strand to SEQ ID NO: 2204330
aucuuuccuaauuugucag

SEQ ID NO: 2204332 - RNA, 19 nt, Artificial Sequence
  Description of Artificial Sequence: Synthetic oligonucleotide
  Sense strand starting at position 2688 of SEQ ID NO: 1883608
auaggucagccuuguaaag

SEQ ID NO: 2204333 - RNA, 19 nt, Artificial Sequence
  Description of Artificial Sequence: Synthetic oligonucleotide
  Antisense strand to SEQ ID NO: 2204332
cuuuacaaggcugaccuau

SEQ ID NO: 2204334 - RNA, 19 nt, Artificial Sequence
  Description of Artificial Sequence: Synthetic oligonucleotide
  Sense strand starting at position 2902 of SEQ ID NO: 1883608
agcuguguucuagaaggca

SEQ ID NO: 2204335 - RNA, 19 nt, Artificial Sequence
  Description of Artificial Sequence: Synthetic oligonucleotide
  Antisense strand to SEQ ID NO: 2204334
ugccuucuagaacacagcu

SEQ ID NO: 2204336 - RNA, 19 nt, Artificial Sequence
  Description of Artificial Sequence: Synthetic oligonucleotide
  Sense strand starting at position 3374 of SEQ ID NO: 1883608
gugaauauuugguacucau

SEQ ID NO: 2204337 - RNA, 19 nt, Artificial Sequence
  Description of Artificial Sequence: Synthetic oligonucleotide
  Antisense strand to SEQ ID NO: 2204336
augaguaccaaauauucac

SEQ ID NO: 2204338 - RNA, 19 nt, Artificial Sequence
  Description of Artificial Sequence: Synthetic oligonucleotide
  Sense strand starting at position 1084 of SEQ ID NO: 1883608
gcuggagccuccucucaga

SEQ ID NO: 2204339 - RNA, 19 nt, Artificial Sequence
  Description of Artificial Sequence: Synthetic oligonucleotide
  Antisense strand to SEQ ID NO: 2204338
ucugagaggaggcuccagc

SEQ ID NO: 2204340 - RNA, 19 nt, Artificial Sequence
  Description of Artificial Sequence: Synthetic oligonucleotide
  Sense strand starting at position 2813 of SEQ ID NO: 1883608
cucuuuauaucugcauagu

SEQ ID NO: 2204341 - RNA, 19 nt, Artificial Sequence
  Description of Artificial Sequence: Synthetic oligonucleotide
  Antisense strand to SEQ ID NO: 2204340
acuaugcagauauaaagag

SEQ ID NO: 2204342 - RNA, 19 nt, Artificial Sequence
  Description of Artificial Sequence: Synthetic oligonucleotide
  Sense strand starting at position 2590 of SEQ ID NO: 1883608
ccaagagcugugugaucuu

SEQ ID NO: 2204343 - RNA, 19 nt, Artificial Sequence
  Description of Artificial Sequence: Synthetic oligonucleotide
  Antisense strand to SEQ ID NO: 2204342
aagaucacacagcucuugg

SEQ ID NO: 2204344 - RNA, 19 nt, Artificial Sequence
  Description of Artificial Sequence: Synthetic oligonucleotide
  Sense strand starting at position 2742 of SEQ ID NO: 1883608
aauaaauagugguagaaca

SEQ ID NO: 2204345 - RNA, 19 nt, Artificial Sequence
  Description of Artificial Sequence: Synthetic oligonucleotide
  Antisense strand to SEQ ID NO: 2204344
uguucuaccacuauuuauu

SEQ ID NO: 2204346 - RNA, 19 nt, Artificial Sequence
  Description of Artificial Sequence: Synthetic oligonucleotide
  Sense strand starting at position 1882 of SEQ ID NO: 1883608
uaaaucuccucugcgaguu

SEQ ID NO: 2204347 - RNA, 19 nt, Artificial Sequence
  Description of Artificial Sequence: Synthetic oligonucleotide
  Antisense strand to SEQ ID NO: 2204346
aacucgcagaggagauuua

SEQ ID NO: 2204348 - RNA, 19 nt, Artificial Sequence
  Description of Artificial Sequence: Synthetic oligonucleotide
  Sense strand starting at position 2367 of SEQ ID NO: 1883608
cugugugcccuguaguaaa

SEQ ID NO: 2204349 - RNA, 19 nt, Artificial Sequence
  Description of Artificial Sequence: Synthetic oligonucleotide
  Antisense strand to SEQ ID NO: 2204348
uuuacuacagggcacacag

SEQ ID NO: 2204350 - RNA, 19 nt, Artificial Sequence
  Description of Artificial Sequence: Synthetic oligonucleotide
  Sense strand starting at position 1881 of SEQ ID NO: 1883608
uuaaaucuccucugcgagu

SEQ ID NO: 2204351 - RNA, 19 nt, Artificial Sequence
  Description of Artificial Sequence: Synthetic oligonucleotide
  Antisense strand to SEQ ID NO: 2204350
acucgcagaggagauuuaa

SEQ ID NO: 2204352 - RNA, 19 nt, Artificial Sequence
  Description of Artificial Sequence: Synthetic oligonucleotide
  Sense strand starting at position 2668 of SEQ ID NO: 1883608
cgguaugcuguuggauuga

SEQ ID NO: 2204353 - RNA, 19 nt, Artificial Sequence
  Description of Artificial Sequence: Synthetic oligonucleotide
  Antisense strand to SEQ ID NO: 2204352
ucaauccaacagcauaccg

SEQ ID NO: 2204354 - RNA, 19 nt, Artificial Sequence
  Description of Artificial Sequence: Synthetic oligonucleotide
  Sense strand starting at position 750 of SEQ ID NO: 1883608
cgcccaaucccuuguacuu

SEQ ID NO: 2204355 - RNA, 19 nt, Artificial Sequence
  Description of Artificial Sequence: Synthetic oligonucleotide
  Antisense strand to SEQ ID NO: 2204354
aaguacaagggauugggcg

SEQ ID NO: 2204356 - RNA, 19 nt, Artificial Sequence
  Description of Artificial Sequence: Synthetic oligonucleotide
  Sense strand starting at position 1047 of SEQ ID NO: 1883608
gucugaguggucugcucca

SEQ ID NO: 2204357 - RNA, 19 nt, Artificial Sequence
  Description of Artificial Sequence: Synthetic oligonucleotide
  Antisense strand to SEQ ID NO: 2204356
uggagcagaccacucagac

SEQ ID NO: 2204358 - RNA, 19 nt, Artificial Sequence
  Description of Artificial Sequence: Synthetic oligonucleotide
  Sense strand starting at position 2895 of SEQ ID NO: 1883608
aacugcuagcuguguucua

SEQ ID NO: 2204359 - RNA, 19 nt, Artificial Sequence
  Description of Artificial Sequence: Synthetic oligonucleotide
  Antisense strand to SEQ ID NO: 2204358
uagaacacagcuagcaguu

SEQ ID NO: 2204360 - RNA, 19 nt, Artificial Sequence
  Description of Artificial Sequence: Synthetic oligonucleotide
  Sense strand starting at position 3124 of SEQ ID NO: 1883608
ugaauuccauggcacagau

SEQ ID NO: 2204361 - RNA, 19 nt, Artificial Sequence
  Description of Artificial Sequence: Synthetic oligonucleotide
  Antisense strand to SEQ ID NO: 2204360
aucugugccauggaauuca

SEQ ID NO: 2204362 - RNA, 19 nt, Artificial Sequence
  Description of Artificial Sequence: Synthetic oligonucleotide
  Sense strand starting at position 1087 of SEQ ID NO: 1883608
ggagccuccucucagaaau

SEQ ID NO: 2204363 - RNA, 19 nt, Artificial Sequence
  Description of Artificial Sequence: Synthetic oligonucleotide
  Antisense strand to SEQ ID NO: 2204362
auuucugagaggaggcucc

SEQ ID NO: 2204364 - RNA, 19 nt, Artificial Sequence
  Description of Artificial Sequence: Synthetic oligonucleotide
  Sense strand starting at position 2739 of SEQ ID NO: 1883608
cucaauaaauagugguaga

SEQ ID NO: 2204365 - RNA, 19 nt, Artificial Sequence
  Description of Artificial Sequence: Synthetic oligonucleotide
  Antisense strand to SEQ ID NO: 2204364
ucuaccacuauuuauugag

SEQ ID NO: 2204366 - RNA, 19 nt, Artificial Sequence
  Description of Artificial Sequence: Synthetic oligonucleotide
  Sense strand starting at position 1732 of SEQ ID NO: 1883608
ucggcugucuccgccagaa

SEQ ID NO: 2204367 - RNA, 19 nt, Artificial Sequence
  Description of Artificial Sequence: Synthetic oligonucleotide
  Antisense strand to SEQ ID NO: 2204366
uucuggcggagacagccga

SEQ ID NO: 2204368 - RNA, 19 nt, Artificial Sequence
  Description of Artificial Sequence: Synthetic oligonucleotide
  Sense strand starting at position 1089 of SEQ ID NO: 1883608
agccuccucucagaaaugu

SEQ ID NO: 2204369 - RNA, 19 nt, Artificial Sequence
  Description of Artificial Sequence: Synthetic oligonucleotide
  Antisense strand to SEQ ID NO: 2204368
acauuucugagaggaggcu

SEQ ID NO: 2204370 - RNA, 19 nt, Artificial Sequence
  Description of Artificial Sequence: Synthetic oligonucleotide
  Sense strand starting at position 2365 of SEQ ID NO: 1883608
ggcugugugcccuguagua

SEQ ID NO: 2204371 - RNA, 19 nt, Artificial Sequence
  Description of Artificial Sequence: Synthetic oligonucleotide
  Antisense strand to SEQ ID NO: 2204370
uacuacagggcacacagcc

SEQ ID NO: 2204372 - RNA, 19 nt, Artificial Sequence
  Description of Artificial Sequence: Synthetic oligonucleotide
  Sense strand starting at position 132 of SEQ ID NO: 1883608
ccuagagguuuaugguuaa

SEQ ID NO: 2204373 - RNA, 19 nt, Artificial Sequence
  Description of Artificial Sequence: Synthetic oligonucleotide
  Antisense strand to SEQ ID NO: 2204372
uuaaccauaaaccucuagg

SEQ ID NO: 2204374 - RNA, 19 nt, Artificial Sequence
  Description of Artificial Sequence: Synthetic oligonucleotide
  Sense strand starting at position 3259 of SEQ ID NO: 1883608
aggaaauacugccggcaga

SEQ ID NO: 2204375 - RNA, 19 nt, Artificial Sequence
  Description of Artificial Sequence: Synthetic oligonucleotide
  Antisense strand to SEQ ID NO: 2204374
ucugccggcaguauuuccu

SEQ ID NO: 2204376 - RNA, 19 nt, Artificial Sequence
  Description of Artificial Sequence: Synthetic oligonucleotide
  Sense strand starting at position 2690 of SEQ ID NO: 1883608
aggucagccuuguaaagca

SEQ ID NO: 2204377 - RNA, 19 nt, Artificial Sequence
  Description of Artificial Sequence: Synthetic oligonucleotide
  Antisense strand to SEQ ID NO: 2204376
ugcuuuacaaggcugaccu

SEQ ID NO: 2204378 - RNA, 19 nt, Artificial Sequence
  Description of Artificial Sequence: Synthetic oligonucleotide
  Sense strand starting at position 2778 of SEQ ID NO: 1883608
ugguguuauugguauguuu

SEQ ID NO: 2204379 - RNA, 19 nt, Artificial Sequence
  Description of Artificial Sequence: Synthetic oligonucleotide
  Antisense strand to SEQ ID NO: 2204378
aaacauaccaauaacacca

SEQ ID NO: 2204380 - RNA, 19 nt, Artificial Sequence
  Description of Artificial Sequence: Synthetic oligonucleotide
  Sense strand starting at position 2769 of SEQ ID NO: 1883608
gagggcccuugguguuauu

SEQ ID NO: 2204381 - RNA, 19 nt, Artificial Sequence
  Description of Artificial Sequence: Synthetic oligonucleotide
  Antisense strand to SEQ ID NO: 2204380
aauaacaccaagggcccuc

SEQ ID NO: 2204382 - RNA, 19 nt, Artificial Sequence
  Description of Artificial Sequence: Synthetic oligonucleotide
  Sense strand starting at position 2635 of SEQ ID NO: 1883609
agcaaaguugacuacauau

SEQ ID NO: 2204383 - RNA, 19 nt, Artificial Sequence
  Description of Artificial Sequence: Synthetic oligonucleotide
  Antisense strand to SEQ ID NO: 2204382
auauguagucaacuuugcu

SEQ ID NO: 2204384 - RNA, 19 nt, Artificial Sequence
  Description of Artificial Sequence: Synthetic oligonucleotide
  Sense strand starting at position 290 of SEQ ID NO: 1883609
ucaagagauugccugagaa

SEQ ID NO: 2204385 - RNA, 19 nt, Artificial Sequence
  Description of Artificial Sequence: Synthetic oligonucleotide
  Antisense strand to SEQ ID NO: 2204384
uucucaggcaaucucuuga

SEQ ID NO: 2204386 - RNA, 19 nt, Artificial Sequence
  Description of Artificial Sequence: Synthetic oligonucleotide
  Sense strand starting at position 1695 of SEQ ID NO: 1883609
acuguacagcuugauaaag

SEQ ID NO: 2204387 - RNA, 19 nt, Artificial Sequence
  Description of Artificial Sequence: Synthetic oligonucleotide
  Antisense strand to SEQ ID NO: 2204386
cuuuaucaagcuguacagu

SEQ ID NO: 2204388 - RNA, 19 nt, Artificial Sequence
  Description of Artificial Sequence: Synthetic oligonucleotide
  Sense strand starting at position 1529 of SEQ ID NO: 1883609
cugaauaaggcuuaguaua

SEQ ID NO: 2204389 - RNA, 19 nt, Artificial Sequence
  Description of Artificial Sequence: Synthetic oligonucleotide
  Antisense strand to SEQ ID NO: 2204388
uauacuaagccuuauucag

SEQ ID NO: 2204390 - RNA, 19 nt, Artificial Sequence
  Description of Artificial Sequence: Synthetic oligonucleotide
  Sense strand starting at position 3800 of SEQ ID NO: 1883609
cccauuagucuuuagggac

SEQ ID NO: 2204391 - RNA, 19 nt, Artificial Sequence
  Description of Artificial Sequence: Synthetic oligonucleotide
  Antisense strand to SEQ ID NO: 2204390
gucccuaaagacuaauggg

SEQ ID NO: 2204392 - RNA, 19 nt, Artificial Sequence
  Description of Artificial Sequence: Synthetic oligonucleotide
  Sense strand starting at position 2814 of SEQ ID NO: 1883609
cuacauuguauugagguga

SEQ ID NO: 2204393 - RNA, 19 nt, Artificial Sequence
  Description of Artificial Sequence: Synthetic oligonucleotide
  Antisense strand to SEQ ID NO: 2204392
ucaccucaauacaauguag

SEQ ID NO: 2204394 - RNA, 19 nt, Artificial Sequence
  Description of Artificial Sequence: Synthetic oligonucleotide
  Sense strand starting at position 2959 of SEQ ID NO: 1883609
ugaagacugaguuggacuu

SEQ ID NO: 2204395 - RNA, 19 nt, Artificial Sequence
  Description of Artificial Sequence: Synthetic oligonucleotide
  Antisense strand to SEQ ID NO: 2204394
aaguccaacucagucuuca

SEQ ID NO: 2204396 - RNA, 19 nt, Artificial Sequence
  Description of Artificial Sequence: Synthetic oligonucleotide
  Sense strand starting at position 556 of SEQ ID NO: 1883609
ggacuuaaagguggaucuu

SEQ ID NO: 2204397 - RNA, 19 nt, Artificial Sequence
  Description of Artificial Sequence: Synthetic oligonucleotide
  Antisense strand to SEQ ID NO: 2204396
aagauccaccuuuaagucc

SEQ ID NO: 2204398 - RNA, 19 nt, Artificial Sequence
  Description of Artificial Sequence: Synthetic oligonucleotide
  Sense strand starting at position 562 of SEQ ID NO: 1883609
aaagguggaucuuccaauu

SEQ ID NO: 2204399 - RNA, 19 nt, Artificial Sequence
  Description of Artificial Sequence: Synthetic oligonucleotide
  Antisense strand to SEQ ID NO: 2204398
aauuggaagauccaccuuu

SEQ ID NO: 2204400 - RNA, 19 nt, Artificial Sequence
  Description of Artificial Sequence: Synthetic oligonucleotide
  Sense strand starting at position 3262 of SEQ ID NO: 1883609
cuuuacugauaugcaagaa

SEQ ID NO: 2204401 - RNA, 19 nt, Artificial Sequence
  Description of Artificial Sequence: Synthetic oligonucleotide
  Antisense strand to SEQ ID NO: 2204400
uucuugcauaucaguaaag

SEQ ID NO: 2204402 - RNA, 19 nt, Artificial Sequence
  Description of Artificial Sequence: Synthetic oligonucleotide
  Sense strand starting at position 2321 of SEQ ID NO: 1883609
aguuauaaggcucaguaga

SEQ ID NO: 2204403 - RNA, 19 nt, Artificial Sequence
  Description of Artificial Sequence: Synthetic oligonucleotide
  Antisense strand to SEQ ID NO: 2204402
ucuacugagccuuauaacu

SEQ ID NO: 2204404 - RNA, 19 nt, Artificial Sequence
  Description of Artificial Sequence: Synthetic oligonucleotide
  Sense strand starting at position 1381 of SEQ ID NO: 1883609
ucaguuucugagggacaca

SEQ ID NO: 2204405 - RNA, 19 nt, Artificial Sequence
  Description of Artificial Sequence: Synthetic oligonucleotide
  Antisense strand to SEQ ID NO: 2204404
ugugucccucagaaacuga

SEQ ID NO: 2204406 - RNA, 19 nt, Artificial Sequence
  Description of Artificial Sequence: Synthetic oligonucleotide
  Sense strand starting at position 606 of SEQ ID NO: 1883609
aggacugucaaaugugaug

SEQ ID NO: 2204407 - RNA, 19 nt, Artificial Sequence
  Description of Artificial Sequence: Synthetic oligonucleotide
  Antisense strand to SEQ ID NO: 2204406
caucacauuugacaguccu

SEQ ID NO: 2204408 - RNA, 19 nt, Artificial Sequence
  Description of Artificial Sequence: Synthetic oligonucleotide
  Sense strand starting at position 3006 of SEQ ID NO: 1883609
cuauguccucuagaucuua

SEQ ID NO: 2204409 - RNA, 19 nt, Artificial Sequence
  Description of Artificial Sequence: Synthetic oligonucleotide
  Antisense strand to SEQ ID NO: 2204408
uaagaucuagaggacauag

SEQ ID NO: 2204410 - RNA, 19 nt, Artificial Sequence
  Description of Artificial Sequence: Synthetic oligonucleotide
  Sense strand starting at position 1320 of SEQ ID NO: 1883609
aguuauagacauugacucu

SEQ ID NO: 2204411 - RNA, 19 nt, Artificial Sequence
  Description of Artificial Sequence: Synthetic oligonucleotide
  Antisense strand to SEQ ID NO: 2204410
agagucaaugucuauaacu

SEQ ID NO: 2204412 - RNA, 19 nt, Artificial Sequence
  Description of Artificial Sequence: Synthetic oligonucleotide
  Sense strand starting at position 3389 of SEQ ID NO: 1883609
gacucacaguucucugaag

SEQ ID NO: 2204413 - RNA, 19 nt, Artificial Sequence
  Description of Artificial Sequence: Synthetic oligonucleotide
  Antisense strand to SEQ ID NO: 2204412
cuucagagaacugugaguc

SEQ ID NO: 2204414 - RNA, 19 nt, Artificial Sequence
  Description of Artificial Sequence: Synthetic oligonucleotide
  Sense strand starting at position 3043 of SEQ ID NO: 1883609
acuaacuagggcugacauu

SEQ ID NO: 2204415 - RNA, 19 nt, Artificial Sequence
  Description of Artificial Sequence: Synthetic oligonucleotide
  Antisense strand to SEQ ID NO: 2204414
aaugucagcccuaguuagu

SEQ ID NO: 2204416 - RNA, 19 nt, Artificial Sequence
  Description of Artificial Sequence: Synthetic oligonucleotide
  Sense strand starting at position 1704 of SEQ ID NO: 1883609
cuugauaaaguuuaacgua

SEQ ID NO: 2204417 - RNA, 19 nt, Artificial Sequence
  Description of Artificial Sequence: Synthetic oligonucleotide
  Antisense strand to SEQ ID NO: 2204416
uacguuaaacuuuaucaag

SEQ ID NO: 2204418 - RNA, 19 nt, Artificial Sequence
  Description of Artificial Sequence: Synthetic oligonucleotide
  Sense strand starting at position 3824 of SEQ ID NO: 1883609
ggguucuaguaauugaaua

SEQ ID NO: 2204419 - RNA, 19 nt, Artificial Sequence
  Description of Artificial Sequence: Synthetic oligonucleotide
  Antisense strand to SEQ ID NO: 2204418
uauucaauuacuagaaccc

SEQ ID NO: 2204420 - RNA, 19 nt, Artificial Sequence
  Description of Artificial Sequence: Synthetic oligonucleotide
  Sense strand starting at position 3524 of SEQ ID NO: 1883609
uucuaauggcacuagaugu

SEQ ID NO: 2204421 - RNA, 19 nt, Artificial Sequence
  Description of Artificial Sequence: Synthetic oligonucleotide
  Antisense strand to SEQ ID NO: 2204420
acaucuagugccauuagaa

SEQ ID NO: 2204422 - RNA, 19 nt, Artificial Sequence
  Description of Artificial Sequence: Synthetic oligonucleotide
  Sense strand starting at position 3758 of SEQ ID NO: 1883609
ggccuauaauaccuuugaa

SEQ ID NO: 2204423 - RNA, 19 nt, Artificial Sequence
  Description of Artificial Sequence: Synthetic oligonucleotide
  Antisense strand to SEQ ID NO: 2204422
uucaaagguauuauaggcc

SEQ ID NO: 2204424 - RNA, 19 nt, Artificial Sequence
  Description of Artificial Sequence: Synthetic oligonucleotide
  Sense strand starting at position 2818 of SEQ ID NO: 1883609
auuguauugaggugauaca

SEQ ID NO: 2204425 - RNA, 19 nt, Artificial Sequence
  Description of Artificial Sequence: Synthetic oligonucleotide
  Antisense strand to SEQ ID NO: 2204424
uguaucaccucaauacaau

SEQ ID NO: 2204426 - RNA, 19 nt, Artificial Sequence
  Description of Artificial Sequence: Synthetic oligonucleotide
  Sense strand starting at position 1508 of SEQ ID NO: 1883609
gggcuauuucuuggcuucu

SEQ ID NO: 2204427 - RNA, 19 nt, Artificial Sequence
  Description of Artificial Sequence: Synthetic oligonucleotide
  Antisense strand to SEQ ID NO: 2204426
agaagccaagaaauagccc

SEQ ID NO: 2204428 - RNA, 19 nt, Artificial Sequence
  Description of Artificial Sequence: Synthetic oligonucleotide
  Sense strand starting at position 1519 of SEQ ID NO: 1883609
uggcuucuggcugaauaag

SEQ ID NO: 2204429 - RNA, 19 nt, Artificial Sequence
  Description of Artificial Sequence: Synthetic oligonucleotide
  Antisense strand to SEQ ID NO: 2204428
cuuauucagccagaagcca

SEQ ID NO: 2204430 - RNA, 19 nt, Artificial Sequence
  Description of Artificial Sequence: Synthetic oligonucleotide
  Sense strand starting at position 2401 of SEQ ID NO: 1883609
aaguuucugggagggcuaa

SEQ ID NO: 2204431 - RNA, 19 nt, Artificial Sequence
  Description of Artificial Sequence: Synthetic oligonucleotide
  Antisense strand to SEQ ID NO: 2204430
uuagcccucccagaaacuu

SEQ ID NO: 2204432 - RNA, 19 nt, Artificial Sequence
  Description of Artificial Sequence: Synthetic oligonucleotide
  Sense strand starting at position 599 of SEQ ID NO: 1883609
gcucuaaaggacugucaaa

SEQ ID NO: 2204433 - RNA, 19 nt, Artificial Sequence
  Description of Artificial Sequence: Synthetic oligonucleotide
  Antisense strand to SEQ ID NO: 2204432
uuugacaguccuuuagagc

SEQ ID NO: 2204434 - RNA, 19 nt, Artificial Sequence
  Description of Artificial Sequence: Synthetic oligonucleotide
  Sense strand starting at position 437 of SEQ ID NO: 1883609
gcagaucagcccugaaaga

SEQ ID NO: 2204435 - RNA, 19 nt, Artificial Sequence
  Description of Artificial Sequence: Synthetic oligonucleotide
  Antisense strand to SEQ ID NO: 2204434
ucuuucagggcugaucugc

SEQ ID NO: 2204436 - RNA, 19 nt, Artificial Sequence
  Description of Artificial Sequence: Synthetic oligonucleotide
  Sense strand starting at position 3125 of SEQ ID NO: 1883609
uaacuuuggguugguuaaa

SEQ ID NO: 2204437 - RNA, 19 nt, Artificial Sequence
  Description of Artificial Sequence: Synthetic oligonucleotide
  Antisense strand to SEQ ID NO: 2204436
uuuaaccaacccaaaguua

SEQ ID NO: 2204438 - RNA, 19 nt, Artificial Sequence
  Description of Artificial Sequence: Synthetic oligonucleotide
  Sense strand starting at position 618 of SEQ ID NO: 1883609
ugugauguuucacugagga

SEQ ID NO: 2204439 - RNA, 19 nt, Artificial Sequence
  Description of Artificial Sequence: Synthetic oligonucleotide
  Antisense strand to SEQ ID NO: 2204438
uccucagugaaacaucaca

SEQ ID NO: 2204440 - RNA, 19 nt, Artificial Sequence
  Description of Artificial Sequence: Synthetic oligonucleotide
  Sense strand starting at position 82 of SEQ ID NO: 1883609
ggaauauuguaagcagggu

SEQ ID NO: 2204441 - RNA, 19 nt, Artificial Sequence
  Description of Artificial Sequence: Synthetic oligonucleotide
  Antisense strand to SEQ ID NO: 2204440
acccugcuuacaauauucc

SEQ ID NO: 2204442 - RNA, 19 nt, Artificial Sequence
  Description of Artificial Sequence: Synthetic oligonucleotide
  Sense strand starting at position 1309 of SEQ ID NO: 1883609
uuagaagccuuaguuauag

SEQ ID NO: 2204443 - RNA, 19 nt, Artificial Sequence
  Description of Artificial Sequence: Synthetic oligonucleotide
  Antisense strand to SEQ ID NO: 2204442
cuauaacuaaggcuucuaa

SEQ ID NO: 2204444 - RNA, 19 nt, Artificial Sequence
  Description of Artificial Sequence: Synthetic oligonucleotide
  Sense strand starting at position 2323 of SEQ ID NO: 1883609
uuauaaggcucaguagauc

SEQ ID NO: 2204445 - RNA, 19 nt, Artificial Sequence
  Description of Artificial Sequence: Synthetic oligonucleotide
  Antisense strand to SEQ ID NO: 2204444
gaucuacugagccuuauaa

SEQ ID NO: 2204446 - RNA, 19 nt, Artificial Sequence
  Description of Artificial Sequence: Synthetic oligonucleotide
  Sense strand starting at position 1195 of SEQ ID NO: 1883609
auguacaggguuugguaaa

SEQ ID NO: 2204447 - RNA, 19 nt, Artificial Sequence
  Description of Artificial Sequence: Synthetic oligonucleotide
  Antisense strand to SEQ ID NO: 2204446
uuuaccaaacccuguacau

SEQ ID NO: 2204448 - RNA, 19 nt, Artificial Sequence
  Description of Artificial Sequence: Synthetic oligonucleotide
  Sense strand starting at position 221 of SEQ ID NO: 1883609
caagaugcugcuggacaau

SEQ ID NO: 2204449 - RNA, 19 nt, Artificial Sequence
  Description of Artificial Sequence: Synthetic oligonucleotide
  Antisense strand to SEQ ID NO: 2204448
auuguccagcagcaucuug

SEQ ID NO: 2204450 - RNA, 19 nt, Artificial Sequence
  Description of Artificial Sequence: Synthetic oligonucleotide
  Sense strand starting at position 1561 of SEQ ID NO: 1883609
gaucaugggcuugaguguu

SEQ ID NO: 2204451 - RNA, 19 nt, Artificial Sequence
  Description of Artificial Sequence: Synthetic oligonucleotide
  Antisense strand to SEQ ID NO: 2204450
aacacucaagcccaugauc

SEQ ID NO: 2204452 - RNA, 19 nt, Artificial Sequence
  Description of Artificial Sequence: Synthetic oligonucleotide
  Sense strand starting at position 3124 of SEQ ID NO: 1883609
cuaacuuuggguugguuaa

SEQ ID NO: 2204453 - RNA, 19 nt, Artificial Sequence
  Description of Artificial Sequence: Synthetic oligonucleotide
  Antisense strand to SEQ ID NO: 2204452
uuaaccaacccaaaguuag

SEQ ID NO: 2204454 - RNA, 19 nt, Artificial Sequence
  Description of Artificial Sequence: Synthetic oligonucleotide
  Sense strand starting at position 86 of SEQ ID NO: 1883609
uauuguaagcagggugaau

SEQ ID NO: 2204455 - RNA, 19 nt, Artificial Sequence
  Description of Artificial Sequence: Synthetic oligonucleotide
  Antisense strand to SEQ ID NO: 2204454
auucacccugcuuacaaua

SEQ ID NO: 2204456 - RNA, 19 nt, Artificial Sequence
  Description of Artificial Sequence: Synthetic oligonucleotide
  Sense strand starting at position 88 of SEQ ID NO: 1883609
uuguaagcagggugaauua

SEQ ID NO: 2204457 - RNA, 19 nt, Artificial Sequence
  Description of Artificial Sequence: Synthetic oligonucleotide
  Antisense strand to SEQ ID NO: 2204456
uaauucacccugcuuacaa

SEQ ID NO: 2204458 - RNA, 19 nt, Artificial Sequence
  Description of Artificial Sequence: Synthetic oligonucleotide
  Sense strand starting at position 3390 of SEQ ID NO: 1883609
acucacaguucucugaagu

SEQ ID NO: 2204459 - RNA, 19 nt, Artificial Sequence
  Description of Artificial Sequence: Synthetic oligonucleotide
  Antisense strand to SEQ ID NO: 2204458
acuucagagaacugugagu

SEQ ID NO: 2204460 - RNA, 19 nt, Artificial Sequence
  Description of Artificial Sequence: Synthetic oligonucleotide
  Sense strand starting at position 1607 of SEQ ID NO: 1883609
gcuaaucuugcaggaaauu

SEQ ID NO: 2204461 - RNA, 19 nt, Artificial Sequence
  Description of Artificial Sequence: Synthetic oligonucleotide
  Antisense strand to SEQ ID NO: 2204460
aauuuccugcaagauuagc

SEQ ID NO: 2204462 - RNA, 19 nt, Artificial Sequence
  Description of Artificial Sequence: Synthetic oligonucleotide
  Sense strand starting at position 404 of SEQ ID NO: 1883610
agugcuuugauugaggaga

SEQ ID NO: 2204463 - RNA, 19 nt, Artificial Sequence
  Description of Artificial Sequence: Synthetic oligonucleotide
  Antisense strand to SEQ ID NO: 2204462
ucuccucaaucaaagcacu

SEQ ID NO: 2204464 - RNA, 19 nt, Artificial Sequence
  Description of Artificial Sequence: Synthetic oligonucleotide
  Sense strand starting at position 2361 of SEQ ID NO: 1883610
uguggcgugcauguauaaa

SEQ ID NO: 2204465 - RNA, 19 nt, Artificial Sequence
  Description of Artificial Sequence: Synthetic oligonucleotide
  Antisense strand to SEQ ID NO: 2204464
uuuauacaugcacgccaca

SEQ ID NO: 2204466 - RNA, 19 nt, Artificial Sequence
  Description of Artificial Sequence: Synthetic oligonucleotide
  Sense strand starting at position 2425 of SEQ ID NO: 1883610
gaugaaagugaaugaugca

SEQ ID NO: 2204467 - RNA, 19 nt, Artificial Sequence
  Description of Artificial Sequence: Synthetic oligonucleotide
  Antisense strand to SEQ ID NO: 2204466
ugcaucauucacuuucauc

SEQ ID NO: 2204468 - RNA, 19 nt, Artificial Sequence
  Description of Artificial Sequence: Synthetic oligonucleotide
  Sense strand starting at position 511 of SEQ ID NO: 1883610
gcuuuaauucuugaggaug

SEQ ID NO: 2204469 - RNA, 19 nt, Artificial Sequence
  Description of Artificial Sequence: Synthetic oligonucleotide
  Antisense strand to SEQ ID NO: 2204468
cauccucaagaauuaaagc

SEQ ID NO: 2204470 - RNA, 19 nt, Artificial Sequence
  Description of Artificial Sequence: Synthetic oligonucleotide
  Sense strand starting at position 3436 of SEQ ID NO: 1883610
aggauuagcacugaggcau

SEQ ID NO: 2204471 - RNA, 19 nt, Artificial Sequence
  Description of Artificial Sequence: Synthetic oligonucleotide
  Antisense strand to SEQ ID NO: 2204470
augccucagugcuaauccu

SEQ ID NO: 2204472 - RNA, 19 nt, Artificial Sequence
  Description of Artificial Sequence: Synthetic oligonucleotide
  Sense strand starting at position 745 of SEQ ID NO: 1883610
uguccaugggaguaucaau

SEQ ID NO: 2204473 - RNA, 19 nt, Artificial Sequence
  Description of Artificial Sequence: Synthetic oligonucleotide
  Antisense strand to SEQ ID NO: 2204472
auugauacucccauggaca

SEQ ID NO: 2204474 - RNA, 19 nt, Artificial Sequence
  Description of Artificial Sequence: Synthetic oligonucleotide
  Sense strand starting at position 2293 of SEQ ID NO: 1883610
cugaguggccuauagauga

SEQ ID NO: 2204475 - RNA, 19 nt, Artificial Sequence
  Description of Artificial Sequence: Synthetic oligonucleotide
  Antisense strand to SEQ ID NO: 2204474
ucaucuauaggccacucag

SEQ ID NO: 2204476 - RNA, 19 nt, Artificial Sequence
  Description of Artificial Sequence: Synthetic oligonucleotide
  Sense strand starting at position 3517 of SEQ ID NO: 1883610
cagcucaauguaggagaaa

SEQ ID NO: 2204477 - RNA, 19 nt, Artificial Sequence
  Description of Artificial Sequence: Synthetic oligonucleotide
  Antisense strand to SEQ ID NO: 2204476
uuucuccuacauugagcug

SEQ ID NO: 2204478 - RNA, 19 nt, Artificial Sequence
  Description of Artificial Sequence: Synthetic oligonucleotide
  Sense strand starting at position 1502 of SEQ ID NO: 1883610
agaugaagcuucucacaca

SEQ ID NO: 2204479 - RNA, 19 nt, Artificial Sequence
  Description of Artificial Sequence: Synthetic oligonucleotide
  Antisense strand to SEQ ID NO: 2204478
ugugugagaagcuucaucu

SEQ ID NO: 2204480 - RNA, 19 nt, Artificial Sequence
  Description of Artificial Sequence: Synthetic oligonucleotide
  Sense strand starting at position 2421 of SEQ ID NO: 1883610
ccucgaugaaagugaauga

SEQ ID NO: 2204481 - RNA, 19 nt, Artificial Sequence
  Description of Artificial Sequence: Synthetic oligonucleotide
  Antisense strand to SEQ ID NO: 2204480
ucauucacuuucaucgagg

SEQ ID NO: 2204482 - RNA, 19 nt, Artificial Sequence
  Description of Artificial Sequence: Synthetic oligonucleotide
  Sense strand starting at position 2119 of SEQ ID NO: 1883610
gccauuaaucuguaucaga

SEQ ID NO: 2204483 - RNA, 19 nt, Artificial Sequence
  Description of Artificial Sequence: Synthetic oligonucleotide
  Antisense strand to SEQ ID NO: 2204482
ucugauacagauuaauggc

SEQ ID NO: 2204484 - RNA, 19 nt, Artificial Sequence
  Description of Artificial Sequence: Synthetic oligonucleotide
  Sense strand starting at position 1697 of SEQ ID NO: 1883610
ggagcacauugagugauua

SEQ ID NO: 2204485 - RNA, 19 nt, Artificial Sequence
  Description of Artificial Sequence: Synthetic oligonucleotide
  Antisense strand to SEQ ID NO: 2204484
uaaucacucaaugugcucc

SEQ ID NO: 2204486 - RNA, 19 nt, Artificial Sequence
  Description of Artificial Sequence: Synthetic oligonucleotide
  Sense strand starting at position 2714 of SEQ ID NO: 1883610
cugguaaugcuccgauuuc

SEQ ID NO: 2204487 - RNA, 19 nt, Artificial Sequence
  Description of Artificial Sequence: Synthetic oligonucleotide
  Antisense strand to SEQ ID NO: 2204486
gaaaucggagcauuaccag

SEQ ID NO: 2204488 - RNA, 19 nt, Artificial Sequence
  Description of Artificial Sequence: Synthetic oligonucleotide
  Sense strand starting at position 852 of SEQ ID NO: 1883610
ucuaaauucgugggacaga

SEQ ID NO: 2204489 - RNA, 19 nt, Artificial Sequence
  Description of Artificial Sequence: Synthetic oligonucleotide
  Antisense strand to SEQ ID NO: 2204488
ucugucccacgaauuuaga

SEQ ID NO: 2204490 - RNA, 19 nt, Artificial Sequence
  Description of Artificial Sequence: Synthetic oligonucleotide
  Sense strand starting at position 2229 of SEQ ID NO: 1883610
uaaaccguugcugaggaau

SEQ ID NO: 2204491 - RNA, 19 nt, Artificial Sequence
  Description of Artificial Sequence: Synthetic oligonucleotide
  Antisense strand to SEQ ID NO: 2204490
auuccucagcaacgguuua

SEQ ID NO: 2204492 - RNA, 19 nt, Artificial Sequence
  Description of Artificial Sequence: Synthetic oligonucleotide
  Sense strand starting at position 318 of SEQ ID NO: 1883610
ggacauugugacugcaaag

SEQ ID NO: 2204493 - RNA, 19 nt, Artificial Sequence
  Description of Artificial Sequence: Synthetic oligonucleotide
  Antisense strand to SEQ ID NO: 2204492
cuuugcagucacaaugucc

SEQ ID NO: 2204494 - RNA, 19 nt, Artificial Sequence
  Description of Artificial Sequence: Synthetic oligonucleotide
  Sense strand starting at position 501 of SEQ ID NO: 1883610
gggaauaucugcuuuaauu

SEQ ID NO: 2204495 - RNA, 19 nt, Artificial Sequence
  Description of Artificial Sequence: Synthetic oligonucleotide
  Antisense strand to SEQ ID NO: 2204494
aauuaaagcagauauuccc

SEQ ID NO: 2204496 - RNA, 19 nt, Artificial Sequence
  Description of Artificial Sequence: Synthetic oligonucleotide
  Sense strand starting at position 291 of SEQ ID NO: 1883610
agaugaguuggucagccua

SEQ ID NO: 2204497 - RNA, 19 nt, Artificial Sequence
  Description of Artificial Sequence: Synthetic oligonucleotide
  Antisense strand to SEQ ID NO: 2204496
uaggcugaccaacucaucu

SEQ ID NO: 2204498 - RNA, 19 nt, Artificial Sequence
  Description of Artificial Sequence: Synthetic oligonucleotide
  Sense strand starting at position 3382 of SEQ ID NO: 1883610
auggguuguagccacagau

SEQ ID NO: 2204499 - RNA, 19 nt, Artificial Sequence
  Description of Artificial Sequence: Synthetic oligonucleotide
  Antisense strand to SEQ ID NO: 2204498
aucuguggcuacaacccau

SEQ ID NO: 2204500 - RNA, 19 nt, Artificial Sequence
  Description of Artificial Sequence: Synthetic oligonucleotide
  Sense strand starting at position 317 of SEQ ID NO: 1883610
uggacauugugacugcaaa

SEQ ID NO: 2204501 - RNA, 19 nt, Artificial Sequence
  Description of Artificial Sequence: Synthetic oligonucleotide
  Antisense strand to SEQ ID NO: 2204500
uuugcagucacaaugucca

SEQ ID NO: 2204502 - RNA, 19 nt, Artificial Sequence
  Description of Artificial Sequence: Synthetic oligonucleotide
  Sense strand starting at position 213 of SEQ ID NO: 1883610
ugguuuguccaguaaugag

SEQ ID NO: 2204503 - RNA, 19 nt, Artificial Sequence
  Description of Artificial Sequence: Synthetic oligonucleotide
  Antisense strand to SEQ ID NO: 2204502
cucauuacuggacaaacca

SEQ ID NO: 2204504 - RNA, 19 nt, Artificial Sequence
  Description of Artificial Sequence: Synthetic oligonucleotide
  Sense strand starting at position 2297 of SEQ ID NO: 1883610
guggccuauagaugaccaa

SEQ ID NO: 2204505 - RNA, 19 nt, Artificial Sequence
  Description of Artificial Sequence: Synthetic oligonucleotide
  Antisense strand to SEQ ID NO: 2204504
uuggucaucuauaggccac

SEQ ID NO: 2204506 - RNA, 19 nt, Artificial Sequence
  Description of Artificial Sequence: Synthetic oligonucleotide
  Sense strand starting at position 3435 of SEQ ID NO: 1883610
uaggauuagcacugaggca

SEQ ID NO: 2204507 - RNA, 19 nt, Artificial Sequence
  Description of Artificial Sequence: Synthetic oligonucleotide
  Antisense strand to SEQ ID NO: 2204506
ugccucagugcuaauccua

SEQ ID NO: 2204508 - RNA, 19 nt, Artificial Sequence
  Description of Artificial Sequence: Synthetic oligonucleotide
  Sense strand starting at position 3558 of SEQ ID NO: 1883610
agacuugaguuugaauuua

SEQ ID NO: 2204509 - RNA, 19 nt, Artificial Sequence
  Description of Artificial Sequence: Synthetic oligonucleotide
  Antisense strand to SEQ ID NO: 2204508
uaaauucaaacucaagucu

SEQ ID NO: 2204510 - RNA, 19 nt, Artificial Sequence
  Description of Artificial Sequence: Synthetic oligonucleotide
  Sense strand starting at position 3267 of SEQ ID NO: 1883610
guguccuuaccuggaagaa

SEQ ID NO: 2204511 - RNA, 19 nt, Artificial Sequence
  Description of Artificial Sequence: Synthetic oligonucleotide
  Antisense strand to SEQ ID NO: 2204510
uucuuccagguaaggacac

SEQ ID NO: 2204512 - RNA, 19 nt, Artificial Sequence
  Description of Artificial Sequence: Synthetic oligonucleotide
  Sense strand starting at position 2232 of SEQ ID NO: 1883610
accguugcugaggaauauu

SEQ ID NO: 2204513 - RNA, 19 nt, Artificial Sequence
  Description of Artificial Sequence: Synthetic oligonucleotide
  Antisense strand to SEQ ID NO: 2204512
aauauuccucagcaacggu

SEQ ID NO: 2204514 - RNA, 19 nt, Artificial Sequence
  Description of Artificial Sequence: Synthetic oligonucleotide
  Sense strand starting at position 3510 of SEQ ID NO: 1883610
ugggaugcagcucaaugua

SEQ ID NO: 2204515 - RNA, 19 nt, Artificial Sequence
  Description of Artificial Sequence: Synthetic oligonucleotide
  Antisense strand to SEQ ID NO: 2204514
uacauugagcugcauccca

SEQ ID NO: 2204516 - RNA, 19 nt, Artificial Sequence
  Description of Artificial Sequence: Synthetic oligonucleotide
  Sense strand starting at position 2291 of SEQ ID NO: 1883610
agcugaguggccuauagau

SEQ ID NO: 2204517 - RNA, 19 nt, Artificial Sequence
  Description of Artificial Sequence: Synthetic oligonucleotide
  Antisense strand to SEQ ID NO: 2204516
aucuauaggccacucagcu

SEQ ID NO: 2204518 - RNA, 19 nt, Artificial Sequence
  Description of Artificial Sequence: Synthetic oligonucleotide
  Sense strand starting at position 2006 of SEQ ID NO: 1883610
guggaaucuucucucauua

SEQ ID NO: 2204519 - RNA, 19 nt, Artificial Sequence
  Description of Artificial Sequence: Synthetic oligonucleotide
  Antisense strand to SEQ ID NO: 2204518
uaaugagagaagauuccac

SEQ ID NO: 2204520 - RNA, 19 nt, Artificial Sequence
  Description of Artificial Sequence: Synthetic oligonucleotide
  Sense strand starting at position 1136 of SEQ ID NO: 1883610
gaagaugccucauuacagu

SEQ ID NO: 2204521 - RNA, 19 nt, Artificial Sequence
  Description of Artificial Sequence: Synthetic oligonucleotide
  Antisense strand to SEQ ID NO: 2204520
acuguaaugaggcaucuuc

SEQ ID NO: 2204522 - RNA, 19 nt, Artificial Sequence
  Description of Artificial Sequence: Synthetic oligonucleotide
  Sense strand starting at position 2115 of SEQ ID NO: 1883610
gagagccauuaaucuguau

SEQ ID NO: 2204523 - RNA, 19 nt, Artificial Sequence
  Description of Artificial Sequence: Synthetic oligonucleotide
  Antisense strand to SEQ ID NO: 2204522
auacagauuaauggcucuc

SEQ ID NO: 2204524 - RNA, 19 nt, Artificial Sequence
  Description of Artificial Sequence: Synthetic oligonucleotide
  Sense strand starting at position 2569 of SEQ ID NO: 1883610
cugacaaauccuugcugac

SEQ ID NO: 2204525 - RNA, 19 nt, Artificial Sequence
  Description of Artificial Sequence: Synthetic oligonucleotide
  Antisense strand to SEQ ID NO: 2204524
gucagcaaggauuugucag

SEQ ID NO: 2204526 - RNA, 19 nt, Artificial Sequence
  Description of Artificial Sequence: Synthetic oligonucleotide
  Sense strand starting at position 509 of SEQ ID NO: 1883610
cugcuuuaauucuugagga

SEQ ID NO: 2204527 - RNA, 19 nt, Artificial Sequence
  Description of Artificial Sequence: Synthetic oligonucleotide
  Antisense strand to SEQ ID NO: 2204526
uccucaagaauuaaagcag

SEQ ID NO: 2204528 - RNA, 19 nt, Artificial Sequence
  Description of Artificial Sequence: Synthetic oligonucleotide
  Sense strand starting at position 1113 of SEQ ID NO: 1883610
aagagcuauucugccagga

SEQ ID NO: 2204529 - RNA, 19 nt, Artificial Sequence
  Description of Artificial Sequence: Synthetic oligonucleotide
  Antisense strand to SEQ ID NO: 2204528
uccuggcagaauagcucuu

SEQ ID NO: 2204530 - RNA, 19 nt, Artificial Sequence
  Description of Artificial Sequence: Synthetic oligonucleotide
  Sense strand starting at position 919 of SEQ ID NO: 1883610
gagugcgcauuucucaauu

SEQ ID NO: 2204531 - RNA, 19 nt, Artificial Sequence
  Description of Artificial Sequence: Synthetic oligonucleotide
  Antisense strand to SEQ ID NO: 2204530
aauugagaaaugcgcacuc

SEQ ID NO: 2204532 - RNA, 19 nt, Artificial Sequence
  Description of Artificial Sequence: Synthetic oligonucleotide
  Sense strand starting at position 2519 of SEQ ID NO: 1883610
gguaucuuccuguauccua

SEQ ID NO: 2204533 - RNA, 19 nt, Artificial Sequence
  Description of Artificial Sequence: Synthetic oligonucleotide
  Antisense strand to SEQ ID NO: 2204532
uaggauacaggaagauacc

SEQ ID NO: 2204534 - RNA, 19 nt, Artificial Sequence
  Description of Artificial Sequence: Synthetic oligonucleotide
  Sense strand starting at position 3669 of SEQ ID NO: 1883610
uauguuagguuguuagaag

SEQ ID NO: 2204535 - RNA, 19 nt, Artificial Sequence
  Description of Artificial Sequence: Synthetic oligonucleotide
  Antisense strand to SEQ ID NO: 2204534
cuucuaacaaccuaacaua

SEQ ID NO: 2204536 - RNA, 19 nt, Artificial Sequence
  Description of Artificial Sequence: Synthetic oligonucleotide
  Sense strand starting at position 2005 of SEQ ID NO: 1883610
uguggaaucuucucucauu

SEQ ID NO: 2204537 - RNA, 19 nt, Artificial Sequence
  Description of Artificial Sequence: Synthetic oligonucleotide
  Antisense strand to SEQ ID NO: 2204536
aaugagagaagauuccaca

SEQ ID NO: 2204538 - RNA, 19 nt, Artificial Sequence
  Description of Artificial Sequence: Synthetic oligonucleotide
  Sense strand starting at position 1701 of SEQ ID NO: 1883610
cacauugagugauuagcuu

SEQ ID NO: 2204539 - RNA, 19 nt, Artificial Sequence
  Description of Artificial Sequence: Synthetic oligonucleotide
  Antisense strand to SEQ ID NO: 2204538
aagcuaaucacucaaugug

SEQ ID NO: 2204540 - RNA, 19 nt, Artificial Sequence
  Description of Artificial Sequence: Synthetic oligonucleotide
  Sense strand starting at position 2415 of SEQ ID NO: 1883610
uggugaccucgaugaaagu

SEQ ID NO: 2204541 - RNA, 19 nt, Artificial Sequence
  Description of Artificial Sequence: Synthetic oligonucleotide
  Antisense strand to SEQ ID NO: 2204540
acuuucaucgaggucacca

SEQ ID NO: 2204542 - RNA, 19 nt, Artificial Sequence
  Description of Artificial Sequence: Synthetic oligonucleotide
  Sense strand starting at position 2302 of SEQ ID NO: 1883611
cugauuucacgguggugau

SEQ ID NO: 2204543 - RNA, 19 nt, Artificial Sequence
  Description of Artificial Sequence: Synthetic oligonucleotide
  Antisense strand to SEQ ID NO: 2204542
aucaccaccgugaaaucag

SEQ ID NO: 2204544 - RNA, 19 nt, Artificial Sequence
  Description of Artificial Sequence: Synthetic oligonucleotide
  Sense strand starting at position 2303 of SEQ ID NO: 1883611
ugauuucacgguggugauu

SEQ ID NO: 2204545 - RNA, 19 nt, Artificial Sequence
  Description of Artificial Sequence: Synthetic oligonucleotide
  Antisense strand to SEQ ID NO: 2204544
aaucaccaccgugaaauca

SEQ ID NO: 2204546 - RNA, 19 nt, Artificial Sequence
  Description of Artificial Sequence: Synthetic oligonucleotide
  Sense strand starting at position 1904 of SEQ ID NO: 1883611
uccuuugagcaugacagau

SEQ ID NO: 2204547 - RNA, 19 nt, Artificial Sequence
  Description of Artificial Sequence: Synthetic oligonucleotide
  Antisense strand to SEQ ID NO: 2204546
aucugucaugcucaaagga

SEQ ID NO: 2204548 - RNA, 19 nt, Artificial Sequence
  Description of Artificial Sequence: Synthetic oligonucleotide
  Sense strand starting at position 1438 of SEQ ID NO: 1883611
cuagucuauuugcuuauua

SEQ ID NO: 2204549 - RNA, 19 nt, Artificial Sequence
  Description of Artificial Sequence: Synthetic oligonucleotide
  Antisense strand to SEQ ID NO: 2204548
uaauaagcaaauagacuag

SEQ ID NO: 2204550 - RNA, 19 nt, Artificial Sequence
  Description of Artificial Sequence: Synthetic oligonucleotide
  Sense strand starting at position 3341 of SEQ ID NO: 1883611
gagcaaaucuagucaagau

SEQ ID NO: 2204551 - RNA, 19 nt, Artificial Sequence
  Description of Artificial Sequence: Synthetic oligonucleotide
  Antisense strand to SEQ ID NO: 2204550
aucuugacuagauuugcuc

SEQ ID NO: 2204552 - RNA, 19 nt, Artificial Sequence
  Description of Artificial Sequence: Synthetic oligonucleotide
  Sense strand starting at position 1414 of SEQ ID NO: 1883611
aggaaaugauaccuugcuu

SEQ ID NO: 2204553 - RNA, 19 nt, Artificial Sequence
  Description of Artificial Sequence: Synthetic oligonucleotide
  Antisense strand to SEQ ID NO: 2204552
aagcaagguaucauuuccu

SEQ ID NO: 2204554 - RNA, 19 nt, Artificial Sequence
  Description of Artificial Sequence: Synthetic oligonucleotide
  Sense strand starting at position 1069 of SEQ ID NO: 1883611
agaaguugccuugaagagu

SEQ ID NO: 2204555 - RNA, 19 nt, Artificial Sequence
  Description of Artificial Sequence: Synthetic oligonucleotide
  Antisense strand to SEQ ID NO: 2204554
acucuucaaggcaacuucu

SEQ ID NO: 2204556 - RNA, 19 nt, Artificial Sequence
  Description of Artificial Sequence: Synthetic oligonucleotide
  Sense strand starting at position 2106 of SEQ ID NO: 1883611
auugcugugaaugagaagu

SEQ ID NO: 2204557 - RNA, 19 nt, Artificial Sequence
  Description of Artificial Sequence: Synthetic oligonucleotide
  Antisense strand to SEQ ID NO: 2204556
acuucucauucacagcaau

SEQ ID NO: 2204558 - RNA, 19 nt, Artificial Sequence
  Description of Artificial Sequence: Synthetic oligonucleotide
  Sense strand starting at position 1824 of SEQ ID NO: 1883611
cugacauagcaguaagcaa

SEQ ID NO: 2204559 - RNA, 19 nt, Artificial Sequence
  Description of Artificial Sequence: Synthetic oligonucleotide
  Antisense strand to SEQ ID NO: 2204558
uugcuuacugcuaugucag

SEQ ID NO: 2204560 - RNA, 19 nt, Artificial Sequence
  Description of Artificial Sequence: Synthetic oligonucleotide
  Sense strand starting at position 2840 of SEQ ID NO: 1883611
guucuagagggaggucaau

SEQ ID NO: 2204561 - RNA, 19 nt, Artificial Sequence
  Description of Artificial Sequence: Synthetic oligonucleotide
  Antisense strand to SEQ ID NO: 2204560
auugaccucccucuagaac

SEQ ID NO: 2204562 - RNA, 19 nt, Artificial Sequence
  Description of Artificial Sequence: Synthetic oligonucleotide
  Sense strand starting at position 2144 of SEQ ID NO: 1883611
aaacuaaugguguguagaa

SEQ ID NO: 2204563 - RNA, 19 nt, Artificial Sequence
  Description of Artificial Sequence: Synthetic oligonucleotide
  Antisense strand to SEQ ID NO: 2204562
uucuacacaccauuaguuu

SEQ ID NO: 2204564 - RNA, 19 nt, Artificial Sequence
  Description of Artificial Sequence: Synthetic oligonucleotide
  Sense strand starting at position 2145 of SEQ ID NO: 1883611
aacuaaugguguguagaag

SEQ ID NO: 2204565 - RNA, 19 nt, Artificial Sequence
  Description of Artificial Sequence: Synthetic oligonucleotide
  Antisense strand to SEQ ID NO: 2204564
cuucuacacaccauuaguu

SEQ ID NO: 2204566 - RNA, 19 nt, Artificial Sequence
  Description of Artificial Sequence: Synthetic oligonucleotide
  Sense strand starting at position 360 of SEQ ID NO: 1883611
uagucccuuggguauauau

SEQ ID NO: 2204567 - RNA, 19 nt, Artificial Sequence
  Description of Artificial Sequence: Synthetic oligonucleotide
  Antisense strand to SEQ ID NO: 2204566
auauauacccaagggacua

SEQ ID NO: 2204568 - RNA, 19 nt, Artificial Sequence
  Description of Artificial Sequence: Synthetic oligonucleotide
  Sense strand starting at position 943 of SEQ ID NO: 1883611
ccaucuugaagguguagaa

SEQ ID NO: 2204569 - RNA, 19 nt, Artificial Sequence
  Description of Artificial Sequence: Synthetic oligonucleotide
  Antisense strand to SEQ ID NO: 2204568
uucuacaccuucaagaugg

SEQ ID NO: 2204570 - RNA, 19 nt, Artificial Sequence
  Description of Artificial Sequence: Synthetic oligonucleotide
  Sense strand starting at position 2105 of SEQ ID NO: 1883611
cauugcugugaaugagaag

SEQ ID NO: 2204571 - RNA, 19 nt, Artificial Sequence
  Description of Artificial Sequence: Synthetic oligonucleotide
  Antisense strand to SEQ ID NO: 2204570
cuucucauucacagcaaug

SEQ ID NO: 2204572 - RNA, 19 nt, Artificial Sequence
  Description of Artificial Sequence: Synthetic oligonucleotide
  Sense strand starting at position 3009 of SEQ ID NO: 1883611
ugggcagggacuuguaaau

SEQ ID NO: 2204573 - RNA, 19 nt, Artificial Sequence
  Description of Artificial Sequence: Synthetic oligonucleotide
  Antisense strand to SEQ ID NO: 2204572
auuuacaagucccugccca

SEQ ID NO: 2204574 - RNA, 19 nt, Artificial Sequence
  Description of Artificial Sequence: Synthetic oligonucleotide
  Sense strand starting at position 3040 of SEQ ID NO: 1883611
cugugcccacuuuaugaaa

SEQ ID NO: 2204575 - RNA, 19 nt, Artificial Sequence
  Description of Artificial Sequence: Synthetic oligonucleotide
  Antisense strand to SEQ ID NO: 2204574
uuucauaaagugggcacag

SEQ ID NO: 2204576 - RNA, 19 nt, Artificial Sequence
  Description of Artificial Sequence: Synthetic oligonucleotide
  Sense strand starting at position 3746 of SEQ ID NO: 1883611
ucaggauaguucccugauc

SEQ ID NO: 2204577 - RNA, 19 nt, Artificial Sequence
  Description of Artificial Sequence: Synthetic oligonucleotide
  Antisense strand to SEQ ID NO: 2204576
gaucagggaacuauccuga

SEQ ID NO: 2204578 - RNA, 19 nt, Artificial Sequence
  Description of Artificial Sequence: Synthetic oligonucleotide
  Sense strand starting at position 1066 of SEQ ID NO: 1883611
cuaagaaguugccuugaag

SEQ ID NO: 2204579 - RNA, 19 nt, Artificial Sequence
  Description of Artificial Sequence: Synthetic oligonucleotide
  Antisense strand to SEQ ID NO: 2204578
cuucaaggcaacuucuuag

SEQ ID NO: 2204580 - RNA, 19 nt, Artificial Sequence
  Description of Artificial Sequence: Synthetic oligonucleotide
  Sense strand starting at position 1903 of SEQ ID NO: 1883611
uuccuuugagcaugacaga

SEQ ID NO: 2204581 - RNA, 19 nt, Artificial Sequence
  Description of Artificial Sequence: Synthetic oligonucleotide
  Antisense strand to SEQ ID NO: 2204580
ucugucaugcucaaaggaa

SEQ ID NO: 2204582 - RNA, 19 nt, Artificial Sequence
  Description of Artificial Sequence: Synthetic oligonucleotide
  Sense strand starting at position 3134 of SEQ ID NO: 1883611
auauguguugcucaaagau

SEQ ID NO: 2204583 - RNA, 19 nt, Artificial Sequence
  Description of Artificial Sequence: Synthetic oligonucleotide
  Antisense strand to SEQ ID NO: 2204582
aucuuugagcaacacauau

SEQ ID NO: 2204584 - RNA, 19 nt, Artificial Sequence
  Description of Artificial Sequence: Synthetic oligonucleotide
  Sense strand starting at position 169 of SEQ ID NO: 1883611
cccauauccgugcaaagga

SEQ ID NO: 2204585 - RNA, 19 nt, Artificial Sequence
  Description of Artificial Sequence: Synthetic oligonucleotide
  Antisense strand to SEQ ID NO: 2204584
uccuuugcacggauauggg

SEQ ID NO: 2204586 - RNA, 19 nt, Artificial Sequence
  Description of Artificial Sequence: Synthetic oligonucleotide
  Sense strand starting at position 3748 of SEQ ID NO: 1883611
aggauaguucccugauccu

SEQ ID NO: 2204587 - RNA, 19 nt, Artificial Sequence
  Description of Artificial Sequence: Synthetic oligonucleotide
  Antisense strand to SEQ ID NO: 2204586
aggaucagggaacuauccu

SEQ ID NO: 2204588 - RNA, 19 nt, Artificial Sequence
  Description of Artificial Sequence: Synthetic oligonucleotide
  Sense strand starting at position 3238 of SEQ ID NO: 1883611
agguacuguguguaggaua

SEQ ID NO: 2204589 - RNA, 19 nt, Artificial Sequence
  Description of Artificial Sequence: Synthetic oligonucleotide
  Antisense strand to SEQ ID NO: 2204588
uauccuacacacaguaccu

SEQ ID NO: 2204590 - RNA, 19 nt, Artificial Sequence
  Description of Artificial Sequence: Synthetic oligonucleotide
  Sense strand starting at position 3243 of SEQ ID NO: 1883611
cuguguguaggauaguaga

SEQ ID NO: 2204591 - RNA, 19 nt, Artificial Sequence
  Description of Artificial Sequence: Synthetic oligonucleotide
  Antisense strand to SEQ ID NO: 2204590
ucuacuauccuacacacag

SEQ ID NO: 2204592 - RNA, 19 nt, Artificial Sequence
  Description of Artificial Sequence: Synthetic oligonucleotide
  Sense strand starting at position 1901 of SEQ ID NO: 1883611
uguuccuuugagcaugaca

SEQ ID NO: 2204593 - RNA, 19 nt, Artificial Sequence
  Description of Artificial Sequence: Synthetic oligonucleotide
  Antisense strand to SEQ ID NO: 2204592
ugucaugcucaaaggaaca

SEQ ID NO: 2204594 - RNA, 19 nt, Artificial Sequence
  Description of Artificial Sequence: Synthetic oligonucleotide
  Sense strand starting at position 2300 of SEQ ID NO: 1883611
gccugauuucacgguggug

SEQ ID NO: 2204595 - RNA, 19 nt, Artificial Sequence
  Description of Artificial Sequence: Synthetic oligonucleotide
  Antisense strand to SEQ ID NO: 2204594
caccaccgugaaaucaggc

SEQ ID NO: 2204596 - RNA, 19 nt, Artificial Sequence
  Description of Artificial Sequence: Synthetic oligonucleotide
  Sense strand starting at position 202 of SEQ ID NO: 1883611
uucuuauggcuccauagua

SEQ ID NO: 2204597 - RNA, 19 nt, Artificial Sequence
  Description of Artificial Sequence: Synthetic oligonucleotide
  Antisense strand to SEQ ID NO: 2204596
uacuauggagccauaagaa

SEQ ID NO: 2204598 - RNA, 19 nt, Artificial Sequence
  Description of Artificial Sequence: Synthetic oligonucleotide
  Sense strand starting at position 1111 of SEQ ID NO: 1883611
uuaccugagcuguauccua

SEQ ID NO: 2204599 - RNA, 19 nt, Artificial Sequence
  Description of Artificial Sequence: Synthetic oligonucleotide
  Antisense strand to SEQ ID NO: 2204598
uaggauacagcucagguaa

SEQ ID NO: 2204600 - RNA, 19 nt, Artificial Sequence
  Description of Artificial Sequence: Synthetic oligonucleotide
  Sense strand starting at position 1813 of SEQ ID NO: 1883611
agcagaagugucugacaua

SEQ ID NO: 2204601 - RNA, 19 nt, Artificial Sequence
  Description of Artificial Sequence: Synthetic oligonucleotide
  Antisense strand to SEQ ID NO: 2204600
uaugucagacacuucugcu

SEQ ID NO: 2204602 - RNA, 19 nt, Artificial Sequence
  Description of Artificial Sequence: Synthetic oligonucleotide
  Sense strand starting at position 2098 of SEQ ID NO: 1883611
ggaagagcauugcugugaa

SEQ ID NO: 2204603 - RNA, 19 nt, Artificial Sequence
  Description of Artificial Sequence: Synthetic oligonucleotide
  Antisense strand to SEQ ID NO: 2204602
uucacagcaaugcucuucc

SEQ ID NO: 2204604 - RNA, 19 nt, Artificial Sequence
  Description of Artificial Sequence: Synthetic oligonucleotide
  Sense strand starting at position 3132 of SEQ ID NO: 1883611
aaauauguguugcucaaag

SEQ ID NO: 2204605 - RNA, 19 nt, Artificial Sequence
  Description of Artificial Sequence: Synthetic oligonucleotide
  Antisense strand to SEQ ID NO: 2204604
cuuugagcaacacauauuu

SEQ ID NO: 2204606 - RNA, 19 nt, Artificial Sequence
  Description of Artificial Sequence: Synthetic oligonucleotide
  Sense strand starting at position 2075 of SEQ ID NO: 1883611
ccaauacccuuguuucgaa

SEQ ID NO: 2204607 - RNA, 19 nt, Artificial Sequence
  Description of Artificial Sequence: Synthetic oligonucleotide
  Antisense strand to SEQ ID NO: 2204606
uucgaaacaaggguauugg

SEQ ID NO: 2204608 - RNA, 19 nt, Artificial Sequence
  Description of Artificial Sequence: Synthetic oligonucleotide
  Sense strand starting at position 2101 of SEQ ID NO: 1883611
agagcauugcugugaauga

SEQ ID NO: 2204609 - RNA, 19 nt, Artificial Sequence
  Description of Artificial Sequence: Synthetic oligonucleotide
  Antisense strand to SEQ ID NO: 2204608
ucauucacagcaaugcucu

SEQ ID NO: 2204610 - RNA, 19 nt, Artificial Sequence
  Description of Artificial Sequence: Synthetic oligonucleotide
  Sense strand starting at position 2807 of SEQ ID NO: 1883611
ccugucuauuggccaaaca

SEQ ID NO: 2204611 - RNA, 19 nt, Artificial Sequence
  Description of Artificial Sequence: Synthetic oligonucleotide
  Antisense strand to SEQ ID NO: 2204610
uguuuggccaauagacagg

SEQ ID NO: 2204612 - RNA, 19 nt, Artificial Sequence
  Description of Artificial Sequence: Synthetic oligonucleotide
  Sense strand starting at position 3280 of SEQ ID NO: 1883611
auaugccaugccugaacau

SEQ ID NO: 2204613 - RNA, 19 nt, Artificial Sequence
  Description of Artificial Sequence: Synthetic oligonucleotide
  Antisense strand to SEQ ID NO: 2204612
auguucaggcauggcauau

SEQ ID NO: 2204614 - RNA, 19 nt, Artificial Sequence
  Description of Artificial Sequence: Synthetic oligonucleotide
  Sense strand starting at position 3708 of SEQ ID NO: 1883611
cucuuucuccagcauuagu

SEQ ID NO: 2204615 - RNA, 19 nt, Artificial Sequence
  Description of Artificial Sequence: Synthetic oligonucleotide
  Antisense strand to SEQ ID NO: 2204614
acuaaugcuggagaaagag

SEQ ID NO: 2204616 - RNA, 19 nt, Artificial Sequence
  Description of Artificial Sequence: Synthetic oligonucleotide
  Sense strand starting at position 3579 of SEQ ID NO: 1883611
ugcuuauuaccugaugcuu

SEQ ID NO: 2204617 - RNA, 19 nt, Artificial Sequence
  Description of Artificial Sequence: Synthetic oligonucleotide
  Antisense strand to SEQ ID NO: 2204616
aagcaucagguaauaagca

SEQ ID NO: 2204618 - RNA, 19 nt, Artificial Sequence
  Description of Artificial Sequence: Synthetic oligonucleotide
  Sense strand starting at position 3688 of SEQ ID NO: 1883611
gggcuuucucagugaaccu

SEQ ID NO: 2204619 - RNA, 19 nt, Artificial Sequence
  Description of Artificial Sequence: Synthetic oligonucleotide
  Antisense strand to SEQ ID NO: 2204618
agguucacugagaaagccc

SEQ ID NO: 2204620 - RNA, 19 nt, Artificial Sequence
  Description of Artificial Sequence: Synthetic oligonucleotide
  Sense strand starting at position 167 of SEQ ID NO: 1883611
cacccauauccgugcaaag

SEQ ID NO: 2204621 - RNA, 19 nt, Artificial Sequence
  Description of Artificial Sequence: Synthetic oligonucleotide
  Antisense strand to SEQ ID NO: 2204620
cuuugcacggauaugggug

SEQ ID NO: 2204622 - RNA, 19 nt, Artificial Sequence
  Description of Artificial Sequence: Synthetic oligonucleotide
  Sense strand starting at position 654 of SEQ ID NO: 1883613
cgaaaugcuccacaaauga

SEQ ID NO: 2204623 - RNA, 19 nt, Artificial Sequence
  Description of Artificial Sequence: Synthetic oligonucleotide
  Antisense strand to SEQ ID NO: 2204622
ucauuuguggagcauuucg

SEQ ID NO: 2204624 - RNA, 19 nt, Artificial Sequence
  Description of Artificial Sequence: Synthetic oligonucleotide
  Sense strand starting at position 813 of SEQ ID NO: 1883613
aaaucuguugacuaggcaa

SEQ ID NO: 2204625 - RNA, 19 nt, Artificial Sequence
  Description of Artificial Sequence: Synthetic oligonucleotide
  Antisense strand to SEQ ID NO: 2204624
uugccuagucaacagauuu

SEQ ID NO: 2204626 - RNA, 19 nt, Artificial Sequence
  Description of Artificial Sequence: Synthetic oligonucleotide
  Sense strand starting at position 3076 of SEQ ID NO: 1883613
ggacucucacucugaauga

SEQ ID NO: 2204627 - RNA, 19 nt, Artificial Sequence
  Description of Artificial Sequence: Synthetic oligonucleotide
  Antisense strand to SEQ ID NO: 2204626
ucauucagagugagagucc

SEQ ID NO: 2204628 - RNA, 19 nt, Artificial Sequence
  Description of Artificial Sequence: Synthetic oligonucleotide
  Sense strand starting at position 1038 of SEQ ID NO: 1883613
gguguaaagcuggacaaau

SEQ ID NO: 2204629 - RNA, 19 nt, Artificial Sequence
  Description of Artificial Sequence: Synthetic oligonucleotide
  Antisense strand to SEQ ID NO: 2204628
auuuguccagcuuuacacc

SEQ ID NO: 2204630 - RNA, 19 nt, Artificial Sequence
  Description of Artificial Sequence: Synthetic oligonucleotide
  Sense strand starting at position 1515 of SEQ ID NO: 1883613
uggguuagaaauggaucuu

SEQ ID NO: 2204631 - RNA, 19 nt, Artificial Sequence
  Description of Artificial Sequence: Synthetic oligonucleotide
  Antisense strand to SEQ ID NO: 2204630
aagauccauuucuaaccca

SEQ ID NO: 2204632 - RNA, 19 nt, Artificial Sequence
  Description of Artificial Sequence: Synthetic oligonucleotide
  Sense strand starting at position 1514 of SEQ ID NO: 1883613
uuggguuagaaauggaucu

SEQ ID NO: 2204633 - RNA, 19 nt, Artificial Sequence
  Description of Artificial Sequence: Synthetic oligonucleotide
  Antisense strand to SEQ ID NO: 2204632
agauccauuucuaacccaa

SEQ ID NO: 2204634 - RNA, 19 nt, Artificial Sequence
  Description of Artificial Sequence: Synthetic oligonucleotide
  Sense strand starting at position 2714 of SEQ ID NO: 1883613
aguauuuacuuugcacagu

SEQ ID NO: 2204635 - RNA, 19 nt, Artificial Sequence
  Description of Artificial Sequence: Synthetic oligonucleotide
  Antisense strand to SEQ ID NO: 2204634
acugugcaaaguaaauacu

SEQ ID NO: 2204636 - RNA, 19 nt, Artificial Sequence
  Description of Artificial Sequence: Synthetic oligonucleotide
  Sense strand starting at position 3073 of SEQ ID NO: 1883613
cugggacucucacucugaa

SEQ ID NO: 2204637 - RNA, 19 nt, Artificial Sequence
  Description of Artificial Sequence: Synthetic oligonucleotide
  Antisense strand to SEQ ID NO: 2204636
uucagagugagagucccag

SEQ ID NO: 2204638 - RNA, 19 nt, Artificial Sequence
  Description of Artificial Sequence: Synthetic oligonucleotide
  Sense strand starting at position 430 of SEQ ID NO: 1883613
agggauauuuauggagaga

SEQ ID NO: 2204639 - RNA, 19 nt, Artificial Sequence
  Description of Artificial Sequence: Synthetic oligonucleotide
  Antisense strand to SEQ ID NO: 2204638
ucucuccauaaauaucccu

SEQ ID NO: 2204640 - RNA, 19 nt, Artificial Sequence
  Description of Artificial Sequence: Synthetic oligonucleotide
  Sense strand starting at position 429 of SEQ ID NO: 1883613
aagggauauuuauggagag

SEQ ID NO: 2204641 - RNA, 19 nt, Artificial Sequence
  Description of Artificial Sequence: Synthetic oligonucleotide
  Antisense strand to SEQ ID NO: 2204640
cucuccauaaauaucccuu

SEQ ID NO: 2204642 - RNA, 19 nt, Artificial Sequence
  Description of Artificial Sequence: Synthetic oligonucleotide
  Sense strand starting at position 384 of SEQ ID NO: 1883613
cauugaugagucugauaca

SEQ ID NO: 2204643 - RNA, 19 nt, Artificial Sequence
  Description of Artificial Sequence: Synthetic oligonucleotide
  Antisense strand to SEQ ID NO: 2204642
uguaucagacucaucaaug

SEQ ID NO: 2204644 - RNA, 19 nt, Artificial Sequence
  Description of Artificial Sequence: Synthetic oligonucleotide
  Sense strand starting at position 171 of SEQ ID NO: 1883613
ucuuauuuacgguguacau

SEQ ID NO: 2204645 - RNA, 19 nt, Artificial Sequence
  Description of Artificial Sequence: Synthetic oligonucleotide
  Antisense strand to SEQ ID NO: 2204644
auguacaccguaaauaaga

SEQ ID NO: 2204646 - RNA, 19 nt, Artificial Sequence
  Description of Artificial Sequence: Synthetic oligonucleotide
  Sense strand starting at position 2805 of SEQ ID NO: 1883613
aacugugugguacauaaua

SEQ ID NO: 2204647 - RNA, 19 nt, Artificial Sequence
  Description of Artificial Sequence: Synthetic oligonucleotide
  Antisense strand to SEQ ID NO: 2204646
uauuauguaccacacaguu

SEQ ID NO: 2204648 - RNA, 19 nt, Artificial Sequence
  Description of Artificial Sequence: Synthetic oligonucleotide
  Sense strand starting at position 721 of SEQ ID NO: 1883613
gaggccauagaaugugaau

SEQ ID NO: 2204649 - RNA, 19 nt, Artificial Sequence
  Description of Artificial Sequence: Synthetic oligonucleotide
  Antisense strand to SEQ ID NO: 2204648
auucacauucuauggccuc

SEQ ID NO: 2204650 - RNA, 19 nt, Artificial Sequence
  Description of Artificial Sequence: Synthetic oligonucleotide
  Sense strand starting at position 1000 of SEQ ID NO: 1883613
uauuauuagaggcggaaag

SEQ ID NO: 2204651 - RNA, 19 nt, Artificial Sequence
  Description of Artificial Sequence: Synthetic oligonucleotide
  Antisense strand to SEQ ID NO: 2204650
cuuuccgccucuaauaaua

SEQ ID NO: 2204652 - RNA, 19 nt, Artificial Sequence
  Description of Artificial Sequence: Synthetic oligonucleotide
  Sense strand starting at position 3192 of SEQ ID NO: 1883613
ccacacaucgcccaagaau

SEQ ID NO: 2204653 - RNA, 19 nt, Artificial Sequence
  Description of Artificial Sequence: Synthetic oligonucleotide
  Antisense strand to SEQ ID NO: 2204652
auucuugggcgaugugugg

SEQ ID NO: 2204654 - RNA, 19 nt, Artificial Sequence
  Description of Artificial Sequence: Synthetic oligonucleotide
  Sense strand starting at position 1508 of SEQ ID NO: 1883613
uucuguuuggguuagaaau

SEQ ID NO: 2204655 - RNA, 19 nt, Artificial Sequence
  Description of Artificial Sequence: Synthetic oligonucleotide
  Antisense strand to SEQ ID NO: 2204654
auuucuaacccaaacagaa

SEQ ID NO: 2204656 - RNA, 19 nt, Artificial Sequence
  Description of Artificial Sequence: Synthetic oligonucleotide
  Sense strand starting at position 2916 of SEQ ID NO: 1883613
agucuuggaugaguuagga

SEQ ID NO: 2204657 - RNA, 19 nt, Artificial Sequence
  Description of Artificial Sequence: Synthetic oligonucleotide
  Antisense strand to SEQ ID NO: 2204656
uccuaacucauccaagacu

SEQ ID NO: 2204658 - RNA, 19 nt, Artificial Sequence
  Description of Artificial Sequence: Synthetic oligonucleotide
  Sense strand starting at position 2913 of SEQ ID NO: 1883613
ggaagucuuggaugaguua

SEQ ID NO: 2204659 - RNA, 19 nt, Artificial Sequence
  Description of Artificial Sequence: Synthetic oligonucleotide
  Antisense strand to SEQ ID NO: 2204658
uaacucauccaagacuucc

SEQ ID NO: 2204660 - RNA, 19 nt, Artificial Sequence
  Description of Artificial Sequence: Synthetic oligonucleotide
  Sense strand starting at position 3170 of SEQ ID NO: 1883613
augaguucuuggguaggga

SEQ ID NO: 2204661 - RNA, 19 nt, Artificial Sequence
  Description of Artificial Sequence: Synthetic oligonucleotide
  Antisense strand to SEQ ID NO: 2204660
ucccuacccaagaacucau

SEQ ID NO: 2204662 - RNA, 19 nt, Artificial Sequence
  Description of Artificial Sequence: Synthetic oligonucleotide
  Sense strand starting at position 2872 of SEQ ID NO: 1883613
uccuguaaauauguacaaa

SEQ ID NO: 2204663 - RNA, 19 nt, Artificial Sequence
  Description of Artificial Sequence: Synthetic oligonucleotide
  Antisense strand to SEQ ID NO: 2204662
uuuguacauauuuacagga

SEQ ID NO: 2204664 - RNA, 19 nt, Artificial Sequence
  Description of Artificial Sequence: Synthetic oligonucleotide
  Sense strand starting at position 723 of SEQ ID NO: 1883613
ggccauagaaugugaauua

SEQ ID NO: 2204665 - RNA, 19 nt, Artificial Sequence
  Description of Artificial Sequence: Synthetic oligonucleotide
  Antisense strand to SEQ ID NO: 2204664
uaauucacauucuauggcc

SEQ ID NO: 2204666 - RNA, 19 nt, Artificial Sequence
  Description of Artificial Sequence: Synthetic oligonucleotide
  Sense strand starting at position 1567 of SEQ ID NO: 1883613
gccauuguuagcguggcaa

SEQ ID NO: 2204667 - RNA, 19 nt, Artificial Sequence
  Description of Artificial Sequence: Synthetic oligonucleotide
  Antisense strand to SEQ ID NO: 2204666
uugccacgcuaacaauggc

SEQ ID NO: 2204668 - RNA, 19 nt, Artificial Sequence
  Description of Artificial Sequence: Synthetic oligonucleotide
  Sense strand starting at position 3326 of SEQ ID NO: 1883613
ucugaaucugauuggagca

SEQ ID NO: 2204669 - RNA, 19 nt, Artificial Sequence
  Description of Artificial Sequence: Synthetic oligonucleotide
  Antisense strand to SEQ ID NO: 2204668
ugcuccaaucagauucaga

SEQ ID NO: 2204670 - RNA, 19 nt, Artificial Sequence
  Description of Artificial Sequence: Synthetic oligonucleotide
  Sense strand starting at position 2807 of SEQ ID NO: 1883613
cugugugguacauaauaca

SEQ ID NO: 2204671 - RNA, 19 nt, Artificial Sequence
  Description of Artificial Sequence: Synthetic oligonucleotide
  Antisense strand to SEQ ID NO: 2204670
uguauuauguaccacacag

SEQ ID NO: 2204672 - RNA, 19 nt, Artificial Sequence
  Description of Artificial Sequence: Synthetic oligonucleotide
  Sense strand starting at position 1059 of SEQ ID NO: 1883613
acaaguacugacuguggau

SEQ ID NO: 2204673 - RNA, 19 nt, Artificial Sequence
  Description of Artificial Sequence: Synthetic oligonucleotide
  Antisense strand to SEQ ID NO: 2204672
auccacagucaguacuugu

SEQ ID NO: 2204674 - RNA, 19 nt, Artificial Sequence
  Description of Artificial Sequence: Synthetic oligonucleotide
  Sense strand starting at position 671 of SEQ ID NO: 1883613
gaagacuccucggcacaaa

SEQ ID NO: 2204675 - RNA, 19 nt, Artificial Sequence
  Description of Artificial Sequence: Synthetic oligonucleotide
  Antisense strand to SEQ ID NO: 2204674
uuugugccgaggagucuuc

SEQ ID NO: 2204676 - RNA, 19 nt, Artificial Sequence
  Description of Artificial Sequence: Synthetic oligonucleotide
  Sense strand starting at position 2171 of SEQ ID NO: 1883613
ggaucugaagcuuagugua

SEQ ID NO: 2204677 - RNA, 19 nt, Artificial Sequence
  Description of Artificial Sequence: Synthetic oligonucleotide
  Antisense strand to SEQ ID NO: 2204676
uacacuaagcuucagaucc

SEQ ID NO: 2204678 - RNA, 19 nt, Artificial Sequence
  Description of Artificial Sequence: Synthetic oligonucleotide
  Sense strand starting at position 381 of SEQ ID NO: 1883613
ucccauugaugagucugau

SEQ ID NO: 2204679 - RNA, 19 nt, Artificial Sequence
  Description of Artificial Sequence: Synthetic oligonucleotide
  Antisense strand to SEQ ID NO: 2204678
aucagacucaucaauggga

SEQ ID NO: 2204680 - RNA, 19 nt, Artificial Sequence
  Description of Artificial Sequence: Synthetic oligonucleotide
  Sense strand starting at position 552 of SEQ ID NO: 1883613
ggcugucagguuuaggaau

SEQ ID NO: 2204681 - RNA, 19 nt, Artificial Sequence
  Description of Artificial Sequence: Synthetic oligonucleotide
  Antisense strand to SEQ ID NO: 2204680
auuccuaaaccugacagcc

SEQ ID NO: 2204682 - RNA, 19 nt, Artificial Sequence
  Description of Artificial Sequence: Synthetic oligonucleotide
  Sense strand starting at position 2094 of SEQ ID NO: 1883613
cugacugaugcagguaaua

SEQ ID NO: 2204683 - RNA, 19 nt, Artificial Sequence
  Description of Artificial Sequence: Synthetic oligonucleotide
  Antisense strand to SEQ ID NO: 2204682
uauuaccugcaucagucag

SEQ ID NO: 2204684 - RNA, 19 nt, Artificial Sequence
  Description of Artificial Sequence: Synthetic oligonucleotide
  Sense strand starting at position 2488 of SEQ ID NO: 1883613
guagcuuugaggcaaucaa

SEQ ID NO: 2204685 - RNA, 19 nt, Artificial Sequence
  Description of Artificial Sequence: Synthetic oligonucleotide
  Antisense strand to SEQ ID NO: 2204684
uugauugccucaaagcuac

SEQ ID NO: 2204686 - RNA, 19 nt, Artificial Sequence
  Description of Artificial Sequence: Synthetic oligonucleotide
  Sense strand starting at position 2800 of SEQ ID NO: 1883613
gaauaaacugugugguaca

SEQ ID NO: 2204687 - RNA, 19 nt, Artificial Sequence
  Description of Artificial Sequence: Synthetic oligonucleotide
  Antisense strand to SEQ ID NO: 2204686
uguaccacacaguuuauuc

SEQ ID NO: 2204688 - RNA, 19 nt, Artificial Sequence
  Description of Artificial Sequence: Synthetic oligonucleotide
  Sense strand starting at position 1467 of SEQ ID NO: 1883613
gucucuguuggaugaaaca

SEQ ID NO: 2204689 - RNA, 19 nt, Artificial Sequence
  Description of Artificial Sequence: Synthetic oligonucleotide
  Antisense strand to SEQ ID NO: 2204688
uguuucauccaacagagac

SEQ ID NO: 2204690 - RNA, 19 nt, Artificial Sequence
  Description of Artificial Sequence: Synthetic oligonucleotide
  Sense strand starting at position 1037 of SEQ ID NO: 1883613
ugguguaaagcuggacaaa

SEQ ID NO: 2204691 - RNA, 19 nt, Artificial Sequence
  Description of Artificial Sequence: Synthetic oligonucleotide
  Antisense strand to SEQ ID NO: 2204690
uuuguccagcuuuacacca

SEQ ID NO: 2204692 - RNA, 19 nt, Artificial Sequence
  Description of Artificial Sequence: Synthetic oligonucleotide
  Sense strand starting at position 2818 of SEQ ID NO: 1883613
auaauacaugcuugguaau

SEQ ID NO: 2204693 - RNA, 19 nt, Artificial Sequence
  Description of Artificial Sequence: Synthetic oligonucleotide
  Antisense strand to SEQ ID NO: 2204692
auuaccaagcauguauuau

SEQ ID NO: 2204694 - RNA, 19 nt, Artificial Sequence
  Description of Artificial Sequence: Synthetic oligonucleotide
  Sense strand starting at position 3132 of SEQ ID NO: 1883613
cugugaccuguugaguuaa

SEQ ID NO: 2204695 - RNA, 19 nt, Artificial Sequence
  Description of Artificial Sequence: Synthetic oligonucleotide
  Antisense strand to SEQ ID NO: 2204694
uuaacucaacaggucacag

SEQ ID NO: 2204696 - RNA, 19 nt, Artificial Sequence
  Description of Artificial Sequence: Synthetic oligonucleotide
  Sense strand starting at position 3604 of SEQ ID NO: 1883613
uucuuuauucgugauacau

SEQ ID NO: 2204697 - RNA, 19 nt, Artificial Sequence
  Description of Artificial Sequence: Synthetic oligonucleotide
  Antisense strand to SEQ ID NO: 2204696
auguaucacgaauaaagaa

SEQ ID NO: 2204698 - RNA, 19 nt, Artificial Sequence
  Description of Artificial Sequence: Synthetic oligonucleotide
  Sense strand starting at position 670 of SEQ ID NO: 1883613
ugaagacuccucggcacaa

SEQ ID NO: 2204699 - RNA, 19 nt, Artificial Sequence
  Description of Artificial Sequence: Synthetic oligonucleotide
  Antisense strand to SEQ ID NO: 2204698
uugugccgaggagucuuca

SEQ ID NO: 2204700 - RNA, 19 nt, Artificial Sequence
  Description of Artificial Sequence: Synthetic oligonucleotide
  Sense strand starting at position 3630 of SEQ ID NO: 1883613
gaucuucuugugggagagu

SEQ ID NO: 2204701 - RNA, 19 nt, Artificial Sequence
  Description of Artificial Sequence: Synthetic oligonucleotide
  Antisense strand to SEQ ID NO: 2204700
acucucccacaagaagauc

SEQ ID NO: 2204702 - RNA, 19 nt, Artificial Sequence
  Description of Artificial Sequence: Synthetic oligonucleotide
  Sense strand starting at position 2046 of SEQ ID NO: 1883612
gugguagcugugguaucuu

SEQ ID NO: 2204703 - RNA, 19 nt, Artificial Sequence
  Description of Artificial Sequence: Synthetic oligonucleotide
  Antisense strand to SEQ ID NO: 2204702
aagauaccacagcuaccac

SEQ ID NO: 2204704 - RNA, 19 nt, Artificial Sequence
  Description of Artificial Sequence: Synthetic oligonucleotide
  Sense strand starting at position 1522 of SEQ ID NO: 1883612
aaucuacucgauugaagag

SEQ ID NO: 2204705 - RNA, 19 nt, Artificial Sequence
  Description of Artificial Sequence: Synthetic oligonucleotide
  Antisense strand to SEQ ID NO: 2204704
cucuucaaucgaguagauu

SEQ ID NO: 2204706 - RNA, 19 nt, Artificial Sequence
  Description of Artificial Sequence: Synthetic oligonucleotide
  Sense strand starting at position 3395 of SEQ ID NO: 1883612
accacugcccuagaugauu

SEQ ID NO: 2204707 - RNA, 19 nt, Artificial Sequence
  Description of Artificial Sequence: Synthetic oligonucleotide
  Antisense strand to SEQ ID NO: 2204706
aaucaucuagggcaguggu

SEQ ID NO: 2204708 - RNA, 19 nt, Artificial Sequence
  Description of Artificial Sequence: Synthetic oligonucleotide
  Sense strand starting at position 2192 of SEQ ID NO: 1883612
gugauuaguccuuaccaag

SEQ ID NO: 2204709 - RNA, 19 nt, Artificial Sequence
  Description of Artificial Sequence: Synthetic oligonucleotide
  Antisense strand to SEQ ID NO: 2204708
cuugguaaggacuaaucac

SEQ ID NO: 2204710 - RNA, 19 nt, Artificial Sequence
  Description of Artificial Sequence: Synthetic oligonucleotide
  Sense strand starting at position 1356 of SEQ ID NO: 1883612
uuauuuauuucugaggcuu

SEQ ID NO: 2204711 - RNA, 19 nt, Artificial Sequence
  Description of Artificial Sequence: Synthetic oligonucleotide
  Antisense strand to SEQ ID NO: 2204710
aagccucagaaauaaauaa

SEQ ID NO: 2204712 - RNA, 19 nt, Artificial Sequence
  Description of Artificial Sequence: Synthetic oligonucleotide
  Sense strand starting at position 2605 of SEQ ID NO: 1883612
cuagauuagaucugauggu

SEQ ID NO: 2204713 - RNA, 19 nt, Artificial Sequence
  Description of Artificial Sequence: Synthetic oligonucleotide
  Antisense strand to SEQ ID NO: 2204712
accaucagaucuaaucuag

SEQ ID NO: 2204714 - RNA, 19 nt, Artificial Sequence
  Description of Artificial Sequence: Synthetic oligonucleotide
  Sense strand starting at position 3577 of SEQ ID NO: 1883612
ggaaacaguguccauaugu

SEQ ID NO: 2204715 - RNA, 19 nt, Artificial Sequence
  Description of Artificial Sequence: Synthetic oligonucleotide
  Antisense strand to SEQ ID NO: 2204714
acauauggacacuguuucc

SEQ ID NO: 2204716 - RNA, 19 nt, Artificial Sequence
  Description of Artificial Sequence: Synthetic oligonucleotide
  Sense strand starting at position 1231 of SEQ ID NO: 1883612
ucucuccugcuggaaauua

SEQ ID NO: 2204717 - RNA, 19 nt, Artificial Sequence
  Description of Artificial Sequence: Synthetic oligonucleotide
  Antisense strand to SEQ ID NO: 2204716
uaauuuccagcaggagaga

SEQ ID NO: 2204718 - RNA, 19 nt, Artificial Sequence
  Description of Artificial Sequence: Synthetic oligonucleotide
  Sense strand starting at position 2609 of SEQ ID NO: 1883612
auuagaucugaugguccau

SEQ ID NO: 2204719 - RNA, 19 nt, Artificial Sequence
  Description of Artificial Sequence: Synthetic oligonucleotide
  Antisense strand to SEQ ID NO: 2204718
auggaccaucagaucuaau

SEQ ID NO: 2204720 - RNA, 19 nt, Artificial Sequence
  Description of Artificial Sequence: Synthetic oligonucleotide
  Sense strand starting at position 1456 of SEQ ID NO: 1883612
uagaguagccuugacucau

SEQ ID NO: 2204721 - RNA, 19 nt, Artificial Sequence
  Description of Artificial Sequence: Synthetic oligonucleotide
  Antisense strand to SEQ ID NO: 2204720
augagucaaggcuacucua

SEQ ID NO: 2204722 - RNA, 19 nt, Artificial Sequence
  Description of Artificial Sequence: Synthetic oligonucleotide
  Sense strand starting at position 269 of SEQ ID NO: 1883612
uguguuguaacugaugaau

SEQ ID NO: 2204723 - RNA, 19 nt, Artificial Sequence
  Description of Artificial Sequence: Synthetic oligonucleotide
  Antisense strand to SEQ ID NO: 2204722
auucaucaguuacaacaca

SEQ ID NO: 2204724 - RNA, 19 nt, Artificial Sequence
  Description of Artificial Sequence: Synthetic oligonucleotide
  Sense strand starting at position 3942 of SEQ ID NO: 1883612
cuauaaggcugacuugauc

SEQ ID NO: 2204725 - RNA, 19 nt, Artificial Sequence
  Description of Artificial Sequence: Synthetic oligonucleotide
  Antisense strand to SEQ ID NO: 2204724
gaucaagucagccuuauag

SEQ ID NO: 2204726 - RNA, 19 nt, Artificial Sequence
  Description of Artificial Sequence: Synthetic oligonucleotide
  Sense strand starting at position 411 of SEQ ID NO: 1883612
uacaguauccugcagagua

SEQ ID NO: 2204727 - RNA, 19 nt, Artificial Sequence
  Description of Artificial Sequence: Synthetic oligonucleotide
  Antisense strand to SEQ ID NO: 2204726
uacucugcaggauacugua

SEQ ID NO: 2204728 - RNA, 19 nt, Artificial Sequence
  Description of Artificial Sequence: Synthetic oligonucleotide
  Sense strand starting at position 833 of SEQ ID NO: 1883612
gcaauauuacgccacuaaa

SEQ ID NO: 2204729 - RNA, 19 nt, Artificial Sequence
  Description of Artificial Sequence: Synthetic oligonucleotide
  Antisense strand to SEQ ID NO: 2204728
uuuaguggcguaauauugc

SEQ ID NO: 2204730 - RNA, 19 nt, Artificial Sequence
  Description of Artificial Sequence: Synthetic oligonucleotide
  Sense strand starting at position 404 of SEQ ID NO: 1883612
guguaauuacaguauccug

SEQ ID NO: 2204731 - RNA, 19 nt, Artificial Sequence
  Description of Artificial Sequence: Synthetic oligonucleotide
  Antisense strand to SEQ ID NO: 2204730
caggauacuguaauuacac

SEQ ID NO: 2204732 - RNA, 19 nt, Artificial Sequence
  Description of Artificial Sequence: Synthetic oligonucleotide
  Sense strand starting at position 57 of SEQ ID NO: 1883612
gugguuaauaguuacagua

SEQ ID NO: 2204733 - RNA, 19 nt, Artificial Sequence
  Description of Artificial Sequence: Synthetic oligonucleotide
  Antisense strand to SEQ ID NO: 2204732
uacuguaacuauuaaccac

SEQ ID NO: 2204734 - RNA, 19 nt, Artificial Sequence
  Description of Artificial Sequence: Synthetic oligonucleotide
  Sense strand starting at position 2546 of SEQ ID NO: 1883612
aggagcuauuagccauuga

SEQ ID NO: 2204735 - RNA, 19 nt, Artificial Sequence
  Description of Artificial Sequence: Synthetic oligonucleotide
  Antisense strand to SEQ ID NO: 2204734
ucaauggcuaauagcuccu

SEQ ID NO: 2204736 - RNA, 19 nt, Artificial Sequence
  Description of Artificial Sequence: Synthetic oligonucleotide
  Sense strand starting at position 1732 of SEQ ID NO: 1883612
cagugcuuacauugagaac

SEQ ID NO: 2204737 - RNA, 19 nt, Artificial Sequence
  Description of Artificial Sequence: Synthetic oligonucleotide
  Antisense strand to SEQ ID NO: 2204736
guucucaauguaagcacug

SEQ ID NO: 2204738 - RNA, 19 nt, Artificial Sequence
  Description of Artificial Sequence: Synthetic oligonucleotide
  Sense strand starting at position 1147 of SEQ ID NO: 1883612
cuaagagcaucucugcaaa

SEQ ID NO: 2204739 - RNA, 19 nt, Artificial Sequence
  Description of Artificial Sequence: Synthetic oligonucleotide
  Antisense strand to SEQ ID NO: 2204738
uuugcagagaugcucuuag

SEQ ID NO: 2204740 - RNA, 19 nt, Artificial Sequence
  Description of Artificial Sequence: Synthetic oligonucleotide
  Sense strand starting at position 652 of SEQ ID NO: 1883612
ccaauagcuguccagaguu

SEQ ID NO: 2204741 - RNA, 19 nt, Artificial Sequence
  Description of Artificial Sequence: Synthetic oligonucleotide
  Antisense strand to SEQ ID NO: 2204740
aacucuggacagcuauugg

SEQ ID NO: 2204742 - RNA, 19 nt, Artificial Sequence
  Description of Artificial Sequence: Synthetic oligonucleotide
  Sense strand starting at position 413 of SEQ ID NO: 1883612
caguauccugcagaguauu

SEQ ID NO: 2204743 - RNA, 19 nt, Artificial Sequence
  Description of Artificial Sequence: Synthetic oligonucleotide
  Antisense strand to SEQ ID NO: 2204742
aauacucugcaggauacug

SEQ ID NO: 2204744 - RNA, 19 nt, Artificial Sequence
  Description of Artificial Sequence: Synthetic oligonucleotide
  Sense strand starting at position 1355 of SEQ ID NO: 1883612
uuuauuuauuucugaggcu

SEQ ID NO: 2204745 - RNA, 19 nt, Artificial Sequence
  Description of Artificial Sequence: Synthetic oligonucleotide
  Antisense strand to SEQ ID NO: 2204744
agccucagaaauaaauaaa

SEQ ID NO: 2204746 - RNA, 19 nt, Artificial Sequence
  Description of Artificial Sequence: Synthetic oligonucleotide
  Sense strand starting at position 952 of SEQ ID NO: 1883612
aauucuugccaggguugaa

SEQ ID NO: 2204747 - RNA, 19 nt, Artificial Sequence
  Description of Artificial Sequence: Synthetic oligonucleotide
  Antisense strand to SEQ ID NO: 2204746
uucaacccuggcaagaauu

SEQ ID NO: 2204748 - RNA, 19 nt, Artificial Sequence
  Description of Artificial Sequence: Synthetic oligonucleotide
  Sense strand starting at position 268 of SEQ ID NO: 1883612
auguguuguaacugaugaa

SEQ ID NO: 2204749 - RNA, 19 nt, Artificial Sequence
  Description of Artificial Sequence: Synthetic oligonucleotide
  Antisense strand to SEQ ID NO: 2204748
uucaucaguuacaacacau

SEQ ID NO: 2204750 - RNA, 19 nt, Artificial Sequence
  Description of Artificial Sequence: Synthetic oligonucleotide
  Sense strand starting at position 1254 of SEQ ID NO: 1883612
agugaaugcacuugaagug

SEQ ID NO: 2204751 - RNA, 19 nt, Artificial Sequence
  Description of Artificial Sequence: Synthetic oligonucleotide
  Antisense strand to SEQ ID NO: 2204750
cacuucaagugcauucacu

SEQ ID NO: 2204752 - RNA, 19 nt, Artificial Sequence
  Description of Artificial Sequence: Synthetic oligonucleotide
  Sense strand starting at position 2191 of SEQ ID NO: 1883612
ugugauuaguccuuaccaa

SEQ ID NO: 2204753 - RNA, 19 nt, Artificial Sequence
  Description of Artificial Sequence: Synthetic oligonucleotide
  Antisense strand to SEQ ID NO: 2204752
uugguaaggacuaaucaca

SEQ ID NO: 2204754 - RNA, 19 nt, Artificial Sequence
  Description of Artificial Sequence: Synthetic oligonucleotide
  Sense strand starting at position 951 of SEQ ID NO: 1883612
gaauucuugccaggguuga

SEQ ID NO: 2204755 - RNA, 19 nt, Artificial Sequence
  Description of Artificial Sequence: Synthetic oligonucleotide
  Antisense strand to SEQ ID NO: 2204754
ucaacccuggcaagaauuc

SEQ ID NO: 2204756 - RNA, 19 nt, Artificial Sequence
  Description of Artificial Sequence: Synthetic oligonucleotide
  Sense strand starting at position 50 of SEQ ID NO: 1883612
guucacagugguuaauagu

SEQ ID NO: 2204757 - RNA, 19 nt, Artificial Sequence
  Description of Artificial Sequence: Synthetic oligonucleotide
  Antisense strand to SEQ ID NO: 2204756
acuauuaaccacugugaac

SEQ ID NO: 2204758 - RNA, 19 nt, Artificial Sequence
  Description of Artificial Sequence: Synthetic oligonucleotide
  Sense strand starting at position 624 of SEQ ID NO: 1883612
ucuagcucucugcagauau

SEQ ID NO: 2204759 - RNA, 19 nt, Artificial Sequence
  Description of Artificial Sequence: Synthetic oligonucleotide
  Antisense strand to SEQ ID NO: 2204758
auaucugcagagagcuaga

SEQ ID NO: 2204760 - RNA, 19 nt, Artificial Sequence
  Description of Artificial Sequence: Synthetic oligonucleotide
  Sense strand starting at position 904 of SEQ ID NO: 1883612
gcucacauacagugugaaa

SEQ ID NO: 2204761 - RNA, 19 nt, Artificial Sequence
  Description of Artificial Sequence: Synthetic oligonucleotide
  Antisense strand to SEQ ID NO: 2204760
uuucacacuguaugugagc

SEQ ID NO: 2204762 - RNA, 19 nt, Artificial Sequence
  Description of Artificial Sequence: Synthetic oligonucleotide
  Sense strand starting at position 3619 of SEQ ID NO: 1883612
agcugaacugucuaagcuu

SEQ ID NO: 2204763 - RNA, 19 nt, Artificial Sequence
  Description of Artificial Sequence: Synthetic oligonucleotide
  Antisense strand to SEQ ID NO: 2204762
aagcuuagacaguucagcu

SEQ ID NO: 2204764 - RNA, 19 nt, Artificial Sequence
  Description of Artificial Sequence: Synthetic oligonucleotide
  Sense strand starting at position 530 of SEQ ID NO: 1883612
ucgucuuucccagaaaguc

SEQ ID NO: 2204765 - RNA, 19 nt, Artificial Sequence
  Description of Artificial Sequence: Synthetic oligonucleotide
  Antisense strand to SEQ ID NO: 2204764
gacuuucugggaaagacga

SEQ ID NO: 2204766 - RNA, 19 nt, Artificial Sequence
  Description of Artificial Sequence: Synthetic oligonucleotide
  Sense strand starting at position 948 of SEQ ID NO: 1883612
uuggaauucuugccagggu

SEQ ID NO: 2204767 - RNA, 19 nt, Artificial Sequence
  Description of Artificial Sequence: Synthetic oligonucleotide
  Antisense strand to SEQ ID NO: 2204766
acccuggcaagaauuccaa

SEQ ID NO: 2204768 - RNA, 19 nt, Artificial Sequence
  Description of Artificial Sequence: Synthetic oligonucleotide
  Sense strand starting at position 2786 of SEQ ID NO: 1883612
cuugcugacugaucucauu

SEQ ID NO: 2204769 - RNA, 19 nt, Artificial Sequence
  Description of Artificial Sequence: Synthetic oligonucleotide
  Antisense strand to SEQ ID NO: 2204768
aaugagaucagucagcaag

SEQ ID NO: 2204770 - RNA, 19 nt, Artificial Sequence
  Description of Artificial Sequence: Synthetic oligonucleotide
  Sense strand starting at position 2188 of SEQ ID NO: 1883612
ccaugugauuaguccuuac

SEQ ID NO: 2204771 - RNA, 19 nt, Artificial Sequence
  Description of Artificial Sequence: Synthetic oligonucleotide
  Antisense strand to SEQ ID NO: 2204770
guaaggacuaaucacaugg

SEQ ID NO: 2204772 - RNA, 19 nt, Artificial Sequence
  Description of Artificial Sequence: Synthetic oligonucleotide
  Sense strand starting at position 1166 of SEQ ID NO: 1883612
ccagaugucucuuuguaug

SEQ ID NO: 2204773 - RNA, 19 nt, Artificial Sequence
  Description of Artificial Sequence: Synthetic oligonucleotide
  Antisense strand to SEQ ID NO: 2204772
cauacaaagagacaucugg

SEQ ID NO: 2204774 - RNA, 19 nt, Artificial Sequence
  Description of Artificial Sequence: Synthetic oligonucleotide
  Sense strand starting at position 2029 of SEQ ID NO: 1883612
uacccagcagucugaaagu

SEQ ID NO: 2204775 - RNA, 19 nt, Artificial Sequence
  Description of Artificial Sequence: Synthetic oligonucleotide
  Antisense strand to SEQ ID NO: 2204774
acuuucagacugcugggua

SEQ ID NO: 2204776 - RNA, 19 nt, Artificial Sequence
  Description of Artificial Sequence: Synthetic oligonucleotide
  Sense strand starting at position 1270 of SEQ ID NO: 1883612
gugcaacugcuugaucuca

SEQ ID NO: 2204777 - RNA, 19 nt, Artificial Sequence
  Description of Artificial Sequence: Synthetic oligonucleotide
  Antisense strand to SEQ ID NO: 2204776
ugagaucaagcaguugcac

SEQ ID NO: 2204778 - RNA, 19 nt, Artificial Sequence
  Description of Artificial Sequence: Synthetic oligonucleotide
  Sense strand starting at position 56 of SEQ ID NO: 1883612
agugguuaauaguuacagu

SEQ ID NO: 2204779 - RNA, 19 nt, Artificial Sequence
  Description of Artificial Sequence: Synthetic oligonucleotide
  Antisense strand to SEQ ID NO: 2204778
acuguaacuauuaaccacu

SEQ ID NO: 2204780 - RNA, 19 nt, Artificial Sequence
  Description of Artificial Sequence: Synthetic oligonucleotide
  Sense strand starting at position 1272 of SEQ ID NO: 1883612
gcaacugcuugaucucaca

SEQ ID NO: 2204781 - RNA, 19 nt, Artificial Sequence
  Description of Artificial Sequence: Synthetic oligonucleotide
  Antisense strand to SEQ ID NO: 2204780
ugugagaucaagcaguugc

SEQ ID NO: 2204782 - RNA, 19 nt, Artificial Sequence
  Description of Artificial Sequence: Synthetic oligonucleotide
  Sense strand starting at position 886 of SEQ ID NO: 1883614
agauauacaguguacucau

SEQ ID NO: 2204783 - RNA, 19 nt, Artificial Sequence
  Description of Artificial Sequence: Synthetic oligonucleotide
  Antisense strand to SEQ ID NO: 2204782
augaguacacuguauaucu

SEQ ID NO: 2204784 - RNA, 19 nt, Artificial Sequence
  Description of Artificial Sequence: Synthetic oligonucleotide
  Sense strand starting at position 1014 of SEQ ID NO: 1883614
gcauuaggcaaagaucuga

SEQ ID NO: 2204785 - RNA, 19 nt, Artificial Sequence
  Description of Artificial Sequence: Synthetic oligonucleotide
  Antisense strand to SEQ ID NO: 2204784
ucagaucuuugccuaaugc

SEQ ID NO: 2204786 - RNA, 19 nt, Artificial Sequence
  Description of Artificial Sequence: Synthetic oligonucleotide
  Sense strand starting at position 3021 of SEQ ID NO: 1883614
gcaauugaauacuuaauga

SEQ ID NO: 2204787 - RNA, 19 nt, Artificial Sequence
  Description of Artificial Sequence: Synthetic oligonucleotide
  Antisense strand to SEQ ID NO: 2204786
ucauuaaguauucaauugc

SEQ ID NO: 2204788 - RNA, 19 nt, Artificial Sequence
  Description of Artificial Sequence: Synthetic oligonucleotide
  Sense strand starting at position 915 of SEQ ID NO: 1883614
uuucucauaggugaugauu

SEQ ID NO: 2204789 - RNA, 19 nt, Artificial Sequence
  Description of Artificial Sequence: Synthetic oligonucleotide
  Antisense strand to SEQ ID NO: 2204788
aaucaucaccuaugagaaa

SEQ ID NO: 2204790 - RNA, 19 nt, Artificial Sequence
  Description of Artificial Sequence: Synthetic oligonucleotide
  Sense strand starting at position 2564 of SEQ ID NO: 1883614
ccaauaguuugauuagaca

SEQ ID NO: 2204791 - RNA, 19 nt, Artificial Sequence
  Description of Artificial Sequence: Synthetic oligonucleotide
  Antisense strand to SEQ ID NO: 2204790
ugucuaaucaaacuauugg

SEQ ID NO: 2204792 - RNA, 19 nt, Artificial Sequence
  Description of Artificial Sequence: Synthetic oligonucleotide
  Sense strand starting at position 800 of SEQ ID NO: 1883614
uuaaccuggcaaugaauaa

SEQ ID NO: 2204793 - RNA, 19 nt, Artificial Sequence
  Description of Artificial Sequence: Synthetic oligonucleotide
  Antisense strand to SEQ ID NO: 2204792
uuauucauugccagguuaa

SEQ ID NO: 2204794 - RNA, 19 nt, Artificial Sequence
  Description of Artificial Sequence: Synthetic oligonucleotide
  Sense strand starting at position 3105 of SEQ ID NO: 1883614
augguuacuguggauauua

SEQ ID NO: 2204795 - RNA, 19 nt, Artificial Sequence
  Description of Artificial Sequence: Synthetic oligonucleotide
  Antisense strand to SEQ ID NO: 2204794
uaauauccacaguaaccau

SEQ ID NO: 2204796 - RNA, 19 nt, Artificial Sequence
  Description of Artificial Sequence: Synthetic oligonucleotide
  Sense strand starting at position 410 of SEQ ID NO: 1883614
ggcuuugggaauuaaaugu

SEQ ID NO: 2204797 - RNA, 19 nt, Artificial Sequence
  Description of Artificial Sequence: Synthetic oligonucleotide
  Antisense strand to SEQ ID NO: 2204796
acauuuaauucccaaagcc

SEQ ID NO: 2204798 - RNA, 19 nt, Artificial Sequence
  Description of Artificial Sequence: Synthetic oligonucleotide
  Sense strand starting at position 1253 of SEQ ID NO: 1883614
gugaauacacauugauauu

SEQ ID NO: 2204799 - RNA, 19 nt, Artificial Sequence
  Description of Artificial Sequence: Synthetic oligonucleotide
  Antisense strand to SEQ ID NO: 2204798
aauaucaauguguauucac

SEQ ID NO: 2204800 - RNA, 19 nt, Artificial Sequence
  Description of Artificial Sequence: Synthetic oligonucleotide
  Sense strand starting at position 3088 of SEQ ID NO: 1883614
aucaauuugccguaugcau

SEQ ID NO: 2204801 - RNA, 19 nt, Artificial Sequence
  Description of Artificial Sequence: Synthetic oligonucleotide
  Antisense strand to SEQ ID NO: 2204800
augcauacggcaaauugau

SEQ ID NO: 2204802 - RNA, 19 nt, Artificial Sequence
  Description of Artificial Sequence: Synthetic oligonucleotide
  Sense strand starting at position 3524 of SEQ ID NO: 1883614
uuucuauggcaggacuauu

SEQ ID NO: 2204803 - RNA, 19 nt, Artificial Sequence
  Description of Artificial Sequence: Synthetic oligonucleotide
  Antisense strand to SEQ ID NO: 2204802
aauaguccugccauagaaa

SEQ ID NO: 2204804 - RNA, 19 nt, Artificial Sequence
  Description of Artificial Sequence: Synthetic oligonucleotide
  Sense strand starting at position 854 of SEQ ID NO: 1883614
guaugaagcacagacaugu

SEQ ID NO: 2204805 - RNA, 19 nt, Artificial Sequence
  Description of Artificial Sequence: Synthetic oligonucleotide
  Antisense strand to SEQ ID NO: 2204804
acaugucugugcuucauac

SEQ ID NO: 2204806 - RNA, 19 nt, Artificial Sequence
  Description of Artificial Sequence: Synthetic oligonucleotide
  Sense strand starting at position 1764 of SEQ ID NO: 1883614
uaagucauccuuugagagg

SEQ ID NO: 2204807 - RNA, 19 nt, Artificial Sequence
  Description of Artificial Sequence: Synthetic oligonucleotide
  Antisense strand to SEQ ID NO: 2204806
ccucucaaaggaugacuua

SEQ ID NO: 2204808 - RNA, 19 nt, Artificial Sequence
  Description of Artificial Sequence: Synthetic oligonucleotide
  Sense strand starting at position 2454 of SEQ ID NO: 1883614
cuugaugaucuguggaaca

SEQ ID NO: 2204809 - RNA, 19 nt, Artificial Sequence
  Description of Artificial Sequence: Synthetic oligonucleotide
  Antisense strand to SEQ ID NO: 2204808
uguuccacagaucaucaag

SEQ ID NO: 2204810 - RNA, 19 nt, Artificial Sequence
  Description of Artificial Sequence: Synthetic oligonucleotide
  Sense strand starting at position 1241 of SEQ ID NO: 1883614
acucaucuuugagugaaua

SEQ ID NO: 2204811 - RNA, 19 nt, Artificial Sequence
  Description of Artificial Sequence: Synthetic oligonucleotide
  Antisense strand to SEQ ID NO: 2204810
uauucacucaaagaugagu

SEQ ID NO: 2204812 - RNA, 19 nt, Artificial Sequence
  Description of Artificial Sequence: Synthetic oligonucleotide
  Sense strand starting at position 3107 of SEQ ID NO: 1883614
gguuacuguggauauuauu

SEQ ID NO: 2204813 - RNA, 19 nt, Artificial Sequence
  Description of Artificial Sequence: Synthetic oligonucleotide
  Antisense strand to SEQ ID NO: 2204812
aauaauauccacaguaacc

SEQ ID NO: 2204814 - RNA, 19 nt, Artificial Sequence
  Description of Artificial Sequence: Synthetic oligonucleotide
  Sense strand starting at position 1308 of SEQ ID NO: 1883614
cgagcuggguccuugauuu

SEQ ID NO: 2204815 - RNA, 19 nt, Artificial Sequence
  Description of Artificial Sequence: Synthetic oligonucleotide
  Antisense strand to SEQ ID NO: 2204814
aaaucaaggacccagcucg

SEQ ID NO: 2204816 - RNA, 19 nt, Artificial Sequence
  Description of Artificial Sequence: Synthetic oligonucleotide
  Sense strand starting at position 1040 of SEQ ID NO: 1883614
auaacagcauuugagaaau

SEQ ID NO: 2204817 - RNA, 19 nt, Artificial Sequence
  Description of Artificial Sequence: Synthetic oligonucleotide
  Antisense strand to SEQ ID NO: 2204816
auuucucaaaugcuguuau

SEQ ID NO: 2204818 - RNA, 19 nt, Artificial Sequence
  Description of Artificial Sequence: Synthetic oligonucleotide
  Sense strand starting at position 1367 of SEQ ID NO: 1883614
guuccaaauguaugaaaug

SEQ ID NO: 2204819 - RNA, 19 nt, Artificial Sequence
  Description of Artificial Sequence: Synthetic oligonucleotide
  Antisense strand to SEQ ID NO: 2204818
cauuucauacauuuggaac

SEQ ID NO: 2204820 - RNA, 19 nt, Artificial Sequence
  Description of Artificial Sequence: Synthetic oligonucleotide
  Sense strand starting at position 1238 of SEQ ID NO: 1883614
gacacucaucuuugaguga

SEQ ID NO: 2204821 - RNA, 19 nt, Artificial Sequence
  Description of Artificial Sequence: Synthetic oligonucleotide
  Antisense strand to SEQ ID NO: 2204820
ucacucaaagaugaguguc

SEQ ID NO: 2204822 - RNA, 19 nt, Artificial Sequence
  Description of Artificial Sequence: Synthetic oligonucleotide
  Sense strand starting at position 3978 of SEQ ID NO: 1883614
gagaaugguccugaguguc

SEQ ID NO: 2204823 - RNA, 19 nt, Artificial Sequence
  Description of Artificial Sequence: Synthetic oligonucleotide
  Antisense strand to SEQ ID NO: 2204822
gacacucaggaccauucuc

SEQ ID NO: 2204824 - RNA, 19 nt, Artificial Sequence
  Description of Artificial Sequence: Synthetic oligonucleotide
  Sense strand starting at position 2648 of SEQ ID NO: 1883614
acggucaucccggaacuaa

SEQ ID NO: 2204825 - RNA, 19 nt, Artificial Sequence
  Description of Artificial Sequence: Synthetic oligonucleotide
  Antisense strand to SEQ ID NO: 2204824
uuaguuccgggaugaccgu

SEQ ID NO: 2204826 - RNA, 19 nt, Artificial Sequence
  Description of Artificial Sequence: Synthetic oligonucleotide
  Sense strand starting at position 2759 of SEQ ID NO: 1883614
uugaaaggucaaugaguuu

SEQ ID NO: 2204827 - RNA, 19 nt, Artificial Sequence
  Description of Artificial Sequence: Synthetic oligonucleotide
  Antisense strand to SEQ ID NO: 2204826
aaacucauugaccuuucaa

SEQ ID NO: 2204828 - RNA, 19 nt, Artificial Sequence
  Description of Artificial Sequence: Synthetic oligonucleotide
  Sense strand starting at position 1773 of SEQ ID NO: 1883614
cuuugagaggacuguauuc

SEQ ID NO: 2204829 - RNA, 19 nt, Artificial Sequence
  Description of Artificial Sequence: Synthetic oligonucleotide
  Antisense strand to SEQ ID NO: 2204828
gaauacaguccucucaaag

SEQ ID NO: 2204830 - RNA, 19 nt, Artificial Sequence
  Description of Artificial Sequence: Synthetic oligonucleotide
  Sense strand starting at position 1623 of SEQ ID NO: 1883614
gacuuaggccuguaugacu

SEQ ID NO: 2204831 - RNA, 19 nt, Artificial Sequence
  Description of Artificial Sequence: Synthetic oligonucleotide
  Antisense strand to SEQ ID NO: 2204830
agucauacaggccuaaguc

SEQ ID NO: 2204832 - RNA, 19 nt, Artificial Sequence
  Description of Artificial Sequence: Synthetic oligonucleotide
  Sense strand starting at position 403 of SEQ ID NO: 1883614
ugacuuaggcuuugggaau

SEQ ID NO: 2204833 - RNA, 19 nt, Artificial Sequence
  Description of Artificial Sequence: Synthetic oligonucleotide
  Antisense strand to SEQ ID NO: 2204832
auucccaaagccuaaguca

SEQ ID NO: 2204834 - RNA, 19 nt, Artificial Sequence
  Description of Artificial Sequence: Synthetic oligonucleotide
  Sense strand starting at position 1242 of SEQ ID NO: 1883614
cucaucuuugagugaauac

SEQ ID NO: 2204835 - RNA, 19 nt, Artificial Sequence
  Description of Artificial Sequence: Synthetic oligonucleotide
  Antisense strand to SEQ ID NO: 2204834
guauucacucaaagaugag

SEQ ID NO: 2204836 - RNA, 19 nt, Artificial Sequence
  Description of Artificial Sequence: Synthetic oligonucleotide
  Sense strand starting at position 1719 of SEQ ID NO: 1883614
gaugacagaggcugugauu

SEQ ID NO: 2204837 - RNA, 19 nt, Artificial Sequence
  Description of Artificial Sequence: Synthetic oligonucleotide
  Antisense strand to SEQ ID NO: 2204836
aaucacagccucugucauc

SEQ ID NO: 2204838 - RNA, 19 nt, Artificial Sequence
  Description of Artificial Sequence: Synthetic oligonucleotide
  Sense strand starting at position 3486 of SEQ ID NO: 1883614
agaguuugucgagggaaac

SEQ ID NO: 2204839 - RNA, 19 nt, Artificial Sequence
  Description of Artificial Sequence: Synthetic oligonucleotide
  Antisense strand to SEQ ID NO: 2204838
guuucccucgacaaacucu

SEQ ID NO: 2204840 - RNA, 19 nt, Artificial Sequence
  Description of Artificial Sequence: Synthetic oligonucleotide
  Sense strand starting at position 3487 of SEQ ID NO: 1883614
gaguuugucgagggaaaca

SEQ ID NO: 2204841 - RNA, 19 nt, Artificial Sequence
  Description of Artificial Sequence: Synthetic oligonucleotide
  Antisense strand to SEQ ID NO: 2204840
uguuucccucgacaaacuc

SEQ ID NO: 2204842 - RNA, 19 nt, Artificial Sequence
  Description of Artificial Sequence: Synthetic oligonucleotide
  Sense strand starting at position 3916 of SEQ ID NO: 1883614
augugaguccacuauucuc

SEQ ID NO: 2204843 - RNA, 19 nt, Artificial Sequence
  Description of Artificial Sequence: Synthetic oligonucleotide
  Antisense strand to SEQ ID NO: 2204842
gagaauaguggacucacau

SEQ ID NO: 2204844 - RNA, 19 nt, Artificial Sequence
  Description of Artificial Sequence: Synthetic oligonucleotide
  Sense strand starting at position 472 of SEQ ID NO: 1883614
cucauuguugacuauguca

SEQ ID NO: 2204845 - RNA, 19 nt, Artificial Sequence
  Description of Artificial Sequence: Synthetic oligonucleotide
  Antisense strand to SEQ ID NO: 2204844
ugacauagucaacaaugag

SEQ ID NO: 2204846 - RNA, 19 nt, Artificial Sequence
  Description of Artificial Sequence: Synthetic oligonucleotide
  Sense strand starting at position 1611 of SEQ ID NO: 1883614
acguuaucccuugacuuag

SEQ ID NO: 2204847 - RNA, 19 nt, Artificial Sequence
  Description of Artificial Sequence: Synthetic oligonucleotide
  Antisense strand to SEQ ID NO: 2204846
cuaagucaagggauaacgu

SEQ ID NO: 2204848 - RNA, 19 nt, Artificial Sequence
  Description of Artificial Sequence: Synthetic oligonucleotide
  Sense strand starting at position 913 of SEQ ID NO: 1883614
aguuucucauaggugauga

SEQ ID NO: 2204849 - RNA, 19 nt, Artificial Sequence
  Description of Artificial Sequence: Synthetic oligonucleotide
  Antisense strand to SEQ ID NO: 2204848
ucaucaccuaugagaaacu

SEQ ID NO: 2204850 - RNA, 19 nt, Artificial Sequence
  Description of Artificial Sequence: Synthetic oligonucleotide
  Sense strand starting at position 1378 of SEQ ID NO: 1883614
augaaauggaguuguuucu

SEQ ID NO: 2204851 - RNA, 19 nt, Artificial Sequence
  Description of Artificial Sequence: Synthetic oligonucleotide
  Antisense strand to SEQ ID NO: 2204850
agaaacaacuccauuucau

SEQ ID NO: 2204852 - RNA, 19 nt, Artificial Sequence
  Description of Artificial Sequence: Synthetic oligonucleotide
  Sense strand starting at position 615 of SEQ ID NO: 1883614
gcaguuaugaaugauguuu

SEQ ID NO: 2204853 - RNA, 19 nt, Artificial Sequence
  Description of Artificial Sequence: Synthetic oligonucleotide
  Antisense strand to SEQ ID NO: 2204852
aaacaucauucauaacugc

SEQ ID NO: 2204854 - RNA, 19 nt, Artificial Sequence
  Description of Artificial Sequence: Synthetic oligonucleotide
  Sense strand starting at position 906 of SEQ ID NO: 1883614
guauuaaaguuucucauag

SEQ ID NO: 2204855 - RNA, 19 nt, Artificial Sequence
  Description of Artificial Sequence: Synthetic oligonucleotide
  Antisense strand to SEQ ID NO: 2204854
cuaugagaaacuuuaauac

SEQ ID NO: 2204856 - RNA, 19 nt, Artificial Sequence
  Description of Artificial Sequence: Synthetic oligonucleotide
  Sense strand starting at position 3188 of SEQ ID NO: 1883614
ugucucuauucucugaaga

SEQ ID NO: 2204857 - RNA, 19 nt, Artificial Sequence
  Description of Artificial Sequence: Synthetic oligonucleotide
  Antisense strand to SEQ ID NO: 2204856
ucuucagagaauagagaca

SEQ ID NO: 2204858 - RNA, 19 nt, Artificial Sequence
  Description of Artificial Sequence: Synthetic oligonucleotide
  Sense strand starting at position 1597 of SEQ ID NO: 1883614
gcagauuaggaguaacguu

SEQ ID NO: 2204859 - RNA, 19 nt, Artificial Sequence
  Description of Artificial Sequence: Synthetic oligonucleotide
  Antisense strand to SEQ ID NO: 2204858
aacguuacuccuaaucugc

SEQ ID NO: 2204860 - RNA, 19 nt, Artificial Sequence
  Description of Artificial Sequence: Synthetic oligonucleotide
  Sense strand starting at position 1784 of SEQ ID NO: 1883614
cuguauucaggguggaacu

SEQ ID NO: 2204861 - RNA, 19 nt, Artificial Sequence
  Description of Artificial Sequence: Synthetic oligonucleotide
  Antisense strand to SEQ ID NO: 2204860
aguuccacccugaauacag

SEQ ID NO: 2204862 - RNA, 19 nt, Artificial Sequence
  Description of Artificial Sequence: Synthetic oligonucleotide
  Sense strand starting at position 2940 of SEQ ID NO: 1883615
aaucucuggugacuggaaa

SEQ ID NO: 2204863 - RNA, 19 nt, Artificial Sequence
  Description of Artificial Sequence: Synthetic oligonucleotide
  Antisense strand to SEQ ID NO: 2204862
uuuccagucaccagagauu

SEQ ID NO: 2204864 - RNA, 19 nt, Artificial Sequence
  Description of Artificial Sequence: Synthetic oligonucleotide
  Sense strand starting at position 2690 of SEQ ID NO: 1883615
aagaaaggucaaggccaua

SEQ ID NO: 2204865 - RNA, 19 nt, Artificial Sequence
  Description of Artificial Sequence: Synthetic oligonucleotide
  Antisense strand to SEQ ID NO: 2204864
uauggccuugaccuuucuu

SEQ ID NO: 2204866 - RNA, 19 nt, Artificial Sequence
  Description of Artificial Sequence: Synthetic oligonucleotide
  Sense strand starting at position 2622 of SEQ ID NO: 1883615
aggacuuggcugcaaacaa

SEQ ID NO: 2204867 - RNA, 19 nt, Artificial Sequence
  Description of Artificial Sequence: Synthetic oligonucleotide
  Antisense strand to SEQ ID NO: 2204866
uuguuugcagccaaguccu

SEQ ID NO: 2204868 - RNA, 19 nt, Artificial Sequence
  Description of Artificial Sequence: Synthetic oligonucleotide
  Sense strand starting at position 1933 of SEQ ID NO: 1883615
uuuaaugagguguaaacga

SEQ ID NO: 2204869 - RNA, 19 nt, Artificial Sequence
  Description of Artificial Sequence: Synthetic oligonucleotide
  Antisense strand to SEQ ID NO: 2204868
ucguuuacaccucauuaaa

SEQ ID NO: 2204870 - RNA, 19 nt, Artificial Sequence
  Description of Artificial Sequence: Synthetic oligonucleotide
  Sense strand starting at position 135 of SEQ ID NO: 1883615
guguguuauuauuucuaac

SEQ ID NO: 2204871 - RNA, 19 nt, Artificial Sequence
  Description of Artificial Sequence: Synthetic oligonucleotide
  Antisense strand to SEQ ID NO: 2204870
guuagaaauaauaacacac

SEQ ID NO: 2204872 - RNA, 19 nt, Artificial Sequence
  Description of Artificial Sequence: Synthetic oligonucleotide
  Sense strand starting at position 418 of SEQ ID NO: 1883615
cuugguugaggccaggaau

SEQ ID NO: 2204873 - RNA, 19 nt, Artificial Sequence
  Description of Artificial Sequence: Synthetic oligonucleotide
  Antisense strand to SEQ ID NO: 2204872
auuccuggccucaaccaag

SEQ ID NO: 2204874 - RNA, 19 nt, Artificial Sequence
  Description of Artificial Sequence: Synthetic oligonucleotide
  Sense strand starting at position 2191 of SEQ ID NO: 1883615
uagcauauuguugaauuga

SEQ ID NO: 2204875 - RNA, 19 nt, Artificial Sequence
  Description of Artificial Sequence: Synthetic oligonucleotide
  Antisense strand to SEQ ID NO: 2204874
ucaauucaacaauaugcua

SEQ ID NO: 2204876 - RNA, 19 nt, Artificial Sequence
  Description of Artificial Sequence: Synthetic oligonucleotide
  Sense strand starting at position 2181 of SEQ ID NO: 1883615
ggauauacauuagcauauu

SEQ ID NO: 2204877 - RNA, 19 nt, Artificial Sequence
  Description of Artificial Sequence: Synthetic oligonucleotide
  Antisense strand to SEQ ID NO: 2204876
aauaugcuaauguauaucc

SEQ ID NO: 2204878 - RNA, 19 nt, Artificial Sequence
  Description of Artificial Sequence: Synthetic oligonucleotide
  Sense strand starting at position 2703 of SEQ ID NO: 1883615
gccauauggcuugaggaca

SEQ ID NO: 2204879 - RNA, 19 nt, Artificial Sequence
  Description of Artificial Sequence: Synthetic oligonucleotide
  Antisense strand to SEQ ID NO: 2204878
uguccucaagccauauggc

SEQ ID NO: 2204880 - RNA, 19 nt, Artificial Sequence
  Description of Artificial Sequence: Synthetic oligonucleotide
  Sense strand starting at position 2720 of SEQ ID NO: 1883615
cagagaugaguugguuaua

SEQ ID NO: 2204881 - RNA, 19 nt, Artificial Sequence
  Description of Artificial Sequence: Synthetic oligonucleotide
  Antisense strand to SEQ ID NO: 2204880
uauaaccaacucaucucug

SEQ ID NO: 2204882 - RNA, 19 nt, Artificial Sequence
  Description of Artificial Sequence: Synthetic oligonucleotide
  Sense strand starting at position 651 of SEQ ID NO: 1883615
ggaguaugauuacucccau

SEQ ID NO: 2204883 - RNA, 19 nt, Artificial Sequence
  Description of Artificial Sequence: Synthetic oligonucleotide
  Antisense strand to SEQ ID NO: 2204882
augggaguaaucauacucc

SEQ ID NO: 2204884 - RNA, 19 nt, Artificial Sequence
  Description of Artificial Sequence: Synthetic oligonucleotide
  Sense strand starting at position 2933 of SEQ ID NO: 1883615
ucaauugaaucucugguga

SEQ ID NO: 2204885 - RNA, 19 nt, Artificial Sequence
  Description of Artificial Sequence: Synthetic oligonucleotide
  Antisense strand to SEQ ID NO: 2204884
ucaccagagauucaauuga

SEQ ID NO: 2204886 - RNA, 19 nt, Artificial Sequence
  Description of Artificial Sequence: Synthetic oligonucleotide
  Sense strand starting at position 2677 of SEQ ID NO: 1883615
cuaggccgucacuaagaaa

SEQ ID NO: 2204887 - RNA, 19 nt, Artificial Sequence
  Description of Artificial Sequence: Synthetic oligonucleotide
  Antisense strand to SEQ ID NO: 2204886
uuucuuagugacggccuag

SEQ ID NO: 2204888 - RNA, 19 nt, Artificial Sequence
  Description of Artificial Sequence: Synthetic oligonucleotide
  Sense strand starting at position 1039 of SEQ ID NO: 1883615
ucuccuugacuugauugua

SEQ ID NO: 2204889 - RNA, 19 nt, Artificial Sequence
  Description of Artificial Sequence: Synthetic oligonucleotide
  Antisense strand to SEQ ID NO: 2204888
uacaaucaagucaaggaga

SEQ ID NO: 2204890 - RNA, 19 nt, Artificial Sequence
  Description of Artificial Sequence: Synthetic oligonucleotide
  Sense strand starting at position 3027 of SEQ ID NO: 1883615
uggauuagcaguugaaaca

SEQ ID NO: 2204891 - RNA, 19 nt, Artificial Sequence
  Description of Artificial Sequence: Synthetic oligonucleotide
  Antisense strand to SEQ ID NO: 2204890
uguuucaacugcuaaucca

SEQ ID NO: 2204892 - RNA, 19 nt, Artificial Sequence
  Description of Artificial Sequence: Synthetic oligonucleotide
  Sense strand starting at position 2083 of SEQ ID NO: 1883615
guuagaagucuguacacca

SEQ ID NO: 2204893 - RNA, 19 nt, Artificial Sequence
  Description of Artificial Sequence: Synthetic oligonucleotide
  Antisense strand to SEQ ID NO: 2204892
ugguguacagacuucuaac

SEQ ID NO: 2204894 - RNA, 19 nt, Artificial Sequence
  Description of Artificial Sequence: Synthetic oligonucleotide
  Sense strand starting at position 1990 of SEQ ID NO: 1883615
gauggaggcuuucuuuaga

SEQ ID NO: 2204895 - RNA, 19 nt, Artificial Sequence
  Description of Artificial Sequence: Synthetic oligonucleotide
  Antisense strand to SEQ ID NO: 2204894
ucuaaagaaagccuccauc

SEQ ID NO: 2204896 - RNA, 19 nt, Artificial Sequence
  Description of Artificial Sequence: Synthetic oligonucleotide
  Sense strand starting at position 1918 of SEQ ID NO: 1883615
auauaaugugggcaguuua

SEQ ID NO: 2204897 - RNA, 19 nt, Artificial Sequence
  Description of Artificial Sequence: Synthetic oligonucleotide
  Antisense strand to SEQ ID NO: 2204896
uaaacugcccacauuauau

SEQ ID NO: 2204898 - RNA, 19 nt, Artificial Sequence
  Description of Artificial Sequence: Synthetic oligonucleotide
  Sense strand starting at position 1687 of SEQ ID NO: 1883615
acccgauucugacuuugaa

SEQ ID NO: 2204899 - RNA, 19 nt, Artificial Sequence
  Description of Artificial Sequence: Synthetic oligonucleotide
  Antisense strand to SEQ ID NO: 2204898
uucaaagucagaaucgggu

SEQ ID NO: 2204900 - RNA, 19 nt, Artificial Sequence
  Description of Artificial Sequence: Synthetic oligonucleotide
  Sense strand starting at position 3119 of SEQ ID NO: 1883615
agaacuuucugcucuagag

SEQ ID NO: 2204901 - RNA, 19 nt, Artificial Sequence
  Description of Artificial Sequence: Synthetic oligonucleotide
  Antisense strand to SEQ ID NO: 2204900
cucuagagcagaaaguucu

SEQ ID NO: 2204902 - RNA, 19 nt, Artificial Sequence
  Description of Artificial Sequence: Synthetic oligonucleotide
  Sense strand starting at position 2057 of SEQ ID NO: 1883615
gauuguuaauuggucauaa

SEQ ID NO: 2204903 - RNA, 19 nt, Artificial Sequence
  Description of Artificial Sequence: Synthetic oligonucleotide
  Antisense strand to SEQ ID NO: 2204902
uuaugaccaauuaacaauc

SEQ ID NO: 2204904 - RNA, 19 nt, Artificial Sequence
  Description of Artificial Sequence: Synthetic oligonucleotide
  Sense strand starting at position 1042 of SEQ ID NO: 1883615
ccuugacuugauuguaaau

SEQ ID NO: 2204905 - RNA, 19 nt, Artificial Sequence
  Description of Artificial Sequence: Synthetic oligonucleotide
  Antisense strand to SEQ ID NO: 2204904
auuuacaaucaagucaagg

SEQ ID NO: 2204906 - RNA, 19 nt, Artificial Sequence
  Description of Artificial Sequence: Synthetic oligonucleotide
  Sense strand starting at position 2998 of SEQ ID NO: 1883615
acagccaucugggugaaua

SEQ ID NO: 2204907 - RNA, 19 nt, Artificial Sequence
  Description of Artificial Sequence: Synthetic oligonucleotide
  Antisense strand to SEQ ID NO: 2204906
uauucacccagauggcugu

SEQ ID NO: 2204908 - RNA, 19 nt, Artificial Sequence
  Description of Artificial Sequence: Synthetic oligonucleotide
  Sense strand starting at position 2997 of SEQ ID NO: 1883615
aacagccaucugggugaau

SEQ ID NO: 2204909 - RNA, 19 nt, Artificial Sequence
  Description of Artificial Sequence: Synthetic oligonucleotide
  Antisense strand to SEQ ID NO: 2204908
auucacccagauggcuguu

SEQ ID NO: 2204910 - RNA, 19 nt, Artificial Sequence
  Description of Artificial Sequence: Synthetic oligonucleotide
  Sense strand starting at position 1931 of SEQ ID NO: 1883615
aguuuaaugagguguaaac

SEQ ID NO: 2204911 - RNA, 19 nt, Artificial Sequence
  Description of Artificial Sequence: Synthetic oligonucleotide
  Antisense strand to SEQ ID NO: 2204910
guuuacaccucauuaaacu

SEQ ID NO: 2204912 - RNA, 19 nt, Artificial Sequence
  Description of Artificial Sequence: Synthetic oligonucleotide
  Sense strand starting at position 2999 of SEQ ID NO: 1883615
cagccaucugggugaauag

SEQ ID NO: 2204913 - RNA, 19 nt, Artificial Sequence
  Description of Artificial Sequence: Synthetic oligonucleotide
  Antisense strand to SEQ ID NO: 2204912
cuauucacccagauggcug

SEQ ID NO: 2204914 - RNA, 19 nt, Artificial Sequence
  Description of Artificial Sequence: Synthetic oligonucleotide
  Sense strand starting at position 1034 of SEQ ID NO: 1883615
cguauucuccuugacuuga

SEQ ID NO: 2204915 - RNA, 19 nt, Artificial Sequence
  Description of Artificial Sequence: Synthetic oligonucleotide
  Antisense strand to SEQ ID NO: 2204914
ucaagucaaggagaauacg

SEQ ID NO: 2204916 - RNA, 19 nt, Artificial Sequence
  Description of Artificial Sequence: Synthetic oligonucleotide
  Sense strand starting at position 1849 of SEQ ID NO: 1883615
gguuacucggaggguagau

SEQ ID NO: 2204917 - RNA, 19 nt, Artificial Sequence
  Description of Artificial Sequence: Synthetic oligonucleotide
  Antisense strand to SEQ ID NO: 2204916
aucuacccuccgaguaacc

SEQ ID NO: 2204918 - RNA, 19 nt, Artificial Sequence
  Description of Artificial Sequence: Synthetic oligonucleotide
  Sense strand starting at position 884 of SEQ ID NO: 1883615
uagcgaguauuugucaugu

SEQ ID NO: 2204919 - RNA, 19 nt, Artificial Sequence
  Description of Artificial Sequence: Synthetic oligonucleotide
  Antisense strand to SEQ ID NO: 2204918
acaugacaaauacucgcua

SEQ ID NO: 2204920 - RNA, 19 nt, Artificial Sequence
  Description of Artificial Sequence: Synthetic oligonucleotide
  Sense strand starting at position 2068 of SEQ ID NO: 1883615
ggucauaauuacuuuguua

SEQ ID NO: 2204921 - RNA, 19 nt, Artificial Sequence
  Description of Artificial Sequence: Synthetic oligonucleotide
  Antisense strand to SEQ ID NO: 2204920
uaacaaaguaauuaugacc

SEQ ID NO: 2204922 - RNA, 19 nt, Artificial Sequence
  Description of Artificial Sequence: Synthetic oligonucleotide
  Sense strand starting at position 2043 of SEQ ID NO: 1883615
cagcaauagucucugauug

SEQ ID NO: 2204923 - RNA, 19 nt, Artificial Sequence
  Description of Artificial Sequence: Synthetic oligonucleotide
  Antisense strand to SEQ ID NO: 2204922
caaucagagacuauugcug

SEQ ID NO: 2204924 - RNA, 19 nt, Artificial Sequence
  Description of Artificial Sequence: Synthetic oligonucleotide
  Sense strand starting at position 2702 of SEQ ID NO: 1883615
ggccauauggcuugaggac

SEQ ID NO: 2204925 - RNA, 19 nt, Artificial Sequence
  Description of Artificial Sequence: Synthetic oligonucleotide
  Antisense strand to SEQ ID NO: 2204924
guccucaagccauauggcc

SEQ ID NO: 2204926 - RNA, 19 nt, Artificial Sequence
  Description of Artificial Sequence: Synthetic oligonucleotide
  Sense strand starting at position 2048 of SEQ ID NO: 1883615
auagucucugauuguuaau

SEQ ID NO: 2204927 - RNA, 19 nt, Artificial Sequence
  Description of Artificial Sequence: Synthetic oligonucleotide
  Antisense strand to SEQ ID NO: 2204926
auuaacaaucagagacuau

SEQ ID NO: 2204928 - RNA, 19 nt, Artificial Sequence
  Description of Artificial Sequence: Synthetic oligonucleotide
  Sense strand starting at position 2054 of SEQ ID NO: 1883615
ucugauuguuaauugguca

SEQ ID NO: 2204929 - RNA, 19 nt, Artificial Sequence
  Description of Artificial Sequence: Synthetic oligonucleotide
  Antisense strand to SEQ ID NO: 2204928
ugaccaauuaacaaucaga

SEQ ID NO: 2204930 - RNA, 19 nt, Artificial Sequence
  Description of Artificial Sequence: Synthetic oligonucleotide
  Sense strand starting at position 1357 of SEQ ID NO: 1883615
ugggaucggcucuggauau

SEQ ID NO: 2204931 - RNA, 19 nt, Artificial Sequence
  Description of Artificial Sequence: Synthetic oligonucleotide
  Antisense strand to SEQ ID NO: 2204930
auauccagagccgauccca

SEQ ID NO: 2204932 - RNA, 19 nt, Artificial Sequence
  Description of Artificial Sequence: Synthetic oligonucleotide
  Sense strand starting at position 897 of SEQ ID NO: 1883615
ucauguagcagacacguua

SEQ ID NO: 2204933 - RNA, 19 nt, Artificial Sequence
  Description of Artificial Sequence: Synthetic oligonucleotide
  Antisense strand to SEQ ID NO: 2204932
uaacgugucugcuacauga

SEQ ID NO: 2204934 - RNA, 19 nt, Artificial Sequence
  Description of Artificial Sequence: Synthetic oligonucleotide
  Sense strand starting at position 322 of SEQ ID NO: 1883615
ugcauugaguaccuacuau

SEQ ID NO: 2204935 - RNA, 19 nt, Artificial Sequence
  Description of Artificial Sequence: Synthetic oligonucleotide
  Antisense strand to SEQ ID NO: 2204934
auaguagguacucaaugca

SEQ ID NO: 2204936 - RNA, 19 nt, Artificial Sequence
  Description of Artificial Sequence: Synthetic oligonucleotide
  Sense strand starting at position 2856 of SEQ ID NO: 1883615
ugaccagauaaguguuugu

SEQ ID NO: 2204937 - RNA, 19 nt, Artificial Sequence
  Description of Artificial Sequence: Synthetic oligonucleotide
  Antisense strand to SEQ ID NO: 2204936
acaaacacuuaucugguca

SEQ ID NO: 2204938 - RNA, 19 nt, Artificial Sequence
  Description of Artificial Sequence: Synthetic oligonucleotide
  Sense strand starting at position 2108 of SEQ ID NO: 1883615
guucuaaggcgacgagaaa

SEQ ID NO: 2204939 - RNA, 19 nt, Artificial Sequence
  Description of Artificial Sequence: Synthetic oligonucleotide
  Antisense strand to SEQ ID NO: 2204938
uuucucgucgccuuagaac

SEQ ID NO: 2204940 - RNA, 19 nt, Artificial Sequence
  Description of Artificial Sequence: Synthetic oligonucleotide
  Sense strand starting at position 849 of SEQ ID NO: 1883615
cuagccagcgaguaaucau

SEQ ID NO: 2204941 - RNA, 19 nt, Artificial Sequence
  Description of Artificial Sequence: Synthetic oligonucleotide
  Antisense strand to SEQ ID NO: 2204940
augauuacucgcuggcuag

SEQ ID NO: 2204942 - RNA, 19 nt, Artificial Sequence
  Description of Artificial Sequence: Synthetic oligonucleotide
  Sense strand starting at position 2929 of SEQ ID NO: 1883616
caucgugguggagaaauaa

SEQ ID NO: 2204943 - RNA, 19 nt, Artificial Sequence
  Description of Artificial Sequence: Synthetic oligonucleotide
  Antisense strand to SEQ ID NO: 2204942
uuauuucuccaccacgaug

SEQ ID NO: 2204944 - RNA, 19 nt, Artificial Sequence
  Description of Artificial Sequence: Synthetic oligonucleotide
  Sense strand starting at position 2943 of SEQ ID NO: 1883616
aauaaaucagccggaagga

SEQ ID NO: 2204945 - RNA, 19 nt, Artificial Sequence
  Description of Artificial Sequence: Synthetic oligonucleotide
  Antisense strand to SEQ ID NO: 2204944
uccuuccggcugauuuauu

SEQ ID NO: 2204946 - RNA, 19 nt, Artificial Sequence
  Description of Artificial Sequence: Synthetic oligonucleotide
  Sense strand starting at position 1053 of SEQ ID NO: 1883616
gugugcucugcucucgaaa

SEQ ID NO: 2204947 - RNA, 19 nt, Artificial Sequence
  Description of Artificial Sequence: Synthetic oligonucleotide
  Antisense strand to SEQ ID NO: 2204946
uuucgagagcagagcacac

SEQ ID NO: 2204948 - RNA, 19 nt, Artificial Sequence
  Description of Artificial Sequence: Synthetic oligonucleotide
  Sense strand starting at position 358 of SEQ ID NO: 1883616
cuagguggucuggaauguu

SEQ ID NO: 2204949 - RNA, 19 nt, Artificial Sequence
  Description of Artificial Sequence: Synthetic oligonucleotide
  Antisense strand to SEQ ID NO: 2204948
aacauuccagaccaccuag

SEQ ID NO: 2204950 - RNA, 19 nt, Artificial Sequence
  Description of Artificial Sequence: Synthetic oligonucleotide
  Sense strand starting at position 2927 of SEQ ID NO: 1883616
ggcaucgugguggagaaau

SEQ ID NO: 2204951 - RNA, 19 nt, Artificial Sequence
  Description of Artificial Sequence: Synthetic oligonucleotide
  Antisense strand to SEQ ID NO: 2204950
auuucuccaccacgaugcc

SEQ ID NO: 2204952 - RNA, 19 nt, Artificial Sequence
  Description of Artificial Sequence: Synthetic oligonucleotide
  Sense strand starting at position 2613 of SEQ ID NO: 1883616
gugugagauuuguccugcu

SEQ ID NO: 2204953 - RNA, 19 nt, Artificial Sequence
  Description of Artificial Sequence: Synthetic oligonucleotide
  Antisense strand to SEQ ID NO: 2204952
agcaggacaaaucucacac

SEQ ID NO: 2204954 - RNA, 19 nt, Artificial Sequence
  Description of Artificial Sequence: Synthetic oligonucleotide
  Sense strand starting at position 837 of SEQ ID NO: 1883616
cuggcugcuccuuagaauc

SEQ ID NO: 2204955 - RNA, 19 nt, Artificial Sequence
  Description of Artificial Sequence: Synthetic oligonucleotide
  Antisense strand to SEQ ID NO: 2204954
gauucuaaggagcagccag

SEQ ID NO: 2204956 - RNA, 19 nt, Artificial Sequence
  Description of Artificial Sequence: Synthetic oligonucleotide
  Sense strand starting at position 556 of SEQ ID NO: 1883616
cggugaacagacugugagu

SEQ ID NO: 2204957 - RNA, 19 nt, Artificial Sequence
  Description of Artificial Sequence: Synthetic oligonucleotide
  Antisense strand to SEQ ID NO: 2204956
acucacagucuguucaccg

SEQ ID NO: 2204958 - RNA, 19 nt, Artificial Sequence
  Description of Artificial Sequence: Synthetic oligonucleotide
  Sense strand starting at position 2926 of SEQ ID NO: 1883616
uggcaucgugguggagaaa

SEQ ID NO: 2204959 - RNA, 19 nt, Artificial Sequence
  Description of Artificial Sequence: Synthetic oligonucleotide
  Antisense strand to SEQ ID NO: 2204958
uuucuccaccacgaugcca

SEQ ID NO: 2204960 - RNA, 19 nt, Artificial Sequence
  Description of Artificial Sequence: Synthetic oligonucleotide
  Sense strand starting at position 2850 of SEQ ID NO: 1883616
gaacuuugcgcagggacua

SEQ ID NO: 2204961 - RNA, 19 nt, Artificial Sequence
  Description of Artificial Sequence: Synthetic oligonucleotide
  Antisense strand to SEQ ID NO: 2204960
uagucccugcgcaaaguuc

SEQ ID NO: 2204962 - RNA, 19 nt, Artificial Sequence
  Description of Artificial Sequence: Synthetic oligonucleotide
  Sense strand starting at position 836 of SEQ ID NO: 1883616
ccuggcugcuccuuagaau

SEQ ID NO: 2204963 - RNA, 19 nt, Artificial Sequence
  Description of Artificial Sequence: Synthetic oligonucleotide
  Antisense strand to SEQ ID NO: 2204962
auucuaaggagcagccagg

SEQ ID NO: 2204964 - RNA, 19 nt, Artificial Sequence
  Description of Artificial Sequence: Synthetic oligonucleotide
  Sense strand starting at position 2555 of SEQ ID NO: 1883616
uuuccagagugcucagcau

SEQ ID NO: 2204965 - RNA, 19 nt, Artificial Sequence
  Description of Artificial Sequence: Synthetic oligonucleotide
  Antisense strand to SEQ ID NO: 2204964
augcugagcacucuggaaa

SEQ ID NO: 2204966 - RNA, 19 nt, Artificial Sequence
  Description of Artificial Sequence: Synthetic oligonucleotide
  Sense strand starting at position 2838 of SEQ ID NO: 1883616
gcacgaggccgugaacuuu

SEQ ID NO: 2204967 - RNA, 19 nt, Artificial Sequence
  Description of Artificial Sequence: Synthetic oligonucleotide
  Antisense strand to SEQ ID NO: 2204966
aaaguucacggccucgugc

SEQ ID NO: 2204968 - RNA, 19 nt, Artificial Sequence
  Description of Artificial Sequence: Synthetic oligonucleotide
  Sense strand starting at position 1154 of SEQ ID NO: 1883616
ccauuucucuggcagcaaa

SEQ ID NO: 2204969 - RNA, 19 nt, Artificial Sequence
  Description of Artificial Sequence: Synthetic oligonucleotide
  Antisense strand to SEQ ID NO: 2204968
uuugcugccagagaaaugg

SEQ ID NO: 2204970 - RNA, 19 nt, Artificial Sequence
  Description of Artificial Sequence: Synthetic oligonucleotide
  Sense strand starting at position 1711 of SEQ ID NO: 1883616
cggacaacuugugaaugaa

SEQ ID NO: 2204971 - RNA, 19 nt, Artificial Sequence
  Description of Artificial Sequence: Synthetic oligonucleotide
  Antisense strand to SEQ ID NO: 2204970
uucauucacaaguuguccg

SEQ ID NO: 2204972 - RNA, 19 nt, Artificial Sequence
  Description of Artificial Sequence: Synthetic oligonucleotide
  Sense strand starting at position 3201 of SEQ ID NO: 1883616
ggucaagugcucgggcaau

SEQ ID NO: 2204973 - RNA, 19 nt, Artificial Sequence
  Description of Artificial Sequence: Synthetic oligonucleotide
  Antisense strand to SEQ ID NO: 2204972
auugcccgagcacuugacc

SEQ ID NO: 2204974 - RNA, 19 nt, Artificial Sequence
  Description of Artificial Sequence: Synthetic oligonucleotide
  Sense strand starting at position 96 of SEQ ID NO: 1883616
gaggaaaugucccaaguuc

SEQ ID NO: 2204975 - RNA, 19 nt, Artificial Sequence
  Description of Artificial Sequence: Synthetic oligonucleotide
  Antisense strand to SEQ ID NO: 2204974
gaacuugggacauuuccuc

SEQ ID NO: 2204976 - RNA, 19 nt, Artificial Sequence
  Description of Artificial Sequence: Synthetic oligonucleotide
  Sense strand starting at position 1542 of SEQ ID NO: 1883616
gcucuuguuucucuuuagu

SEQ ID NO: 2204977 - RNA, 19 nt, Artificial Sequence
  Description of Artificial Sequence: Synthetic oligonucleotide
  Antisense strand to SEQ ID NO: 2204976
acuaaagagaaacaagagc

SEQ ID NO: 2204978 - RNA, 19 nt, Artificial Sequence
  Description of Artificial Sequence: Synthetic oligonucleotide
  Sense strand starting at position 3200 of SEQ ID NO: 1883616
cggucaagugcucgggcaa

SEQ ID NO: 2204979 - RNA, 19 nt, Artificial Sequence
  Description of Artificial Sequence: Synthetic oligonucleotide
  Antisense strand to SEQ ID NO: 2204978
uugcccgagcacuugaccg

SEQ ID NO: 2204980 - RNA, 19 nt, Artificial Sequence
  Description of Artificial Sequence: Synthetic oligonucleotide
  Sense strand starting at position 1710 of SEQ ID NO: 1883616
ccggacaacuugugaauga

SEQ ID NO: 2204981 - RNA, 19 nt, Artificial Sequence
  Description of Artificial Sequence: Synthetic oligonucleotide
  Antisense strand to SEQ ID NO: 2204980
ucauucacaaguuguccgg

SEQ ID NO: 2204982 - RNA, 19 nt, Artificial Sequence
  Description of Artificial Sequence: Synthetic oligonucleotide
  Sense strand starting at position 367 of SEQ ID NO: 1883616
cuggaauguucccacagcu

SEQ ID NO: 2204983 - RNA, 19 nt, Artificial Sequence
  Description of Artificial Sequence: Synthetic oligonucleotide
  Antisense strand to SEQ ID NO: 2204982
agcugugggaacauuccag

SEQ ID NO: 2204984 - RNA, 19 nt, Artificial Sequence
  Description of Artificial Sequence: Synthetic oligonucleotide
  Sense strand starting at position 302 of SEQ ID NO: 1883616
gcacacaggucagauguuu

SEQ ID NO: 2204985 - RNA, 19 nt, Artificial Sequence
  Description of Artificial Sequence: Synthetic oligonucleotide
  Antisense strand to SEQ ID NO: 2204984
aaacaucugaccugugugc

SEQ ID NO: 2204986 - RNA, 19 nt, Artificial Sequence
  Description of Artificial Sequence: Synthetic oligonucleotide
  Sense strand starting at position 839 of SEQ ID NO: 1883616
ggcugcuccuuagaaucua

SEQ ID NO: 2204987 - RNA, 19 nt, Artificial Sequence
  Description of Artificial Sequence: Synthetic oligonucleotide
  Antisense strand to SEQ ID NO: 2204986
uagauucuaaggagcagcc

SEQ ID NO: 2204988 - RNA, 19 nt, Artificial Sequence
  Description of Artificial Sequence: Synthetic oligonucleotide
  Sense strand starting at position 2380 of SEQ ID NO: 1883616
ccuggcugcuguuacauaa

SEQ ID NO: 2204989 - RNA, 19 nt, Artificial Sequence
  Description of Artificial Sequence: Synthetic oligonucleotide
  Antisense strand to SEQ ID NO: 2204988
uuauguaacagcagccagg

SEQ ID NO: 2204990 - RNA, 19 nt, Artificial Sequence
  Description of Artificial Sequence: Synthetic oligonucleotide
  Sense strand starting at position 2925 of SEQ ID NO: 1883616
cuggcaucgugguggagaa

SEQ ID NO: 2204991 - RNA, 19 nt, Artificial Sequence
  Description of Artificial Sequence: Synthetic oligonucleotide
  Antisense strand to SEQ ID NO: 2204990
uucuccaccacgaugccag

SEQ ID NO: 2204992 - RNA, 19 nt, Artificial Sequence
  Description of Artificial Sequence: Synthetic oligonucleotide
  Sense strand starting at position 1994 of SEQ ID NO: 1883616
ucucuucucugcugguaga

SEQ ID NO: 2204993 - RNA, 19 nt, Artificial Sequence
  Description of Artificial Sequence: Synthetic oligonucleotide
  Antisense strand to SEQ ID NO: 2204992
ucuaccagcagagaagaga

SEQ ID NO: 2204994 - RNA, 19 nt, Artificial Sequence
  Description of Artificial Sequence: Synthetic oligonucleotide
  Sense strand starting at position 2342 of SEQ ID NO: 1883616
cgcgcuuccuucuauggaa

SEQ ID NO: 2204995 - RNA, 19 nt, Artificial Sequence
  Description of Artificial Sequence: Synthetic oligonucleotide
  Antisense strand to SEQ ID NO: 2204994
uuccauagaaggaagcgcg

SEQ ID NO: 2204996 - RNA, 19 nt, Artificial Sequence
  Description of Artificial Sequence: Synthetic oligonucleotide
  Sense strand starting at position 1632 of SEQ ID NO: 1883616
auguacuccuguuguguca

SEQ ID NO: 2204997 - RNA, 19 nt, Artificial Sequence
  Description of Artificial Sequence: Synthetic oligonucleotide
  Antisense strand to SEQ ID NO: 2204996
ugacacaacaggaguacau

SEQ ID NO: 2204998 - RNA, 19 nt, Artificial Sequence
  Description of Artificial Sequence: Synthetic oligonucleotide
  Sense strand starting at position 1055 of SEQ ID NO: 1883616
gugcucugcucucgaaagu

SEQ ID NO: 2204999 - RNA, 19 nt, Artificial Sequence
  Description of Artificial Sequence: Synthetic oligonucleotide
  Antisense strand to SEQ ID NO: 2204998
acuuucgagagcagagcac

SEQ ID NO: 2205000 - RNA, 19 nt, Artificial Sequence
  Description of Artificial Sequence: Synthetic oligonucleotide
  Sense strand starting at position 2653 of SEQ ID NO: 1883617
ccaauucuggagugauuaa

SEQ ID NO: 2205001 - RNA, 19 nt, Artificial Sequence
  Description of Artificial Sequence: Synthetic oligonucleotide
  Antisense strand to SEQ ID NO: 2205000
uuaaucacuccagaauugg

SEQ ID NO: 2205002 - RNA, 19 nt, Artificial Sequence
  Description of Artificial Sequence: Synthetic oligonucleotide
  Sense strand starting at position 1595 of SEQ ID NO: 1883617
ugauuccucagguggauga

SEQ ID NO: 2205003 - RNA, 19 nt, Artificial Sequence
  Description of Artificial Sequence: Synthetic oligonucleotide
  Antisense strand to SEQ ID NO: 2205002
ucauccaccugaggaauca

SEQ ID NO: 2205004 - RNA, 19 nt, Artificial Sequence
  Description of Artificial Sequence: Synthetic oligonucleotide
  Sense strand starting at position 3321 of SEQ ID NO: 1883617
ucuuaaauaggacguagau

SEQ ID NO: 2205005 - RNA, 19 nt, Artificial Sequence
  Description of Artificial Sequence: Synthetic oligonucleotide
  Antisense strand to SEQ ID NO: 2205004
aucuacguccuauuuaaga

SEQ ID NO: 2205006 - RNA, 19 nt, Artificial Sequence
  Description of Artificial Sequence: Synthetic oligonucleotide
  Sense strand starting at position 3309 of SEQ ID NO: 1883617
aguaacuacuggucuuaaa

SEQ ID NO: 2205007 - RNA, 19 nt, Artificial Sequence
  Description of Artificial Sequence: Synthetic oligonucleotide
  Antisense strand to SEQ ID NO: 2205006
uuuaagaccaguaguuacu

SEQ ID NO: 2205008 - RNA, 19 nt, Artificial Sequence
  Description of Artificial Sequence: Synthetic oligonucleotide
  Sense strand starting at position 2448 of SEQ ID NO: 1883617
cgaccacaggcuuauguaa

SEQ ID NO: 2205009 - RNA, 19 nt, Artificial Sequence
  Description of Artificial Sequence: Synthetic oligonucleotide
  Antisense strand to SEQ ID NO: 2205008
uuacauaagccuguggucg

SEQ ID NO: 2205010 - RNA, 19 nt, Artificial Sequence
  Description of Artificial Sequence: Synthetic oligonucleotide
  Sense strand starting at position 326 of SEQ ID NO: 1883617
cugagucagccacaagguu

SEQ ID NO: 2205011 - RNA, 19 nt, Artificial Sequence
  Description of Artificial Sequence: Synthetic oligonucleotide
  Antisense strand to SEQ ID NO: 2205010
aaccuuguggcugacucag

SEQ ID NO: 2205012 - RNA, 19 nt, Artificial Sequence
  Description of Artificial Sequence: Synthetic oligonucleotide
  Sense strand starting at position 322 of SEQ ID NO: 1883617
gauucugagucagccacaa

SEQ ID NO: 2205013 - RNA, 19 nt, Artificial Sequence
  Description of Artificial Sequence: Synthetic oligonucleotide
  Antisense strand to SEQ ID NO: 2205012
uuguggcugacucagaauc

SEQ ID NO: 2205014 - RNA, 19 nt, Artificial Sequence
  Description of Artificial Sequence: Synthetic oligonucleotide
  Sense strand starting at position 1581 of SEQ ID NO: 1883617
ugggaagccuuucuugauu

SEQ ID NO: 2205015 - RNA, 19 nt, Artificial Sequence
  Description of Artificial Sequence: Synthetic oligonucleotide
  Antisense strand to SEQ ID NO: 2205014
aaucaagaaaggcuuccca

SEQ ID NO: 2205016 - RNA, 19 nt, Artificial Sequence
  Description of Artificial Sequence: Synthetic oligonucleotide
  Sense strand starting at position 3583 of SEQ ID NO: 1883617
cagacuucucagugguaac

SEQ ID NO: 2205017 - RNA, 19 nt, Artificial Sequence
  Description of Artificial Sequence: Synthetic oligonucleotide
  Antisense strand to SEQ ID NO: 2205016
guuaccacugagaagucug

SEQ ID NO: 2205018 - RNA, 19 nt, Artificial Sequence
  Description of Artificial Sequence: Synthetic oligonucleotide
  Sense strand starting at position 2130 of SEQ ID NO: 1883617
agcacaugugguuaacagu

SEQ ID NO: 2205019 - RNA, 19 nt, Artificial Sequence
  Description of Artificial Sequence: Synthetic oligonucleotide
  Antisense strand to SEQ ID NO: 2205018
acuguuaaccacaugugcu

SEQ ID NO: 2205020 - RNA, 19 nt, Artificial Sequence
  Description of Artificial Sequence: Synthetic oligonucleotide
  Sense strand starting at position 1701 of SEQ ID NO: 1883617
ccuacaugcuccuuugaag

SEQ ID NO: 2205021 - RNA, 19 nt, Artificial Sequence
  Description of Artificial Sequence: Synthetic oligonucleotide
  Antisense strand to SEQ ID NO: 2205020
cuucaaaggagcauguagg

SEQ ID NO: 2205022 - RNA, 19 nt, Artificial Sequence
  Description of Artificial Sequence: Synthetic oligonucleotide
  Sense strand starting at position 3582 of SEQ ID NO: 1883617
gcagacuucucagugguaa

SEQ ID NO: 2205023 - RNA, 19 nt, Artificial Sequence
  Description of Artificial Sequence: Synthetic oligonucleotide
  Antisense strand to SEQ ID NO: 2205022
uuaccacugagaagucugc

SEQ ID NO: 2205024 - RNA, 19 nt, Artificial Sequence
  Description of Artificial Sequence: Synthetic oligonucleotide
  Sense strand starting at position 2351 of SEQ ID NO: 1883617
ugagcucacgggugguaaa

SEQ ID NO: 2205025 - RNA, 19 nt, Artificial Sequence
  Description of Artificial Sequence: Synthetic oligonucleotide
  Antisense strand to SEQ ID NO: 2205024
uuuaccacccgugagcuca

SEQ ID NO: 2205026 - RNA, 19 nt, Artificial Sequence
  Description of Artificial Sequence: Synthetic oligonucleotide
  Sense strand starting at position 679 of SEQ ID NO: 1883617
cgccuucccacgggaagau

SEQ ID NO: 2205027 - RNA, 19 nt, Artificial Sequence
  Description of Artificial Sequence: Synthetic oligonucleotide
  Antisense strand to SEQ ID NO: 2205026
aucuucccgugggaaggcg

SEQ ID NO: 2205028 - RNA, 19 nt, Artificial Sequence
  Description of Artificial Sequence: Synthetic oligonucleotide
  Sense strand starting at position 1142 of SEQ ID NO: 1883617
acaagauacugacaugagu

SEQ ID NO: 2205029 - RNA, 19 nt, Artificial Sequence
  Description of Artificial Sequence: Synthetic oligonucleotide
  Antisense strand to SEQ ID NO: 2205028
acucaugucaguaucuugu

SEQ ID NO: 2205030 - RNA, 19 nt, Artificial Sequence
  Description of Artificial Sequence: Synthetic oligonucleotide
  Sense strand starting at position 946 of SEQ ID NO: 1883617
gggcaaugcuuggugucaa

SEQ ID NO: 2205031 - RNA, 19 nt, Artificial Sequence
  Description of Artificial Sequence: Synthetic oligonucleotide
  Antisense strand to SEQ ID NO: 2205030
uugacaccaagcauugccc

SEQ ID NO: 2205032 - RNA, 19 nt, Artificial Sequence
  Description of Artificial Sequence: Synthetic oligonucleotide
  Sense strand starting at position 2565 of SEQ ID NO: 1883617
augcucagauaucauugaa

SEQ ID NO: 2205033 - RNA, 19 nt, Artificial Sequence
  Description of Artificial Sequence: Synthetic oligonucleotide
  Antisense strand to SEQ ID NO: 2205032
uucaaugauaucugagcau

SEQ ID NO: 2205034 - RNA, 19 nt, Artificial Sequence
  Description of Artificial Sequence: Synthetic oligonucleotide
  Sense strand starting at position 307 of SEQ ID NO: 1883617
ucucaugacucucaggauu

SEQ ID NO: 2205035 - RNA, 19 nt, Artificial Sequence
  Description of Artificial Sequence: Synthetic oligonucleotide
  Antisense strand to SEQ ID NO: 2205034
aauccugagagucaugaga

SEQ ID NO: 2205036 - RNA, 19 nt, Artificial Sequence
  Description of Artificial Sequence: Synthetic oligonucleotide
  Sense strand starting at position 3866 of SEQ ID NO: 1883617
agaauagccuaauacugua

SEQ ID NO: 2205037 - RNA, 19 nt, Artificial Sequence
  Description of Artificial Sequence: Synthetic oligonucleotide
  Antisense strand to SEQ ID NO: 2205036
uacaguauuaggcuauucu

SEQ ID NO: 2205038 - RNA, 19 nt, Artificial Sequence
  Description of Artificial Sequence: Synthetic oligonucleotide
  Sense strand starting at position 945 of SEQ ID NO: 1883617
cgggcaaugcuugguguca

SEQ ID NO: 2205039 - RNA, 19 nt, Artificial Sequence
  Description of Artificial Sequence: Synthetic oligonucleotide
  Antisense strand to SEQ ID NO: 2205038
ugacaccaagcauugcccg

SEQ ID NO: 2205040 - RNA, 19 nt, Artificial Sequence
  Description of Artificial Sequence: Synthetic oligonucleotide
  Sense strand starting at position 1222 of SEQ ID NO: 1883617
gcguuucuuccaugcucaa

SEQ ID NO: 2205041 - RNA, 19 nt, Artificial Sequence
  Description of Artificial Sequence: Synthetic oligonucleotide
  Antisense strand to SEQ ID NO: 2205040
uugagcauggaagaaacgc

SEQ ID NO: 2205042 - RNA, 19 nt, Artificial Sequence
  Description of Artificial Sequence: Synthetic oligonucleotide
  Sense strand starting at position 3603 of SEQ ID NO: 1883617
uuaccagccugaggaaaua

SEQ ID NO: 2205043 - RNA, 19 nt, Artificial Sequence
  Description of Artificial Sequence: Synthetic oligonucleotide
  Antisense strand to SEQ ID NO: 2205042
uauuuccucaggcugguaa

SEQ ID NO: 2205044 - RNA, 19 nt, Artificial Sequence
  Description of Artificial Sequence: Synthetic oligonucleotide
  Sense strand starting at position 309 of SEQ ID NO: 1883617
ucaugacucucaggauucu

SEQ ID NO: 2205045 - RNA, 19 nt, Artificial Sequence
  Description of Artificial Sequence: Synthetic oligonucleotide
  Antisense strand to SEQ ID NO: 2205044
agaauccugagagucauga

SEQ ID NO: 2205046 - RNA, 19 nt, Artificial Sequence
  Description of Artificial Sequence: Synthetic oligonucleotide
  Sense strand starting at position 3299 of SEQ ID NO: 1883617
gggcaagucuaguaacuac

SEQ ID NO: 2205047 - RNA, 19 nt, Artificial Sequence
  Description of Artificial Sequence: Synthetic oligonucleotide
  Antisense strand to SEQ ID NO: 2205046
guaguuacuagacuugccc

SEQ ID NO: 2205048 - RNA, 19 nt, Artificial Sequence
  Description of Artificial Sequence: Synthetic oligonucleotide
  Sense strand starting at position 315 of SEQ ID NO: 1883617
cucucaggauucugaguca

SEQ ID NO: 2205049 - RNA, 19 nt, Artificial Sequence
  Description of Artificial Sequence: Synthetic oligonucleotide
  Antisense strand to SEQ ID NO: 2205048
ugacucagaauccugagag

SEQ ID NO: 2205050 - RNA, 19 nt, Artificial Sequence
  Description of Artificial Sequence: Synthetic oligonucleotide
  Sense strand starting at position 1593 of SEQ ID NO: 1883617
cuugauuccucagguggau

SEQ ID NO: 2205051 - RNA, 19 nt, Artificial Sequence
  Description of Artificial Sequence: Synthetic oligonucleotide
  Antisense strand to SEQ ID NO: 2205050
auccaccugaggaaucaag

SEQ ID NO: 2205052 - RNA, 19 nt, Artificial Sequence
  Description of Artificial Sequence: Synthetic oligonucleotide
  Sense strand starting at position 1489 of SEQ ID NO: 1883617
ggcugcuucuuccagucaa

SEQ ID NO: 2205053 - RNA, 19 nt, Artificial Sequence
  Description of Artificial Sequence: Synthetic oligonucleotide
  Antisense strand to SEQ ID NO: 2205052
uugacuggaagaagcagcc

SEQ ID NO: 2205054 - RNA, 19 nt, Artificial Sequence
  Description of Artificial Sequence: Synthetic oligonucleotide
  Sense strand starting at position 947 of SEQ ID NO: 1883617
ggcaaugcuuggugucaag

SEQ ID NO: 2205055 - RNA, 19 nt, Artificial Sequence
  Description of Artificial Sequence: Synthetic oligonucleotide
  Antisense strand to SEQ ID NO: 2205054
cuugacaccaagcauugcc

SEQ ID NO: 2205056 - RNA, 19 nt, Artificial Sequence
  Description of Artificial Sequence: Synthetic oligonucleotide
  Sense strand starting at position 3123 of SEQ ID NO: 1883618
gcuuguugauuucuaaauc

SEQ ID NO: 2205057 - RNA, 19 nt, Artificial Sequence
  Description of Artificial Sequence: Synthetic oligonucleotide
  Antisense strand to SEQ ID NO: 2205056
gauuuagaaaucaacaagc

SEQ ID NO: 2205058 - RNA, 19 nt, Artificial Sequence
  Description of Artificial Sequence: Synthetic oligonucleotide
  Sense strand starting at position 2557 of SEQ ID NO: 1883618
agagcauuucugugucagg

SEQ ID NO: 2205059 - RNA, 19 nt, Artificial Sequence
  Description of Artificial Sequence: Synthetic oligonucleotide
  Antisense strand to SEQ ID NO: 2205058
ccugacacagaaaugcucu

SEQ ID NO: 2205060 - RNA, 19 nt, Artificial Sequence
  Description of Artificial Sequence: Synthetic oligonucleotide
  Sense strand starting at position 3120 of SEQ ID NO: 1883618
uuggcuuguugauuucuaa

SEQ ID NO: 2205061 - RNA, 19 nt, Artificial Sequence
  Description of Artificial Sequence: Synthetic oligonucleotide
  Antisense strand to SEQ ID NO: 2205060
uuagaaaucaacaagccaa

SEQ ID NO: 2205062 - RNA, 19 nt, Artificial Sequence
  Description of Artificial Sequence: Synthetic oligonucleotide
  Sense strand starting at position 3174 of SEQ ID NO: 1883618
ccaggauacuucucuugga

SEQ ID NO: 2205063 - RNA, 19 nt, Artificial Sequence
  Description of Artificial Sequence: Synthetic oligonucleotide
  Antisense strand to SEQ ID NO: 2205062
uccaagagaaguauccugg

SEQ ID NO: 2205064 - RNA, 19 nt, Artificial Sequence
  Description of Artificial Sequence: Synthetic oligonucleotide
  Sense strand starting at position 2925 of SEQ ID NO: 1883618
augaguuauuugcuguuua

SEQ ID NO: 2205065 - RNA, 19 nt, Artificial Sequence
  Description of Artificial Sequence: Synthetic oligonucleotide
  Antisense strand to SEQ ID NO: 2205064
uaaacagcaaauaacucau

SEQ ID NO: 2205066 - RNA, 19 nt, Artificial Sequence
  Description of Artificial Sequence: Synthetic oligonucleotide
  Sense strand starting at position 3178 of SEQ ID NO: 1883618
gauacuucucuuggacuga

SEQ ID NO: 2205067 - RNA, 19 nt, Artificial Sequence
  Description of Artificial Sequence: Synthetic oligonucleotide
  Antisense strand to SEQ ID NO: 2205066
ucaguccaagagaaguauc

SEQ ID NO: 2205068 - RNA, 19 nt, Artificial Sequence
  Description of Artificial Sequence: Synthetic oligonucleotide
  Sense strand starting at position 2077 of SEQ ID NO: 1883618
gcagcucacagauagauug

SEQ ID NO: 2205069 - RNA, 19 nt, Artificial Sequence
  Description of Artificial Sequence: Synthetic oligonucleotide
  Antisense strand to SEQ ID NO: 2205068
caaucuaucugugagcugc

SEQ ID NO: 2205070 - RNA, 19 nt, Artificial Sequence
  Description of Artificial Sequence: Synthetic oligonucleotide
  Sense strand starting at position 2025 of SEQ ID NO: 1883618
ucuugagauaccugguaga

SEQ ID NO: 2205071 - RNA, 19 nt, Artificial Sequence
  Description of Artificial Sequence: Synthetic oligonucleotide
  Antisense strand to SEQ ID NO: 2205070
ucuaccagguaucucaaga

SEQ ID NO: 2205072 - RNA, 19 nt, Artificial Sequence
  Description of Artificial Sequence: Synthetic oligonucleotide
  Sense strand starting at position 2900 of SEQ ID NO: 1883618
cgagacucaugaccuuaau

SEQ ID NO: 2205073 - RNA, 19 nt, Artificial Sequence
  Description of Artificial Sequence: Synthetic oligonucleotide
  Antisense strand to SEQ ID NO: 2205072
auuaaggucaugagucucg

SEQ ID NO: 2205074 - RNA, 19 nt, Artificial Sequence
  Description of Artificial Sequence: Synthetic oligonucleotide
  Sense strand starting at position 3865 of SEQ ID NO: 1883618
ucuaacuuugcagaaguca

SEQ ID NO: 2205075 - RNA, 19 nt, Artificial Sequence
  Description of Artificial Sequence: Synthetic oligonucleotide
  Antisense strand to SEQ ID NO: 2205074
ugacuucugcaaaguuaga

SEQ ID NO: 2205076 - RNA, 19 nt, Artificial Sequence
  Description of Artificial Sequence: Synthetic oligonucleotide
  Sense strand starting at position 3116 of SEQ ID NO: 1883618
ggguuuggcuuguugauuu

SEQ ID NO: 2205077 - RNA, 19 nt, Artificial Sequence
  Description of Artificial Sequence: Synthetic oligonucleotide
  Antisense strand to SEQ ID NO: 2205076
aaaucaacaagccaaaccc

SEQ ID NO: 2205078 - RNA, 19 nt, Artificial Sequence
  Description of Artificial Sequence: Synthetic oligonucleotide
  Sense strand starting at position 2798 of SEQ ID NO: 1883618
ggucucaggccucagaacu

SEQ ID NO: 2205079 - RNA, 19 nt, Artificial Sequence
  Description of Artificial Sequence: Synthetic oligonucleotide
  Antisense strand to SEQ ID NO: 2205078
aguucugaggccugagacc

SEQ ID NO: 2205080 - RNA, 19 nt, Artificial Sequence
  Description of Artificial Sequence: Synthetic oligonucleotide
  Sense strand starting at position 3138 of SEQ ID NO: 1883618
aaucucaaagcguaguaaa

SEQ ID NO: 2205081 - RNA, 19 nt, Artificial Sequence
  Description of Artificial Sequence: Synthetic oligonucleotide
  Antisense strand to SEQ ID NO: 2205080
uuuacuacgcuuugagauu

SEQ ID NO: 2205082 - RNA, 19 nt, Artificial Sequence
  Description of Artificial Sequence: Synthetic oligonucleotide
  Sense strand starting at position 3148 of SEQ ID NO: 1883618
cguaguaaacauugggaca

SEQ ID NO: 2205083 - RNA, 19 nt, Artificial Sequence
  Description of Artificial Sequence: Synthetic oligonucleotide
  Antisense strand to SEQ ID NO: 2205082
ugucccaauguuuacuacg

SEQ ID NO: 2205084 - RNA, 19 nt, Artificial Sequence
  Description of Artificial Sequence: Synthetic oligonucleotide
  Sense strand starting at position 3637 of SEQ ID NO: 1883618
gggaacaucgcucacaugu

SEQ ID NO: 2205085 - RNA, 19 nt, Artificial Sequence
  Description of Artificial Sequence: Synthetic oligonucleotide
  Antisense strand to SEQ ID NO: 2205084
acaugugagcgauguuccc

SEQ ID NO: 2205086 - RNA, 19 nt, Artificial Sequence
  Description of Artificial Sequence: Synthetic oligonucleotide
  Sense strand starting at position 1989 of SEQ ID NO: 1883618
aacuaaggcugggauuuau

SEQ ID NO: 2205087 - RNA, 19 nt, Artificial Sequence
  Description of Artificial Sequence: Synthetic oligonucleotide
  Antisense strand to SEQ ID NO: 2205086
auaaaucccagccuuaguu

SEQ ID NO: 2205088 - RNA, 19 nt, Artificial Sequence
  Description of Artificial Sequence: Synthetic oligonucleotide
  Sense strand starting at position 2833 of SEQ ID NO: 1883618
uucugagguucucccaaua

SEQ ID NO: 2205089 - RNA, 19 nt, Artificial Sequence
  Description of Artificial Sequence: Synthetic oligonucleotide
  Antisense strand to SEQ ID NO: 2205088
uauugggagaaccucagaa

SEQ ID NO: 2205090 - RNA, 19 nt, Artificial Sequence
  Description of Artificial Sequence: Synthetic oligonucleotide
  Sense strand starting at position 2929 of SEQ ID NO: 1883618
guuauuugcuguuuacucu

SEQ ID NO: 2205091 - RNA, 19 nt, Artificial Sequence
  Description of Artificial Sequence: Synthetic oligonucleotide
  Antisense strand to SEQ ID NO: 2205090
agaguaaacagcaaauaac

SEQ ID NO: 2205092 - RNA, 19 nt, Artificial Sequence
  Description of Artificial Sequence: Synthetic oligonucleotide
  Sense strand starting at position 3342 of SEQ ID NO: 1883618
uuguuauaagcacacgacu

SEQ ID NO: 2205093 - RNA, 19 nt, Artificial Sequence
  Description of Artificial Sequence: Synthetic oligonucleotide
  Antisense strand to SEQ ID NO: 2205092
agucgugugcuuauaacaa

SEQ ID NO: 2205094 - RNA, 19 nt, Artificial Sequence
  Description of Artificial Sequence: Synthetic oligonucleotide
  Sense strand starting at position 3508 of SEQ ID NO: 1883618
aaggcuugucgacauucca

SEQ ID NO: 2205095 - RNA, 19 nt, Artificial Sequence
  Description of Artificial Sequence: Synthetic oligonucleotide
  Antisense strand to SEQ ID NO: 2205094
uggaaugucgacaagccuu

SEQ ID NO: 2205096 - RNA, 19 nt, Artificial Sequence
  Description of Artificial Sequence: Synthetic oligonucleotide
  Sense strand starting at position 3504 of SEQ ID NO: 1883618
gaagaaggcuugucgacau

SEQ ID NO: 2205097 - RNA, 19 nt, Artificial Sequence
  Description of Artificial Sequence: Synthetic oligonucleotide
  Antisense strand to SEQ ID NO: 2205096
augucgacaagccuucuuc

SEQ ID NO: 2205098 - RNA, 19 nt, Artificial Sequence
  Description of Artificial Sequence: Synthetic oligonucleotide
  Sense strand starting at position 3284 of SEQ ID NO: 1883618
agcucaggacucggaguaa

SEQ ID NO: 2205099 - RNA, 19 nt, Artificial Sequence
  Description of Artificial Sequence: Synthetic oligonucleotide
  Antisense strand to SEQ ID NO: 2205098
uuacuccgaguccugagcu

SEQ ID NO: 2205100 - RNA, 19 nt, Artificial Sequence
  Description of Artificial Sequence: Synthetic oligonucleotide
  Sense strand starting at position 2664 of SEQ ID NO: 1883618
ggaacauccuuccugucuu

SEQ ID NO: 2205101 - RNA, 19 nt, Artificial Sequence
  Description of Artificial Sequence: Synthetic oligonucleotide
  Antisense strand to SEQ ID NO: 2205100
aagacaggaaggauguucc

SEQ ID NO: 2205102 - RNA, 19 nt, Artificial Sequence
  Description of Artificial Sequence: Synthetic oligonucleotide
  Sense strand starting at position 3578 of SEQ ID NO: 1883618
uguaauacuuggcucauga

SEQ ID NO: 2205103 - RNA, 19 nt, Artificial Sequence
  Description of Artificial Sequence: Synthetic oligonucleotide
  Antisense strand to SEQ ID NO: 2205102
ucaugagccaaguauuaca

SEQ ID NO: 2205104 - RNA, 19 nt, Artificial Sequence
  Description of Artificial Sequence: Synthetic oligonucleotide
  Sense strand starting at position 2600 of SEQ ID NO: 1883618
auugguucccauggagcua

SEQ ID NO: 2205105 - RNA, 19 nt, Artificial Sequence
  Description of Artificial Sequence: Synthetic oligonucleotide
  Antisense strand to SEQ ID NO: 2205104
uagcuccaugggaaccaau

SEQ ID NO: 2205106 - RNA, 19 nt, Artificial Sequence
  Description of Artificial Sequence: Synthetic oligonucleotide
  Sense strand starting at position 3577 of SEQ ID NO: 1883618
uuguaauacuuggcucaug

SEQ ID NO: 2205107 - RNA, 19 nt, Artificial Sequence
  Description of Artificial Sequence: Synthetic oligonucleotide
  Antisense strand to SEQ ID NO: 2205106
caugagccaaguauuacaa

SEQ ID NO: 2205108 - RNA, 19 nt, Artificial Sequence
  Description of Artificial Sequence: Synthetic oligonucleotide
  Sense strand starting at position 3067 of SEQ ID NO: 1883618
ggacgugcugaucaguauu

SEQ ID NO: 2205109 - RNA, 19 nt, Artificial Sequence
  Description of Artificial Sequence: Synthetic oligonucleotide
  Antisense strand to SEQ ID NO: 2205108
aauacugaucagcacgucc

SEQ ID NO: 2205110 - RNA, 19 nt, Artificial Sequence
  Description of Artificial Sequence: Synthetic oligonucleotide
  Sense strand starting at position 3715 of SEQ ID NO: 1883618
ggugcacuggccugaggaa

SEQ ID NO: 2205111 - RNA, 19 nt, Artificial Sequence
  Description of Artificial Sequence: Synthetic oligonucleotide
  Antisense strand to SEQ ID NO: 2205110
uuccucaggccagugcacc

SEQ ID NO: 2205112 - RNA, 19 nt, Artificial Sequence
  Description of Artificial Sequence: Synthetic oligonucleotide
  Sense strand starting at position 1998 of SEQ ID NO: 1883618
ugggauuuaucaugaguca

SEQ ID NO: 2205113 - RNA, 19 nt, Artificial Sequence
  Description of Artificial Sequence: Synthetic oligonucleotide
  Antisense strand to SEQ ID NO: 2205112
ugacucaugauaaauccca

SEQ ID NO: 2205114 - RNA, 19 nt, Artificial Sequence
  Description of Artificial Sequence: Synthetic oligonucleotide
  Sense strand starting at position 3576 of SEQ ID NO: 1883618
uuuguaauacuuggcucau

SEQ ID NO: 2205115 - RNA, 19 nt, Artificial Sequence
  Description of Artificial Sequence: Synthetic oligonucleotide
  Antisense strand to SEQ ID NO: 2205114
augagccaaguauuacaaa

SEQ ID NO: 2205116 - RNA, 19 nt, Artificial Sequence
  Description of Artificial Sequence: Synthetic oligonucleotide
  Sense strand starting at position 3200 of SEQ ID NO: 1883618
gagcuuaggucacuuguuu

SEQ ID NO: 2205117 - RNA, 19 nt, Artificial Sequence
  Description of Artificial Sequence: Synthetic oligonucleotide
  Antisense strand to SEQ ID NO: 2205116
aaacaagugaccuaagcuc

SEQ ID NO: 2205118 - RNA, 19 nt, Artificial Sequence
  Description of Artificial Sequence: Synthetic oligonucleotide
  Sense strand starting at position 2028 of SEQ ID NO: 1883618
ugagauaccugguagaccu

SEQ ID NO: 2205119 - RNA, 19 nt, Artificial Sequence
  Description of Artificial Sequence: Synthetic oligonucleotide
  Antisense strand to SEQ ID NO: 2205118
aggucuaccagguaucuca

SEQ ID NO: 2205120 - RNA, 19 nt, Artificial Sequence
  Description of Artificial Sequence: Synthetic oligonucleotide
  Sense strand starting at position 3474 of SEQ ID NO: 1883618
uugcguuucucagcagaca

SEQ ID NO: 2205121 - RNA, 19 nt, Artificial Sequence
  Description of Artificial Sequence: Synthetic oligonucleotide
  Antisense strand to SEQ ID NO: 2205120
ugucugcugagaaacgcaa

SEQ ID NO: 2205122 - RNA, 19 nt, Artificial Sequence
  Description of Artificial Sequence: Synthetic oligonucleotide
  Sense strand starting at position 2152 of SEQ ID NO: 1883618
cuguuucugcccugucaua

SEQ ID NO: 2205123 - RNA, 19 nt, Artificial Sequence
  Description of Artificial Sequence: Synthetic oligonucleotide
  Antisense strand to SEQ ID NO: 2205122
uaugacagggcagaaacag

SEQ ID NO: 2205124 - RNA, 19 nt, Artificial Sequence
  Description of Artificial Sequence: Synthetic oligonucleotide
  Sense strand starting at position 2010 of SEQ ID NO: 1883618
ugagucaucuuggcgucuu

SEQ ID NO: 2205125 - RNA, 19 nt, Artificial Sequence
  Description of Artificial Sequence: Synthetic oligonucleotide
  Antisense strand to SEQ ID NO: 2205124
aagacgccaagaugacuca

SEQ ID NO: 2205126 - RNA, 19 nt, Artificial Sequence
  Description of Artificial Sequence: Synthetic oligonucleotide
  Sense strand starting at position 2974 of SEQ ID NO: 1883618
gcagcuuagucagggauuu

SEQ ID NO: 2205127 - RNA, 19 nt, Artificial Sequence
  Description of Artificial Sequence: Synthetic oligonucleotide
  Antisense strand to SEQ ID NO: 2205126
aaaucccugacuaagcugc

SEQ ID NO: 2205128 - RNA, 19 nt, Artificial Sequence
  Description of Artificial Sequence: Synthetic oligonucleotide
  Sense strand starting at position 3177 of SEQ ID NO: 1883618
ggauacuucucuuggacug

SEQ ID NO: 2205129 - RNA, 19 nt, Artificial Sequence
  Description of Artificial Sequence: Synthetic oligonucleotide
  Antisense strand to SEQ ID NO: 2205128
caguccaagagaaguaucc

SEQ ID NO: 2205130 - RNA, 19 nt, Artificial Sequence
  Description of Artificial Sequence: Synthetic oligonucleotide
  Sense strand starting at position 3582 of SEQ ID NO: 1883618
auacuuggcucaugauaaa

SEQ ID NO: 2205131 - RNA, 19 nt, Artificial Sequence
  Description of Artificial Sequence: Synthetic oligonucleotide
  Antisense strand to SEQ ID NO: 2205130
uuuaucaugagccaaguau

SEQ ID NO: 2205132 - RNA, 19 nt, Artificial Sequence
  Description of Artificial Sequence: Synthetic oligonucleotide
  Sense strand starting at position 2926 of SEQ ID NO: 1883618
ugaguuauuugcuguuuac

SEQ ID NO: 2205133 - RNA, 19 nt, Artificial Sequence
  Description of Artificial Sequence: Synthetic oligonucleotide
  Antisense strand to SEQ ID NO: 2205132
guaaacagcaaauaacuca

SEQ ID NO: 2205134 - RNA, 19 nt, Artificial Sequence
  Description of Artificial Sequence: Synthetic oligonucleotide
  Sense strand starting at position 3354 of SEQ ID NO: 1883618
cacgacuucugagguuaaa

SEQ ID NO: 2205135 - RNA, 19 nt, Artificial Sequence
  Description of Artificial Sequence: Synthetic oligonucleotide
  Antisense strand to SEQ ID NO: 2205134
uuuaaccucagaagucgug

SEQ ID NO: 2205136 - RNA, 19 nt, Artificial Sequence
  Description of Artificial Sequence: Synthetic oligonucleotide
  Sense strand starting at position 2264 of SEQ ID NO: 1883619
cagagugucauggaccuga

SEQ ID NO: 2205137 - RNA, 19 nt, Artificial Sequence
  Description of Artificial Sequence: Synthetic oligonucleotide
  Antisense strand to SEQ ID NO: 2205136
ucagguccaugacacucug

SEQ ID NO: 2205138 - RNA, 19 nt, Artificial Sequence
  Description of Artificial Sequence: Synthetic oligonucleotide
  Sense strand starting at position 2016 of SEQ ID NO: 1883619
gagaucuggcacugaggau

SEQ ID NO: 2205139 - RNA, 19 nt, Artificial Sequence
  Description of Artificial Sequence: Synthetic oligonucleotide
  Antisense strand to SEQ ID NO: 2205138
auccucagugccagaucuc

SEQ ID NO: 2205140 - RNA, 19 nt, Artificial Sequence
  Description of Artificial Sequence: Synthetic oligonucleotide
  Sense strand starting at position 2268 of SEQ ID NO: 1883619
gugucauggaccugauaaa

SEQ ID NO: 2205141 - RNA, 19 nt, Artificial Sequence
  Description of Artificial Sequence: Synthetic oligonucleotide
  Antisense strand to SEQ ID NO: 2205140
uuuaucagguccaugacac

SEQ ID NO: 2205142 - RNA, 19 nt, Artificial Sequence
  Description of Artificial Sequence: Synthetic oligonucleotide
  Sense strand starting at position 1077 of SEQ ID NO: 1883619
cgggaauucuguuuaaagg

SEQ ID NO: 2205143 - RNA, 19 nt, Artificial Sequence
  Description of Artificial Sequence: Synthetic oligonucleotide
  Antisense strand to SEQ ID NO: 2205142
ccuuuaaacagaauucccg

SEQ ID NO: 2205144 - RNA, 19 nt, Artificial Sequence
  Description of Artificial Sequence: Synthetic oligonucleotide
  Sense strand starting at position 2305 of SEQ ID NO: 1883619
guuugagaaucccugugag

SEQ ID NO: 2205145 - RNA, 19 nt, Artificial Sequence
  Description of Artificial Sequence: Synthetic oligonucleotide
  Antisense strand to SEQ ID NO: 2205144
cucacagggauucucaaac

SEQ ID NO: 2205146 - RNA, 19 nt, Artificial Sequence
  Description of Artificial Sequence: Synthetic oligonucleotide
  Sense strand starting at position 2295 of SEQ ID NO: 1883619
ccggauggguguuugagaa

SEQ ID NO: 2205147 - RNA, 19 nt, Artificial Sequence
  Description of Artificial Sequence: Synthetic oligonucleotide
  Antisense strand to SEQ ID NO: 2205146
uucucaaacacccauccgg

SEQ ID NO: 2205148 - RNA, 19 nt, Artificial Sequence
  Description of Artificial Sequence: Synthetic oligonucleotide
  Sense strand starting at position 1097 of SEQ ID NO: 1883619
ggauaaugcauucggaccu

SEQ ID NO: 2205149 - RNA, 19 nt, Artificial Sequence
  Description of Artificial Sequence: Synthetic oligonucleotide
  Antisense strand to SEQ ID NO: 2205148
agguccgaaugcauuaucc

SEQ ID NO: 2205150 - RNA, 19 nt, Artificial Sequence
  Description of Artificial Sequence: Synthetic oligonucleotide
  Sense strand starting at position 2296 of SEQ ID NO: 1883619
cggauggguguuugagaau

SEQ ID NO: 2205151 - RNA, 19 nt, Artificial Sequence
  Description of Artificial Sequence: Synthetic oligonucleotide
  Antisense strand to SEQ ID NO: 2205150
auucucaaacacccauccg

SEQ ID NO: 2205152 - RNA, 19 nt, Artificial Sequence
  Description of Artificial Sequence: Synthetic oligonucleotide
  Sense strand starting at position 2308 of SEQ ID NO: 1883619
ugagaaucccugugagucu

SEQ ID NO: 2205153 - RNA, 19 nt, Artificial Sequence
  Description of Artificial Sequence: Synthetic oligonucleotide
  Antisense strand to SEQ ID NO: 2205152
agacucacagggauucuca

SEQ ID NO: 2205154 - RNA, 19 nt, Artificial Sequence
  Description of Artificial Sequence: Synthetic oligonucleotide
  Sense strand starting at position 1655 of SEQ ID NO: 1883619
aguuuccuuccuuggcaaa

SEQ ID NO: 2205155 - RNA, 19 nt, Artificial Sequence
  Description of Artificial Sequence: Synthetic oligonucleotide
  Antisense strand to SEQ ID NO: 2205154
uuugccaaggaaggaaacu

SEQ ID NO: 2205156 - RNA, 19 nt, Artificial Sequence
  Description of Artificial Sequence: Synthetic oligonucleotide
  Sense strand starting at position 3616 of SEQ ID NO: 1883619
cuggcuucugccugacuca

SEQ ID NO: 2205157 - RNA, 19 nt, Artificial Sequence
  Description of Artificial Sequence: Synthetic oligonucleotide
  Antisense strand to SEQ ID NO: 2205156
ugagucaggcagaagccag

SEQ ID NO: 2205158 - RNA, 19 nt, Artificial Sequence
  Description of Artificial Sequence: Synthetic oligonucleotide
  Sense strand starting at position 2029 of SEQ ID NO: 1883619
gaggaucucucaggaagug

SEQ ID NO: 2205159 - RNA, 19 nt, Artificial Sequence
  Description of Artificial Sequence: Synthetic oligonucleotide
  Antisense strand to SEQ ID NO: 2205158
cacuuccugagagauccuc

SEQ ID NO: 2205160 - RNA, 19 nt, Artificial Sequence
  Description of Artificial Sequence: Synthetic oligonucleotide
  Sense strand starting at position 3810 of SEQ ID NO: 1883619
acaagauccuucugguaag

SEQ ID NO: 2205161 - RNA, 19 nt, Artificial Sequence
  Description of Artificial Sequence: Synthetic oligonucleotide
  Antisense strand to SEQ ID NO: 2205160
cuuaccagaaggaucuugu

SEQ ID NO: 2205162 - RNA, 19 nt, Artificial Sequence
  Description of Artificial Sequence: Synthetic oligonucleotide
  Sense strand starting at position 1098 of SEQ ID NO: 1883619
gauaaugcauucggaccua

SEQ ID NO: 2205163 - RNA, 19 nt, Artificial Sequence
  Description of Artificial Sequence: Synthetic oligonucleotide
  Antisense strand to SEQ ID NO: 2205162
uagguccgaaugcauuauc

SEQ ID NO: 2205164 - RNA, 19 nt, Artificial Sequence
  Description of Artificial Sequence: Synthetic oligonucleotide
  Sense strand starting at position 2083 of SEQ ID NO: 1883619
cguccacucuccgagaaca

SEQ ID NO: 2205165 - RNA, 19 nt, Artificial Sequence
  Description of Artificial Sequence: Synthetic oligonucleotide
  Antisense strand to SEQ ID NO: 2205164
uguucucggagaguggacg

SEQ ID NO: 2205166 - RNA, 19 nt, Artificial Sequence
  Description of Artificial Sequence: Synthetic oligonucleotide
  Sense strand starting at position 2002 of SEQ ID NO: 1883619
cagcguuccugguggagau

SEQ ID NO: 2205167 - RNA, 19 nt, Artificial Sequence
  Description of Artificial Sequence: Synthetic oligonucleotide
  Antisense strand to SEQ ID NO: 2205166
aucuccaccaggaacgcug

SEQ ID NO: 2205168 - RNA, 19 nt, Artificial Sequence
  Description of Artificial Sequence: Synthetic oligonucleotide
  Sense strand starting at position 2753 of SEQ ID NO: 1883620
uuguucuguggagagaaca

SEQ ID NO: 2205169 - RNA, 19 nt, Artificial Sequence
  Description of Artificial Sequence: Synthetic oligonucleotide
  Antisense strand to SEQ ID NO: 2205168
uguucucuccacagaacaa

SEQ ID NO: 2205170 - RNA, 19 nt, Artificial Sequence
  Description of Artificial Sequence: Synthetic oligonucleotide
  Sense strand starting at position 2860 of SEQ ID NO: 1883620
cagaaacucggcugaugau

SEQ ID NO: 2205171 - RNA, 19 nt, Artificial Sequence
  Description of Artificial Sequence: Synthetic oligonucleotide
  Antisense strand to SEQ ID NO: 2205170
aucaucagccgaguuucug

SEQ ID NO: 2205172 - RNA, 19 nt, Artificial Sequence
  Description of Artificial Sequence: Synthetic oligonucleotide
  Sense strand starting at position 2869 of SEQ ID NO: 1883620
ggcugaugaugaguuucaa

SEQ ID NO: 2205173 - RNA, 19 nt, Artificial Sequence
  Description of Artificial Sequence: Synthetic oligonucleotide
  Antisense strand to SEQ ID NO: 2205172
uugaaacucaucaucagcc

SEQ ID NO: 2205174 - RNA, 19 nt, Artificial Sequence
  Description of Artificial Sequence: Synthetic oligonucleotide
  Sense strand starting at position 2280 of SEQ ID NO: 1883620
gggugauaagugcagcaca

SEQ ID NO: 2205175 - RNA, 19 nt, Artificial Sequence
  Description of Artificial Sequence: Synthetic oligonucleotide
  Antisense strand to SEQ ID NO: 2205174
ugugcugcacuuaucaccc

SEQ ID NO: 2205176 - RNA, 19 nt, Artificial Sequence
  Description of Artificial Sequence: Synthetic oligonucleotide
  Sense strand starting at position 2749 of SEQ ID NO: 1883620
uugauuguucuguggagag

SEQ ID NO: 2205177 - RNA, 19 nt, Artificial Sequence
  Description of Artificial Sequence: Synthetic oligonucleotide
  Antisense strand to SEQ ID NO: 2205176
cucuccacagaacaaucaa

SEQ ID NO: 2205178 - RNA, 19 nt, Artificial Sequence
  Description of Artificial Sequence: Synthetic oligonucleotide
  Sense strand starting at position 2748 of SEQ ID NO: 1883620
cuugauuguucuguggaga

SEQ ID NO: 2205179 - RNA, 19 nt, Artificial Sequence
  Description of Artificial Sequence: Synthetic oligonucleotide
  Antisense strand to SEQ ID NO: 2205178
ucuccacagaacaaucaag

SEQ ID NO: 2205180 - RNA, 19 nt, Artificial Sequence
  Description of Artificial Sequence: Synthetic oligonucleotide
  Sense strand starting at position 2777 of SEQ ID NO: 1883620
gggugaaucugcucucagg

SEQ ID NO: 2205181 - RNA, 19 nt, Artificial Sequence
  Description of Artificial Sequence: Synthetic oligonucleotide
  Antisense strand to SEQ ID NO: 2205180
ccugagagcagauucaccc

SEQ ID NO: 2205182 - RNA, 19 nt, Artificial Sequence
  Description of Artificial Sequence: Synthetic oligonucleotide
  Sense strand starting at position 2563 of SEQ ID NO: 1883620
ugggcagauuguucucaca

SEQ ID NO: 2205183 - RNA, 19 nt, Artificial Sequence
  Description of Artificial Sequence: Synthetic oligonucleotide
  Antisense strand to SEQ ID NO: 2205182
ugugagaacaaucugccca

SEQ ID NO: 2205184 - RNA, 19 nt, Artificial Sequence
  Description of Artificial Sequence: Synthetic oligonucleotide
  Sense strand starting at position 2571 of SEQ ID NO: 1883620
uuguucucacaguguggaa

SEQ ID NO: 2205185 - RNA, 19 nt, Artificial Sequence
  Description of Artificial Sequence: Synthetic oligonucleotide
  Antisense strand to SEQ ID NO: 2205184
uuccacacugugagaacaa

SEQ ID NO: 2205186 - RNA, 19 nt, Artificial Sequence
  Description of Artificial Sequence: Synthetic oligonucleotide
  Sense strand starting at position 2565 of SEQ ID NO: 1883620
ggcagauuguucucacagu

SEQ ID NO: 2205187 - RNA, 19 nt, Artificial Sequence
  Description of Artificial Sequence: Synthetic oligonucleotide
  Antisense strand to SEQ ID NO: 2205186
acugugagaacaaucugcc

SEQ ID NO: 2205188 - RNA, 19 nt, Artificial Sequence
  Description of Artificial Sequence: Synthetic oligonucleotide
  Sense strand starting at position 2081 of SEQ ID NO: 1883620
ugcugauccuccuugagca

SEQ ID NO: 2205189 - RNA, 19 nt, Artificial Sequence
  Description of Artificial Sequence: Synthetic oligonucleotide
  Antisense strand to SEQ ID NO: 2205188
ugcucaaggaggaucagca

SEQ ID NO: 2205190 - RNA, 19 nt, Artificial Sequence
  Description of Artificial Sequence: Synthetic oligonucleotide
  Sense strand starting at position 2482 of SEQ ID NO: 1883620
uguaauaaguaggacauga

SEQ ID NO: 2205191 - RNA, 19 nt, Artificial Sequence
  Description of Artificial Sequence: Synthetic oligonucleotide
  Antisense strand to SEQ ID NO: 2205190
ucauguccuacuuauuaca

SEQ ID NO: 2205192 - RNA, 19 nt, Artificial Sequence
  Description of Artificial Sequence: Synthetic oligonucleotide
  Sense strand starting at position 2402 of SEQ ID NO: 1883620
gccagagcugugugaaggu

SEQ ID NO: 2205193 - RNA, 19 nt, Artificial Sequence
  Description of Artificial Sequence: Synthetic oligonucleotide
  Antisense strand to SEQ ID NO: 2205192
accuucacacagcucuggc

SEQ ID NO: 2205194 - RNA, 19 nt, Artificial Sequence
  Description of Artificial Sequence: Synthetic oligonucleotide
  Sense strand starting at position 2975 of SEQ ID NO: 1883620
ugcagacgcuguuuaaguu

SEQ ID NO: 2205195 - RNA, 19 nt, Artificial Sequence
  Description of Artificial Sequence: Synthetic oligonucleotide
  Antisense strand to SEQ ID NO: 2205194
aacuuaaacagcgucugca

SEQ ID NO: 2205196 - RNA, 19 nt, Artificial Sequence
  Description of Artificial Sequence: Synthetic oligonucleotide
  Sense strand starting at position 2672 of SEQ ID NO: 1883620
gaagcagaauguuggcaaa

SEQ ID NO: 2205197 - RNA, 19 nt, Artificial Sequence
  Description of Artificial Sequence: Synthetic oligonucleotide
  Antisense strand to SEQ ID NO: 2205196
uuugccaacauucugcuuc

SEQ ID NO: 2205198 - RNA, 19 nt, Artificial Sequence
  Description of Artificial Sequence: Synthetic oligonucleotide
  Sense strand starting at position 2566 of SEQ ID NO: 1883620
gcagauuguucucacagug

SEQ ID NO: 2205199 - RNA, 19 nt, Artificial Sequence
  Description of Artificial Sequence: Synthetic oligonucleotide
  Antisense strand to SEQ ID NO: 2205198
cacugugagaacaaucugc

SEQ ID NO: 2205200 - RNA, 19 nt, Artificial Sequence
  Description of Artificial Sequence: Synthetic oligonucleotide
  Sense strand starting at position 2747 of SEQ ID NO: 1883620
acuugauuguucuguggag

SEQ ID NO: 2205201 - RNA, 19 nt, Artificial Sequence
  Description of Artificial Sequence: Synthetic oligonucleotide
  Antisense strand to SEQ ID NO: 2205200
cuccacagaacaaucaagu

SEQ ID NO: 2205202 - RNA, 19 nt, Artificial Sequence
  Description of Artificial Sequence: Synthetic oligonucleotide
  Sense strand starting at position 2359 of SEQ ID NO: 1883620
ccagcucaguucugagaac

SEQ ID NO: 2205203 - RNA, 19 nt, Artificial Sequence
  Description of Artificial Sequence: Synthetic oligonucleotide
  Antisense strand to SEQ ID NO: 2205202
guucucagaacugagcugg

SEQ ID NO: 2205204 - RNA, 19 nt, Artificial Sequence
  Description of Artificial Sequence: Synthetic oligonucleotide
  Sense strand starting at position 2963 of SEQ ID NO: 1883620
aagaaauugugcugcagac

SEQ ID NO: 2205205 - RNA, 19 nt, Artificial Sequence
  Description of Artificial Sequence: Synthetic oligonucleotide
  Antisense strand to SEQ ID NO: 2205204
gucugcagcacaauuucuu

SEQ ID NO: 2205206 - RNA, 19 nt, Artificial Sequence
  Description of Artificial Sequence: Synthetic oligonucleotide
  Sense strand starting at position 2159 of SEQ ID NO: 1883620
ucugucugcugucagaagu

SEQ ID NO: 2205207 - RNA, 19 nt, Artificial Sequence
  Description of Artificial Sequence: Synthetic oligonucleotide
  Antisense strand to SEQ ID NO: 2205206
acuucugacagcagacaga

SEQ ID NO: 2205208 - RNA, 19 nt, Artificial Sequence
  Description of Artificial Sequence: Synthetic oligonucleotide
  Sense strand starting at position 2156 of SEQ ID NO: 1883620
gguucugucugcugucaga

SEQ ID NO: 2205209 - RNA, 19 nt, Artificial Sequence
  Description of Artificial Sequence: Synthetic oligonucleotide
  Antisense strand to SEQ ID NO: 2205208
ucugacagcagacagaacc

SEQ ID NO: 2205210 - RNA, 19 nt, Artificial Sequence
  Description of Artificial Sequence: Synthetic oligonucleotide
  Sense strand starting at position 2382 of SEQ ID NO: 1883621
gugccuggugucuuacgga

SEQ ID NO: 2205211 - RNA, 19 nt, Artificial Sequence
  Description of Artificial Sequence: Synthetic oligonucleotide
  Antisense strand to SEQ ID NO: 2205210
uccguaagacaccaggcac

SEQ ID NO: 2205212 - RNA, 19 nt, Artificial Sequence
  Description of Artificial Sequence: Synthetic oligonucleotide
  Sense strand starting at position 547 of SEQ ID NO: 1883621
ccagacucuuggguagaaa

SEQ ID NO: 2205213 - RNA, 19 nt, Artificial Sequence
  Description of Artificial Sequence: Synthetic oligonucleotide
  Antisense strand to SEQ ID NO: 2205212
uuucuacccaagagucugg

SEQ ID NO: 2205214 - RNA, 19 nt, Artificial Sequence
  Description of Artificial Sequence: Synthetic oligonucleotide
  Sense strand starting at position 584 of SEQ ID NO: 1883621
gcucucuuugccucuguua

SEQ ID NO: 2205215 - RNA, 19 nt, Artificial Sequence
  Description of Artificial Sequence: Synthetic oligonucleotide
  Antisense strand to SEQ ID NO: 2205214
uaacagaggcaaagagagc

SEQ ID NO: 2205216 - RNA, 19 nt, Artificial Sequence
  Description of Artificial Sequence: Synthetic oligonucleotide
  Sense strand starting at position 1648 of SEQ ID NO: 1883621
acccuucucccaugggaaa

SEQ ID NO: 2205217 - RNA, 19 nt, Artificial Sequence
  Description of Artificial Sequence: Synthetic oligonucleotide
  Antisense strand to SEQ ID NO: 2205216
uuucccaugggagaagggu

SEQ ID NO: 2205218 - RNA, 19 nt, Artificial Sequence
  Description of Artificial Sequence: Synthetic oligonucleotide
  Sense strand starting at position 2023 of SEQ ID NO: 1883621
accguauugacagaagcaa

SEQ ID NO: 2205219 - RNA, 19 nt, Artificial Sequence
  Description of Artificial Sequence: Synthetic oligonucleotide
  Antisense strand to SEQ ID NO: 2205218
uugcuucugucaauacggu

SEQ ID NO: 2205220 - RNA, 19 nt, Artificial Sequence
  Description of Artificial Sequence: Synthetic oligonucleotide
  Sense strand starting at position 3636 of SEQ ID NO: 1883621
agcuauuggcacuaagaug

SEQ ID NO: 2205221 - RNA, 19 nt, Artificial Sequence
  Description of Artificial Sequence: Synthetic oligonucleotide
  Antisense strand to SEQ ID NO: 2205220
caucuuagugccaauagcu

SEQ ID NO: 2205222 - RNA, 19 nt, Artificial Sequence
  Description of Artificial Sequence: Synthetic oligonucleotide
  Sense strand starting at position 3830 of SEQ ID NO: 1883621
gcugcaagagaugaguuaa

SEQ ID NO: 2205223 - RNA, 19 nt, Artificial Sequence
  Description of Artificial Sequence: Synthetic oligonucleotide
  Antisense strand to SEQ ID NO: 2205222
uuaacucaucucuugcagc

SEQ ID NO: 2205224 - RNA, 19 nt, Artificial Sequence
  Description of Artificial Sequence: Synthetic oligonucleotide
  Sense strand starting at position 3932 of SEQ ID NO: 1883621
ugcuuugugcugcucuaau

SEQ ID NO: 2205225 - RNA, 19 nt, Artificial Sequence
  Description of Artificial Sequence: Synthetic oligonucleotide
  Antisense strand to SEQ ID NO: 2205224
auuagagcagcacaaagca

SEQ ID NO: 2205226 - RNA, 19 nt, Artificial Sequence
  Description of Artificial Sequence: Synthetic oligonucleotide
  Sense strand starting at position 3430 of SEQ ID NO: 1883621
uggcguaagccugugguca

SEQ ID NO: 2205227 - RNA, 19 nt, Artificial Sequence
  Description of Artificial Sequence: Synthetic oligonucleotide
  Antisense strand to SEQ ID NO: 2205226
ugaccacaggcuuacgcca

SEQ ID NO: 2205228 - RNA, 19 nt, Artificial Sequence
  Description of Artificial Sequence: Synthetic oligonucleotide
  Sense strand starting at position 3070 of SEQ ID NO: 1883621
ggacaaugugaggguuuau

SEQ ID NO: 2205229 - RNA, 19 nt, Artificial Sequence
  Description of Artificial Sequence: Synthetic oligonucleotide
  Antisense strand to SEQ ID NO: 2205228
auaaacccucacauugucc

SEQ ID NO: 2205230 - RNA, 19 nt, Artificial Sequence
  Description of Artificial Sequence: Synthetic oligonucleotide
  Sense strand starting at position 526 of SEQ ID NO: 1883621
ugcuaaugccagggaggaa

SEQ ID NO: 2205231 - RNA, 19 nt, Artificial Sequence
  Description of Artificial Sequence: Synthetic oligonucleotide
  Antisense strand to SEQ ID NO: 2205230
uuccucccuggcauuagca

SEQ ID NO: 2205232 - RNA, 19 nt, Artificial Sequence
  Description of Artificial Sequence: Synthetic oligonucleotide
  Sense strand starting at position 781 of SEQ ID NO: 1883621
gccaaagaagccugaaauu

SEQ ID NO: 2205233 - RNA, 19 nt, Artificial Sequence
  Description of Artificial Sequence: Synthetic oligonucleotide
  Antisense strand to SEQ ID NO: 2205232
aauuucaggcuucuuuggc

SEQ ID NO: 2205234 - RNA, 19 nt, Artificial Sequence
  Description of Artificial Sequence: Synthetic oligonucleotide
  Sense strand starting at position 3644 of SEQ ID NO: 1883621
gcacuaagaugacauuuaa

SEQ ID NO: 2205235 - RNA, 19 nt, Artificial Sequence
  Description of Artificial Sequence: Synthetic oligonucleotide
  Antisense strand to SEQ ID NO: 2205234
uuaaaugucaucuuagugc

SEQ ID NO: 2205236 - RNA, 19 nt, Artificial Sequence
  Description of Artificial Sequence: Synthetic oligonucleotide
  Sense strand starting at position 908 of SEQ ID NO: 1883621
gccagauugguggaaugca

SEQ ID NO: 2205237 - RNA, 19 nt, Artificial Sequence
  Description of Artificial Sequence: Synthetic oligonucleotide
  Antisense strand to SEQ ID NO: 2205236
ugcauuccaccaaucuggc

SEQ ID NO: 2205238 - RNA, 19 nt, Artificial Sequence
  Description of Artificial Sequence: Synthetic oligonucleotide
  Sense strand starting at position 2387 of SEQ ID NO: 1883621
uggugucuuacggaagacu

SEQ ID NO: 2205239 - RNA, 19 nt, Artificial Sequence
  Description of Artificial Sequence: Synthetic oligonucleotide
  Antisense strand to SEQ ID NO: 2205238
agucuuccguaagacacca

SEQ ID NO: 2205240 - RNA, 19 nt, Artificial Sequence
  Description of Artificial Sequence: Synthetic oligonucleotide
  Sense strand starting at position 949 of SEQ ID NO: 1883621
gggcuuuaccucugaacau

SEQ ID NO: 2205241 - RNA, 19 nt, Artificial Sequence
  Description of Artificial Sequence: Synthetic oligonucleotide
  Antisense strand to SEQ ID NO: 2205240
auguucagagguaaagccc

SEQ ID NO: 2205242 - RNA, 19 nt, Artificial Sequence
  Description of Artificial Sequence: Synthetic oligonucleotide
  Sense strand starting at position 3082 of SEQ ID NO: 1883621
gguuuauuguauguggaag

SEQ ID NO: 2205243 - RNA, 19 nt, Artificial Sequence
  Description of Artificial Sequence: Synthetic oligonucleotide
  Antisense strand to SEQ ID NO: 2205242
cuuccacauacaauaaacc

SEQ ID NO: 2205244 - RNA, 19 nt, Artificial Sequence
  Description of Artificial Sequence: Synthetic oligonucleotide
  Sense strand starting at position 1187 of SEQ ID NO: 1883621
gcuguagcucuccagaaca

SEQ ID NO: 2205245 - RNA, 19 nt, Artificial Sequence
  Description of Artificial Sequence: Synthetic oligonucleotide
  Antisense strand to SEQ ID NO: 2205244
uguucuggagagcuacagc

SEQ ID NO: 2205246 - RNA, 19 nt, Artificial Sequence
  Description of Artificial Sequence: Synthetic oligonucleotide
  Sense strand starting at position 3081 of SEQ ID NO: 1883621
ggguuuauuguauguggaa

SEQ ID NO: 2205247 - RNA, 19 nt, Artificial Sequence
  Description of Artificial Sequence: Synthetic oligonucleotide
  Antisense strand to SEQ ID NO: 2205246
uuccacauacaauaaaccc

SEQ ID NO: 2205248 - RNA, 19 nt, Artificial Sequence
  Description of Artificial Sequence: Synthetic oligonucleotide
  Sense strand starting at position 3829 of SEQ ID NO: 1883621
ugcugcaagagaugaguua

SEQ ID NO: 2205249 - RNA, 19 nt, Artificial Sequence
  Description of Artificial Sequence: Synthetic oligonucleotide
  Antisense strand to SEQ ID NO: 2205248
uaacucaucucuugcagca

SEQ ID NO: 2205250 - RNA, 19 nt, Artificial Sequence
  Description of Artificial Sequence: Synthetic oligonucleotide
  Sense strand starting at position 189 of SEQ ID NO: 1883621
cggguucacccagguaaca

SEQ ID NO: 2205251 - RNA, 19 nt, Artificial Sequence
  Description of Artificial Sequence: Synthetic oligonucleotide
  Antisense strand to SEQ ID NO: 2205250
uguuaccugggugaacccg

SEQ ID NO: 2205252 - RNA, 19 nt, Artificial Sequence
  Description of Artificial Sequence: Synthetic oligonucleotide
  Sense strand starting at position 646 of SEQ ID NO: 1883621
aaggucaagugccuucuaa

SEQ ID NO: 2205253 - RNA, 19 nt, Artificial Sequence
  Description of Artificial Sequence: Synthetic oligonucleotide
  Antisense strand to SEQ ID NO: 2205252
uuagaaggcacuugaccuu

SEQ ID NO: 2205254 - RNA, 19 nt, Artificial Sequence
  Description of Artificial Sequence: Synthetic oligonucleotide
  Sense strand starting at position 3792 of SEQ ID NO: 1883621
cguguuauccaggagucca

SEQ ID NO: 2205255 - RNA, 19 nt, Artificial Sequence
  Description of Artificial Sequence: Synthetic oligonucleotide
  Antisense strand to SEQ ID NO: 2205254
uggacuccuggauaacacg

SEQ ID NO: 2205256 - RNA, 19 nt, Artificial Sequence
  Description of Artificial Sequence: Synthetic oligonucleotide
  Sense strand starting at position 2441 of SEQ ID NO: 1883621
ggguuacucucuucuccua

SEQ ID NO: 2205257 - RNA, 19 nt, Artificial Sequence
  Description of Artificial Sequence: Synthetic oligonucleotide
  Antisense strand to SEQ ID NO: 2205256
uaggagaagagaguaaccc

SEQ ID NO: 2205258 - RNA, 19 nt, Artificial Sequence
  Description of Artificial Sequence: Synthetic oligonucleotide
  Sense strand starting at position 3135 of SEQ ID NO: 1883621
ccuguugggcuugagucau

SEQ ID NO: 2205259 - RNA, 19 nt, Artificial Sequence
  Description of Artificial Sequence: Synthetic oligonucleotide
  Antisense strand to SEQ ID NO: 2205258
augacucaagcccaacagg

SEQ ID NO: 2205260 - RNA, 19 nt, Artificial Sequence
  Description of Artificial Sequence: Synthetic oligonucleotide
  Sense strand starting at position 229 of SEQ ID NO: 1883621
gguaacagguuucucaguu

SEQ ID NO: 2205261 - RNA, 19 nt, Artificial Sequence
  Description of Artificial Sequence: Synthetic oligonucleotide
  Antisense strand to SEQ ID NO: 2205260
aacugagaaaccuguuacc

SEQ ID NO: 2205262 - RNA, 19 nt, Artificial Sequence
  Description of Artificial Sequence: Synthetic oligonucleotide
  Sense strand starting at position 2 of SEQ ID NO: 1883621
ggaagagauuaacauagua

SEQ ID NO: 2205263 - RNA, 19 nt, Artificial Sequence
  Description of Artificial Sequence: Synthetic oligonucleotide
  Antisense strand to SEQ ID NO: 2205262
uacuauguuaaucucuucc

SEQ ID NO: 2205264 - RNA, 19 nt, Artificial Sequence
  Description of Artificial Sequence: Synthetic oligonucleotide
  Sense strand starting at position 442 of SEQ ID NO: 1883621
ggugcucacccagguaaua

SEQ ID NO: 2205265 - RNA, 19 nt, Artificial Sequence
  Description of Artificial Sequence: Synthetic oligonucleotide
  Antisense strand to SEQ ID NO: 2205264
uauuaccugggugagcacc

SEQ ID NO: 2205266 - RNA, 19 nt, Artificial Sequence
  Description of Artificial Sequence: Synthetic oligonucleotide
  Sense strand starting at position 823 of SEQ ID NO: 1883621
uucuuaaucuggcuguaac

SEQ ID NO: 2205267 - RNA, 19 nt, Artificial Sequence
  Description of Artificial Sequence: Synthetic oligonucleotide
  Antisense strand to SEQ ID NO: 2205266
guuacagccagauuaagaa

SEQ ID NO: 2205268 - RNA, 19 nt, Artificial Sequence
  Description of Artificial Sequence: Synthetic oligonucleotide
  Sense strand starting at position 3146 of SEQ ID NO: 1883621
ugagucauuuacugagaug

SEQ ID NO: 2205269 - RNA, 19 nt, Artificial Sequence
  Description of Artificial Sequence: Synthetic oligonucleotide
  Antisense strand to SEQ ID NO: 2205268
caucucaguaaaugacuca

SEQ ID NO: 2205270 - RNA, 19 nt, Artificial Sequence
  Description of Artificial Sequence: Synthetic oligonucleotide
  Sense strand starting at position 453 of SEQ ID NO: 1883621
agguaauagggcuguucuu

SEQ ID NO: 2205271 - RNA, 19 nt, Artificial Sequence
  Description of Artificial Sequence: Synthetic oligonucleotide
  Antisense strand to SEQ ID NO: 2205270
aagaacagcccuauuaccu

SEQ ID NO: 2205272 - RNA, 19 nt, Artificial Sequence
  Description of Artificial Sequence: Synthetic oligonucleotide
  Sense strand starting at position 230 of SEQ ID NO: 1883621
guaacagguuucucaguuu

SEQ ID NO: 2205273 - RNA, 19 nt, Artificial Sequence
  Description of Artificial Sequence: Synthetic oligonucleotide
  Antisense strand to SEQ ID NO: 2205272
aaacugagaaaccuguuac

SEQ ID NO: 2205274 - RNA, 19 nt, Artificial Sequence
  Description of Artificial Sequence: Synthetic oligonucleotide
  Sense strand starting at position 498 of SEQ ID NO: 1883621
ugugcucaccuggguaaca

SEQ ID NO: 2205275 - RNA, 19 nt, Artificial Sequence
  Description of Artificial Sequence: Synthetic oligonucleotide
  Antisense strand to SEQ ID NO: 2205274
uguuacccaggugagcaca

SEQ ID NO: 2205276 - RNA, 19 nt, Artificial Sequence
  Description of Artificial Sequence: Synthetic oligonucleotide
  Sense strand starting at position 3789 of SEQ ID NO: 1883621
gggcguguuauccaggagu

SEQ ID NO: 2205277 - RNA, 19 nt, Artificial Sequence
  Description of Artificial Sequence: Synthetic oligonucleotide
  Antisense strand to SEQ ID NO: 2205276
acuccuggauaacacgccc

SEQ ID NO: 2205278 - RNA, 19 nt, Artificial Sequence
  Description of Artificial Sequence: Synthetic oligonucleotide
  Sense strand starting at position 3841 of SEQ ID NO: 1883621
ugaguuaacucagaagagg

SEQ ID NO: 2205279 - RNA, 19 nt, Artificial Sequence
  Description of Artificial Sequence: Synthetic oligonucleotide
  Antisense strand to SEQ ID NO: 2205278
ccucuucugaguuaacuca

SEQ ID NO: 2205280 - RNA, 19 nt, Artificial Sequence
  Description of Artificial Sequence: Synthetic oligonucleotide
  Sense strand starting at position 3913 of SEQ ID NO: 1883621
acgauauagugucuuaguc

SEQ ID NO: 2205281 - RNA, 19 nt, Artificial Sequence
  Description of Artificial Sequence: Synthetic oligonucleotide
  Antisense strand to SEQ ID NO: 2205280
gacuaagacacuauaucgu

SEQ ID NO: 2205282 - RNA, 19 nt, Artificial Sequence
  Description of Artificial Sequence: Synthetic oligonucleotide
  Sense strand starting at position 1939 of SEQ ID NO: 1883621
gugacgugguugucagaga

SEQ ID NO: 2205283 - RNA, 19 nt, Artificial Sequence
  Description of Artificial Sequence: Synthetic oligonucleotide
  Antisense strand to SEQ ID NO: 2205282
ucucugacaaccacgucac

SEQ ID NO: 2205284 - RNA, 19 nt, Artificial Sequence
  Description of Artificial Sequence: Synthetic oligonucleotide
  Sense strand starting at position 3294 of SEQ ID NO: 1883621
gggucucaugccuguaauu

SEQ ID NO: 2205285 - RNA, 19 nt, Artificial Sequence
  Description of Artificial Sequence: Synthetic oligonucleotide
  Antisense strand to SEQ ID NO: 2205284
aauuacaggcaugagaccc

SEQ ID NO: 2205286 - RNA, 19 nt, Artificial Sequence
  Description of Artificial Sequence: Synthetic oligonucleotide
  Sense strand starting at position 7 of SEQ ID NO: 1883621
agauuaacauaguaacgaa

SEQ ID NO: 2205287 - RNA, 19 nt, Artificial Sequence
  Description of Artificial Sequence: Synthetic oligonucleotide
  Antisense strand to SEQ ID NO: 2205286
uucguuacuauguuaaucu

SEQ ID NO: 2205288 - RNA, 19 nt, Artificial Sequence
  Description of Artificial Sequence: Synthetic oligonucleotide
  Sense strand starting at position 1313 of SEQ ID NO: 1883621
ucacaacucugaggagaaa

SEQ ID NO: 2205289 - RNA, 19 nt, Artificial Sequence
  Description of Artificial Sequence: Synthetic oligonucleotide
  Antisense strand to SEQ ID NO: 2205288
uuucuccucagaguuguga

SEQ ID NO: 2205290 - RNA, 19 nt, Artificial Sequence
  Description of Artificial Sequence: Synthetic oligonucleotide
  Sense strand starting at position 1416 of SEQ ID NO: 1883622
uugacaaacgagcauauua

SEQ ID NO: 2205291 - RNA, 19 nt, Artificial Sequence
  Description of Artificial Sequence: Synthetic oligonucleotide
  Antisense strand to SEQ ID NO: 2205290
uaauaugcucguuugucaa

SEQ ID NO: 2205292 - RNA, 19 nt, Artificial Sequence
  Description of Artificial Sequence: Synthetic oligonucleotide
  Sense strand starting at position 3110 of SEQ ID NO: 1883622
ucccucuuagaugaaguua

SEQ ID NO: 2205293 - RNA, 19 nt, Artificial Sequence
  Description of Artificial Sequence: Synthetic oligonucleotide
  Antisense strand to SEQ ID NO: 2205292
uaacuucaucuaagaggga

SEQ ID NO: 2205294 - RNA, 19 nt, Artificial Sequence
  Description of Artificial Sequence: Synthetic oligonucleotide
  Sense strand starting at position 3016 of SEQ ID NO: 1883622
uugagaaagcauugacuga

SEQ ID NO: 2205295 - RNA, 19 nt, Artificial Sequence
  Description of Artificial Sequence: Synthetic oligonucleotide
  Antisense strand to SEQ ID NO: 2205294
ucagucaaugcuuucucaa

SEQ ID NO: 2205296 - RNA, 19 nt, Artificial Sequence
  Description of Artificial Sequence: Synthetic oligonucleotide
  Sense strand starting at position 1362 of SEQ ID NO: 1883622
gugaacagacuaugaguaa

SEQ ID NO: 2205297 - RNA, 19 nt, Artificial Sequence
  Description of Artificial Sequence: Synthetic oligonucleotide
  Antisense strand to SEQ ID NO: 2205296
uuacucauagucuguucac

SEQ ID NO: 2205298 - RNA, 19 nt, Artificial Sequence
  Description of Artificial Sequence: Synthetic oligonucleotide
  Sense strand starting at position 2858 of SEQ ID NO: 1883622
ggcuaauuugauugucucu

SEQ ID NO: 2205299 - RNA, 19 nt, Artificial Sequence
  Description of Artificial Sequence: Synthetic oligonucleotide
  Antisense strand to SEQ ID NO: 2205298
agagacaaucaaauuagcc

SEQ ID NO: 2205300 - RNA, 19 nt, Artificial Sequence
  Description of Artificial Sequence: Synthetic oligonucleotide
  Sense strand starting at position 3969 of SEQ ID NO: 1883622
cugagaaccacaugugaug

SEQ ID NO: 2205301 - RNA, 19 nt, Artificial Sequence
  Description of Artificial Sequence: Synthetic oligonucleotide
  Antisense strand to SEQ ID NO: 2205300
caucacaugugguucucag

SEQ ID NO: 2205302 - RNA, 19 nt, Artificial Sequence
  Description of Artificial Sequence: Synthetic oligonucleotide
  Sense strand starting at position 2688 of SEQ ID NO: 1883622
cagugauuggguggaagag

SEQ ID NO: 2205303 - RNA, 19 nt, Artificial Sequence
  Description of Artificial Sequence: Synthetic oligonucleotide
  Antisense strand to SEQ ID NO: 2205302
cucuuccacccaaucacug

SEQ ID NO: 2205304 - RNA, 19 nt, Artificial Sequence
  Description of Artificial Sequence: Synthetic oligonucleotide
  Sense strand starting at position 3299 of SEQ ID NO: 1883622
agaagagggcugcauguaa

SEQ ID NO: 2205305 - RNA, 19 nt, Artificial Sequence
  Description of Artificial Sequence: Synthetic oligonucleotide
  Antisense strand to SEQ ID NO: 2205304
uuacaugcagcccucuucu

SEQ ID NO: 2205306 - RNA, 19 nt, Artificial Sequence
  Description of Artificial Sequence: Synthetic oligonucleotide
  Sense strand starting at position 3273 of SEQ ID NO: 1883622
cuaagaucgagguagaguu

SEQ ID NO: 2205307 - RNA, 19 nt, Artificial Sequence
  Description of Artificial Sequence: Synthetic oligonucleotide
  Antisense strand to SEQ ID NO: 2205306
aacucuaccucgaucuuag

SEQ ID NO: 2205308 - RNA, 19 nt, Artificial Sequence
  Description of Artificial Sequence: Synthetic oligonucleotide
  Sense strand starting at position 375 of SEQ ID NO: 1883622
auauguaaaccacagugua

SEQ ID NO: 2205309 - RNA, 19 nt, Artificial Sequence
  Description of Artificial Sequence: Synthetic oligonucleotide
  Antisense strand to SEQ ID NO: 2205308
uacacugugguuuacauau

SEQ ID NO: 2205310 - RNA, 19 nt, Artificial Sequence
  Description of Artificial Sequence: Synthetic oligonucleotide
  Sense strand starting at position 3480 of SEQ ID NO: 1883622
ggauaucggauaggaguua

SEQ ID NO: 2205311 - RNA, 19 nt, Artificial Sequence
  Description of Artificial Sequence: Synthetic oligonucleotide
  Antisense strand to SEQ ID NO: 2205310
uaacuccuauccgauaucc

SEQ ID NO: 2205312 - RNA, 19 nt, Artificial Sequence
  Description of Artificial Sequence: Synthetic oligonucleotide
  Sense strand starting at position 3620 of SEQ ID NO: 1883622
uccaaaugucuuugaaagg

SEQ ID NO: 2205313 - RNA, 19 nt, Artificial Sequence
  Description of Artificial Sequence: Synthetic oligonucleotide
  Antisense strand to SEQ ID NO: 2205312
ccuuucaaagacauuugga

SEQ ID NO: 2205314 - RNA, 19 nt, Artificial Sequence
  Description of Artificial Sequence: Synthetic oligonucleotide
  Sense strand starting at position 3533 of SEQ ID NO: 1883622
gggagaacccugggcuuga

SEQ ID NO: 2205315 - RNA, 19 nt, Artificial Sequence
  Description of Artificial Sequence: Synthetic oligonucleotide
  Antisense strand to SEQ ID NO: 2205314
ucaagcccaggguucuccc

SEQ ID NO: 2205316 - RNA, 19 nt, Artificial Sequence
  Description of Artificial Sequence: Synthetic oligonucleotide
  Sense strand starting at position 3243 of SEQ ID NO: 1883622
gcuugaauugcucuccgcu

SEQ ID NO: 2205317 - RNA, 19 nt, Artificial Sequence
  Description of Artificial Sequence: Synthetic oligonucleotide
  Antisense strand to SEQ ID NO: 2205316
agcggagagcaauucaagc

SEQ ID NO: 2205318 - RNA, 19 nt, Artificial Sequence
  Description of Artificial Sequence: Synthetic oligonucleotide
  Sense strand starting at position 258 of SEQ ID NO: 1883622
uggaucugcccucacacau

SEQ ID NO: 2205319 - RNA, 19 nt, Artificial Sequence
  Description of Artificial Sequence: Synthetic oligonucleotide
  Antisense strand to SEQ ID NO: 2205318
augugugagggcagaucca

SEQ ID NO: 2205320 - RNA, 19 nt, Artificial Sequence
  Description of Artificial Sequence: Synthetic oligonucleotide
  Sense strand starting at position 1221 of SEQ ID NO: 1883622
auaauacauguguagucua

SEQ ID NO: 2205321 - RNA, 19 nt, Artificial Sequence
  Description of Artificial Sequence: Synthetic oligonucleotide
  Antisense strand to SEQ ID NO: 2205320
uagacuacacauguauuau

SEQ ID NO: 2205322 - RNA, 19 nt, Artificial Sequence
  Description of Artificial Sequence: Synthetic oligonucleotide
  Sense strand starting at position 635 of SEQ ID NO: 1883622
agcaguuaugaauaguuau

SEQ ID NO: 2205323 - RNA, 19 nt, Artificial Sequence
  Description of Artificial Sequence: Synthetic oligonucleotide
  Antisense strand to SEQ ID NO: 2205322
auaacuauucauaacugcu

SEQ ID NO: 2205324 - RNA, 19 nt, Artificial Sequence
  Description of Artificial Sequence: Synthetic oligonucleotide
  Sense strand starting at position 3023 of SEQ ID NO: 1883622
agcauugacugacuaacuu

SEQ ID NO: 2205325 - RNA, 19 nt, Artificial Sequence
  Description of Artificial Sequence: Synthetic oligonucleotide
  Antisense strand to SEQ ID NO: 2205324
aaguuagucagucaaugcu

SEQ ID NO: 2205326 - RNA, 19 nt, Artificial Sequence
  Description of Artificial Sequence: Synthetic oligonucleotide
  Sense strand starting at position 1197 of SEQ ID NO: 1883622
acgugugugcaguaaauuu

SEQ ID NO: 2205327 - RNA, 19 nt, Artificial Sequence
  Description of Artificial Sequence: Synthetic oligonucleotide
  Antisense strand to SEQ ID NO: 2205326
aaauuuacugcacacacgu

SEQ ID NO: 2205328 - RNA, 19 nt, Artificial Sequence
  Description of Artificial Sequence: Synthetic oligonucleotide
  Sense strand starting at position 3617 of SEQ ID NO: 1883622
gaguccaaaugucuuugaa

SEQ ID NO: 2205329 - RNA, 19 nt, Artificial Sequence
  Description of Artificial Sequence: Synthetic oligonucleotide
  Antisense strand to SEQ ID NO: 2205328
uucaaagacauuuggacuc

SEQ ID NO: 2205330 - RNA, 19 nt, Artificial Sequence
  Description of Artificial Sequence: Synthetic oligonucleotide
  Sense strand starting at position 3619 of SEQ ID NO: 1883622
guccaaaugucuuugaaag

SEQ ID NO: 2205331 - RNA, 19 nt, Artificial Sequence
  Description of Artificial Sequence: Synthetic oligonucleotide
  Antisense strand to SEQ ID NO: 2205330
cuuucaaagacauuuggac

SEQ ID NO: 2205332 - RNA, 19 nt, Artificial Sequence
  Description of Artificial Sequence: Synthetic oligonucleotide
  Sense strand starting at position 1041 of SEQ ID NO: 1883622
cgaauuaaauacgcaacaa

SEQ ID NO: 2205333 - RNA, 19 nt, Artificial Sequence
  Description of Artificial Sequence: Synthetic oligonucleotide
  Antisense strand to SEQ ID NO: 2205332
uuguugcguauuuaauucg

SEQ ID NO: 2205334 - RNA, 19 nt, Artificial Sequence
  Description of Artificial Sequence: Synthetic oligonucleotide
  Sense strand starting at position 1226 of SEQ ID NO: 1883622
acauguguagucuacaauu

SEQ ID NO: 2205335 - RNA, 19 nt, Artificial Sequence
  Description of Artificial Sequence: Synthetic oligonucleotide
  Antisense strand to SEQ ID NO: 2205334
aauuguagacuacacaugu

SEQ ID NO: 2205336 - RNA, 19 nt, Artificial Sequence
  Description of Artificial Sequence: Synthetic oligonucleotide
  Sense strand starting at position 3610 of SEQ ID NO: 1883622
ccuucuugaguccaaaugu

SEQ ID NO: 2205337 - RNA, 19 nt, Artificial Sequence
  Description of Artificial Sequence: Synthetic oligonucleotide
  Antisense strand to SEQ ID NO: 2205336
acauuuggacucaagaagg

SEQ ID NO: 2205338 - RNA, 19 nt, Artificial Sequence
  Description of Artificial Sequence: Synthetic oligonucleotide
  Sense strand starting at position 3260 of SEQ ID NO: 1883622
cugaucuucucagcuaaga

SEQ ID NO: 2205339 - RNA, 19 nt, Artificial Sequence
  Description of Artificial Sequence: Synthetic oligonucleotide
  Antisense strand to SEQ ID NO: 2205338
ucuuagcugagaagaucag

SEQ ID NO: 2205340 - RNA, 19 nt, Artificial Sequence
  Description of Artificial Sequence: Synthetic oligonucleotide
  Sense strand starting at position 3326 of SEQ ID NO: 1883622
cucugucucggaggacaaa

SEQ ID NO: 2205341 - RNA, 19 nt, Artificial Sequence
  Description of Artificial Sequence: Synthetic oligonucleotide
  Antisense strand to SEQ ID NO: 2205340
uuuguccuccgagacagag

SEQ ID NO: 2205342 - RNA, 19 nt, Artificial Sequence
  Description of Artificial Sequence: Synthetic oligonucleotide
  Sense strand starting at position 3981 of SEQ ID NO: 1883622
ugugaugacacuugugaug

SEQ ID NO: 2205343 - RNA, 19 nt, Artificial Sequence
  Description of Artificial Sequence: Synthetic oligonucleotide
  Antisense strand to SEQ ID NO: 2205342
caucacaagugucaucaca

SEQ ID NO: 2205344 - RNA, 19 nt, Artificial Sequence
  Description of Artificial Sequence: Synthetic oligonucleotide
  Sense strand starting at position 1426 of SEQ ID NO: 1883622
agcauauuagagcaugcau

SEQ ID NO: 2205345 - RNA, 19 nt, Artificial Sequence
  Description of Artificial Sequence: Synthetic oligonucleotide
  Antisense strand to SEQ ID NO: 2205344
augcaugcucuaauaugcu

SEQ ID NO: 2205346 - RNA, 19 nt, Artificial Sequence
  Description of Artificial Sequence: Synthetic oligonucleotide
  Sense strand starting at position 3283 of SEQ ID NO: 1883622
gguagaguugcacagcaga

SEQ ID NO: 2205347 - RNA, 19 nt, Artificial Sequence
  Description of Artificial Sequence: Synthetic oligonucleotide
  Antisense strand to SEQ ID NO: 2205346
ucugcugugcaacucuacc

SEQ ID NO: 2205348 - RNA, 19 nt, Artificial Sequence
  Description of Artificial Sequence: Synthetic oligonucleotide
  Sense strand starting at position 2740 of SEQ ID NO: 1883622
agaugauguuucucagcag

SEQ ID NO: 2205349 - RNA, 19 nt, Artificial Sequence
  Description of Artificial Sequence: Synthetic oligonucleotide
  Antisense strand to SEQ ID NO: 2205348
cugcugagaaacaucaucu

SEQ ID NO: 2205350 - RNA, 19 nt, Artificial Sequence
  Description of Artificial Sequence: Synthetic oligonucleotide
  Sense strand starting at position 2905 of SEQ ID NO: 1883622
uacagaagcgauugcagaa

SEQ ID NO: 2205351 - RNA, 19 nt, Artificial Sequence
  Description of Artificial Sequence: Synthetic oligonucleotide
  Antisense strand to SEQ ID NO: 2205350
uucugcaaucgcuucugua

SEQ ID NO: 2205352 - RNA, 19 nt, Artificial Sequence
  Description of Artificial Sequence: Synthetic oligonucleotide
  Sense strand starting at position 2573 of SEQ ID NO: 1883622
cugucuccacgugaugaca

SEQ ID NO: 2205353 - RNA, 19 nt, Artificial Sequence
  Description of Artificial Sequence: Synthetic oligonucleotide
  Antisense strand to SEQ ID NO: 2205352
ugucaucacguggagacag

SEQ ID NO: 2205354 - RNA, 19 nt, Artificial Sequence
  Description of Artificial Sequence: Synthetic oligonucleotide
  Sense strand starting at position 2638 of SEQ ID NO: 1883622
gacugagagcucugccaga

SEQ ID NO: 2205355 - RNA, 19 nt, Artificial Sequence
  Description of Artificial Sequence: Synthetic oligonucleotide
  Antisense strand to SEQ ID NO: 2205354
ucuggcagagcucucaguc

SEQ ID NO: 2205356 - RNA, 19 nt, Artificial Sequence
  Description of Artificial Sequence: Synthetic oligonucleotide
  Sense strand starting at position 1224 of SEQ ID NO: 1883622
auacauguguagucuacaa

SEQ ID NO: 2205357 - RNA, 19 nt, Artificial Sequence
  Description of Artificial Sequence: Synthetic oligonucleotide
  Antisense strand to SEQ ID NO: 2205356
uuguagacuacacauguau

SEQ ID NO: 2205358 - RNA, 19 nt, Artificial Sequence
  Description of Artificial Sequence: Synthetic oligonucleotide
  Sense strand starting at position 3903 of SEQ ID NO: 1883622
aacagcaauucugugugaa

SEQ ID NO: 2205359 - RNA, 19 nt, Artificial Sequence
  Description of Artificial Sequence: Synthetic oligonucleotide
  Antisense strand to SEQ ID NO: 2205358
uucacacagaauugcuguu

SEQ ID NO: 2205360 - RNA, 19 nt, Artificial Sequence
  Description of Artificial Sequence: Synthetic oligonucleotide
  Sense strand starting at position 3770 of SEQ ID NO: 1883622
ugacaucugugucucagau

SEQ ID NO: 2205361 - RNA, 19 nt, Artificial Sequence
  Description of Artificial Sequence: Synthetic oligonucleotide
  Antisense strand to SEQ ID NO: 2205360
aucugagacacagauguca

SEQ ID NO: 2205362 - RNA, 19 nt, Artificial Sequence
  Description of Artificial Sequence: Synthetic oligonucleotide
  Sense strand starting at position 3904 of SEQ ID NO: 1883622
acagcaauucugugugaaa

SEQ ID NO: 2205363 - RNA, 19 nt, Artificial Sequence
  Description of Artificial Sequence: Synthetic oligonucleotide
  Antisense strand to SEQ ID NO: 2205362
uuucacacagaauugcugu

SEQ ID NO: 2205364 - RNA, 19 nt, Artificial Sequence
  Description of Artificial Sequence: Synthetic oligonucleotide
  Sense strand starting at position 1293 of SEQ ID NO: 1883622
gcgauucucauagaagcuu

SEQ ID NO: 2205365 - RNA, 19 nt, Artificial Sequence
  Description of Artificial Sequence: Synthetic oligonucleotide
  Antisense strand to SEQ ID NO: 2205364
aagcuucuaugagaaucgc

SEQ ID NO: 2205366 - RNA, 19 nt, Artificial Sequence
  Description of Artificial Sequence: Synthetic oligonucleotide
  Sense strand starting at position 42 of SEQ ID NO: 1883622
cccuaaauauaccugcgau

SEQ ID NO: 2205367 - RNA, 19 nt, Artificial Sequence
  Description of Artificial Sequence: Synthetic oligonucleotide
  Antisense strand to SEQ ID NO: 2205366
aucgcagguauauuuaggg

SEQ ID NO: 2205368 - RNA, 19 nt, Artificial Sequence
  Description of Artificial Sequence: Synthetic oligonucleotide
  Sense strand starting at position 2770 of SEQ ID NO: 1883622
caggacuuucugugggcau

SEQ ID NO: 2205369 - RNA, 19 nt, Artificial Sequence
  Description of Artificial Sequence: Synthetic oligonucleotide
  Antisense strand to SEQ ID NO: 2205368
augcccacagaaaguccug

SEQ ID NO: 2205370 - RNA, 19 nt, Artificial Sequence
  Description of Artificial Sequence: Synthetic oligonucleotide
  Sense strand starting at position 47 of SEQ ID NO: 1883623
gucuauugugaggauuaag

SEQ ID NO: 2205371 - RNA, 19 nt, Artificial Sequence
  Description of Artificial Sequence: Synthetic oligonucleotide
  Antisense strand to SEQ ID NO: 2205370
cuuaauccucacaauagac

SEQ ID NO: 2205372 - RNA, 19 nt, Artificial Sequence
  Description of Artificial Sequence: Synthetic oligonucleotide
  Sense strand starting at position 605 of SEQ ID NO: 1883623
ggugaaccucuuggauaua

SEQ ID NO: 2205373 - RNA, 19 nt, Artificial Sequence
  Description of Artificial Sequence: Synthetic oligonucleotide
  Antisense strand to SEQ ID NO: 2205372
uauauccaagagguucacc

SEQ ID NO: 2205374 - RNA, 19 nt, Artificial Sequence
  Description of Artificial Sequence: Synthetic oligonucleotide
  Sense strand starting at position 401 of SEQ ID NO: 1883623
gaauguuguaagugaaaga

SEQ ID NO: 2205375 - RNA, 19 nt, Artificial Sequence
  Description of Artificial Sequence: Synthetic oligonucleotide
  Antisense strand to SEQ ID NO: 2205374
ucuuucacuuacaacauuc

SEQ ID NO: 2205376 - RNA, 19 nt, Artificial Sequence
  Description of Artificial Sequence: Synthetic oligonucleotide
  Sense strand starting at position 2733 of SEQ ID NO: 1883623
ggaugaaacgagcaguagu

SEQ ID NO: 2205377 - RNA, 19 nt, Artificial Sequence
  Description of Artificial Sequence: Synthetic oligonucleotide
  Antisense strand to SEQ ID NO: 2205376
acuacugcucguuucaucc

SEQ ID NO: 2205378 - RNA, 19 nt, Artificial Sequence
  Description of Artificial Sequence: Synthetic oligonucleotide
  Sense strand starting at position 541 of SEQ ID NO: 1883623
cagcuuuaauggguaggaa

SEQ ID NO: 2205379 - RNA, 19 nt, Artificial Sequence
  Description of Artificial Sequence: Synthetic oligonucleotide
  Antisense strand to SEQ ID NO: 2205378
uuccuacccauuaaagcug

SEQ ID NO: 2205380 - RNA, 19 nt, Artificial Sequence
  Description of Artificial Sequence: Synthetic oligonucleotide
  Sense strand starting at position 392 of SEQ ID NO: 1883623
ggaccucaagaauguugua

SEQ ID NO: 2205381 - RNA, 19 nt, Artificial Sequence
  Description of Artificial Sequence: Synthetic oligonucleotide
  Antisense strand to SEQ ID NO: 2205380
uacaacauucuugaggucc

SEQ ID NO: 2205382 - RNA, 19 nt, Artificial Sequence
  Description of Artificial Sequence: Synthetic oligonucleotide
  Sense strand starting at position 2886 of SEQ ID NO: 1883623
gagaucaguuggguuccaa

SEQ ID NO: 2205383 - RNA, 19 nt, Artificial Sequence
  Description of Artificial Sequence: Synthetic oligonucleotide
  Antisense strand to SEQ ID NO: 2205382
uuggaacccaacugaucuc

SEQ ID NO: 2205384 - RNA, 19 nt, Artificial Sequence
  Description of Artificial Sequence: Synthetic oligonucleotide
  Sense strand starting at position 735 of SEQ ID NO: 1883623
cuacaauuucuuggcgcau

SEQ ID NO: 2205385 - RNA, 19 nt, Artificial Sequence
  Description of Artificial Sequence: Synthetic oligonucleotide
  Antisense strand to SEQ ID NO: 2205384
augcgccaagaaauuguag

SEQ ID NO: 2205386 - RNA, 19 nt, Artificial Sequence
  Description of Artificial Sequence: Synthetic oligonucleotide
  Sense strand starting at position 2809 of SEQ ID NO: 1883623
guggguauuauugauagcu

SEQ ID NO: 2205387 - RNA, 19 nt, Artificial Sequence
  Description of Artificial Sequence: Synthetic oligonucleotide
  Antisense strand to SEQ ID NO: 2205386
agcuaucaauaauacccac

SEQ ID NO: 2205388 - RNA, 19 nt, Artificial Sequence
  Description of Artificial Sequence: Synthetic oligonucleotide
  Sense strand starting at position 3249 of SEQ ID NO: 1883623
uauauagggugcuuaugau

SEQ ID NO: 2205389 - RNA, 19 nt, Artificial Sequence
  Description of Artificial Sequence: Synthetic oligonucleotide
  Antisense strand to SEQ ID NO: 2205388
aucauaagcacccuauaua

SEQ ID NO: 2205390 - RNA, 19 nt, Artificial Sequence
  Description of Artificial Sequence: Synthetic oligonucleotide
  Sense strand starting at position 3766 of SEQ ID NO: 1883623
augcauagaguuuggugaa

SEQ ID NO: 2205391 - RNA, 19 nt, Artificial Sequence
  Description of Artificial Sequence: Synthetic oligonucleotide
  Antisense strand to SEQ ID NO: 2205390
uucaccaaacucuaugcau

SEQ ID NO: 2205392 - RNA, 19 nt, Artificial Sequence
  Description of Artificial Sequence: Synthetic oligonucleotide
  Sense strand starting at position 3087 of SEQ ID NO: 1883623
gggcaaucuacaugccaug

SEQ ID NO: 2205393 - RNA, 19 nt, Artificial Sequence
  Description of Artificial Sequence: Synthetic oligonucleotide
  Antisense strand to SEQ ID NO: 2205392
cauggcauguagauugccc

SEQ ID NO: 2205394 - RNA, 19 nt, Artificial Sequence
  Description of Artificial Sequence: Synthetic oligonucleotide
  Sense strand starting at position 3622 of SEQ ID NO: 1883623
cuccauuucugacagagua

SEQ ID NO: 2205395 - RNA, 19 nt, Artificial Sequence
  Description of Artificial Sequence: Synthetic oligonucleotide
  Antisense strand to SEQ ID NO: 2205394
uacucugucagaaauggag

SEQ ID NO: 2205396 - RNA, 19 nt, Artificial Sequence
  Description of Artificial Sequence: Synthetic oligonucleotide
  Sense strand starting at position 3814 of SEQ ID NO: 1883623
uuuguuuguugacucaaau

SEQ ID NO: 2205397 - RNA, 19 nt, Artificial Sequence
  Description of Artificial Sequence: Synthetic oligonucleotide
  Antisense strand to SEQ ID NO: 2205396
auuugagucaacaaacaaa

SEQ ID NO: 2205398 - RNA, 19 nt, Artificial Sequence
  Description of Artificial Sequence: Synthetic oligonucleotide
  Sense strand starting at position 800 of SEQ ID NO: 1883623
agauacucuugucugcauu

SEQ ID NO: 2205399 - RNA, 19 nt, Artificial Sequence
  Description of Artificial Sequence: Synthetic oligonucleotide
  Antisense strand to SEQ ID NO: 2205398
aaugcagacaagaguaucu

SEQ ID NO: 2205400 - RNA, 19 nt, Artificial Sequence
  Description of Artificial Sequence: Synthetic oligonucleotide
  Sense strand starting at position 3196 of SEQ ID NO: 1883623
caaugugguccguaauagu

SEQ ID NO: 2205401 - RNA, 19 nt, Artificial Sequence
  Description of Artificial Sequence: Synthetic oligonucleotide
  Antisense strand to SEQ ID NO: 2205400
acuauuacggaccacauug

SEQ ID NO: 2205402 - RNA, 19 nt, Artificial Sequence
  Description of Artificial Sequence: Synthetic oligonucleotide
  Sense strand starting at position 3427 of SEQ ID NO: 1883623
uuacaacaugucugcagua

SEQ ID NO: 2205403 - RNA, 19 nt, Artificial Sequence
  Description of Artificial Sequence: Synthetic oligonucleotide
  Antisense strand to SEQ ID NO: 2205402
uacugcagacauguuguaa

SEQ ID NO: 2205404 - RNA, 19 nt, Artificial Sequence
  Description of Artificial Sequence: Synthetic oligonucleotide
  Sense strand starting at position 3192 of SEQ ID NO: 1883623
cauacaaugugguccguaa

SEQ ID NO: 2205405 - RNA, 19 nt, Artificial Sequence
  Description of Artificial Sequence: Synthetic oligonucleotide
  Antisense strand to SEQ ID NO: 2205404
uuacggaccacauuguaug

SEQ ID NO: 2205406 - RNA, 19 nt, Artificial Sequence
  Description of Artificial Sequence: Synthetic oligonucleotide
  Sense strand starting at position 3551 of SEQ ID NO: 1883623
auagaaguuuaggaacaca

SEQ ID NO: 2205407 - RNA, 19 nt, Artificial Sequence
  Description of Artificial Sequence: Synthetic oligonucleotide
  Antisense strand to SEQ ID NO: 2205406
uguguuccuaaacuucuau

SEQ ID NO: 2205408 - RNA, 19 nt, Artificial Sequence
  Description of Artificial Sequence: Synthetic oligonucleotide
  Sense strand starting at position 3194 of SEQ ID NO: 1883623
uacaaugugguccguaaua

SEQ ID NO: 2205409 - RNA, 19 nt, Artificial Sequence
  Description of Artificial Sequence: Synthetic oligonucleotide
  Antisense strand to SEQ ID NO: 2205408
uauuacggaccacauugua

SEQ ID NO: 2205410 - RNA, 19 nt, Artificial Sequence
  Description of Artificial Sequence: Synthetic oligonucleotide
  Sense strand starting at position 3205 of SEQ ID NO: 1883623
ccguaauaguaucauuuag

SEQ ID NO: 2205411 - RNA, 19 nt, Artificial Sequence
  Description of Artificial Sequence: Synthetic oligonucleotide
  Antisense strand to SEQ ID NO: 2205410
cuaaaugauacuauuacgg

SEQ ID NO: 2205412 - RNA, 19 nt, Artificial Sequence
  Description of Artificial Sequence: Synthetic oligonucleotide
  Sense strand starting at position 2743 of SEQ ID NO: 1883623
agcaguaguccacggugau

SEQ ID NO: 2205413 - RNA, 19 nt, Artificial Sequence
  Description of Artificial Sequence: Synthetic oligonucleotide
  Antisense strand to SEQ ID NO: 2205412
aucaccguggacuacugcu

SEQ ID NO: 2205414 - RNA, 19 nt, Artificial Sequence
  Description of Artificial Sequence: Synthetic oligonucleotide
  Sense strand starting at position 789 of SEQ ID NO: 1883623
cgauaaucuuaagauacuc

SEQ ID NO: 2205415 - RNA, 19 nt, Artificial Sequence
  Description of Artificial Sequence: Synthetic oligonucleotide
  Antisense strand to SEQ ID NO: 2205414
gaguaucuuaagauuaucg

SEQ ID NO: 2205416 - RNA, 19 nt, Artificial Sequence
  Description of Artificial Sequence: Synthetic oligonucleotide
  Sense strand starting at position 2744 of SEQ ID NO: 1883623
gcaguaguccacggugauu

SEQ ID NO: 2205417 - RNA, 19 nt, Artificial Sequence
  Description of Artificial Sequence: Synthetic oligonucleotide
  Antisense strand to SEQ ID NO: 2205416
aaucaccguggacuacugc

SEQ ID NO: 2205418 - RNA, 19 nt, Artificial Sequence
  Description of Artificial Sequence: Synthetic oligonucleotide
  Sense strand starting at position 606 of SEQ ID NO: 1883623
gugaaccucuuggauauau

SEQ ID NO: 2205419 - RNA, 19 nt, Artificial Sequence
  Description of Artificial Sequence: Synthetic oligonucleotide
  Antisense strand to SEQ ID NO: 2205418
auauauccaagagguucac

SEQ ID NO: 2205420 - RNA, 19 nt, Artificial Sequence
  Description of Artificial Sequence: Synthetic oligonucleotide
  Sense strand starting at position 2512 of SEQ ID NO: 1883623
ggagaguuaugguggagga

SEQ ID NO: 2205421 - RNA, 19 nt, Artificial Sequence
  Description of Artificial Sequence: Synthetic oligonucleotide
  Antisense strand to SEQ ID NO: 2205420
uccuccaccauaacucucc

SEQ ID NO: 2205422 - RNA, 19 nt, Artificial Sequence
  Description of Artificial Sequence: Synthetic oligonucleotide
  Sense strand starting at position 397 of SEQ ID NO: 1883623
ucaagaauguuguaaguga

SEQ ID NO: 2205423 - RNA, 19 nt, Artificial Sequence
  Description of Artificial Sequence: Synthetic oligonucleotide
  Antisense strand to SEQ ID NO: 2205422
ucacuuacaacauucuuga

SEQ ID NO: 2205424 - RNA, 19 nt, Artificial Sequence
  Description of Artificial Sequence: Synthetic oligonucleotide
  Sense strand starting at position 44 of SEQ ID NO: 1883623
uaagucuauugugaggauu

SEQ ID NO: 2205425 - RNA, 19 nt, Artificial Sequence
  Description of Artificial Sequence: Synthetic oligonucleotide
  Antisense strand to SEQ ID NO: 2205424
aauccucacaauagacuua

SEQ ID NO: 2205426 - RNA, 19 nt, Artificial Sequence
  Description of Artificial Sequence: Synthetic oligonucleotide
  Sense strand starting at position 3255 of SEQ ID NO: 1883623
gggugcuuaugauaaccua

SEQ ID NO: 2205427 - RNA, 19 nt, Artificial Sequence
  Description of Artificial Sequence: Synthetic oligonucleotide
  Antisense strand to SEQ ID NO: 2205426
uagguuaucauaagcaccc

SEQ ID NO: 2205428 - RNA, 19 nt, Artificial Sequence
  Description of Artificial Sequence: Synthetic oligonucleotide
  Sense strand starting at position 2811 of SEQ ID NO: 1883623
ggguauuauugauagcuua

SEQ ID NO: 2205429 - RNA, 19 nt, Artificial Sequence
  Description of Artificial Sequence: Synthetic oligonucleotide
  Antisense strand to SEQ ID NO: 2205428
uaagcuaucaauaauaccc

SEQ ID NO: 2205430 - RNA, 19 nt, Artificial Sequence
  Description of Artificial Sequence: Synthetic oligonucleotide
  Sense strand starting at position 2805 of SEQ ID NO: 1883623
aaacguggguauuauugau

SEQ ID NO: 2205431 - RNA, 19 nt, Artificial Sequence
  Description of Artificial Sequence: Synthetic oligonucleotide
  Antisense strand to SEQ ID NO: 2205430
aucaauaauacccacguuu

SEQ ID NO: 2205432 - RNA, 19 nt, Artificial Sequence
  Description of Artificial Sequence: Synthetic oligonucleotide
  Sense strand starting at position 46 of SEQ ID NO: 1883623
agucuauugugaggauuaa

SEQ ID NO: 2205433 - RNA, 19 nt, Artificial Sequence
  Description of Artificial Sequence: Synthetic oligonucleotide
  Antisense strand to SEQ ID NO: 2205432
uuaauccucacaauagacu

SEQ ID NO: 2205434 - RNA, 19 nt, Artificial Sequence
  Description of Artificial Sequence: Synthetic oligonucleotide
  Sense strand starting at position 604 of SEQ ID NO: 1883623
uggugaaccucuuggauau

SEQ ID NO: 2205435 - RNA, 19 nt, Artificial Sequence
  Description of Artificial Sequence: Synthetic oligonucleotide
  Antisense strand to SEQ ID NO: 2205434
auauccaagagguucacca

SEQ ID NO: 2205436 - RNA, 19 nt, Artificial Sequence
  Description of Artificial Sequence: Synthetic oligonucleotide
  Sense strand starting at position 2509 of SEQ ID NO: 1883623
gguggagaguuauggugga

SEQ ID NO: 2205437 - RNA, 19 nt, Artificial Sequence
  Description of Artificial Sequence: Synthetic oligonucleotide
  Antisense strand to SEQ ID NO: 2205436
uccaccauaacucuccacc

SEQ ID NO: 2205438 - RNA, 19 nt, Artificial Sequence
  Description of Artificial Sequence: Synthetic oligonucleotide
  Sense strand starting at position 43 of SEQ ID NO: 1883623
uuaagucuauugugaggau

SEQ ID NO: 2205439 - RNA, 19 nt, Artificial Sequence
  Description of Artificial Sequence: Synthetic oligonucleotide
  Antisense strand to SEQ ID NO: 2205438
auccucacaauagacuuaa

SEQ ID NO: 2205440 - RNA, 19 nt, Artificial Sequence
  Description of Artificial Sequence: Synthetic oligonucleotide
  Sense strand starting at position 2818 of SEQ ID NO: 1883623
auugauagcuuaugugaca

SEQ ID NO: 2205441 - RNA, 19 nt, Artificial Sequence
  Description of Artificial Sequence: Synthetic oligonucleotide
  Antisense strand to SEQ ID NO: 2205440
ugucacauaagcuaucaau

SEQ ID NO: 2205442 - RNA, 19 nt, Artificial Sequence
  Description of Artificial Sequence: Synthetic oligonucleotide
  Sense strand starting at position 2890 of SEQ ID NO: 1883623
ucaguuggguuccaagcau

SEQ ID NO: 2205443 - RNA, 19 nt, Artificial Sequence
  Description of Artificial Sequence: Synthetic oligonucleotide
  Antisense strand to SEQ ID NO: 2205442
augcuuggaacccaacuga

SEQ ID NO: 2205444 - RNA, 19 nt, Artificial Sequence
  Description of Artificial Sequence: Synthetic oligonucleotide
  Sense strand starting at position 3767 of SEQ ID NO: 1883623
ugcauagaguuuggugaaa

SEQ ID NO: 2205445 - RNA, 19 nt, Artificial Sequence
  Description of Artificial Sequence: Synthetic oligonucleotide
  Antisense strand to SEQ ID NO: 2205444
uuucaccaaacucuaugca

SEQ ID NO: 2205446 - RNA, 19 nt, Artificial Sequence
  Description of Artificial Sequence: Synthetic oligonucleotide
  Sense strand starting at position 395 of SEQ ID NO: 1883623
ccucaagaauguuguaagu

SEQ ID NO: 2205447 - RNA, 19 nt, Artificial Sequence
  Description of Artificial Sequence: Synthetic oligonucleotide
  Antisense strand to SEQ ID NO: 2205446
acuuacaacauucuugagg

SEQ ID NO: 2205448 - RNA, 19 nt, Artificial Sequence
  Description of Artificial Sequence: Synthetic oligonucleotide
  Sense strand starting at position 3205 of SEQ ID NO: 1883624
ccacaauagugaucagaug

SEQ ID NO: 2205449 - RNA, 19 nt, Artificial Sequence
  Description of Artificial Sequence: Synthetic oligonucleotide
  Antisense strand to SEQ ID NO: 2205448
caucugaucacuauugugg

SEQ ID NO: 2205450 - RNA, 19 nt, Artificial Sequence
  Description of Artificial Sequence: Synthetic oligonucleotide
  Sense strand starting at position 2968 of SEQ ID NO: 1883624
cuagaauggcucuaaauuc

SEQ ID NO: 2205451 - RNA, 19 nt, Artificial Sequence
  Description of Artificial Sequence: Synthetic oligonucleotide
  Antisense strand to SEQ ID NO: 2205450
gaauuuagagccauucuag

SEQ ID NO: 2205452 - RNA, 19 nt, Artificial Sequence
  Description of Artificial Sequence: Synthetic oligonucleotide
  Sense strand starting at position 2516 of SEQ ID NO: 1883624
cgugauauuugcuccaaga

SEQ ID NO: 2205453 - RNA, 19 nt, Artificial Sequence
  Description of Artificial Sequence: Synthetic oligonucleotide
  Antisense strand to SEQ ID NO: 2205452
ucuuggagcaaauaucacg

SEQ ID NO: 2205454 - RNA, 19 nt, Artificial Sequence
  Description of Artificial Sequence: Synthetic oligonucleotide
  Sense strand starting at position 2515 of SEQ ID NO: 1883624
acgugauauuugcuccaag

SEQ ID NO: 2205455 - RNA, 19 nt, Artificial Sequence
  Description of Artificial Sequence: Synthetic oligonucleotide
  Antisense strand to SEQ ID NO: 2205454
cuuggagcaaauaucacgu

SEQ ID NO: 2205456 - RNA, 19 nt, Artificial Sequence
  Description of Artificial Sequence: Synthetic oligonucleotide
  Sense strand starting at position 3014 of SEQ ID NO: 1883624
guuggauuccuacacuaau

SEQ ID NO: 2205457 - RNA, 19 nt, Artificial Sequence
  Description of Artificial Sequence: Synthetic oligonucleotide
  Antisense strand to SEQ ID NO: 2205456
auuaguguaggaauccaac

SEQ ID NO: 2205458 - RNA, 19 nt, Artificial Sequence
  Description of Artificial Sequence: Synthetic oligonucleotide
  Sense strand starting at position 2484 of SEQ ID NO: 1883624
gaauguauagaaugcagaa

SEQ ID NO: 2205459 - RNA, 19 nt, Artificial Sequence
  Description of Artificial Sequence: Synthetic oligonucleotide
  Antisense strand to SEQ ID NO: 2205458
uucugcauucuauacauuc

SEQ ID NO: 2205460 - RNA, 19 nt, Artificial Sequence
  Description of Artificial Sequence: Synthetic oligonucleotide
  Sense strand starting at position 734 of SEQ ID NO: 1883624
ugcagacucccuuagauag

SEQ ID NO: 2205461 - RNA, 19 nt, Artificial Sequence
  Description of Artificial Sequence: Synthetic oligonucleotide
  Antisense strand to SEQ ID NO: 2205460
cuaucuaagggagucugca

SEQ ID NO: 2205462 - RNA, 19 nt, Artificial Sequence
  Description of Artificial Sequence: Synthetic oligonucleotide
  Sense strand starting at position 2698 of SEQ ID NO: 1883624
auuggaaagccugaugcaa

SEQ ID NO: 2205463 - RNA, 19 nt, Artificial Sequence
  Description of Artificial Sequence: Synthetic oligonucleotide
  Antisense strand to SEQ ID NO: 2205462
uugcaucaggcuuuccaau

SEQ ID NO: 2205464 - RNA, 19 nt, Artificial Sequence
  Description of Artificial Sequence: Synthetic oligonucleotide
  Sense strand starting at position 3242 of SEQ ID NO: 1883624
auuuacuagucgucacuau

SEQ ID NO: 2205465 - RNA, 19 nt, Artificial Sequence
  Description of Artificial Sequence: Synthetic oligonucleotide
  Antisense strand to SEQ ID NO: 2205464
auagugacgacuaguaaau

SEQ ID NO: 2205466 - RNA, 19 nt, Artificial Sequence
  Description of Artificial Sequence: Synthetic oligonucleotide
  Sense strand starting at position 1623 of SEQ ID NO: 1883624
ucugaauuaugguuacaga

SEQ ID NO: 2205467 - RNA, 19 nt, Artificial Sequence
  Description of Artificial Sequence: Synthetic oligonucleotide
  Antisense strand to SEQ ID NO: 2205466
ucuguaaccauaauucaga

SEQ ID NO: 2205468 - RNA, 19 nt, Artificial Sequence
  Description of Artificial Sequence: Synthetic oligonucleotide
  Sense strand starting at position 817 of SEQ ID NO: 1883624
uccuuuaagggcuauaauu

SEQ ID NO: 2205469 - RNA, 19 nt, Artificial Sequence
  Description of Artificial Sequence: Synthetic oligonucleotide
  Antisense strand to SEQ ID NO: 2205468
aauuauagcccuuaaagga

SEQ ID NO: 2205470 - RNA, 19 nt, Artificial Sequence
  Description of Artificial Sequence: Synthetic oligonucleotide
  Sense strand starting at position 2553 of SEQ ID NO: 1883624
guagacuggccuuauaaau

SEQ ID NO: 2205471 - RNA, 19 nt, Artificial Sequence
  Description of Artificial Sequence: Synthetic oligonucleotide
  Antisense strand to SEQ ID NO: 2205470
auuuauaaggccagucuac

SEQ ID NO: 2205472 - RNA, 19 nt, Artificial Sequence
  Description of Artificial Sequence: Synthetic oligonucleotide
  Sense strand starting at position 3131 of SEQ ID NO: 1883624
ugauauagggcucauucuu

SEQ ID NO: 2205473 - RNA, 19 nt, Artificial Sequence
  Description of Artificial Sequence: Synthetic oligonucleotide
  Antisense strand to SEQ ID NO: 2205472
aagaaugagcccuauauca

SEQ ID NO: 2205474 - RNA, 19 nt, Artificial Sequence
  Description of Artificial Sequence: Synthetic oligonucleotide
  Sense strand starting at position 2965 of SEQ ID NO: 1883624
cuacuagaauggcucuaaa

SEQ ID NO: 2205475 - RNA, 19 nt, Artificial Sequence
  Description of Artificial Sequence: Synthetic oligonucleotide
  Antisense strand to SEQ ID NO: 2205474
uuuagagccauucuaguag

SEQ ID NO: 2205476 - RNA, 19 nt, Artificial Sequence
  Description of Artificial Sequence: Synthetic oligonucleotide
  Sense strand starting at position 2034 of SEQ ID NO: 1883624
aggacaauguuagucaacu

SEQ ID NO: 2205477 - RNA, 19 nt, Artificial Sequence
  Description of Artificial Sequence: Synthetic oligonucleotide
  Antisense strand to SEQ ID NO: 2205476
aguugacuaacauuguccu

SEQ ID NO: 2205478 - RNA, 19 nt, Artificial Sequence
  Description of Artificial Sequence: Synthetic oligonucleotide
  Sense strand starting at position 2801 of SEQ ID NO: 1883624
gagagagucucucuacuua

SEQ ID NO: 2205479 - RNA, 19 nt, Artificial Sequence
  Description of Artificial Sequence: Synthetic oligonucleotide
  Antisense strand to SEQ ID NO: 2205478
uaaguagagagacucucuc

SEQ ID NO: 2205480 - RNA, 19 nt, Artificial Sequence
  Description of Artificial Sequence: Synthetic oligonucleotide
  Sense strand starting at position 828 of SEQ ID NO: 1883624
cuauaauuagauugcugga

SEQ ID NO: 2205481 - RNA, 19 nt, Artificial Sequence
  Description of Artificial Sequence: Synthetic oligonucleotide
  Antisense strand to SEQ ID NO: 2205480
uccagcaaucuaauuauag

SEQ ID NO: 2205482 - RNA, 19 nt, Artificial Sequence
  Description of Artificial Sequence: Synthetic oligonucleotide
  Sense strand starting at position 795 of SEQ ID NO: 1883624
cugucaacucucuaaggua

SEQ ID NO: 2205483 - RNA, 19 nt, Artificial Sequence
  Description of Artificial Sequence: Synthetic oligonucleotide
  Antisense strand to SEQ ID NO: 2205482
uaccuuagagaguugacag

SEQ ID NO: 2205484 - RNA, 19 nt, Artificial Sequence
  Description of Artificial Sequence: Synthetic oligonucleotide
  Sense strand starting at position 1493 of SEQ ID NO: 1883624
gaauguuaagugcauuaua

SEQ ID NO: 2205485 - RNA, 19 nt, Artificial Sequence
  Description of Artificial Sequence: Synthetic oligonucleotide
  Antisense strand to SEQ ID NO: 2205484
uauaaugcacuuaacauuc

SEQ ID NO: 2205486 - RNA, 19 nt, Artificial Sequence
  Description of Artificial Sequence: Synthetic oligonucleotide
  Sense strand starting at position 2035 of SEQ ID NO: 1883624
ggacaauguuagucaacug

SEQ ID NO: 2205487 - RNA, 19 nt, Artificial Sequence
  Description of Artificial Sequence: Synthetic oligonucleotide
  Antisense strand to SEQ ID NO: 2205486
caguugacuaacauugucc

SEQ ID NO: 2205488 - RNA, 19 nt, Artificial Sequence
  Description of Artificial Sequence: Synthetic oligonucleotide
  Sense strand starting at position 1794 of SEQ ID NO: 1883624
auugguguuugacugaaag

SEQ ID NO: 2205489 - RNA, 19 nt, Artificial Sequence
  Description of Artificial Sequence: Synthetic oligonucleotide
  Antisense strand to SEQ ID NO: 2205488
cuuucagucaaacaccaau

SEQ ID NO: 2205490 - RNA, 19 nt, Artificial Sequence
  Description of Artificial Sequence: Synthetic oligonucleotide
  Sense strand starting at position 2799 of SEQ ID NO: 1883624
uugagagagucucucuacu

SEQ ID NO: 2205491 - RNA, 19 nt, Artificial Sequence
  Description of Artificial Sequence: Synthetic oligonucleotide
  Antisense strand to SEQ ID NO: 2205490
aguagagagacucucucaa

SEQ ID NO: 2205492 - RNA, 19 nt, Artificial Sequence
  Description of Artificial Sequence: Synthetic oligonucleotide
  Sense strand starting at position 1080 of SEQ ID NO: 1883624
acugcauuggaaugucaaa

SEQ ID NO: 2205493 - RNA, 19 nt, Artificial Sequence
  Description of Artificial Sequence: Synthetic oligonucleotide
  Antisense strand to SEQ ID NO: 2205492
uuugacauuccaaugcagu

SEQ ID NO: 2205494 - RNA, 19 nt, Artificial Sequence
  Description of Artificial Sequence: Synthetic oligonucleotide
  Sense strand starting at position 808 of SEQ ID NO: 1883624
aagguagucuccuuuaagg

SEQ ID NO: 2205495 - RNA, 19 nt, Artificial Sequence
  Description of Artificial Sequence: Synthetic oligonucleotide
  Antisense strand to SEQ ID NO: 2205494
ccuuaaaggagacuaccuu

SEQ ID NO: 2205496 - RNA, 19 nt, Artificial Sequence
  Description of Artificial Sequence: Synthetic oligonucleotide
  Sense strand starting at position 2077 of SEQ ID NO: 1883624
ucauguaagaaauguggua

SEQ ID NO: 2205497 - RNA, 19 nt, Artificial Sequence
  Description of Artificial Sequence: Synthetic oligonucleotide
  Antisense strand to SEQ ID NO: 2205496
uaccacauuucuuacauga

SEQ ID NO: 2205498 - RNA, 19 nt, Artificial Sequence
  Description of Artificial Sequence: Synthetic oligonucleotide
  Sense strand starting at position 1490 of SEQ ID NO: 1883624
aaagaauguuaagugcauu

SEQ ID NO: 2205499 - RNA, 19 nt, Artificial Sequence
  Description of Artificial Sequence: Synthetic oligonucleotide
  Antisense strand to SEQ ID NO: 2205498
aaugcacuuaacauucuuu

SEQ ID NO: 2205500 - RNA, 19 nt, Artificial Sequence
  Description of Artificial Sequence: Synthetic oligonucleotide
  Sense strand starting at position 2710 of SEQ ID NO: 1883624
gaugcaaauugauuauugu

SEQ ID NO: 2205501 - RNA, 19 nt, Artificial Sequence
  Description of Artificial Sequence: Synthetic oligonucleotide
  Antisense strand to SEQ ID NO: 2205500
acaauaaucaauuugcauc

SEQ ID NO: 2205502 - RNA, 19 nt, Artificial Sequence
  Description of Artificial Sequence: Synthetic oligonucleotide
  Sense strand starting at position 3246 of SEQ ID NO: 1883624
acuagucgucacuauuaca

SEQ ID NO: 2205503 - RNA, 19 nt, Artificial Sequence
  Description of Artificial Sequence: Synthetic oligonucleotide
  Antisense strand to SEQ ID NO: 2205502
uguaauagugacgacuagu

SEQ ID NO: 2205504 - RNA, 19 nt, Artificial Sequence
  Description of Artificial Sequence: Synthetic oligonucleotide
  Sense strand starting at position 3254 of SEQ ID NO: 1883624
ucacuauuacagggcagua

SEQ ID NO: 2205505 - RNA, 19 nt, Artificial Sequence
  Description of Artificial Sequence: Synthetic oligonucleotide
  Antisense strand to SEQ ID NO: 2205504
uacugcccuguaauaguga

SEQ ID NO: 2205506 - RNA, 19 nt, Artificial Sequence
  Description of Artificial Sequence: Synthetic oligonucleotide
  Sense strand starting at position 1308 of SEQ ID NO: 1883624
gguagaaucccauguacuu

SEQ ID NO: 2205507 - RNA, 19 nt, Artificial Sequence
  Description of Artificial Sequence: Synthetic oligonucleotide
  Antisense strand to SEQ ID NO: 2205506
aaguacaugggauucuacc

SEQ ID NO: 2205508 - RNA, 19 nt, Artificial Sequence
  Description of Artificial Sequence: Synthetic oligonucleotide
  Sense strand starting at position 1427 of SEQ ID NO: 1883624
ugcacugugguauauuaca

SEQ ID NO: 2205509 - RNA, 19 nt, Artificial Sequence
  Description of Artificial Sequence: Synthetic oligonucleotide
  Antisense strand to SEQ ID NO: 2205508
uguaauauaccacagugca

SEQ ID NO: 2205510 - RNA, 19 nt, Artificial Sequence
  Description of Artificial Sequence: Synthetic oligonucleotide
  Sense strand starting at position 3102 of SEQ ID NO: 1883624
ggugacagccucuaaugca

SEQ ID NO: 2205511 - RNA, 19 nt, Artificial Sequence
  Description of Artificial Sequence: Synthetic oligonucleotide
  Antisense strand to SEQ ID NO: 2205510
ugcauuagaggcugucacc

SEQ ID NO: 2205512 - RNA, 19 nt, Artificial Sequence
  Description of Artificial Sequence: Synthetic oligonucleotide
  Sense strand starting at position 909 of SEQ ID NO: 1883624
uugugacagucuucuaaca

SEQ ID NO: 2205513 - RNA, 19 nt, Artificial Sequence
  Description of Artificial Sequence: Synthetic oligonucleotide
  Antisense strand to SEQ ID NO: 2205512
uguuagaagacugucacaa

SEQ ID NO: 2205514 - RNA, 19 nt, Artificial Sequence
  Description of Artificial Sequence: Synthetic oligonucleotide
  Sense strand starting at position 2550 of SEQ ID NO: 1883624
auuguagacuggccuuaua

SEQ ID NO: 2205515 - RNA, 19 nt, Artificial Sequence
  Description of Artificial Sequence: Synthetic oligonucleotide
  Antisense strand to SEQ ID NO: 2205514
uauaaggccagucuacaau

SEQ ID NO: 2205516 - RNA, 19 nt, Artificial Sequence
  Description of Artificial Sequence: Synthetic oligonucleotide
  Sense strand starting at position 1245 of SEQ ID NO: 1883624
uguguacucaccgaaaguc

SEQ ID NO: 2205517 - RNA, 19 nt, Artificial Sequence
  Description of Artificial Sequence: Synthetic oligonucleotide
  Antisense strand to SEQ ID NO: 2205516
gacuuucggugaguacaca

SEQ ID NO: 2205518 - RNA, 19 nt, Artificial Sequence
  Description of Artificial Sequence: Synthetic oligonucleotide
  Sense strand starting at position 3011 of SEQ ID NO: 1883624
gcaguuggauuccuacacu

SEQ ID NO: 2205519 - RNA, 19 nt, Artificial Sequence
  Description of Artificial Sequence: Synthetic oligonucleotide
  Antisense strand to SEQ ID NO: 2205518
aguguaggaauccaacugc

SEQ ID NO: 2205520 - RNA, 19 nt, Artificial Sequence
  Description of Artificial Sequence: Synthetic oligonucleotide
  Sense strand starting at position 3243 of SEQ ID NO: 1883624
uuuacuagucgucacuauu

SEQ ID NO: 2205521 - RNA, 19 nt, Artificial Sequence
  Description of Artificial Sequence: Synthetic oligonucleotide
  Antisense strand to SEQ ID NO: 2205520
aauagugacgacuaguaaa

SEQ ID NO: 2205522 - RNA, 19 nt, Artificial Sequence
  Description of Artificial Sequence: Synthetic oligonucleotide
  Sense strand starting at position 3365 of SEQ ID NO: 1883624
ggacuugcacaguguauua

SEQ ID NO: 2205523 - RNA, 19 nt, Artificial Sequence
  Description of Artificial Sequence: Synthetic oligonucleotide
  Antisense strand to SEQ ID NO: 2205522
uaauacacugugcaagucc

SEQ ID NO: 2205524 - RNA, 19 nt, Artificial Sequence
  Description of Artificial Sequence: Synthetic oligonucleotide
  Sense strand starting at position 2040 of SEQ ID NO: 1883624
auguuagucaacugggcua

SEQ ID NO: 2205525 - RNA, 19 nt, Artificial Sequence
  Description of Artificial Sequence: Synthetic oligonucleotide
  Antisense strand to SEQ ID NO: 2205524
uagcccaguugacuaacau

SEQ ID NO: 2205526 - RNA, 19 nt, Artificial Sequence
  Description of Artificial Sequence: Synthetic oligonucleotide
  Sense strand starting at position 925 of SEQ ID NO: 1883624
acagcaguaucaucuguua

SEQ ID NO: 2205527 - RNA, 19 nt, Artificial Sequence
  Description of Artificial Sequence: Synthetic oligonucleotide
  Antisense strand to SEQ ID NO: 2205526
uaacagaugauacugcugu

SEQ ID NO: 2205528 - RNA, 19 nt, Artificial Sequence
  Description of Artificial Sequence: Synthetic oligonucleotide
  Sense strand starting at position 2751 of SEQ ID NO: 1883625
gaacuagacgcugauauua

SEQ ID NO: 2205529 - RNA, 19 nt, Artificial Sequence
  Description of Artificial Sequence: Synthetic oligonucleotide
  Antisense strand to SEQ ID NO: 2205528
uaauaucagcgucuaguuc

SEQ ID NO: 2205530 - RNA, 19 nt, Artificial Sequence
  Description of Artificial Sequence: Synthetic oligonucleotide
  Sense strand starting at position 3413 of SEQ ID NO: 1883625
uugucauuucgaugaucuu

SEQ ID NO: 2205531 - RNA, 19 nt, Artificial Sequence
  Description of Artificial Sequence: Synthetic oligonucleotide
  Antisense strand to SEQ ID NO: 2205530
aagaucaucgaaaugacaa

SEQ ID NO: 2205532 - RNA, 19 nt, Artificial Sequence
  Description of Artificial Sequence: Synthetic oligonucleotide
  Sense strand starting at position 3393 of SEQ ID NO: 1883625
aucugugcauuuguauaau

SEQ ID NO: 2205533 - RNA, 19 nt, Artificial Sequence
  Description of Artificial Sequence: Synthetic oligonucleotide
  Antisense strand to SEQ ID NO: 2205532
auuauacaaaugcacagau

SEQ ID NO: 2205534 - RNA, 19 nt, Artificial Sequence
  Description of Artificial Sequence: Synthetic oligonucleotide
  Sense strand starting at position 3386 of SEQ ID NO: 1883625
accacucaucugugcauuu

SEQ ID NO: 2205535 - RNA, 19 nt, Artificial Sequence
  Description of Artificial Sequence: Synthetic oligonucleotide
  Antisense strand to SEQ ID NO: 2205534
aaaugcacagaugaguggu

SEQ ID NO: 2205536 - RNA, 19 nt, Artificial Sequence
  Description of Artificial Sequence: Synthetic oligonucleotide
  Sense strand starting at position 3545 of SEQ ID NO: 1883625
cucacuucucugggauaaa

SEQ ID NO: 2205537 - RNA, 19 nt, Artificial Sequence
  Description of Artificial Sequence: Synthetic oligonucleotide
  Antisense strand to SEQ ID NO: 2205536
uuuaucccagagaagugag

SEQ ID NO: 2205538 - RNA, 19 nt, Artificial Sequence
  Description of Artificial Sequence: Synthetic oligonucleotide
  Sense strand starting at position 2611 of SEQ ID NO: 1883625
agcacagcuccugagacau

SEQ ID NO: 2205539 - RNA, 19 nt, Artificial Sequence
  Description of Artificial Sequence: Synthetic oligonucleotide
  Antisense strand to SEQ ID NO: 2205538
augucucaggagcugugcu

SEQ ID NO: 2205540 - RNA, 19 nt, Artificial Sequence
  Description of Artificial Sequence: Synthetic oligonucleotide
  Sense strand starting at position 270 of SEQ ID NO: 1883625
gugagaagccuugaagguc

SEQ ID NO: 2205541 - RNA, 19 nt, Artificial Sequence
  Description of Artificial Sequence: Synthetic oligonucleotide
  Antisense strand to SEQ ID NO: 2205540
gaccuucaaggcuucucac

SEQ ID NO: 2205542 - RNA, 19 nt, Artificial Sequence
  Description of Artificial Sequence: Synthetic oligonucleotide
  Sense strand starting at position 3262 of SEQ ID NO: 1883625
aggugcugagauugacaca

SEQ ID NO: 2205543 - RNA, 19 nt, Artificial Sequence
  Description of Artificial Sequence: Synthetic oligonucleotide
  Antisense strand to SEQ ID NO: 2205542
ugugucaaucucagcaccu

SEQ ID NO: 2205544 - RNA, 19 nt, Artificial Sequence
  Description of Artificial Sequence: Synthetic oligonucleotide
  Sense strand starting at position 624 of SEQ ID NO: 1883625
gucaguauuuaagaaggaa

SEQ ID NO: 2205545 - RNA, 19 nt, Artificial Sequence
  Description of Artificial Sequence: Synthetic oligonucleotide
  Antisense strand to SEQ ID NO: 2205544
uuccuucuuaaauacugac

SEQ ID NO: 2205546 - RNA, 19 nt, Artificial Sequence
  Description of Artificial Sequence: Synthetic oligonucleotide
  Sense strand starting at position 3179 of SEQ ID NO: 1883625
gagagagcaguguacucuu

SEQ ID NO: 2205547 - RNA, 19 nt, Artificial Sequence
  Description of Artificial Sequence: Synthetic oligonucleotide
  Antisense strand to SEQ ID NO: 2205546
aagaguacacugcucucuc

SEQ ID NO: 2205548 - RNA, 19 nt, Artificial Sequence
  Description of Artificial Sequence: Synthetic oligonucleotide
  Sense strand starting at position 2255 of SEQ ID NO: 1883625
gguggaauucgacacugca

SEQ ID NO: 2205549 - RNA, 19 nt, Artificial Sequence
  Description of Artificial Sequence: Synthetic oligonucleotide
  Antisense strand to SEQ ID NO: 2205548
ugcagugucgaauuccacc

SEQ ID NO: 2205550 - RNA, 19 nt, Artificial Sequence
  Description of Artificial Sequence: Synthetic oligonucleotide
  Sense strand starting at position 2750 of SEQ ID NO: 1883625
agaacuagacgcugauauu

SEQ ID NO: 2205551 - RNA, 19 nt, Artificial Sequence
  Description of Artificial Sequence: Synthetic oligonucleotide
  Antisense strand to SEQ ID NO: 2205550
aauaucagcgucuaguucu

SEQ ID NO: 2205552 - RNA, 19 nt, Artificial Sequence
  Description of Artificial Sequence: Synthetic oligonucleotide
  Sense strand starting at position 3543 of SEQ ID NO: 1883625
uucucacuucucugggaua

SEQ ID NO: 2205553 - RNA, 19 nt, Artificial Sequence
  Description of Artificial Sequence: Synthetic oligonucleotide
  Antisense strand to SEQ ID NO: 2205552
uaucccagagaagugagaa

SEQ ID NO: 2205554 - RNA, 19 nt, Artificial Sequence
  Description of Artificial Sequence: Synthetic oligonucleotide
  Sense strand starting at position 3161 of SEQ ID NO: 1883625
guuguaauaaaugguauag

SEQ ID NO: 2205555 - RNA, 19 nt, Artificial Sequence
  Description of Artificial Sequence: Synthetic oligonucleotide
  Antisense strand to SEQ ID NO: 2205554
cuauaccauuuauuacaac

SEQ ID NO: 2205556 - RNA, 19 nt, Artificial Sequence
  Description of Artificial Sequence: Synthetic oligonucleotide
  Sense strand starting at position 1102 of SEQ ID NO: 1883625
aggugaggaugguugcuaa

SEQ ID NO: 2205557 - RNA, 19 nt, Artificial Sequence
  Description of Artificial Sequence: Synthetic oligonucleotide
  Antisense strand to SEQ ID NO: 2205556
uuagcaaccauccucaccu

SEQ ID NO: 2205558 - RNA, 19 nt, Artificial Sequence
  Description of Artificial Sequence: Synthetic oligonucleotide
  Sense strand starting at position 3530 of SEQ ID NO: 1883625
guguaaauauaaguucuca

SEQ ID NO: 2205559 - RNA, 19 nt, Artificial Sequence
  Description of Artificial Sequence: Synthetic oligonucleotide
  Antisense strand to SEQ ID NO: 2205558
ugagaacuuauauuuacac

SEQ ID NO: 2205560 - RNA, 19 nt, Artificial Sequence
  Description of Artificial Sequence: Synthetic oligonucleotide
  Sense strand starting at position 3770 of SEQ ID NO: 1883625
gucgugaucguuguggcuu

SEQ ID NO: 2205561 - RNA, 19 nt, Artificial Sequence
  Description of Artificial Sequence: Synthetic oligonucleotide
  Antisense strand to SEQ ID NO: 2205560
aagccacaacgaucacgac

SEQ ID NO: 2205562 - RNA, 19 nt, Artificial Sequence
  Description of Artificial Sequence: Synthetic oligonucleotide
  Sense strand starting at position 3542 of SEQ ID NO: 1883625
guucucacuucucugggau

SEQ ID NO: 2205563 - RNA, 19 nt, Artificial Sequence
  Description of Artificial Sequence: Synthetic oligonucleotide
  Antisense strand to SEQ ID NO: 2205562
aucccagagaagugagaac

SEQ ID NO: 2205564 - RNA, 19 nt, Artificial Sequence
  Description of Artificial Sequence: Synthetic oligonucleotide
  Sense strand starting at position 3758 of SEQ ID NO: 1883625
ucugauagauaugucguga

SEQ ID NO: 2205565 - RNA, 19 nt, Artificial Sequence
  Description of Artificial Sequence: Synthetic oligonucleotide
  Antisense strand to SEQ ID NO: 2205564
ucacgacauaucuaucaga

SEQ ID NO: 2205566 - RNA, 19 nt, Artificial Sequence
  Description of Artificial Sequence: Synthetic oligonucleotide
  Sense strand starting at position 3802 of SEQ ID NO: 1883625
caugauauuggacgucuuu

SEQ ID NO: 2205567 - RNA, 19 nt, Artificial Sequence
  Description of Artificial Sequence: Synthetic oligonucleotide
  Antisense strand to SEQ ID NO: 2205566
aaagacguccaauaucaug

SEQ ID NO: 2205568 - RNA, 19 nt, Artificial Sequence
  Description of Artificial Sequence: Synthetic oligonucleotide
  Sense strand starting at position 3795 of SEQ ID NO: 1883625
gcauuuccaugauauugga

SEQ ID NO: 2205569 - RNA, 19 nt, Artificial Sequence
  Description of Artificial Sequence: Synthetic oligonucleotide
  Antisense strand to SEQ ID NO: 2205568
uccaauaucauggaaaugc

SEQ ID NO: 2205570 - RNA, 19 nt, Artificial Sequence
  Description of Artificial Sequence: Synthetic oligonucleotide
  Sense strand starting at position 259 of SEQ ID NO: 1883625
gggugagcugugugagaag

SEQ ID NO: 2205571 - RNA, 19 nt, Artificial Sequence
  Description of Artificial Sequence: Synthetic oligonucleotide
  Antisense strand to SEQ ID NO: 2205570
cuucucacacagcucaccc

SEQ ID NO: 2205572 - RNA, 19 nt, Artificial Sequence
  Description of Artificial Sequence: Synthetic oligonucleotide
  Sense strand starting at position 2211 of SEQ ID NO: 1883625
agggaauggugucccuguu

SEQ ID NO: 2205573 - RNA, 19 nt, Artificial Sequence
  Description of Artificial Sequence: Synthetic oligonucleotide
  Antisense strand to SEQ ID NO: 2205572
aacagggacaccauucccu

SEQ ID NO: 2205574 - RNA, 19 nt, Artificial Sequence
  Description of Artificial Sequence: Synthetic oligonucleotide
  Sense strand starting at position 1578 of SEQ ID NO: 1883625
ggcucauucccuugaacga

SEQ ID NO: 2205575 - RNA, 19 nt, Artificial Sequence
  Description of Artificial Sequence: Synthetic oligonucleotide
  Antisense strand to SEQ ID NO: 2205574
ucguucaagggaaugagcc

SEQ ID NO: 2205576 - RNA, 19 nt, Artificial Sequence
  Description of Artificial Sequence: Synthetic oligonucleotide
  Sense strand starting at position 1937 of SEQ ID NO: 1883625
gacuguggguccuuucuca

SEQ ID NO: 2205577 - RNA, 19 nt, Artificial Sequence
  Description of Artificial Sequence: Synthetic oligonucleotide
  Antisense strand to SEQ ID NO: 2205576
ugagaaaggacccacaguc

SEQ ID NO: 2205578 - RNA, 19 nt, Artificial Sequence
  Description of Artificial Sequence: Synthetic oligonucleotide
  Sense strand starting at position 1890 of SEQ ID NO: 1883625
augguuugaugucugcaga

SEQ ID NO: 2205579 - RNA, 19 nt, Artificial Sequence
  Description of Artificial Sequence: Synthetic oligonucleotide
  Antisense strand to SEQ ID NO: 2205578
ucugcagacaucaaaccau

SEQ ID NO: 2205580 - RNA, 19 nt, Artificial Sequence
  Description of Artificial Sequence: Synthetic oligonucleotide
  Sense strand starting at position 2693 of SEQ ID NO: 1883625
uugugagguuuauuaugug

SEQ ID NO: 2205581 - RNA, 19 nt, Artificial Sequence
  Description of Artificial Sequence: Synthetic oligonucleotide
  Antisense strand to SEQ ID NO: 2205580
cacauaauaaaccucacaa

SEQ ID NO: 2205582 - RNA, 19 nt, Artificial Sequence
  Description of Artificial Sequence: Synthetic oligonucleotide
  Sense strand starting at position 1891 of SEQ ID NO: 1883625
ugguuugaugucugcagaa

SEQ ID NO: 2205583 - RNA, 19 nt, Artificial Sequence
  Description of Artificial Sequence: Synthetic oligonucleotide
  Antisense strand to SEQ ID NO: 2205582
uucugcagacaucaaacca

SEQ ID NO: 2205584 - RNA, 19 nt, Artificial Sequence
  Description of Artificial Sequence: Synthetic oligonucleotide
  Sense strand starting at position 1903 of SEQ ID NO: 1883625
ugcagaauccgccauaguu

SEQ ID NO: 2205585 - RNA, 19 nt, Artificial Sequence
  Description of Artificial Sequence: Synthetic oligonucleotide
  Antisense strand to SEQ ID NO: 2205584
aacuauggcggauucugca

SEQ ID NO: 2205586 - RNA, 19 nt, Artificial Sequence
  Description of Artificial Sequence: Synthetic oligonucleotide
  Sense strand starting at position 3763 of SEQ ID NO: 1883625
uagauaugucgugaucguu

SEQ ID NO: 2205587 - RNA, 19 nt, Artificial Sequence
  Description of Artificial Sequence: Synthetic oligonucleotide
  Antisense strand to SEQ ID NO: 2205586
aacgaucacgacauaucua

SEQ ID NO: 2205588 - RNA, 19 nt, Artificial Sequence
  Description of Artificial Sequence: Synthetic oligonucleotide
  Sense strand starting at position 2523 of SEQ ID NO: 1883625
gccuuuacuccacggacuu

SEQ ID NO: 2205589 - RNA, 19 nt, Artificial Sequence
  Description of Artificial Sequence: Synthetic oligonucleotide
  Antisense strand to SEQ ID NO: 2205588
aaguccguggaguaaaggc

SEQ ID NO: 2205590 - RNA, 19 nt, Artificial Sequence
  Description of Artificial Sequence: Synthetic oligonucleotide
  Sense strand starting at position 3587 of SEQ ID NO: 1883625
aucauuaggccaugcugua

SEQ ID NO: 2205591 - RNA, 19 nt, Artificial Sequence
  Description of Artificial Sequence: Synthetic oligonucleotide
  Antisense strand to SEQ ID NO: 2205590
uacagcauggccuaaugau

SEQ ID NO: 2205592 - RNA, 19 nt, Artificial Sequence
  Description of Artificial Sequence: Synthetic oligonucleotide
  Sense strand starting at position 1864 of SEQ ID NO: 1883625
gcaucauugcaucgugaaa

SEQ ID NO: 2205593 - RNA, 19 nt, Artificial Sequence
  Description of Artificial Sequence: Synthetic oligonucleotide
  Antisense strand to SEQ ID NO: 2205592
uuucacgaugcaaugaugc

SEQ ID NO: 2205594 - RNA, 19 nt, Artificial Sequence
  Description of Artificial Sequence: Synthetic oligonucleotide
  Sense strand starting at position 940 of SEQ ID NO: 1883625
accugcauucugugcagau

SEQ ID NO: 2205595 - RNA, 19 nt, Artificial Sequence
  Description of Artificial Sequence: Synthetic oligonucleotide
  Antisense strand to SEQ ID NO: 2205594
aucugcacagaaugcaggu

SEQ ID NO: 2205596 - RNA, 19 nt, Artificial Sequence
  Description of Artificial Sequence: Synthetic oligonucleotide
  Sense strand starting at position 941 of SEQ ID NO: 1883625
ccugcauucugugcagaug

SEQ ID NO: 2205597 - RNA, 19 nt, Artificial Sequence
  Description of Artificial Sequence: Synthetic oligonucleotide
  Antisense strand to SEQ ID NO: 2205596
caucugcacagaaugcagg

SEQ ID NO: 2205598 - RNA, 19 nt, Artificial Sequence
  Description of Artificial Sequence: Synthetic oligonucleotide
  Sense strand starting at position 3163 of SEQ ID NO: 1883625
uguaauaaaugguauagag

SEQ ID NO: 2205599 - RNA, 19 nt, Artificial Sequence
  Description of Artificial Sequence: Synthetic oligonucleotide
  Antisense strand to SEQ ID NO: 2205598
cucuauaccauuuauuaca

SEQ ID NO: 2205600 - RNA, 19 nt, Artificial Sequence
  Description of Artificial Sequence: Synthetic oligonucleotide
  Sense strand starting at position 3215 of SEQ ID NO: 1883625
ggaaaccucuuaggaaacu

SEQ ID NO: 2205601 - RNA, 19 nt, Artificial Sequence
  Description of Artificial Sequence: Synthetic oligonucleotide
  Antisense strand to SEQ ID NO: 2205600
aguuuccuaagagguuucc

SEQ ID NO: 2205602 - RNA, 19 nt, Artificial Sequence
  Description of Artificial Sequence: Synthetic oligonucleotide
  Sense strand starting at position 1953 of SEQ ID NO: 1883625
ucacgcuucucugucauca

SEQ ID NO: 2205603 - RNA, 19 nt, Artificial Sequence
  Description of Artificial Sequence: Synthetic oligonucleotide
  Antisense strand to SEQ ID NO: 2205602
ugaugacagagaagcguga

SEQ ID NO: 2205604 - RNA, 19 nt, Artificial Sequence
  Description of Artificial Sequence: Synthetic oligonucleotide
  Sense strand starting at position 539 of SEQ ID NO: 1883625
gcgcauggcuacuuuaaau

SEQ ID NO: 2205605 - RNA, 19 nt, Artificial Sequence
  Description of Artificial Sequence: Synthetic oligonucleotide
  Antisense strand to SEQ ID NO: 2205604
auuuaaaguagccaugcgc

SEQ ID NO: 2205606 - RNA, 19 nt, Artificial Sequence
  Description of Artificial Sequence: Synthetic oligonucleotide
  Sense strand starting at position 3419 of SEQ ID NO: 1883625
uuucgaugaucuuagauaa

SEQ ID NO: 2205607 - RNA, 19 nt, Artificial Sequence
  Description of Artificial Sequence: Synthetic oligonucleotide
  Antisense strand to SEQ ID NO: 2205606
uuaucuaagaucaucgaaa

SEQ ID NO: 2205608 - RNA, 19 nt, Artificial Sequence
  Description of Artificial Sequence: Synthetic oligonucleotide
  Sense strand starting at position 3216 of SEQ ID NO: 1883626
agauauggucuuuacaucu

SEQ ID NO: 2205609 - RNA, 19 nt, Artificial Sequence
  Description of Artificial Sequence: Synthetic oligonucleotide
  Antisense strand to SEQ ID NO: 2205608
agauguaaagaccauaucu

SEQ ID NO: 2205610 - RNA, 19 nt, Artificial Sequence
  Description of Artificial Sequence: Synthetic oligonucleotide
  Sense strand starting at position 2983 of SEQ ID NO: 1883626
uggcaugguacuuagaaca

SEQ ID NO: 2205611 - RNA, 19 nt, Artificial Sequence
  Description of Artificial Sequence: Synthetic oligonucleotide
  Antisense strand to SEQ ID NO: 2205610
uguucuaaguaccaugcca

SEQ ID NO: 2205612 - RNA, 19 nt, Artificial Sequence
  Description of Artificial Sequence: Synthetic oligonucleotide
  Sense strand starting at position 2692 of SEQ ID NO: 1883626
agacuuucuguugaguaga

SEQ ID NO: 2205613 - RNA, 19 nt, Artificial Sequence
  Description of Artificial Sequence: Synthetic oligonucleotide
  Antisense strand to SEQ ID NO: 2205612
ucuacucaacagaaagucu

SEQ ID NO: 2205614 - RNA, 19 nt, Artificial Sequence
  Description of Artificial Sequence: Synthetic oligonucleotide
  Sense strand starting at position 1144 of SEQ ID NO: 1883626
gauguuugacaacaugguu

SEQ ID NO: 2205615 - RNA, 19 nt, Artificial Sequence
  Description of Artificial Sequence: Synthetic oligonucleotide
  Antisense strand to SEQ ID NO: 2205614
aaccauguugucaaacauc

SEQ ID NO: 2205616 - RNA, 19 nt, Artificial Sequence
  Description of Artificial Sequence: Synthetic oligonucleotide
  Sense strand starting at position 3622 of SEQ ID NO: 1883626
uucuauguccgggaagaau

SEQ ID NO: 2205617 - RNA, 19 nt, Artificial Sequence
  Description of Artificial Sequence: Synthetic oligonucleotide
  Antisense strand to SEQ ID NO: 2205616
auucuucccggacauagaa

SEQ ID NO: 2205618 - RNA, 19 nt, Artificial Sequence
  Description of Artificial Sequence: Synthetic oligonucleotide
  Sense strand starting at position 2616 of SEQ ID NO: 1883626
gggaggaucuggguguaga

SEQ ID NO: 2205619 - RNA, 19 nt, Artificial Sequence
  Description of Artificial Sequence: Synthetic oligonucleotide
  Antisense strand to SEQ ID NO: 2205618
ucuacacccagauccuccc

SEQ ID NO: 2205620 - RNA, 19 nt, Artificial Sequence
  Description of Artificial Sequence: Synthetic oligonucleotide
  Sense strand starting at position 251 of SEQ ID NO: 1883626
agaaguuaucacugauacu

SEQ ID NO: 2205621 - RNA, 19 nt, Artificial Sequence
  Description of Artificial Sequence: Synthetic oligonucleotide
  Antisense strand to SEQ ID NO: 2205620
aguaucagugauaacuucu

SEQ ID NO: 2205622 - RNA, 19 nt, Artificial Sequence
  Description of Artificial Sequence: Synthetic oligonucleotide
  Sense strand starting at position 532 of SEQ ID NO: 1883626
ucuacuuggcauuauugaa

SEQ ID NO: 2205623 - RNA, 19 nt, Artificial Sequence
  Description of Artificial Sequence: Synthetic oligonucleotide
  Antisense strand to SEQ ID NO: 2205622
uucaauaaugccaaguaga

SEQ ID NO: 2205624 - RNA, 19 nt, Artificial Sequence
  Description of Artificial Sequence: Synthetic oligonucleotide
  Sense strand starting at position 193 of SEQ ID NO: 1883626
cuggaauaugcaugaauca

SEQ ID NO: 2205625 - RNA, 19 nt, Artificial Sequence
  Description of Artificial Sequence: Synthetic oligonucleotide
  Antisense strand to SEQ ID NO: 2205624
ugauucaugcauauuccag

SEQ ID NO: 2205626 - RNA, 19 nt, Artificial Sequence
  Description of Artificial Sequence: Synthetic oligonucleotide
  Sense strand starting at position 3796 of SEQ ID NO: 1883626
cugguaaaugcugaccuaa

SEQ ID NO: 2205627 - RNA, 19 nt, Artificial Sequence
  Description of Artificial Sequence: Synthetic oligonucleotide
  Antisense strand to SEQ ID NO: 2205626
uuaggucagcauuuaccag

SEQ ID NO: 2205628 - RNA, 19 nt, Artificial Sequence
  Description of Artificial Sequence: Synthetic oligonucleotide
  Sense strand starting at position 1418 of SEQ ID NO: 1883626
ccgguaugggaguaaugac

SEQ ID NO: 2205629 - RNA, 19 nt, Artificial Sequence
  Description of Artificial Sequence: Synthetic oligonucleotide
  Antisense strand to SEQ ID NO: 2205628
gucauuacucccauaccgg

SEQ ID NO: 2205630 - RNA, 19 nt, Artificial Sequence
  Description of Artificial Sequence: Synthetic oligonucleotide
  Sense strand starting at position 182 of SEQ ID NO: 1883626
gggaaagccagcuggaaua

SEQ ID NO: 2205631 - RNA, 19 nt, Artificial Sequence
  Description of Artificial Sequence: Synthetic oligonucleotide
  Antisense strand to SEQ ID NO: 2205630
uauuccagcuggcuuuccc

SEQ ID NO: 2205632 - RNA, 19 nt, Artificial Sequence
  Description of Artificial Sequence: Synthetic oligonucleotide
  Sense strand starting at position 2617 of SEQ ID NO: 1883626
ggaggaucuggguguagac

SEQ ID NO: 2205633 - RNA, 19 nt, Artificial Sequence
  Description of Artificial Sequence: Synthetic oligonucleotide
  Antisense strand to SEQ ID NO: 2205632
gucuacacccagauccucc

SEQ ID NO: 2205634 - RNA, 19 nt, Artificial Sequence
  Description of Artificial Sequence: Synthetic oligonucleotide
  Sense strand starting at position 1387 of SEQ ID NO: 1883626
agaagccuccugcaauaca

SEQ ID NO: 2205635 - RNA, 19 nt, Artificial Sequence
  Description of Artificial Sequence: Synthetic oligonucleotide
  Antisense strand to SEQ ID NO: 2205634
uguauugcaggaggcuucu

SEQ ID NO: 2205636 - RNA, 19 nt, Artificial Sequence
  Description of Artificial Sequence: Synthetic oligonucleotide
  Sense strand starting at position 2885 of SEQ ID NO: 1883626
ucgugcauuuaaucaaagu

SEQ ID NO: 2205637 - RNA, 19 nt, Artificial Sequence
  Description of Artificial Sequence: Synthetic oligonucleotide
  Antisense strand to SEQ ID NO: 2205636
acuuugauuaaaugcacga

SEQ ID NO: 2205638 - RNA, 19 nt, Artificial Sequence
  Description of Artificial Sequence: Synthetic oligonucleotide
  Sense strand starting at position 2498 of SEQ ID NO: 1883626
gggaaaggguuugcuuaga

SEQ ID NO: 2205639 - RNA, 19 nt, Artificial Sequence
  Description of Artificial Sequence: Synthetic oligonucleotide
  Antisense strand to SEQ ID NO: 2205638
ucuaagcaaacccuuuccc

SEQ ID NO: 2205640 - RNA, 19 nt, Artificial Sequence
  Description of Artificial Sequence: Synthetic oligonucleotide
  Sense strand starting at position 1137 of SEQ ID NO: 1883626
ggcauaagauguuugacaa

SEQ ID NO: 2205641 - RNA, 19 nt, Artificial Sequence
  Description of Artificial Sequence: Synthetic oligonucleotide
  Antisense strand to SEQ ID NO: 2205640
uugucaaacaucuuaugcc

SEQ ID NO: 2205642 - RNA, 19 nt, Artificial Sequence
  Description of Artificial Sequence: Synthetic oligonucleotide
  Sense strand starting at position 1354 of SEQ ID NO: 1883626
ggucacuuccauuaaaguu

SEQ ID NO: 2205643 - RNA, 19 nt, Artificial Sequence
  Description of Artificial Sequence: Synthetic oligonucleotide
  Antisense strand to SEQ ID NO: 2205642
aacuuuaauggaagugacc

SEQ ID NO: 2205644 - RNA, 19 nt, Artificial Sequence
  Description of Artificial Sequence: Synthetic oligonucleotide
  Sense strand starting at position 2679 of SEQ ID NO: 1883626
gaacaucgucuuuagacuu

SEQ ID NO: 2205645 - RNA, 19 nt, Artificial Sequence
  Description of Artificial Sequence: Synthetic oligonucleotide
  Antisense strand to SEQ ID NO: 2205644
aagucuaaagacgauguuc

SEQ ID NO: 2205646 - RNA, 19 nt, Artificial Sequence
  Description of Artificial Sequence: Synthetic oligonucleotide
  Sense strand starting at position 3409 of SEQ ID NO: 1883626
uacaguagugaguauccau

SEQ ID NO: 2205647 - RNA, 19 nt, Artificial Sequence
  Description of Artificial Sequence: Synthetic oligonucleotide
  Antisense strand to SEQ ID NO: 2205646
auggauacucacuacugua

SEQ ID NO: 2205648 - RNA, 19 nt, Artificial Sequence
  Description of Artificial Sequence: Synthetic oligonucleotide
  Sense strand starting at position 3683 of SEQ ID NO: 1883626
aggccuguaguugaacaua

SEQ ID NO: 2205649 - RNA, 19 nt, Artificial Sequence
  Description of Artificial Sequence: Synthetic oligonucleotide
  Antisense strand to SEQ ID NO: 2205648
uauguucaacuacaggccu

SEQ ID NO: 2205650 - RNA, 19 nt, Artificial Sequence
  Description of Artificial Sequence: Synthetic oligonucleotide
  Sense strand starting at position 3960 of SEQ ID NO: 1883626
gcuggagguccauacuauc

SEQ ID NO: 2205651 - RNA, 19 nt, Artificial Sequence
  Description of Artificial Sequence: Synthetic oligonucleotide
  Antisense strand to SEQ ID NO: 2205650
gauaguauggaccuccagc

SEQ ID NO: 2205652 - RNA, 19 nt, Artificial Sequence
  Description of Artificial Sequence: Synthetic oligonucleotide
  Sense strand starting at position 3454 of SEQ ID NO: 1883626
ggcuguaauggaugaacau

SEQ ID NO: 2205653 - RNA, 19 nt, Artificial Sequence
  Description of Artificial Sequence: Synthetic oligonucleotide
  Antisense strand to SEQ ID NO: 2205652
auguucauccauuacagcc

SEQ ID NO: 2205654 - RNA, 19 nt, Artificial Sequence
  Description of Artificial Sequence: Synthetic oligonucleotide
  Sense strand starting at position 2850 of SEQ ID NO: 1883626
ucauuccgacauugaaacu

SEQ ID NO: 2205655 - RNA, 19 nt, Artificial Sequence
  Description of Artificial Sequence: Synthetic oligonucleotide
  Antisense strand to SEQ ID NO: 2205654
aguuucaaugucggaauga

SEQ ID NO: 2205656 - RNA, 19 nt, Artificial Sequence
  Description of Artificial Sequence: Synthetic oligonucleotide
  Sense strand starting at position 2847 of SEQ ID NO: 1883626
gccucauuccgacauugaa

SEQ ID NO: 2205657 - RNA, 19 nt, Artificial Sequence
  Description of Artificial Sequence: Synthetic oligonucleotide
  Antisense strand to SEQ ID NO: 2205656
uucaaugucggaaugaggc

SEQ ID NO: 2205658 - RNA, 19 nt, Artificial Sequence
  Description of Artificial Sequence: Synthetic oligonucleotide
  Sense strand starting at position 1138 of SEQ ID NO: 1883626
gcauaagauguuugacaac

SEQ ID NO: 2205659 - RNA, 19 nt, Artificial Sequence
  Description of Artificial Sequence: Synthetic oligonucleotide
  Antisense strand to SEQ ID NO: 2205658
guugucaaacaucuuaugc

SEQ ID NO: 2205660 - RNA, 19 nt, Artificial Sequence
  Description of Artificial Sequence: Synthetic oligonucleotide
  Sense strand starting at position 3798 of SEQ ID NO: 1883626
gguaaaugcugaccuaaug

SEQ ID NO: 2205661 - RNA, 19 nt, Artificial Sequence
  Description of Artificial Sequence: Synthetic oligonucleotide
  Antisense strand to SEQ ID NO: 2205660
cauuaggucagcauuuacc

SEQ ID NO: 2205662 - RNA, 19 nt, Artificial Sequence
  Description of Artificial Sequence: Synthetic oligonucleotide
  Sense strand starting at position 39 of SEQ ID NO: 1883626
aagugaccugcucaaaguu

SEQ ID NO: 2205663 - RNA, 19 nt, Artificial Sequence
  Description of Artificial Sequence: Synthetic oligonucleotide
  Antisense strand to SEQ ID NO: 2205662
aacuuugagcaggucacuu

SEQ ID NO: 2205664 - RNA, 19 nt, Artificial Sequence
  Description of Artificial Sequence: Synthetic oligonucleotide
  Sense strand starting at position 1340 of SEQ ID NO: 1883626
gaagaucuguaccugguca

SEQ ID NO: 2205665 - RNA, 19 nt, Artificial Sequence
  Description of Artificial Sequence: Synthetic oligonucleotide
  Antisense strand to SEQ ID NO: 2205664
ugaccagguacagaucuuc

SEQ ID NO: 2205666 - RNA, 19 nt, Artificial Sequence
  Description of Artificial Sequence: Synthetic oligonucleotide
  Sense strand starting at position 2742 of SEQ ID NO: 1883626
gcucuuuggagaggugaga

SEQ ID NO: 2205667 - RNA, 19 nt, Artificial Sequence
  Description of Artificial Sequence: Synthetic oligonucleotide
  Antisense strand to SEQ ID NO: 2205666
ucucaccucuccaaagagc

SEQ ID NO: 2205668 - RNA, 19 nt, Artificial Sequence
  Description of Artificial Sequence: Synthetic oligonucleotide
  Sense strand starting at position 1326 of SEQ ID NO: 1883626
ccuuccuugcuguagaaga

SEQ ID NO: 2205669 - RNA, 19 nt, Artificial Sequence
  Description of Artificial Sequence: Synthetic oligonucleotide
  Antisense strand to SEQ ID NO: 2205668
ucuucuacagcaaggaagg

SEQ ID NO: 2205670 - RNA, 19 nt, Artificial Sequence
  Description of Artificial Sequence: Synthetic oligonucleotide
  Sense strand starting at position 3810 of SEQ ID NO: 1883626
ccuaauguggauuguugaa

SEQ ID NO: 2205671 - RNA, 19 nt, Artificial Sequence
  Description of Artificial Sequence: Synthetic oligonucleotide
  Antisense strand to SEQ ID NO: 2205670
uucaacaauccacauuagg

SEQ ID NO: 2205672 - RNA, 19 nt, Artificial Sequence
  Description of Artificial Sequence: Synthetic oligonucleotide
  Sense strand starting at position 3621 of SEQ ID NO: 1883626
cuucuauguccgggaagaa

SEQ ID NO: 2205673 - RNA, 19 nt, Artificial Sequence
  Description of Artificial Sequence: Synthetic oligonucleotide
  Antisense strand to SEQ ID NO: 2205672
uucuucccggacauagaag

SEQ ID NO: 2205674 - RNA, 19 nt, Artificial Sequence
  Description of Artificial Sequence: Synthetic oligonucleotide
  Sense strand starting at position 3370 of SEQ ID NO: 1883626
ucugaugaauuguuacuuu

SEQ ID NO: 2205675 - RNA, 19 nt, Artificial Sequence
  Description of Artificial Sequence: Synthetic oligonucleotide
  Antisense strand to SEQ ID NO: 2205674
aaaguaacaauucaucaga

SEQ ID NO: 2205676 - RNA, 19 nt, Artificial Sequence
  Description of Artificial Sequence: Synthetic oligonucleotide
  Sense strand starting at position 676 of SEQ ID NO: 1883626
uugguuauuggucaaguau

SEQ ID NO: 2205677 - RNA, 19 nt, Artificial Sequence
  Description of Artificial Sequence: Synthetic oligonucleotide
  Antisense strand to SEQ ID NO: 2205676
auacuugaccaauaaccaa

SEQ ID NO: 2205678 - RNA, 19 nt, Artificial Sequence
  Description of Artificial Sequence: Synthetic oligonucleotide
  Sense strand starting at position 2678 of SEQ ID NO: 1883626
ggaacaucgucuuuagacu

SEQ ID NO: 2205679 - RNA, 19 nt, Artificial Sequence
  Description of Artificial Sequence: Synthetic oligonucleotide
  Antisense strand to SEQ ID NO: 2205678
agucuaaagacgauguucc

SEQ ID NO: 2205680 - RNA, 19 nt, Artificial Sequence
  Description of Artificial Sequence: Synthetic oligonucleotide
  Sense strand starting at position 84 of SEQ ID NO: 1883626
cugucuuccuacuuaggga

SEQ ID NO: 2205681 - RNA, 19 nt, Artificial Sequence
  Description of Artificial Sequence: Synthetic oligonucleotide
  Antisense strand to SEQ ID NO: 2205680
ucccuaaguaggaagacag

SEQ ID NO: 2205682 - RNA, 19 nt, Artificial Sequence
  Description of Artificial Sequence: Synthetic oligonucleotide
  Sense strand starting at position 48 of SEQ ID NO: 1883626
gcucaaaguuaaccaguaa

SEQ ID NO: 2205683 - RNA, 19 nt, Artificial Sequence
  Description of Artificial Sequence: Synthetic oligonucleotide
  Antisense strand to SEQ ID NO: 2205682
uuacugguuaacuuugagc

SEQ ID NO: 2205684 - RNA, 19 nt, Artificial Sequence
  Description of Artificial Sequence: Synthetic oligonucleotide
  Sense strand starting at position 609 of SEQ ID NO: 1883626
auaagucucugcucuaaag

SEQ ID NO: 2205685 - RNA, 19 nt, Artificial Sequence
  Description of Artificial Sequence: Synthetic oligonucleotide
  Antisense strand to SEQ ID NO: 2205684
cuuuagagcagagacuuau

SEQ ID NO: 2205686 - RNA, 19 nt, Artificial Sequence
  Description of Artificial Sequence: Synthetic oligonucleotide
  Sense strand starting at position 685 of SEQ ID NO: 1883626
ggucaaguauuccucauac

SEQ ID NO: 2205687 - RNA, 19 nt, Artificial Sequence
  Description of Artificial Sequence: Synthetic oligonucleotide
  Antisense strand to SEQ ID NO: 2205686
guaugaggaauacuugacc

SEQ ID NO: 2205688 - RNA, 19 nt, Artificial Sequence
  Description of Artificial Sequence: Synthetic oligonucleotide
  Sense strand starting at position 3453 of SEQ ID NO: 1883627
augagauaauguuuaccag

SEQ ID NO: 2205689 - RNA, 19 nt, Artificial Sequence
  Description of Artificial Sequence: Synthetic oligonucleotide
  Antisense strand to SEQ ID NO: 2205688
cugguaaacauuaucucau

SEQ ID NO: 2205690 - RNA, 19 nt, Artificial Sequence
  Description of Artificial Sequence: Synthetic oligonucleotide
  Sense strand starting at position 1207 of SEQ ID NO: 1883627
uuacuaugaccuuaggcaa

SEQ ID NO: 2205691 - RNA, 19 nt, Artificial Sequence
  Description of Artificial Sequence: Synthetic oligonucleotide
  Antisense strand to SEQ ID NO: 2205690
uugccuaaggucauaguaa

SEQ ID NO: 2205692 - RNA, 19 nt, Artificial Sequence
  Description of Artificial Sequence: Synthetic oligonucleotide
  Sense strand starting at position 3686 of SEQ ID NO: 1883627
cagggaauguggguagaau

SEQ ID NO: 2205693 - RNA, 19 nt, Artificial Sequence
  Description of Artificial Sequence: Synthetic oligonucleotide
  Antisense strand to SEQ ID NO: 2205692
auucuacccacauucccug

SEQ ID NO: 2205694 - RNA, 19 nt, Artificial Sequence
  Description of Artificial Sequence: Synthetic oligonucleotide
  Sense strand starting at position 3454 of SEQ ID NO: 1883627
ugagauaauguuuaccagu

SEQ ID NO: 2205695 - RNA, 19 nt, Artificial Sequence
  Description of Artificial Sequence: Synthetic oligonucleotide
  Antisense strand to SEQ ID NO: 2205694
acugguaaacauuaucuca

SEQ ID NO: 2205696 - RNA, 19 nt, Artificial Sequence
  Description of Artificial Sequence: Synthetic oligonucleotide
  Sense strand starting at position 318 of SEQ ID NO: 1883627
ugcugugaucagucacguu

SEQ ID NO: 2205697 - RNA, 19 nt, Artificial Sequence
  Description of Artificial Sequence: Synthetic oligonucleotide
  Antisense strand to SEQ ID NO: 2205696
aacgugacugaucacagca

SEQ ID NO: 2205698 - RNA, 19 nt, Artificial Sequence
  Description of Artificial Sequence: Synthetic oligonucleotide
  Sense strand starting at position 204 of SEQ ID NO: 1883627
gaauguuugcuccaaagag

SEQ ID NO: 2205699 - RNA, 19 nt, Artificial Sequence
  Description of Artificial Sequence: Synthetic oligonucleotide
  Antisense strand to SEQ ID NO: 2205698
cucuuuggagcaaacauuc

SEQ ID NO: 2205700 - RNA, 19 nt, Artificial Sequence
  Description of Artificial Sequence: Synthetic oligonucleotide
  Sense strand starting at position 3523 of SEQ ID NO: 1883627
uagggaguuaauggcagaa

SEQ ID NO: 2205701 - RNA, 19 nt, Artificial Sequence
  Description of Artificial Sequence: Synthetic oligonucleotide
  Antisense strand to SEQ ID NO: 2205700
uucugccauuaacucccua

SEQ ID NO: 2205702 - RNA, 19 nt, Artificial Sequence
  Description of Artificial Sequence: Synthetic oligonucleotide
  Sense strand starting at position 3982 of SEQ ID NO: 1883627
ccugcuauauuucugaguu

SEQ ID NO: 2205703 - RNA, 19 nt, Artificial Sequence
  Description of Artificial Sequence: Synthetic oligonucleotide
  Antisense strand to SEQ ID NO: 2205702
aacucagaaauauagcagg

SEQ ID NO: 2205704 - RNA, 19 nt, Artificial Sequence
  Description of Artificial Sequence: Synthetic oligonucleotide
  Sense strand starting at position 100 of SEQ ID NO: 1883627
ugcacaauuugguuucuuu

SEQ ID NO: 2205705 - RNA, 19 nt, Artificial Sequence
  Description of Artificial Sequence: Synthetic oligonucleotide
  Antisense strand to SEQ ID NO: 2205704
aaagaaaccaaauugugca

SEQ ID NO: 2205706 - RNA, 19 nt, Artificial Sequence
  Description of Artificial Sequence: Synthetic oligonucleotide
  Sense strand starting at position 746 of SEQ ID NO: 1883627
ugguauaagauguauguga

SEQ ID NO: 2205707 - RNA, 19 nt, Artificial Sequence
  Description of Artificial Sequence: Synthetic oligonucleotide
  Antisense strand to SEQ ID NO: 2205706
ucacauacaucuuauacca

SEQ ID NO: 2205708 - RNA, 19 nt, Artificial Sequence
  Description of Artificial Sequence: Synthetic oligonucleotide
  Sense strand starting at position 1220 of SEQ ID NO: 1883627
aggcaagaugccuaaaccu

SEQ ID NO: 2205709 - RNA, 19 nt, Artificial Sequence
  Description of Artificial Sequence: Synthetic oligonucleotide
  Antisense strand to SEQ ID NO: 2205708
agguuuaggcaucuugccu

SEQ ID NO: 2205710 - RNA, 19 nt, Artificial Sequence
  Description of Artificial Sequence: Synthetic oligonucleotide
  Sense strand starting at position 3599 of SEQ ID NO: 1883627
ccacuuugugauuauugau

SEQ ID NO: 2205711 - RNA, 19 nt, Artificial Sequence
  Description of Artificial Sequence: Synthetic oligonucleotide
  Antisense strand to SEQ ID NO: 2205710
aucaauaaucacaaagugg

SEQ ID NO: 2205712 - RNA, 19 nt, Artificial Sequence
  Description of Artificial Sequence: Synthetic oligonucleotide
  Sense strand starting at position 2571 of SEQ ID NO: 1883627
cgcuauacugcgccauaau

SEQ ID NO: 2205713 - RNA, 19 nt, Artificial Sequence
  Description of Artificial Sequence: Synthetic oligonucleotide
  Antisense strand to SEQ ID NO: 2205712
auuauggcgcaguauagcg

SEQ ID NO: 2205714 - RNA, 19 nt, Artificial Sequence
  Description of Artificial Sequence: Synthetic oligonucleotide
  Sense strand starting at position 344 of SEQ ID NO: 1883627
agaagucuagagugacauc

SEQ ID NO: 2205715 - RNA, 19 nt, Artificial Sequence
  Description of Artificial Sequence: Synthetic oligonucleotide
  Antisense strand to SEQ ID NO: 2205714
gaugucacucuagacuucu

SEQ ID NO: 2205716 - RNA, 19 nt, Artificial Sequence
  Description of Artificial Sequence: Synthetic oligonucleotide
  Sense strand starting at position 2366 of SEQ ID NO: 1883627
acacgauuccgagagcaag

SEQ ID NO: 2205717 - RNA, 19 nt, Artificial Sequence
  Description of Artificial Sequence: Synthetic oligonucleotide
  Antisense strand to SEQ ID NO: 2205716
cuugcucucggaaucgugu

SEQ ID NO: 2205718 - RNA, 19 nt, Artificial Sequence
  Description of Artificial Sequence: Synthetic oligonucleotide
  Sense strand starting at position 3380 of SEQ ID NO: 1883627
agccguaaauuuccucauu

SEQ ID NO: 2205719 - RNA, 19 nt, Artificial Sequence
  Description of Artificial Sequence: Synthetic oligonucleotide
  Antisense strand to SEQ ID NO: 2205718
aaugaggaaauuuacggcu

SEQ ID NO: 2205720 - RNA, 19 nt, Artificial Sequence
  Description of Artificial Sequence: Synthetic oligonucleotide
  Sense strand starting at position 3381 of SEQ ID NO: 1883627
gccguaaauuuccucauua

SEQ ID NO: 2205721 - RNA, 19 nt, Artificial Sequence
  Description of Artificial Sequence: Synthetic oligonucleotide
  Antisense strand to SEQ ID NO: 2205720
uaaugaggaaauuuacggc

SEQ ID NO: 2205722 - RNA, 19 nt, Artificial Sequence
  Description of Artificial Sequence: Synthetic oligonucleotide
  Sense strand starting at position 1210 of SEQ ID NO: 1883627
cuaugaccuuaggcaagau

SEQ ID NO: 2205723 - RNA, 19 nt, Artificial Sequence
  Description of Artificial Sequence: Synthetic oligonucleotide
  Antisense strand to SEQ ID NO: 2205722
aucuugccuaaggucauag

SEQ ID NO: 2205724 - RNA, 19 nt, Artificial Sequence
  Description of Artificial Sequence: Synthetic oligonucleotide
  Sense strand starting at position 3513 of SEQ ID NO: 1883627
cuagguaacauagggaguu

SEQ ID NO: 2205725 - RNA, 19 nt, Artificial Sequence
  Description of Artificial Sequence: Synthetic oligonucleotide
  Antisense strand to SEQ ID NO: 2205724
aacucccuauguuaccuag

SEQ ID NO: 2205726 - RNA, 19 nt, Artificial Sequence
  Description of Artificial Sequence: Synthetic oligonucleotide
  Sense strand starting at position 2515 of SEQ ID NO: 1883627
cuaccaaacguuugaaaga

SEQ ID NO: 2205727 - RNA, 19 nt, Artificial Sequence
  Description of Artificial Sequence: Synthetic oligonucleotide
  Antisense strand to SEQ ID NO: 2205726
ucuuucaaacguuugguag

SEQ ID NO: 2205728 - RNA, 19 nt, Artificial Sequence
  Description of Artificial Sequence: Synthetic oligonucleotide
  Sense strand starting at position 218 of SEQ ID NO: 1883627
aagagauaugggugcuuga

SEQ ID NO: 2205729 - RNA, 19 nt, Artificial Sequence
  Description of Artificial Sequence: Synthetic oligonucleotide
  Antisense strand to SEQ ID NO: 2205728
ucaagcacccauaucucuu

SEQ ID NO: 2205730 - RNA, 19 nt, Artificial Sequence
  Description of Artificial Sequence: Synthetic oligonucleotide
  Sense strand starting at position 2522 of SEQ ID NO: 1883627
acguuugaaagacgaugaa

SEQ ID NO: 2205731 - RNA, 19 nt, Artificial Sequence
  Description of Artificial Sequence: Synthetic oligonucleotide
  Antisense strand to SEQ ID NO: 2205730
uucaucgucuuucaaacgu

SEQ ID NO: 2205732 - RNA, 19 nt, Artificial Sequence
  Description of Artificial Sequence: Synthetic oligonucleotide
  Sense strand starting at position 676 of SEQ ID NO: 1883627
uagugacugccuuauugga

SEQ ID NO: 2205733 - RNA, 19 nt, Artificial Sequence
  Description of Artificial Sequence: Synthetic oligonucleotide
  Antisense strand to SEQ ID NO: 2205732
uccaauaaggcagucacua

SEQ ID NO: 2205734 - RNA, 19 nt, Artificial Sequence
  Description of Artificial Sequence: Synthetic oligonucleotide
  Sense strand starting at position 3030 of SEQ ID NO: 1883627
caguucucucuggaggcaa

SEQ ID NO: 2205735 - RNA, 19 nt, Artificial Sequence
  Description of Artificial Sequence: Synthetic oligonucleotide
  Antisense strand to SEQ ID NO: 2205734
uugccuccagagagaacug

SEQ ID NO: 2205736 - RNA, 19 nt, Artificial Sequence
  Description of Artificial Sequence: Synthetic oligonucleotide
  Sense strand starting at position 278 of SEQ ID NO: 1883627
guauccaaucuguauaucu

SEQ ID NO: 2205737 - RNA, 19 nt, Artificial Sequence
  Description of Artificial Sequence: Synthetic oligonucleotide
  Antisense strand to SEQ ID NO: 2205736
agauauacagauuggauac

SEQ ID NO: 2205738 - RNA, 19 nt, Artificial Sequence
  Description of Artificial Sequence: Synthetic oligonucleotide
  Sense strand starting at position 202 of SEQ ID NO: 1883627
gagaauguuugcuccaaag

SEQ ID NO: 2205739 - RNA, 19 nt, Artificial Sequence
  Description of Artificial Sequence: Synthetic oligonucleotide
  Antisense strand to SEQ ID NO: 2205738
cuuuggagcaaacauucuc

SEQ ID NO: 2205740 - RNA, 19 nt, Artificial Sequence
  Description of Artificial Sequence: Synthetic oligonucleotide
  Sense strand starting at position 3423 of SEQ ID NO: 1883627
ugauaccuuccaugagguu

SEQ ID NO: 2205741 - RNA, 19 nt, Artificial Sequence
  Description of Artificial Sequence: Synthetic oligonucleotide
  Antisense strand to SEQ ID NO: 2205740
aaccucauggaagguauca

SEQ ID NO: 2205742 - RNA, 19 nt, Artificial Sequence
  Description of Artificial Sequence: Synthetic oligonucleotide
  Sense strand starting at position 750 of SEQ ID NO: 1883627
auaagauguaugugaaugu

SEQ ID NO: 2205743 - RNA, 19 nt, Artificial Sequence
  Description of Artificial Sequence: Synthetic oligonucleotide
  Antisense strand to SEQ ID NO: 2205742
acauucacauacaucuuau

SEQ ID NO: 2205744 - RNA, 19 nt, Artificial Sequence
  Description of Artificial Sequence: Synthetic oligonucleotide
  Sense strand starting at position 748 of SEQ ID NO: 1883627
guauaagauguaugugaau

SEQ ID NO: 2205745 - RNA, 19 nt, Artificial Sequence
  Description of Artificial Sequence: Synthetic oligonucleotide
  Antisense strand to SEQ ID NO: 2205744
auucacauacaucuuauac

SEQ ID NO: 2205746 - RNA, 19 nt, Artificial Sequence
  Description of Artificial Sequence: Synthetic oligonucleotide
  Sense strand starting at position 2484 of SEQ ID NO: 1883627
ugcgaaaugaguuaacagu

SEQ ID NO: 2205747 - RNA, 19 nt, Artificial Sequence
  Description of Artificial Sequence: Synthetic oligonucleotide
  Antisense strand to SEQ ID NO: 2205746
acuguuaacucauuucgca

SEQ ID NO: 2205748 - RNA, 19 nt, Artificial Sequence
  Description of Artificial Sequence: Synthetic oligonucleotide
  Sense strand starting at position 116 of SEQ ID NO: 1883627
uuuguuaugagagguccaa

SEQ ID NO: 2205749 - RNA, 19 nt, Artificial Sequence
  Description of Artificial Sequence: Synthetic oligonucleotide
  Antisense strand to SEQ ID NO: 2205748
uuggaccucucauaacaaa

SEQ ID NO: 2205750 - RNA, 19 nt, Artificial Sequence
  Description of Artificial Sequence: Synthetic oligonucleotide
  Sense strand starting at position 728 of SEQ ID NO: 1883627
aagcuuauuggacaguguu

SEQ ID NO: 2205751 - RNA, 19 nt, Artificial Sequence
  Description of Artificial Sequence: Synthetic oligonucleotide
  Antisense strand to SEQ ID NO: 2205750
aacacuguccaauaagcuu

SEQ ID NO: 2205752 - RNA, 19 nt, Artificial Sequence
  Description of Artificial Sequence: Synthetic oligonucleotide
  Sense strand starting at position 777 of SEQ ID NO: 1883627
gcauguauggcuuaggaac

SEQ ID NO: 2205753 - RNA, 19 nt, Artificial Sequence
  Description of Artificial Sequence: Synthetic oligonucleotide
  Antisense strand to SEQ ID NO: 2205752
guuccuaagccauacaugc

SEQ ID NO: 2205754 - RNA, 19 nt, Artificial Sequence
  Description of Artificial Sequence: Synthetic oligonucleotide
  Sense strand starting at position 3598 of SEQ ID NO: 1883627
cccacuuugugauuauuga

SEQ ID NO: 2205755 - RNA, 19 nt, Artificial Sequence
  Description of Artificial Sequence: Synthetic oligonucleotide
  Antisense strand to SEQ ID NO: 2205754
ucaauaaucacaaaguggg

SEQ ID NO: 2205756 - RNA, 19 nt, Artificial Sequence
  Description of Artificial Sequence: Synthetic oligonucleotide
  Sense strand starting at position 201 of SEQ ID NO: 1883627
ugagaauguuugcuccaaa

SEQ ID NO: 2205757 - RNA, 19 nt, Artificial Sequence
  Description of Artificial Sequence: Synthetic oligonucleotide
  Antisense strand to SEQ ID NO: 2205756
uuuggagcaaacauucuca

SEQ ID NO: 2205758 - RNA, 19 nt, Artificial Sequence
  Description of Artificial Sequence: Synthetic oligonucleotide
  Sense strand starting at position 736 of SEQ ID NO: 1883627
uggacaguguugguauaag

SEQ ID NO: 2205759 - RNA, 19 nt, Artificial Sequence
  Description of Artificial Sequence: Synthetic oligonucleotide
  Antisense strand to SEQ ID NO: 2205758
cuuauaccaacacugucca

SEQ ID NO: 2205760 - RNA, 19 nt, Artificial Sequence
  Description of Artificial Sequence: Synthetic oligonucleotide
  Sense strand starting at position 1185 of SEQ ID NO: 1883627
guugaaauccuaugacagc

SEQ ID NO: 2205761 - RNA, 19 nt, Artificial Sequence
  Description of Artificial Sequence: Synthetic oligonucleotide
  Antisense strand to SEQ ID NO: 2205760
gcugucauaggauuucaac

SEQ ID NO: 2205762 - RNA, 19 nt, Artificial Sequence
  Description of Artificial Sequence: Synthetic oligonucleotide
  Sense strand starting at position 1155 of SEQ ID NO: 1883627
aggauaacuugugcucuga

SEQ ID NO: 2205763 - RNA, 19 nt, Artificial Sequence
  Description of Artificial Sequence: Synthetic oligonucleotide
  Antisense strand to SEQ ID NO: 2205762
ucagagcacaaguuauccu

SEQ ID NO: 2205764 - RNA, 19 nt, Artificial Sequence
  Description of Artificial Sequence: Synthetic oligonucleotide
  Sense strand starting at position 1157 of SEQ ID NO: 1883627
gauaacuugugcucugaag

SEQ ID NO: 2205765 - RNA, 19 nt, Artificial Sequence
  Description of Artificial Sequence: Synthetic oligonucleotide
  Antisense strand to SEQ ID NO: 2205764
cuucagagcacaaguuauc

SEQ ID NO: 2205766 - RNA, 19 nt, Artificial Sequence
  Description of Artificial Sequence: Synthetic oligonucleotide
  Sense strand starting at position 3845 of SEQ ID NO: 1883627
agagauguuaguggucaug

SEQ ID NO: 2205767 - RNA, 19 nt, Artificial Sequence
  Description of Artificial Sequence: Synthetic oligonucleotide
  Antisense strand to SEQ ID NO: 2205766
caugaccacuaacaucucu

SEQ ID NO: 2205768 - RNA, 19 nt, Artificial Sequence
  Description of Artificial Sequence: Synthetic oligonucleotide
  Sense strand starting at position 1175 of SEQ ID NO: 1883628
aagugauuucuugguuagc

SEQ ID NO: 2205769 - RNA, 19 nt, Artificial Sequence
  Description of Artificial Sequence: Synthetic oligonucleotide
  Antisense strand to SEQ ID NO: 2205768
gcuaaccaagaaaucacuu

SEQ ID NO: 2205770 - RNA, 19 nt, Artificial Sequence
  Description of Artificial Sequence: Synthetic oligonucleotide
  Sense strand starting at position 3734 of SEQ ID NO: 1883628
gugaauagagaugguuuaa

SEQ ID NO: 2205771 - RNA, 19 nt, Artificial Sequence
  Description of Artificial Sequence: Synthetic oligonucleotide
  Antisense strand to SEQ ID NO: 2205770
uuaaaccaucucuauucac

SEQ ID NO: 2205772 - RNA, 19 nt, Artificial Sequence
  Description of Artificial Sequence: Synthetic oligonucleotide
  Sense strand starting at position 3528 of SEQ ID NO: 1883628
auuuauucuugagcagugu

SEQ ID NO: 2205773 - RNA, 19 nt, Artificial Sequence
  Description of Artificial Sequence: Synthetic oligonucleotide
  Antisense strand to SEQ ID NO: 2205772
acacugcucaagaauaaau

SEQ ID NO: 2205774 - RNA, 19 nt, Artificial Sequence
  Description of Artificial Sequence: Synthetic oligonucleotide
  Sense strand starting at position 1549 of SEQ ID NO: 1883628
aaugcaagagucuggaaau

SEQ ID NO: 2205775 - RNA, 19 nt, Artificial Sequence
  Description of Artificial Sequence: Synthetic oligonucleotide
  Antisense strand to SEQ ID NO: 2205774
auuuccagacucuugcauu

SEQ ID NO: 2205776 - RNA, 19 nt, Artificial Sequence
  Description of Artificial Sequence: Synthetic oligonucleotide
  Sense strand starting at position 1176 of SEQ ID NO: 1883628
agugauuucuugguuagcu

SEQ ID NO: 2205777 - RNA, 19 nt, Artificial Sequence
  Description of Artificial Sequence: Synthetic oligonucleotide
  Antisense strand to SEQ ID NO: 2205776
agcuaaccaagaaaucacu

SEQ ID NO: 2205778 - RNA, 19 nt, Artificial Sequence
  Description of Artificial Sequence: Synthetic oligonucleotide
  Sense strand starting at position 1177 of SEQ ID NO: 1883628
gugauuucuugguuagcua

SEQ ID NO: 2205779 - RNA, 19 nt, Artificial Sequence
  Description of Artificial Sequence: Synthetic oligonucleotide
  Antisense strand to SEQ ID NO: 2205778
uagcuaaccaagaaaucac

SEQ ID NO: 2205780 - RNA, 19 nt, Artificial Sequence
  Description of Artificial Sequence: Synthetic oligonucleotide
  Sense strand starting at position 3733 of SEQ ID NO: 1883628
ugugaauagagaugguuua

SEQ ID NO: 2205781 - RNA, 19 nt, Artificial Sequence
  Description of Artificial Sequence: Synthetic oligonucleotide
  Antisense strand to SEQ ID NO: 2205780
uaaaccaucucuauucaca

SEQ ID NO: 2205782 - RNA, 19 nt, Artificial Sequence
  Description of Artificial Sequence: Synthetic oligonucleotide
  Sense strand starting at position 3488 of SEQ ID NO: 1883628
gaucgauugcaguauagag

SEQ ID NO: 2205783 - RNA, 19 nt, Artificial Sequence
  Description of Artificial Sequence: Synthetic oligonucleotide
  Antisense strand to SEQ ID NO: 2205782
cucuauacugcaaucgauc

SEQ ID NO: 2205784 - RNA, 19 nt, Artificial Sequence
  Description of Artificial Sequence: Synthetic oligonucleotide
  Sense strand starting at position 2314 of SEQ ID NO: 1883628
cgguuaagggcguuugcau

SEQ ID NO: 2205785 - RNA, 19 nt, Artificial Sequence
  Description of Artificial Sequence: Synthetic oligonucleotide
  Antisense strand to SEQ ID NO: 2205784
augcaaacgcccuuaaccg

SEQ ID NO: 2205786 - RNA, 19 nt, Artificial Sequence
  Description of Artificial Sequence: Synthetic oligonucleotide
  Sense strand starting at position 2849 of SEQ ID NO: 1883628
gucguucugaacuaauaga

SEQ ID NO: 2205787 - RNA, 19 nt, Artificial Sequence
  Description of Artificial Sequence: Synthetic oligonucleotide
  Antisense strand to SEQ ID NO: 2205786
ucuauuaguucagaacgac

SEQ ID NO: 2205788 - RNA, 19 nt, Artificial Sequence
  Description of Artificial Sequence: Synthetic oligonucleotide
  Sense strand starting at position 3490 of SEQ ID NO: 1883628
ucgauugcaguauagagau

SEQ ID NO: 2205789 - RNA, 19 nt, Artificial Sequence
  Description of Artificial Sequence: Synthetic oligonucleotide
  Antisense strand to SEQ ID NO: 2205788
aucucuauacugcaaucga

SEQ ID NO: 2205790 - RNA, 19 nt, Artificial Sequence
  Description of Artificial Sequence: Synthetic oligonucleotide
  Sense strand starting at position 929 of SEQ ID NO: 1883628
cgccgucuugccucaaauu

SEQ ID NO: 2205791 - RNA, 19 nt, Artificial Sequence
  Description of Artificial Sequence: Synthetic oligonucleotide
  Antisense strand to SEQ ID NO: 2205790
aauuugaggcaagacggcg

SEQ ID NO: 2205792 - RNA, 19 nt, Artificial Sequence
  Description of Artificial Sequence: Synthetic oligonucleotide
  Sense strand starting at position 1596 of SEQ ID NO: 1883628
acgcgaggagacugagaau

SEQ ID NO: 2205793 - RNA, 19 nt, Artificial Sequence
  Description of Artificial Sequence: Synthetic oligonucleotide
  Antisense strand to SEQ ID NO: 2205792
auucucagucuccucgcgu

SEQ ID NO: 2205794 - RNA, 19 nt, Artificial Sequence
  Description of Artificial Sequence: Synthetic oligonucleotide
  Sense strand starting at position 1188 of SEQ ID NO: 1883628
guuagcuaaguauauaacu

SEQ ID NO: 2205795 - RNA, 19 nt, Artificial Sequence
  Description of Artificial Sequence: Synthetic oligonucleotide
  Antisense strand to SEQ ID NO: 2205794
aguuauauacuuagcuaac

SEQ ID NO: 2205796 - RNA, 19 nt, Artificial Sequence
  Description of Artificial Sequence: Synthetic oligonucleotide
  Sense strand starting at position 3723 of SEQ ID NO: 1883628
ucuuccaaucugugaauag

SEQ ID NO: 2205797 - RNA, 19 nt, Artificial Sequence
  Description of Artificial Sequence: Synthetic oligonucleotide
  Antisense strand to SEQ ID NO: 2205796
cuauucacagauuggaaga

SEQ ID NO: 2205798 - RNA, 19 nt, Artificial Sequence
  Description of Artificial Sequence: Synthetic oligonucleotide
  Sense strand starting at position 3230 of SEQ ID NO: 1883628
ggcuauuguauuuguaggu

SEQ ID NO: 2205799 - RNA, 19 nt, Artificial Sequence
  Description of Artificial Sequence: Synthetic oligonucleotide
  Antisense strand to SEQ ID NO: 2205798
accuacaaauacaauagcc

SEQ ID NO: 2205800 - RNA, 19 nt, Artificial Sequence
  Description of Artificial Sequence: Synthetic oligonucleotide
  Sense strand starting at position 1993 of SEQ ID NO: 1883628
cgagcuuccgucguaagua

SEQ ID NO: 2205801 - RNA, 19 nt, Artificial Sequence
  Description of Artificial Sequence: Synthetic oligonucleotide
  Antisense strand to SEQ ID NO: 2205800
uacuuacgacggaagcucg

SEQ ID NO: 2205802 - RNA, 19 nt, Artificial Sequence
  Description of Artificial Sequence: Synthetic oligonucleotide
  Sense strand starting at position 3703 of SEQ ID NO: 1883628
uggaauuuaugugauuaca

SEQ ID NO: 2205803 - RNA, 19 nt, Artificial Sequence
  Description of Artificial Sequence: Synthetic oligonucleotide
  Antisense strand to SEQ ID NO: 2205802
uguaaucacauaaauucca

SEQ ID NO: 2205804 - RNA, 19 nt, Artificial Sequence
  Description of Artificial Sequence: Synthetic oligonucleotide
  Sense strand starting at position 3140 of SEQ ID NO: 1883628
acuaucaaacuguguuaau

SEQ ID NO: 2205805 - RNA, 19 nt, Artificial Sequence
  Description of Artificial Sequence: Synthetic oligonucleotide
  Antisense strand to SEQ ID NO: 2205804
auuaacacaguuugauagu

SEQ ID NO: 2205806 - RNA, 19 nt, Artificial Sequence
  Description of Artificial Sequence: Synthetic oligonucleotide
  Sense strand starting at position 3191 of SEQ ID NO: 1883628
gugacuuuauucucccaag

SEQ ID NO: 2205807 - RNA, 19 nt, Artificial Sequence
  Description of Artificial Sequence: Synthetic oligonucleotide
  Antisense strand to SEQ ID NO: 2205806
cuugggagaauaaagucac

SEQ ID NO: 2205808 - RNA, 19 nt, Artificial Sequence
  Description of Artificial Sequence: Synthetic oligonucleotide
  Sense strand starting at position 2962 of SEQ ID NO: 1883628
gugggcuuccuagaccgaa

SEQ ID NO: 2205809 - RNA, 19 nt, Artificial Sequence
  Description of Artificial Sequence: Synthetic oligonucleotide
  Antisense strand to SEQ ID NO: 2205808
uucggucuaggaagcccac

SEQ ID NO: 2205810 - RNA, 19 nt, Artificial Sequence
  Description of Artificial Sequence: Synthetic oligonucleotide
  Sense strand starting at position 3315 of SEQ ID NO: 1883628
guuggaucuguagaucugu

SEQ ID NO: 2205811 - RNA, 19 nt, Artificial Sequence
  Description of Artificial Sequence: Synthetic oligonucleotide
  Antisense strand to SEQ ID NO: 2205810
acagaucuacagauccaac

SEQ ID NO: 2205812 - RNA, 19 nt, Artificial Sequence
  Description of Artificial Sequence: Synthetic oligonucleotide
  Sense strand starting at position 1051 of SEQ ID NO: 1883628
gguuaaauucugugaccca

SEQ ID NO: 2205813 - RNA, 19 nt, Artificial Sequence
  Description of Artificial Sequence: Synthetic oligonucleotide
  Antisense strand to SEQ ID NO: 2205812
ugggucacagaauuuaacc

SEQ ID NO: 2205814 - RNA, 19 nt, Artificial Sequence
  Description of Artificial Sequence: Synthetic oligonucleotide
  Sense strand starting at position 3141 of SEQ ID NO: 1883628
cuaucaaacuguguuaauu

SEQ ID NO: 2205815 - RNA, 19 nt, Artificial Sequence
  Description of Artificial Sequence: Synthetic oligonucleotide
  Antisense strand to SEQ ID NO: 2205814
aauuaacacaguuugauag

SEQ ID NO: 2205816 - RNA, 19 nt, Artificial Sequence
  Description of Artificial Sequence: Synthetic oligonucleotide
  Sense strand starting at position 3663 of SEQ ID NO: 1883628
ccuuauuauuuguaaggga

SEQ ID NO: 2205817 - RNA, 19 nt, Artificial Sequence
  Description of Artificial Sequence: Synthetic oligonucleotide
  Antisense strand to SEQ ID NO: 2205816
ucccuuacaaauaauaagg

SEQ ID NO: 2205818 - RNA, 19 nt, Artificial Sequence
  Description of Artificial Sequence: Synthetic oligonucleotide
  Sense strand starting at position 3037 of SEQ ID NO: 1883628
cccuuugacccaugcagau

SEQ ID NO: 2205819 - RNA, 19 nt, Artificial Sequence
  Description of Artificial Sequence: Synthetic oligonucleotide
  Antisense strand to SEQ ID NO: 2205818
aucugcaugggucaaaggg

SEQ ID NO: 2205820 - RNA, 19 nt, Artificial Sequence
  Description of Artificial Sequence: Synthetic oligonucleotide
  Sense strand starting at position 3183 of SEQ ID NO: 1883628
gaaguccugugacuuuauu

SEQ ID NO: 2205821 - RNA, 19 nt, Artificial Sequence
  Description of Artificial Sequence: Synthetic oligonucleotide
  Antisense strand to SEQ ID NO: 2205820
aauaaagucacaggacuuc

SEQ ID NO: 2205822 - RNA, 19 nt, Artificial Sequence
  Description of Artificial Sequence: Synthetic oligonucleotide
  Sense strand starting at position 3666 of SEQ ID NO: 1883628
uauuauuuguaagggacaa

SEQ ID NO: 2205823 - RNA, 19 nt, Artificial Sequence
  Description of Artificial Sequence: Synthetic oligonucleotide
  Antisense strand to SEQ ID NO: 2205822
uugucccuuacaaauaaua

SEQ ID NO: 2205824 - RNA, 19 nt, Artificial Sequence
  Description of Artificial Sequence: Synthetic oligonucleotide
  Sense strand starting at position 78 of SEQ ID NO: 1883628
gauagaaagugacaaugaa

SEQ ID NO: 2205825 - RNA, 19 nt, Artificial Sequence
  Description of Artificial Sequence: Synthetic oligonucleotide
  Antisense strand to SEQ ID NO: 2205824
uucauugucacuuucuauc

SEQ ID NO: 2205826 - RNA, 19 nt, Artificial Sequence
  Description of Artificial Sequence: Synthetic oligonucleotide
  Sense strand starting at position 951 of SEQ ID NO: 1883628
aacguuacuuauguuagau

SEQ ID NO: 2205827 - RNA, 19 nt, Artificial Sequence
  Description of Artificial Sequence: Synthetic oligonucleotide
  Antisense strand to SEQ ID NO: 2205826
aucuaacauaaguaacguu

SEQ ID NO: 2205828 - RNA, 19 nt, Artificial Sequence
  Description of Artificial Sequence: Synthetic oligonucleotide
  Sense strand starting at position 3745 of SEQ ID NO: 1883628
ugguuuaacuuuccuguaa

SEQ ID NO: 2205829 - RNA, 19 nt, Artificial Sequence
  Description of Artificial Sequence: Synthetic oligonucleotide
  Antisense strand to SEQ ID NO: 2205828
uuacaggaaaguuaaacca

SEQ ID NO: 2205830 - RNA, 19 nt, Artificial Sequence
  Description of Artificial Sequence: Synthetic oligonucleotide
  Sense strand starting at position 3746 of SEQ ID NO: 1883628
gguuuaacuuuccuguaau

SEQ ID NO: 2205831 - RNA, 19 nt, Artificial Sequence
  Description of Artificial Sequence: Synthetic oligonucleotide
  Antisense strand to SEQ ID NO: 2205830
auuacaggaaaguuaaacc

SEQ ID NO: 2205832 - RNA, 19 nt, Artificial Sequence
  Description of Artificial Sequence: Synthetic oligonucleotide
  Sense strand starting at position 1185 of SEQ ID NO: 1883628
uugguuagcuaaguauaua

SEQ ID NO: 2205833 - RNA, 19 nt, Artificial Sequence
  Description of Artificial Sequence: Synthetic oligonucleotide
  Antisense strand to SEQ ID NO: 2205832
uauauacuuagcuaaccaa

SEQ ID NO: 2205834 - RNA, 19 nt, Artificial Sequence
  Description of Artificial Sequence: Synthetic oligonucleotide
  Sense strand starting at position 3553 of SEQ ID NO: 1883628
ugcgauguuaaauagcauu

SEQ ID NO: 2205835 - RNA, 19 nt, Artificial Sequence
  Description of Artificial Sequence: Synthetic oligonucleotide
  Antisense strand to SEQ ID NO: 2205834
aaugcuauuuaacaucgca

SEQ ID NO: 2205836 - RNA, 19 nt, Artificial Sequence
  Description of Artificial Sequence: Synthetic oligonucleotide
  Sense strand starting at position 948 of SEQ ID NO: 1883628
guuaacguuacuuauguua

SEQ ID NO: 2205837 - RNA, 19 nt, Artificial Sequence
  Description of Artificial Sequence: Synthetic oligonucleotide
  Antisense strand to SEQ ID NO: 2205836
uaacauaaguaacguuaac

SEQ ID NO: 2205838 - RNA, 19 nt, Artificial Sequence
  Description of Artificial Sequence: Synthetic oligonucleotide
  Sense strand starting at position 3180 of SEQ ID NO: 1883628
cuugaaguccugugacuuu

SEQ ID NO: 2205839 - RNA, 19 nt, Artificial Sequence
  Description of Artificial Sequence: Synthetic oligonucleotide
  Antisense strand to SEQ ID NO: 2205838
aaagucacaggacuucaag

SEQ ID NO: 2205840 - RNA, 19 nt, Artificial Sequence
  Description of Artificial Sequence: Synthetic oligonucleotide
  Sense strand starting at position 3259 of SEQ ID NO: 1883628
auuagcuugucaguuuaaa

SEQ ID NO: 2205841 - RNA, 19 nt, Artificial Sequence
  Description of Artificial Sequence: Synthetic oligonucleotide
  Antisense strand to SEQ ID NO: 2205840
uuuaaacugacaagcuaau

SEQ ID NO: 2205842 - RNA, 19 nt, Artificial Sequence
  Description of Artificial Sequence: Synthetic oligonucleotide
  Sense strand starting at position 3205 of SEQ ID NO: 1883628
ccaagauugcuuuggcuua

SEQ ID NO: 2205843 - RNA, 19 nt, Artificial Sequence
  Description of Artificial Sequence: Synthetic oligonucleotide
  Antisense strand to SEQ ID NO: 2205842
uaagccaaagcaaucuugg

SEQ ID NO: 2205844 - RNA, 19 nt, Artificial Sequence
  Description of Artificial Sequence: Synthetic oligonucleotide
  Sense strand starting at position 3256 of SEQ ID NO: 1883628
ggaauuagcuugucaguuu

SEQ ID NO: 2205845 - RNA, 19 nt, Artificial Sequence
  Description of Artificial Sequence: Synthetic oligonucleotide
  Antisense strand to SEQ ID NO: 2205844
aaacugacaagcuaauucc

SEQ ID NO: 2205846 - RNA, 19 nt, Artificial Sequence
  Description of Artificial Sequence: Synthetic oligonucleotide
  Sense strand starting at position 3254 of SEQ ID NO: 1883628
uuggaauuagcuugucagu

SEQ ID NO: 2205847 - RNA, 19 nt, Artificial Sequence
  Description of Artificial Sequence: Synthetic oligonucleotide
  Antisense strand to SEQ ID NO: 2205846
acugacaagcuaauuccaa

SEQ ID NO: 2205848 - RNA, 19 nt, Artificial Sequence
  Description of Artificial Sequence: Synthetic oligonucleotide
  Sense strand starting at position 1175 of SEQ ID NO: 1883629
aagugauuucuugguuagc

SEQ ID NO: 2205849 - RNA, 19 nt, Artificial Sequence
  Description of Artificial Sequence: Synthetic oligonucleotide
  Antisense strand to SEQ ID NO: 2205848
gcuaaccaagaaaucacuu

SEQ ID NO: 2205850 - RNA, 19 nt, Artificial Sequence
  Description of Artificial Sequence: Synthetic oligonucleotide
  Sense strand starting at position 3734 of SEQ ID NO: 1883629
gugaauagagaugguuuaa

SEQ ID NO: 2205851 - RNA, 19 nt, Artificial Sequence
  Description of Artificial Sequence: Synthetic oligonucleotide
  Antisense strand to SEQ ID NO: 2205850
uuaaaccaucucuauucac

SEQ ID NO: 2205852 - RNA, 19 nt, Artificial Sequence
  Description of Artificial Sequence: Synthetic oligonucleotide
  Sense strand starting at position 3528 of SEQ ID NO: 1883629
auuuauucuugagcagugu

SEQ ID NO: 2205853 - RNA, 19 nt, Artificial Sequence
  Description of Artificial Sequence: Synthetic oligonucleotide
  Antisense strand to SEQ ID NO: 2205852
acacugcucaagaauaaau

SEQ ID NO: 2205854 - RNA, 19 nt, Artificial Sequence
  Description of Artificial Sequence: Synthetic oligonucleotide
  Sense strand starting at position 1549 of SEQ ID NO: 1883629
aaugcaagagucuggaaau

SEQ ID NO: 2205855 - RNA, 19 nt, Artificial Sequence
  Description of Artificial Sequence: Synthetic oligonucleotide
  Antisense strand to SEQ ID NO: 2205854
auuuccagacucuugcauu

SEQ ID NO: 2205856 - RNA, 19 nt, Artificial Sequence
  Description of Artificial Sequence: Synthetic oligonucleotide
  Sense strand starting at position 1176 of SEQ ID NO: 1883629
agugauuucuugguuagcu

SEQ ID NO: 2205857 - RNA, 19 nt, Artificial Sequence
  Description of Artificial Sequence: Synthetic oligonucleotide
  Antisense strand to SEQ ID NO: 2205856
agcuaaccaagaaaucacu

SEQ ID NO: 2205858 - RNA, 19 nt, Artificial Sequence
  Description of Artificial Sequence: Synthetic oligonucleotide
  Sense strand starting at position 1177 of SEQ ID NO: 1883629
gugauuucuugguuagcua

SEQ ID NO: 2205859 - RNA, 19 nt, Artificial Sequence
  Description of Artificial Sequence: Synthetic oligonucleotide
  Antisense strand to SEQ ID NO: 2205858
uagcuaaccaagaaaucac

SEQ ID NO: 2205860 - RNA, 19 nt, Artificial Sequence
  Description of Artificial Sequence: Synthetic oligonucleotide
  Sense strand starting at position 3733 of SEQ ID NO: 1883629
ugugaauagagaugguuua

SEQ ID NO: 2205861 - RNA, 19 nt, Artificial Sequence
  Description of Artificial Sequence: Synthetic oligonucleotide
  Antisense strand to SEQ ID NO: 2205860
uaaaccaucucuauucaca

SEQ ID NO: 2205862 - RNA, 19 nt, Artificial Sequence
  Description of Artificial Sequence: Synthetic oligonucleotide
  Sense strand starting at position 3488 of SEQ ID NO: 1883629
gaucgauugcaguauagag

SEQ ID NO: 2205863 - RNA, 19 nt, Artificial Sequence
  Description of Artificial Sequence: Synthetic oligonucleotide
  Antisense strand to SEQ ID NO: 2205862
cucuauacugcaaucgauc

SEQ ID NO: 2205864 - RNA, 19 nt, Artificial Sequence
  Description of Artificial Sequence: Synthetic oligonucleotide
  Sense strand starting at position 2314 of SEQ ID NO: 1883629
cgguuaagggcguuugcau

SEQ ID NO: 2205865 - RNA, 19 nt, Artificial Sequence
  Description of Artificial Sequence: Synthetic oligonucleotide
  Antisense strand to SEQ ID NO: 2205864
augcaaacgcccuuaaccg

SEQ ID NO: 2205866 - RNA, 19 nt, Artificial Sequence
  Description of Artificial Sequence: Synthetic oligonucleotide
  Sense strand starting at position 2849 of SEQ ID NO: 1883629
gucguucugaacuaauaga

SEQ ID NO: 2205867 - RNA, 19 nt, Artificial Sequence
  Description of Artificial Sequence: Synthetic oligonucleotide
  Antisense strand to SEQ ID NO: 2205866
ucuauuaguucagaacgac

SEQ ID NO: 2205868 - RNA, 19 nt, Artificial Sequence
  Description of Artificial Sequence: Synthetic oligonucleotide
  Sense strand starting at position 3490 of SEQ ID NO: 1883629
ucgauugcaguauagagau

SEQ ID NO: 2205869 - RNA, 19 nt, Artificial Sequence
  Description of Artificial Sequence: Synthetic oligonucleotide
  Antisense strand to SEQ ID NO: 2205868
aucucuauacugcaaucga

SEQ ID NO: 2205870 - RNA, 19 nt, Artificial Sequence
  Description of Artificial Sequence: Synthetic oligonucleotide
  Sense strand starting at position 929 of SEQ ID NO: 1883629
cgccgucuugccucaaauu

SEQ ID NO: 2205871 - RNA, 19 nt, Artificial Sequence
  Description of Artificial Sequence: Synthetic oligonucleotide
  Antisense strand to SEQ ID NO: 2205870
aauuugaggcaagacggcg

SEQ ID NO: 2205872 - RNA, 19 nt, Artificial Sequence
  Description of Artificial Sequence: Synthetic oligonucleotide
  Sense strand starting at position 1596 of SEQ ID NO: 1883629
acgcgaggagacugagaau

SEQ ID NO: 2205873 - RNA, 19 nt, Artificial Sequence
  Description of Artificial Sequence: Synthetic oligonucleotide
  Antisense strand to SEQ ID NO: 2205872
auucucagucuccucgcgu

SEQ ID NO: 2205874 - RNA, 19 nt, Artificial Sequence
  Description of Artificial Sequence: Synthetic oligonucleotide
  Sense strand starting at position 1188 of SEQ ID NO: 1883629
guuagcuaaguauauaacu

SEQ ID NO: 2205875 - RNA, 19 nt, Artificial Sequence
  Description of Artificial Sequence: Synthetic oligonucleotide
  Antisense strand to SEQ ID NO: 2205874
aguuauauacuuagcuaac

SEQ ID NO: 2205876 - RNA, 19 nt, Artificial Sequence
  Description of Artificial Sequence: Synthetic oligonucleotide
  Sense strand starting at position 3723 of SEQ ID NO: 1883629
ucuuccaaucugugaauag

SEQ ID NO: 2205877 - RNA, 19 nt, Artificial Sequence
  Description of Artificial Sequence: Synthetic oligonucleotide
  Antisense strand to SEQ ID NO: 2205876
cuauucacagauuggaaga

SEQ ID NO: 2205878 - RNA, 19 nt, Artificial Sequence
  Description of Artificial Sequence: Synthetic oligonucleotide
  Sense strand starting at position 3230 of SEQ ID NO: 1883629
ggcuauuguauuuguaggu

SEQ ID NO: 2205879 - RNA, 19 nt, Artificial Sequence
  Description of Artificial Sequence: Synthetic oligonucleotide
  Antisense strand to SEQ ID NO: 2205878
accuacaaauacaauagcc

SEQ ID NO: 2205880 - RNA, 19 nt, Artificial Sequence
  Description of Artificial Sequence: Synthetic oligonucleotide
  Sense strand starting at position 1993 of SEQ ID NO: 1883629
cgagcuuccgucguaagua

SEQ ID NO: 2205881 - RNA, 19 nt, Artificial Sequence
  Description of Artificial Sequence: Synthetic oligonucleotide
  Antisense strand to SEQ ID NO: 2205880
uacuuacgacggaagcucg

SEQ ID NO: 2205882 - RNA, 19 nt, Artificial Sequence
  Description of Artificial Sequence: Synthetic oligonucleotide
  Sense strand starting at position 3703 of SEQ ID NO: 1883629
uggaauuuaugugauuaca

SEQ ID NO: 2205883 - RNA, 19 nt, Artificial Sequence
  Description of Artificial Sequence: Synthetic oligonucleotide
  Antisense strand to SEQ ID NO: 2205882
uguaaucacauaaauucca

SEQ ID NO: 2205884 - RNA, 19 nt, Artificial Sequence
  Description of Artificial Sequence: Synthetic oligonucleotide
  Sense strand starting at position 3140 of SEQ ID NO: 1883629
acuaucaaacuguguuaau

SEQ ID NO: 2205885 - RNA, 19 nt, Artificial Sequence
  Description of Artificial Sequence: Synthetic oligonucleotide
  Antisense strand to SEQ ID NO: 2205884
auuaacacaguuugauagu

SEQ ID NO: 2205886 - RNA, 19 nt, Artificial Sequence
  Description of Artificial Sequence: Synthetic oligonucleotide
  Sense strand starting at position 3191 of SEQ ID NO: 1883629
gugacuuuauucucccaag

SEQ ID NO: 2205887 - RNA, 19 nt, Artificial Sequence
  Description of Artificial Sequence: Synthetic oligonucleotide
  Antisense strand to SEQ ID NO: 2205886
cuugggagaauaaagucac

SEQ ID NO: 2205888 - RNA, 19 nt, Artificial Sequence
  Description of Artificial Sequence: Synthetic oligonucleotide
  Sense strand starting at position 2962 of SEQ ID NO: 1883629
gugggcuuccuagaccgaa

SEQ ID NO: 2205889 - RNA, 19 nt, Artificial Sequence
  Description of Artificial Sequence: Synthetic oligonucleotide
  Antisense strand to SEQ ID NO: 2205888
uucggucuaggaagcccac

SEQ ID NO: 2205890 - RNA, 19 nt, Artificial Sequence
  Description of Artificial Sequence: Synthetic oligonucleotide
  Sense strand starting at position 3315 of SEQ ID NO: 1883629
guuggaucuguagaucugu

SEQ ID NO: 2205891 - RNA, 19 nt, Artificial Sequence
  Description of Artificial Sequence: Synthetic oligonucleotide
  Antisense strand to SEQ ID NO: 2205890
acagaucuacagauccaac

SEQ ID NO: 2205892 - RNA, 19 nt, Artificial Sequence
  Description of Artificial Sequence: Synthetic oligonucleotide
  Sense strand starting at position 1051 of SEQ ID NO: 1883629
gguuaaauucugugaccca

SEQ ID NO: 2205893 - RNA, 19 nt, Artificial Sequence
  Description of Artificial Sequence: Synthetic oligonucleotide
  Antisense strand to SEQ ID NO: 2205892
ugggucacagaauuuaacc

SEQ ID NO: 2205894 - RNA, 19 nt, Artificial Sequence
  Description of Artificial Sequence: Synthetic oligonucleotide
  Sense strand starting at position 3141 of SEQ ID NO: 1883629
cuaucaaacuguguuaauu

SEQ ID NO: 2205895 - RNA, 19 nt, Artificial Sequence
  Description of Artificial Sequence: Synthetic oligonucleotide
  Antisense strand to SEQ ID NO: 2205894
aauuaacacaguuugauag

SEQ ID NO: 2205896 - RNA, 19 nt, Artificial Sequence
  Description of Artificial Sequence: Synthetic oligonucleotide
  Sense strand starting at position 3663 of SEQ ID NO: 1883629
ccuuauuauuuguaaggga

SEQ ID NO: 2205897 - RNA, 19 nt, Artificial Sequence
  Description of Artificial Sequence: Synthetic oligonucleotide
  Antisense strand to SEQ ID NO: 2205896
ucccuuacaaauaauaagg

SEQ ID NO: 2205898 - RNA, 19 nt, Artificial Sequence
  Description of Artificial Sequence: Synthetic oligonucleotide
  Sense strand starting at position 3037 of SEQ ID NO: 1883629
cccuuugacccaugcagau

SEQ ID NO: 2205899 - RNA, 19 nt, Artificial Sequence
  Description of Artificial Sequence: Synthetic oligonucleotide
  Antisense strand to SEQ ID NO: 2205898
aucugcaugggucaaaggg

SEQ ID NO: 2205900 - RNA, 19 nt, Artificial Sequence
  Description of Artificial Sequence: Synthetic oligonucleotide
  Sense strand starting at position 3183 of SEQ ID NO: 1883629
gaaguccugugacuuuauu

SEQ ID NO: 2205901 - RNA, 19 nt, Artificial Sequence
  Description of Artificial Sequence: Synthetic oligonucleotide
  Antisense strand to SEQ ID NO: 2205900
aauaaagucacaggacuuc

SEQ ID NO: 2205902 - RNA, 19 nt, Artificial Sequence
  Description of Artificial Sequence: Synthetic oligonucleotide
  Sense strand starting at position 3666 of SEQ ID NO: 1883629
uauuauuuguaagggacaa

SEQ ID NO: 2205903 - RNA, 19 nt, Artificial Sequence
  Description of Artificial Sequence: Synthetic oligonucleotide
  Antisense strand to SEQ ID NO: 2205902
uugucccuuacaaauaaua

SEQ ID NO: 2205904 - RNA, 19 nt, Artificial Sequence
  Description of Artificial Sequence: Synthetic oligonucleotide
  Sense strand starting at position 78 of SEQ ID NO: 1883629
gauagaaagugacaaugaa

SEQ ID NO: 2205905 - RNA, 19 nt, Artificial Sequence
  Description of Artificial Sequence: Synthetic oligonucleotide
  Antisense strand to SEQ ID NO: 2205904
uucauugucacuuucuauc

SEQ ID NO: 2205906 - RNA, 19 nt, Artificial Sequence
  Description of Artificial Sequence: Synthetic oligonucleotide
  Sense strand starting at position 951 of SEQ ID NO: 1883629
aacguuacuuauguuagau

SEQ ID NO: 2205907 - RNA, 19 nt, Artificial Sequence
  Description of Artificial Sequence: Synthetic oligonucleotide
  Antisense strand to SEQ ID NO: 2205906
aucuaacauaaguaacguu

SEQ ID NO: 2205908 - RNA, 19 nt, Artificial Sequence
  Description of Artificial Sequence: Synthetic oligonucleotide
  Sense strand starting at position 3745 of SEQ ID NO: 1883629
ugguuuaacuuuccuguaa

SEQ ID NO: 2205909 - RNA, 19 nt, Artificial Sequence
  Description of Artificial Sequence: Synthetic oligonucleotide
  Antisense strand to SEQ ID NO: 2205908
uuacaggaaaguuaaacca

SEQ ID NO: 2205910 - RNA, 19 nt, Artificial Sequence
  Description of Artificial Sequence: Synthetic oligonucleotide
  Sense strand starting at position 3746 of SEQ ID NO: 1883629
gguuuaacuuuccuguaau

SEQ ID NO: 2205911 - RNA, 19 nt, Artificial Sequence
  Description of Artificial Sequence: Synthetic oligonucleotide
  Antisense strand to SEQ ID NO: 2205910
auuacaggaaaguuaaacc

SEQ ID NO: 2205912 - RNA, 19 nt, Artificial Sequence
  Description of Artificial Sequence: Synthetic oligonucleotide
  Sense strand starting at position 1185 of SEQ ID NO: 1883629
uugguuagcuaaguauaua

SEQ ID NO: 2205913 - RNA, 19 nt, Artificial Sequence
  Description of Artificial Sequence: Synthetic oligonucleotide
  Antisense strand to SEQ ID NO: 2205912
uauauacuuagcuaaccaa

SEQ ID NO: 2205914 - RNA, 19 nt, Artificial Sequence
  Description of Artificial Sequence: Synthetic oligonucleotide
  Sense strand starting at position 3553 of SEQ ID NO: 1883629
ugcgauguuaaauagcauu

SEQ ID NO: 2205915 - RNA, 19 nt, Artificial Sequence
  Description of Artificial Sequence: Synthetic oligonucleotide
  Antisense strand to SEQ ID NO: 2205914
aaugcuauuuaacaucgca

SEQ ID NO: 2205916 - RNA, 19 nt, Artificial Sequence
  Description of Artificial Sequence: Synthetic oligonucleotide
  Sense strand starting at position 948 of SEQ ID NO: 1883629
guuaacguuacuuauguua

SEQ ID NO: 2205917 - RNA, 19 nt, Artificial Sequence
  Description of Artificial Sequence: Synthetic oligonucleotide
  Antisense strand to SEQ ID NO: 2205916
uaacauaaguaacguuaac

SEQ ID NO: 2205918 - RNA, 19 nt, Artificial Sequence
  Description of Artificial Sequence: Synthetic oligonucleotide
  Sense strand starting at position 3180 of SEQ ID NO: 1883629
cuugaaguccugugacuuu

SEQ ID NO: 2205919 - RNA, 19 nt, Artificial Sequence
  Description of Artificial Sequence: Synthetic oligonucleotide
  Antisense strand to SEQ ID NO: 2205918
aaagucacaggacuucaag

SEQ ID NO: 2205920 - RNA, 19 nt, Artificial Sequence
  Description of Artificial Sequence: Synthetic oligonucleotide
  Sense strand starting at position 3259 of SEQ ID NO: 1883629
auuagcuugucaguuuaaa

SEQ ID NO: 2205921 - RNA, 19 nt, Artificial Sequence
  Description of Artificial Sequence: Synthetic oligonucleotide
  Antisense strand to SEQ ID NO: 2205920
uuuaaacugacaagcuaau

SEQ ID NO: 2205922 - RNA, 19 nt, Artificial Sequence
  Description of Artificial Sequence: Synthetic oligonucleotide
  Sense strand starting at position 3205 of SEQ ID NO: 1883629
ccaagauugcuuuggcuua

SEQ ID NO: 2205923 - RNA, 19 nt, Artificial Sequence
  Description of Artificial Sequence: Synthetic oligonucleotide
  Antisense strand to SEQ ID NO: 2205922
uaagccaaagcaaucuugg

SEQ ID NO: 2205924 - RNA, 19 nt, Artificial Sequence
  Description of Artificial Sequence: Synthetic oligonucleotide
  Sense strand starting at position 3256 of SEQ ID NO: 1883629
ggaauuagcuugucaguuu

SEQ ID NO: 2205925 - RNA, 19 nt, Artificial Sequence
  Description of Artificial Sequence: Synthetic oligonucleotide
  Antisense strand to SEQ ID NO: 2205924
aaacugacaagcuaauucc

SEQ ID NO: 2205926 - RNA, 19 nt, Artificial Sequence
  Description of Artificial Sequence: Synthetic oligonucleotide
  Sense strand starting at position 3254 of SEQ ID NO: 1883629
uuggaauuagcuugucagu

SEQ ID NO: 2205927 - RNA, 19 nt, Artificial Sequence
  Description of Artificial Sequence: Synthetic oligonucleotide
  Antisense strand to SEQ ID NO: 2205926
acugacaagcuaauuccaa

SEQ ID NO: 2205928 - RNA, 19 nt, Artificial Sequence
  Description of Artificial Sequence: Synthetic oligonucleotide
  Sense strand starting at position 2447 of SEQ ID NO: 1883630
ggugcucuuccugcacgau

SEQ ID NO: 2205929 - RNA, 19 nt, Artificial Sequence
  Description of Artificial Sequence: Synthetic oligonucleotide
  Antisense strand to SEQ ID NO: 2205928
aucgugcaggaagagcacc

SEQ ID NO: 2205930 - RNA, 19 nt, Artificial Sequence
  Description of Artificial Sequence: Synthetic oligonucleotide
  Sense strand starting at position 1412 of SEQ ID NO: 1883630
acagaugucagaggaguau

SEQ ID NO: 2205931 - RNA, 19 nt, Artificial Sequence
  Description of Artificial Sequence: Synthetic oligonucleotide
  Antisense strand to SEQ ID NO: 2205930
auacuccucugacaucugu

SEQ ID NO: 2205932 - RNA, 19 nt, Artificial Sequence
  Description of Artificial Sequence: Synthetic oligonucleotide
  Sense strand starting at position 291 of SEQ ID NO: 1883630
ggaagauugccucagguca

SEQ ID NO: 2205933 - RNA, 19 nt, Artificial Sequence
  Description of Artificial Sequence: Synthetic oligonucleotide
  Antisense strand to SEQ ID NO: 2205932
ugaccugaggcaaucuucc

SEQ ID NO: 2205934 - RNA, 19 nt, Artificial Sequence
  Description of Artificial Sequence: Synthetic oligonucleotide
  Sense strand starting at position 156 of SEQ ID NO: 1883630
ugaccaacccuuuggaauu

SEQ ID NO: 2205935 - RNA, 19 nt, Artificial Sequence
  Description of Artificial Sequence: Synthetic oligonucleotide
  Antisense strand to SEQ ID NO: 2205934
aauuccaaaggguugguca

SEQ ID NO: 2205936 - RNA, 19 nt, Artificial Sequence
  Description of Artificial Sequence: Synthetic oligonucleotide
  Sense strand starting at position 526 of SEQ ID NO: 1883630
gaauuaugugcugagugga

SEQ ID NO: 2205937 - RNA, 19 nt, Artificial Sequence
  Description of Artificial Sequence: Synthetic oligonucleotide
  Antisense strand to SEQ ID NO: 2205936
uccacucagcacauaauuc

SEQ ID NO: 2205938 - RNA, 19 nt, Artificial Sequence
  Description of Artificial Sequence: Synthetic oligonucleotide
  Sense strand starting at position 2650 of SEQ ID NO: 1883630
cccguugaucccuaauuaa

SEQ ID NO: 2205939 - RNA, 19 nt, Artificial Sequence
  Description of Artificial Sequence: Synthetic oligonucleotide
  Antisense strand to SEQ ID NO: 2205938
uuaauuagggaucaacggg

SEQ ID NO: 2205940 - RNA, 19 nt, Artificial Sequence
  Description of Artificial Sequence: Synthetic oligonucleotide
  Sense strand starting at position 1636 of SEQ ID NO: 1883630
gcgcuuccauuauuuaauc

SEQ ID NO: 2205941 - RNA, 19 nt, Artificial Sequence
  Description of Artificial Sequence: Synthetic oligonucleotide
  Antisense strand to SEQ ID NO: 2205940
gauuaaauaauggaagcgc

SEQ ID NO: 2205942 - RNA, 19 nt, Artificial Sequence
  Description of Artificial Sequence: Synthetic oligonucleotide
  Sense strand starting at position 2680 of SEQ ID NO: 1883630
uccugaucauugccaaaug

SEQ ID NO: 2205943 - RNA, 19 nt, Artificial Sequence
  Description of Artificial Sequence: Synthetic oligonucleotide
  Antisense strand to SEQ ID NO: 2205942
cauuuggcaaugaucagga

SEQ ID NO: 2205944 - RNA, 19 nt, Artificial Sequence
  Description of Artificial Sequence: Synthetic oligonucleotide
  Sense strand starting at position 648 of SEQ ID NO: 1883630
gcuagucaaaggugggaau

SEQ ID NO: 2205945 - RNA, 19 nt, Artificial Sequence
  Description of Artificial Sequence: Synthetic oligonucleotide
  Antisense strand to SEQ ID NO: 2205944
auucccaccuuugacuagc

SEQ ID NO: 2205946 - RNA, 19 nt, Artificial Sequence
  Description of Artificial Sequence: Synthetic oligonucleotide
  Sense strand starting at position 1205 of SEQ ID NO: 1883630
auuccuuaggcuugagauc

SEQ ID NO: 2205947 - RNA, 19 nt, Artificial Sequence
  Description of Artificial Sequence: Synthetic oligonucleotide
  Antisense strand to SEQ ID NO: 2205946
gaucucaagccuaaggaau

SEQ ID NO: 2205948 - RNA, 19 nt, Artificial Sequence
  Description of Artificial Sequence: Synthetic oligonucleotide
  Sense strand starting at position 2133 of SEQ ID NO: 1883630
gcuggaguugagggaguua

SEQ ID NO: 2205949 - RNA, 19 nt, Artificial Sequence
  Description of Artificial Sequence: Synthetic oligonucleotide
  Antisense strand to SEQ ID NO: 2205948
uaacucccucaacuccagc

SEQ ID NO: 2205950 - RNA, 19 nt, Artificial Sequence
  Description of Artificial Sequence: Synthetic oligonucleotide
  Sense strand starting at position 132 of SEQ ID NO: 1883630
ggagcugccuaaucacauu

SEQ ID NO: 2205951 - RNA, 19 nt, Artificial Sequence
  Description of Artificial Sequence: Synthetic oligonucleotide
  Antisense strand to SEQ ID NO: 2205950
aaugugauuaggcagcucc

SEQ ID NO: 2205952 - RNA, 19 nt, Artificial Sequence
  Description of Artificial Sequence: Synthetic oligonucleotide
  Sense strand starting at position 529 of SEQ ID NO: 1883630
uuaugugcugaguggauaa

SEQ ID NO: 2205953 - RNA, 19 nt, Artificial Sequence
  Description of Artificial Sequence: Synthetic oligonucleotide
  Antisense strand to SEQ ID NO: 2205952
uuauccacucagcacauaa

SEQ ID NO: 2205954 - RNA, 19 nt, Artificial Sequence
  Description of Artificial Sequence: Synthetic oligonucleotide
  Sense strand starting at position 1105 of SEQ ID NO: 1883630
cucuaugugucuuuauaag

SEQ ID NO: 2205955 - RNA, 19 nt, Artificial Sequence
  Description of Artificial Sequence: Synthetic oligonucleotide
  Antisense strand to SEQ ID NO: 2205954
cuuauaaagacacauagag

SEQ ID NO: 2205956 - RNA, 19 nt, Artificial Sequence
  Description of Artificial Sequence: Synthetic oligonucleotide
  Sense strand starting at position 1116 of SEQ ID NO: 1883630
uuuauaaguuggucucauu

SEQ ID NO: 2205957 - RNA, 19 nt, Artificial Sequence
  Description of Artificial Sequence: Synthetic oligonucleotide
  Antisense strand to SEQ ID NO: 2205956
aaugagaccaacuuauaaa

SEQ ID NO: 2205958 - RNA, 19 nt, Artificial Sequence
  Description of Artificial Sequence: Synthetic oligonucleotide
  Sense strand starting at position 1115 of SEQ ID NO: 1883630
cuuuauaaguuggucucau

SEQ ID NO: 2205959 - RNA, 19 nt, Artificial Sequence
  Description of Artificial Sequence: Synthetic oligonucleotide
  Antisense strand to SEQ ID NO: 2205958
augagaccaacuuauaaag

SEQ ID NO: 2205960 - RNA, 19 nt, Artificial Sequence
  Description of Artificial Sequence: Synthetic oligonucleotide
  Sense strand starting at position 1114 of SEQ ID NO: 1883630
ucuuuauaaguuggucuca

SEQ ID NO: 2205961 - RNA, 19 nt, Artificial Sequence
  Description of Artificial Sequence: Synthetic oligonucleotide
  Antisense strand to SEQ ID NO: 2205960
ugagaccaacuuauaaaga

SEQ ID NO: 2205962 - RNA, 19 nt, Artificial Sequence
  Description of Artificial Sequence: Synthetic oligonucleotide
  Sense strand starting at position 542 of SEQ ID NO: 1883630
ggauaaugugcuggauguc

SEQ ID NO: 2205963 - RNA, 19 nt, Artificial Sequence
  Description of Artificial Sequence: Synthetic oligonucleotide
  Antisense strand to SEQ ID NO: 2205962
gacauccagcacauuaucc

SEQ ID NO: 2205964 - RNA, 19 nt, Artificial Sequence
  Description of Artificial Sequence: Synthetic oligonucleotide
  Sense strand starting at position 523 of SEQ ID NO: 1883630
ucagaauuaugugcugagu

SEQ ID NO: 2205965 - RNA, 19 nt, Artificial Sequence
  Description of Artificial Sequence: Synthetic oligonucleotide
  Antisense strand to SEQ ID NO: 2205964
acucagcacauaauucuga

SEQ ID NO: 2205966 - RNA, 19 nt, Artificial Sequence
  Description of Artificial Sequence: Synthetic oligonucleotide
  Sense strand starting at position 3652 of SEQ ID NO: 1883630
uuucuuuagcaaugagguu

SEQ ID NO: 2205967 - RNA, 19 nt, Artificial Sequence
  Description of Artificial Sequence: Synthetic oligonucleotide
  Antisense strand to SEQ ID NO: 2205966
aaccucauugcuaaagaaa

SEQ ID NO: 2205968 - RNA, 19 nt, Artificial Sequence
  Description of Artificial Sequence: Synthetic oligonucleotide
  Sense strand starting at position 2547 of SEQ ID NO: 1883630
ccgccuaaucccuggagau

SEQ ID NO: 2205969 - RNA, 19 nt, Artificial Sequence
  Description of Artificial Sequence: Synthetic oligonucleotide
  Antisense strand to SEQ ID NO: 2205968
aucuccagggauuaggcgg

SEQ ID NO: 2205970 - RNA, 19 nt, Artificial Sequence
  Description of Artificial Sequence: Synthetic oligonucleotide
  Sense strand starting at position 2548 of SEQ ID NO: 1883630
cgccuaaucccuggagauc

SEQ ID NO: 2205971 - RNA, 19 nt, Artificial Sequence
  Description of Artificial Sequence: Synthetic oligonucleotide
  Antisense strand to SEQ ID NO: 2205970
gaucuccagggauuaggcg

SEQ ID NO: 2205972 - RNA, 19 nt, Artificial Sequence
  Description of Artificial Sequence: Synthetic oligonucleotide
  Sense strand starting at position 1103 of SEQ ID NO: 1883630
aucucuaugugucuuuaua

SEQ ID NO: 2205973 - RNA, 19 nt, Artificial Sequence
  Description of Artificial Sequence: Synthetic oligonucleotide
  Antisense strand to SEQ ID NO: 2205972
uauaaagacacauagagau

SEQ ID NO: 2205974 - RNA, 19 nt, Artificial Sequence
  Description of Artificial Sequence: Synthetic oligonucleotide
  Sense strand starting at position 1045 of SEQ ID NO: 1883630
gggcucagacaauguuguu

SEQ ID NO: 2205975 - RNA, 19 nt, Artificial Sequence
  Description of Artificial Sequence: Synthetic oligonucleotide
  Antisense strand to SEQ ID NO: 2205974
aacaacauugucugagccc

SEQ ID NO: 2205976 - RNA, 19 nt, Artificial Sequence
  Description of Artificial Sequence: Synthetic oligonucleotide
  Sense strand starting at position 1424 of SEQ ID NO: 1883630
ggaguauccuggaggagcu

SEQ ID NO: 2205977 - RNA, 19 nt, Artificial Sequence
  Description of Artificial Sequence: Synthetic oligonucleotide
  Antisense strand to SEQ ID NO: 2205976
agcuccuccaggauacucc

SEQ ID NO: 2205978 - RNA, 19 nt, Artificial Sequence
  Description of Artificial Sequence: Synthetic oligonucleotide
  Sense strand starting at position 423 of SEQ ID NO: 1883630
ccgcccuaucaguaguaua

SEQ ID NO: 2205979 - RNA, 19 nt, Artificial Sequence
  Description of Artificial Sequence: Synthetic oligonucleotide
  Antisense strand to SEQ ID NO: 2205978
uauacuacugauagggcgg

SEQ ID NO: 2205980 - RNA, 19 nt, Artificial Sequence
  Description of Artificial Sequence: Synthetic oligonucleotide
  Sense strand starting at position 1613 of SEQ ID NO: 1883630
aagacagucccgugcuaga

SEQ ID NO: 2205981 - RNA, 19 nt, Artificial Sequence
  Description of Artificial Sequence: Synthetic oligonucleotide
  Antisense strand to SEQ ID NO: 2205980
ucuagcacgggacugucuu

SEQ ID NO: 2205982 - RNA, 19 nt, Artificial Sequence
  Description of Artificial Sequence: Synthetic oligonucleotide
  Sense strand starting at position 1569 of SEQ ID NO: 1883630
ugaggaaaguccgccugua

SEQ ID NO: 2205983 - RNA, 19 nt, Artificial Sequence
  Description of Artificial Sequence: Synthetic oligonucleotide
  Antisense strand to SEQ ID NO: 2205982
uacaggcggacuuuccuca

SEQ ID NO: 2205984 - RNA, 19 nt, Artificial Sequence
  Description of Artificial Sequence: Synthetic oligonucleotide
  Sense strand starting at position 1101 of SEQ ID NO: 1883630
ccaucucuaugugucuuua

SEQ ID NO: 2205985 - RNA, 19 nt, Artificial Sequence
  Description of Artificial Sequence: Synthetic oligonucleotide
  Antisense strand to SEQ ID NO: 2205984
uaaagacacauagagaugg

SEQ ID NO: 2205986 - RNA, 19 nt, Artificial Sequence
  Description of Artificial Sequence: Synthetic oligonucleotide
  Sense strand starting at position 1478 of SEQ ID NO: 1883630
gcugguaucagugggaggu

SEQ ID NO: 2205987 - RNA, 19 nt, Artificial Sequence
  Description of Artificial Sequence: Synthetic oligonucleotide
  Antisense strand to SEQ ID NO: 2205986
accucccacugauaccagc

SEQ ID NO: 2205988 - RNA, 19 nt, Artificial Sequence
  Description of Artificial Sequence: Synthetic oligonucleotide
  Sense strand starting at position 1086 of SEQ ID NO: 1883630
uuuagugcugcuuauccau

SEQ ID NO: 2205989 - RNA, 19 nt, Artificial Sequence
  Description of Artificial Sequence: Synthetic oligonucleotide
  Antisense strand to SEQ ID NO: 2205988
auggauaagcagcacuaaa

SEQ ID NO: 2205990 - RNA, 19 nt, Artificial Sequence
  Description of Artificial Sequence: Synthetic oligonucleotide
  Sense strand starting at position 1277 of SEQ ID NO: 1883630
gugauugguucugcagagu

SEQ ID NO: 2205991 - RNA, 19 nt, Artificial Sequence
  Description of Artificial Sequence: Synthetic oligonucleotide
  Antisense strand to SEQ ID NO: 2205990
acucugcagaaccaaucac

SEQ ID NO: 2205992 - RNA, 19 nt, Artificial Sequence
  Description of Artificial Sequence: Synthetic oligonucleotide
  Sense strand starting at position 44 of SEQ ID NO: 1883630
aauguaauaucaggaagga

SEQ ID NO: 2205993 - RNA, 19 nt, Artificial Sequence
  Description of Artificial Sequence: Synthetic oligonucleotide
  Antisense strand to SEQ ID NO: 2205992
uccuuccugauauuacauu

SEQ ID NO: 2205994 - RNA, 19 nt, Artificial Sequence
  Description of Artificial Sequence: Synthetic oligonucleotide
  Sense strand starting at position 2690 of SEQ ID NO: 1883630
ugccaaaugcccuguccau

SEQ ID NO: 2205995 - RNA, 19 nt, Artificial Sequence
  Description of Artificial Sequence: Synthetic oligonucleotide
  Antisense strand to SEQ ID NO: 2205994
auggacagggcauuuggca

SEQ ID NO: 2205996 - RNA, 19 nt, Artificial Sequence
  Description of Artificial Sequence: Synthetic oligonucleotide
  Sense strand starting at position 92 of SEQ ID NO: 1883630
agaacagaguccuaacuuu

SEQ ID NO: 2205997 - RNA, 19 nt, Artificial Sequence
  Description of Artificial Sequence: Synthetic oligonucleotide
  Antisense strand to SEQ ID NO: 2205996
aaaguuaggacucuguucu

SEQ ID NO: 2205998 - RNA, 19 nt, Artificial Sequence
  Description of Artificial Sequence: Synthetic oligonucleotide
  Sense strand starting at position 1421 of SEQ ID NO: 1883630
agaggaguauccuggagga

SEQ ID NO: 2205999 - RNA, 19 nt, Artificial Sequence
  Description of Artificial Sequence: Synthetic oligonucleotide
  Antisense strand to SEQ ID NO: 2205998
uccuccaggauacuccucu

SEQ ID NO: 2206000 - RNA, 19 nt, Artificial Sequence
  Description of Artificial Sequence: Synthetic oligonucleotide
  Sense strand starting at position 1183 of SEQ ID NO: 1883630
gcucccaguugccuuauau

SEQ ID NO: 2206001 - RNA, 19 nt, Artificial Sequence
  Description of Artificial Sequence: Synthetic oligonucleotide
  Antisense strand to SEQ ID NO: 2206000
auauaaggcaacugggagc

SEQ ID NO: 2206002 - RNA, 19 nt, Artificial Sequence
  Description of Artificial Sequence: Synthetic oligonucleotide
  Sense strand starting at position 1255 of SEQ ID NO: 1883630
acaguaaucucauggaagg

SEQ ID NO: 2206003 - RNA, 19 nt, Artificial Sequence
  Description of Artificial Sequence: Synthetic oligonucleotide
  Antisense strand to SEQ ID NO: 2206002
ccuuccaugagauuacugu

SEQ ID NO: 2206004 - RNA, 19 nt, Artificial Sequence
  Description of Artificial Sequence: Synthetic oligonucleotide
  Sense strand starting at position 1273 of SEQ ID NO: 1883630
gccugugauugguucugca

SEQ ID NO: 2206005 - RNA, 19 nt, Artificial Sequence
  Description of Artificial Sequence: Synthetic oligonucleotide
  Antisense strand to SEQ ID NO: 2206004
ugcagaaccaaucacaggc

SEQ ID NO: 2206006 - RNA, 19 nt, Artificial Sequence
  Description of Artificial Sequence: Synthetic oligonucleotide
  Sense strand starting at position 1673 of SEQ ID NO: 1883630
ggaagacacuauuguaauc

SEQ ID NO: 2206007 - RNA, 19 nt, Artificial Sequence
  Description of Artificial Sequence: Synthetic oligonucleotide
  Antisense strand to SEQ ID NO: 2206006
gauuacaauagugucuucc

SEQ ID NO: 2206008 - RNA, 19 nt, Artificial Sequence
  Description of Artificial Sequence: Synthetic oligonucleotide
  Sense strand starting at position 2303 of SEQ ID NO: 1883631
auuauugcacguguugcaa

SEQ ID NO: 2206009 - RNA, 19 nt, Artificial Sequence
  Description of Artificial Sequence: Synthetic oligonucleotide
  Antisense strand to SEQ ID NO: 2206008
uugcaacacgugcaauaau

SEQ ID NO: 2206010 - RNA, 19 nt, Artificial Sequence
  Description of Artificial Sequence: Synthetic oligonucleotide
  Sense strand starting at position 370 of SEQ ID NO: 1883631
cugaguaguaaggauguaa

SEQ ID NO: 2206011 - RNA, 19 nt, Artificial Sequence
  Description of Artificial Sequence: Synthetic oligonucleotide
  Antisense strand to SEQ ID NO: 2206010
uuacauccuuacuacucag

SEQ ID NO: 2206012 - RNA, 19 nt, Artificial Sequence
  Description of Artificial Sequence: Synthetic oligonucleotide
  Sense strand starting at position 604 of SEQ ID NO: 1883631
acuagaugugguuaccuaa

SEQ ID NO: 2206013 - RNA, 19 nt, Artificial Sequence
  Description of Artificial Sequence: Synthetic oligonucleotide
  Antisense strand to SEQ ID NO: 2206012
uuagguaaccacaucuagu

SEQ ID NO: 2206014 - RNA, 19 nt, Artificial Sequence
  Description of Artificial Sequence: Synthetic oligonucleotide
  Sense strand starting at position 1112 of SEQ ID NO: 1883631
cacugagagcuguaucaag

SEQ ID NO: 2206015 - RNA, 19 nt, Artificial Sequence
  Description of Artificial Sequence: Synthetic oligonucleotide
  Antisense strand to SEQ ID NO: 2206014
cuugauacagcucucagug

SEQ ID NO: 2206016 - RNA, 19 nt, Artificial Sequence
  Description of Artificial Sequence: Synthetic oligonucleotide
  Sense strand starting at position 753 of SEQ ID NO: 1883631
gucauauaagcugaggacu

SEQ ID NO: 2206017 - RNA, 19 nt, Artificial Sequence
  Description of Artificial Sequence: Synthetic oligonucleotide
  Antisense strand to SEQ ID NO: 2206016
aguccucagcuuauaugac

SEQ ID NO: 2206018 - RNA, 19 nt, Artificial Sequence
  Description of Artificial Sequence: Synthetic oligonucleotide
  Sense strand starting at position 1188 of SEQ ID NO: 1883631
uaacuuugagagcagugau

SEQ ID NO: 2206019 - RNA, 19 nt, Artificial Sequence
  Description of Artificial Sequence: Synthetic oligonucleotide
  Antisense strand to SEQ ID NO: 2206018
aucacugcucucaaaguua

SEQ ID NO: 2206020 - RNA, 19 nt, Artificial Sequence
  Description of Artificial Sequence: Synthetic oligonucleotide
  Sense strand starting at position 777 of SEQ ID NO: 1883631
gugacaaucagguagagca

SEQ ID NO: 2206021 - RNA, 19 nt, Artificial Sequence
  Description of Artificial Sequence: Synthetic oligonucleotide
  Antisense strand to SEQ ID NO: 2206020
ugcucuaccugauugucac

SEQ ID NO: 2206022 - RNA, 19 nt, Artificial Sequence
  Description of Artificial Sequence: Synthetic oligonucleotide
  Sense strand starting at position 2261 of SEQ ID NO: 1883631
cucgacauuccugaauauu

SEQ ID NO: 2206023 - RNA, 19 nt, Artificial Sequence
  Description of Artificial Sequence: Synthetic oligonucleotide
  Antisense strand to SEQ ID NO: 2206022
aauauucaggaaugucgag

SEQ ID NO: 2206024 - RNA, 19 nt, Artificial Sequence
  Description of Artificial Sequence: Synthetic oligonucleotide
  Sense strand starting at position 1984 of SEQ ID NO: 1883631
gacagauggaguugauagu

SEQ ID NO: 2206025 - RNA, 19 nt, Artificial Sequence
  Description of Artificial Sequence: Synthetic oligonucleotide
  Antisense strand to SEQ ID NO: 2206024
acuaucaacuccaucuguc

SEQ ID NO: 2206026 - RNA, 19 nt, Artificial Sequence
  Description of Artificial Sequence: Synthetic oligonucleotide
  Sense strand starting at position 374 of SEQ ID NO: 1883631
guaguaaggauguaaaggu

SEQ ID NO: 2206027 - RNA, 19 nt, Artificial Sequence
  Description of Artificial Sequence: Synthetic oligonucleotide
  Antisense strand to SEQ ID NO: 2206026
accuuuacauccuuacuac

SEQ ID NO: 2206028 - RNA, 19 nt, Artificial Sequence
  Description of Artificial Sequence: Synthetic oligonucleotide
  Sense strand starting at position 607 of SEQ ID NO: 1883631
agaugugguuaccuaagga

SEQ ID NO: 2206029 - RNA, 19 nt, Artificial Sequence
  Description of Artificial Sequence: Synthetic oligonucleotide
  Antisense strand to SEQ ID NO: 2206028
uccuuagguaaccacaucu

SEQ ID NO: 2206030 - RNA, 19 nt, Artificial Sequence
  Description of Artificial Sequence: Synthetic oligonucleotide
  Sense strand starting at position 505 of SEQ ID NO: 1883631
ugagauguccuuggaacca

SEQ ID NO: 2206031 - RNA, 19 nt, Artificial Sequence
  Description of Artificial Sequence: Synthetic oligonucleotide
  Antisense strand to SEQ ID NO: 2206030
ugguuccaaggacaucuca

SEQ ID NO: 2206032 - RNA, 19 nt, Artificial Sequence
  Description of Artificial Sequence: Synthetic oligonucleotide
  Sense strand starting at position 835 of SEQ ID NO: 1883631
cucgauuauguagagugaa

SEQ ID NO: 2206033 - RNA, 19 nt, Artificial Sequence
  Description of Artificial Sequence: Synthetic oligonucleotide
  Antisense strand to SEQ ID NO: 2206032
uucacucuacauaaucgag

SEQ ID NO: 2206034 - RNA, 19 nt, Artificial Sequence
  Description of Artificial Sequence: Synthetic oligonucleotide
  Sense strand starting at position 982 of SEQ ID NO: 1883631
uauuguggugaauggaaau

SEQ ID NO: 2206035 - RNA, 19 nt, Artificial Sequence
  Description of Artificial Sequence: Synthetic oligonucleotide
  Antisense strand to SEQ ID NO: 2206034
auuuccauucaccacaaua

SEQ ID NO: 2206036 - RNA, 19 nt, Artificial Sequence
  Description of Artificial Sequence: Synthetic oligonucleotide
  Sense strand starting at position 140 of SEQ ID NO: 1883631
cccuaaguccaguaaaccu

SEQ ID NO: 2206037 - RNA, 19 nt, Artificial Sequence
  Description of Artificial Sequence: Synthetic oligonucleotide
  Antisense strand to SEQ ID NO: 2206036
agguuuacuggacuuaggg

SEQ ID NO: 2206038 - RNA, 19 nt, Artificial Sequence
  Description of Artificial Sequence: Synthetic oligonucleotide
  Sense strand starting at position 1211 of SEQ ID NO: 1883631
aaaguuugagagcagcauu

SEQ ID NO: 2206039 - RNA, 19 nt, Artificial Sequence
  Description of Artificial Sequence: Synthetic oligonucleotide
  Antisense strand to SEQ ID NO: 2206038
aaugcugcucucaaacuuu

SEQ ID NO: 2206040 - RNA, 19 nt, Artificial Sequence
  Description of Artificial Sequence: Synthetic oligonucleotide
  Sense strand starting at position 504 of SEQ ID NO: 1883631
uugagauguccuuggaacc

SEQ ID NO: 2206041 - RNA, 19 nt, Artificial Sequence
  Description of Artificial Sequence: Synthetic oligonucleotide
  Antisense strand to SEQ ID NO: 2206040
gguuccaaggacaucucaa

SEQ ID NO: 2206042 - RNA, 19 nt, Artificial Sequence
  Description of Artificial Sequence: Synthetic oligonucleotide
  Sense strand starting at position 493 of SEQ ID NO: 1883631
gaagcuuaaguuugagaug

SEQ ID NO: 2206043 - RNA, 19 nt, Artificial Sequence
  Description of Artificial Sequence: Synthetic oligonucleotide
  Antisense strand to SEQ ID NO: 2206042
caucucaaacuuaagcuuc

SEQ ID NO: 2206044 - RNA, 19 nt, Artificial Sequence
  Description of Artificial Sequence: Synthetic oligonucleotide
  Sense strand starting at position 979 of SEQ ID NO: 1883631
gccuauuguggugaaugga

SEQ ID NO: 2206045 - RNA, 19 nt, Artificial Sequence
  Description of Artificial Sequence: Synthetic oligonucleotide
  Antisense strand to SEQ ID NO: 2206044
uccauucaccacaauaggc

SEQ ID NO: 2206046 - RNA, 19 nt, Artificial Sequence
  Description of Artificial Sequence: Synthetic oligonucleotide
  Sense strand starting at position 825 of SEQ ID NO: 1883631
ucgaauggaacucgauuau

SEQ ID NO: 2206047 - RNA, 19 nt, Artificial Sequence
  Description of Artificial Sequence: Synthetic oligonucleotide
  Antisense strand to SEQ ID NO: 2206046
auaaucgaguuccauucga

SEQ ID NO: 2206048 - RNA, 19 nt, Artificial Sequence
  Description of Artificial Sequence: Synthetic oligonucleotide
  Sense strand starting at position 1046 of SEQ ID NO: 1883631
aaugcuaugugacugggau

SEQ ID NO: 2206049 - RNA, 19 nt, Artificial Sequence
  Description of Artificial Sequence: Synthetic oligonucleotide
  Antisense strand to SEQ ID NO: 2206048
aucccagucacauagcauu

SEQ ID NO: 2206050 - RNA, 19 nt, Artificial Sequence
  Description of Artificial Sequence: Synthetic oligonucleotide
  Sense strand starting at position 1500 of SEQ ID NO: 1883631
agagaaggugucugaguug

SEQ ID NO: 2206051 - RNA, 19 nt, Artificial Sequence
  Description of Artificial Sequence: Synthetic oligonucleotide
  Antisense strand to SEQ ID NO: 2206050
caacucagacaccuucucu

SEQ ID NO: 2206052 - RNA, 19 nt, Artificial Sequence
  Description of Artificial Sequence: Synthetic oligonucleotide
  Sense strand starting at position 549 of SEQ ID NO: 1883631
gagaaagacugagauugaa

SEQ ID NO: 2206053 - RNA, 19 nt, Artificial Sequence
  Description of Artificial Sequence: Synthetic oligonucleotide
  Antisense strand to SEQ ID NO: 2206052
uucaaucucagucuuucuc

SEQ ID NO: 2206054 - RNA, 19 nt, Artificial Sequence
  Description of Artificial Sequence: Synthetic oligonucleotide
  Sense strand starting at position 1499 of SEQ ID NO: 1883631
cagagaaggugucugaguu

SEQ ID NO: 2206055 - RNA, 19 nt, Artificial Sequence
  Description of Artificial Sequence: Synthetic oligonucleotide
  Antisense strand to SEQ ID NO: 2206054
aacucagacaccuucucug

SEQ ID NO: 2206056 - RNA, 19 nt, Artificial Sequence
  Description of Artificial Sequence: Synthetic oligonucleotide
  Sense strand starting at position 832 of SEQ ID NO: 1883631
gaacucgauuauguagagu

SEQ ID NO: 2206057 - RNA, 19 nt, Artificial Sequence
  Description of Artificial Sequence: Synthetic oligonucleotide
  Antisense strand to SEQ ID NO: 2206056
acucuacauaaucgaguuc

SEQ ID NO: 2206058 - RNA, 19 nt, Artificial Sequence
  Description of Artificial Sequence: Synthetic oligonucleotide
  Sense strand starting at position 298 of SEQ ID NO: 1883631
uguccuauuggucaaaguc

SEQ ID NO: 2206059 - RNA, 19 nt, Artificial Sequence
  Description of Artificial Sequence: Synthetic oligonucleotide
  Antisense strand to SEQ ID NO: 2206058
gacuuugaccaauaggaca

SEQ ID NO: 2206060 - RNA, 19 nt, Artificial Sequence
  Description of Artificial Sequence: Synthetic oligonucleotide
  Sense strand starting at position 273 of SEQ ID NO: 1883631
cccagaaugucagucacuu

SEQ ID NO: 2206061 - RNA, 19 nt, Artificial Sequence
  Description of Artificial Sequence: Synthetic oligonucleotide
  Antisense strand to SEQ ID NO: 2206060
aagugacugacauucuggg

SEQ ID NO: 2206062 - RNA, 19 nt, Artificial Sequence
  Description of Artificial Sequence: Synthetic oligonucleotide
  Sense strand starting at position 2131 of SEQ ID NO: 1883631
agagguuuccucugcagag

SEQ ID NO: 2206063 - RNA, 19 nt, Artificial Sequence
  Description of Artificial Sequence: Synthetic oligonucleotide
  Antisense strand to SEQ ID NO: 2206062
cucugcagaggaaaccucu

SEQ ID NO: 2206064 - RNA, 19 nt, Artificial Sequence
  Description of Artificial Sequence: Synthetic oligonucleotide
  Sense strand starting at position 1995 of SEQ ID NO: 1883631
uugauagucucuccacgga

SEQ ID NO: 2206065 - RNA, 19 nt, Artificial Sequence
  Description of Artificial Sequence: Synthetic oligonucleotide
  Antisense strand to SEQ ID NO: 2206064
uccguggagagacuaucaa

SEQ ID NO: 2206066 - RNA, 19 nt, Artificial Sequence
  Description of Artificial Sequence: Synthetic oligonucleotide
  Sense strand starting at position 347 of SEQ ID NO: 1883631
gggauuauacucugccuuu

SEQ ID NO: 2206067 - RNA, 19 nt, Artificial Sequence
  Description of Artificial Sequence: Synthetic oligonucleotide
  Antisense strand to SEQ ID NO: 2206066
aaaggcagaguauaauccc

SEQ ID NO: 2206068 - RNA, 19 nt, Artificial Sequence
  Description of Artificial Sequence: Synthetic oligonucleotide
  Sense strand starting at position 2146 of SEQ ID NO: 1883631
agagcagccucccuuaaau

SEQ ID NO: 2206069 - RNA, 19 nt, Artificial Sequence
  Description of Artificial Sequence: Synthetic oligonucleotide
  Antisense strand to SEQ ID NO: 2206068
auuuaagggaggcugcucu

SEQ ID NO: 2206070 - RNA, 19 nt, Artificial Sequence
  Description of Artificial Sequence: Synthetic oligonucleotide
  Sense strand starting at position 2252 of SEQ ID NO: 1883631
ugguaauugcucgacauuc

SEQ ID NO: 2206071 - RNA, 19 nt, Artificial Sequence
  Description of Artificial Sequence: Synthetic oligonucleotide
  Antisense strand to SEQ ID NO: 2206070
gaaugucgagcaauuacca

SEQ ID NO: 2206072 - RNA, 19 nt, Artificial Sequence
  Description of Artificial Sequence: Synthetic oligonucleotide
  Sense strand starting at position 1191 of SEQ ID NO: 1883631
cuuugagagcagugauucu

SEQ ID NO: 2206073 - RNA, 19 nt, Artificial Sequence
  Description of Artificial Sequence: Synthetic oligonucleotide
  Antisense strand to SEQ ID NO: 2206072
agaaucacugcucucaaag

SEQ ID NO: 2206074 - RNA, 19 nt, Artificial Sequence
  Description of Artificial Sequence: Synthetic oligonucleotide
  Sense strand starting at position 175 of SEQ ID NO: 1883631
gcccaaucuuggguauauc

SEQ ID NO: 2206075 - RNA, 19 nt, Artificial Sequence
  Description of Artificial Sequence: Synthetic oligonucleotide
  Antisense strand to SEQ ID NO: 2206074
gauauacccaagauugggc

SEQ ID NO: 2206076 - RNA, 19 nt, Artificial Sequence
  Description of Artificial Sequence: Synthetic oligonucleotide
  Sense strand starting at position 297 of SEQ ID NO: 1883631
auguccuauuggucaaagu

SEQ ID NO: 2206077 - RNA, 19 nt, Artificial Sequence
  Description of Artificial Sequence: Synthetic oligonucleotide
  Antisense strand to SEQ ID NO: 2206076
acuuugaccaauaggacau

SEQ ID NO: 2206078 - RNA, 19 nt, Artificial Sequence
  Description of Artificial Sequence: Synthetic oligonucleotide
  Sense strand starting at position 2254 of SEQ ID NO: 1883631
guaauugcucgacauuccu

SEQ ID NO: 2206079 - RNA, 19 nt, Artificial Sequence
  Description of Artificial Sequence: Synthetic oligonucleotide
  Antisense strand to SEQ ID NO: 2206078
aggaaugucgagcaauuac

SEQ ID NO: 2206080 - RNA, 19 nt, Artificial Sequence
  Description of Artificial Sequence: Synthetic oligonucleotide
  Sense strand starting at position 173 of SEQ ID NO: 1883631
uugcccaaucuuggguaua

SEQ ID NO: 2206081 - RNA, 19 nt, Artificial Sequence
  Description of Artificial Sequence: Synthetic oligonucleotide
  Antisense strand to SEQ ID NO: 2206080
uauacccaagauugggcaa

SEQ ID NO: 2206082 - RNA, 19 nt, Artificial Sequence
  Description of Artificial Sequence: Synthetic oligonucleotide
  Sense strand starting at position 2318 of SEQ ID NO: 1883631
gcaagcuuaucuuccuaag

SEQ ID NO: 2206083 - RNA, 19 nt, Artificial Sequence
  Description of Artificial Sequence: Synthetic oligonucleotide
  Antisense strand to SEQ ID NO: 2206082
cuuaggaagauaagcuugc

SEQ ID NO: 2206084 - RNA, 19 nt, Artificial Sequence
  Description of Artificial Sequence: Synthetic oligonucleotide
  Sense strand starting at position 723 of SEQ ID NO: 1883631
gugaucagucauggccaau

SEQ ID NO: 2206085 - RNA, 19 nt, Artificial Sequence
  Description of Artificial Sequence: Synthetic oligonucleotide
  Antisense strand to SEQ ID NO: 2206084
auuggccaugacugaucac

SEQ ID NO: 2206086 - RNA, 19 nt, Artificial Sequence
  Description of Artificial Sequence: Synthetic oligonucleotide
  Sense strand starting at position 1450 of SEQ ID NO: 1883631
ucaauugucuaauuggcuu

SEQ ID NO: 2206087 - RNA, 19 nt, Artificial Sequence
  Description of Artificial Sequence: Synthetic oligonucleotide
  Antisense strand to SEQ ID NO: 2206086
aagccaauuagacaauuga

SEQ ID NO: 2206088 - RNA, 19 nt, Artificial Sequence
  Description of Artificial Sequence: Synthetic oligonucleotide
  Sense strand starting at position 1139 of SEQ ID NO: 1883632
ggccuagaacuuuacauua

SEQ ID NO: 2206089 - RNA, 19 nt, Artificial Sequence
  Description of Artificial Sequence: Synthetic oligonucleotide
  Antisense strand to SEQ ID NO: 2206088
uaauguaaaguucuaggcc

SEQ ID NO: 2206090 - RNA, 19 nt, Artificial Sequence
  Description of Artificial Sequence: Synthetic oligonucleotide
  Sense strand starting at position 1510 of SEQ ID NO: 1883632
ggauucugaguugaaucga

SEQ ID NO: 2206091 - RNA, 19 nt, Artificial Sequence
  Description of Artificial Sequence: Synthetic oligonucleotide
  Antisense strand to SEQ ID NO: 2206090
ucgauucaacucagaaucc

SEQ ID NO: 2206092 - RNA, 19 nt, Artificial Sequence
  Description of Artificial Sequence: Synthetic oligonucleotide
  Sense strand starting at position 783 of SEQ ID NO: 1883632
gcuuuccuugcugacauuu

SEQ ID NO: 2206093 - RNA, 19 nt, Artificial Sequence
  Description of Artificial Sequence: Synthetic oligonucleotide
  Antisense strand to SEQ ID NO: 2206092
aaaugucagcaaggaaagc

SEQ ID NO: 2206094 - RNA, 19 nt, Artificial Sequence
  Description of Artificial Sequence: Synthetic oligonucleotide
  Sense strand starting at position 3883 of SEQ ID NO: 1883632
aagaauauugggugacucu

SEQ ID NO: 2206095 - RNA, 19 nt, Artificial Sequence
  Description of Artificial Sequence: Synthetic oligonucleotide
  Antisense strand to SEQ ID NO: 2206094
agagucacccaauauucuu

SEQ ID NO: 2206096 - RNA, 19 nt, Artificial Sequence
  Description of Artificial Sequence: Synthetic oligonucleotide
  Sense strand starting at position 578 of SEQ ID NO: 1883632
ccaagugagauccauuggu

SEQ ID NO: 2206097 - RNA, 19 nt, Artificial Sequence
  Description of Artificial Sequence: Synthetic oligonucleotide
  Antisense strand to SEQ ID NO: 2206096
accaauggaucucacuugg

SEQ ID NO: 2206098 - RNA, 19 nt, Artificial Sequence
  Description of Artificial Sequence: Synthetic oligonucleotide
  Sense strand starting at position 3216 of SEQ ID NO: 1883632
ucugguuguauugaagaac

SEQ ID NO: 2206099 - RNA, 19 nt, Artificial Sequence
  Description of Artificial Sequence: Synthetic oligonucleotide
  Antisense strand to SEQ ID NO: 2206098
guucuucaauacaaccaga

SEQ ID NO: 2206100 - RNA, 19 nt, Artificial Sequence
  Description of Artificial Sequence: Synthetic oligonucleotide
  Sense strand starting at position 3586 of SEQ ID NO: 1883632
guguuacaaucauuugcca

SEQ ID NO: 2206101 - RNA, 19 nt, Artificial Sequence
  Description of Artificial Sequence: Synthetic oligonucleotide
  Antisense strand to SEQ ID NO: 2206100
uggcaaaugauuguaacac

SEQ ID NO: 2206102 - RNA, 19 nt, Artificial Sequence
  Description of Artificial Sequence: Synthetic oligonucleotide
  Sense strand starting at position 3886 of SEQ ID NO: 1883632
aauauugggugacucuaau

SEQ ID NO: 2206103 - RNA, 19 nt, Artificial Sequence
  Description of Artificial Sequence: Synthetic oligonucleotide
  Antisense strand to SEQ ID NO: 2206102
auuagagucacccaauauu

SEQ ID NO: 2206104 - RNA, 19 nt, Artificial Sequence
  Description of Artificial Sequence: Synthetic oligonucleotide
  Sense strand starting at position 129 of SEQ ID NO: 1883632
acgugaauuuguuccaagu

SEQ ID NO: 2206105 - RNA, 19 nt, Artificial Sequence
  Description of Artificial Sequence: Synthetic oligonucleotide
  Antisense strand to SEQ ID NO: 2206104
acuuggaacaaauucacgu

SEQ ID NO: 2206106 - RNA, 19 nt, Artificial Sequence
  Description of Artificial Sequence: Synthetic oligonucleotide
  Sense strand starting at position 3012 of SEQ ID NO: 1883632
gagagcagucgagagugaa

SEQ ID NO: 2206107 - RNA, 19 nt, Artificial Sequence
  Description of Artificial Sequence: Synthetic oligonucleotide
  Antisense strand to SEQ ID NO: 2206106
uucacucucgacugcucuc

SEQ ID NO: 2206108 - RNA, 19 nt, Artificial Sequence
  Description of Artificial Sequence: Synthetic oligonucleotide
  Sense strand starting at position 2459 of SEQ ID NO: 1883632
aaggcaugucccgaaauga

SEQ ID NO: 2206109 - RNA, 19 nt, Artificial Sequence
  Description of Artificial Sequence: Synthetic oligonucleotide
  Antisense strand to SEQ ID NO: 2206108
ucauuucgggacaugccuu

SEQ ID NO: 2206110 - RNA, 19 nt, Artificial Sequence
  Description of Artificial Sequence: Synthetic oligonucleotide
  Sense strand starting at position 1434 of SEQ ID NO: 1883632
cagaaagucgaugacuguu

SEQ ID NO: 2206111 - RNA, 19 nt, Artificial Sequence
  Description of Artificial Sequence: Synthetic oligonucleotide
  Antisense strand to SEQ ID NO: 2206110
aacagucaucgacuuucug

SEQ ID NO: 2206112 - RNA, 19 nt, Artificial Sequence
  Description of Artificial Sequence: Synthetic oligonucleotide
  Sense strand starting at position 495 of SEQ ID NO: 1883632
guaaaucagcuggaguuga

SEQ ID NO: 2206113 - RNA, 19 nt, Artificial Sequence
  Description of Artificial Sequence: Synthetic oligonucleotide
  Antisense strand to SEQ ID NO: 2206112
ucaacuccagcugauuuac

SEQ ID NO: 2206114 - RNA, 19 nt, Artificial Sequence
  Description of Artificial Sequence: Synthetic oligonucleotide
  Sense strand starting at position 1481 of SEQ ID NO: 1883632
gugaauggcaccuaaguga

SEQ ID NO: 2206115 - RNA, 19 nt, Artificial Sequence
  Description of Artificial Sequence: Synthetic oligonucleotide
  Antisense strand to SEQ ID NO: 2206114
ucacuuaggugccauucac

SEQ ID NO: 2206116 - RNA, 19 nt, Artificial Sequence
  Description of Artificial Sequence: Synthetic oligonucleotide
  Sense strand starting at position 302 of SEQ ID NO: 1883632
ccagucugugagcagagaa

SEQ ID NO: 2206117 - RNA, 19 nt, Artificial Sequence
  Description of Artificial Sequence: Synthetic oligonucleotide
  Antisense strand to SEQ ID NO: 2206116
uucucugcucacagacugg

SEQ ID NO: 2206118 - RNA, 19 nt, Artificial Sequence
  Description of Artificial Sequence: Synthetic oligonucleotide
  Sense strand starting at position 323 of SEQ ID NO: 1883632
guuauuguagaguguauuu

SEQ ID NO: 2206119 - RNA, 19 nt, Artificial Sequence
  Description of Artificial Sequence: Synthetic oligonucleotide
  Antisense strand to SEQ ID NO: 2206118
aaauacacucuacaauaac

SEQ ID NO: 2206120 - RNA, 19 nt, Artificial Sequence
  Description of Artificial Sequence: Synthetic oligonucleotide
  Sense strand starting at position 310 of SEQ ID NO: 1883632
ugagcagagaaggguuauu

SEQ ID NO: 2206121 - RNA, 19 nt, Artificial Sequence
  Description of Artificial Sequence: Synthetic oligonucleotide
  Antisense strand to SEQ ID NO: 2206120
aauaacccuucucugcuca

SEQ ID NO: 2206122 - RNA, 19 nt, Artificial Sequence
  Description of Artificial Sequence: Synthetic oligonucleotide
  Sense strand starting at position 1131 of SEQ ID NO: 1883632
auuccuuuggccuagaacu

SEQ ID NO: 2206123 - RNA, 19 nt, Artificial Sequence
  Description of Artificial Sequence: Synthetic oligonucleotide
  Antisense strand to SEQ ID NO: 2206122
aguucuaggccaaaggaau

SEQ ID NO: 2206124 - RNA, 19 nt, Artificial Sequence
  Description of Artificial Sequence: Synthetic oligonucleotide
  Sense strand starting at position 875 of SEQ ID NO: 1883632
ggucuuuaucgacauuaca

SEQ ID NO: 2206125 - RNA, 19 nt, Artificial Sequence
  Description of Artificial Sequence: Synthetic oligonucleotide
  Antisense strand to SEQ ID NO: 2206124
uguaaugucgauaaagacc

SEQ ID NO: 2206126 - RNA, 19 nt, Artificial Sequence
  Description of Artificial Sequence: Synthetic oligonucleotide
  Sense strand starting at position 1381 of SEQ ID NO: 1883632
uuuggugauuagucagaaa

SEQ ID NO: 2206127 - RNA, 19 nt, Artificial Sequence
  Description of Artificial Sequence: Synthetic oligonucleotide
  Antisense strand to SEQ ID NO: 2206126
uuucugacuaaucaccaaa

SEQ ID NO: 2206128 - RNA, 19 nt, Artificial Sequence
  Description of Artificial Sequence: Synthetic oligonucleotide
  Sense strand starting at position 3689 of SEQ ID NO: 1883632
ggaguccuugccuacaaac

SEQ ID NO: 2206129 - RNA, 19 nt, Artificial Sequence
  Description of Artificial Sequence: Synthetic oligonucleotide
  Antisense strand to SEQ ID NO: 2206128
guuuguaggcaaggacucc

SEQ ID NO: 2206130 - RNA, 19 nt, Artificial Sequence
  Description of Artificial Sequence: Synthetic oligonucleotide
  Sense strand starting at position 3039 of SEQ ID NO: 1883632
ggcugugaucuuuacacaa

SEQ ID NO: 2206131 - RNA, 19 nt, Artificial Sequence
  Description of Artificial Sequence: Synthetic oligonucleotide
  Antisense strand to SEQ ID NO: 2206130
uuguguaaagaucacagcc

SEQ ID NO: 2206132 - RNA, 19 nt, Artificial Sequence
  Description of Artificial Sequence: Synthetic oligonucleotide
  Sense strand starting at position 12 of SEQ ID NO: 1883632
uugacuuguguuuaccaga

SEQ ID NO: 2206133 - RNA, 19 nt, Artificial Sequence
  Description of Artificial Sequence: Synthetic oligonucleotide
  Antisense strand to SEQ ID NO: 2206132
ucugguaaacacaagucaa

SEQ ID NO: 2206134 - RNA, 19 nt, Artificial Sequence
  Description of Artificial Sequence: Synthetic oligonucleotide
  Sense strand starting at position 1787 of SEQ ID NO: 1883632
ggguuugagcuccauccaa

SEQ ID NO: 2206135 - RNA, 19 nt, Artificial Sequence
  Description of Artificial Sequence: Synthetic oligonucleotide
  Antisense strand to SEQ ID NO: 2206134
uuggauggagcucaaaccc

SEQ ID NO: 2206136 - RNA, 19 nt, Artificial Sequence
  Description of Artificial Sequence: Synthetic oligonucleotide
  Sense strand starting at position 3845 of SEQ ID NO: 1883632
gugcucucuggagaccuaa

SEQ ID NO: 2206137 - RNA, 19 nt, Artificial Sequence
  Description of Artificial Sequence: Synthetic oligonucleotide
  Antisense strand to SEQ ID NO: 2206136
uuaggucuccagagagcac

SEQ ID NO: 2206138 - RNA, 19 nt, Artificial Sequence
  Description of Artificial Sequence: Synthetic oligonucleotide
  Sense strand starting at position 462 of SEQ ID NO: 1883632
agaucaucucuauacguuu

SEQ ID NO: 2206139 - RNA, 19 nt, Artificial Sequence
  Description of Artificial Sequence: Synthetic oligonucleotide
  Antisense strand to SEQ ID NO: 2206138
aaacguauagagaugaucu

SEQ ID NO: 2206140 - RNA, 19 nt, Artificial Sequence
  Description of Artificial Sequence: Synthetic oligonucleotide
  Sense strand starting at position 1703 of SEQ ID NO: 1883632
uuugacacauccuugggua

SEQ ID NO: 2206141 - RNA, 19 nt, Artificial Sequence
  Description of Artificial Sequence: Synthetic oligonucleotide
  Antisense strand to SEQ ID NO: 2206140
uacccaaggaugugucaaa

SEQ ID NO: 2206142 - RNA, 19 nt, Artificial Sequence
  Description of Artificial Sequence: Synthetic oligonucleotide
  Sense strand starting at position 2449 of SEQ ID NO: 1883632
gaaaucauccaaggcaugu

SEQ ID NO: 2206143 - RNA, 19 nt, Artificial Sequence
  Description of Artificial Sequence: Synthetic oligonucleotide
  Antisense strand to SEQ ID NO: 2206142
acaugccuuggaugauuuc

SEQ ID NO: 2206144 - RNA, 19 nt, Artificial Sequence
  Description of Artificial Sequence: Synthetic oligonucleotide
  Sense strand starting at position 1133 of SEQ ID NO: 1883632
uccuuuggccuagaacuuu

SEQ ID NO: 2206145 - RNA, 19 nt, Artificial Sequence
  Description of Artificial Sequence: Synthetic oligonucleotide
  Antisense strand to SEQ ID NO: 2206144
aaaguucuaggccaaagga

SEQ ID NO: 2206146 - RNA, 19 nt, Artificial Sequence
  Description of Artificial Sequence: Synthetic oligonucleotide
  Sense strand starting at position 17 of SEQ ID NO: 1883632
uuguguuuaccagaacuuu

SEQ ID NO: 2206147 - RNA, 19 nt, Artificial Sequence
  Description of Artificial Sequence: Synthetic oligonucleotide
  Antisense strand to SEQ ID NO: 2206146
aaaguucugguaaacacaa

SEQ ID NO: 2206148 - RNA, 19 nt, Artificial Sequence
  Description of Artificial Sequence: Synthetic oligonucleotide
  Sense strand starting at position 320 of SEQ ID NO: 1883632
aggguuauuguagagugua

SEQ ID NO: 2206149 - RNA, 19 nt, Artificial Sequence
  Description of Artificial Sequence: Synthetic oligonucleotide
  Antisense strand to SEQ ID NO: 2206148
uacacucuacaauaacccu

SEQ ID NO: 2206150 - RNA, 19 nt, Artificial Sequence
  Description of Artificial Sequence: Synthetic oligonucleotide
  Sense strand starting at position 3257 of SEQ ID NO: 1883632
gcacgaaacgguuaaugac

SEQ ID NO: 2206151 - RNA, 19 nt, Artificial Sequence
  Description of Artificial Sequence: Synthetic oligonucleotide
  Antisense strand to SEQ ID NO: 2206150
gucauuaaccguuucgugc

SEQ ID NO: 2206152 - RNA, 19 nt, Artificial Sequence
  Description of Artificial Sequence: Synthetic oligonucleotide
  Sense strand starting at position 1507 of SEQ ID NO: 1883632
uguggauucugaguugaau

SEQ ID NO: 2206153 - RNA, 19 nt, Artificial Sequence
  Description of Artificial Sequence: Synthetic oligonucleotide
  Antisense strand to SEQ ID NO: 2206152
auucaacucagaauccaca

SEQ ID NO: 2206154 - RNA, 19 nt, Artificial Sequence
  Description of Artificial Sequence: Synthetic oligonucleotide
  Sense strand starting at position 3576 of SEQ ID NO: 1883632
gaguuauaauguguuacaa

SEQ ID NO: 2206155 - RNA, 19 nt, Artificial Sequence
  Description of Artificial Sequence: Synthetic oligonucleotide
  Antisense strand to SEQ ID NO: 2206154
uuguaacacauuauaacuc

SEQ ID NO: 2206156 - RNA, 19 nt, Artificial Sequence
  Description of Artificial Sequence: Synthetic oligonucleotide
  Sense strand starting at position 1005 of SEQ ID NO: 1883632
aaaccaugccucgagucau

SEQ ID NO: 2206157 - RNA, 19 nt, Artificial Sequence
  Description of Artificial Sequence: Synthetic oligonucleotide
  Antisense strand to SEQ ID NO: 2206156
augacucgaggcaugguuu

SEQ ID NO: 2206158 - RNA, 19 nt, Artificial Sequence
  Description of Artificial Sequence: Synthetic oligonucleotide
  Sense strand starting at position 28 of SEQ ID NO: 1883632
agaacuuugugucuacaug

SEQ ID NO: 2206159 - RNA, 19 nt, Artificial Sequence
  Description of Artificial Sequence: Synthetic oligonucleotide
  Antisense strand to SEQ ID NO: 2206158
cauguagacacaaaguucu

SEQ ID NO: 2206160 - RNA, 19 nt, Artificial Sequence
  Description of Artificial Sequence: Synthetic oligonucleotide
  Sense strand starting at position 447 of SEQ ID NO: 1883632
uuuauagagcauuguagau

SEQ ID NO: 2206161 - RNA, 19 nt, Artificial Sequence
  Description of Artificial Sequence: Synthetic oligonucleotide
  Antisense strand to SEQ ID NO: 2206160
aucuacaaugcucuauaaa

SEQ ID NO: 2206162 - RNA, 19 nt, Artificial Sequence
  Description of Artificial Sequence: Synthetic oligonucleotide
  Sense strand starting at position 583 of SEQ ID NO: 1883632
ugagauccauuggugcuaa

SEQ ID NO: 2206163 - RNA, 19 nt, Artificial Sequence
  Description of Artificial Sequence: Synthetic oligonucleotide
  Antisense strand to SEQ ID NO: 2206162
uuagcaccaauggaucuca

SEQ ID NO: 2206164 - RNA, 19 nt, Artificial Sequence
  Description of Artificial Sequence: Synthetic oligonucleotide
  Sense strand starting at position 460 of SEQ ID NO: 1883632
guagaucaucucuauacgu

SEQ ID NO: 2206165 - RNA, 19 nt, Artificial Sequence
  Description of Artificial Sequence: Synthetic oligonucleotide
  Antisense strand to SEQ ID NO: 2206164
acguauagagaugaucuac

SEQ ID NO: 2206166 - RNA, 19 nt, Artificial Sequence
  Description of Artificial Sequence: Synthetic oligonucleotide
  Sense strand starting at position 1015 of SEQ ID NO: 1883632
ucgagucauguacaaaugu

SEQ ID NO: 2206167 - RNA, 19 nt, Artificial Sequence
  Description of Artificial Sequence: Synthetic oligonucleotide
  Antisense strand to SEQ ID NO: 2206166
acauuuguacaugacucga

SEQ ID NO: 2206168 - RNA, 19 nt, Artificial Sequence
  Description of Artificial Sequence: Synthetic oligonucleotide
  Sense strand starting at position 1833 of SEQ ID NO: 1883633
uggaaauggcuggauugua

SEQ ID NO: 2206169 - RNA, 19 nt, Artificial Sequence
  Description of Artificial Sequence: Synthetic oligonucleotide
  Antisense strand to SEQ ID NO: 2206168
uacaauccagccauuucca

SEQ ID NO: 2206170 - RNA, 19 nt, Artificial Sequence
  Description of Artificial Sequence: Synthetic oligonucleotide
  Sense strand starting at position 1679 of SEQ ID NO: 1883633
guggauagaccacagcuau

SEQ ID NO: 2206171 - RNA, 19 nt, Artificial Sequence
  Description of Artificial Sequence: Synthetic oligonucleotide
  Antisense strand to SEQ ID NO: 2206170
auagcuguggucuauccac

SEQ ID NO: 2206172 - RNA, 19 nt, Artificial Sequence
  Description of Artificial Sequence: Synthetic oligonucleotide
  Sense strand starting at position 1173 of SEQ ID NO: 1883633
uguacuugacauugaauaa

SEQ ID NO: 2206173 - RNA, 19 nt, Artificial Sequence
  Description of Artificial Sequence: Synthetic oligonucleotide
  Antisense strand to SEQ ID NO: 2206172
uuauucaaugucaaguaca

SEQ ID NO: 2206174 - RNA, 19 nt, Artificial Sequence
  Description of Artificial Sequence: Synthetic oligonucleotide
  Sense strand starting at position 2575 of SEQ ID NO: 1883633
auguaugugaugcaugaga

SEQ ID NO: 2206175 - RNA, 19 nt, Artificial Sequence
  Description of Artificial Sequence: Synthetic oligonucleotide
  Antisense strand to SEQ ID NO: 2206174
ucucaugcaucacauacau

SEQ ID NO: 2206176 - RNA, 19 nt, Artificial Sequence
  Description of Artificial Sequence: Synthetic oligonucleotide
  Sense strand starting at position 3739 of SEQ ID NO: 1883633
cacugagagcuaugaucua

SEQ ID NO: 2206177 - RNA, 19 nt, Artificial Sequence
  Description of Artificial Sequence: Synthetic oligonucleotide
  Antisense strand to SEQ ID NO: 2206176
uagaucauagcucucagug

SEQ ID NO: 2206178 - RNA, 19 nt, Artificial Sequence
  Description of Artificial Sequence: Synthetic oligonucleotide
  Sense strand starting at position 3090 of SEQ ID NO: 1883633
ugacauugaucugcagaug

SEQ ID NO: 2206179 - RNA, 19 nt, Artificial Sequence
  Description of Artificial Sequence: Synthetic oligonucleotide
  Antisense strand to SEQ ID NO: 2206178
caucugcagaucaauguca

SEQ ID NO: 2206180 - RNA, 19 nt, Artificial Sequence
  Description of Artificial Sequence: Synthetic oligonucleotide
  Sense strand starting at position 2808 of SEQ ID NO: 1883633
agaguaugucuccaaucuu

SEQ ID NO: 2206181 - RNA, 19 nt, Artificial Sequence
  Description of Artificial Sequence: Synthetic oligonucleotide
  Antisense strand to SEQ ID NO: 2206180
aagauuggagacauacucu

SEQ ID NO: 2206182 - RNA, 19 nt, Artificial Sequence
  Description of Artificial Sequence: Synthetic oligonucleotide
  Sense strand starting at position 3056 of SEQ ID NO: 1883633
ggaagagucgacgauguua

SEQ ID NO: 2206183 - RNA, 19 nt, Artificial Sequence
  Description of Artificial Sequence: Synthetic oligonucleotide
  Antisense strand to SEQ ID NO: 2206182
uaacaucgucgacucuucc

SEQ ID NO: 2206184 - RNA, 19 nt, Artificial Sequence
  Description of Artificial Sequence: Synthetic oligonucleotide
  Sense strand starting at position 1215 of SEQ ID NO: 1883633
acuugaguaguuugacaga

SEQ ID NO: 2206185 - RNA, 19 nt, Artificial Sequence
  Description of Artificial Sequence: Synthetic oligonucleotide
  Antisense strand to SEQ ID NO: 2206184
ucugucaaacuacucaagu

SEQ ID NO: 2206186 - RNA, 19 nt, Artificial Sequence
  Description of Artificial Sequence: Synthetic oligonucleotide
  Sense strand starting at position 3107 of SEQ ID NO: 1883633
ugcaaugcagucuaaauga

SEQ ID NO: 2206187 - RNA, 19 nt, Artificial Sequence
  Description of Artificial Sequence: Synthetic oligonucleotide
  Antisense strand to SEQ ID NO: 2206186
ucauuuagacugcauugca

SEQ ID NO: 2206188 - RNA, 19 nt, Artificial Sequence
  Description of Artificial Sequence: Synthetic oligonucleotide
  Sense strand starting at position 3079 of SEQ ID NO: 1883633
gccuauucuccugacauug

SEQ ID NO: 2206189 - RNA, 19 nt, Artificial Sequence
  Description of Artificial Sequence: Synthetic oligonucleotide
  Antisense strand to SEQ ID NO: 2206188
caaugucaggagaauaggc

SEQ ID NO: 2206190 - RNA, 19 nt, Artificial Sequence
  Description of Artificial Sequence: Synthetic oligonucleotide
  Sense strand starting at position 3935 of SEQ ID NO: 1883633
cugugucauuguucuauuu

SEQ ID NO: 2206191 - RNA, 19 nt, Artificial Sequence
  Description of Artificial Sequence: Synthetic oligonucleotide
  Antisense strand to SEQ ID NO: 2206190
aaauagaacaaugacacag

SEQ ID NO: 2206192 - RNA, 19 nt, Artificial Sequence
  Description of Artificial Sequence: Synthetic oligonucleotide
  Sense strand starting at position 2568 of SEQ ID NO: 1883633
uuaucaaauguaugugaug

SEQ ID NO: 2206193 - RNA, 19 nt, Artificial Sequence
  Description of Artificial Sequence: Synthetic oligonucleotide
  Antisense strand to SEQ ID NO: 2206192
caucacauacauuugauaa

SEQ ID NO: 2206194 - RNA, 19 nt, Artificial Sequence
  Description of Artificial Sequence: Synthetic oligonucleotide
  Sense strand starting at position 1651 of SEQ ID NO: 1883633
auccgaucagcagagucau

SEQ ID NO: 2206195 - RNA, 19 nt, Artificial Sequence
  Description of Artificial Sequence: Synthetic oligonucleotide
  Antisense strand to SEQ ID NO: 2206194
augacucugcugaucggau

SEQ ID NO: 2206196 - RNA, 19 nt, Artificial Sequence
  Description of Artificial Sequence: Synthetic oligonucleotide
  Sense strand starting at position 1231 of SEQ ID NO: 1883633
agaggaugcacccgugaaa

SEQ ID NO: 2206197 - RNA, 19 nt, Artificial Sequence
  Description of Artificial Sequence: Synthetic oligonucleotide
  Antisense strand to SEQ ID NO: 2206196
uuucacgggugcauccucu

SEQ ID NO: 2206198 - RNA, 19 nt, Artificial Sequence
  Description of Artificial Sequence: Synthetic oligonucleotide
  Sense strand starting at position 1706 of SEQ ID NO: 1883633
ucagguguugauggacauu

SEQ ID NO: 2206199 - RNA, 19 nt, Artificial Sequence
  Description of Artificial Sequence: Synthetic oligonucleotide
  Antisense strand to SEQ ID NO: 2206198
aauguccaucaacaccuga

SEQ ID NO: 2206200 - RNA, 19 nt, Artificial Sequence
  Description of Artificial Sequence: Synthetic oligonucleotide
  Sense strand starting at position 606 of SEQ ID NO: 1883633
gguggaaugaauugucucu

SEQ ID NO: 2206201 - RNA, 19 nt, Artificial Sequence
  Description of Artificial Sequence: Synthetic oligonucleotide
  Antisense strand to SEQ ID NO: 2206200
agagacaauucauuccacc

SEQ ID NO: 2206202 - RNA, 19 nt, Artificial Sequence
  Description of Artificial Sequence: Synthetic oligonucleotide
  Sense strand starting at position 1832 of SEQ ID NO: 1883633
uuggaaauggcuggauugu

SEQ ID NO: 2206203 - RNA, 19 nt, Artificial Sequence
  Description of Artificial Sequence: Synthetic oligonucleotide
  Antisense strand to SEQ ID NO: 2206202
acaauccagccauuuccaa

SEQ ID NO: 2206204 - RNA, 19 nt, Artificial Sequence
  Description of Artificial Sequence: Synthetic oligonucleotide
  Sense strand starting at position 3620 of SEQ ID NO: 1883633
uugauacaauccguuaauc

SEQ ID NO: 2206205 - RNA, 19 nt, Artificial Sequence
  Description of Artificial Sequence: Synthetic oligonucleotide
  Antisense strand to SEQ ID NO: 2206204
gauuaacggauuguaucaa

SEQ ID NO: 2206206 - RNA, 19 nt, Artificial Sequence
  Description of Artificial Sequence: Synthetic oligonucleotide
  Sense strand starting at position 1843 of SEQ ID NO: 1883633
uggauuguacgauaggugu

SEQ ID NO: 2206207 - RNA, 19 nt, Artificial Sequence
  Description of Artificial Sequence: Synthetic oligonucleotide
  Antisense strand to SEQ ID NO: 2206206
acaccuaucguacaaucca

SEQ ID NO: 2206208 - RNA, 19 nt, Artificial Sequence
  Description of Artificial Sequence: Synthetic oligonucleotide
  Sense strand starting at position 3028 of SEQ ID NO: 1883633
gcaaauauauucucugagu

SEQ ID NO: 2206209 - RNA, 19 nt, Artificial Sequence
  Description of Artificial Sequence: Synthetic oligonucleotide
  Antisense strand to SEQ ID NO: 2206208
acucagagaauauauuugc

SEQ ID NO: 2206210 - RNA, 19 nt, Artificial Sequence
  Description of Artificial Sequence: Synthetic oligonucleotide
  Sense strand starting at position 1882 of SEQ ID NO: 1883633
cucguaaagauuggguaau

SEQ ID NO: 2206211 - RNA, 19 nt, Artificial Sequence
  Description of Artificial Sequence: Synthetic oligonucleotide
  Antisense strand to SEQ ID NO: 2206210
auuacccaaucuuuacgag

SEQ ID NO: 2206212 - RNA, 19 nt, Artificial Sequence
  Description of Artificial Sequence: Synthetic oligonucleotide
  Sense strand starting at position 1815 of SEQ ID NO: 1883633
cggguuaauauccaggcuu

SEQ ID NO: 2206213 - RNA, 19 nt, Artificial Sequence
  Description of Artificial Sequence: Synthetic oligonucleotide
  Antisense strand to SEQ ID NO: 2206212
aagccuggauauuaacccg

SEQ ID NO: 2206214 - RNA, 19 nt, Artificial Sequence
  Description of Artificial Sequence: Synthetic oligonucleotide
  Sense strand starting at position 3058 of SEQ ID NO: 1883633
aagagucgacgauguuaag

SEQ ID NO: 2206215 - RNA, 19 nt, Artificial Sequence
  Description of Artificial Sequence: Synthetic oligonucleotide
  Antisense strand to SEQ ID NO: 2206214
cuuaacaucgucgacucuu

SEQ ID NO: 2206216 - RNA, 19 nt, Artificial Sequence
  Description of Artificial Sequence: Synthetic oligonucleotide
  Sense strand starting at position 2531 of SEQ ID NO: 1883633
uuugaagaguuaucucugu

SEQ ID NO: 2206217 - RNA, 19 nt, Artificial Sequence
  Description of Artificial Sequence: Synthetic oligonucleotide
  Antisense strand to SEQ ID NO: 2206216
acagagauaacucuucaaa

SEQ ID NO: 2206218 - RNA, 19 nt, Artificial Sequence
  Description of Artificial Sequence: Synthetic oligonucleotide
  Sense strand starting at position 54 of SEQ ID NO: 1883633
gccacuccacugugaugaa

SEQ ID NO: 2206219 - RNA, 19 nt, Artificial Sequence
  Description of Artificial Sequence: Synthetic oligonucleotide
  Antisense strand to SEQ ID NO: 2206218
uucaucacaguggaguggc

SEQ ID NO: 2206220 - RNA, 19 nt, Artificial Sequence
  Description of Artificial Sequence: Synthetic oligonucleotide
  Sense strand starting at position 3055 of SEQ ID NO: 1883633
aggaagagucgacgauguu

SEQ ID NO: 2206221 - RNA, 19 nt, Artificial Sequence
  Description of Artificial Sequence: Synthetic oligonucleotide
  Antisense strand to SEQ ID NO: 2206220
aacaucgucgacucuuccu

SEQ ID NO: 2206222 - RNA, 19 nt, Artificial Sequence
  Description of Artificial Sequence: Synthetic oligonucleotide
  Sense strand starting at position 476 of SEQ ID NO: 1883633
uugauugagcgcuacgaaa

SEQ ID NO: 2206223 - RNA, 19 nt, Artificial Sequence
  Description of Artificial Sequence: Synthetic oligonucleotide
  Antisense strand to SEQ ID NO: 2206222
uuucguagcgcucaaucaa

SEQ ID NO: 2206224 - RNA, 19 nt, Artificial Sequence
  Description of Artificial Sequence: Synthetic oligonucleotide
  Sense strand starting at position 1763 of SEQ ID NO: 1883633
cuaugaaucucugugcaca

SEQ ID NO: 2206225 - RNA, 19 nt, Artificial Sequence
  Description of Artificial Sequence: Synthetic oligonucleotide
  Antisense strand to SEQ ID NO: 2206224
ugugcacagagauucauag

SEQ ID NO: 2206226 - RNA, 19 nt, Artificial Sequence
  Description of Artificial Sequence: Synthetic oligonucleotide
  Sense strand starting at position 3772 of SEQ ID NO: 1883633
uucuauauagugugaggua

SEQ ID NO: 2206227 - RNA, 19 nt, Artificial Sequence
  Description of Artificial Sequence: Synthetic oligonucleotide
  Antisense strand to SEQ ID NO: 2206226
uaccucacacuauauagaa

SEQ ID NO: 2206228 - RNA, 19 nt, Artificial Sequence
  Description of Artificial Sequence: Synthetic oligonucleotide
  Sense strand starting at position 107 of SEQ ID NO: 1883633
cagacucugagucgucaga

SEQ ID NO: 2206229 - RNA, 19 nt, Artificial Sequence
  Description of Artificial Sequence: Synthetic oligonucleotide
  Antisense strand to SEQ ID NO: 2206228
ucugacgacucagagucug

SEQ ID NO: 2206230 - RNA, 19 nt, Artificial Sequence
  Description of Artificial Sequence: Synthetic oligonucleotide
  Sense strand starting at position 1646 of SEQ ID NO: 1883633
uguguauccgaucagcaga

SEQ ID NO: 2206231 - RNA, 19 nt, Artificial Sequence
  Description of Artificial Sequence: Synthetic oligonucleotide
  Antisense strand to SEQ ID NO: 2206230
ucugcugaucggauacaca

SEQ ID NO: 2206232 - RNA, 19 nt, Artificial Sequence
  Description of Artificial Sequence: Synthetic oligonucleotide
  Sense strand starting at position 109 of SEQ ID NO: 1883633
gacucugagucgucagaug

SEQ ID NO: 2206233 - RNA, 19 nt, Artificial Sequence
  Description of Artificial Sequence: Synthetic oligonucleotide
  Antisense strand to SEQ ID NO: 2206232
caucugacgacucagaguc

SEQ ID NO: 2206234 - RNA, 19 nt, Artificial Sequence
  Description of Artificial Sequence: Synthetic oligonucleotide
  Sense strand starting at position 3041 of SEQ ID NO: 1883633
cugagucuguggcuaggaa

SEQ ID NO: 2206235 - RNA, 19 nt, Artificial Sequence
  Description of Artificial Sequence: Synthetic oligonucleotide
  Antisense strand to SEQ ID NO: 2206234
uuccuagccacagacucag

SEQ ID NO: 2206236 - RNA, 19 nt, Artificial Sequence
  Description of Artificial Sequence: Synthetic oligonucleotide
  Sense strand starting at position 675 of SEQ ID NO: 1883633
guuucugggaucugugacu

SEQ ID NO: 2206237 - RNA, 19 nt, Artificial Sequence
  Description of Artificial Sequence: Synthetic oligonucleotide
  Antisense strand to SEQ ID NO: 2206236
agucacagaucccagaaac

SEQ ID NO: 2206238 - RNA, 19 nt, Artificial Sequence
  Description of Artificial Sequence: Synthetic oligonucleotide
  Sense strand starting at position 612 of SEQ ID NO: 1883633
augaauugucucugccaug

SEQ ID NO: 2206239 - RNA, 19 nt, Artificial Sequence
  Description of Artificial Sequence: Synthetic oligonucleotide
  Antisense strand to SEQ ID NO: 2206238
cauggcagagacaauucau

SEQ ID NO: 2206240 - RNA, 19 nt, Artificial Sequence
  Description of Artificial Sequence: Synthetic oligonucleotide
  Sense strand starting at position 2201 of SEQ ID NO: 1883633
ccauaucaguggguauguu

SEQ ID NO: 2206241 - RNA, 19 nt, Artificial Sequence
  Description of Artificial Sequence: Synthetic oligonucleotide
  Antisense strand to SEQ ID NO: 2206240
aacauacccacugauaugg

SEQ ID NO: 2206242 - RNA, 19 nt, Artificial Sequence
  Description of Artificial Sequence: Synthetic oligonucleotide
  Sense strand starting at position 1881 of SEQ ID NO: 1883633
gcucguaaagauuggguaa

SEQ ID NO: 2206243 - RNA, 19 nt, Artificial Sequence
  Description of Artificial Sequence: Synthetic oligonucleotide
  Antisense strand to SEQ ID NO: 2206242
uuacccaaucuuuacgagc

SEQ ID NO: 2206244 - RNA, 19 nt, Artificial Sequence
  Description of Artificial Sequence: Synthetic oligonucleotide
  Sense strand starting at position 550 of SEQ ID NO: 1883633
cucaacgugugaucccaau

SEQ ID NO: 2206245 - RNA, 19 nt, Artificial Sequence
  Description of Artificial Sequence: Synthetic oligonucleotide
  Antisense strand to SEQ ID NO: 2206244
auugggaucacacguugag

SEQ ID NO: 2206246 - RNA, 19 nt, Artificial Sequence
  Description of Artificial Sequence: Synthetic oligonucleotide
  Sense strand starting at position 2729 of SEQ ID NO: 1883633
gggagaaucugcuucguug

SEQ ID NO: 2206247 - RNA, 19 nt, Artificial Sequence
  Description of Artificial Sequence: Synthetic oligonucleotide
  Antisense strand to SEQ ID NO: 2206246
caacgaagcagauucuccc

SEQ ID NO: 2206248 - RNA, 19 nt, Artificial Sequence
  Description of Artificial Sequence: Synthetic oligonucleotide
  Sense strand starting at position 2295 of SEQ ID NO: 1883634
accacuauccaugggaauu

SEQ ID NO: 2206249 - RNA, 19 nt, Artificial Sequence
  Description of Artificial Sequence: Synthetic oligonucleotide
  Antisense strand to SEQ ID NO: 2206248
aauucccauggauaguggu

SEQ ID NO: 2206250 - RNA, 19 nt, Artificial Sequence
  Description of Artificial Sequence: Synthetic oligonucleotide
  Sense strand starting at position 497 of SEQ ID NO: 1883634
ugcagcuuccuguugucaa

SEQ ID NO: 2206251 - RNA, 19 nt, Artificial Sequence
  Description of Artificial Sequence: Synthetic oligonucleotide
  Antisense strand to SEQ ID NO: 2206250
uugacaacaggaagcugca

SEQ ID NO: 2206252 - RNA, 19 nt, Artificial Sequence
  Description of Artificial Sequence: Synthetic oligonucleotide
  Sense strand starting at position 3123 of SEQ ID NO: 1883634
uuucucuagcuagagaaca

SEQ ID NO: 2206253 - RNA, 19 nt, Artificial Sequence
  Description of Artificial Sequence: Synthetic oligonucleotide
  Antisense strand to SEQ ID NO: 2206252
uguucucuagcuagagaaa

SEQ ID NO: 2206254 - RNA, 19 nt, Artificial Sequence
  Description of Artificial Sequence: Synthetic oligonucleotide
  Sense strand starting at position 450 of SEQ ID NO: 1883634
aaguauaggcucuagaauc

SEQ ID NO: 2206255 - RNA, 19 nt, Artificial Sequence
  Description of Artificial Sequence: Synthetic oligonucleotide
  Antisense strand to SEQ ID NO: 2206254
gauucuagagccuauacuu

SEQ ID NO: 2206256 - RNA, 19 nt, Artificial Sequence
  Description of Artificial Sequence: Synthetic oligonucleotide
  Sense strand starting at position 3367 of SEQ ID NO: 1883634
uauugugaagcuuaauaga

SEQ ID NO: 2206257 - RNA, 19 nt, Artificial Sequence
  Description of Artificial Sequence: Synthetic oligonucleotide
  Antisense strand to SEQ ID NO: 2206256
ucuauuaagcuucacaaua

SEQ ID NO: 2206258 - RNA, 19 nt, Artificial Sequence
  Description of Artificial Sequence: Synthetic oligonucleotide
  Sense strand starting at position 1673 of SEQ ID NO: 1883634
ggugguguuauggagggaa

SEQ ID NO: 2206259 - RNA, 19 nt, Artificial Sequence
  Description of Artificial Sequence: Synthetic oligonucleotide
  Antisense strand to SEQ ID NO: 2206258
uucccuccauaacaccacc

SEQ ID NO: 2206260 - RNA, 19 nt, Artificial Sequence
  Description of Artificial Sequence: Synthetic oligonucleotide
  Sense strand starting at position 3693 of SEQ ID NO: 1883634
gagaaauuacuuugauggu

SEQ ID NO: 2206261 - RNA, 19 nt, Artificial Sequence
  Description of Artificial Sequence: Synthetic oligonucleotide
  Antisense strand to SEQ ID NO: 2206260
accaucaaaguaauuucuc

SEQ ID NO: 2206262 - RNA, 19 nt, Artificial Sequence
  Description of Artificial Sequence: Synthetic oligonucleotide
  Sense strand starting at position 2467 of SEQ ID NO: 1883634
cucaaacuuuaguuagaga

SEQ ID NO: 2206263 - RNA, 19 nt, Artificial Sequence
  Description of Artificial Sequence: Synthetic oligonucleotide
  Antisense strand to SEQ ID NO: 2206262
ucucuaacuaaaguuugag

SEQ ID NO: 2206264 - RNA, 19 nt, Artificial Sequence
  Description of Artificial Sequence: Synthetic oligonucleotide
  Sense strand starting at position 1885 of SEQ ID NO: 1883634
agaagaaucuguuccauac

SEQ ID NO: 2206265 - RNA, 19 nt, Artificial Sequence
  Description of Artificial Sequence: Synthetic oligonucleotide
  Antisense strand to SEQ ID NO: 2206264
guauggaacagauucuucu

SEQ ID NO: 2206266 - RNA, 19 nt, Artificial Sequence
  Description of Artificial Sequence: Synthetic oligonucleotide
  Sense strand starting at position 797 of SEQ ID NO: 1883634
cuuguaauucguuuggugu

SEQ ID NO: 2206267 - RNA, 19 nt, Artificial Sequence
  Description of Artificial Sequence: Synthetic oligonucleotide
  Antisense strand to SEQ ID NO: 2206266
acaccaaacgaauuacaag

SEQ ID NO: 2206268 - RNA, 19 nt, Artificial Sequence
  Description of Artificial Sequence: Synthetic oligonucleotide
  Sense strand starting at position 1677 of SEQ ID NO: 1883634
guguuauggagggaaaguc

SEQ ID NO: 2206269 - RNA, 19 nt, Artificial Sequence
  Description of Artificial Sequence: Synthetic oligonucleotide
  Antisense strand to SEQ ID NO: 2206268
gacuuucccuccauaacac

SEQ ID NO: 2206270 - RNA, 19 nt, Artificial Sequence
  Description of Artificial Sequence: Synthetic oligonucleotide
  Sense strand starting at position 2196 of SEQ ID NO: 1883634
acaacauggcucugaauaa

SEQ ID NO: 2206271 - RNA, 19 nt, Artificial Sequence
  Description of Artificial Sequence: Synthetic oligonucleotide
  Antisense strand to SEQ ID NO: 2206270
uuauucagagccauguugu

SEQ ID NO: 2206272 - RNA, 19 nt, Artificial Sequence
  Description of Artificial Sequence: Synthetic oligonucleotide
  Sense strand starting at position 1675 of SEQ ID NO: 1883634
ugguguuauggagggaaag

SEQ ID NO: 2206273 - RNA, 19 nt, Artificial Sequence
  Description of Artificial Sequence: Synthetic oligonucleotide
  Antisense strand to SEQ ID NO: 2206272
cuuucccuccauaacacca

SEQ ID NO: 2206274 - RNA, 19 nt, Artificial Sequence
  Description of Artificial Sequence: Synthetic oligonucleotide
  Sense strand starting at position 3260 of SEQ ID NO: 1883634
ucuuaauuccauggauaug

SEQ ID NO: 2206275 - RNA, 19 nt, Artificial Sequence
  Description of Artificial Sequence: Synthetic oligonucleotide
  Antisense strand to SEQ ID NO: 2206274
cauauccauggaauuaaga

SEQ ID NO: 2206276 - RNA, 19 nt, Artificial Sequence
  Description of Artificial Sequence: Synthetic oligonucleotide
  Sense strand starting at position 3700 of SEQ ID NO: 1883634
uacuuugauggugaagguu

SEQ ID NO: 2206277 - RNA, 19 nt, Artificial Sequence
  Description of Artificial Sequence: Synthetic oligonucleotide
  Antisense strand to SEQ ID NO: 2206276
aaccuucaccaucaaagua

SEQ ID NO: 2206278 - RNA, 19 nt, Artificial Sequence
  Description of Artificial Sequence: Synthetic oligonucleotide
  Sense strand starting at position 1557 of SEQ ID NO: 1883634
aguguuuagcaagaaauau

SEQ ID NO: 2206279 - RNA, 19 nt, Artificial Sequence
  Description of Artificial Sequence: Synthetic oligonucleotide
  Antisense strand to SEQ ID NO: 2206278
auauuucuugcuaaacacu

SEQ ID NO: 2206280 - RNA, 19 nt, Artificial Sequence
  Description of Artificial Sequence: Synthetic oligonucleotide
  Sense strand starting at position 3336 of SEQ ID NO: 1883634
cacauuguccuagagagca

SEQ ID NO: 2206281 - RNA, 19 nt, Artificial Sequence
  Description of Artificial Sequence: Synthetic oligonucleotide
  Antisense strand to SEQ ID NO: 2206280
ugcucucuaggacaaugug

SEQ ID NO: 2206282 - RNA, 19 nt, Artificial Sequence
  Description of Artificial Sequence: Synthetic oligonucleotide
  Sense strand starting at position 610 of SEQ ID NO: 1883634
auaggaaggguuuggguau

SEQ ID NO: 2206283 - RNA, 19 nt, Artificial Sequence
  Description of Artificial Sequence: Synthetic oligonucleotide
  Antisense strand to SEQ ID NO: 2206282
auacccaaacccuuccuau

SEQ ID NO: 2206284 - RNA, 19 nt, Artificial Sequence
  Description of Artificial Sequence: Synthetic oligonucleotide
  Sense strand starting at position 2793 of SEQ ID NO: 1883634
uggauuggacggcagagua

SEQ ID NO: 2206285 - RNA, 19 nt, Artificial Sequence
  Description of Artificial Sequence: Synthetic oligonucleotide
  Antisense strand to SEQ ID NO: 2206284
uacucugccguccaaucca

SEQ ID NO: 2206286 - RNA, 19 nt, Artificial Sequence
  Description of Artificial Sequence: Synthetic oligonucleotide
  Sense strand starting at position 1740 of SEQ ID NO: 1883634
uuauaccaccaguauuagu

SEQ ID NO: 2206287 - RNA, 19 nt, Artificial Sequence
  Description of Artificial Sequence: Synthetic oligonucleotide
  Antisense strand to SEQ ID NO: 2206286
acuaauacuggugguauaa

SEQ ID NO: 2206288 - RNA, 19 nt, Artificial Sequence
  Description of Artificial Sequence: Synthetic oligonucleotide
  Sense strand starting at position 11 of SEQ ID NO: 1883634
cccuuugacccauauguua

SEQ ID NO: 2206289 - RNA, 19 nt, Artificial Sequence
  Description of Artificial Sequence: Synthetic oligonucleotide
  Antisense strand to SEQ ID NO: 2206288
uaacauaugggucaaaggg

SEQ ID NO: 2206290 - RNA, 19 nt, Artificial Sequence
  Description of Artificial Sequence: Synthetic oligonucleotide
  Sense strand starting at position 832 of SEQ ID NO: 1883634
gagagaacuuuccugucau

SEQ ID NO: 2206291 - RNA, 19 nt, Artificial Sequence
  Description of Artificial Sequence: Synthetic oligonucleotide
  Antisense strand to SEQ ID NO: 2206290
augacaggaaaguucucuc

SEQ ID NO: 2206292 - RNA, 19 nt, Artificial Sequence
  Description of Artificial Sequence: Synthetic oligonucleotide
  Sense strand starting at position 1686 of SEQ ID NO: 1883634
agggaaagucagugaguca

SEQ ID NO: 2206293 - RNA, 19 nt, Artificial Sequence
  Description of Artificial Sequence: Synthetic oligonucleotide
  Antisense strand to SEQ ID NO: 2206292
ugacucacugacuuucccu

SEQ ID NO: 2206294 - RNA, 19 nt, Artificial Sequence
  Description of Artificial Sequence: Synthetic oligonucleotide
  Sense strand starting at position 1676 of SEQ ID NO: 1883634
gguguuauggagggaaagu

SEQ ID NO: 2206295 - RNA, 19 nt, Artificial Sequence
  Description of Artificial Sequence: Synthetic oligonucleotide
  Antisense strand to SEQ ID NO: 2206294
acuuucccuccauaacacc

SEQ ID NO: 2206296 - RNA, 19 nt, Artificial Sequence
  Description of Artificial Sequence: Synthetic oligonucleotide
  Sense strand starting at position 903 of SEQ ID NO: 1883634
uuccaauagcucugaacag

SEQ ID NO: 2206297 - RNA, 19 nt, Artificial Sequence
  Description of Artificial Sequence: Synthetic oligonucleotide
  Antisense strand to SEQ ID NO: 2206296
cuguucagagcuauuggaa

SEQ ID NO: 2206298 - RNA, 19 nt, Artificial Sequence
  Description of Artificial Sequence: Synthetic oligonucleotide
  Sense strand starting at position 679 of SEQ ID NO: 1883634
ccagaacaaguaugucuau

SEQ ID NO: 2206299 - RNA, 19 nt, Artificial Sequence
  Description of Artificial Sequence: Synthetic oligonucleotide
  Antisense strand to SEQ ID NO: 2206298
auagacauacuuguucugg

SEQ ID NO: 2206300 - RNA, 19 nt, Artificial Sequence
  Description of Artificial Sequence: Synthetic oligonucleotide
  Sense strand starting at position 1142 of SEQ ID NO: 1883634
gcaauuccuggucacuaau

SEQ ID NO: 2206301 - RNA, 19 nt, Artificial Sequence
  Description of Artificial Sequence: Synthetic oligonucleotide
  Antisense strand to SEQ ID NO: 2206300
auuagugaccaggaauugc

SEQ ID NO: 2206302 - RNA, 19 nt, Artificial Sequence
  Description of Artificial Sequence: Synthetic oligonucleotide
  Sense strand starting at position 2947 of SEQ ID NO: 1883634
cugauuacugccuaaggca

SEQ ID NO: 2206303 - RNA, 19 nt, Artificial Sequence
  Description of Artificial Sequence: Synthetic oligonucleotide
  Antisense strand to SEQ ID NO: 2206302
ugccuuaggcaguaaucag

SEQ ID NO: 2206304 - RNA, 19 nt, Artificial Sequence
  Description of Artificial Sequence: Synthetic oligonucleotide
  Sense strand starting at position 2380 of SEQ ID NO: 1883634
gucuuaaaccuuuauuggu

SEQ ID NO: 2206305 - RNA, 19 nt, Artificial Sequence
  Description of Artificial Sequence: Synthetic oligonucleotide
  Antisense strand to SEQ ID NO: 2206304
accaauaaagguuuaagac

SEQ ID NO: 2206306 - RNA, 19 nt, Artificial Sequence
  Description of Artificial Sequence: Synthetic oligonucleotide
  Sense strand starting at position 1840 of SEQ ID NO: 1883634
guuugaaauccagguauca

SEQ ID NO: 2206307 - RNA, 19 nt, Artificial Sequence
  Description of Artificial Sequence: Synthetic oligonucleotide
  Antisense strand to SEQ ID NO: 2206306
ugauaccuggauuucaaac

SEQ ID NO: 2206308 - RNA, 19 nt, Artificial Sequence
  Description of Artificial Sequence: Synthetic oligonucleotide
  Sense strand starting at position 1639 of SEQ ID NO: 1883634
gaaugcaugucagugagaa

SEQ ID NO: 2206309 - RNA, 19 nt, Artificial Sequence
  Description of Artificial Sequence: Synthetic oligonucleotide
  Antisense strand to SEQ ID NO: 2206308
uucucacugacaugcauuc

SEQ ID NO: 2206310 - RNA, 19 nt, Artificial Sequence
  Description of Artificial Sequence: Synthetic oligonucleotide
  Sense strand starting at position 352 of SEQ ID NO: 1883634
ggaucauucugguccucag

SEQ ID NO: 2206311 - RNA, 19 nt, Artificial Sequence
  Description of Artificial Sequence: Synthetic oligonucleotide
  Antisense strand to SEQ ID NO: 2206310
cugaggaccagaaugaucc

SEQ ID NO: 2206312 - RNA, 19 nt, Artificial Sequence
  Description of Artificial Sequence: Synthetic oligonucleotide
  Sense strand starting at position 1082 of SEQ ID NO: 1883634
gcacauugacauggugaca

SEQ ID NO: 2206313 - RNA, 19 nt, Artificial Sequence
  Description of Artificial Sequence: Synthetic oligonucleotide
  Antisense strand to SEQ ID NO: 2206312
ugucaccaugucaaugugc

SEQ ID NO: 2206314 - RNA, 19 nt, Artificial Sequence
  Description of Artificial Sequence: Synthetic oligonucleotide
  Sense strand starting at position 1551 of SEQ ID NO: 1883634
aaauguaguguuuagcaag

SEQ ID NO: 2206315 - RNA, 19 nt, Artificial Sequence
  Description of Artificial Sequence: Synthetic oligonucleotide
  Antisense strand to SEQ ID NO: 2206314
cuugcuaaacacuacauuu

SEQ ID NO: 2206316 - RNA, 19 nt, Artificial Sequence
  Description of Artificial Sequence: Synthetic oligonucleotide
  Sense strand starting at position 1095 of SEQ ID NO: 1883634
gugacaaccugaguagagu

SEQ ID NO: 2206317 - RNA, 19 nt, Artificial Sequence
  Description of Artificial Sequence: Synthetic oligonucleotide
  Antisense strand to SEQ ID NO: 2206316
acucuacucagguugucac

SEQ ID NO: 2206318 - RNA, 19 nt, Artificial Sequence
  Description of Artificial Sequence: Synthetic oligonucleotide
  Sense strand starting at position 1640 of SEQ ID NO: 1883634
aaugcaugucagugagaag

SEQ ID NO: 2206319 - RNA, 19 nt, Artificial Sequence
  Description of Artificial Sequence: Synthetic oligonucleotide
  Antisense strand to SEQ ID NO: 2206318
cuucucacugacaugcauu

SEQ ID NO: 2206320 - RNA, 19 nt, Artificial Sequence
  Description of Artificial Sequence: Synthetic oligonucleotide
  Sense strand starting at position 2309 of SEQ ID NO: 1883634
gaauuaugccauugaggug

SEQ ID NO: 2206321 - RNA, 19 nt, Artificial Sequence
  Description of Artificial Sequence: Synthetic oligonucleotide
  Antisense strand to SEQ ID NO: 2206320
caccucaauggcauaauuc

SEQ ID NO: 2206322 - RNA, 19 nt, Artificial Sequence
  Description of Artificial Sequence: Synthetic oligonucleotide
  Sense strand starting at position 1993 of SEQ ID NO: 1883634
guguauuugugucucuaug

SEQ ID NO: 2206323 - RNA, 19 nt, Artificial Sequence
  Description of Artificial Sequence: Synthetic oligonucleotide
  Antisense strand to SEQ ID NO: 2206322
cauagagacacaaauacac

SEQ ID NO: 2206324 - RNA, 19 nt, Artificial Sequence
  Description of Artificial Sequence: Synthetic oligonucleotide
  Sense strand starting at position 2344 of SEQ ID NO: 1883634
uagugcuuaggccaggaau

SEQ ID NO: 2206325 - RNA, 19 nt, Artificial Sequence
  Description of Artificial Sequence: Synthetic oligonucleotide
  Antisense strand to SEQ ID NO: 2206324
auuccuggccuaagcacua

SEQ ID NO: 2206326 - RNA, 19 nt, Artificial Sequence
  Description of Artificial Sequence: Synthetic oligonucleotide
  Sense strand starting at position 1641 of SEQ ID NO: 1883634
augcaugucagugagaagu

SEQ ID NO: 2206327 - RNA, 19 nt, Artificial Sequence
  Description of Artificial Sequence: Synthetic oligonucleotide
  Antisense strand to SEQ ID NO: 2206326
acuucucacugacaugcau

SEQ ID NO: 2206328 - RNA, 19 nt, Artificial Sequence
  Description of Artificial Sequence: Synthetic oligonucleotide
  Sense strand starting at position 2228 of SEQ ID NO: 1883635
uaaugagaauuaccuguga

SEQ ID NO: 2206329 - RNA, 19 nt, Artificial Sequence
  Description of Artificial Sequence: Synthetic oligonucleotide
  Antisense strand to SEQ ID NO: 2206328
ucacagguaauucucauua

SEQ ID NO: 2206330 - RNA, 19 nt, Artificial Sequence
  Description of Artificial Sequence: Synthetic oligonucleotide
  Sense strand starting at position 2328 of SEQ ID NO: 1883635
ugcugaugacauuauacca

SEQ ID NO: 2206331 - RNA, 19 nt, Artificial Sequence
  Description of Artificial Sequence: Synthetic oligonucleotide
  Antisense strand to SEQ ID NO: 2206330
ugguauaaugucaucagca

SEQ ID NO: 2206332 - RNA, 19 nt, Artificial Sequence
  Description of Artificial Sequence: Synthetic oligonucleotide
  Sense strand starting at position 2925 of SEQ ID NO: 1883635
guguacccuccagaauaaa

SEQ ID NO: 2206333 - RNA, 19 nt, Artificial Sequence
  Description of Artificial Sequence: Synthetic oligonucleotide
  Antisense strand to SEQ ID NO: 2206332
uuuauucuggaggguacac

SEQ ID NO: 2206334 - RNA, 19 nt, Artificial Sequence
  Description of Artificial Sequence: Synthetic oligonucleotide
  Sense strand starting at position 2232 of SEQ ID NO: 1883635
gagaauuaccugugauaua

SEQ ID NO: 2206335 - RNA, 19 nt, Artificial Sequence
  Description of Artificial Sequence: Synthetic oligonucleotide
  Antisense strand to SEQ ID NO: 2206334
uauaucacagguaauucuc

SEQ ID NO: 2206336 - RNA, 19 nt, Artificial Sequence
  Description of Artificial Sequence: Synthetic oligonucleotide
  Sense strand starting at position 2594 of SEQ ID NO: 1883635
ccaguauuacuaggagaua

SEQ ID NO: 2206337 - RNA, 19 nt, Artificial Sequence
  Description of Artificial Sequence: Synthetic oligonucleotide
  Antisense strand to SEQ ID NO: 2206336
uaucuccuaguaauacugg

SEQ ID NO: 2206338 - RNA, 19 nt, Artificial Sequence
  Description of Artificial Sequence: Synthetic oligonucleotide
  Sense strand starting at position 2985 of SEQ ID NO: 1883635
cauuguaugcgguuguuau

SEQ ID NO: 2206339 - RNA, 19 nt, Artificial Sequence
  Description of Artificial Sequence: Synthetic oligonucleotide
  Antisense strand to SEQ ID NO: 2206338
auaacaaccgcauacaaug

SEQ ID NO: 2206340 - RNA, 19 nt, Artificial Sequence
  Description of Artificial Sequence: Synthetic oligonucleotide
  Sense strand starting at position 2935 of SEQ ID NO: 1883635
cagaauaaacugugaguga

SEQ ID NO: 2206341 - RNA, 19 nt, Artificial Sequence
  Description of Artificial Sequence: Synthetic oligonucleotide
  Antisense strand to SEQ ID NO: 2206340
ucacucacaguuuauucug

SEQ ID NO: 2206342 - RNA, 19 nt, Artificial Sequence
  Description of Artificial Sequence: Synthetic oligonucleotide
  Sense strand starting at position 39 of SEQ ID NO: 1883635
gagugauuacuaggaccca

SEQ ID NO: 2206343 - RNA, 19 nt, Artificial Sequence
  Description of Artificial Sequence: Synthetic oligonucleotide
  Antisense strand to SEQ ID NO: 2206342
uggguccuaguaaucacuc

SEQ ID NO: 2206344 - RNA, 19 nt, Artificial Sequence
  Description of Artificial Sequence: Synthetic oligonucleotide
  Sense strand starting at position 515 of SEQ ID NO: 1883635
gagauagguggguagucua

SEQ ID NO: 2206345 - RNA, 19 nt, Artificial Sequence
  Description of Artificial Sequence: Synthetic oligonucleotide
  Antisense strand to SEQ ID NO: 2206344
uagacuacccaccuaucuc

SEQ ID NO: 2206346 - RNA, 19 nt, Artificial Sequence
  Description of Artificial Sequence: Synthetic oligonucleotide
  Sense strand starting at position 2993 of SEQ ID NO: 1883635
gcgguuguuauuuauauac

SEQ ID NO: 2206347 - RNA, 19 nt, Artificial Sequence
  Description of Artificial Sequence: Synthetic oligonucleotide
  Antisense strand to SEQ ID NO: 2206346
guauauaaauaacaaccgc

SEQ ID NO: 2206348 - RNA, 19 nt, Artificial Sequence
  Description of Artificial Sequence: Synthetic oligonucleotide
  Sense strand starting at position 3423 of SEQ ID NO: 1883635
ugcccagaauuucugcuua

SEQ ID NO: 2206349 - RNA, 19 nt, Artificial Sequence
  Description of Artificial Sequence: Synthetic oligonucleotide
  Antisense strand to SEQ ID NO: 2206348
uaagcagaaauucugggca

SEQ ID NO: 2206350 - RNA, 19 nt, Artificial Sequence
  Description of Artificial Sequence: Synthetic oligonucleotide
  Sense strand starting at position 3286 of SEQ ID NO: 1883635
aauguuaagugacucagaa

SEQ ID NO: 2206351 - RNA, 19 nt, Artificial Sequence
  Description of Artificial Sequence: Synthetic oligonucleotide
  Antisense strand to SEQ ID NO: 2206350
uucugagucacuuaacauu

SEQ ID NO: 2206352 - RNA, 19 nt, Artificial Sequence
  Description of Artificial Sequence: Synthetic oligonucleotide
  Sense strand starting at position 1394 of SEQ ID NO: 1883635
ugggaauagugagaaauuu

SEQ ID NO: 2206353 - RNA, 19 nt, Artificial Sequence
  Description of Artificial Sequence: Synthetic oligonucleotide
  Antisense strand to SEQ ID NO: 2206352
aaauuucucacuauuccca

SEQ ID NO: 2206354 - RNA, 19 nt, Artificial Sequence
  Description of Artificial Sequence: Synthetic oligonucleotide
  Sense strand starting at position 3466 of SEQ ID NO: 1883635
caaggucauaugugaggga

SEQ ID NO: 2206355 - RNA, 19 nt, Artificial Sequence
  Description of Artificial Sequence: Synthetic oligonucleotide
  Antisense strand to SEQ ID NO: 2206354
ucccucacauaugaccuug

SEQ ID NO: 2206356 - RNA, 19 nt, Artificial Sequence
  Description of Artificial Sequence: Synthetic oligonucleotide
  Sense strand starting at position 2480 of SEQ ID NO: 1883635
aaaccugucccugaaucga

SEQ ID NO: 2206357 - RNA, 19 nt, Artificial Sequence
  Description of Artificial Sequence: Synthetic oligonucleotide
  Antisense strand to SEQ ID NO: 2206356
ucgauucagggacagguuu

SEQ ID NO: 2206358 - RNA, 19 nt, Artificial Sequence
  Description of Artificial Sequence: Synthetic oligonucleotide
  Sense strand starting at position 2939 of SEQ ID NO: 1883635
auaaacugugagugaauau

SEQ ID NO: 2206359 - RNA, 19 nt, Artificial Sequence
  Description of Artificial Sequence: Synthetic oligonucleotide
  Antisense strand to SEQ ID NO: 2206358
auauucacucacaguuuau

SEQ ID NO: 2206360 - RNA, 19 nt, Artificial Sequence
  Description of Artificial Sequence: Synthetic oligonucleotide
  Sense strand starting at position 2923 of SEQ ID NO: 1883635
ugguguacccuccagaaua

SEQ ID NO: 2206361 - RNA, 19 nt, Artificial Sequence
  Description of Artificial Sequence: Synthetic oligonucleotide
  Antisense strand to SEQ ID NO: 2206360
uauucuggaggguacacca

SEQ ID NO: 2206362 - RNA, 19 nt, Artificial Sequence
  Description of Artificial Sequence: Synthetic oligonucleotide
  Sense strand starting at position 892 of SEQ ID NO: 1883635
aggugaaugccagagcaca

SEQ ID NO: 2206363 - RNA, 19 nt, Artificial Sequence
  Description of Artificial Sequence: Synthetic oligonucleotide
  Antisense strand to SEQ ID NO: 2206362
ugugcucuggcauucaccu

SEQ ID NO: 2206364 - RNA, 19 nt, Artificial Sequence
  Description of Artificial Sequence: Synthetic oligonucleotide
  Sense strand starting at position 2276 of SEQ ID NO: 1883635
cacaguagauaugugacau

SEQ ID NO: 2206365 - RNA, 19 nt, Artificial Sequence
  Description of Artificial Sequence: Synthetic oligonucleotide
  Antisense strand to SEQ ID NO: 2206364
augucacauaucuacugug

SEQ ID NO: 2206366 - RNA, 19 nt, Artificial Sequence
  Description of Artificial Sequence: Synthetic oligonucleotide
  Sense strand starting at position 2522 of SEQ ID NO: 1883635
guuacacagcuccagauua

SEQ ID NO: 2206367 - RNA, 19 nt, Artificial Sequence
  Description of Artificial Sequence: Synthetic oligonucleotide
  Antisense strand to SEQ ID NO: 2206366
uaaucuggagcuguguaac

SEQ ID NO: 2206368 - RNA, 19 nt, Artificial Sequence
  Description of Artificial Sequence: Synthetic oligonucleotide
  Sense strand starting at position 2622 of SEQ ID NO: 1883635
ggaauaaaguugccugaua

SEQ ID NO: 2206369 - RNA, 19 nt, Artificial Sequence
  Description of Artificial Sequence: Synthetic oligonucleotide
  Antisense strand to SEQ ID NO: 2206368
uaucaggcaacuuuauucc

SEQ ID NO: 2206370 - RNA, 19 nt, Artificial Sequence
  Description of Artificial Sequence: Synthetic oligonucleotide
  Sense strand starting at position 3340 of SEQ ID NO: 1883635
gugguagaucugggauaau

SEQ ID NO: 2206371 - RNA, 19 nt, Artificial Sequence
  Description of Artificial Sequence: Synthetic oligonucleotide
  Antisense strand to SEQ ID NO: 2206370
auuaucccagaucuaccac

SEQ ID NO: 2206372 - RNA, 19 nt, Artificial Sequence
  Description of Artificial Sequence: Synthetic oligonucleotide
  Sense strand starting at position 3084 of SEQ ID NO: 1883635
uggcaauaaucagcaaaca

SEQ ID NO: 2206373 - RNA, 19 nt, Artificial Sequence
  Description of Artificial Sequence: Synthetic oligonucleotide
  Antisense strand to SEQ ID NO: 2206372
uguuugcugauuauugcca

SEQ ID NO: 2206374 - RNA, 19 nt, Artificial Sequence
  Description of Artificial Sequence: Synthetic oligonucleotide
  Sense strand starting at position 3447 of SEQ ID NO: 1883635
gacucaggaucucugaguu

SEQ ID NO: 2206375 - RNA, 19 nt, Artificial Sequence
  Description of Artificial Sequence: Synthetic oligonucleotide
  Antisense strand to SEQ ID NO: 2206374
aacucagagauccugaguc

SEQ ID NO: 2206376 - RNA, 19 nt, Artificial Sequence
  Description of Artificial Sequence: Synthetic oligonucleotide
  Sense strand starting at position 3707 of SEQ ID NO: 1883635
gauagagaguaugucaagu

SEQ ID NO: 2206377 - RNA, 19 nt, Artificial Sequence
  Description of Artificial Sequence: Synthetic oligonucleotide
  Antisense strand to SEQ ID NO: 2206376
acuugacauacucucuauc

SEQ ID NO: 2206378 - RNA, 19 nt, Artificial Sequence
  Description of Artificial Sequence: Synthetic oligonucleotide
  Sense strand starting at position 3021 of SEQ ID NO: 1883635
guaauagaauggcuuccaa

SEQ ID NO: 2206379 - RNA, 19 nt, Artificial Sequence
  Description of Artificial Sequence: Synthetic oligonucleotide
  Antisense strand to SEQ ID NO: 2206378
uuggaagccauucuauuac

SEQ ID NO: 2206380 - RNA, 19 nt, Artificial Sequence
  Description of Artificial Sequence: Synthetic oligonucleotide
  Sense strand starting at position 2623 of SEQ ID NO: 1883635
gaauaaaguugccugauau

SEQ ID NO: 2206381 - RNA, 19 nt, Artificial Sequence
  Description of Artificial Sequence: Synthetic oligonucleotide
  Antisense strand to SEQ ID NO: 2206380
auaucaggcaacuuuauuc

SEQ ID NO: 2206382 - RNA, 19 nt, Artificial Sequence
  Description of Artificial Sequence: Synthetic oligonucleotide
  Sense strand starting at position 822 of SEQ ID NO: 1883635
cuacuuggccucuacugau

SEQ ID NO: 2206383 - RNA, 19 nt, Artificial Sequence
  Description of Artificial Sequence: Synthetic oligonucleotide
  Antisense strand to SEQ ID NO: 2206382
aucaguagaggccaaguag

SEQ ID NO: 2206384 - RNA, 19 nt, Artificial Sequence
  Description of Artificial Sequence: Synthetic oligonucleotide
  Sense strand starting at position 2992 of SEQ ID NO: 1883635
ugcgguuguuauuuauaua

SEQ ID NO: 2206385 - RNA, 19 nt, Artificial Sequence
  Description of Artificial Sequence: Synthetic oligonucleotide
  Antisense strand to SEQ ID NO: 2206384
uauauaaauaacaaccgca

SEQ ID NO: 2206386 - RNA, 19 nt, Artificial Sequence
  Description of Artificial Sequence: Synthetic oligonucleotide
  Sense strand starting at position 3740 of SEQ ID NO: 1883635
gcaauuguaaauggaaagu

SEQ ID NO: 2206387 - RNA, 19 nt, Artificial Sequence
  Description of Artificial Sequence: Synthetic oligonucleotide
  Antisense strand to SEQ ID NO: 2206386
acuuuccauuuacaauugc

SEQ ID NO: 2206388 - RNA, 19 nt, Artificial Sequence
  Description of Artificial Sequence: Synthetic oligonucleotide
  Sense strand starting at position 3470 of SEQ ID NO: 1883635
gucauaugugagggaggua

SEQ ID NO: 2206389 - RNA, 19 nt, Artificial Sequence
  Description of Artificial Sequence: Synthetic oligonucleotide
  Antisense strand to SEQ ID NO: 2206388
uaccucccucacauaugac

SEQ ID NO: 2206390 - RNA, 19 nt, Artificial Sequence
  Description of Artificial Sequence: Synthetic oligonucleotide
  Sense strand starting at position 2496 of SEQ ID NO: 1883635
cgagauuuguaagacuaaa

SEQ ID NO: 2206391 - RNA, 19 nt, Artificial Sequence
  Description of Artificial Sequence: Synthetic oligonucleotide
  Antisense strand to SEQ ID NO: 2206390
uuuagucuuacaaaucucg

SEQ ID NO: 2206392 - RNA, 19 nt, Artificial Sequence
  Description of Artificial Sequence: Synthetic oligonucleotide
  Sense strand starting at position 810 of SEQ ID NO: 1883635
ucagaaagcucucuacuug

SEQ ID NO: 2206393 - RNA, 19 nt, Artificial Sequence
  Description of Artificial Sequence: Synthetic oligonucleotide
  Antisense strand to SEQ ID NO: 2206392
caaguagagagcuuucuga

SEQ ID NO: 2206394 - RNA, 19 nt, Artificial Sequence
  Description of Artificial Sequence: Synthetic oligonucleotide
  Sense strand starting at position 2407 of SEQ ID NO: 1883635
aguuuagauguguaggcaa

SEQ ID NO: 2206395 - RNA, 19 nt, Artificial Sequence
  Description of Artificial Sequence: Synthetic oligonucleotide
  Antisense strand to SEQ ID NO: 2206394
uugccuacacaucuaaacu

SEQ ID NO: 2206396 - RNA, 19 nt, Artificial Sequence
  Description of Artificial Sequence: Synthetic oligonucleotide
  Sense strand starting at position 573 of SEQ ID NO: 1883635
ugcuuugaucagcaccaca

SEQ ID NO: 2206397 - RNA, 19 nt, Artificial Sequence
  Description of Artificial Sequence: Synthetic oligonucleotide
  Antisense strand to SEQ ID NO: 2206396
uguggugcugaucaaagca

SEQ ID NO: 2206398 - RNA, 19 nt, Artificial Sequence
  Description of Artificial Sequence: Synthetic oligonucleotide
  Sense strand starting at position 2047 of SEQ ID NO: 1883635
ucaacuucuguuuauguca

SEQ ID NO: 2206399 - RNA, 19 nt, Artificial Sequence
  Description of Artificial Sequence: Synthetic oligonucleotide
  Antisense strand to SEQ ID NO: 2206398
ugacauaaacagaaguuga

SEQ ID NO: 2206400 - RNA, 19 nt, Artificial Sequence
  Description of Artificial Sequence: Synthetic oligonucleotide
  Sense strand starting at position 3118 of SEQ ID NO: 1883635
gccacaguaguaugaaaua

SEQ ID NO: 2206401 - RNA, 19 nt, Artificial Sequence
  Description of Artificial Sequence: Synthetic oligonucleotide
  Antisense strand to SEQ ID NO: 2206400
uauuucauacuacuguggc

SEQ ID NO: 2206402 - RNA, 19 nt, Artificial Sequence
  Description of Artificial Sequence: Synthetic oligonucleotide
  Sense strand starting at position 2287 of SEQ ID NO: 1883635
ugugacauuccuuauagcu

SEQ ID NO: 2206403 - RNA, 19 nt, Artificial Sequence
  Description of Artificial Sequence: Synthetic oligonucleotide
  Antisense strand to SEQ ID NO: 2206402
agcuauaaggaaugucaca

SEQ ID NO: 2206404 - RNA, 19 nt, Artificial Sequence
  Description of Artificial Sequence: Synthetic oligonucleotide
  Sense strand starting at position 2493 of SEQ ID NO: 1883635
aaucgagauuuguaagacu

SEQ ID NO: 2206405 - RNA, 19 nt, Artificial Sequence
  Description of Artificial Sequence: Synthetic oligonucleotide
  Antisense strand to SEQ ID NO: 2206404
agucuuacaaaucucgauu

SEQ ID NO: 2206406 - RNA, 19 nt, Artificial Sequence
  Description of Artificial Sequence: Synthetic oligonucleotide
  Sense strand starting at position 3953 of SEQ ID NO: 1883635
acucauauacuguguauac

SEQ ID NO: 2206407 - RNA, 19 nt, Artificial Sequence
  Description of Artificial Sequence: Synthetic oligonucleotide
  Antisense strand to SEQ ID NO: 2206406
guauacacaguauaugagu

SEQ ID NO: 2206408 - RNA, 19 nt, Artificial Sequence
  Description of Artificial Sequence: Synthetic oligonucleotide
  Sense strand starting at position 2545 of SEQ ID NO: 1883636
acgcaaauacuauauggau

SEQ ID NO: 2206409 - RNA, 19 nt, Artificial Sequence
  Description of Artificial Sequence: Synthetic oligonucleotide
  Antisense strand to SEQ ID NO: 2206408
auccauauaguauuugcgu

SEQ ID NO: 2206410 - RNA, 19 nt, Artificial Sequence
  Description of Artificial Sequence: Synthetic oligonucleotide
  Sense strand starting at position 514 of SEQ ID NO: 1883636
acucaugacccuugagaua

SEQ ID NO: 2206411 - RNA, 19 nt, Artificial Sequence
  Description of Artificial Sequence: Synthetic oligonucleotide
  Antisense strand to SEQ ID NO: 2206410
uaucucaagggucaugagu

SEQ ID NO: 2206412 - RNA, 19 nt, Artificial Sequence
  Description of Artificial Sequence: Synthetic oligonucleotide
  Sense strand starting at position 2119 of SEQ ID NO: 1883636
acuuauuacccaggauaug

SEQ ID NO: 2206413 - RNA, 19 nt, Artificial Sequence
  Description of Artificial Sequence: Synthetic oligonucleotide
  Antisense strand to SEQ ID NO: 2206412
cauauccuggguaauaagu

SEQ ID NO: 2206414 - RNA, 19 nt, Artificial Sequence
  Description of Artificial Sequence: Synthetic oligonucleotide
  Sense strand starting at position 3649 of SEQ ID NO: 1883636
ucacuuguuggcucgcuaa

SEQ ID NO: 2206415 - RNA, 19 nt, Artificial Sequence
  Description of Artificial Sequence: Synthetic oligonucleotide
  Antisense strand to SEQ ID NO: 2206414
uuagcgagccaacaaguga

SEQ ID NO: 2206416 - RNA, 19 nt, Artificial Sequence
  Description of Artificial Sequence: Synthetic oligonucleotide
  Sense strand starting at position 159 of SEQ ID NO: 1883636
acucucuaacguuagagaa

SEQ ID NO: 2206417 - RNA, 19 nt, Artificial Sequence
  Description of Artificial Sequence: Synthetic oligonucleotide
  Antisense strand to SEQ ID NO: 2206416
uucucuaacguuagagagu

SEQ ID NO: 2206418 - RNA, 19 nt, Artificial Sequence
  Description of Artificial Sequence: Synthetic oligonucleotide
  Sense strand starting at position 2120 of SEQ ID NO: 1883636
cuuauuacccaggauaugu

SEQ ID NO: 2206419 - RNA, 19 nt, Artificial Sequence
  Description of Artificial Sequence: Synthetic oligonucleotide
  Antisense strand to SEQ ID NO: 2206418
acauauccuggguaauaag

SEQ ID NO: 2206420 - RNA, 19 nt, Artificial Sequence
  Description of Artificial Sequence: Synthetic oligonucleotide
  Sense strand starting at position 3838 of SEQ ID NO: 1883636
uacuguacucaaugagaga

SEQ ID NO: 2206421 - RNA, 19 nt, Artificial Sequence
  Description of Artificial Sequence: Synthetic oligonucleotide
  Antisense strand to SEQ ID NO: 2206420
ucucucauugaguacagua

SEQ ID NO: 2206422 - RNA, 19 nt, Artificial Sequence
  Description of Artificial Sequence: Synthetic oligonucleotide
  Sense strand starting at position 116 of SEQ ID NO: 1883636
uuaagaaagcgaggaaauu

SEQ ID NO: 2206423 - RNA, 19 nt, Artificial Sequence
  Description of Artificial Sequence: Synthetic oligonucleotide
  Antisense strand to SEQ ID NO: 2206422
aauuuccucgcuuucuuaa

SEQ ID NO: 2206424 - RNA, 19 nt, Artificial Sequence
  Description of Artificial Sequence: Synthetic oligonucleotide
  Sense strand starting at position 2911 of SEQ ID NO: 1883636
aaucguaaugaguauuaag

SEQ ID NO: 2206425 - RNA, 19 nt, Artificial Sequence
  Description of Artificial Sequence: Synthetic oligonucleotide
  Antisense strand to SEQ ID NO: 2206424
cuuaauacucauuacgauu

SEQ ID NO: 2206426 - RNA, 19 nt, Artificial Sequence
  Description of Artificial Sequence: Synthetic oligonucleotide
  Sense strand starting at position 1350 of SEQ ID NO: 1883636
gccuuuaguguuguaugua

SEQ ID NO: 2206427 - RNA, 19 nt, Artificial Sequence
  Description of Artificial Sequence: Synthetic oligonucleotide
  Antisense strand to SEQ ID NO: 2206426
uacauacaacacuaaaggc

SEQ ID NO: 2206428 - RNA, 19 nt, Artificial Sequence
  Description of Artificial Sequence: Synthetic oligonucleotide
  Sense strand starting at position 3755 of SEQ ID NO: 1883636
auguauugugaaugagaaa

SEQ ID NO: 2206429 - RNA, 19 nt, Artificial Sequence
  Description of Artificial Sequence: Synthetic oligonucleotide
  Antisense strand to SEQ ID NO: 2206428
uuucucauucacaauacau

SEQ ID NO: 2206430 - RNA, 19 nt, Artificial Sequence
  Description of Artificial Sequence: Synthetic oligonucleotide
  Sense strand starting at position 2560 of SEQ ID NO: 1883636
ggauuacaugcugaacagu

SEQ ID NO: 2206431 - RNA, 19 nt, Artificial Sequence
  Description of Artificial Sequence: Synthetic oligonucleotide
  Antisense strand to SEQ ID NO: 2206430
acuguucagcauguaaucc

SEQ ID NO: 2206432 - RNA, 19 nt, Artificial Sequence
  Description of Artificial Sequence: Synthetic oligonucleotide
  Sense strand starting at position 361 of SEQ ID NO: 1883636
ggaagcuugauguaauuac

SEQ ID NO: 2206433 - RNA, 19 nt, Artificial Sequence
  Description of Artificial Sequence: Synthetic oligonucleotide
  Antisense strand to SEQ ID NO: 2206432
guaauuacaucaagcuucc

SEQ ID NO: 2206434 - RNA, 19 nt, Artificial Sequence
  Description of Artificial Sequence: Synthetic oligonucleotide
  Sense strand starting at position 125 of SEQ ID NO: 1883636
cgaggaaauucuccacaac

SEQ ID NO: 2206435 - RNA, 19 nt, Artificial Sequence
  Description of Artificial Sequence: Synthetic oligonucleotide
  Antisense strand to SEQ ID NO: 2206434
guuguggagaauuuccucg

SEQ ID NO: 2206436 - RNA, 19 nt, Artificial Sequence
  Description of Artificial Sequence: Synthetic oligonucleotide
  Sense strand starting at position 2116 of SEQ ID NO: 1883636
cugacuuauuacccaggau

SEQ ID NO: 2206437 - RNA, 19 nt, Artificial Sequence
  Description of Artificial Sequence: Synthetic oligonucleotide
  Antisense strand to SEQ ID NO: 2206436
auccuggguaauaagucag

SEQ ID NO: 2206438 - RNA, 19 nt, Artificial Sequence
  Description of Artificial Sequence: Synthetic oligonucleotide
  Sense strand starting at position 594 of SEQ ID NO: 1883636
auaacuggugagugagaua

SEQ ID NO: 2206439 - RNA, 19 nt, Artificial Sequence
  Description of Artificial Sequence: Synthetic oligonucleotide
  Antisense strand to SEQ ID NO: 2206438
uaucucacucaccaguuau

SEQ ID NO: 2206440 - RNA, 19 nt, Artificial Sequence
  Description of Artificial Sequence: Synthetic oligonucleotide
  Sense strand starting at position 56 of SEQ ID NO: 1883636
ucacacuacugguuggaaa

SEQ ID NO: 2206441 - RNA, 19 nt, Artificial Sequence
  Description of Artificial Sequence: Synthetic oligonucleotide
  Antisense strand to SEQ ID NO: 2206440
uuuccaaccaguaguguga

SEQ ID NO: 2206442 - RNA, 19 nt, Artificial Sequence
  Description of Artificial Sequence: Synthetic oligonucleotide
  Sense strand starting at position 2616 of SEQ ID NO: 1883636
ucuggauuauguccagaaa

SEQ ID NO: 2206443 - RNA, 19 nt, Artificial Sequence
  Description of Artificial Sequence: Synthetic oligonucleotide
  Antisense strand to SEQ ID NO: 2206442
uuucuggacauaauccaga

SEQ ID NO: 2206444 - RNA, 19 nt, Artificial Sequence
  Description of Artificial Sequence: Synthetic oligonucleotide
  Sense strand starting at position 3979 of SEQ ID NO: 1883636
auauguguauuucucaguu

SEQ ID NO: 2206445 - RNA, 19 nt, Artificial Sequence
  Description of Artificial Sequence: Synthetic oligonucleotide
  Antisense strand to SEQ ID NO: 2206444
aacugagaaauacacauau

SEQ ID NO: 2206446 - RNA, 19 nt, Artificial Sequence
  Description of Artificial Sequence: Synthetic oligonucleotide
  Sense strand starting at position 2787 of SEQ ID NO: 1883636
gugguauggcuagaaugaa

SEQ ID NO: 2206447 - RNA, 19 nt, Artificial Sequence
  Description of Artificial Sequence: Synthetic oligonucleotide
  Antisense strand to SEQ ID NO: 2206446
uucauucuagccauaccac

SEQ ID NO: 2206448 - RNA, 19 nt, Artificial Sequence
  Description of Artificial Sequence: Synthetic oligonucleotide
  Sense strand starting at position 3893 of SEQ ID NO: 1883636
aaagucauccuugggacau

SEQ ID NO: 2206449 - RNA, 19 nt, Artificial Sequence
  Description of Artificial Sequence: Synthetic oligonucleotide
  Antisense strand to SEQ ID NO: 2206448
augucccaaggaugacuuu

SEQ ID NO: 2206450 - RNA, 19 nt, Artificial Sequence
  Description of Artificial Sequence: Synthetic oligonucleotide
  Sense strand starting at position 2148 of SEQ ID NO: 1883636
cuguacaaugacuggaauu

SEQ ID NO: 2206451 - RNA, 19 nt, Artificial Sequence
  Description of Artificial Sequence: Synthetic oligonucleotide
  Antisense strand to SEQ ID NO: 2206450
aauuccagucauuguacag

SEQ ID NO: 2206452 - RNA, 19 nt, Artificial Sequence
  Description of Artificial Sequence: Synthetic oligonucleotide
  Sense strand starting at position 1342 of SEQ ID NO: 1883636
uguauugugccuuuagugu

SEQ ID NO: 2206453 - RNA, 19 nt, Artificial Sequence
  Description of Artificial Sequence: Synthetic oligonucleotide
  Antisense strand to SEQ ID NO: 2206452
acacuaaaggcacaauaca

SEQ ID NO: 2206454 - RNA, 19 nt, Artificial Sequence
  Description of Artificial Sequence: Synthetic oligonucleotide
  Sense strand starting at position 2918 of SEQ ID NO: 1883636
augaguauuaagugauaug

SEQ ID NO: 2206455 - RNA, 19 nt, Artificial Sequence
  Description of Artificial Sequence: Synthetic oligonucleotide
  Antisense strand to SEQ ID NO: 2206454
cauaucacuuaauacucau

SEQ ID NO: 2206456 - RNA, 19 nt, Artificial Sequence
  Description of Artificial Sequence: Synthetic oligonucleotide
  Sense strand starting at position 593 of SEQ ID NO: 1883636
cauaacuggugagugagau

SEQ ID NO: 2206457 - RNA, 19 nt, Artificial Sequence
  Description of Artificial Sequence: Synthetic oligonucleotide
  Antisense strand to SEQ ID NO: 2206456
aucucacucaccaguuaug

SEQ ID NO: 2206458 - RNA, 19 nt, Artificial Sequence
  Description of Artificial Sequence: Synthetic oligonucleotide
  Sense strand starting at position 3834 of SEQ ID NO: 1883636
ugauuacuguacucaauga

SEQ ID NO: 2206459 - RNA, 19 nt, Artificial Sequence
  Description of Artificial Sequence: Synthetic oligonucleotide
  Antisense strand to SEQ ID NO: 2206458
ucauugaguacaguaauca

SEQ ID NO: 2206460 - RNA, 19 nt, Artificial Sequence
  Description of Artificial Sequence: Synthetic oligonucleotide
  Sense strand starting at position 2919 of SEQ ID NO: 1883636
ugaguauuaagugauaugu

SEQ ID NO: 2206461 - RNA, 19 nt, Artificial Sequence
  Description of Artificial Sequence: Synthetic oligonucleotide
  Antisense strand to SEQ ID NO: 2206460
acauaucacuuaauacuca

SEQ ID NO: 2206462 - RNA, 19 nt, Artificial Sequence
  Description of Artificial Sequence: Synthetic oligonucleotide
  Sense strand starting at position 3523 of SEQ ID NO: 1883636
ucaccaaugccaggacaua

SEQ ID NO: 2206463 - RNA, 19 nt, Artificial Sequence
  Description of Artificial Sequence: Synthetic oligonucleotide
  Antisense strand to SEQ ID NO: 2206462
uauguccuggcauugguga

SEQ ID NO: 2206464 - RNA, 19 nt, Artificial Sequence
  Description of Artificial Sequence: Synthetic oligonucleotide
  Sense strand starting at position 1992 of SEQ ID NO: 1883636
uugagaucugucuagguca

SEQ ID NO: 2206465 - RNA, 19 nt, Artificial Sequence
  Description of Artificial Sequence: Synthetic oligonucleotide
  Antisense strand to SEQ ID NO: 2206464
ugaccuagacagaucucaa

SEQ ID NO: 2206466 - RNA, 19 nt, Artificial Sequence
  Description of Artificial Sequence: Synthetic oligonucleotide
  Sense strand starting at position 1804 of SEQ ID NO: 1883636
ucacucuuccuacagaugu

SEQ ID NO: 2206467 - RNA, 19 nt, Artificial Sequence
  Description of Artificial Sequence: Synthetic oligonucleotide
  Antisense strand to SEQ ID NO: 2206466
acaucuguaggaagaguga

SEQ ID NO: 2206468 - RNA, 19 nt, Artificial Sequence
  Description of Artificial Sequence: Synthetic oligonucleotide
  Sense strand starting at position 2197 of SEQ ID NO: 1883636
uuccuaccucaguaugacu

SEQ ID NO: 2206469 - RNA, 19 nt, Artificial Sequence
  Description of Artificial Sequence: Synthetic oligonucleotide
  Antisense strand to SEQ ID NO: 2206468
agucauacugagguaggaa

SEQ ID NO: 2206470 - RNA, 19 nt, Artificial Sequence
  Description of Artificial Sequence: Synthetic oligonucleotide
  Sense strand starting at position 1539 of SEQ ID NO: 1883636
ccaaauguucuaggauuau

SEQ ID NO: 2206471 - RNA, 19 nt, Artificial Sequence
  Description of Artificial Sequence: Synthetic oligonucleotide
  Antisense strand to SEQ ID NO: 2206470
auaauccuagaacauuugg

SEQ ID NO: 2206472 - RNA, 19 nt, Artificial Sequence
  Description of Artificial Sequence: Synthetic oligonucleotide
  Sense strand starting at position 464 of SEQ ID NO: 1883636
ugguaauguguucaugaag

SEQ ID NO: 2206473 - RNA, 19 nt, Artificial Sequence
  Description of Artificial Sequence: Synthetic oligonucleotide
  Antisense strand to SEQ ID NO: 2206472
cuucaugaacacauuacca

SEQ ID NO: 2206474 - RNA, 19 nt, Artificial Sequence
  Description of Artificial Sequence: Synthetic oligonucleotide
  Sense strand starting at position 3558 of SEQ ID NO: 1883636
cccagcucucuugagacau

SEQ ID NO: 2206475 - RNA, 19 nt, Artificial Sequence
  Description of Artificial Sequence: Synthetic oligonucleotide
  Antisense strand to SEQ ID NO: 2206474
augucucaagagagcuggg

SEQ ID NO: 2206476 - RNA, 19 nt, Artificial Sequence
  Description of Artificial Sequence: Synthetic oligonucleotide
  Sense strand starting at position 3983 of SEQ ID NO: 1883636
guguauuucucaguuucca

SEQ ID NO: 2206477 - RNA, 19 nt, Artificial Sequence
  Description of Artificial Sequence: Synthetic oligonucleotide
  Antisense strand to SEQ ID NO: 2206476
uggaaacugagaaauacac

SEQ ID NO: 2206478 - RNA, 19 nt, Artificial Sequence
  Description of Artificial Sequence: Synthetic oligonucleotide
  Sense strand starting at position 3512 of SEQ ID NO: 1883636
uggcuagaagcucaccaau

SEQ ID NO: 2206479 - RNA, 19 nt, Artificial Sequence
  Description of Artificial Sequence: Synthetic oligonucleotide
  Antisense strand to SEQ ID NO: 2206478
auuggugagcuucuagcca

SEQ ID NO: 2206480 - RNA, 19 nt, Artificial Sequence
  Description of Artificial Sequence: Synthetic oligonucleotide
  Sense strand starting at position 2726 of SEQ ID NO: 1883636
aucaaaugacaacguuuau

SEQ ID NO: 2206481 - RNA, 19 nt, Artificial Sequence
  Description of Artificial Sequence: Synthetic oligonucleotide
  Antisense strand to SEQ ID NO: 2206480
auaaacguugucauuugau

SEQ ID NO: 2206482 - RNA, 19 nt, Artificial Sequence
  Description of Artificial Sequence: Synthetic oligonucleotide
  Sense strand starting at position 3152 of SEQ ID NO: 1883636
gcuuauuucucucuuguac

SEQ ID NO: 2206483 - RNA, 19 nt, Artificial Sequence
  Description of Artificial Sequence: Synthetic oligonucleotide
  Antisense strand to SEQ ID NO: 2206482
guacaagagagaaauaagc

SEQ ID NO: 2206484 - RNA, 19 nt, Artificial Sequence
  Description of Artificial Sequence: Synthetic oligonucleotide
  Sense strand starting at position 3831 of SEQ ID NO: 1883636
gccugauuacuguacucaa

SEQ ID NO: 2206485 - RNA, 19 nt, Artificial Sequence
  Description of Artificial Sequence: Synthetic oligonucleotide
  Antisense strand to SEQ ID NO: 2206484
uugaguacaguaaucaggc

SEQ ID NO: 2206486 - RNA, 19 nt, Artificial Sequence
  Description of Artificial Sequence: Synthetic oligonucleotide
  Sense strand starting at position 3584 of SEQ ID NO: 1883636
gugaauugagugugaacag

SEQ ID NO: 2206487 - RNA, 19 nt, Artificial Sequence
  Description of Artificial Sequence: Synthetic oligonucleotide
  Antisense strand to SEQ ID NO: 2206486
cuguucacacucaauucac

SEQ ID NO: 2206488 - RNA, 19 nt, Artificial Sequence
  Description of Artificial Sequence: Synthetic oligonucleotide
  Sense strand starting at position 2153 of SEQ ID NO: 1883637
ugaaaccgcguguuaaugu

SEQ ID NO: 2206489 - RNA, 19 nt, Artificial Sequence
  Description of Artificial Sequence: Synthetic oligonucleotide
  Antisense strand to SEQ ID NO: 2206488
acauuaacacgcgguuuca

SEQ ID NO: 2206490 - RNA, 19 nt, Artificial Sequence
  Description of Artificial Sequence: Synthetic oligonucleotide
  Sense strand starting at position 736 of SEQ ID NO: 1883637
ucugcuguguauuuagaga

SEQ ID NO: 2206491 - RNA, 19 nt, Artificial Sequence
  Description of Artificial Sequence: Synthetic oligonucleotide
  Antisense strand to SEQ ID NO: 2206490
ucucuaaauacacagcaga

SEQ ID NO: 2206492 - RNA, 19 nt, Artificial Sequence
  Description of Artificial Sequence: Synthetic oligonucleotide
  Sense strand starting at position 626 of SEQ ID NO: 1883637
gcccuuauggaagaaguua

SEQ ID NO: 2206493 - RNA, 19 nt, Artificial Sequence
  Description of Artificial Sequence: Synthetic oligonucleotide
  Antisense strand to SEQ ID NO: 2206492
uaacuucuuccauaagggc

SEQ ID NO: 2206494 - RNA, 19 nt, Artificial Sequence
  Description of Artificial Sequence: Synthetic oligonucleotide
  Sense strand starting at position 687 of SEQ ID NO: 1883637
uggaaauguuccucaaaca

SEQ ID NO: 2206495 - RNA, 19 nt, Artificial Sequence
  Description of Artificial Sequence: Synthetic oligonucleotide
  Antisense strand to SEQ ID NO: 2206494
uguuugaggaacauuucca

SEQ ID NO: 2206496 - RNA, 19 nt, Artificial Sequence
  Description of Artificial Sequence: Synthetic oligonucleotide
  Sense strand starting at position 3403 of SEQ ID NO: 1883637
cgggauuaaaguuggaaau

SEQ ID NO: 2206497 - RNA, 19 nt, Artificial Sequence
  Description of Artificial Sequence: Synthetic oligonucleotide
  Antisense strand to SEQ ID NO: 2206496
auuuccaacuuuaaucccg

SEQ ID NO: 2206498 - RNA, 19 nt, Artificial Sequence
  Description of Artificial Sequence: Synthetic oligonucleotide
  Sense strand starting at position 3413 of SEQ ID NO: 1883637
guuggaaauugaccggaga

SEQ ID NO: 2206499 - RNA, 19 nt, Artificial Sequence
  Description of Artificial Sequence: Synthetic oligonucleotide
  Antisense strand to SEQ ID NO: 2206498
ucuccggucaauuuccaac

SEQ ID NO: 2206500 - RNA, 19 nt, Artificial Sequence
  Description of Artificial Sequence: Synthetic oligonucleotide
  Sense strand starting at position 291 of SEQ ID NO: 1883637
aauuuacuauggcuucgua

SEQ ID NO: 2206501 - RNA, 19 nt, Artificial Sequence
  Description of Artificial Sequence: Synthetic oligonucleotide
  Antisense strand to SEQ ID NO: 2206500
uacgaagccauaguaaauu

SEQ ID NO: 2206502 - RNA, 19 nt, Artificial Sequence
  Description of Artificial Sequence: Synthetic oligonucleotide
  Sense strand starting at position 357 of SEQ ID NO: 1883637
uugggagugaugcaauuau

SEQ ID NO: 2206503 - RNA, 19 nt, Artificial Sequence
  Description of Artificial Sequence: Synthetic oligonucleotide
  Antisense strand to SEQ ID NO: 2206502
auaauugcaucacucccaa

SEQ ID NO: 2206504 - RNA, 19 nt, Artificial Sequence
  Description of Artificial Sequence: Synthetic oligonucleotide
  Sense strand starting at position 2150 of SEQ ID NO: 1883637
gugugaaaccgcguguuaa

SEQ ID NO: 2206505 - RNA, 19 nt, Artificial Sequence
  Description of Artificial Sequence: Synthetic oligonucleotide
  Antisense strand to SEQ ID NO: 2206504
uuaacacgcgguuucacac

SEQ ID NO: 2206506 - RNA, 19 nt, Artificial Sequence
  Description of Artificial Sequence: Synthetic oligonucleotide
  Sense strand starting at position 1519 of SEQ ID NO: 1883637
cuccgccuccaauaagaaa

SEQ ID NO: 2206507 - RNA, 19 nt, Artificial Sequence
  Description of Artificial Sequence: Synthetic oligonucleotide
  Antisense strand to SEQ ID NO: 2206506
uuucuuauuggaggcggag

SEQ ID NO: 2206508 - RNA, 19 nt, Artificial Sequence
  Description of Artificial Sequence: Synthetic oligonucleotide
  Sense strand starting at position 275 of SEQ ID NO: 1883637
gcccaacuuguuuaagaau

SEQ ID NO: 2206509 - RNA, 19 nt, Artificial Sequence
  Description of Artificial Sequence: Synthetic oligonucleotide
  Antisense strand to SEQ ID NO: 2206508
auucuuaaacaaguugggc

SEQ ID NO: 2206510 - RNA, 19 nt, Artificial Sequence
  Description of Artificial Sequence: Synthetic oligonucleotide
  Sense strand starting at position 653 of SEQ ID NO: 1883637
uggcuaaaccagcauuauu

SEQ ID NO: 2206511 - RNA, 19 nt, Artificial Sequence
  Description of Artificial Sequence: Synthetic oligonucleotide
  Antisense strand to SEQ ID NO: 2206510
aauaaugcugguuuagcca

SEQ ID NO: 2206512 - RNA, 19 nt, Artificial Sequence
  Description of Artificial Sequence: Synthetic oligonucleotide
  Sense strand starting at position 686 of SEQ ID NO: 1883637
guggaaauguuccucaaac

SEQ ID NO: 2206513 - RNA, 19 nt, Artificial Sequence
  Description of Artificial Sequence: Synthetic oligonucleotide
  Antisense strand to SEQ ID NO: 2206512
guuugaggaacauuuccac

SEQ ID NO: 2206514 - RNA, 19 nt, Artificial Sequence
  Description of Artificial Sequence: Synthetic oligonucleotide
  Sense strand starting at position 791 of SEQ ID NO: 1883637
acagcaugucuugauuauu

SEQ ID NO: 2206515 - RNA, 19 nt, Artificial Sequence
  Description of Artificial Sequence: Synthetic oligonucleotide
  Antisense strand to SEQ ID NO: 2206514
aauaaucaagacaugcugu

SEQ ID NO: 2206516 - RNA, 19 nt, Artificial Sequence
  Description of Artificial Sequence: Synthetic oligonucleotide
  Sense strand starting at position 794 of SEQ ID NO: 1883637
gcaugucuugauuauuaca

SEQ ID NO: 2206517 - RNA, 19 nt, Artificial Sequence
  Description of Artificial Sequence: Synthetic oligonucleotide
  Antisense strand to SEQ ID NO: 2206516
uguaauaaucaagacaugc

SEQ ID NO: 2206518 - RNA, 19 nt, Artificial Sequence
  Description of Artificial Sequence: Synthetic oligonucleotide
  Sense strand starting at position 349 of SEQ ID NO: 1883637
auugauauuugggagugau

SEQ ID NO: 2206519 - RNA, 19 nt, Artificial Sequence
  Description of Artificial Sequence: Synthetic oligonucleotide
  Antisense strand to SEQ ID NO: 2206518
aucacucccaaauaucaau

SEQ ID NO: 2206520 - RNA, 19 nt, Artificial Sequence
  Description of Artificial Sequence: Synthetic oligonucleotide
  Sense strand starting at position 52 of SEQ ID NO: 1883637
guggcucaaucacuagaua

SEQ ID NO: 2206521 - RNA, 19 nt, Artificial Sequence
  Description of Artificial Sequence: Synthetic oligonucleotide
  Antisense strand to SEQ ID NO: 2206520
uaucuagugauugagccac

SEQ ID NO: 2206522 - RNA, 19 nt, Artificial Sequence
  Description of Artificial Sequence: Synthetic oligonucleotide
  Sense strand starting at position 46 of SEQ ID NO: 1883637
guauauguggcucaaucac

SEQ ID NO: 2206523 - RNA, 19 nt, Artificial Sequence
  Description of Artificial Sequence: Synthetic oligonucleotide
  Antisense strand to SEQ ID NO: 2206522
gugauugagccacauauac

SEQ ID NO: 2206524 - RNA, 19 nt, Artificial Sequence
  Description of Artificial Sequence: Synthetic oligonucleotide
  Sense strand starting at position 2393 of SEQ ID NO: 1883637
ggacucgcccgcagaguuu

SEQ ID NO: 2206525 - RNA, 19 nt, Artificial Sequence
  Description of Artificial Sequence: Synthetic oligonucleotide
  Antisense strand to SEQ ID NO: 2206524
aaacucugcgggcgagucc

SEQ ID NO: 2206526 - RNA, 19 nt, Artificial Sequence
  Description of Artificial Sequence: Synthetic oligonucleotide
  Sense strand starting at position 273 of SEQ ID NO: 1883637
augcccaacuuguuuaaga

SEQ ID NO: 2206527 - RNA, 19 nt, Artificial Sequence
  Description of Artificial Sequence: Synthetic oligonucleotide
  Antisense strand to SEQ ID NO: 2206526
ucuuaaacaaguugggcau

SEQ ID NO: 2206528 - RNA, 19 nt, Artificial Sequence
  Description of Artificial Sequence: Synthetic oligonucleotide
  Sense strand starting at position 274 of SEQ ID NO: 1883637
ugcccaacuuguuuaagaa

SEQ ID NO: 2206529 - RNA, 19 nt, Artificial Sequence
  Description of Artificial Sequence: Synthetic oligonucleotide
  Antisense strand to SEQ ID NO: 2206528
uucuuaaacaaguugggca

SEQ ID NO: 2206530 - RNA, 19 nt, Artificial Sequence
  Description of Artificial Sequence: Synthetic oligonucleotide
  Sense strand starting at position 3394 of SEQ ID NO: 1883637
uuuccucggcgggauuaaa

SEQ ID NO: 2206531 - RNA, 19 nt, Artificial Sequence
  Description of Artificial Sequence: Synthetic oligonucleotide
  Antisense strand to SEQ ID NO: 2206530
uuuaaucccgccgaggaaa

SEQ ID NO: 2206532 - RNA, 19 nt, Artificial Sequence
  Description of Artificial Sequence: Synthetic oligonucleotide
  Sense strand starting at position 988 of SEQ ID NO: 1883637
cucucuuuguucccaggaa

SEQ ID NO: 2206533 - RNA, 19 nt, Artificial Sequence
  Description of Artificial Sequence: Synthetic oligonucleotide
  Antisense strand to SEQ ID NO: 2206532
uuccugggaacaaagagag

SEQ ID NO: 2206534 - RNA, 19 nt, Artificial Sequence
  Description of Artificial Sequence: Synthetic oligonucleotide
  Sense strand starting at position 1023 of SEQ ID NO: 1883637
agucuuguagcugagaagu

SEQ ID NO: 2206535 - RNA, 19 nt, Artificial Sequence
  Description of Artificial Sequence: Synthetic oligonucleotide
  Antisense strand to SEQ ID NO: 2206534
acuucucagcuacaagacu

SEQ ID NO: 2206536 - RNA, 19 nt, Artificial Sequence
  Description of Artificial Sequence: Synthetic oligonucleotide
  Sense strand starting at position 348 of SEQ ID NO: 1883637
aauugauauuugggaguga

SEQ ID NO: 2206537 - RNA, 19 nt, Artificial Sequence
  Description of Artificial Sequence: Synthetic oligonucleotide
  Antisense strand to SEQ ID NO: 2206536
ucacucccaaauaucaauu

SEQ ID NO: 2206538 - RNA, 19 nt, Artificial Sequence
  Description of Artificial Sequence: Synthetic oligonucleotide
  Sense strand starting at position 2493 of SEQ ID NO: 1883637
gugagagaacuuugcagug

SEQ ID NO: 2206539 - RNA, 19 nt, Artificial Sequence
  Description of Artificial Sequence: Synthetic oligonucleotide
  Antisense strand to SEQ ID NO: 2206538
cacugcaaaguucucucac

SEQ ID NO: 2206540 - RNA, 19 nt, Artificial Sequence
  Description of Artificial Sequence: Synthetic oligonucleotide
  Sense strand starting at position 286 of SEQ ID NO: 1883637
uuaagaauuuacuauggcu

SEQ ID NO: 2206541 - RNA, 19 nt, Artificial Sequence
  Description of Artificial Sequence: Synthetic oligonucleotide
  Antisense strand to SEQ ID NO: 2206540
agccauaguaaauucuuaa

SEQ ID NO: 2206542 - RNA, 19 nt, Artificial Sequence
  Description of Artificial Sequence: Synthetic oligonucleotide
  Sense strand starting at position 304 of SEQ ID NO: 1883637
uucguacagacugguuaaa

SEQ ID NO: 2206543 - RNA, 19 nt, Artificial Sequence
  Description of Artificial Sequence: Synthetic oligonucleotide
  Antisense strand to SEQ ID NO: 2206542
uuuaaccagucuguacgaa

SEQ ID NO: 2206544 - RNA, 19 nt, Artificial Sequence
  Description of Artificial Sequence: Synthetic oligonucleotide
  Sense strand starting at position 1022 of SEQ ID NO: 1883637
uagucuuguagcugagaag

SEQ ID NO: 2206545 - RNA, 19 nt, Artificial Sequence
  Description of Artificial Sequence: Synthetic oligonucleotide
  Antisense strand to SEQ ID NO: 2206544
cuucucagcuacaagacua

SEQ ID NO: 2206546 - RNA, 19 nt, Artificial Sequence
  Description of Artificial Sequence: Synthetic oligonucleotide
  Sense strand starting at position 1176 of SEQ ID NO: 1883637
ugggaauccuucccgccaa

SEQ ID NO: 2206547 - RNA, 19 nt, Artificial Sequence
  Description of Artificial Sequence: Synthetic oligonucleotide
  Antisense strand to SEQ ID NO: 2206546
uuggcgggaaggauuccca

SEQ ID NO: 2206548 - RNA, 19 nt, Artificial Sequence
  Description of Artificial Sequence: Synthetic oligonucleotide
  Sense strand starting at position 709 of SEQ ID NO: 1883637
gcauaaaugcggcaauacu

SEQ ID NO: 2206549 - RNA, 19 nt, Artificial Sequence
  Description of Artificial Sequence: Synthetic oligonucleotide
  Antisense strand to SEQ ID NO: 2206548
aguauugccgcauuuaugc

SEQ ID NO: 2206550 - RNA, 19 nt, Artificial Sequence
  Description of Artificial Sequence: Synthetic oligonucleotide
  Sense strand starting at position 303 of SEQ ID NO: 1883637
cuucguacagacugguuaa

SEQ ID NO: 2206551 - RNA, 19 nt, Artificial Sequence
  Description of Artificial Sequence: Synthetic oligonucleotide
  Antisense strand to SEQ ID NO: 2206550
uuaaccagucuguacgaag

SEQ ID NO: 2206552 - RNA, 19 nt, Artificial Sequence
  Description of Artificial Sequence: Synthetic oligonucleotide
  Sense strand starting at position 295 of SEQ ID NO: 1883637
uacuauggcuucguacaga

SEQ ID NO: 2206553 - RNA, 19 nt, Artificial Sequence
  Description of Artificial Sequence: Synthetic oligonucleotide
  Antisense strand to SEQ ID NO: 2206552
ucuguacgaagccauagua

SEQ ID NO: 2206554 - RNA, 19 nt, Artificial Sequence
  Description of Artificial Sequence: Synthetic oligonucleotide
  Sense strand starting at position 520 of SEQ ID NO: 1883637
ucccguaagucucuugaag

SEQ ID NO: 2206555 - RNA, 19 nt, Artificial Sequence
  Description of Artificial Sequence: Synthetic oligonucleotide
  Antisense strand to SEQ ID NO: 2206554
cuucaagagacuuacggga

SEQ ID NO: 2206556 - RNA, 19 nt, Artificial Sequence
  Description of Artificial Sequence: Synthetic oligonucleotide
  Sense strand starting at position 973 of SEQ ID NO: 1883637
gguuuauuacauugucucu

SEQ ID NO: 2206557 - RNA, 19 nt, Artificial Sequence
  Description of Artificial Sequence: Synthetic oligonucleotide
  Antisense strand to SEQ ID NO: 2206556
agagacaauguaauaaacc

SEQ ID NO: 2206558 - RNA, 19 nt, Artificial Sequence
  Description of Artificial Sequence: Synthetic oligonucleotide
  Sense strand starting at position 44 of SEQ ID NO: 1883637
ugguauauguggcucaauc

SEQ ID NO: 2206559 - RNA, 19 nt, Artificial Sequence
  Description of Artificial Sequence: Synthetic oligonucleotide
  Antisense strand to SEQ ID NO: 2206558
gauugagccacauauacca

SEQ ID NO: 2206560 - RNA, 19 nt, Artificial Sequence
  Description of Artificial Sequence: Synthetic oligonucleotide
  Sense strand starting at position 1291 of SEQ ID NO: 1883637
ggacaucacagucgucuuu

SEQ ID NO: 2206561 - RNA, 19 nt, Artificial Sequence
  Description of Artificial Sequence: Synthetic oligonucleotide
  Antisense strand to SEQ ID NO: 2206560
aaagacgacugugaugucc

SEQ ID NO: 2206562 - RNA, 19 nt, Artificial Sequence
  Description of Artificial Sequence: Synthetic oligonucleotide
  Sense strand starting at position 1021 of SEQ ID NO: 1883637
guagucuuguagcugagaa

SEQ ID NO: 2206563 - RNA, 19 nt, Artificial Sequence
  Description of Artificial Sequence: Synthetic oligonucleotide
  Antisense strand to SEQ ID NO: 2206562
uucucagcuacaagacuac

SEQ ID NO: 2206564 - RNA, 19 nt, Artificial Sequence
  Description of Artificial Sequence: Synthetic oligonucleotide
  Sense strand starting at position 143 of SEQ ID NO: 1883637
cugucaucgucaccaaauu

SEQ ID NO: 2206565 - RNA, 19 nt, Artificial Sequence
  Description of Artificial Sequence: Synthetic oligonucleotide
  Antisense strand to SEQ ID NO: 2206564
aauuuggugacgaugacag

SEQ ID NO: 2206566 - RNA, 19 nt, Artificial Sequence
  Description of Artificial Sequence: Synthetic oligonucleotide
  Sense strand starting at position 2139 of SEQ ID NO: 1883637
uuagcuccggagugugaaa

SEQ ID NO: 2206567 - RNA, 19 nt, Artificial Sequence
  Description of Artificial Sequence: Synthetic oligonucleotide
  Antisense strand to SEQ ID NO: 2206566
uuucacacuccggagcuaa

SEQ ID NO: 2206568 - RNA, 19 nt, Artificial Sequence
  Description of Artificial Sequence: Synthetic oligonucleotide
  Sense strand starting at position 3044 of SEQ ID NO: 1883638
cgaugugugcaguuaguag

SEQ ID NO: 2206569 - RNA, 19 nt, Artificial Sequence
  Description of Artificial Sequence: Synthetic oligonucleotide
  Antisense strand to SEQ ID NO: 2206568
cuacuaacugcacacaucg

SEQ ID NO: 2206570 - RNA, 19 nt, Artificial Sequence
  Description of Artificial Sequence: Synthetic oligonucleotide
  Sense strand starting at position 1861 of SEQ ID NO: 1883638
ugguuauugggugacaaua

SEQ ID NO: 2206571 - RNA, 19 nt, Artificial Sequence
  Description of Artificial Sequence: Synthetic oligonucleotide
  Antisense strand to SEQ ID NO: 2206570
uauugucacccaauaacca

SEQ ID NO: 2206572 - RNA, 19 nt, Artificial Sequence
  Description of Artificial Sequence: Synthetic oligonucleotide
  Sense strand starting at position 2931 of SEQ ID NO: 1883638
gcguacucgcaagugaaac

SEQ ID NO: 2206573 - RNA, 19 nt, Artificial Sequence
  Description of Artificial Sequence: Synthetic oligonucleotide
  Antisense strand to SEQ ID NO: 2206572
guuucacuugcgaguacgc

SEQ ID NO: 2206574 - RNA, 19 nt, Artificial Sequence
  Description of Artificial Sequence: Synthetic oligonucleotide
  Sense strand starting at position 1250 of SEQ ID NO: 1883638
aauguuggccuauagaaua

SEQ ID NO: 2206575 - RNA, 19 nt, Artificial Sequence
  Description of Artificial Sequence: Synthetic oligonucleotide
  Antisense strand to SEQ ID NO: 2206574
uauucuauaggccaacauu

SEQ ID NO: 2206576 - RNA, 19 nt, Artificial Sequence
  Description of Artificial Sequence: Synthetic oligonucleotide
  Sense strand starting at position 1718 of SEQ ID NO: 1883638
gaauuagagucacuugaug

SEQ ID NO: 2206577 - RNA, 19 nt, Artificial Sequence
  Description of Artificial Sequence: Synthetic oligonucleotide
  Antisense strand to SEQ ID NO: 2206576
caucaagugacucuaauuc

SEQ ID NO: 2206578 - RNA, 19 nt, Artificial Sequence
  Description of Artificial Sequence: Synthetic oligonucleotide
  Sense strand starting at position 1058 of SEQ ID NO: 1883638
ggacaauggagaugccuua

SEQ ID NO: 2206579 - RNA, 19 nt, Artificial Sequence
  Description of Artificial Sequence: Synthetic oligonucleotide
  Antisense strand to SEQ ID NO: 2206578
uaaggcaucuccauugucc

SEQ ID NO: 2206580 - RNA, 19 nt, Artificial Sequence
  Description of Artificial Sequence: Synthetic oligonucleotide
  Sense strand starting at position 1465 of SEQ ID NO: 1883638
ccguuuaugccucuagcau

SEQ ID NO: 2206581 - RNA, 19 nt, Artificial Sequence
  Description of Artificial Sequence: Synthetic oligonucleotide
  Antisense strand to SEQ ID NO: 2206580
augcuagaggcauaaacgg

SEQ ID NO: 2206582 - RNA, 19 nt, Artificial Sequence
  Description of Artificial Sequence: Synthetic oligonucleotide
  Sense strand starting at position 3394 of SEQ ID NO: 1883638
aggagccugaugcaugaua

SEQ ID NO: 2206583 - RNA, 19 nt, Artificial Sequence
  Description of Artificial Sequence: Synthetic oligonucleotide
  Antisense strand to SEQ ID NO: 2206582
uaucaugcaucaggcuccu

SEQ ID NO: 2206584 - RNA, 19 nt, Artificial Sequence
  Description of Artificial Sequence: Synthetic oligonucleotide
  Sense strand starting at position 1541 of SEQ ID NO: 1883638
cuguaaugaccugagguca

SEQ ID NO: 2206585 - RNA, 19 nt, Artificial Sequence
  Description of Artificial Sequence: Synthetic oligonucleotide
  Antisense strand to SEQ ID NO: 2206584
ugaccucaggucauuacag

SEQ ID NO: 2206586 - RNA, 19 nt, Artificial Sequence
  Description of Artificial Sequence: Synthetic oligonucleotide
  Sense strand starting at position 3272 of SEQ ID NO: 1883638
gggagaaucucccuucuua

SEQ ID NO: 2206587 - RNA, 19 nt, Artificial Sequence
  Description of Artificial Sequence: Synthetic oligonucleotide
  Antisense strand to SEQ ID NO: 2206586
uaagaagggagauucuccc

SEQ ID NO: 2206588 - RNA, 19 nt, Artificial Sequence
  Description of Artificial Sequence: Synthetic oligonucleotide
  Sense strand starting at position 2664 of SEQ ID NO: 1883638
aucagagucacuggugaaa

SEQ ID NO: 2206589 - RNA, 19 nt, Artificial Sequence
  Description of Artificial Sequence: Synthetic oligonucleotide
  Antisense strand to SEQ ID NO: 2206588
uuucaccagugacucugau

SEQ ID NO: 2206590 - RNA, 19 nt, Artificial Sequence
  Description of Artificial Sequence: Synthetic oligonucleotide
  Sense strand starting at position 3366 of SEQ ID NO: 1883638
uaagaaugacagugagucu

SEQ ID NO: 2206591 - RNA, 19 nt, Artificial Sequence
  Description of Artificial Sequence: Synthetic oligonucleotide
  Antisense strand to SEQ ID NO: 2206590
agacucacugucauucuua

SEQ ID NO: 2206592 - RNA, 19 nt, Artificial Sequence
  Description of Artificial Sequence: Synthetic oligonucleotide
  Sense strand starting at position 2929 of SEQ ID NO: 1883638
uggcguacucgcaagugaa

SEQ ID NO: 2206593 - RNA, 19 nt, Artificial Sequence
  Description of Artificial Sequence: Synthetic oligonucleotide
  Antisense strand to SEQ ID NO: 2206592
uucacuugcgaguacgcca

SEQ ID NO: 2206594 - RNA, 19 nt, Artificial Sequence
  Description of Artificial Sequence: Synthetic oligonucleotide
  Sense strand starting at position 2721 of SEQ ID NO: 1883638
cuaggugcccaggauuaau

SEQ ID NO: 2206595 - RNA, 19 nt, Artificial Sequence
  Description of Artificial Sequence: Synthetic oligonucleotide
  Antisense strand to SEQ ID NO: 2206594
auuaauccugggcaccuag

SEQ ID NO: 2206596 - RNA, 19 nt, Artificial Sequence
  Description of Artificial Sequence: Synthetic oligonucleotide
  Sense strand starting at position 283 of SEQ ID NO: 1883638
gaguuauacagugggacca

SEQ ID NO: 2206597 - RNA, 19 nt, Artificial Sequence
  Description of Artificial Sequence: Synthetic oligonucleotide
  Antisense strand to SEQ ID NO: 2206596
uggucccacuguauaacuc

SEQ ID NO: 2206598 - RNA, 19 nt, Artificial Sequence
  Description of Artificial Sequence: Synthetic oligonucleotide
  Sense strand starting at position 1859 of SEQ ID NO: 1883638
gaugguuauugggugacaa

SEQ ID NO: 2206599 - RNA, 19 nt, Artificial Sequence
  Description of Artificial Sequence: Synthetic oligonucleotide
  Antisense strand to SEQ ID NO: 2206598
uugucacccaauaaccauc

SEQ ID NO: 2206600 - RNA, 19 nt, Artificial Sequence
  Description of Artificial Sequence: Synthetic oligonucleotide
  Sense strand starting at position 2455 of SEQ ID NO: 1883638
uuaucuccagagcaguaua

SEQ ID NO: 2206601 - RNA, 19 nt, Artificial Sequence
  Description of Artificial Sequence: Synthetic oligonucleotide
  Antisense strand to SEQ ID NO: 2206600
uauacugcucuggagauaa

SEQ ID NO: 2206602 - RNA, 19 nt, Artificial Sequence
  Description of Artificial Sequence: Synthetic oligonucleotide
  Sense strand starting at position 3329 of SEQ ID NO: 1883638
ggccuuuagcacuaacaag

SEQ ID NO: 2206603 - RNA, 19 nt, Artificial Sequence
  Description of Artificial Sequence: Synthetic oligonucleotide
  Antisense strand to SEQ ID NO: 2206602
cuuguuagugcuaaaggcc

SEQ ID NO: 2206604 - RNA, 19 nt, Artificial Sequence
  Description of Artificial Sequence: Synthetic oligonucleotide
  Sense strand starting at position 3166 of SEQ ID NO: 1883638
ggaaguuacccuggguaga

SEQ ID NO: 2206605 - RNA, 19 nt, Artificial Sequence
  Description of Artificial Sequence: Synthetic oligonucleotide
  Antisense strand to SEQ ID NO: 2206604
ucuacccaggguaacuucc

SEQ ID NO: 2206606 - RNA, 19 nt, Artificial Sequence
  Description of Artificial Sequence: Synthetic oligonucleotide
  Sense strand starting at position 211 of SEQ ID NO: 1883638
ggcauuacagucugagaaa

SEQ ID NO: 2206607 - RNA, 19 nt, Artificial Sequence
  Description of Artificial Sequence: Synthetic oligonucleotide
  Antisense strand to SEQ ID NO: 2206606
uuucucagacuguaaugcc

SEQ ID NO: 2206608 - RNA, 19 nt, Artificial Sequence
  Description of Artificial Sequence: Synthetic oligonucleotide
  Sense strand starting at position 3143 of SEQ ID NO: 1883638
cuccuuuagcaaugggaag

SEQ ID NO: 2206609 - RNA, 19 nt, Artificial Sequence
  Description of Artificial Sequence: Synthetic oligonucleotide
  Antisense strand to SEQ ID NO: 2206608
cuucccauugcuaaaggag

SEQ ID NO: 2206610 - RNA, 19 nt, Artificial Sequence
  Description of Artificial Sequence: Synthetic oligonucleotide
  Sense strand starting at position 1815 of SEQ ID NO: 1883638
acacgugaauucucugaaa

SEQ ID NO: 2206611 - RNA, 19 nt, Artificial Sequence
  Description of Artificial Sequence: Synthetic oligonucleotide
  Antisense strand to SEQ ID NO: 2206610
uuucagagaauucacgugu

SEQ ID NO: 2206612 - RNA, 19 nt, Artificial Sequence
  Description of Artificial Sequence: Synthetic oligonucleotide
  Sense strand starting at position 2440 of SEQ ID NO: 1883638
gagauucuggugcacuuau

SEQ ID NO: 2206613 - RNA, 19 nt, Artificial Sequence
  Description of Artificial Sequence: Synthetic oligonucleotide
  Antisense strand to SEQ ID NO: 2206612
auaagugcaccagaaucuc

SEQ ID NO: 2206614 - RNA, 19 nt, Artificial Sequence
  Description of Artificial Sequence: Synthetic oligonucleotide
  Sense strand starting at position 1289 of SEQ ID NO: 1883638
ggcauucaagcugggaaga

SEQ ID NO: 2206615 - RNA, 19 nt, Artificial Sequence
  Description of Artificial Sequence: Synthetic oligonucleotide
  Antisense strand to SEQ ID NO: 2206614
ucuucccagcuugaaugcc

SEQ ID NO: 2206616 - RNA, 19 nt, Artificial Sequence
  Description of Artificial Sequence: Synthetic oligonucleotide
  Sense strand starting at position 1860 of SEQ ID NO: 1883638
augguuauugggugacaau

SEQ ID NO: 2206617 - RNA, 19 nt, Artificial Sequence
  Description of Artificial Sequence: Synthetic oligonucleotide
  Antisense strand to SEQ ID NO: 2206616
auugucacccaauaaccau

SEQ ID NO: 2206618 - RNA, 19 nt, Artificial Sequence
  Description of Artificial Sequence: Synthetic oligonucleotide
  Sense strand starting at position 3167 of SEQ ID NO: 1883638
gaaguuacccuggguagau

SEQ ID NO: 2206619 - RNA, 19 nt, Artificial Sequence
  Description of Artificial Sequence: Synthetic oligonucleotide
  Antisense strand to SEQ ID NO: 2206618
aucuacccaggguaacuuc

SEQ ID NO: 2206620 - RNA, 19 nt, Artificial Sequence
  Description of Artificial Sequence: Synthetic oligonucleotide
  Sense strand starting at position 18 of SEQ ID NO: 1883638
gugguauggcaaggaaaua

SEQ ID NO: 2206621 - RNA, 19 nt, Artificial Sequence
  Description of Artificial Sequence: Synthetic oligonucleotide
  Antisense strand to SEQ ID NO: 2206620
uauuuccuugccauaccac

SEQ ID NO: 2206622 - RNA, 19 nt, Artificial Sequence
  Description of Artificial Sequence: Synthetic oligonucleotide
  Sense strand starting at position 1327 of SEQ ID NO: 1883638
acauuugugucuuugcuca

SEQ ID NO: 2206623 - RNA, 19 nt, Artificial Sequence
  Description of Artificial Sequence: Synthetic oligonucleotide
  Antisense strand to SEQ ID NO: 2206622
ugagcaaagacacaaaugu

SEQ ID NO: 2206624 - RNA, 19 nt, Artificial Sequence
  Description of Artificial Sequence: Synthetic oligonucleotide
  Sense strand starting at position 1890 of SEQ ID NO: 1883638
uaguuaacaucuguugaag

SEQ ID NO: 2206625 - RNA, 19 nt, Artificial Sequence
  Description of Artificial Sequence: Synthetic oligonucleotide
  Antisense strand to SEQ ID NO: 2206624
cuucaacagauguuaacua

SEQ ID NO: 2206626 - RNA, 19 nt, Artificial Sequence
  Description of Artificial Sequence: Synthetic oligonucleotide
  Sense strand starting at position 621 of SEQ ID NO: 1883638
ggaagcugucauggacuga

SEQ ID NO: 2206627 - RNA, 19 nt, Artificial Sequence
  Description of Artificial Sequence: Synthetic oligonucleotide
  Antisense strand to SEQ ID NO: 2206626
ucaguccaugacagcuucc

SEQ ID NO: 2206628 - RNA, 19 nt, Artificial Sequence
  Description of Artificial Sequence: Synthetic oligonucleotide
  Sense strand starting at position 442 of SEQ ID NO: 1883638
gcuguacagcuauagacaa

SEQ ID NO: 2206629 - RNA, 19 nt, Artificial Sequence
  Description of Artificial Sequence: Synthetic oligonucleotide
  Antisense strand to SEQ ID NO: 2206628
uugucuauagcuguacagc

SEQ ID NO: 2206630 - RNA, 19 nt, Artificial Sequence
  Description of Artificial Sequence: Synthetic oligonucleotide
  Sense strand starting at position 905 of SEQ ID NO: 1883638
uggccagaaccuugaacuu

SEQ ID NO: 2206631 - RNA, 19 nt, Artificial Sequence
  Description of Artificial Sequence: Synthetic oligonucleotide
  Antisense strand to SEQ ID NO: 2206630
aaguucaagguucuggcca

SEQ ID NO: 2206632 - RNA, 19 nt, Artificial Sequence
  Description of Artificial Sequence: Synthetic oligonucleotide
  Sense strand starting at position 3695 of SEQ ID NO: 1883638
agcagaaauuagcucacua

SEQ ID NO: 2206633 - RNA, 19 nt, Artificial Sequence
  Description of Artificial Sequence: Synthetic oligonucleotide
  Antisense strand to SEQ ID NO: 2206632
uagugagcuaauuucugcu

SEQ ID NO: 2206634 - RNA, 19 nt, Artificial Sequence
  Description of Artificial Sequence: Synthetic oligonucleotide
  Sense strand starting at position 2930 of SEQ ID NO: 1883638
ggcguacucgcaagugaaa

SEQ ID NO: 2206635 - RNA, 19 nt, Artificial Sequence
  Description of Artificial Sequence: Synthetic oligonucleotide
  Antisense strand to SEQ ID NO: 2206634
uuucacuugcgaguacgcc

SEQ ID NO: 2206636 - RNA, 19 nt, Artificial Sequence
  Description of Artificial Sequence: Synthetic oligonucleotide
  Sense strand starting at position 2990 of SEQ ID NO: 1883638
gauuucugguuacaugaaa

SEQ ID NO: 2206637 - RNA, 19 nt, Artificial Sequence
  Description of Artificial Sequence: Synthetic oligonucleotide
  Antisense strand to SEQ ID NO: 2206636
uuucauguaaccagaaauc

SEQ ID NO: 2206638 - RNA, 19 nt, Artificial Sequence
  Description of Artificial Sequence: Synthetic oligonucleotide
  Sense strand starting at position 3076 of SEQ ID NO: 1883638
ugagaacucuacuugcauu

SEQ ID NO: 2206639 - RNA, 19 nt, Artificial Sequence
  Description of Artificial Sequence: Synthetic oligonucleotide
  Antisense strand to SEQ ID NO: 2206638
aaugcaaguagaguucuca

SEQ ID NO: 2206640 - RNA, 19 nt, Artificial Sequence
  Description of Artificial Sequence: Synthetic oligonucleotide
  Sense strand starting at position 1720 of SEQ ID NO: 1883638
auuagagucacuugaugug

SEQ ID NO: 2206641 - RNA, 19 nt, Artificial Sequence
  Description of Artificial Sequence: Synthetic oligonucleotide
  Antisense strand to SEQ ID NO: 2206640
cacaucaagugacucuaau

SEQ ID NO: 2206642 - RNA, 19 nt, Artificial Sequence
  Description of Artificial Sequence: Synthetic oligonucleotide
  Sense strand starting at position 1540 of SEQ ID NO: 1883638
acuguaaugaccugagguc

SEQ ID NO: 2206643 - RNA, 19 nt, Artificial Sequence
  Description of Artificial Sequence: Synthetic oligonucleotide
  Antisense strand to SEQ ID NO: 2206642
gaccucaggucauuacagu

SEQ ID NO: 2206644 - RNA, 19 nt, Artificial Sequence
  Description of Artificial Sequence: Synthetic oligonucleotide
  Sense strand starting at position 462 of SEQ ID NO: 1883638
guacuuaccuucccugaga

SEQ ID NO: 2206645 - RNA, 19 nt, Artificial Sequence
  Description of Artificial Sequence: Synthetic oligonucleotide
  Antisense strand to SEQ ID NO: 2206644
ucucagggaagguaaguac

SEQ ID NO: 2206646 - RNA, 19 nt, Artificial Sequence
  Description of Artificial Sequence: Synthetic oligonucleotide
  Sense strand starting at position 3120 of SEQ ID NO: 1883638
ggugcugaauaauuacuau

SEQ ID NO: 2206647 - RNA, 19 nt, Artificial Sequence
  Description of Artificial Sequence: Synthetic oligonucleotide
  Antisense strand to SEQ ID NO: 2206646
auaguaauuauucagcacc

SEQ ID NO: 2206648 - RNA, 19 nt, Artificial Sequence
  Description of Artificial Sequence: Synthetic oligonucleotide
  Sense strand starting at position 3021 of SEQ ID NO: 1883639
agaauaagcccagagcauu

SEQ ID NO: 2206649 - RNA, 19 nt, Artificial Sequence
  Description of Artificial Sequence: Synthetic oligonucleotide
  Antisense strand to SEQ ID NO: 2206648
aaugcucugggcuuauucu

SEQ ID NO: 2206650 - RNA, 19 nt, Artificial Sequence
  Description of Artificial Sequence: Synthetic oligonucleotide
  Sense strand starting at position 3032 of SEQ ID NO: 1883639
agagcauuccuaggaaacu

SEQ ID NO: 2206651 - RNA, 19 nt, Artificial Sequence
  Description of Artificial Sequence: Synthetic oligonucleotide
  Antisense strand to SEQ ID NO: 2206650
aguuuccuaggaaugcucu

SEQ ID NO: 2206652 - RNA, 19 nt, Artificial Sequence
  Description of Artificial Sequence: Synthetic oligonucleotide
  Sense strand starting at position 69 of SEQ ID NO: 1883639
aauagagaguuguugaauu

SEQ ID NO: 2206653 - RNA, 19 nt, Artificial Sequence
  Description of Artificial Sequence: Synthetic oligonucleotide
  Antisense strand to SEQ ID NO: 2206652
aauucaacaacucucuauu

SEQ ID NO: 2206654 - RNA, 19 nt, Artificial Sequence
  Description of Artificial Sequence: Synthetic oligonucleotide
  Sense strand starting at position 67 of SEQ ID NO: 1883639
ucaauagagaguuguugaa

SEQ ID NO: 2206655 - RNA, 19 nt, Artificial Sequence
  Description of Artificial Sequence: Synthetic oligonucleotide
  Antisense strand to SEQ ID NO: 2206654
uucaacaacucucuauuga

SEQ ID NO: 2206656 - RNA, 19 nt, Artificial Sequence
  Description of Artificial Sequence: Synthetic oligonucleotide
  Sense strand starting at position 3029 of SEQ ID NO: 1883639
cccagagcauuccuaggaa

SEQ ID NO: 2206657 - RNA, 19 nt, Artificial Sequence
  Description of Artificial Sequence: Synthetic oligonucleotide
  Antisense strand to SEQ ID NO: 2206656
uuccuaggaaugcucuggg

SEQ ID NO: 2206658 - RNA, 19 nt, Artificial Sequence
  Description of Artificial Sequence: Synthetic oligonucleotide
  Sense strand starting at position 2045 of SEQ ID NO: 1883639
cccauaguucuacagaguc

SEQ ID NO: 2206659 - RNA, 19 nt, Artificial Sequence
  Description of Artificial Sequence: Synthetic oligonucleotide
  Antisense strand to SEQ ID NO: 2206658
gacucuguagaacuauggg

SEQ ID NO: 2206660 - RNA, 19 nt, Artificial Sequence
  Description of Artificial Sequence: Synthetic oligonucleotide
  Sense strand starting at position 174 of SEQ ID NO: 1883639
cagauuagguggcuuaaga

SEQ ID NO: 2206661 - RNA, 19 nt, Artificial Sequence
  Description of Artificial Sequence: Synthetic oligonucleotide
  Antisense strand to SEQ ID NO: 2206660
ucuuaagccaccuaaucug

SEQ ID NO: 2206662 - RNA, 19 nt, Artificial Sequence
  Description of Artificial Sequence: Synthetic oligonucleotide
  Sense strand starting at position 2391 of SEQ ID NO: 1883639
aaggguguuguggagcaaa

SEQ ID NO: 2206663 - RNA, 19 nt, Artificial Sequence
  Description of Artificial Sequence: Synthetic oligonucleotide
  Antisense strand to SEQ ID NO: 2206662
uuugcuccacaacacccuu

SEQ ID NO: 2206664 - RNA, 19 nt, Artificial Sequence
  Description of Artificial Sequence: Synthetic oligonucleotide
  Sense strand starting at position 2443 of SEQ ID NO: 1883639
aacacagagggcugugauu

SEQ ID NO: 2206665 - RNA, 19 nt, Artificial Sequence
  Description of Artificial Sequence: Synthetic oligonucleotide
  Antisense strand to SEQ ID NO: 2206664
aaucacagcccucuguguu

SEQ ID NO: 2206666 - RNA, 19 nt, Artificial Sequence
  Description of Artificial Sequence: Synthetic oligonucleotide
  Sense strand starting at position 2417 of SEQ ID NO: 1883639
agauaaacaccgugugaau

SEQ ID NO: 2206667 - RNA, 19 nt, Artificial Sequence
  Description of Artificial Sequence: Synthetic oligonucleotide
  Antisense strand to SEQ ID NO: 2206666
auucacacgguguuuaucu

SEQ ID NO: 2206668 - RNA, 19 nt, Artificial Sequence
  Description of Artificial Sequence: Synthetic oligonucleotide
  Sense strand starting at position 2419 of SEQ ID NO: 1883639
auaaacaccgugugaauga

SEQ ID NO: 2206669 - RNA, 19 nt, Artificial Sequence
  Description of Artificial Sequence: Synthetic oligonucleotide
  Antisense strand to SEQ ID NO: 2206668
ucauucacacgguguuuau

SEQ ID NO: 2206670 - RNA, 19 nt, Artificial Sequence
  Description of Artificial Sequence: Synthetic oligonucleotide
  Sense strand starting at position 2561 of SEQ ID NO: 1883639
cuuauucugcugggaugaa

SEQ ID NO: 2206671 - RNA, 19 nt, Artificial Sequence
  Description of Artificial Sequence: Synthetic oligonucleotide
  Antisense strand to SEQ ID NO: 2206670
uucaucccagcagaauaag

SEQ ID NO: 2206672 - RNA, 19 nt, Artificial Sequence
  Description of Artificial Sequence: Synthetic oligonucleotide
  Sense strand starting at position 2051 of SEQ ID NO: 1883639
guucuacagagucauguua

SEQ ID NO: 2206673 - RNA, 19 nt, Artificial Sequence
  Description of Artificial Sequence: Synthetic oligonucleotide
  Antisense strand to SEQ ID NO: 2206672
uaacaugacucuguagaac

SEQ ID NO: 2206674 - RNA, 19 nt, Artificial Sequence
  Description of Artificial Sequence: Synthetic oligonucleotide
  Sense strand starting at position 2821 of SEQ ID NO: 1883639
uuaaaugcauggcuuuaga

SEQ ID NO: 2206675 - RNA, 19 nt, Artificial Sequence
  Description of Artificial Sequence: Synthetic oligonucleotide
  Antisense strand to SEQ ID NO: 2206674
ucuaaagccaugcauuuaa

SEQ ID NO: 2206676 - RNA, 19 nt, Artificial Sequence
  Description of Artificial Sequence: Synthetic oligonucleotide
  Sense strand starting at position 2492 of SEQ ID NO: 1883639
aguguucuucccuaaggca

SEQ ID NO: 2206677 - RNA, 19 nt, Artificial Sequence
  Description of Artificial Sequence: Synthetic oligonucleotide
  Antisense strand to SEQ ID NO: 2206676
ugccuuagggaagaacacu

SEQ ID NO: 2206678 - RNA, 19 nt, Artificial Sequence
  Description of Artificial Sequence: Synthetic oligonucleotide
  Sense strand starting at position 2819 of SEQ ID NO: 1883639
acuuaaaugcauggcuuua

SEQ ID NO: 2206679 - RNA, 19 nt, Artificial Sequence
  Description of Artificial Sequence: Synthetic oligonucleotide
  Antisense strand to SEQ ID NO: 2206678
uaaagccaugcauuuaagu

SEQ ID NO: 2206680 - RNA, 19 nt, Artificial Sequence
  Description of Artificial Sequence: Synthetic oligonucleotide
  Sense strand starting at position 3981 of SEQ ID NO: 1883639
uugucuggcuuaucacaca

SEQ ID NO: 2206681 - RNA, 19 nt, Artificial Sequence
  Description of Artificial Sequence: Synthetic oligonucleotide
  Antisense strand to SEQ ID NO: 2206680
ugugugauaagccagacaa

SEQ ID NO: 2206682 - RNA, 19 nt, Artificial Sequence
  Description of Artificial Sequence: Synthetic oligonucleotide
  Sense strand starting at position 3617 of SEQ ID NO: 1883639
uacagauuaguugguguuu

SEQ ID NO: 2206683 - RNA, 19 nt, Artificial Sequence
  Description of Artificial Sequence: Synthetic oligonucleotide
  Antisense strand to SEQ ID NO: 2206682
aaacaccaacuaaucugua

SEQ ID NO: 2206684 - RNA, 19 nt, Artificial Sequence
  Description of Artificial Sequence: Synthetic oligonucleotide
  Sense strand starting at position 2560 of SEQ ID NO: 1883639
gcuuauucugcugggauga

SEQ ID NO: 2206685 - RNA, 19 nt, Artificial Sequence
  Description of Artificial Sequence: Synthetic oligonucleotide
  Antisense strand to SEQ ID NO: 2206684
ucaucccagcagaauaagc

SEQ ID NO: 2206686 - RNA, 19 nt, Artificial Sequence
  Description of Artificial Sequence: Synthetic oligonucleotide
  Sense strand starting at position 2225 of SEQ ID NO: 1883639
cugauugagcucugcuaca

SEQ ID NO: 2206687 - RNA, 19 nt, Artificial Sequence
  Description of Artificial Sequence: Synthetic oligonucleotide
  Antisense strand to SEQ ID NO: 2206686
uguagcagagcucaaucag

SEQ ID NO: 2206688 - RNA, 19 nt, Artificial Sequence
  Description of Artificial Sequence: Synthetic oligonucleotide
  Sense strand starting at position 2919 of SEQ ID NO: 1883639
accagagacugacaaagua

SEQ ID NO: 2206689 - RNA, 19 nt, Artificial Sequence
  Description of Artificial Sequence: Synthetic oligonucleotide
  Antisense strand to SEQ ID NO: 2206688
uacuuugucagucucuggu

SEQ ID NO: 2206690 - RNA, 19 nt, Artificial Sequence
  Description of Artificial Sequence: Synthetic oligonucleotide
  Sense strand starting at position 3051 of SEQ ID NO: 1883639
ggcaacagauuguuuguuu

SEQ ID NO: 2206691 - RNA, 19 nt, Artificial Sequence
  Description of Artificial Sequence: Synthetic oligonucleotide
  Antisense strand to SEQ ID NO: 2206690
aaacaaacaaucuguugcc

SEQ ID NO: 2206692 - RNA, 19 nt, Artificial Sequence
  Description of Artificial Sequence: Synthetic oligonucleotide
  Sense strand starting at position 79 of SEQ ID NO: 1883639
uguugaauuucuugaaugg

SEQ ID NO: 2206693 - RNA, 19 nt, Artificial Sequence
  Description of Artificial Sequence: Synthetic oligonucleotide
  Antisense strand to SEQ ID NO: 2206692
ccauucaagaaauucaaca

SEQ ID NO: 2206694 - RNA, 19 nt, Artificial Sequence
  Description of Artificial Sequence: Synthetic oligonucleotide
  Sense strand starting at position 2746 of SEQ ID NO: 1883639
gcggcuccuaacugauaca

SEQ ID NO: 2206695 - RNA, 19 nt, Artificial Sequence
  Description of Artificial Sequence: Synthetic oligonucleotide
  Antisense strand to SEQ ID NO: 2206694
uguaucaguuaggagccgc

SEQ ID NO: 2206696 - RNA, 19 nt, Artificial Sequence
  Description of Artificial Sequence: Synthetic oligonucleotide
  Sense strand starting at position 2470 of SEQ ID NO: 1883639
uagagcagccuucgaagua

SEQ ID NO: 2206697 - RNA, 19 nt, Artificial Sequence
  Description of Artificial Sequence: Synthetic oligonucleotide
  Antisense strand to SEQ ID NO: 2206696
uacuucgaaggcugcucua

SEQ ID NO: 2206698 - RNA, 19 nt, Artificial Sequence
  Description of Artificial Sequence: Synthetic oligonucleotide
  Sense strand starting at position 2881 of SEQ ID NO: 1883639
caaagccugugugcugaua

SEQ ID NO: 2206699 - RNA, 19 nt, Artificial Sequence
  Description of Artificial Sequence: Synthetic oligonucleotide
  Antisense strand to SEQ ID NO: 2206698
uaucagcacacaggcuuug

SEQ ID NO: 2206700 - RNA, 19 nt, Artificial Sequence
  Description of Artificial Sequence: Synthetic oligonucleotide
  Sense strand starting at position 2146 of SEQ ID NO: 1883639
caggcuggcucguuacaaa

SEQ ID NO: 2206701 - RNA, 19 nt, Artificial Sequence
  Description of Artificial Sequence: Synthetic oligonucleotide
  Antisense strand to SEQ ID NO: 2206700
uuuguaacgagccagccug

SEQ ID NO: 2206702 - RNA, 19 nt, Artificial Sequence
  Description of Artificial Sequence: Synthetic oligonucleotide
  Sense strand starting at position 10 of SEQ ID NO: 1883639
gucuucugucacugaugca

SEQ ID NO: 2206703 - RNA, 19 nt, Artificial Sequence
  Description of Artificial Sequence: Synthetic oligonucleotide
  Antisense strand to SEQ ID NO: 2206702
ugcaucagugacagaagac

SEQ ID NO: 2206704 - RNA, 19 nt, Artificial Sequence
  Description of Artificial Sequence: Synthetic oligonucleotide
  Sense strand starting at position 3409 of SEQ ID NO: 1883639
ggguguaacugacagacaa

SEQ ID NO: 2206705 - RNA, 19 nt, Artificial Sequence
  Description of Artificial Sequence: Synthetic oligonucleotide
  Antisense strand to SEQ ID NO: 2206704
uugucugucaguuacaccc

SEQ ID NO: 2206706 - RNA, 19 nt, Artificial Sequence
  Description of Artificial Sequence: Synthetic oligonucleotide
  Sense strand starting at position 299 of SEQ ID NO: 1883639
uucuuuguguguccuuaca

SEQ ID NO: 2206707 - RNA, 19 nt, Artificial Sequence
  Description of Artificial Sequence: Synthetic oligonucleotide
  Antisense strand to SEQ ID NO: 2206706
uguaaggacacacaaagaa

SEQ ID NO: 2206708 - RNA, 19 nt, Artificial Sequence
  Description of Artificial Sequence: Synthetic oligonucleotide
  Sense strand starting at position 2766 of SEQ ID NO: 1883639
gguuaagccugcguaauga

SEQ ID NO: 2206709 - RNA, 19 nt, Artificial Sequence
  Description of Artificial Sequence: Synthetic oligonucleotide
  Antisense strand to SEQ ID NO: 2206708
ucauuacgcaggcuuaacc

SEQ ID NO: 2206710 - RNA, 19 nt, Artificial Sequence
  Description of Artificial Sequence: Synthetic oligonucleotide
  Sense strand starting at position 3033 of SEQ ID NO: 1883639
gagcauuccuaggaaacug

SEQ ID NO: 2206711 - RNA, 19 nt, Artificial Sequence
  Description of Artificial Sequence: Synthetic oligonucleotide
  Antisense strand to SEQ ID NO: 2206710
caguuuccuaggaaugcuc

SEQ ID NO: 2206712 - RNA, 19 nt, Artificial Sequence
  Description of Artificial Sequence: Synthetic oligonucleotide
  Sense strand starting at position 2763 of SEQ ID NO: 1883639
caggguuaagccugcguaa

SEQ ID NO: 2206713 - RNA, 19 nt, Artificial Sequence
  Description of Artificial Sequence: Synthetic oligonucleotide
  Antisense strand to SEQ ID NO: 2206712
uuacgcaggcuuaacccug

SEQ ID NO: 2206714 - RNA, 19 nt, Artificial Sequence
  Description of Artificial Sequence: Synthetic oligonucleotide
  Sense strand starting at position 2765 of SEQ ID NO: 1883639
ggguuaagccugcguaaug

SEQ ID NO: 2206715 - RNA, 19 nt, Artificial Sequence
  Description of Artificial Sequence: Synthetic oligonucleotide
  Antisense strand to SEQ ID NO: 2206714
cauuacgcaggcuuaaccc

SEQ ID NO: 2206716 - RNA, 19 nt, Artificial Sequence
  Description of Artificial Sequence: Synthetic oligonucleotide
  Sense strand starting at position 2065 of SEQ ID NO: 1883639
uguuaaccgugguuguuau

SEQ ID NO: 2206717 - RNA, 19 nt, Artificial Sequence
  Description of Artificial Sequence: Synthetic oligonucleotide
  Antisense strand to SEQ ID NO: 2206716
auaacaaccacgguuaaca

SEQ ID NO: 2206718 - RNA, 19 nt, Artificial Sequence
  Description of Artificial Sequence: Synthetic oligonucleotide
  Sense strand starting at position 2482 of SEQ ID NO: 1883639
cgaaguaugcaguguucuu

SEQ ID NO: 2206719 - RNA, 19 nt, Artificial Sequence
  Description of Artificial Sequence: Synthetic oligonucleotide
  Antisense strand to SEQ ID NO: 2206718
aagaacacugcauacuucg

SEQ ID NO: 2206720 - RNA, 19 nt, Artificial Sequence
  Description of Artificial Sequence: Synthetic oligonucleotide
  Sense strand starting at position 2062 of SEQ ID NO: 1883639
ucauguuaaccgugguugu

SEQ ID NO: 2206721 - RNA, 19 nt, Artificial Sequence
  Description of Artificial Sequence: Synthetic oligonucleotide
  Antisense strand to SEQ ID NO: 2206720
acaaccacgguuaacauga

SEQ ID NO: 2206722 - RNA, 19 nt, Artificial Sequence
  Description of Artificial Sequence: Synthetic oligonucleotide
  Sense strand starting at position 2063 of SEQ ID NO: 1883639
cauguuaaccgugguuguu

SEQ ID NO: 2206723 - RNA, 19 nt, Artificial Sequence
  Description of Artificial Sequence: Synthetic oligonucleotide
  Antisense strand to SEQ ID NO: 2206722
aacaaccacgguuaacaug

SEQ ID NO: 2206724 - RNA, 19 nt, Artificial Sequence
  Description of Artificial Sequence: Synthetic oligonucleotide
  Sense strand starting at position 2053 of SEQ ID NO: 1883639
ucuacagagucauguuaac

SEQ ID NO: 2206725 - RNA, 19 nt, Artificial Sequence
  Description of Artificial Sequence: Synthetic oligonucleotide
  Antisense strand to SEQ ID NO: 2206724
guuaacaugacucuguaga

SEQ ID NO: 2206726 - RNA, 19 nt, Artificial Sequence
  Description of Artificial Sequence: Synthetic oligonucleotide
  Sense strand starting at position 2889 of SEQ ID NO: 1883639
gugugcugauauggaauaa

SEQ ID NO: 2206727 - RNA, 19 nt, Artificial Sequence
  Description of Artificial Sequence: Synthetic oligonucleotide
  Antisense strand to SEQ ID NO: 2206726
uuauuccauaucagcacac

SEQ ID NO: 2206728 - RNA, 19 nt, Artificial Sequence
  Description of Artificial Sequence: Synthetic oligonucleotide
  Sense strand starting at position 564 of SEQ ID NO: 1883640
augcauacugcagaaugaa

SEQ ID NO: 2206729 - RNA, 19 nt, Artificial Sequence
  Description of Artificial Sequence: Synthetic oligonucleotide
  Antisense strand to SEQ ID NO: 2206728
uucauucugcaguaugcau

SEQ ID NO: 2206730 - RNA, 19 nt, Artificial Sequence
  Description of Artificial Sequence: Synthetic oligonucleotide
  Sense strand starting at position 2421 of SEQ ID NO: 1883640
uguauaugaguguaguaug

SEQ ID NO: 2206731 - RNA, 19 nt, Artificial Sequence
  Description of Artificial Sequence: Synthetic oligonucleotide
  Antisense strand to SEQ ID NO: 2206730
cauacuacacucauauaca

SEQ ID NO: 2206732 - RNA, 19 nt, Artificial Sequence
  Description of Artificial Sequence: Synthetic oligonucleotide
  Sense strand starting at position 2426 of SEQ ID NO: 1883640
augaguguaguauguuaag

SEQ ID NO: 2206733 - RNA, 19 nt, Artificial Sequence
  Description of Artificial Sequence: Synthetic oligonucleotide
  Antisense strand to SEQ ID NO: 2206732
cuuaacauacuacacucau

SEQ ID NO: 2206734 - RNA, 19 nt, Artificial Sequence
  Description of Artificial Sequence: Synthetic oligonucleotide
  Sense strand starting at position 2413 of SEQ ID NO: 1883640
gcaaguguuguauaugagu

SEQ ID NO: 2206735 - RNA, 19 nt, Artificial Sequence
  Description of Artificial Sequence: Synthetic oligonucleotide
  Antisense strand to SEQ ID NO: 2206734
acucauauacaacacuugc

SEQ ID NO: 2206736 - RNA, 19 nt, Artificial Sequence
  Description of Artificial Sequence: Synthetic oligonucleotide
  Sense strand starting at position 2419 of SEQ ID NO: 1883640
guuguauaugaguguagua

SEQ ID NO: 2206737 - RNA, 19 nt, Artificial Sequence
  Description of Artificial Sequence: Synthetic oligonucleotide
  Antisense strand to SEQ ID NO: 2206736
uacuacacucauauacaac

SEQ ID NO: 2206738 - RNA, 19 nt, Artificial Sequence
  Description of Artificial Sequence: Synthetic oligonucleotide
  Sense strand starting at position 2415 of SEQ ID NO: 1883640
aaguguuguauaugagugu

SEQ ID NO: 2206739 - RNA, 19 nt, Artificial Sequence
  Description of Artificial Sequence: Synthetic oligonucleotide
  Antisense strand to SEQ ID NO: 2206738
acacucauauacaacacuu

SEQ ID NO: 2206740 - RNA, 19 nt, Artificial Sequence
  Description of Artificial Sequence: Synthetic oligonucleotide
  Sense strand starting at position 2418 of SEQ ID NO: 1883640
uguuguauaugaguguagu

SEQ ID NO: 2206741 - RNA, 19 nt, Artificial Sequence
  Description of Artificial Sequence: Synthetic oligonucleotide
  Antisense strand to SEQ ID NO: 2206740
acuacacucauauacaaca

SEQ ID NO: 2206742 - RNA, 19 nt, Artificial Sequence
  Description of Artificial Sequence: Synthetic oligonucleotide
  Sense strand starting at position 2424 of SEQ ID NO: 1883640
auaugaguguaguauguua

SEQ ID NO: 2206743 - RNA, 19 nt, Artificial Sequence
  Description of Artificial Sequence: Synthetic oligonucleotide
  Antisense strand to SEQ ID NO: 2206742
uaacauacuacacucauau

SEQ ID NO: 2206744 - RNA, 19 nt, Artificial Sequence
  Description of Artificial Sequence: Synthetic oligonucleotide
  Sense strand starting at position 335 of SEQ ID NO: 1883640
cuuguuucuugguauauac

SEQ ID NO: 2206745 - RNA, 19 nt, Artificial Sequence
  Description of Artificial Sequence: Synthetic oligonucleotide
  Antisense strand to SEQ ID NO: 2206744
guauauaccaagaaacaag

SEQ ID NO: 2206746 - RNA, 19 nt, Artificial Sequence
  Description of Artificial Sequence: Synthetic oligonucleotide
  Sense strand starting at position 2411 of SEQ ID NO: 1883640
augcaaguguuguauauga

SEQ ID NO: 2206747 - RNA, 19 nt, Artificial Sequence
  Description of Artificial Sequence: Synthetic oligonucleotide
  Antisense strand to SEQ ID NO: 2206746
ucauauacaacacuugcau

SEQ ID NO: 2206748 - RNA, 19 nt, Artificial Sequence
  Description of Artificial Sequence: Synthetic oligonucleotide
  Sense strand starting at position 2416 of SEQ ID NO: 1883640
aguguuguauaugagugua

SEQ ID NO: 2206749 - RNA, 19 nt, Artificial Sequence
  Description of Artificial Sequence: Synthetic oligonucleotide
  Antisense strand to SEQ ID NO: 2206748
uacacucauauacaacacu

SEQ ID NO: 2206750 - RNA, 19 nt, Artificial Sequence
  Description of Artificial Sequence: Synthetic oligonucleotide
  Sense strand starting at position 2409 of SEQ ID NO: 1883640
cgaugcaaguguuguauau

SEQ ID NO: 2206751 - RNA, 19 nt, Artificial Sequence
  Description of Artificial Sequence: Synthetic oligonucleotide
  Antisense strand to SEQ ID NO: 2206750
auauacaacacuugcaucg

SEQ ID NO: 2206752 - RNA, 19 nt, Artificial Sequence
  Description of Artificial Sequence: Synthetic oligonucleotide
  Sense strand starting at position 2771 of SEQ ID NO: 1883641
gacauagaguuaccacaug

SEQ ID NO: 2206753 - RNA, 19 nt, Artificial Sequence
  Description of Artificial Sequence: Synthetic oligonucleotide
  Antisense strand to SEQ ID NO: 2206752
caugugguaacucuauguc

SEQ ID NO: 2206754 - RNA, 19 nt, Artificial Sequence
  Description of Artificial Sequence: Synthetic oligonucleotide
  Sense strand starting at position 1822 of SEQ ID NO: 1883641
guugacauaccauaaaguu

SEQ ID NO: 2206755 - RNA, 19 nt, Artificial Sequence
  Description of Artificial Sequence: Synthetic oligonucleotide
  Antisense strand to SEQ ID NO: 2206754
aacuuuaugguaugucaac

SEQ ID NO: 2206756 - RNA, 19 nt, Artificial Sequence
  Description of Artificial Sequence: Synthetic oligonucleotide
  Sense strand starting at position 860 of SEQ ID NO: 1883641
ucacucacuggucagacau

SEQ ID NO: 2206757 - RNA, 19 nt, Artificial Sequence
  Description of Artificial Sequence: Synthetic oligonucleotide
  Antisense strand to SEQ ID NO: 2206756
augucugaccagugaguga

SEQ ID NO: 2206758 - RNA, 19 nt, Artificial Sequence
  Description of Artificial Sequence: Synthetic oligonucleotide
  Sense strand starting at position 1225 of SEQ ID NO: 1883641
agcagaaaugagcaaaugu

SEQ ID NO: 2206759 - RNA, 19 nt, Artificial Sequence
  Description of Artificial Sequence: Synthetic oligonucleotide
  Antisense strand to SEQ ID NO: 2206758
acauuugcucauuucugcu

SEQ ID NO: 2206760 - RNA, 19 nt, Artificial Sequence
  Description of Artificial Sequence: Synthetic oligonucleotide
  Sense strand starting at position 2019 of SEQ ID NO: 1883641
cuccacugucugugaauuu

SEQ ID NO: 2206761 - RNA, 19 nt, Artificial Sequence
  Description of Artificial Sequence: Synthetic oligonucleotide
  Antisense strand to SEQ ID NO: 2206760
aaauucacagacaguggag

SEQ ID NO: 2206762 - RNA, 19 nt, Artificial Sequence
  Description of Artificial Sequence: Synthetic oligonucleotide
  Sense strand starting at position 3943 of SEQ ID NO: 1883641
aaucaaggcccugagaguu

SEQ ID NO: 2206763 - RNA, 19 nt, Artificial Sequence
  Description of Artificial Sequence: Synthetic oligonucleotide
  Antisense strand to SEQ ID NO: 2206762
aacucucagggccuugauu

SEQ ID NO: 2206764 - RNA, 19 nt, Artificial Sequence
  Description of Artificial Sequence: Synthetic oligonucleotide
  Sense strand starting at position 1800 of SEQ ID NO: 1883641
ucagcagcuuuauugauuu

SEQ ID NO: 2206765 - RNA, 19 nt, Artificial Sequence
  Description of Artificial Sequence: Synthetic oligonucleotide
  Antisense strand to SEQ ID NO: 2206764
aaaucaauaaagcugcuga

SEQ ID NO: 2206766 - RNA, 19 nt, Artificial Sequence
  Description of Artificial Sequence: Synthetic oligonucleotide
  Sense strand starting at position 1731 of SEQ ID NO: 1883641
auccuuaguguccagggaa

SEQ ID NO: 2206767 - RNA, 19 nt, Artificial Sequence
  Description of Artificial Sequence: Synthetic oligonucleotide
  Antisense strand to SEQ ID NO: 2206766
uucccuggacacuaaggau

SEQ ID NO: 2206768 - RNA, 19 nt, Artificial Sequence
  Description of Artificial Sequence: Synthetic oligonucleotide
  Sense strand starting at position 3109 of SEQ ID NO: 1883641
cuagaauccgaagguggaa

SEQ ID NO: 2206769 - RNA, 19 nt, Artificial Sequence
  Description of Artificial Sequence: Synthetic oligonucleotide
  Antisense strand to SEQ ID NO: 2206768
uuccaccuucggauucuag

SEQ ID NO: 2206770 - RNA, 19 nt, Artificial Sequence
  Description of Artificial Sequence: Synthetic oligonucleotide
  Sense strand starting at position 1470 of SEQ ID NO: 1883641
augaauuucucauaggagg

SEQ ID NO: 2206771 - RNA, 19 nt, Artificial Sequence
  Description of Artificial Sequence: Synthetic oligonucleotide
  Antisense strand to SEQ ID NO: 2206770
ccuccuaugagaaauucau

SEQ ID NO: 2206772 - RNA, 19 nt, Artificial Sequence
  Description of Artificial Sequence: Synthetic oligonucleotide
  Sense strand starting at position 1667 of SEQ ID NO: 1883641
uguaauacaugggugagga

SEQ ID NO: 2206773 - RNA, 19 nt, Artificial Sequence
  Description of Artificial Sequence: Synthetic oligonucleotide
  Antisense strand to SEQ ID NO: 2206772
uccucacccauguauuaca

SEQ ID NO: 2206774 - RNA, 19 nt, Artificial Sequence
  Description of Artificial Sequence: Synthetic oligonucleotide
  Sense strand starting at position 152 of SEQ ID NO: 1883641
ugugaauguccguauuucu

SEQ ID NO: 2206775 - RNA, 19 nt, Artificial Sequence
  Description of Artificial Sequence: Synthetic oligonucleotide
  Antisense strand to SEQ ID NO: 2206774
agaaauacggacauucaca

SEQ ID NO: 2206776 - RNA, 19 nt, Artificial Sequence
  Description of Artificial Sequence: Synthetic oligonucleotide
  Sense strand starting at position 670 of SEQ ID NO: 1883641
ggagcagcucuuuagagag

SEQ ID NO: 2206777 - RNA, 19 nt, Artificial Sequence
  Description of Artificial Sequence: Synthetic oligonucleotide
  Antisense strand to SEQ ID NO: 2206776
cucucuaaagagcugcucc

SEQ ID NO: 2206778 - RNA, 19 nt, Artificial Sequence
  Description of Artificial Sequence: Synthetic oligonucleotide
  Sense strand starting at position 1668 of SEQ ID NO: 1883641
guaauacaugggugaggau

SEQ ID NO: 2206779 - RNA, 19 nt, Artificial Sequence
  Description of Artificial Sequence: Synthetic oligonucleotide
  Antisense strand to SEQ ID NO: 2206778
auccucacccauguauuac

SEQ ID NO: 2206780 - RNA, 19 nt, Artificial Sequence
  Description of Artificial Sequence: Synthetic oligonucleotide
  Sense strand starting at position 457 of SEQ ID NO: 1883641
ccauguguccuggccguau

SEQ ID NO: 2206781 - RNA, 19 nt, Artificial Sequence
  Description of Artificial Sequence: Synthetic oligonucleotide
  Antisense strand to SEQ ID NO: 2206780
auacggccaggacacaugg

SEQ ID NO: 2206782 - RNA, 19 nt, Artificial Sequence
  Description of Artificial Sequence: Synthetic oligonucleotide
  Sense strand starting at position 3201 of SEQ ID NO: 1883641
gcgaacuguaaugauagau

SEQ ID NO: 2206783 - RNA, 19 nt, Artificial Sequence
  Description of Artificial Sequence: Synthetic oligonucleotide
  Antisense strand to SEQ ID NO: 2206782
aucuaucauuacaguucgc

SEQ ID NO: 2206784 - RNA, 19 nt, Artificial Sequence
  Description of Artificial Sequence: Synthetic oligonucleotide
  Sense strand starting at position 859 of SEQ ID NO: 1883641
aucacucacuggucagaca

SEQ ID NO: 2206785 - RNA, 19 nt, Artificial Sequence
  Description of Artificial Sequence: Synthetic oligonucleotide
  Antisense strand to SEQ ID NO: 2206784
ugucugaccagugagugau

SEQ ID NO: 2206786 - RNA, 19 nt, Artificial Sequence
  Description of Artificial Sequence: Synthetic oligonucleotide
  Sense strand starting at position 2756 of SEQ ID NO: 1883641
cuccucaaaugguuagaca

SEQ ID NO: 2206787 - RNA, 19 nt, Artificial Sequence
  Description of Artificial Sequence: Synthetic oligonucleotide
  Antisense strand to SEQ ID NO: 2206786
ugucuaaccauuugaggag

SEQ ID NO: 2206788 - RNA, 19 nt, Artificial Sequence
  Description of Artificial Sequence: Synthetic oligonucleotide
  Sense strand starting at position 1664 of SEQ ID NO: 1883641
gauuguaauacauggguga

SEQ ID NO: 2206789 - RNA, 19 nt, Artificial Sequence
  Description of Artificial Sequence: Synthetic oligonucleotide
  Antisense strand to SEQ ID NO: 2206788
ucacccauguauuacaauc

SEQ ID NO: 2206790 - RNA, 19 nt, Artificial Sequence
  Description of Artificial Sequence: Synthetic oligonucleotide
  Sense strand starting at position 3370 of SEQ ID NO: 1883641
cccuuaugugaaugaacca

SEQ ID NO: 2206791 - RNA, 19 nt, Artificial Sequence
  Description of Artificial Sequence: Synthetic oligonucleotide
  Antisense strand to SEQ ID NO: 2206790
ugguucauucacauaaggg

SEQ ID NO: 2206792 - RNA, 19 nt, Artificial Sequence
  Description of Artificial Sequence: Synthetic oligonucleotide
  Sense strand starting at position 1680 of SEQ ID NO: 1883641
ugaggauguguacauaugu

SEQ ID NO: 2206793 - RNA, 19 nt, Artificial Sequence
  Description of Artificial Sequence: Synthetic oligonucleotide
  Antisense strand to SEQ ID NO: 2206792
acauauguacacauccuca

SEQ ID NO: 2206794 - RNA, 19 nt, Artificial Sequence
  Description of Artificial Sequence: Synthetic oligonucleotide
  Sense strand starting at position 3274 of SEQ ID NO: 1883641
aauuguauggugcauaaau

SEQ ID NO: 2206795 - RNA, 19 nt, Artificial Sequence
  Description of Artificial Sequence: Synthetic oligonucleotide
  Antisense strand to SEQ ID NO: 2206794
auuuaugcaccauacaauu

SEQ ID NO: 2206796 - RNA, 19 nt, Artificial Sequence
  Description of Artificial Sequence: Synthetic oligonucleotide
  Sense strand starting at position 1468 of SEQ ID NO: 1883641
ucaugaauuucucauagga

SEQ ID NO: 2206797 - RNA, 19 nt, Artificial Sequence
  Description of Artificial Sequence: Synthetic oligonucleotide
  Antisense strand to SEQ ID NO: 2206796
uccuaugagaaauucauga

SEQ ID NO: 2206798 - RNA, 19 nt, Artificial Sequence
  Description of Artificial Sequence: Synthetic oligonucleotide
  Sense strand starting at position 3197 of SEQ ID NO: 1883641
ucaagcgaacuguaaugau

SEQ ID NO: 2206799 - RNA, 19 nt, Artificial Sequence
  Description of Artificial Sequence: Synthetic oligonucleotide
  Antisense strand to SEQ ID NO: 2206798
aucauuacaguucgcuuga

SEQ ID NO: 2206800 - RNA, 19 nt, Artificial Sequence
  Description of Artificial Sequence: Synthetic oligonucleotide
  Sense strand starting at position 3256 of SEQ ID NO: 1883641
gcacacuugaaaugaguga

SEQ ID NO: 2206801 - RNA, 19 nt, Artificial Sequence
  Description of Artificial Sequence: Synthetic oligonucleotide
  Antisense strand to SEQ ID NO: 2206800
ucacucauuucaagugugc

SEQ ID NO: 2206802 - RNA, 19 nt, Artificial Sequence
  Description of Artificial Sequence: Synthetic oligonucleotide
  Sense strand starting at position 676 of SEQ ID NO: 1883641
gcucuuuagagaggaucua

SEQ ID NO: 2206803 - RNA, 19 nt, Artificial Sequence
  Description of Artificial Sequence: Synthetic oligonucleotide
  Antisense strand to SEQ ID NO: 2206802
uagauccucucuaaagagc

SEQ ID NO: 2206804 - RNA, 19 nt, Artificial Sequence
  Description of Artificial Sequence: Synthetic oligonucleotide
  Sense strand starting at position 2141 of SEQ ID NO: 1883641
augguuguguguuuaauuu

SEQ ID NO: 2206805 - RNA, 19 nt, Artificial Sequence
  Description of Artificial Sequence: Synthetic oligonucleotide
  Antisense strand to SEQ ID NO: 2206804
aaauuaaacacacaaccau

SEQ ID NO: 2206806 - RNA, 19 nt, Artificial Sequence
  Description of Artificial Sequence: Synthetic oligonucleotide
  Sense strand starting at position 809 of SEQ ID NO: 1883641
aaggcuuaaguguaagagu

SEQ ID NO: 2206807 - RNA, 19 nt, Artificial Sequence
  Description of Artificial Sequence: Synthetic oligonucleotide
  Antisense strand to SEQ ID NO: 2206806
acucuuacacuuaagccuu

SEQ ID NO: 2206808 - RNA, 19 nt, Artificial Sequence
  Description of Artificial Sequence: Synthetic oligonucleotide
  Sense strand starting at position 1677 of SEQ ID NO: 1883641
gggugaggauguguacaua

SEQ ID NO: 2206809 - RNA, 19 nt, Artificial Sequence
  Description of Artificial Sequence: Synthetic oligonucleotide
  Antisense strand to SEQ ID NO: 2206808
uauguacacauccucaccc

SEQ ID NO: 2206810 - RNA, 19 nt, Artificial Sequence
  Description of Artificial Sequence: Synthetic oligonucleotide
  Sense strand starting at position 3276 of SEQ ID NO: 1883641
uuguauggugcauaaauua

SEQ ID NO: 2206811 - RNA, 19 nt, Artificial Sequence
  Description of Artificial Sequence: Synthetic oligonucleotide
  Antisense strand to SEQ ID NO: 2206810
uaauuuaugcaccauacaa

SEQ ID NO: 2206812 - RNA, 19 nt, Artificial Sequence
  Description of Artificial Sequence: Synthetic oligonucleotide
  Sense strand starting at position 3942 of SEQ ID NO: 1883641
uaaucaaggcccugagagu

SEQ ID NO: 2206813 - RNA, 19 nt, Artificial Sequence
  Description of Artificial Sequence: Synthetic oligonucleotide
  Antisense strand to SEQ ID NO: 2206812
acucucagggccuugauua

SEQ ID NO: 2206814 - RNA, 19 nt, Artificial Sequence
  Description of Artificial Sequence: Synthetic oligonucleotide
  Sense strand starting at position 151 of SEQ ID NO: 1883641
cugugaauguccguauuuc

SEQ ID NO: 2206815 - RNA, 19 nt, Artificial Sequence
  Description of Artificial Sequence: Synthetic oligonucleotide
  Antisense strand to SEQ ID NO: 2206814
gaaauacggacauucacag

SEQ ID NO: 2206816 - RNA, 19 nt, Artificial Sequence
  Description of Artificial Sequence: Synthetic oligonucleotide
  Sense strand starting at position 3022 of SEQ ID NO: 1883641
acauucugcuaaguuaaag

SEQ ID NO: 2206817 - RNA, 19 nt, Artificial Sequence
  Description of Artificial Sequence: Synthetic oligonucleotide
  Antisense strand to SEQ ID NO: 2206816
cuuuaacuuagcagaaugu

SEQ ID NO: 2206818 - RNA, 19 nt, Artificial Sequence
  Description of Artificial Sequence: Synthetic oligonucleotide
  Sense strand starting at position 669 of SEQ ID NO: 1883641
gggagcagcucuuuagaga

SEQ ID NO: 2206819 - RNA, 19 nt, Artificial Sequence
  Description of Artificial Sequence: Synthetic oligonucleotide
  Antisense strand to SEQ ID NO: 2206818
ucucuaaagagcugcuccc

SEQ ID NO: 2206820 - RNA, 19 nt, Artificial Sequence
  Description of Artificial Sequence: Synthetic oligonucleotide
  Sense strand starting at position 3058 of SEQ ID NO: 1883641
ccacauguuguaugaaacu

SEQ ID NO: 2206821 - RNA, 19 nt, Artificial Sequence
  Description of Artificial Sequence: Synthetic oligonucleotide
  Antisense strand to SEQ ID NO: 2206820
aguuucauacaacaugugg

SEQ ID NO: 2206822 - RNA, 19 nt, Artificial Sequence
  Description of Artificial Sequence: Synthetic oligonucleotide
  Sense strand starting at position 1215 of SEQ ID NO: 1883641
uaugcuggccagcagaaau

SEQ ID NO: 2206823 - RNA, 19 nt, Artificial Sequence
  Description of Artificial Sequence: Synthetic oligonucleotide
  Antisense strand to SEQ ID NO: 2206822
auuucugcuggccagcaua

SEQ ID NO: 2206824 - RNA, 19 nt, Artificial Sequence
  Description of Artificial Sequence: Synthetic oligonucleotide
  Sense strand starting at position 2799 of SEQ ID NO: 1883641
uguuacaccuauguauaua

SEQ ID NO: 2206825 - RNA, 19 nt, Artificial Sequence
  Description of Artificial Sequence: Synthetic oligonucleotide
  Antisense strand to SEQ ID NO: 2206824
uauauacauagguguaaca

SEQ ID NO: 2206826 - RNA, 19 nt, Artificial Sequence
  Description of Artificial Sequence: Synthetic oligonucleotide
  Sense strand starting at position 1723 of SEQ ID NO: 1883641
cuaacuaaauccuuagugu

SEQ ID NO: 2206827 - RNA, 19 nt, Artificial Sequence
  Description of Artificial Sequence: Synthetic oligonucleotide
  Antisense strand to SEQ ID NO: 2206826
acacuaaggauuuaguuag

SEQ ID NO: 2206828 - RNA, 19 nt, Artificial Sequence
  Description of Artificial Sequence: Synthetic oligonucleotide
  Sense strand starting at position 2200 of SEQ ID NO: 1883641
gguuacuguguuuaacauu

SEQ ID NO: 2206829 - RNA, 19 nt, Artificial Sequence
  Description of Artificial Sequence: Synthetic oligonucleotide
  Antisense strand to SEQ ID NO: 2206828
aauguuaaacacaguaacc

SEQ ID NO: 2206830 - RNA, 19 nt, Artificial Sequence
  Description of Artificial Sequence: Synthetic oligonucleotide
  Sense strand starting at position 3978 of SEQ ID NO: 1883641
ugguaauacgacugacagu

SEQ ID NO: 2206831 - RNA, 19 nt, Artificial Sequence
  Description of Artificial Sequence: Synthetic oligonucleotide
  Antisense strand to SEQ ID NO: 2206830
acugucagucguauuacca

SEQ ID NO: 2206832 - RNA, 19 nt, Artificial Sequence
  Description of Artificial Sequence: Synthetic oligonucleotide
  Sense strand starting at position 1482 of SEQ ID NO: 1883642
ugccauggcgcgguagaaa

SEQ ID NO: 2206833 - RNA, 19 nt, Artificial Sequence
  Description of Artificial Sequence: Synthetic oligonucleotide
  Antisense strand to SEQ ID NO: 2206832
uuucuaccgcgccauggca

SEQ ID NO: 2206834 - RNA, 19 nt, Artificial Sequence
  Description of Artificial Sequence: Synthetic oligonucleotide
  Sense strand starting at position 2775 of SEQ ID NO: 1883642
gugccaucccucuugcagu

SEQ ID NO: 2206835 - RNA, 19 nt, Artificial Sequence
  Description of Artificial Sequence: Synthetic oligonucleotide
  Antisense strand to SEQ ID NO: 2206834
acugcaagagggauggcac

SEQ ID NO: 2206836 - RNA, 19 nt, Artificial Sequence
  Description of Artificial Sequence: Synthetic oligonucleotide
  Sense strand starting at position 2123 of SEQ ID NO: 1883642
acaucaaugccaugagaug

SEQ ID NO: 2206837 - RNA, 19 nt, Artificial Sequence
  Description of Artificial Sequence: Synthetic oligonucleotide
  Antisense strand to SEQ ID NO: 2206836
caucucauggcauugaugu

SEQ ID NO: 2206838 - RNA, 19 nt, Artificial Sequence
  Description of Artificial Sequence: Synthetic oligonucleotide
  Sense strand starting at position 1453 of SEQ ID NO: 1883642
auggaaguguaauucgaga

SEQ ID NO: 2206839 - RNA, 19 nt, Artificial Sequence
  Description of Artificial Sequence: Synthetic oligonucleotide
  Antisense strand to SEQ ID NO: 2206838
ucucgaauuacacuuccau

SEQ ID NO: 2206840 - RNA, 19 nt, Artificial Sequence
  Description of Artificial Sequence: Synthetic oligonucleotide
  Sense strand starting at position 2183 of SEQ ID NO: 1883642
auccauguuggugaaugua

SEQ ID NO: 2206841 - RNA, 19 nt, Artificial Sequence
  Description of Artificial Sequence: Synthetic oligonucleotide
  Antisense strand to SEQ ID NO: 2206840
uacauucaccaacauggau

SEQ ID NO: 2206842 - RNA, 19 nt, Artificial Sequence
  Description of Artificial Sequence: Synthetic oligonucleotide
  Sense strand starting at position 1493 of SEQ ID NO: 1883642
gguagaaacagaugugguu

SEQ ID NO: 2206843 - RNA, 19 nt, Artificial Sequence
  Description of Artificial Sequence: Synthetic oligonucleotide
  Antisense strand to SEQ ID NO: 2206842
aaccacaucuguuucuacc

SEQ ID NO: 2206844 - RNA, 19 nt, Artificial Sequence
  Description of Artificial Sequence: Synthetic oligonucleotide
  Sense strand starting at position 895 of SEQ ID NO: 1883642
augucucuugcaggagaaa

SEQ ID NO: 2206845 - RNA, 19 nt, Artificial Sequence
  Description of Artificial Sequence: Synthetic oligonucleotide
  Antisense strand to SEQ ID NO: 2206844
uuucuccugcaagagacau

SEQ ID NO: 2206846 - RNA, 19 nt, Artificial Sequence
  Description of Artificial Sequence: Synthetic oligonucleotide
  Sense strand starting at position 2610 of SEQ ID NO: 1883642
acuagagucuccucacuca

SEQ ID NO: 2206847 - RNA, 19 nt, Artificial Sequence
  Description of Artificial Sequence: Synthetic oligonucleotide
  Antisense strand to SEQ ID NO: 2206846
ugagugaggagacucuagu

SEQ ID NO: 2206848 - RNA, 19 nt, Artificial Sequence
  Description of Artificial Sequence: Synthetic oligonucleotide
  Sense strand starting at position 1448 of SEQ ID NO: 1883642
gugggauggaaguguaauu

SEQ ID NO: 2206849 - RNA, 19 nt, Artificial Sequence
  Description of Artificial Sequence: Synthetic oligonucleotide
  Antisense strand to SEQ ID NO: 2206848
aauuacacuuccaucccac

SEQ ID NO: 2206850 - RNA, 19 nt, Artificial Sequence
  Description of Artificial Sequence: Synthetic oligonucleotide
  Sense strand starting at position 525 of SEQ ID NO: 1883642
ugacauauggauuguccga

SEQ ID NO: 2206851 - RNA, 19 nt, Artificial Sequence
  Description of Artificial Sequence: Synthetic oligonucleotide
  Antisense strand to SEQ ID NO: 2206850
ucggacaauccauauguca

SEQ ID NO: 2206852 - RNA, 19 nt, Artificial Sequence
  Description of Artificial Sequence: Synthetic oligonucleotide
  Sense strand starting at position 1385 of SEQ ID NO: 1883642
guagcagugaaucacaguu

SEQ ID NO: 2206853 - RNA, 19 nt, Artificial Sequence
  Description of Artificial Sequence: Synthetic oligonucleotide
  Antisense strand to SEQ ID NO: 2206852
aacugugauucacugcuac

SEQ ID NO: 2206854 - RNA, 19 nt, Artificial Sequence
  Description of Artificial Sequence: Synthetic oligonucleotide
  Sense strand starting at position 527 of SEQ ID NO: 1883642
acauauggauuguccgagu

SEQ ID NO: 2206855 - RNA, 19 nt, Artificial Sequence
  Description of Artificial Sequence: Synthetic oligonucleotide
  Antisense strand to SEQ ID NO: 2206854
acucggacaauccauaugu

SEQ ID NO: 2206856 - RNA, 19 nt, Artificial Sequence
  Description of Artificial Sequence: Synthetic oligonucleotide
  Sense strand starting at position 2186 of SEQ ID NO: 1883642
cauguuggugaauguauca

SEQ ID NO: 2206857 - RNA, 19 nt, Artificial Sequence
  Description of Artificial Sequence: Synthetic oligonucleotide
  Antisense strand to SEQ ID NO: 2206856
ugauacauucaccaacaug

SEQ ID NO: 2206858 - RNA, 19 nt, Artificial Sequence
  Description of Artificial Sequence: Synthetic oligonucleotide
  Sense strand starting at position 2608 of SEQ ID NO: 1883642
cgacuagagucuccucacu

SEQ ID NO: 2206859 - RNA, 19 nt, Artificial Sequence
  Description of Artificial Sequence: Synthetic oligonucleotide
  Antisense strand to SEQ ID NO: 2206858
agugaggagacucuagucg

SEQ ID NO: 2206860 - RNA, 19 nt, Artificial Sequence
  Description of Artificial Sequence: Synthetic oligonucleotide
  Sense strand starting at position 3189 of SEQ ID NO: 1883642
uccugucaccugugagacu

SEQ ID NO: 2206861 - RNA, 19 nt, Artificial Sequence
  Description of Artificial Sequence: Synthetic oligonucleotide
  Antisense strand to SEQ ID NO: 2206860
agucucacaggugacagga

SEQ ID NO: 2206862 - RNA, 19 nt, Artificial Sequence
  Description of Artificial Sequence: Synthetic oligonucleotide
  Sense strand starting at position 2083 of SEQ ID NO: 1883642
ucucuucucuguuucuaga

SEQ ID NO: 2206863 - RNA, 19 nt, Artificial Sequence
  Description of Artificial Sequence: Synthetic oligonucleotide
  Antisense strand to SEQ ID NO: 2206862
ucuagaaacagagaagaga

SEQ ID NO: 2206864 - RNA, 19 nt, Artificial Sequence
  Description of Artificial Sequence: Synthetic oligonucleotide
  Sense strand starting at position 3686 of SEQ ID NO: 1883642
ccagccuagucagucauua

SEQ ID NO: 2206865 - RNA, 19 nt, Artificial Sequence
  Description of Artificial Sequence: Synthetic oligonucleotide
  Antisense strand to SEQ ID NO: 2206864
uaaugacugacuaggcugg

SEQ ID NO: 2206866 - RNA, 19 nt, Artificial Sequence
  Description of Artificial Sequence: Synthetic oligonucleotide
  Sense strand starting at position 710 of SEQ ID NO: 1883642
uuaugcucugcauggugaa

SEQ ID NO: 2206867 - RNA, 19 nt, Artificial Sequence
  Description of Artificial Sequence: Synthetic oligonucleotide
  Antisense strand to SEQ ID NO: 2206866
uucaccaugcagagcauaa

SEQ ID NO: 2206868 - RNA, 19 nt, Artificial Sequence
  Description of Artificial Sequence: Synthetic oligonucleotide
  Sense strand starting at position 2418 of SEQ ID NO: 1883642
aggagaagcucuuaaacac

SEQ ID NO: 2206869 - RNA, 19 nt, Artificial Sequence
  Description of Artificial Sequence: Synthetic oligonucleotide
  Antisense strand to SEQ ID NO: 2206868
guguuuaagagcuucuccu

SEQ ID NO: 2206870 - RNA, 19 nt, Artificial Sequence
  Description of Artificial Sequence: Synthetic oligonucleotide
  Sense strand starting at position 2121 of SEQ ID NO: 1883642
ucacaucaaugccaugaga

SEQ ID NO: 2206871 - RNA, 19 nt, Artificial Sequence
  Description of Artificial Sequence: Synthetic oligonucleotide
  Antisense strand to SEQ ID NO: 2206870
ucucauggcauugauguga

SEQ ID NO: 2206872 - RNA, 19 nt, Artificial Sequence
  Description of Artificial Sequence: Synthetic oligonucleotide
  Sense strand starting at position 351 of SEQ ID NO: 1883642
gguacagacucagacaugu

SEQ ID NO: 2206873 - RNA, 19 nt, Artificial Sequence
  Description of Artificial Sequence: Synthetic oligonucleotide
  Antisense strand to SEQ ID NO: 2206872
acaugucugagucuguacc

SEQ ID NO: 2206874 - RNA, 19 nt, Artificial Sequence
  Description of Artificial Sequence: Synthetic oligonucleotide
  Sense strand starting at position 1377 of SEQ ID NO: 1883642
agagaacuguagcagugaa

SEQ ID NO: 2206875 - RNA, 19 nt, Artificial Sequence
  Description of Artificial Sequence: Synthetic oligonucleotide
  Antisense strand to SEQ ID NO: 2206874
uucacugcuacaguucucu

SEQ ID NO: 2206876 - RNA, 19 nt, Artificial Sequence
  Description of Artificial Sequence: Synthetic oligonucleotide
  Sense strand starting at position 2162 of SEQ ID NO: 1883642
ccauguggguuugagagau

SEQ ID NO: 2206877 - RNA, 19 nt, Artificial Sequence
  Description of Artificial Sequence: Synthetic oligonucleotide
  Antisense strand to SEQ ID NO: 2206876
aucucucaaacccacaugg

SEQ ID NO: 2206878 - RNA, 19 nt, Artificial Sequence
  Description of Artificial Sequence: Synthetic oligonucleotide
  Sense strand starting at position 2376 of SEQ ID NO: 1883642
guagcacccgccuguaauu

SEQ ID NO: 2206879 - RNA, 19 nt, Artificial Sequence
  Description of Artificial Sequence: Synthetic oligonucleotide
  Antisense strand to SEQ ID NO: 2206878
aauuacaggcgggugcuac

SEQ ID NO: 2206880 - RNA, 19 nt, Artificial Sequence
  Description of Artificial Sequence: Synthetic oligonucleotide
  Sense strand starting at position 308 of SEQ ID NO: 1883642
ugagaucacucagguccaa

SEQ ID NO: 2206881 - RNA, 19 nt, Artificial Sequence
  Description of Artificial Sequence: Synthetic oligonucleotide
  Antisense strand to SEQ ID NO: 2206880
uuggaccugagugaucuca

SEQ ID NO: 2206882 - RNA, 19 nt, Artificial Sequence
  Description of Artificial Sequence: Synthetic oligonucleotide
  Sense strand starting at position 893 of SEQ ID NO: 1883642
ccaugucucuugcaggaga

SEQ ID NO: 2206883 - RNA, 19 nt, Artificial Sequence
  Description of Artificial Sequence: Synthetic oligonucleotide
  Antisense strand to SEQ ID NO: 2206882
ucuccugcaagagacaugg

SEQ ID NO: 2206884 - RNA, 19 nt, Artificial Sequence
  Description of Artificial Sequence: Synthetic oligonucleotide
  Sense strand starting at position 530 of SEQ ID NO: 1883642
uauggauuguccgagucug

SEQ ID NO: 2206885 - RNA, 19 nt, Artificial Sequence
  Description of Artificial Sequence: Synthetic oligonucleotide
  Antisense strand to SEQ ID NO: 2206884
cagacucggacaauccaua

SEQ ID NO: 2206886 - RNA, 19 nt, Artificial Sequence
  Description of Artificial Sequence: Synthetic oligonucleotide
  Sense strand starting at position 661 of SEQ ID NO: 1883642
gcacauggcucacagcaau

SEQ ID NO: 2206887 - RNA, 19 nt, Artificial Sequence
  Description of Artificial Sequence: Synthetic oligonucleotide
  Antisense strand to SEQ ID NO: 2206886
auugcugugagccaugugc

SEQ ID NO: 2206888 - RNA, 19 nt, Artificial Sequence
  Description of Artificial Sequence: Synthetic oligonucleotide
  Sense strand starting at position 1626 of SEQ ID NO: 1883642
gcuuuacaguucugaguuu

SEQ ID NO: 2206889 - RNA, 19 nt, Artificial Sequence
  Description of Artificial Sequence: Synthetic oligonucleotide
  Antisense strand to SEQ ID NO: 2206888
aaacucagaacuguaaagc

SEQ ID NO: 2206890 - RNA, 19 nt, Artificial Sequence
  Description of Artificial Sequence: Synthetic oligonucleotide
  Sense strand starting at position 567 of SEQ ID NO: 1883646
cguuuagggacauaggauu

SEQ ID NO: 2206891 - RNA, 19 nt, Artificial Sequence
  Description of Artificial Sequence: Synthetic oligonucleotide
  Antisense strand to SEQ ID NO: 2206890
aauccuaugucccuaaacg

SEQ ID NO: 2206892 - RNA, 19 nt, Artificial Sequence
  Description of Artificial Sequence: Synthetic oligonucleotide
  Sense strand starting at position 3906 of SEQ ID NO: 1883646
gucacauugacgucucgca

SEQ ID NO: 2206893 - RNA, 19 nt, Artificial Sequence
  Description of Artificial Sequence: Synthetic oligonucleotide
  Antisense strand to SEQ ID NO: 2206892
ugcgagacgucaaugugac

SEQ ID NO: 2206894 - RNA, 19 nt, Artificial Sequence
  Description of Artificial Sequence: Synthetic oligonucleotide
  Sense strand starting at position 972 of SEQ ID NO: 1883646
agaggaaacuuugcuugga

SEQ ID NO: 2206895 - RNA, 19 nt, Artificial Sequence
  Description of Artificial Sequence: Synthetic oligonucleotide
  Antisense strand to SEQ ID NO: 2206894
uccaagcaaaguuuccucu

SEQ ID NO: 2206896 - RNA, 19 nt, Artificial Sequence
  Description of Artificial Sequence: Synthetic oligonucleotide
  Sense strand starting at position 212 of SEQ ID NO: 1883646
ugcuauaagcaucaugaaa

SEQ ID NO: 2206897 - RNA, 19 nt, Artificial Sequence
  Description of Artificial Sequence: Synthetic oligonucleotide
  Antisense strand to SEQ ID NO: 2206896
uuucaugaugcuuauagca

SEQ ID NO: 2206898 - RNA, 19 nt, Artificial Sequence
  Description of Artificial Sequence: Synthetic oligonucleotide
  Sense strand starting at position 152 of SEQ ID NO: 1883646
aaagguaacuauccaguga

SEQ ID NO: 2206899 - RNA, 19 nt, Artificial Sequence
  Description of Artificial Sequence: Synthetic oligonucleotide
  Antisense strand to SEQ ID NO: 2206898
ucacuggauaguuaccuuu

SEQ ID NO: 2206900 - RNA, 19 nt, Artificial Sequence
  Description of Artificial Sequence: Synthetic oligonucleotide
  Sense strand starting at position 120 of SEQ ID NO: 1883646
gcagauuaggccuacaaau

SEQ ID NO: 2206901 - RNA, 19 nt, Artificial Sequence
  Description of Artificial Sequence: Synthetic oligonucleotide
  Antisense strand to SEQ ID NO: 2206900
auuuguaggccuaaucugc

SEQ ID NO: 2206902 - RNA, 19 nt, Artificial Sequence
  Description of Artificial Sequence: Synthetic oligonucleotide
  Sense strand starting at position 581 of SEQ ID NO: 1883646
ggauuaagcagaggauggu

SEQ ID NO: 2206903 - RNA, 19 nt, Artificial Sequence
  Description of Artificial Sequence: Synthetic oligonucleotide
  Antisense strand to SEQ ID NO: 2206902
accauccucugcuuaaucc

SEQ ID NO: 2206904 - RNA, 19 nt, Artificial Sequence
  Description of Artificial Sequence: Synthetic oligonucleotide
  Sense strand starting at position 1374 of SEQ ID NO: 1883646
agaaguaauacguggaaac

SEQ ID NO: 2206905 - RNA, 19 nt, Artificial Sequence
  Description of Artificial Sequence: Synthetic oligonucleotide
  Antisense strand to SEQ ID NO: 2206904
guuuccacguauuacuucu

SEQ ID NO: 2206906 - RNA, 19 nt, Artificial Sequence
  Description of Artificial Sequence: Synthetic oligonucleotide
  Sense strand starting at position 1245 of SEQ ID NO: 1883646
ccaguucuacaugagaguu

SEQ ID NO: 2206907 - RNA, 19 nt, Artificial Sequence
  Description of Artificial Sequence: Synthetic oligonucleotide
  Antisense strand to SEQ ID NO: 2206906
aacucucauguagaacugg

SEQ ID NO: 2206908 - RNA, 19 nt, Artificial Sequence
  Description of Artificial Sequence: Synthetic oligonucleotide
  Sense strand starting at position 3010 of SEQ ID NO: 1883646
auaaguccuguugauugau

SEQ ID NO: 2206909 - RNA, 19 nt, Artificial Sequence
  Description of Artificial Sequence: Synthetic oligonucleotide
  Antisense strand to SEQ ID NO: 2206908
aucaaucaacaggacuuau

SEQ ID NO: 2206910 - RNA, 19 nt, Artificial Sequence
  Description of Artificial Sequence: Synthetic oligonucleotide
  Sense strand starting at position 2287 of SEQ ID NO: 1883646
guaacaucgccugcgucaa

SEQ ID NO: 2206911 - RNA, 19 nt, Artificial Sequence
  Description of Artificial Sequence: Synthetic oligonucleotide
  Antisense strand to SEQ ID NO: 2206910
uugacgcaggcgauguuac

SEQ ID NO: 2206912 - RNA, 19 nt, Artificial Sequence
  Description of Artificial Sequence: Synthetic oligonucleotide
  Sense strand starting at position 2840 of SEQ ID NO: 1883646
ggucuuuaacucugauaaa

SEQ ID NO: 2206913 - RNA, 19 nt, Artificial Sequence
  Description of Artificial Sequence: Synthetic oligonucleotide
  Antisense strand to SEQ ID NO: 2206912
uuuaucagaguuaaagacc

SEQ ID NO: 2206914 - RNA, 19 nt, Artificial Sequence
  Description of Artificial Sequence: Synthetic oligonucleotide
  Sense strand starting at position 424 of SEQ ID NO: 1883646
uuacaugugccuuacagaa

SEQ ID NO: 2206915 - RNA, 19 nt, Artificial Sequence
  Description of Artificial Sequence: Synthetic oligonucleotide
  Antisense strand to SEQ ID NO: 2206914
uucuguaaggcacauguaa

SEQ ID NO: 2206916 - RNA, 19 nt, Artificial Sequence
  Description of Artificial Sequence: Synthetic oligonucleotide
  Sense strand starting at position 98 of SEQ ID NO: 1883646
gagaaauaguucuuucuug

SEQ ID NO: 2206917 - RNA, 19 nt, Artificial Sequence
  Description of Artificial Sequence: Synthetic oligonucleotide
  Antisense strand to SEQ ID NO: 2206916
caagaaagaacuauuucuc

SEQ ID NO: 2206918 - RNA, 19 nt, Artificial Sequence
  Description of Artificial Sequence: Synthetic oligonucleotide
  Sense strand starting at position 1375 of SEQ ID NO: 1883646
gaaguaauacguggaaacu

SEQ ID NO: 2206919 - RNA, 19 nt, Artificial Sequence
  Description of Artificial Sequence: Synthetic oligonucleotide
  Antisense strand to SEQ ID NO: 2206918
aguuuccacguauuacuuc

SEQ ID NO: 2206920 - RNA, 19 nt, Artificial Sequence
  Description of Artificial Sequence: Synthetic oligonucleotide
  Sense strand starting at position 2708 of SEQ ID NO: 1883646
cgguauuugugauucaagc

SEQ ID NO: 2206921 - RNA, 19 nt, Artificial Sequence
  Description of Artificial Sequence: Synthetic oligonucleotide
  Antisense strand to SEQ ID NO: 2206920
gcuugaaucacaaauaccg

SEQ ID NO: 2206922 - RNA, 19 nt, Artificial Sequence
  Description of Artificial Sequence: Synthetic oligonucleotide
  Sense strand starting at position 2903 of SEQ ID NO: 1883646
ggaagaaauugcucuccuu

SEQ ID NO: 2206923 - RNA, 19 nt, Artificial Sequence
  Description of Artificial Sequence: Synthetic oligonucleotide
  Antisense strand to SEQ ID NO: 2206922
aaggagagcaauuucuucc

SEQ ID NO: 2206924 - RNA, 19 nt, Artificial Sequence
  Description of Artificial Sequence: Synthetic oligonucleotide
  Sense strand starting at position 329 of SEQ ID NO: 1883646
agauuaagguagucuuauu

SEQ ID NO: 2206925 - RNA, 19 nt, Artificial Sequence
  Description of Artificial Sequence: Synthetic oligonucleotide
  Antisense strand to SEQ ID NO: 2206924
aauaagacuaccuuaaucu

SEQ ID NO: 2206926 - RNA, 19 nt, Artificial Sequence
  Description of Artificial Sequence: Synthetic oligonucleotide
  Sense strand starting at position 991 of SEQ ID NO: 1883646
gguucucagccagggagaa

SEQ ID NO: 2206927 - RNA, 19 nt, Artificial Sequence
  Description of Artificial Sequence: Synthetic oligonucleotide
  Antisense strand to SEQ ID NO: 2206926
uucucccuggcugagaacc

SEQ ID NO: 2206928 - RNA, 19 nt, Artificial Sequence
  Description of Artificial Sequence: Synthetic oligonucleotide
  Sense strand starting at position 2958 of SEQ ID NO: 1883646
gacaaauguguccgaggag

SEQ ID NO: 2206929 - RNA, 19 nt, Artificial Sequence
  Description of Artificial Sequence: Synthetic oligonucleotide
  Antisense strand to SEQ ID NO: 2206928
cuccucggacacauuuguc

SEQ ID NO: 2206930 - RNA, 19 nt, Artificial Sequence
  Description of Artificial Sequence: Synthetic oligonucleotide
  Sense strand starting at position 2957 of SEQ ID NO: 1883646
ugacaaauguguccgagga

SEQ ID NO: 2206931 - RNA, 19 nt, Artificial Sequence
  Description of Artificial Sequence: Synthetic oligonucleotide
  Antisense strand to SEQ ID NO: 2206930
uccucggacacauuuguca

SEQ ID NO: 2206932 - RNA, 19 nt, Artificial Sequence
  Description of Artificial Sequence: Synthetic oligonucleotide
  Sense strand starting at position 537 of SEQ ID NO: 1883646
uucuguuugggucaccuaa

SEQ ID NO: 2206933 - RNA, 19 nt, Artificial Sequence
  Description of Artificial Sequence: Synthetic oligonucleotide
  Antisense strand to SEQ ID NO: 2206932
uuaggugacccaaacagaa

SEQ ID NO: 2206934 - RNA, 19 nt, Artificial Sequence
  Description of Artificial Sequence: Synthetic oligonucleotide
  Sense strand starting at position 156 of SEQ ID NO: 1883646
guaacuauccagugaaucc

SEQ ID NO: 2206935 - RNA, 19 nt, Artificial Sequence
  Description of Artificial Sequence: Synthetic oligonucleotide
  Antisense strand to SEQ ID NO: 2206934
ggauucacuggauaguuac

SEQ ID NO: 2206936 - RNA, 19 nt, Artificial Sequence
  Description of Artificial Sequence: Synthetic oligonucleotide
  Sense strand starting at position 975 of SEQ ID NO: 1883646
ggaaacuuugcuuggaggu

SEQ ID NO: 2206937 - RNA, 19 nt, Artificial Sequence
  Description of Artificial Sequence: Synthetic oligonucleotide
  Antisense strand to SEQ ID NO: 2206936
accuccaagcaaaguuucc

SEQ ID NO: 2206938 - RNA, 19 nt, Artificial Sequence
  Description of Artificial Sequence: Synthetic oligonucleotide
  Sense strand starting at position 539 of SEQ ID NO: 1883646
cuguuugggucaccuaaag

SEQ ID NO: 2206939 - RNA, 19 nt, Artificial Sequence
  Description of Artificial Sequence: Synthetic oligonucleotide
  Antisense strand to SEQ ID NO: 2206938
cuuuaggugacccaaacag

SEQ ID NO: 2206940 - RNA, 19 nt, Artificial Sequence
  Description of Artificial Sequence: Synthetic oligonucleotide
  Sense strand starting at position 3955 of SEQ ID NO: 1883646
gcuccuguggcauaaauga

SEQ ID NO: 2206941 - RNA, 19 nt, Artificial Sequence
  Description of Artificial Sequence: Synthetic oligonucleotide
  Antisense strand to SEQ ID NO: 2206940
ucauuuaugccacaggagc

SEQ ID NO: 2206942 - RNA, 19 nt, Artificial Sequence
  Description of Artificial Sequence: Synthetic oligonucleotide
  Sense strand starting at position 2738 of SEQ ID NO: 1883646
ggaccacucuaucugcauu

SEQ ID NO: 2206943 - RNA, 19 nt, Artificial Sequence
  Description of Artificial Sequence: Synthetic oligonucleotide
  Antisense strand to SEQ ID NO: 2206942
aaugcagauagaguggucc

SEQ ID NO: 2206944 - RNA, 19 nt, Artificial Sequence
  Description of Artificial Sequence: Synthetic oligonucleotide
  Sense strand starting at position 3132 of SEQ ID NO: 1883646
aggaaugauuugcaauagu

SEQ ID NO: 2206945 - RNA, 19 nt, Artificial Sequence
  Description of Artificial Sequence: Synthetic oligonucleotide
  Antisense strand to SEQ ID NO: 2206944
acuauugcaaaucauuccu

SEQ ID NO: 2206946 - RNA, 19 nt, Artificial Sequence
  Description of Artificial Sequence: Synthetic oligonucleotide
  Sense strand starting at position 976 of SEQ ID NO: 1883646
gaaacuuugcuuggagguu

SEQ ID NO: 2206947 - RNA, 19 nt, Artificial Sequence
  Description of Artificial Sequence: Synthetic oligonucleotide
  Antisense strand to SEQ ID NO: 2206946
aaccuccaagcaaaguuuc

SEQ ID NO: 2206948 - RNA, 19 nt, Artificial Sequence
  Description of Artificial Sequence: Synthetic oligonucleotide
  Sense strand starting at position 439 of SEQ ID NO: 1883646
agaauauuaugccugguuu

SEQ ID NO: 2206949 - RNA, 19 nt, Artificial Sequence
  Description of Artificial Sequence: Synthetic oligonucleotide
  Antisense strand to SEQ ID NO: 2206948
aaaccaggcauaauauucu

SEQ ID NO: 2206950 - RNA, 19 nt, Artificial Sequence
  Description of Artificial Sequence: Synthetic oligonucleotide
  Sense strand starting at position 2611 of SEQ ID NO: 1883646
gugugcugucuacaaagga

SEQ ID NO: 2206951 - RNA, 19 nt, Artificial Sequence
  Description of Artificial Sequence: Synthetic oligonucleotide
  Antisense strand to SEQ ID NO: 2206950
uccuuuguagacagcacac

SEQ ID NO: 2206952 - RNA, 19 nt, Artificial Sequence
  Description of Artificial Sequence: Synthetic oligonucleotide
  Sense strand starting at position 3250 of SEQ ID NO: 1883646
uuauaacguguccaguuaa

SEQ ID NO: 2206953 - RNA, 19 nt, Artificial Sequence
  Description of Artificial Sequence: Synthetic oligonucleotide
  Antisense strand to SEQ ID NO: 2206952
uuaacuggacacguuauaa

SEQ ID NO: 2206954 - RNA, 19 nt, Artificial Sequence
  Description of Artificial Sequence: Synthetic oligonucleotide
  Sense strand starting at position 168 of SEQ ID NO: 1883646
ugaauccguaaugguuaau

SEQ ID NO: 2206955 - RNA, 19 nt, Artificial Sequence
  Description of Artificial Sequence: Synthetic oligonucleotide
  Antisense strand to SEQ ID NO: 2206954
auuaaccauuacggauuca

SEQ ID NO: 2206956 - RNA, 19 nt, Artificial Sequence
  Description of Artificial Sequence: Synthetic oligonucleotide
  Sense strand starting at position 2609 of SEQ ID NO: 1883646
augugugcugucuacaaag

SEQ ID NO: 2206957 - RNA, 19 nt, Artificial Sequence
  Description of Artificial Sequence: Synthetic oligonucleotide
  Antisense strand to SEQ ID NO: 2206956
cuuuguagacagcacacau

SEQ ID NO: 2206958 - RNA, 19 nt, Artificial Sequence
  Description of Artificial Sequence: Synthetic oligonucleotide
  Sense strand starting at position 3034 of SEQ ID NO: 1883646
aauguuuaauuugggagau

SEQ ID NO: 2206959 - RNA, 19 nt, Artificial Sequence
  Description of Artificial Sequence: Synthetic oligonucleotide
  Antisense strand to SEQ ID NO: 2206958
aucucccaaauuaaacauu

SEQ ID NO: 2206960 - RNA, 19 nt, Artificial Sequence
  Description of Artificial Sequence: Synthetic oligonucleotide
  Sense strand starting at position 235 of SEQ ID NO: 1883646
aaacuuaacuucguguaug

SEQ ID NO: 2206961 - RNA, 19 nt, Artificial Sequence
  Description of Artificial Sequence: Synthetic oligonucleotide
  Antisense strand to SEQ ID NO: 2206960
cauacacgaaguuaaguuu

SEQ ID NO: 2206962 - RNA, 19 nt, Artificial Sequence
  Description of Artificial Sequence: Synthetic oligonucleotide
  Sense strand starting at position 3086 of SEQ ID NO: 1883646
gaaagugcuaguugagagu

SEQ ID NO: 2206963 - RNA, 19 nt, Artificial Sequence
  Description of Artificial Sequence: Synthetic oligonucleotide
  Antisense strand to SEQ ID NO: 2206962
acucucaacuagcacuuuc

SEQ ID NO: 2206964 - RNA, 19 nt, Artificial Sequence
  Description of Artificial Sequence: Synthetic oligonucleotide
  Sense strand starting at position 3035 of SEQ ID NO: 1883646
auguuuaauuugggagaug

SEQ ID NO: 2206965 - RNA, 19 nt, Artificial Sequence
  Description of Artificial Sequence: Synthetic oligonucleotide
  Antisense strand to SEQ ID NO: 2206964
caucucccaaauuaaacau

SEQ ID NO: 2206966 - RNA, 19 nt, Artificial Sequence
  Description of Artificial Sequence: Synthetic oligonucleotide
  Sense strand starting at position 234 of SEQ ID NO: 1883646
gaaacuuaacuucguguau

SEQ ID NO: 2206967 - RNA, 19 nt, Artificial Sequence
  Description of Artificial Sequence: Synthetic oligonucleotide
  Antisense strand to SEQ ID NO: 2206966
auacacgaaguuaaguuuc

SEQ ID NO: 2206968 - RNA, 19 nt, Artificial Sequence
  Description of Artificial Sequence: Synthetic oligonucleotide
  Sense strand starting at position 440 of SEQ ID NO: 1883646
gaauauuaugccugguuuc

SEQ ID NO: 2206969 - RNA, 19 nt, Artificial Sequence
  Description of Artificial Sequence: Synthetic oligonucleotide
  Antisense strand to SEQ ID NO: 2206968
gaaaccaggcauaauauuc

SEQ ID NO: 2206970 - RNA, 19 nt, Artificial Sequence
  Description of Artificial Sequence: Synthetic oligonucleotide
  Sense strand starting at position 3723 of SEQ ID NO: 1883647
uuagcuccugaugacaaau

SEQ ID NO: 2206971 - RNA, 19 nt, Artificial Sequence
  Description of Artificial Sequence: Synthetic oligonucleotide
  Antisense strand to SEQ ID NO: 2206970
auuugucaucaggagcuaa

SEQ ID NO: 2206972 - RNA, 19 nt, Artificial Sequence
  Description of Artificial Sequence: Synthetic oligonucleotide
  Sense strand starting at position 997 of SEQ ID NO: 1883647
agggcucauuuguccuuua

SEQ ID NO: 2206973 - RNA, 19 nt, Artificial Sequence
  Description of Artificial Sequence: Synthetic oligonucleotide
  Antisense strand to SEQ ID NO: 2206972
uaaaggacaaaugagcccu

SEQ ID NO: 2206974 - RNA, 19 nt, Artificial Sequence
  Description of Artificial Sequence: Synthetic oligonucleotide
  Sense strand starting at position 3513 of SEQ ID NO: 1883647
gaacucugaugaguagacu

SEQ ID NO: 2206975 - RNA, 19 nt, Artificial Sequence
  Description of Artificial Sequence: Synthetic oligonucleotide
  Antisense strand to SEQ ID NO: 2206974
agucuacucaucagaguuc

SEQ ID NO: 2206976 - RNA, 19 nt, Artificial Sequence
  Description of Artificial Sequence: Synthetic oligonucleotide
  Sense strand starting at position 2663 of SEQ ID NO: 1883647
uuucuauuugugugacauu

SEQ ID NO: 2206977 - RNA, 19 nt, Artificial Sequence
  Description of Artificial Sequence: Synthetic oligonucleotide
  Antisense strand to SEQ ID NO: 2206976
aaugucacacaaauagaaa

SEQ ID NO: 2206978 - RNA, 19 nt, Artificial Sequence
  Description of Artificial Sequence: Synthetic oligonucleotide
  Sense strand starting at position 2690 of SEQ ID NO: 1883647
cagguaguacuuuaacaug

SEQ ID NO: 2206979 - RNA, 19 nt, Artificial Sequence
  Description of Artificial Sequence: Synthetic oligonucleotide
  Antisense strand to SEQ ID NO: 2206978
cauguuaaaguacuaccug

SEQ ID NO: 2206980 - RNA, 19 nt, Artificial Sequence
  Description of Artificial Sequence: Synthetic oligonucleotide
  Sense strand starting at position 213 of SEQ ID NO: 1883647
acauguaaugcuuagggau

SEQ ID NO: 2206981 - RNA, 19 nt, Artificial Sequence
  Description of Artificial Sequence: Synthetic oligonucleotide
  Antisense strand to SEQ ID NO: 2206980
aucccuaagcauuacaugu

SEQ ID NO: 2206982 - RNA, 19 nt, Artificial Sequence
  Description of Artificial Sequence: Synthetic oligonucleotide
  Sense strand starting at position 2497 of SEQ ID NO: 1883647
uugauaaaucacuaccgua

SEQ ID NO: 2206983 - RNA, 19 nt, Artificial Sequence
  Description of Artificial Sequence: Synthetic oligonucleotide
  Antisense strand to SEQ ID NO: 2206982
uacgguagugauuuaucaa

SEQ ID NO: 2206984 - RNA, 19 nt, Artificial Sequence
  Description of Artificial Sequence: Synthetic oligonucleotide
  Sense strand starting at position 3449 of SEQ ID NO: 1883647
gcaguccugauugagaaug

SEQ ID NO: 2206985 - RNA, 19 nt, Artificial Sequence
  Description of Artificial Sequence: Synthetic oligonucleotide
  Antisense strand to SEQ ID NO: 2206984
cauucucaaucaggacugc

SEQ ID NO: 2206986 - RNA, 19 nt, Artificial Sequence
  Description of Artificial Sequence: Synthetic oligonucleotide
  Sense strand starting at position 2559 of SEQ ID NO: 1883647
auaggagaauaucuuuguu

SEQ ID NO: 2206987 - RNA, 19 nt, Artificial Sequence
  Description of Artificial Sequence: Synthetic oligonucleotide
  Antisense strand to SEQ ID NO: 2206986
aacaaagauauucuccuau

SEQ ID NO: 2206988 - RNA, 19 nt, Artificial Sequence
  Description of Artificial Sequence: Synthetic oligonucleotide
  Sense strand starting at position 2682 of SEQ ID NO: 1883647
ggacaagucagguaguacu

SEQ ID NO: 2206989 - RNA, 19 nt, Artificial Sequence
  Description of Artificial Sequence: Synthetic oligonucleotide
  Antisense strand to SEQ ID NO: 2206988
aguacuaccugacuugucc

SEQ ID NO: 2206990 - RNA, 19 nt, Artificial Sequence
  Description of Artificial Sequence: Synthetic oligonucleotide
  Sense strand starting at position 3908 of SEQ ID NO: 1883647
cgucucuaugccgucuaga

SEQ ID NO: 2206991 - RNA, 19 nt, Artificial Sequence
  Description of Artificial Sequence: Synthetic oligonucleotide
  Antisense strand to SEQ ID NO: 2206990
ucuagacggcauagagacg

SEQ ID NO: 2206992 - RNA, 19 nt, Artificial Sequence
  Description of Artificial Sequence: Synthetic oligonucleotide
  Sense strand starting at position 998 of SEQ ID NO: 1883647
gggcucauuuguccuuuau

SEQ ID NO: 2206993 - RNA, 19 nt, Artificial Sequence
  Description of Artificial Sequence: Synthetic oligonucleotide
  Antisense strand to SEQ ID NO: 2206992
auaaaggacaaaugagccc

SEQ ID NO: 2206994 - RNA, 19 nt, Artificial Sequence
  Description of Artificial Sequence: Synthetic oligonucleotide
  Sense strand starting at position 2860 of SEQ ID NO: 1883647
caaucauccgugugauuuc

SEQ ID NO: 2206995 - RNA, 19 nt, Artificial Sequence
  Description of Artificial Sequence: Synthetic oligonucleotide
  Antisense strand to SEQ ID NO: 2206994
gaaaucacacggaugauug

SEQ ID NO: 2206996 - RNA, 19 nt, Artificial Sequence
  Description of Artificial Sequence: Synthetic oligonucleotide
  Sense strand starting at position 3759 of SEQ ID NO: 1883647
agugcaugauaacuaauaa

SEQ ID NO: 2206997 - RNA, 19 nt, Artificial Sequence
  Description of Artificial Sequence: Synthetic oligonucleotide
  Antisense strand to SEQ ID NO: 2206996
uuauuaguuaucaugcacu

SEQ ID NO: 2206998 - RNA, 19 nt, Artificial Sequence
  Description of Artificial Sequence: Synthetic oligonucleotide
  Sense strand starting at position 2975 of SEQ ID NO: 1883647
gcguuuguuauaguuagua

SEQ ID NO: 2206999 - RNA, 19 nt, Artificial Sequence
  Description of Artificial Sequence: Synthetic oligonucleotide
  Antisense strand to SEQ ID NO: 2206998
uacuaacuauaacaaacgc

SEQ ID NO: 2207000 - RNA, 19 nt, Artificial Sequence
  Description of Artificial Sequence: Synthetic oligonucleotide
  Sense strand starting at position 3672 of SEQ ID NO: 1883647
aguaauuuggcuugucauc

SEQ ID NO: 2207001 - RNA, 19 nt, Artificial Sequence
  Description of Artificial Sequence: Synthetic oligonucleotide
  Antisense strand to SEQ ID NO: 2207000
gaugacaagccaaauuacu

SEQ ID NO: 2207002 - RNA, 19 nt, Artificial Sequence
  Description of Artificial Sequence: Synthetic oligonucleotide
  Sense strand starting at position 3754 of SEQ ID NO: 1883647
gagugagugcaugauaacu

SEQ ID NO: 2207003 - RNA, 19 nt, Artificial Sequence
  Description of Artificial Sequence: Synthetic oligonucleotide
  Antisense strand to SEQ ID NO: 2207002
aguuaucaugcacucacuc

SEQ ID NO: 2207004 - RNA, 19 nt, Artificial Sequence
  Description of Artificial Sequence: Synthetic oligonucleotide
  Sense strand starting at position 3507 of SEQ ID NO: 1883647
cugguugaacucugaugag

SEQ ID NO: 2207005 - RNA, 19 nt, Artificial Sequence
  Description of Artificial Sequence: Synthetic oligonucleotide
  Antisense strand to SEQ ID NO: 2207004
cucaucagaguucaaccag

SEQ ID NO: 2207006 - RNA, 19 nt, Artificial Sequence
  Description of Artificial Sequence: Synthetic oligonucleotide
  Sense strand starting at position 3584 of SEQ ID NO: 1883647
cccauagacugcuuaugaa

SEQ ID NO: 2207007 - RNA, 19 nt, Artificial Sequence
  Description of Artificial Sequence: Synthetic oligonucleotide
  Antisense strand to SEQ ID NO: 2207006
uucauaagcagucuauggg

SEQ ID NO: 2207008 - RNA, 19 nt, Artificial Sequence
  Description of Artificial Sequence: Synthetic oligonucleotide
  Sense strand starting at position 3651 of SEQ ID NO: 1883647
gaaauuauugacggaguuu

SEQ ID NO: 2207009 - RNA, 19 nt, Artificial Sequence
  Description of Artificial Sequence: Synthetic oligonucleotide
  Antisense strand to SEQ ID NO: 2207008
aaacuccgucaauaauuuc

SEQ ID NO: 2207010 - RNA, 19 nt, Artificial Sequence
  Description of Artificial Sequence: Synthetic oligonucleotide
  Sense strand starting at position 1582 of SEQ ID NO: 1883647
agaugugacuuucuaacuc

SEQ ID NO: 2207011 - RNA, 19 nt, Artificial Sequence
  Description of Artificial Sequence: Synthetic oligonucleotide
  Antisense strand to SEQ ID NO: 2207010
gaguuagaaagucacaucu

SEQ ID NO: 2207012 - RNA, 19 nt, Artificial Sequence
  Description of Artificial Sequence: Synthetic oligonucleotide
  Sense strand starting at position 3555 of SEQ ID NO: 1883647
guuaucuguguccaggaaa

SEQ ID NO: 2207013 - RNA, 19 nt, Artificial Sequence
  Description of Artificial Sequence: Synthetic oligonucleotide
  Antisense strand to SEQ ID NO: 2207012
uuuccuggacacagauaac

SEQ ID NO: 2207014 - RNA, 19 nt, Artificial Sequence
  Description of Artificial Sequence: Synthetic oligonucleotide
  Sense strand starting at position 220 of SEQ ID NO: 1883647
augcuuagggaugguugaa

SEQ ID NO: 2207015 - RNA, 19 nt, Artificial Sequence
  Description of Artificial Sequence: Synthetic oligonucleotide
  Antisense strand to SEQ ID NO: 2207014
uucaaccaucccuaagcau

SEQ ID NO: 2207016 - RNA, 19 nt, Artificial Sequence
  Description of Artificial Sequence: Synthetic oligonucleotide
  Sense strand starting at position 3189 of SEQ ID NO: 1883647
uguugcaaucaauaugagu

SEQ ID NO: 2207017 - RNA, 19 nt, Artificial Sequence
  Description of Artificial Sequence: Synthetic oligonucleotide
  Antisense strand to SEQ ID NO: 2207016
acucauauugauugcaaca

SEQ ID NO: 2207018 - RNA, 19 nt, Artificial Sequence
  Description of Artificial Sequence: Synthetic oligonucleotide
  Sense strand starting at position 3522 of SEQ ID NO: 1883647
ugaguagacuuaucaugug

SEQ ID NO: 2207019 - RNA, 19 nt, Artificial Sequence
  Description of Artificial Sequence: Synthetic oligonucleotide
  Antisense strand to SEQ ID NO: 2207018
cacaugauaagucuacuca

SEQ ID NO: 2207020 - RNA, 19 nt, Artificial Sequence
  Description of Artificial Sequence: Synthetic oligonucleotide
  Sense strand starting at position 3010 of SEQ ID NO: 1883647
uccuguuuccuuuacugga

SEQ ID NO: 2207021 - RNA, 19 nt, Artificial Sequence
  Description of Artificial Sequence: Synthetic oligonucleotide
  Antisense strand to SEQ ID NO: 2207020
uccaguaaaggaaacagga

SEQ ID NO: 2207022 - RNA, 19 nt, Artificial Sequence
  Description of Artificial Sequence: Synthetic oligonucleotide
  Sense strand starting at position 1602 of SEQ ID NO: 1883647
acuuuaucauacgucagga

SEQ ID NO: 2207023 - RNA, 19 nt, Artificial Sequence
  Description of Artificial Sequence: Synthetic oligonucleotide
  Antisense strand to SEQ ID NO: 2207022
uccugacguaugauaaagu

SEQ ID NO: 2207024 - RNA, 19 nt, Artificial Sequence
  Description of Artificial Sequence: Synthetic oligonucleotide
  Sense strand starting at position 391 of SEQ ID NO: 1883647
ggacucaccuguccauuau

SEQ ID NO: 2207025 - RNA, 19 nt, Artificial Sequence
  Description of Artificial Sequence: Synthetic oligonucleotide
  Antisense strand to SEQ ID NO: 2207024
auaauggacaggugagucc

SEQ ID NO: 2207026 - RNA, 19 nt, Artificial Sequence
  Description of Artificial Sequence: Synthetic oligonucleotide
  Sense strand starting at position 2765 of SEQ ID NO: 1883647
cuuuauccauuguuggaau

SEQ ID NO: 2207027 - RNA, 19 nt, Artificial Sequence
  Description of Artificial Sequence: Synthetic oligonucleotide
  Antisense strand to SEQ ID NO: 2207026
auuccaacaauggauaaag

SEQ ID NO: 2207028 - RNA, 19 nt, Artificial Sequence
  Description of Artificial Sequence: Synthetic oligonucleotide
  Sense strand starting at position 1000 of SEQ ID NO: 1883647
gcucauuuguccuuuaugu

SEQ ID NO: 2207029 - RNA, 19 nt, Artificial Sequence
  Description of Artificial Sequence: Synthetic oligonucleotide
  Antisense strand to SEQ ID NO: 2207028
acauaaaggacaaaugagc

SEQ ID NO: 2207030 - RNA, 19 nt, Artificial Sequence
  Description of Artificial Sequence: Synthetic oligonucleotide
  Sense strand starting at position 3400 of SEQ ID NO: 1883647
cugccaaacgauggauauu

SEQ ID NO: 2207031 - RNA, 19 nt, Artificial Sequence
  Description of Artificial Sequence: Synthetic oligonucleotide
  Antisense strand to SEQ ID NO: 2207030
aauauccaucguuuggcag

SEQ ID NO: 2207032 - RNA, 19 nt, Artificial Sequence
  Description of Artificial Sequence: Synthetic oligonucleotide
  Sense strand starting at position 3448 of SEQ ID NO: 1883647
ugcaguccugauugagaau

SEQ ID NO: 2207033 - RNA, 19 nt, Artificial Sequence
  Description of Artificial Sequence: Synthetic oligonucleotide
  Antisense strand to SEQ ID NO: 2207032
auucucaaucaggacugca

SEQ ID NO: 2207034 - RNA, 19 nt, Artificial Sequence
  Description of Artificial Sequence: Synthetic oligonucleotide
  Sense strand starting at position 3463 of SEQ ID NO: 1883647
gaaugcugcaguuggaaga

SEQ ID NO: 2207035 - RNA, 19 nt, Artificial Sequence
  Description of Artificial Sequence: Synthetic oligonucleotide
  Antisense strand to SEQ ID NO: 2207034
ucuuccaacugcagcauuc

SEQ ID NO: 2207036 - RNA, 19 nt, Artificial Sequence
  Description of Artificial Sequence: Synthetic oligonucleotide
  Sense strand starting at position 2763 of SEQ ID NO: 1883647
cucuuuauccauuguugga

SEQ ID NO: 2207037 - RNA, 19 nt, Artificial Sequence
  Description of Artificial Sequence: Synthetic oligonucleotide
  Antisense strand to SEQ ID NO: 2207036
uccaacaauggauaaagag

SEQ ID NO: 2207038 - RNA, 19 nt, Artificial Sequence
  Description of Artificial Sequence: Synthetic oligonucleotide
  Sense strand starting at position 2815 of SEQ ID NO: 1883647
uaaagugaugccuagccuu

SEQ ID NO: 2207039 - RNA, 19 nt, Artificial Sequence
  Description of Artificial Sequence: Synthetic oligonucleotide
  Antisense strand to SEQ ID NO: 2207038
aaggcuaggcaucacuuua

SEQ ID NO: 2207040 - RNA, 19 nt, Artificial Sequence
  Description of Artificial Sequence: Synthetic oligonucleotide
  Sense strand starting at position 1547 of SEQ ID NO: 1883647
uuguacgacuuccuuuaaa

SEQ ID NO: 2207041 - RNA, 19 nt, Artificial Sequence
  Description of Artificial Sequence: Synthetic oligonucleotide
  Antisense strand to SEQ ID NO: 2207040
uuuaaaggaagucguacaa

SEQ ID NO: 2207042 - RNA, 19 nt, Artificial Sequence
  Description of Artificial Sequence: Synthetic oligonucleotide
  Sense strand starting at position 3527 of SEQ ID NO: 1883647
agacuuaucauguguggca

SEQ ID NO: 2207043 - RNA, 19 nt, Artificial Sequence
  Description of Artificial Sequence: Synthetic oligonucleotide
  Antisense strand to SEQ ID NO: 2207042
ugccacacaugauaagucu

SEQ ID NO: 2207044 - RNA, 19 nt, Artificial Sequence
  Description of Artificial Sequence: Synthetic oligonucleotide
  Sense strand starting at position 2395 of SEQ ID NO: 1883647
cucugugucucucuaauaa

SEQ ID NO: 2207045 - RNA, 19 nt, Artificial Sequence
  Description of Artificial Sequence: Synthetic oligonucleotide
  Antisense strand to SEQ ID NO: 2207044
uuauuagagagacacagag

SEQ ID NO: 2207046 - RNA, 19 nt, Artificial Sequence
  Description of Artificial Sequence: Synthetic oligonucleotide
  Sense strand starting at position 3547 of SEQ ID NO: 1883647
gaaguaagguuaucugugu

SEQ ID NO: 2207047 - RNA, 19 nt, Artificial Sequence
  Description of Artificial Sequence: Synthetic oligonucleotide
  Antisense strand to SEQ ID NO: 2207046
acacagauaaccuuacuuc

SEQ ID NO: 2207048 - RNA, 19 nt, Artificial Sequence
  Description of Artificial Sequence: Synthetic oligonucleotide
  Sense strand starting at position 3551 of SEQ ID NO: 1883647
uaagguuaucuguguccag

SEQ ID NO: 2207049 - RNA, 19 nt, Artificial Sequence
  Description of Artificial Sequence: Synthetic oligonucleotide
  Antisense strand to SEQ ID NO: 2207048
cuggacacagauaaccuua

SEQ ID NO: 2207050 - RNA, 19 nt, Artificial Sequence
  Description of Artificial Sequence: Synthetic oligonucleotide
  Sense strand starting at position 3672 of SEQ ID NO: 1883648
gauuaaacaguguggaaau

SEQ ID NO: 2207051 - RNA, 19 nt, Artificial Sequence
  Description of Artificial Sequence: Synthetic oligonucleotide
  Antisense strand to SEQ ID NO: 2207050
auuuccacacuguuuaauc

SEQ ID NO: 2207052 - RNA, 19 nt, Artificial Sequence
  Description of Artificial Sequence: Synthetic oligonucleotide
  Sense strand starting at position 2406 of SEQ ID NO: 1883648
gcccuugagauggaucuca

SEQ ID NO: 2207053 - RNA, 19 nt, Artificial Sequence
  Description of Artificial Sequence: Synthetic oligonucleotide
  Antisense strand to SEQ ID NO: 2207052
ugagauccaucucaagggc

SEQ ID NO: 2207054 - RNA, 19 nt, Artificial Sequence
  Description of Artificial Sequence: Synthetic oligonucleotide
  Sense strand starting at position 3383 of SEQ ID NO: 1883648
cgggcuguaguguucuuau

SEQ ID NO: 2207055 - RNA, 19 nt, Artificial Sequence
  Description of Artificial Sequence: Synthetic oligonucleotide
  Antisense strand to SEQ ID NO: 2207054
auaagaacacuacagcccg

SEQ ID NO: 2207056 - RNA, 19 nt, Artificial Sequence
  Description of Artificial Sequence: Synthetic oligonucleotide
  Sense strand starting at position 1105 of SEQ ID NO: 1883648
gacugauccuucccuggga

SEQ ID NO: 2207057 - RNA, 19 nt, Artificial Sequence
  Description of Artificial Sequence: Synthetic oligonucleotide
  Antisense strand to SEQ ID NO: 2207056
ucccagggaaggaucaguc

SEQ ID NO: 2207058 - RNA, 19 nt, Artificial Sequence
  Description of Artificial Sequence: Synthetic oligonucleotide
  Sense strand starting at position 3670 of SEQ ID NO: 1883648
cugauuaaacaguguggaa

SEQ ID NO: 2207059 - RNA, 19 nt, Artificial Sequence
  Description of Artificial Sequence: Synthetic oligonucleotide
  Antisense strand to SEQ ID NO: 2207058
uuccacacuguuuaaucag

SEQ ID NO: 2207060 - RNA, 19 nt, Artificial Sequence
  Description of Artificial Sequence: Synthetic oligonucleotide
  Sense strand starting at position 1107 of SEQ ID NO: 1883648
cugauccuucccugggaga

SEQ ID NO: 2207061 - RNA, 19 nt, Artificial Sequence
  Description of Artificial Sequence: Synthetic oligonucleotide
  Antisense strand to SEQ ID NO: 2207060
ucucccagggaaggaucag

SEQ ID NO: 2207062 - RNA, 19 nt, Artificial Sequence
  Description of Artificial Sequence: Synthetic oligonucleotide
  Sense strand starting at position 3774 of SEQ ID NO: 1883648
uugaaagauuuccaugauu

SEQ ID NO: 2207063 - RNA, 19 nt, Artificial Sequence
  Description of Artificial Sequence: Synthetic oligonucleotide
  Antisense strand to SEQ ID NO: 2207062
aaucauggaaaucuuucaa

SEQ ID NO: 2207064 - RNA, 19 nt, Artificial Sequence
  Description of Artificial Sequence: Synthetic oligonucleotide
  Sense strand starting at position 3753 of SEQ ID NO: 1883648
guguuuaaagcccggauuu

SEQ ID NO: 2207065 - RNA, 19 nt, Artificial Sequence
  Description of Artificial Sequence: Synthetic oligonucleotide
  Antisense strand to SEQ ID NO: 2207064
aaauccgggcuuuaaacac

SEQ ID NO: 2207066 - RNA, 19 nt, Artificial Sequence
  Description of Artificial Sequence: Synthetic oligonucleotide
  Sense strand starting at position 3882 of SEQ ID NO: 1883648
gaguuugggucucugaaag

SEQ ID NO: 2207067 - RNA, 19 nt, Artificial Sequence
  Description of Artificial Sequence: Synthetic oligonucleotide
  Antisense strand to SEQ ID NO: 2207066
cuuucagagacccaaacuc

SEQ ID NO: 2207068 - RNA, 19 nt, Artificial Sequence
  Description of Artificial Sequence: Synthetic oligonucleotide
  Sense strand starting at position 2464 of SEQ ID NO: 1883648
gccugauccggagagcaga

SEQ ID NO: 2207069 - RNA, 19 nt, Artificial Sequence
  Description of Artificial Sequence: Synthetic oligonucleotide
  Antisense strand to SEQ ID NO: 2207068
ucugcucuccggaucaggc

SEQ ID NO: 2207070 - RNA, 19 nt, Artificial Sequence
  Description of Artificial Sequence: Synthetic oligonucleotide
  Sense strand starting at position 3721 of SEQ ID NO: 1883648
aaauguuuaggacgacuuu

SEQ ID NO: 2207071 - RNA, 19 nt, Artificial Sequence
  Description of Artificial Sequence: Synthetic oligonucleotide
  Antisense strand to SEQ ID NO: 2207070
aaagucguccuaaacauuu

SEQ ID NO: 2207072 - RNA, 19 nt, Artificial Sequence
  Description of Artificial Sequence: Synthetic oligonucleotide
  Sense strand starting at position 3386 of SEQ ID NO: 1883648
gcuguaguguucuuauuua

SEQ ID NO: 2207073 - RNA, 19 nt, Artificial Sequence
  Description of Artificial Sequence: Synthetic oligonucleotide
  Antisense strand to SEQ ID NO: 2207072
uaaauaagaacacuacagc

SEQ ID NO: 2207074 - RNA, 19 nt, Artificial Sequence
  Description of Artificial Sequence: Synthetic oligonucleotide
  Sense strand starting at position 3275 of SEQ ID NO: 1883648
gugugagaacugggagcua

SEQ ID NO: 2207075 - RNA, 19 nt, Artificial Sequence
  Description of Artificial Sequence: Synthetic oligonucleotide
  Antisense strand to SEQ ID NO: 2207074
uagcucccaguucucacac

SEQ ID NO: 2207076 - RNA, 19 nt, Artificial Sequence
  Description of Artificial Sequence: Synthetic oligonucleotide
  Sense strand starting at position 3745 of SEQ ID NO: 1883648
uauugaaaguguuuaaagc

SEQ ID NO: 2207077 - RNA, 19 nt, Artificial Sequence
  Description of Artificial Sequence: Synthetic oligonucleotide
  Antisense strand to SEQ ID NO: 2207076
gcuuuaaacacuuucaaua

SEQ ID NO: 2207078 - RNA, 19 nt, Artificial Sequence
  Description of Artificial Sequence: Synthetic oligonucleotide
  Sense strand starting at position 807 of SEQ ID NO: 1883648
uugugaucuggucgggaca

SEQ ID NO: 2207079 - RNA, 19 nt, Artificial Sequence
  Description of Artificial Sequence: Synthetic oligonucleotide
  Antisense strand to SEQ ID NO: 2207078
ugucccgaccagaucacaa

SEQ ID NO: 2207080 - RNA, 19 nt, Artificial Sequence
  Description of Artificial Sequence: Synthetic oligonucleotide
  Sense strand starting at position 886 of SEQ ID NO: 1883648
ugaagaugcacguguauaa

SEQ ID NO: 2207081 - RNA, 19 nt, Artificial Sequence
  Description of Artificial Sequence: Synthetic oligonucleotide
  Antisense strand to SEQ ID NO: 2207080
uuauacacgugcaucuuca

SEQ ID NO: 2207082 - RNA, 19 nt, Artificial Sequence
  Description of Artificial Sequence: Synthetic oligonucleotide
  Sense strand starting at position 532 of SEQ ID NO: 1883648
agcuguguuccuggaacaa

SEQ ID NO: 2207083 - RNA, 19 nt, Artificial Sequence
  Description of Artificial Sequence: Synthetic oligonucleotide
  Antisense strand to SEQ ID NO: 2207082
uuguuccaggaacacagcu

SEQ ID NO: 2207084 - RNA, 19 nt, Artificial Sequence
  Description of Artificial Sequence: Synthetic oligonucleotide
  Sense strand starting at position 1120 of SEQ ID NO: 1883648
gggagaggccuuuguagcu

SEQ ID NO: 2207085 - RNA, 19 nt, Artificial Sequence
  Description of Artificial Sequence: Synthetic oligonucleotide
  Antisense strand to SEQ ID NO: 2207084
agcuacaaaggccucuccc

SEQ ID NO: 2207086 - RNA, 19 nt, Artificial Sequence
  Description of Artificial Sequence: Synthetic oligonucleotide
  Sense strand starting at position 3660 of SEQ ID NO: 1883648
cguguacgcacugauuaaa

SEQ ID NO: 2207087 - RNA, 19 nt, Artificial Sequence
  Description of Artificial Sequence: Synthetic oligonucleotide
  Antisense strand to SEQ ID NO: 2207086
uuuaaucagugcguacacg

SEQ ID NO: 2207088 - RNA, 19 nt, Artificial Sequence
  Description of Artificial Sequence: Synthetic oligonucleotide
  Sense strand starting at position 3447 of SEQ ID NO: 1883648
ccucacuuguaugugcaaa

SEQ ID NO: 2207089 - RNA, 19 nt, Artificial Sequence
  Description of Artificial Sequence: Synthetic oligonucleotide
  Antisense strand to SEQ ID NO: 2207088
uuugcacauacaagugagg

SEQ ID NO: 2207090 - RNA, 19 nt, Artificial Sequence
  Description of Artificial Sequence: Synthetic oligonucleotide
  Sense strand starting at position 884 of SEQ ID NO: 1883648
ucugaagaugcacguguau

SEQ ID NO: 2207091 - RNA, 19 nt, Artificial Sequence
  Description of Artificial Sequence: Synthetic oligonucleotide
  Antisense strand to SEQ ID NO: 2207090
auacacgugcaucuucaga

SEQ ID NO: 2207092 - RNA, 19 nt, Artificial Sequence
  Description of Artificial Sequence: Synthetic oligonucleotide
  Sense strand starting at position 792 of SEQ ID NO: 1883648
agguuugucacagguuugu

SEQ ID NO: 2207093 - RNA, 19 nt, Artificial Sequence
  Description of Artificial Sequence: Synthetic oligonucleotide
  Antisense strand to SEQ ID NO: 2207092
acaaaccugugacaaaccu

SEQ ID NO: 2207094 - RNA, 19 nt, Artificial Sequence
  Description of Artificial Sequence: Synthetic oligonucleotide
  Sense strand starting at position 338 of SEQ ID NO: 1883648
gugugaggcgcaugaauga

SEQ ID NO: 2207095 - RNA, 19 nt, Artificial Sequence
  Description of Artificial Sequence: Synthetic oligonucleotide
  Antisense strand to SEQ ID NO: 2207094
ucauucaugcgccucacac

SEQ ID NO: 2207096 - RNA, 19 nt, Artificial Sequence
  Description of Artificial Sequence: Synthetic oligonucleotide
  Sense strand starting at position 3265 of SEQ ID NO: 1883648
cgguugguuugugugagaa

SEQ ID NO: 2207097 - RNA, 19 nt, Artificial Sequence
  Description of Artificial Sequence: Synthetic oligonucleotide
  Antisense strand to SEQ ID NO: 2207096
uucucacacaaaccaaccg

SEQ ID NO: 2207098 - RNA, 19 nt, Artificial Sequence
  Description of Artificial Sequence: Synthetic oligonucleotide
  Sense strand starting at position 336 of SEQ ID NO: 1883648
gugugugaggcgcaugaau

SEQ ID NO: 2207099 - RNA, 19 nt, Artificial Sequence
  Description of Artificial Sequence: Synthetic oligonucleotide
  Antisense strand to SEQ ID NO: 2207098
auucaugcgccucacacac

SEQ ID NO: 2207100 - RNA, 19 nt, Artificial Sequence
  Description of Artificial Sequence: Synthetic oligonucleotide
  Sense strand starting at position 2411 of SEQ ID NO: 1883648
ugagauggaucucauguca

SEQ ID NO: 2207101 - RNA, 19 nt, Artificial Sequence
  Description of Artificial Sequence: Synthetic oligonucleotide
  Antisense strand to SEQ ID NO: 2207100
ugacaugagauccaucuca

SEQ ID NO: 2207102 - RNA, 19 nt, Artificial Sequence
  Description of Artificial Sequence: Synthetic oligonucleotide
  Sense strand starting at position 3446 of SEQ ID NO: 1883648
gccucacuuguaugugcaa

SEQ ID NO: 2207103 - RNA, 19 nt, Artificial Sequence
  Description of Artificial Sequence: Synthetic oligonucleotide
  Antisense strand to SEQ ID NO: 2207102
uugcacauacaagugaggc

SEQ ID NO: 2207104 - RNA, 19 nt, Artificial Sequence
  Description of Artificial Sequence: Synthetic oligonucleotide
  Sense strand starting at position 3673 of SEQ ID NO: 1883648
auuaaacaguguggaaaua

SEQ ID NO: 2207105 - RNA, 19 nt, Artificial Sequence
  Description of Artificial Sequence: Synthetic oligonucleotide
  Antisense strand to SEQ ID NO: 2207104
uauuuccacacuguuuaau

SEQ ID NO: 2207106 - RNA, 19 nt, Artificial Sequence
  Description of Artificial Sequence: Synthetic oligonucleotide
  Sense strand starting at position 3659 of SEQ ID NO: 1883648
gcguguacgcacugauuaa

SEQ ID NO: 2207107 - RNA, 19 nt, Artificial Sequence
  Description of Artificial Sequence: Synthetic oligonucleotide
  Antisense strand to SEQ ID NO: 2207106
uuaaucagugcguacacgc

SEQ ID NO: 2207108 - RNA, 19 nt, Artificial Sequence
  Description of Artificial Sequence: Synthetic oligonucleotide
  Sense strand starting at position 3504 of SEQ ID NO: 1883648
gugggagguucccauccua

SEQ ID NO: 2207109 - RNA, 19 nt, Artificial Sequence
  Description of Artificial Sequence: Synthetic oligonucleotide
  Antisense strand to SEQ ID NO: 2207108
uaggaugggaaccucccac

SEQ ID NO: 2207110 - RNA, 19 nt, Artificial Sequence
  Description of Artificial Sequence: Synthetic oligonucleotide
  Sense strand starting at position 3719 of SEQ ID NO: 1883648
gcaaauguuuaggacgacu

SEQ ID NO: 2207111 - RNA, 19 nt, Artificial Sequence
  Description of Artificial Sequence: Synthetic oligonucleotide
  Antisense strand to SEQ ID NO: 2207110
agucguccuaaacauuugc

SEQ ID NO: 2207112 - RNA, 19 nt, Artificial Sequence
  Description of Artificial Sequence: Synthetic oligonucleotide
  Sense strand starting at position 3868 of SEQ ID NO: 1883648
guggaaccuuggcagaguu

SEQ ID NO: 2207113 - RNA, 19 nt, Artificial Sequence
  Description of Artificial Sequence: Synthetic oligonucleotide
  Antisense strand to SEQ ID NO: 2207112
aacucugccaagguuccac

SEQ ID NO: 2207114 - RNA, 19 nt, Artificial Sequence
  Description of Artificial Sequence: Synthetic oligonucleotide
  Sense strand starting at position 790 of SEQ ID NO: 1883648
ccagguuugucacagguuu

SEQ ID NO: 2207115 - RNA, 19 nt, Artificial Sequence
  Description of Artificial Sequence: Synthetic oligonucleotide
  Antisense strand to SEQ ID NO: 2207114
aaaccugugacaaaccugg

SEQ ID NO: 2207116 - RNA, 19 nt, Artificial Sequence
  Description of Artificial Sequence: Synthetic oligonucleotide
  Sense strand starting at position 1323 of SEQ ID NO: 1883648
caaggcgccuuguaagaau

SEQ ID NO: 2207117 - RNA, 19 nt, Artificial Sequence
  Description of Artificial Sequence: Synthetic oligonucleotide
  Antisense strand to SEQ ID NO: 2207116
auucuuacaaggcgccuug

SEQ ID NO: 2207118 - RNA, 19 nt, Artificial Sequence
  Description of Artificial Sequence: Synthetic oligonucleotide
  Sense strand starting at position 3267 of SEQ ID NO: 1883648
guugguuugugugagaacu

SEQ ID NO: 2207119 - RNA, 19 nt, Artificial Sequence
  Description of Artificial Sequence: Synthetic oligonucleotide
  Antisense strand to SEQ ID NO: 2207118
aguucucacacaaaccaac

SEQ ID NO: 2207120 - RNA, 19 nt, Artificial Sequence
  Description of Artificial Sequence: Synthetic oligonucleotide
  Sense strand starting at position 3002 of SEQ ID NO: 1883648
cagcccuguuccuggauga

SEQ ID NO: 2207121 - RNA, 19 nt, Artificial Sequence
  Description of Artificial Sequence: Synthetic oligonucleotide
  Antisense strand to SEQ ID NO: 2207120
ucauccaggaacagggcug

SEQ ID NO: 2207122 - RNA, 19 nt, Artificial Sequence
  Description of Artificial Sequence: Synthetic oligonucleotide
  Sense strand starting at position 3224 of SEQ ID NO: 1883648
aacugugggucuuggcaau

SEQ ID NO: 2207123 - RNA, 19 nt, Artificial Sequence
  Description of Artificial Sequence: Synthetic oligonucleotide
  Antisense strand to SEQ ID NO: 2207122
auugccaagacccacaguu

SEQ ID NO: 2207124 - RNA, 19 nt, Artificial Sequence
  Description of Artificial Sequence: Synthetic oligonucleotide
  Sense strand starting at position 576 of SEQ ID NO: 1883648
ccgagcugcuuaggacaua

SEQ ID NO: 2207125 - RNA, 19 nt, Artificial Sequence
  Description of Artificial Sequence: Synthetic oligonucleotide
  Antisense strand to SEQ ID NO: 2207124
uauguccuaagcagcucgg

SEQ ID NO: 2207126 - RNA, 19 nt, Artificial Sequence
  Description of Artificial Sequence: Synthetic oligonucleotide
  Sense strand starting at position 1167 of SEQ ID NO: 1883648
agccauuagugaggacguu

SEQ ID NO: 2207127 - RNA, 19 nt, Artificial Sequence
  Description of Artificial Sequence: Synthetic oligonucleotide
  Antisense strand to SEQ ID NO: 2207126
aacguccucacuaauggcu

SEQ ID NO: 2207128 - RNA, 19 nt, Artificial Sequence
  Description of Artificial Sequence: Synthetic oligonucleotide
  Sense strand starting at position 3264 of SEQ ID NO: 1883648
ucgguugguuugugugaga

SEQ ID NO: 2207129 - RNA, 19 nt, Artificial Sequence
  Description of Artificial Sequence: Synthetic oligonucleotide
  Antisense strand to SEQ ID NO: 2207128
ucucacacaaaccaaccga

SEQ ID NO: 2207130 - RNA, 19 nt, Artificial Sequence
  Description of Artificial Sequence: Synthetic oligonucleotide
  Sense strand starting at position 498 of SEQ ID NO: 1883649
ugaucaaugucauuaaagg

SEQ ID NO: 2207131 - RNA, 19 nt, Artificial Sequence
  Description of Artificial Sequence: Synthetic oligonucleotide
  Antisense strand to SEQ ID NO: 2207130
ccuuuaaugacauugauca

SEQ ID NO: 2207132 - RNA, 19 nt, Artificial Sequence
  Description of Artificial Sequence: Synthetic oligonucleotide
  Sense strand starting at position 2961 of SEQ ID NO: 1883649
auuccuaggcacuagaauu

SEQ ID NO: 2207133 - RNA, 19 nt, Artificial Sequence
  Description of Artificial Sequence: Synthetic oligonucleotide
  Antisense strand to SEQ ID NO: 2207132
aauucuagugccuaggaau

SEQ ID NO: 2207134 - RNA, 19 nt, Artificial Sequence
  Description of Artificial Sequence: Synthetic oligonucleotide
  Sense strand starting at position 2545 of SEQ ID NO: 1883649
cucugaucccuggaaccuu

SEQ ID NO: 2207135 - RNA, 19 nt, Artificial Sequence
  Description of Artificial Sequence: Synthetic oligonucleotide
  Antisense strand to SEQ ID NO: 2207134
aagguuccagggaucagag

SEQ ID NO: 2207136 - RNA, 19 nt, Artificial Sequence
  Description of Artificial Sequence: Synthetic oligonucleotide
  Sense strand starting at position 714 of SEQ ID NO: 1883649
gggaaaguccauggaguga

SEQ ID NO: 2207137 - RNA, 19 nt, Artificial Sequence
  Description of Artificial Sequence: Synthetic oligonucleotide
  Antisense strand to SEQ ID NO: 2207136
ucacuccauggacuuuccc

SEQ ID NO: 2207138 - RNA, 19 nt, Artificial Sequence
  Description of Artificial Sequence: Synthetic oligonucleotide
  Sense strand starting at position 504 of SEQ ID NO: 1883649
augucauuaaagggaaagu

SEQ ID NO: 2207139 - RNA, 19 nt, Artificial Sequence
  Description of Artificial Sequence: Synthetic oligonucleotide
  Antisense strand to SEQ ID NO: 2207138
acuuucccuuuaaugacau

SEQ ID NO: 2207140 - RNA, 19 nt, Artificial Sequence
  Description of Artificial Sequence: Synthetic oligonucleotide
  Sense strand starting at position 2780 of SEQ ID NO: 1883649
acaguagguagaugacaua

SEQ ID NO: 2207141 - RNA, 19 nt, Artificial Sequence
  Description of Artificial Sequence: Synthetic oligonucleotide
  Antisense strand to SEQ ID NO: 2207140
uaugucaucuaccuacugu

SEQ ID NO: 2207142 - RNA, 19 nt, Artificial Sequence
  Description of Artificial Sequence: Synthetic oligonucleotide
  Sense strand starting at position 1084 of SEQ ID NO: 1883649
uggugauugaugggauaug

SEQ ID NO: 2207143 - RNA, 19 nt, Artificial Sequence
  Description of Artificial Sequence: Synthetic oligonucleotide
  Antisense strand to SEQ ID NO: 2207142
cauaucccaucaaucacca

SEQ ID NO: 2207144 - RNA, 19 nt, Artificial Sequence
  Description of Artificial Sequence: Synthetic oligonucleotide
  Sense strand starting at position 1435 of SEQ ID NO: 1883649
gagggauggcaccaugguu

SEQ ID NO: 2207145 - RNA, 19 nt, Artificial Sequence
  Description of Artificial Sequence: Synthetic oligonucleotide
  Antisense strand to SEQ ID NO: 2207144
aaccauggugccaucccuc

SEQ ID NO: 2207146 - RNA, 19 nt, Artificial Sequence
  Description of Artificial Sequence: Synthetic oligonucleotide
  Sense strand starting at position 3633 of SEQ ID NO: 1883649
auagaaauguuuccuaaug

SEQ ID NO: 2207147 - RNA, 19 nt, Artificial Sequence
  Description of Artificial Sequence: Synthetic oligonucleotide
  Antisense strand to SEQ ID NO: 2207146
cauuaggaaacauuucuau

SEQ ID NO: 2207148 - RNA, 19 nt, Artificial Sequence
  Description of Artificial Sequence: Synthetic oligonucleotide
  Sense strand starting at position 3416 of SEQ ID NO: 1883649
aauaguugugagggauaua

SEQ ID NO: 2207149 - RNA, 19 nt, Artificial Sequence
  Description of Artificial Sequence: Synthetic oligonucleotide
  Antisense strand to SEQ ID NO: 2207148
uauaucccucacaacuauu

SEQ ID NO: 2207150 - RNA, 19 nt, Artificial Sequence
  Description of Artificial Sequence: Synthetic oligonucleotide
  Sense strand starting at position 969 of SEQ ID NO: 1883649
ggcugcuguagucauuuaa

SEQ ID NO: 2207151 - RNA, 19 nt, Artificial Sequence
  Description of Artificial Sequence: Synthetic oligonucleotide
  Antisense strand to SEQ ID NO: 2207150
uuaaaugacuacagcagcc

SEQ ID NO: 2207152 - RNA, 19 nt, Artificial Sequence
  Description of Artificial Sequence: Synthetic oligonucleotide
  Sense strand starting at position 1848 of SEQ ID NO: 1883649
cuaaccucggauuaucauu

SEQ ID NO: 2207153 - RNA, 19 nt, Artificial Sequence
  Description of Artificial Sequence: Synthetic oligonucleotide
  Antisense strand to SEQ ID NO: 2207152
aaugauaauccgagguuag

SEQ ID NO: 2207154 - RNA, 19 nt, Artificial Sequence
  Description of Artificial Sequence: Synthetic oligonucleotide
  Sense strand starting at position 566 of SEQ ID NO: 1883649
aggcuugcuagagaggauu

SEQ ID NO: 2207155 - RNA, 19 nt, Artificial Sequence
  Description of Artificial Sequence: Synthetic oligonucleotide
  Antisense strand to SEQ ID NO: 2207154
aauccucucuagcaagccu

SEQ ID NO: 2207156 - RNA, 19 nt, Artificial Sequence
  Description of Artificial Sequence: Synthetic oligonucleotide
  Sense strand starting at position 442 of SEQ ID NO: 1883649
gggcucauagcuuagaaca

SEQ ID NO: 2207157 - RNA, 19 nt, Artificial Sequence
  Description of Artificial Sequence: Synthetic oligonucleotide
  Antisense strand to SEQ ID NO: 2207156
uguucuaagcuaugagccc

SEQ ID NO: 2207158 - RNA, 19 nt, Artificial Sequence
  Description of Artificial Sequence: Synthetic oligonucleotide
  Sense strand starting at position 561 of SEQ ID NO: 1883649
aaggaaggcuugcuagaga

SEQ ID NO: 2207159 - RNA, 19 nt, Artificial Sequence
  Description of Artificial Sequence: Synthetic oligonucleotide
  Antisense strand to SEQ ID NO: 2207158
ucucuagcaagccuuccuu

SEQ ID NO: 2207160 - RNA, 19 nt, Artificial Sequence
  Description of Artificial Sequence: Synthetic oligonucleotide
  Sense strand starting at position 3904 of SEQ ID NO: 1883649
cucugaaugaggugaacuu

SEQ ID NO: 2207161 - RNA, 19 nt, Artificial Sequence
  Description of Artificial Sequence: Synthetic oligonucleotide
  Antisense strand to SEQ ID NO: 2207160
aaguucaccucauucagag

SEQ ID NO: 2207162 - RNA, 19 nt, Artificial Sequence
  Description of Artificial Sequence: Synthetic oligonucleotide
  Sense strand starting at position 657 of SEQ ID NO: 1883649
ggcagagaugucuauccau

SEQ ID NO: 2207163 - RNA, 19 nt, Artificial Sequence
  Description of Artificial Sequence: Synthetic oligonucleotide
  Antisense strand to SEQ ID NO: 2207162
auggauagacaucucugcc

SEQ ID NO: 2207164 - RNA, 19 nt, Artificial Sequence
  Description of Artificial Sequence: Synthetic oligonucleotide
  Sense strand starting at position 3941 of SEQ ID NO: 1883649
augucugcugaggaauauu

SEQ ID NO: 2207165 - RNA, 19 nt, Artificial Sequence
  Description of Artificial Sequence: Synthetic oligonucleotide
  Antisense strand to SEQ ID NO: 2207164
aauauuccucagcagacau

SEQ ID NO: 2207166 - RNA, 19 nt, Artificial Sequence
  Description of Artificial Sequence: Synthetic oligonucleotide
  Sense strand starting at position 3554 of SEQ ID NO: 1883649
guagaaucuucccuaacag

SEQ ID NO: 2207167 - RNA, 19 nt, Artificial Sequence
  Description of Artificial Sequence: Synthetic oligonucleotide
  Antisense strand to SEQ ID NO: 2207166
cuguuagggaagauucuac

SEQ ID NO: 2207168 - RNA, 19 nt, Artificial Sequence
  Description of Artificial Sequence: Synthetic oligonucleotide
  Sense strand starting at position 3105 of SEQ ID NO: 1883649
ggcuauaagaccuggauug

SEQ ID NO: 2207169 - RNA, 19 nt, Artificial Sequence
  Description of Artificial Sequence: Synthetic oligonucleotide
  Antisense strand to SEQ ID NO: 2207168
caauccaggucuuauagcc

SEQ ID NO: 2207170 - RNA, 19 nt, Artificial Sequence
  Description of Artificial Sequence: Synthetic oligonucleotide
  Sense strand starting at position 3894 of SEQ ID NO: 1883649
agaaaugcuucucugaaug

SEQ ID NO: 2207171 - RNA, 19 nt, Artificial Sequence
  Description of Artificial Sequence: Synthetic oligonucleotide
  Antisense strand to SEQ ID NO: 2207170
cauucagagaagcauuucu

SEQ ID NO: 2207172 - RNA, 19 nt, Artificial Sequence
  Description of Artificial Sequence: Synthetic oligonucleotide
  Sense strand starting at position 2937 of SEQ ID NO: 1883649
uuguguuuccuagauaagg

SEQ ID NO: 2207173 - RNA, 19 nt, Artificial Sequence
  Description of Artificial Sequence: Synthetic oligonucleotide
  Antisense strand to SEQ ID NO: 2207172
ccuuaucuaggaaacacaa

SEQ ID NO: 2207174 - RNA, 19 nt, Artificial Sequence
  Description of Artificial Sequence: Synthetic oligonucleotide
  Sense strand starting at position 1259 of SEQ ID NO: 1883649
gugccugugcucuccuuau

SEQ ID NO: 2207175 - RNA, 19 nt, Artificial Sequence
  Description of Artificial Sequence: Synthetic oligonucleotide
  Antisense strand to SEQ ID NO: 2207174
auaaggagagcacaggcac

SEQ ID NO: 2207176 - RNA, 19 nt, Artificial Sequence
  Description of Artificial Sequence: Synthetic oligonucleotide
  Sense strand starting at position 3173 of SEQ ID NO: 1883649
aaacuugacguguaacauu

SEQ ID NO: 2207177 - RNA, 19 nt, Artificial Sequence
  Description of Artificial Sequence: Synthetic oligonucleotide
  Antisense strand to SEQ ID NO: 2207176
aauguuacacgucaaguuu

SEQ ID NO: 2207178 - RNA, 19 nt, Artificial Sequence
  Description of Artificial Sequence: Synthetic oligonucleotide
  Sense strand starting at position 3324 of SEQ ID NO: 1883649
guccuuaguaguucgcuuu

SEQ ID NO: 2207179 - RNA, 19 nt, Artificial Sequence
  Description of Artificial Sequence: Synthetic oligonucleotide
  Antisense strand to SEQ ID NO: 2207178
aaagcgaacuacuaaggac

SEQ ID NO: 2207180 - RNA, 19 nt, Artificial Sequence
  Description of Artificial Sequence: Synthetic oligonucleotide
  Sense strand starting at position 1633 of SEQ ID NO: 1883649
ugaguaggcaccugauaaa

SEQ ID NO: 2207181 - RNA, 19 nt, Artificial Sequence
  Description of Artificial Sequence: Synthetic oligonucleotide
  Antisense strand to SEQ ID NO: 2207180
uuuaucaggugccuacuca

SEQ ID NO: 2207182 - RNA, 19 nt, Artificial Sequence
  Description of Artificial Sequence: Synthetic oligonucleotide
  Sense strand starting at position 1853 of SEQ ID NO: 1883649
cucggauuaucauucuaaa

SEQ ID NO: 2207183 - RNA, 19 nt, Artificial Sequence
  Description of Artificial Sequence: Synthetic oligonucleotide
  Antisense strand to SEQ ID NO: 2207182
uuuagaaugauaauccgag

SEQ ID NO: 2207184 - RNA, 19 nt, Artificial Sequence
  Description of Artificial Sequence: Synthetic oligonucleotide
  Sense strand starting at position 1749 of SEQ ID NO: 1883649
cccugcuuucuuuaaggga

SEQ ID NO: 2207185 - RNA, 19 nt, Artificial Sequence
  Description of Artificial Sequence: Synthetic oligonucleotide
  Antisense strand to SEQ ID NO: 2207184
ucccuuaaagaaagcaggg

SEQ ID NO: 2207186 - RNA, 19 nt, Artificial Sequence
  Description of Artificial Sequence: Synthetic oligonucleotide
  Sense strand starting at position 2709 of SEQ ID NO: 1883649
cagaguaaguguuuaggaa

SEQ ID NO: 2207187 - RNA, 19 nt, Artificial Sequence
  Description of Artificial Sequence: Synthetic oligonucleotide
  Antisense strand to SEQ ID NO: 2207186
uuccuaaacacuuacucug

SEQ ID NO: 2207188 - RNA, 19 nt, Artificial Sequence
  Description of Artificial Sequence: Synthetic oligonucleotide
  Sense strand starting at position 1616 of SEQ ID NO: 1883649
gcagaauuauauguacaug

SEQ ID NO: 2207189 - RNA, 19 nt, Artificial Sequence
  Description of Artificial Sequence: Synthetic oligonucleotide
  Antisense strand to SEQ ID NO: 2207188
cauguacauauaauucugc

SEQ ID NO: 2207190 - RNA, 19 nt, Artificial Sequence
  Description of Artificial Sequence: Synthetic oligonucleotide
  Sense strand starting at position 1482 of SEQ ID NO: 1883649
uguaaauaggcucauucuu

SEQ ID NO: 2207191 - RNA, 19 nt, Artificial Sequence
  Description of Artificial Sequence: Synthetic oligonucleotide
  Antisense strand to SEQ ID NO: 2207190
aagaaugagccuauuuaca

SEQ ID NO: 2207192 - RNA, 19 nt, Artificial Sequence
  Description of Artificial Sequence: Synthetic oligonucleotide
  Sense strand starting at position 1186 of SEQ ID NO: 1883649
guaguuccagcuuaggaau

SEQ ID NO: 2207193 - RNA, 19 nt, Artificial Sequence
  Description of Artificial Sequence: Synthetic oligonucleotide
  Antisense strand to SEQ ID NO: 2207192
auuccuaagcuggaacuac

SEQ ID NO: 2207194 - RNA, 19 nt, Artificial Sequence
  Description of Artificial Sequence: Synthetic oligonucleotide
  Sense strand starting at position 2939 of SEQ ID NO: 1883649
guguuuccuagauaaggca

SEQ ID NO: 2207195 - RNA, 19 nt, Artificial Sequence
  Description of Artificial Sequence: Synthetic oligonucleotide
  Antisense strand to SEQ ID NO: 2207194
ugccuuaucuaggaaacac

SEQ ID NO: 2207196 - RNA, 19 nt, Artificial Sequence
  Description of Artificial Sequence: Synthetic oligonucleotide
  Sense strand starting at position 3080 of SEQ ID NO: 1883649
caggguagcauaggucaaa

SEQ ID NO: 2207197 - RNA, 19 nt, Artificial Sequence
  Description of Artificial Sequence: Synthetic oligonucleotide
  Antisense strand to SEQ ID NO: 2207196
uuugaccuaugcuacccug

SEQ ID NO: 2207198 - RNA, 19 nt, Artificial Sequence
  Description of Artificial Sequence: Synthetic oligonucleotide
  Sense strand starting at position 111 of SEQ ID NO: 1883649
gccaaugagcuggauaugu

SEQ ID NO: 2207199 - RNA, 19 nt, Artificial Sequence
  Description of Artificial Sequence: Synthetic oligonucleotide
  Antisense strand to SEQ ID NO: 2207198
acauauccagcucauuggc

SEQ ID NO: 2207200 - RNA, 19 nt, Artificial Sequence
  Description of Artificial Sequence: Synthetic oligonucleotide
  Sense strand starting at position 906 of SEQ ID NO: 1883649
ucaucuuggcuauaauugu

SEQ ID NO: 2207201 - RNA, 19 nt, Artificial Sequence
  Description of Artificial Sequence: Synthetic oligonucleotide
  Antisense strand to SEQ ID NO: 2207200
acaauuauagccaagauga

SEQ ID NO: 2207202 - RNA, 19 nt, Artificial Sequence
  Description of Artificial Sequence: Synthetic oligonucleotide
  Sense strand starting at position 10 of SEQ ID NO: 1883649
uugugaagugcagauguga

SEQ ID NO: 2207203 - RNA, 19 nt, Artificial Sequence
  Description of Artificial Sequence: Synthetic oligonucleotide
  Antisense strand to SEQ ID NO: 2207202
ucacaucugcacuucacaa

SEQ ID NO: 2207204 - RNA, 19 nt, Artificial Sequence
  Description of Artificial Sequence: Synthetic oligonucleotide
  Sense strand starting at position 484 of SEQ ID NO: 1883649
augguaacccauugugauc

SEQ ID NO: 2207205 - RNA, 19 nt, Artificial Sequence
  Description of Artificial Sequence: Synthetic oligonucleotide
  Antisense strand to SEQ ID NO: 2207204
gaucacaauggguuaccau

SEQ ID NO: 2207206 - RNA, 19 nt, Artificial Sequence
  Description of Artificial Sequence: Synthetic oligonucleotide
  Sense strand starting at position 2848 of SEQ ID NO: 1883649
ucagcaaucugcucagaaa

SEQ ID NO: 2207207 - RNA, 19 nt, Artificial Sequence
  Description of Artificial Sequence: Synthetic oligonucleotide
  Antisense strand to SEQ ID NO: 2207206
uuucugagcagauugcuga

SEQ ID NO: 2207208 - RNA, 19 nt, Artificial Sequence
  Description of Artificial Sequence: Synthetic oligonucleotide
  Sense strand starting at position 1159 of SEQ ID NO: 1883649
gggagaagugacuguuguu

SEQ ID NO: 2207209 - RNA, 19 nt, Artificial Sequence
  Description of Artificial Sequence: Synthetic oligonucleotide
  Antisense strand to SEQ ID NO: 2207208
aacaacagucacuucuccc

SEQ ID NO: 2207210 - RNA, 19 nt, Artificial Sequence
  Description of Artificial Sequence: Synthetic oligonucleotide
  Sense strand starting at position 336 of SEQ ID NO: 1883650
aaugaaaugcacggaauaa

SEQ ID NO: 2207211 - RNA, 19 nt, Artificial Sequence
  Description of Artificial Sequence: Synthetic oligonucleotide
  Antisense strand to SEQ ID NO: 2207210
uuauuccgugcauuucauu

SEQ ID NO: 2207212 - RNA, 19 nt, Artificial Sequence
  Description of Artificial Sequence: Synthetic oligonucleotide
  Sense strand starting at position 3180 of SEQ ID NO: 1883650
gaaguugagagugauccuu

SEQ ID NO: 2207213 - RNA, 19 nt, Artificial Sequence
  Description of Artificial Sequence: Synthetic oligonucleotide
  Antisense strand to SEQ ID NO: 2207212
aaggaucacucucaacuuc

SEQ ID NO: 2207214 - RNA, 19 nt, Artificial Sequence
  Description of Artificial Sequence: Synthetic oligonucleotide
  Sense strand starting at position 3478 of SEQ ID NO: 1883650
uagagaucagagugguaga

SEQ ID NO: 2207215 - RNA, 19 nt, Artificial Sequence
  Description of Artificial Sequence: Synthetic oligonucleotide
  Antisense strand to SEQ ID NO: 2207214
ucuaccacucugaucucua

SEQ ID NO: 2207216 - RNA, 19 nt, Artificial Sequence
  Description of Artificial Sequence: Synthetic oligonucleotide
  Sense strand starting at position 3928 of SEQ ID NO: 1883650
cacauagaugcugaaguua

SEQ ID NO: 2207217 - RNA, 19 nt, Artificial Sequence
  Description of Artificial Sequence: Synthetic oligonucleotide
  Antisense strand to SEQ ID NO: 2207216
uaacuucagcaucuaugug

SEQ ID NO: 2207218 - RNA, 19 nt, Artificial Sequence
  Description of Artificial Sequence: Synthetic oligonucleotide
  Sense strand starting at position 2632 of SEQ ID NO: 1883650
gugaaugggccucaccaaa

SEQ ID NO: 2207219 - RNA, 19 nt, Artificial Sequence
  Description of Artificial Sequence: Synthetic oligonucleotide
  Antisense strand to SEQ ID NO: 2207218
uuuggugaggcccauucac

SEQ ID NO: 2207220 - RNA, 19 nt, Artificial Sequence
  Description of Artificial Sequence: Synthetic oligonucleotide
  Sense strand starting at position 3374 of SEQ ID NO: 1883650
gagaauaaugccuaugguc

SEQ ID NO: 2207221 - RNA, 19 nt, Artificial Sequence
  Description of Artificial Sequence: Synthetic oligonucleotide
  Antisense strand to SEQ ID NO: 2207220
gaccauaggcauuauucuc

SEQ ID NO: 2207222 - RNA, 19 nt, Artificial Sequence
  Description of Artificial Sequence: Synthetic oligonucleotide
  Sense strand starting at position 2886 of SEQ ID NO: 1883650
ggugucaauuucuuauggu

SEQ ID NO: 2207223 - RNA, 19 nt, Artificial Sequence
  Description of Artificial Sequence: Synthetic oligonucleotide
  Antisense strand to SEQ ID NO: 2207222
accauaagaaauugacacc

SEQ ID NO: 2207224 - RNA, 19 nt, Artificial Sequence
  Description of Artificial Sequence: Synthetic oligonucleotide
  Sense strand starting at position 600 of SEQ ID NO: 1883650
gcuguagaugcagaggaaa

SEQ ID NO: 2207225 - RNA, 19 nt, Artificial Sequence
  Description of Artificial Sequence: Synthetic oligonucleotide
  Antisense strand to SEQ ID NO: 2207224
uuuccucugcaucuacagc

SEQ ID NO: 2207226 - RNA, 19 nt, Artificial Sequence
  Description of Artificial Sequence: Synthetic oligonucleotide
  Sense strand starting at position 335 of SEQ ID NO: 1883650
uaaugaaaugcacggaaua

SEQ ID NO: 2207227 - RNA, 19 nt, Artificial Sequence
  Description of Artificial Sequence: Synthetic oligonucleotide
  Antisense strand to SEQ ID NO: 2207226
uauuccgugcauuucauua

SEQ ID NO: 2207228 - RNA, 19 nt, Artificial Sequence
  Description of Artificial Sequence: Synthetic oligonucleotide
  Sense strand starting at position 358 of SEQ ID NO: 1883650
gcuguuucucgcccacuga

SEQ ID NO: 2207229 - RNA, 19 nt, Artificial Sequence
  Description of Artificial Sequence: Synthetic oligonucleotide
  Antisense strand to SEQ ID NO: 2207228
ucagugggcgagaaacagc

SEQ ID NO: 2207230 - RNA, 19 nt, Artificial Sequence
  Description of Artificial Sequence: Synthetic oligonucleotide
  Sense strand starting at position 2597 of SEQ ID NO: 1883650
uguuaaacugaguaaagca

SEQ ID NO: 2207231 - RNA, 19 nt, Artificial Sequence
  Description of Artificial Sequence: Synthetic oligonucleotide
  Antisense strand to SEQ ID NO: 2207230
ugcuuuacucaguuuaaca

SEQ ID NO: 2207232 - RNA, 19 nt, Artificial Sequence
  Description of Artificial Sequence: Synthetic oligonucleotide
  Sense strand starting at position 602 of SEQ ID NO: 1883650
uguagaugcagaggaaauu

SEQ ID NO: 2207233 - RNA, 19 nt, Artificial Sequence
  Description of Artificial Sequence: Synthetic oligonucleotide
  Antisense strand to SEQ ID NO: 2207232
aauuuccucugcaucuaca

SEQ ID NO: 2207234 - RNA, 19 nt, Artificial Sequence
  Description of Artificial Sequence: Synthetic oligonucleotide
  Sense strand starting at position 579 of SEQ ID NO: 1883650
gaguuucugaaguggauga

SEQ ID NO: 2207235 - RNA, 19 nt, Artificial Sequence
  Description of Artificial Sequence: Synthetic oligonucleotide
  Antisense strand to SEQ ID NO: 2207234
ucauccacuucagaaacuc

SEQ ID NO: 2207236 - RNA, 19 nt, Artificial Sequence
  Description of Artificial Sequence: Synthetic oligonucleotide
  Sense strand starting at position 3179 of SEQ ID NO: 1883650
ggaaguugagagugauccu

SEQ ID NO: 2207237 - RNA, 19 nt, Artificial Sequence
  Description of Artificial Sequence: Synthetic oligonucleotide
  Antisense strand to SEQ ID NO: 2207236
aggaucacucucaacuucc

SEQ ID NO: 2207238 - RNA, 19 nt, Artificial Sequence
  Description of Artificial Sequence: Synthetic oligonucleotide
  Sense strand starting at position 1882 of SEQ ID NO: 1883650
aacuguaaucuugggacuu

SEQ ID NO: 2207239 - RNA, 19 nt, Artificial Sequence
  Description of Artificial Sequence: Synthetic oligonucleotide
  Antisense strand to SEQ ID NO: 2207238
aagucccaagauuacaguu

SEQ ID NO: 2207240 - RNA, 19 nt, Artificial Sequence
  Description of Artificial Sequence: Synthetic oligonucleotide
  Sense strand starting at position 3373 of SEQ ID NO: 1883650
ggagaauaaugccuauggu

SEQ ID NO: 2207241 - RNA, 19 nt, Artificial Sequence
  Description of Artificial Sequence: Synthetic oligonucleotide
  Antisense strand to SEQ ID NO: 2207240
accauaggcauuauucucc

SEQ ID NO: 2207242 - RNA, 19 nt, Artificial Sequence
  Description of Artificial Sequence: Synthetic oligonucleotide
  Sense strand starting at position 2786 of SEQ ID NO: 1883650
uggccuuaggacugaaacu

SEQ ID NO: 2207243 - RNA, 19 nt, Artificial Sequence
  Description of Artificial Sequence: Synthetic oligonucleotide
  Antisense strand to SEQ ID NO: 2207242
aguuucaguccuaaggcca

SEQ ID NO: 2207244 - RNA, 19 nt, Artificial Sequence
  Description of Artificial Sequence: Synthetic oligonucleotide
  Sense strand starting at position 2504 of SEQ ID NO: 1883650
acuugauugggccaugcaa

SEQ ID NO: 2207245 - RNA, 19 nt, Artificial Sequence
  Description of Artificial Sequence: Synthetic oligonucleotide
  Antisense strand to SEQ ID NO: 2207244
uugcauggcccaaucaagu

SEQ ID NO: 2207246 - RNA, 19 nt, Artificial Sequence
  Description of Artificial Sequence: Synthetic oligonucleotide
  Sense strand starting at position 3710 of SEQ ID NO: 1883650
guuucccuucuggaaguaa

SEQ ID NO: 2207247 - RNA, 19 nt, Artificial Sequence
  Description of Artificial Sequence: Synthetic oligonucleotide
  Antisense strand to SEQ ID NO: 2207246
uuacuuccagaagggaaac

SEQ ID NO: 2207248 - RNA, 19 nt, Artificial Sequence
  Description of Artificial Sequence: Synthetic oligonucleotide
  Sense strand starting at position 449 of SEQ ID NO: 1883650
uuaguugacuauucuaaug

SEQ ID NO: 2207249 - RNA, 19 nt, Artificial Sequence
  Description of Artificial Sequence: Synthetic oligonucleotide
  Antisense strand to SEQ ID NO: 2207248
cauuagaauagucaacuaa

SEQ ID NO: 2207250 - RNA, 19 nt, Artificial Sequence
  Description of Artificial Sequence: Synthetic oligonucleotide
  Sense strand starting at position 2515 of SEQ ID NO: 1883650
ccaugcaaugcccagauau

SEQ ID NO: 2207251 - RNA, 19 nt, Artificial Sequence
  Description of Artificial Sequence: Synthetic oligonucleotide
  Antisense strand to SEQ ID NO: 2207250
auaucugggcauugcaugg

SEQ ID NO: 2207252 - RNA, 19 nt, Artificial Sequence
  Description of Artificial Sequence: Synthetic oligonucleotide
  Sense strand starting at position 3192 of SEQ ID NO: 1883650
gauccuuggccauauagca

SEQ ID NO: 2207253 - RNA, 19 nt, Artificial Sequence
  Description of Artificial Sequence: Synthetic oligonucleotide
  Antisense strand to SEQ ID NO: 2207252
ugcuauauggccaaggauc

SEQ ID NO: 2207254 - RNA, 19 nt, Artificial Sequence
  Description of Artificial Sequence: Synthetic oligonucleotide
  Sense strand starting at position 1085 of SEQ ID NO: 1883650
cauugaaaugcugguugaa

SEQ ID NO: 2207255 - RNA, 19 nt, Artificial Sequence
  Description of Artificial Sequence: Synthetic oligonucleotide
  Antisense strand to SEQ ID NO: 2207254
uucaaccagcauuucaaug

SEQ ID NO: 2207256 - RNA, 19 nt, Artificial Sequence
  Description of Artificial Sequence: Synthetic oligonucleotide
  Sense strand starting at position 823 of SEQ ID NO: 1883650
aggccagagcuauaauguu

SEQ ID NO: 2207257 - RNA, 19 nt, Artificial Sequence
  Description of Artificial Sequence: Synthetic oligonucleotide
  Antisense strand to SEQ ID NO: 2207256
aacauuauagcucuggccu

SEQ ID NO: 2207258 - RNA, 19 nt, Artificial Sequence
  Description of Artificial Sequence: Synthetic oligonucleotide
  Sense strand starting at position 3462 of SEQ ID NO: 1883650
ugauuauccugcucaauag

SEQ ID NO: 2207259 - RNA, 19 nt, Artificial Sequence
  Description of Artificial Sequence: Synthetic oligonucleotide
  Antisense strand to SEQ ID NO: 2207258
cuauugagcaggauaauca

SEQ ID NO: 2207260 - RNA, 19 nt, Artificial Sequence
  Description of Artificial Sequence: Synthetic oligonucleotide
  Sense strand starting at position 573 of SEQ ID NO: 1883650
uaccaugaguuucugaagu

SEQ ID NO: 2207261 - RNA, 19 nt, Artificial Sequence
  Description of Artificial Sequence: Synthetic oligonucleotide
  Antisense strand to SEQ ID NO: 2207260
acuucagaaacucauggua

SEQ ID NO: 2207262 - RNA, 19 nt, Artificial Sequence
  Description of Artificial Sequence: Synthetic oligonucleotide
  Sense strand starting at position 3376 of SEQ ID NO: 1883650
gaauaaugccuauggucua

SEQ ID NO: 2207263 - RNA, 19 nt, Artificial Sequence
  Description of Artificial Sequence: Synthetic oligonucleotide
  Antisense strand to SEQ ID NO: 2207262
uagaccauaggcauuauuc

SEQ ID NO: 2207264 - RNA, 19 nt, Artificial Sequence
  Description of Artificial Sequence: Synthetic oligonucleotide
  Sense strand starting at position 1650 of SEQ ID NO: 1883650
gaguuacuggcggaaguau

SEQ ID NO: 2207265 - RNA, 19 nt, Artificial Sequence
  Description of Artificial Sequence: Synthetic oligonucleotide
  Antisense strand to SEQ ID NO: 2207264
auacuuccgccaguaacuc

SEQ ID NO: 2207266 - RNA, 19 nt, Artificial Sequence
  Description of Artificial Sequence: Synthetic oligonucleotide
  Sense strand starting at position 3411 of SEQ ID NO: 1883650
aagaucuguccuugguaca

SEQ ID NO: 2207267 - RNA, 19 nt, Artificial Sequence
  Description of Artificial Sequence: Synthetic oligonucleotide
  Antisense strand to SEQ ID NO: 2207266
uguaccaaggacagaucuu

SEQ ID NO: 2207268 - RNA, 19 nt, Artificial Sequence
  Description of Artificial Sequence: Synthetic oligonucleotide
  Sense strand starting at position 590 of SEQ ID NO: 1883650
guggaugaaggcuguagau

SEQ ID NO: 2207269 - RNA, 19 nt, Artificial Sequence
  Description of Artificial Sequence: Synthetic oligonucleotide
  Antisense strand to SEQ ID NO: 2207268
aucuacagccuucauccac

SEQ ID NO: 2207270 - RNA, 19 nt, Artificial Sequence
  Description of Artificial Sequence: Synthetic oligonucleotide
  Sense strand starting at position 3341 of SEQ ID NO: 1883650
ccuagcugaguccaguuaa

SEQ ID NO: 2207271 - RNA, 19 nt, Artificial Sequence
  Description of Artificial Sequence: Synthetic oligonucleotide
  Antisense strand to SEQ ID NO: 2207270
uuaacuggacucagcuagg

SEQ ID NO: 2207272 - RNA, 19 nt, Artificial Sequence
  Description of Artificial Sequence: Synthetic oligonucleotide
  Sense strand starting at position 3410 of SEQ ID NO: 1883650
gaagaucuguccuugguac

SEQ ID NO: 2207273 - RNA, 19 nt, Artificial Sequence
  Description of Artificial Sequence: Synthetic oligonucleotide
  Antisense strand to SEQ ID NO: 2207272
guaccaaggacagaucuuc

SEQ ID NO: 2207274 - RNA, 19 nt, Artificial Sequence
  Description of Artificial Sequence: Synthetic oligonucleotide
  Sense strand starting at position 3354 of SEQ ID NO: 1883650
aguuaaguagccugacaga

SEQ ID NO: 2207275 - RNA, 19 nt, Artificial Sequence
  Description of Artificial Sequence: Synthetic oligonucleotide
  Antisense strand to SEQ ID NO: 2207274
ucugucaggcuacuuaacu

SEQ ID NO: 2207276 - RNA, 19 nt, Artificial Sequence
  Description of Artificial Sequence: Synthetic oligonucleotide
  Sense strand starting at position 409 of SEQ ID NO: 1883650
acaucuaucccacgcaaga

SEQ ID NO: 2207277 - RNA, 19 nt, Artificial Sequence
  Description of Artificial Sequence: Synthetic oligonucleotide
  Antisense strand to SEQ ID NO: 2207276
ucuugcgugggauagaugu

SEQ ID NO: 2207278 - RNA, 19 nt, Artificial Sequence
  Description of Artificial Sequence: Synthetic oligonucleotide
  Sense strand starting at position 436 of SEQ ID NO: 1883650
gcagaaaucuuacuuaguu

SEQ ID NO: 2207279 - RNA, 19 nt, Artificial Sequence
  Description of Artificial Sequence: Synthetic oligonucleotide
  Antisense strand to SEQ ID NO: 2207278
aacuaaguaagauuucugc

SEQ ID NO: 2207280 - RNA, 19 nt, Artificial Sequence
  Description of Artificial Sequence: Synthetic oligonucleotide
  Sense strand starting at position 1419 of SEQ ID NO: 1883650
agcuuuacauugucaaaug

SEQ ID NO: 2207281 - RNA, 19 nt, Artificial Sequence
  Description of Artificial Sequence: Synthetic oligonucleotide
  Antisense strand to SEQ ID NO: 2207280
cauuugacaauguaaagcu

SEQ ID NO: 2207282 - RNA, 19 nt, Artificial Sequence
  Description of Artificial Sequence: Synthetic oligonucleotide
  Sense strand starting at position 2550 of SEQ ID NO: 1883650
cuggguguuuccuuaagag

SEQ ID NO: 2207283 - RNA, 19 nt, Artificial Sequence
  Description of Artificial Sequence: Synthetic oligonucleotide
  Antisense strand to SEQ ID NO: 2207282
cucuuaaggaaacacccag

SEQ ID NO: 2207284 - RNA, 19 nt, Artificial Sequence
  Description of Artificial Sequence: Synthetic oligonucleotide
  Sense strand starting at position 3186 of SEQ ID NO: 1883650
gagagugauccuuggccau

SEQ ID NO: 2207285 - RNA, 19 nt, Artificial Sequence
  Description of Artificial Sequence: Synthetic oligonucleotide
  Antisense strand to SEQ ID NO: 2207284
auggccaaggaucacucuc

SEQ ID NO: 2207286 - RNA, 19 nt, Artificial Sequence
  Description of Artificial Sequence: Synthetic oligonucleotide
  Sense strand starting at position 3189 of SEQ ID NO: 1883650
agugauccuuggccauaua

SEQ ID NO: 2207287 - RNA, 19 nt, Artificial Sequence
  Description of Artificial Sequence: Synthetic oligonucleotide
  Antisense strand to SEQ ID NO: 2207286
uauauggccaaggaucacu

SEQ ID NO: 2207288 - RNA, 19 nt, Artificial Sequence
  Description of Artificial Sequence: Synthetic oligonucleotide
  Sense strand starting at position 758 of SEQ ID NO: 1883650
caugaagucuuucugaguu

SEQ ID NO: 2207289 - RNA, 19 nt, Artificial Sequence
  Description of Artificial Sequence: Synthetic oligonucleotide
  Antisense strand to SEQ ID NO: 2207288
aacucagaaagacuucaug

SEQ ID NO: 2207290 - RNA, 19 nt, Artificial Sequence
  Description of Artificial Sequence: Synthetic oligonucleotide
  Sense strand starting at position 976 of SEQ ID NO: 1883651
gcccgugugaccucauucu

SEQ ID NO: 2207291 - RNA, 19 nt, Artificial Sequence
  Description of Artificial Sequence: Synthetic oligonucleotide
  Antisense strand to SEQ ID NO: 2207290
agaaugaggucacacgggc

SEQ ID NO: 2207292 - RNA, 19 nt, Artificial Sequence
  Description of Artificial Sequence: Synthetic oligonucleotide
  Sense strand starting at position 54 of SEQ ID NO: 1883651
guuugauuugugggagcac

SEQ ID NO: 2207293 - RNA, 19 nt, Artificial Sequence
  Description of Artificial Sequence: Synthetic oligonucleotide
  Antisense strand to SEQ ID NO: 2207292
gugcucccacaaaucaaac

SEQ ID NO: 2207294 - RNA, 19 nt, Artificial Sequence
  Description of Artificial Sequence: Synthetic oligonucleotide
  Sense strand starting at position 2366 of SEQ ID NO: 1883651
ggugcguauggaggaauuu

SEQ ID NO: 2207295 - RNA, 19 nt, Artificial Sequence
  Description of Artificial Sequence: Synthetic oligonucleotide
  Antisense strand to SEQ ID NO: 2207294
aaauuccuccauacgcacc

SEQ ID NO: 2207296 - RNA, 19 nt, Artificial Sequence
  Description of Artificial Sequence: Synthetic oligonucleotide
  Sense strand starting at position 1434 of SEQ ID NO: 1883651
uguuaaguacuaggaggaa

SEQ ID NO: 2207297 - RNA, 19 nt, Artificial Sequence
  Description of Artificial Sequence: Synthetic oligonucleotide
  Antisense strand to SEQ ID NO: 2207296
uuccuccuaguacuuaaca

SEQ ID NO: 2207298 - RNA, 19 nt, Artificial Sequence
  Description of Artificial Sequence: Synthetic oligonucleotide
  Sense strand starting at position 3329 of SEQ ID NO: 1883651
agaacuuuccuagggcaag

SEQ ID NO: 2207299 - RNA, 19 nt, Artificial Sequence
  Description of Artificial Sequence: Synthetic oligonucleotide
  Antisense strand to SEQ ID NO: 2207298
cuugcccuaggaaaguucu

SEQ ID NO: 2207300 - RNA, 19 nt, Artificial Sequence
  Description of Artificial Sequence: Synthetic oligonucleotide
  Sense strand starting at position 2892 of SEQ ID NO: 1883651
gaggcaucuccagagcaca

SEQ ID NO: 2207301 - RNA, 19 nt, Artificial Sequence
  Description of Artificial Sequence: Synthetic oligonucleotide
  Antisense strand to SEQ ID NO: 2207300
ugugcucuggagaugccuc

SEQ ID NO: 2207302 - RNA, 19 nt, Artificial Sequence
  Description of Artificial Sequence: Synthetic oligonucleotide
  Sense strand starting at position 1826 of SEQ ID NO: 1883651
ggaguaaagcgguaaugga

SEQ ID NO: 2207303 - RNA, 19 nt, Artificial Sequence
  Description of Artificial Sequence: Synthetic oligonucleotide
  Antisense strand to SEQ ID NO: 2207302
uccauuaccgcuuuacucc

SEQ ID NO: 2207304 - RNA, 19 nt, Artificial Sequence
  Description of Artificial Sequence: Synthetic oligonucleotide
  Sense strand starting at position 1419 of SEQ ID NO: 1883651
auaagaugcagauaguguu

SEQ ID NO: 2207305 - RNA, 19 nt, Artificial Sequence
  Description of Artificial Sequence: Synthetic oligonucleotide
  Antisense strand to SEQ ID NO: 2207304
aacacuaucugcaucuuau

SEQ ID NO: 2207306 - RNA, 19 nt, Artificial Sequence
  Description of Artificial Sequence: Synthetic oligonucleotide
  Sense strand starting at position 922 of SEQ ID NO: 1883651
cgcacuuauguagagaaac

SEQ ID NO: 2207307 - RNA, 19 nt, Artificial Sequence
  Description of Artificial Sequence: Synthetic oligonucleotide
  Antisense strand to SEQ ID NO: 2207306
guuucucuacauaagugcg

SEQ ID NO: 2207308 - RNA, 19 nt, Artificial Sequence
  Description of Artificial Sequence: Synthetic oligonucleotide
  Sense strand starting at position 1986 of SEQ ID NO: 1883651
agugacaucuugguugaaa

SEQ ID NO: 2207309 - RNA, 19 nt, Artificial Sequence
  Description of Artificial Sequence: Synthetic oligonucleotide
  Antisense strand to SEQ ID NO: 2207308
uuucaaccaagaugucacu

SEQ ID NO: 2207310 - RNA, 19 nt, Artificial Sequence
  Description of Artificial Sequence: Synthetic oligonucleotide
  Sense strand starting at position 1985 of SEQ ID NO: 1883651
aagugacaucuugguugaa

SEQ ID NO: 2207311 - RNA, 19 nt, Artificial Sequence
  Description of Artificial Sequence: Synthetic oligonucleotide
  Antisense strand to SEQ ID NO: 2207310
uucaaccaagaugucacuu

SEQ ID NO: 2207312 - RNA, 19 nt, Artificial Sequence
  Description of Artificial Sequence: Synthetic oligonucleotide
  Sense strand starting at position 943 of SEQ ID NO: 1883651
cucuaaaucccauggcaga

SEQ ID NO: 2207313 - RNA, 19 nt, Artificial Sequence
  Description of Artificial Sequence: Synthetic oligonucleotide
  Antisense strand to SEQ ID NO: 2207312
ucugccaugggauuuagag

SEQ ID NO: 2207314 - RNA, 19 nt, Artificial Sequence
  Description of Artificial Sequence: Synthetic oligonucleotide
  Sense strand starting at position 3423 of SEQ ID NO: 1883651
cugaccucuucugugaaag

SEQ ID NO: 2207315 - RNA, 19 nt, Artificial Sequence
  Description of Artificial Sequence: Synthetic oligonucleotide
  Antisense strand to SEQ ID NO: 2207314
cuuucacagaagaggucag

SEQ ID NO: 2207316 - RNA, 19 nt, Artificial Sequence
  Description of Artificial Sequence: Synthetic oligonucleotide
  Sense strand starting at position 1190 of SEQ ID NO: 1883651
uguuuauuugcaugucuau

SEQ ID NO: 2207317 - RNA, 19 nt, Artificial Sequence
  Description of Artificial Sequence: Synthetic oligonucleotide
  Antisense strand to SEQ ID NO: 2207316
auagacaugcaaauaaaca

SEQ ID NO: 2207318 - RNA, 19 nt, Artificial Sequence
  Description of Artificial Sequence: Synthetic oligonucleotide
  Sense strand starting at position 1987 of SEQ ID NO: 1883651
gugacaucuugguugaaac

SEQ ID NO: 2207319 - RNA, 19 nt, Artificial Sequence
  Description of Artificial Sequence: Synthetic oligonucleotide
  Antisense strand to SEQ ID NO: 2207318
guuucaaccaagaugucac

SEQ ID NO: 2207320 - RNA, 19 nt, Artificial Sequence
  Description of Artificial Sequence: Synthetic oligonucleotide
  Sense strand starting at position 3159 of SEQ ID NO: 1883651
aggguaggugcucaguaau

SEQ ID NO: 2207321 - RNA, 19 nt, Artificial Sequence
  Description of Artificial Sequence: Synthetic oligonucleotide
  Antisense strand to SEQ ID NO: 2207320
auuacugagcaccuacccu

SEQ ID NO: 2207322 - RNA, 19 nt, Artificial Sequence
  Description of Artificial Sequence: Synthetic oligonucleotide
  Sense strand starting at position 2398 of SEQ ID NO: 1883651
uacagaauuuggugauaaa

SEQ ID NO: 2207323 - RNA, 19 nt, Artificial Sequence
  Description of Artificial Sequence: Synthetic oligonucleotide
  Antisense strand to SEQ ID NO: 2207322
uuuaucaccaaauucugua

SEQ ID NO: 2207324 - RNA, 19 nt, Artificial Sequence
  Description of Artificial Sequence: Synthetic oligonucleotide
  Sense strand starting at position 3514 of SEQ ID NO: 1883651
cuguacuccagugaaguuu

SEQ ID NO: 2207325 - RNA, 19 nt, Artificial Sequence
  Description of Artificial Sequence: Synthetic oligonucleotide
  Antisense strand to SEQ ID NO: 2207324
aaacuucacuggaguacag

SEQ ID NO: 2207326 - RNA, 19 nt, Artificial Sequence
  Description of Artificial Sequence: Synthetic oligonucleotide
  Sense strand starting at position 877 of SEQ ID NO: 1883651
caucaugacccgugggauc

SEQ ID NO: 2207327 - RNA, 19 nt, Artificial Sequence
  Description of Artificial Sequence: Synthetic oligonucleotide
  Antisense strand to SEQ ID NO: 2207326
gaucccacgggucaugaug

SEQ ID NO: 2207328 - RNA, 19 nt, Artificial Sequence
  Description of Artificial Sequence: Synthetic oligonucleotide
  Sense strand starting at position 2642 of SEQ ID NO: 1883651
guggaugacggcugaauua

SEQ ID NO: 2207329 - RNA, 19 nt, Artificial Sequence
  Description of Artificial Sequence: Synthetic oligonucleotide
  Antisense strand to SEQ ID NO: 2207328
uaauucagccgucauccac

SEQ ID NO: 2207330 - RNA, 19 nt, Artificial Sequence
  Description of Artificial Sequence: Synthetic oligonucleotide
  Sense strand starting at position 3367 of SEQ ID NO: 1883651
gaauguugacgcugaaauu

SEQ ID NO: 2207331 - RNA, 19 nt, Artificial Sequence
  Description of Artificial Sequence: Synthetic oligonucleotide
  Antisense strand to SEQ ID NO: 2207330
aauuucagcgucaacauuc

SEQ ID NO: 2207332 - RNA, 19 nt, Artificial Sequence
  Description of Artificial Sequence: Synthetic oligonucleotide
  Sense strand starting at position 920 of SEQ ID NO: 1883651
ugcgcacuuauguagagaa

SEQ ID NO: 2207333 - RNA, 19 nt, Artificial Sequence
  Description of Artificial Sequence: Synthetic oligonucleotide
  Antisense strand to SEQ ID NO: 2207332
uucucuacauaagugcgca

SEQ ID NO: 2207334 - RNA, 19 nt, Artificial Sequence
  Description of Artificial Sequence: Synthetic oligonucleotide
  Sense strand starting at position 3510 of SEQ ID NO: 1883651
guagcuguacuccagugaa

SEQ ID NO: 2207335 - RNA, 19 nt, Artificial Sequence
  Description of Artificial Sequence: Synthetic oligonucleotide
  Antisense strand to SEQ ID NO: 2207334
uucacuggaguacagcuac

SEQ ID NO: 2207336 - RNA, 19 nt, Artificial Sequence
  Description of Artificial Sequence: Synthetic oligonucleotide
  Sense strand starting at position 1823 of SEQ ID NO: 1883651
uuaggaguaaagcgguaau

SEQ ID NO: 2207337 - RNA, 19 nt, Artificial Sequence
  Description of Artificial Sequence: Synthetic oligonucleotide
  Antisense strand to SEQ ID NO: 2207336
auuaccgcuuuacuccuaa

SEQ ID NO: 2207338 - RNA, 19 nt, Artificial Sequence
  Description of Artificial Sequence: Synthetic oligonucleotide
  Sense strand starting at position 3353 of SEQ ID NO: 1883651
ccugcucuccgugagaaug

SEQ ID NO: 2207339 - RNA, 19 nt, Artificial Sequence
  Description of Artificial Sequence: Synthetic oligonucleotide
  Antisense strand to SEQ ID NO: 2207338
cauucucacggagagcagg

SEQ ID NO: 2207340 - RNA, 19 nt, Artificial Sequence
  Description of Artificial Sequence: Synthetic oligonucleotide
  Sense strand starting at position 1476 of SEQ ID NO: 1883651
cggaccauugggugcuaaa

SEQ ID NO: 2207341 - RNA, 19 nt, Artificial Sequence
  Description of Artificial Sequence: Synthetic oligonucleotide
  Antisense strand to SEQ ID NO: 2207340
uuuagcacccaaugguccg

SEQ ID NO: 2207342 - RNA, 19 nt, Artificial Sequence
  Description of Artificial Sequence: Synthetic oligonucleotide
  Sense strand starting at position 25 of SEQ ID NO: 1883651
caagguggcggccauauua

SEQ ID NO: 2207343 - RNA, 19 nt, Artificial Sequence
  Description of Artificial Sequence: Synthetic oligonucleotide
  Antisense strand to SEQ ID NO: 2207342
uaauauggccgccaccuug

SEQ ID NO: 2207344 - RNA, 19 nt, Artificial Sequence
  Description of Artificial Sequence: Synthetic oligonucleotide
  Sense strand starting at position 1315 of SEQ ID NO: 1883651
gggaauaguuaggaaugaa

SEQ ID NO: 2207345 - RNA, 19 nt, Artificial Sequence
  Description of Artificial Sequence: Synthetic oligonucleotide
  Antisense strand to SEQ ID NO: 2207344
uucauuccuaacuauuccc

SEQ ID NO: 2207346 - RNA, 19 nt, Artificial Sequence
  Description of Artificial Sequence: Synthetic oligonucleotide
  Sense strand starting at position 2323 of SEQ ID NO: 1883651
gugguuugaccaggguacu

SEQ ID NO: 2207347 - RNA, 19 nt, Artificial Sequence
  Description of Artificial Sequence: Synthetic oligonucleotide
  Antisense strand to SEQ ID NO: 2207346
aguacccuggucaaaccac

SEQ ID NO: 2207348 - RNA, 19 nt, Artificial Sequence
  Description of Artificial Sequence: Synthetic oligonucleotide
  Sense strand starting at position 2396 of SEQ ID NO: 1883651
ucuacagaauuuggugaua

SEQ ID NO: 2207349 - RNA, 19 nt, Artificial Sequence
  Description of Artificial Sequence: Synthetic oligonucleotide
  Antisense strand to SEQ ID NO: 2207348
uaucaccaaauucuguaga

SEQ ID NO: 2207350 - RNA, 19 nt, Artificial Sequence
  Description of Artificial Sequence: Synthetic oligonucleotide
  Sense strand starting at position 2345 of SEQ ID NO: 1883651
aguguugagguuuggaagu

SEQ ID NO: 2207351 - RNA, 19 nt, Artificial Sequence
  Description of Artificial Sequence: Synthetic oligonucleotide
  Antisense strand to SEQ ID NO: 2207350
acuuccaaaccucaacacu

SEQ ID NO: 2207352 - RNA, 19 nt, Artificial Sequence
  Description of Artificial Sequence: Synthetic oligonucleotide
  Sense strand starting at position 912 of SEQ ID NO: 1883651
acugauucugcgcacuuau

SEQ ID NO: 2207353 - RNA, 19 nt, Artificial Sequence
  Description of Artificial Sequence: Synthetic oligonucleotide
  Antisense strand to SEQ ID NO: 2207352
auaagugcgcagaaucagu

SEQ ID NO: 2207354 - RNA, 19 nt, Artificial Sequence
  Description of Artificial Sequence: Synthetic oligonucleotide
  Sense strand starting at position 55 of SEQ ID NO: 1883651
uuugauuugugggagcaca

SEQ ID NO: 2207355 - RNA, 19 nt, Artificial Sequence
  Description of Artificial Sequence: Synthetic oligonucleotide
  Antisense strand to SEQ ID NO: 2207354
ugugcucccacaaaucaaa

SEQ ID NO: 2207356 - RNA, 19 nt, Artificial Sequence
  Description of Artificial Sequence: Synthetic oligonucleotide
  Sense strand starting at position 3055 of SEQ ID NO: 1883651
uguugauuuccucgcugcu

SEQ ID NO: 2207357 - RNA, 19 nt, Artificial Sequence
  Description of Artificial Sequence: Synthetic oligonucleotide
  Antisense strand to SEQ ID NO: 2207356
agcagcgaggaaaucaaca

SEQ ID NO: 2207358 - RNA, 19 nt, Artificial Sequence
  Description of Artificial Sequence: Synthetic oligonucleotide
  Sense strand starting at position 1898 of SEQ ID NO: 1883651
gugguaacccgguguggaa

SEQ ID NO: 2207359 - RNA, 19 nt, Artificial Sequence
  Description of Artificial Sequence: Synthetic oligonucleotide
  Antisense strand to SEQ ID NO: 2207358
uuccacaccggguuaccac

SEQ ID NO: 2207360 - RNA, 19 nt, Artificial Sequence
  Description of Artificial Sequence: Synthetic oligonucleotide
  Sense strand starting at position 2463 of SEQ ID NO: 1883651
ccaguuucugccugacagu

SEQ ID NO: 2207361 - RNA, 19 nt, Artificial Sequence
  Description of Artificial Sequence: Synthetic oligonucleotide
  Antisense strand to SEQ ID NO: 2207360
acugucaggcagaaacugg

SEQ ID NO: 2207362 - RNA, 19 nt, Artificial Sequence
  Description of Artificial Sequence: Synthetic oligonucleotide
  Sense strand starting at position 911 of SEQ ID NO: 1883651
cacugauucugcgcacuua

SEQ ID NO: 2207363 - RNA, 19 nt, Artificial Sequence
  Description of Artificial Sequence: Synthetic oligonucleotide
  Antisense strand to SEQ ID NO: 2207362
uaagugcgcagaaucagug

SEQ ID NO: 2207364 - RNA, 19 nt, Artificial Sequence
  Description of Artificial Sequence: Synthetic oligonucleotide
  Sense strand starting at position 3513 of SEQ ID NO: 1883651
gcuguacuccagugaaguu

SEQ ID NO: 2207365 - RNA, 19 nt, Artificial Sequence
  Description of Artificial Sequence: Synthetic oligonucleotide
  Antisense strand to SEQ ID NO: 2207364
aacuucacuggaguacagc

SEQ ID NO: 2207366 - RNA, 19 nt, Artificial Sequence
  Description of Artificial Sequence: Synthetic oligonucleotide
  Sense strand starting at position 1314 of SEQ ID NO: 1883651
ugggaauaguuaggaauga

SEQ ID NO: 2207367 - RNA, 19 nt, Artificial Sequence
  Description of Artificial Sequence: Synthetic oligonucleotide
  Antisense strand to SEQ ID NO: 2207366
ucauuccuaacuauuccca

SEQ ID NO: 2207368 - RNA, 19 nt, Artificial Sequence
  Description of Artificial Sequence: Synthetic oligonucleotide
  Sense strand starting at position 2365 of SEQ ID NO: 1883651
aggugcguauggaggaauu

SEQ ID NO: 2207369 - RNA, 19 nt, Artificial Sequence
  Description of Artificial Sequence: Synthetic oligonucleotide
  Antisense strand to SEQ ID NO: 2207368
aauuccuccauacgcaccu

SEQ ID NO: 2207370 - RNA, 19 nt, Artificial Sequence
  Description of Artificial Sequence: Synthetic oligonucleotide
  Sense strand starting at position 3981 of SEQ ID NO: 1883652
auuacagugcuugaauaaa

SEQ ID NO: 2207371 - RNA, 19 nt, Artificial Sequence
  Description of Artificial Sequence: Synthetic oligonucleotide
  Antisense strand to SEQ ID NO: 2207370
uuuauucaagcacuguaau

SEQ ID NO: 2207372 - RNA, 19 nt, Artificial Sequence
  Description of Artificial Sequence: Synthetic oligonucleotide
  Sense strand starting at position 3945 of SEQ ID NO: 1883652
uugauuaugggaugagagu

SEQ ID NO: 2207373 - RNA, 19 nt, Artificial Sequence
  Description of Artificial Sequence: Synthetic oligonucleotide
  Antisense strand to SEQ ID NO: 2207372
acucucaucccauaaucaa

SEQ ID NO: 2207374 - RNA, 19 nt, Artificial Sequence
  Description of Artificial Sequence: Synthetic oligonucleotide
  Sense strand starting at position 2376 of SEQ ID NO: 1883652
caaugucaccuguaagaug

SEQ ID NO: 2207375 - RNA, 19 nt, Artificial Sequence
  Description of Artificial Sequence: Synthetic oligonucleotide
  Antisense strand to SEQ ID NO: 2207374
caucuuacaggugacauug

SEQ ID NO: 2207376 - RNA, 19 nt, Artificial Sequence
  Description of Artificial Sequence: Synthetic oligonucleotide
  Sense strand starting at position 1219 of SEQ ID NO: 1883652
auggaaauuuagggaaaua

SEQ ID NO: 2207377 - RNA, 19 nt, Artificial Sequence
  Description of Artificial Sequence: Synthetic oligonucleotide
  Antisense strand to SEQ ID NO: 2207376
uauuucccuaaauuuccau

SEQ ID NO: 2207378 - RNA, 19 nt, Artificial Sequence
  Description of Artificial Sequence: Synthetic oligonucleotide
  Sense strand starting at position 1218 of SEQ ID NO: 1883652
aauggaaauuuagggaaau

SEQ ID NO: 2207379 - RNA, 19 nt, Artificial Sequence
  Description of Artificial Sequence: Synthetic oligonucleotide
  Antisense strand to SEQ ID NO: 2207378
auuucccuaaauuuccauu

SEQ ID NO: 2207380 - RNA, 19 nt, Artificial Sequence
  Description of Artificial Sequence: Synthetic oligonucleotide
  Sense strand starting at position 2833 of SEQ ID NO: 1883652
ucugauauugguugaaaga

SEQ ID NO: 2207381 - RNA, 19 nt, Artificial Sequence
  Description of Artificial Sequence: Synthetic oligonucleotide
  Antisense strand to SEQ ID NO: 2207380
ucuuucaaccaauaucaga

SEQ ID NO: 2207382 - RNA, 19 nt, Artificial Sequence
  Description of Artificial Sequence: Synthetic oligonucleotide
  Sense strand starting at position 1786 of SEQ ID NO: 1883652
aucugagaugaugguccaa

SEQ ID NO: 2207383 - RNA, 19 nt, Artificial Sequence
  Description of Artificial Sequence: Synthetic oligonucleotide
  Antisense strand to SEQ ID NO: 2207382
uuggaccaucaucucagau

SEQ ID NO: 2207384 - RNA, 19 nt, Artificial Sequence
  Description of Artificial Sequence: Synthetic oligonucleotide
  Sense strand starting at position 3318 of SEQ ID NO: 1883652
gcacauuuauccucauugu

SEQ ID NO: 2207385 - RNA, 19 nt, Artificial Sequence
  Description of Artificial Sequence: Synthetic oligonucleotide
  Antisense strand to SEQ ID NO: 2207384
acaaugaggauaaaugugc

SEQ ID NO: 2207386 - RNA, 19 nt, Artificial Sequence
  Description of Artificial Sequence: Synthetic oligonucleotide
  Sense strand starting at position 3919 of SEQ ID NO: 1883652
agcuauuuauugucuucca

SEQ ID NO: 2207387 - RNA, 19 nt, Artificial Sequence
  Description of Artificial Sequence: Synthetic oligonucleotide
  Antisense strand to SEQ ID NO: 2207386
uggaagacaauaaauagcu

SEQ ID NO: 2207388 - RNA, 19 nt, Artificial Sequence
  Description of Artificial Sequence: Synthetic oligonucleotide
  Sense strand starting at position 385 of SEQ ID NO: 1883652
acuagacacugauuaguua

SEQ ID NO: 2207389 - RNA, 19 nt, Artificial Sequence
  Description of Artificial Sequence: Synthetic oligonucleotide
  Antisense strand to SEQ ID NO: 2207388
uaacuaaucagugucuagu

SEQ ID NO: 2207390 - RNA, 19 nt, Artificial Sequence
  Description of Artificial Sequence: Synthetic oligonucleotide
  Sense strand starting at position 3392 of SEQ ID NO: 1883652
ucuaguaagagugaaguca

SEQ ID NO: 2207391 - RNA, 19 nt, Artificial Sequence
  Description of Artificial Sequence: Synthetic oligonucleotide
  Antisense strand to SEQ ID NO: 2207390
ugacuucacucuuacuaga

SEQ ID NO: 2207392 - RNA, 19 nt, Artificial Sequence
  Description of Artificial Sequence: Synthetic oligonucleotide
  Sense strand starting at position 729 of SEQ ID NO: 1883652
aggauauugcucuauuacc

SEQ ID NO: 2207393 - RNA, 19 nt, Artificial Sequence
  Description of Artificial Sequence: Synthetic oligonucleotide
  Antisense strand to SEQ ID NO: 2207392
gguaauagagcaauauccu

SEQ ID NO: 2207394 - RNA, 19 nt, Artificial Sequence
  Description of Artificial Sequence: Synthetic oligonucleotide
  Sense strand starting at position 3906 of SEQ ID NO: 1883652
agaaacguugaauagcuau

SEQ ID NO: 2207395 - RNA, 19 nt, Artificial Sequence
  Description of Artificial Sequence: Synthetic oligonucleotide
  Antisense strand to SEQ ID NO: 2207394
auagcuauucaacguuucu

SEQ ID NO: 2207396 - RNA, 19 nt, Artificial Sequence
  Description of Artificial Sequence: Synthetic oligonucleotide
  Sense strand starting at position 2313 of SEQ ID NO: 1883652
guuauucuacuugauugau

SEQ ID NO: 2207397 - RNA, 19 nt, Artificial Sequence
  Description of Artificial Sequence: Synthetic oligonucleotide
  Antisense strand to SEQ ID NO: 2207396
aucaaucaaguagaauaac

SEQ ID NO: 2207398 - RNA, 19 nt, Artificial Sequence
  Description of Artificial Sequence: Synthetic oligonucleotide
  Sense strand starting at position 1394 of SEQ ID NO: 1883652
agauuaggcaacuguaaag

SEQ ID NO: 2207399 - RNA, 19 nt, Artificial Sequence
  Description of Artificial Sequence: Synthetic oligonucleotide
  Antisense strand to SEQ ID NO: 2207398
cuuuacaguugccuaaucu

SEQ ID NO: 2207400 - RNA, 19 nt, Artificial Sequence
  Description of Artificial Sequence: Synthetic oligonucleotide
  Sense strand starting at position 1235 of SEQ ID NO: 1883652
auagucugugguuaaacaa

SEQ ID NO: 2207401 - RNA, 19 nt, Artificial Sequence
  Description of Artificial Sequence: Synthetic oligonucleotide
  Antisense strand to SEQ ID NO: 2207400
uuguuuaaccacagacuau

SEQ ID NO: 2207402 - RNA, 19 nt, Artificial Sequence
  Description of Artificial Sequence: Synthetic oligonucleotide
  Sense strand starting at position 2565 of SEQ ID NO: 1883652
gcagucaucauggaccuga

SEQ ID NO: 2207403 - RNA, 19 nt, Artificial Sequence
  Description of Artificial Sequence: Synthetic oligonucleotide
  Antisense strand to SEQ ID NO: 2207402
ucagguccaugaugacugc

SEQ ID NO: 2207404 - RNA, 19 nt, Artificial Sequence
  Description of Artificial Sequence: Synthetic oligonucleotide
  Sense strand starting at position 2672 of SEQ ID NO: 1883652
cugagagaugcugagccau

SEQ ID NO: 2207405 - RNA, 19 nt, Artificial Sequence
  Description of Artificial Sequence: Synthetic oligonucleotide
  Antisense strand to SEQ ID NO: 2207404
auggcucagcaucucucag

SEQ ID NO: 2207406 - RNA, 19 nt, Artificial Sequence
  Description of Artificial Sequence: Synthetic oligonucleotide
  Sense strand starting at position 3417 of SEQ ID NO: 1883652
gaaagaaggucuguuucca

SEQ ID NO: 2207407 - RNA, 19 nt, Artificial Sequence
  Description of Artificial Sequence: Synthetic oligonucleotide
  Antisense strand to SEQ ID NO: 2207406
uggaaacagaccuucuuuc

SEQ ID NO: 2207408 - RNA, 19 nt, Artificial Sequence
  Description of Artificial Sequence: Synthetic oligonucleotide
  Sense strand starting at position 1364 of SEQ ID NO: 1883652
uugucuucucagcaggaaa

SEQ ID NO: 2207409 - RNA, 19 nt, Artificial Sequence
  Description of Artificial Sequence: Synthetic oligonucleotide
  Antisense strand to SEQ ID NO: 2207408
uuuccugcugagaagacaa

SEQ ID NO: 2207410 - RNA, 19 nt, Artificial Sequence
  Description of Artificial Sequence: Synthetic oligonucleotide
  Sense strand starting at position 392 of SEQ ID NO: 1883652
acugauuaguuacucuaua

SEQ ID NO: 2207411 - RNA, 19 nt, Artificial Sequence
  Description of Artificial Sequence: Synthetic oligonucleotide
  Antisense strand to SEQ ID NO: 2207410
uauagaguaacuaaucagu

SEQ ID NO: 2207412 - RNA, 19 nt, Artificial Sequence
  Description of Artificial Sequence: Synthetic oligonucleotide
  Sense strand starting at position 727 of SEQ ID NO: 1883652
acaggauauugcucuauua

SEQ ID NO: 2207413 - RNA, 19 nt, Artificial Sequence
  Description of Artificial Sequence: Synthetic oligonucleotide
  Antisense strand to SEQ ID NO: 2207412
uaauagagcaauauccugu

SEQ ID NO: 2207414 - RNA, 19 nt, Artificial Sequence
  Description of Artificial Sequence: Synthetic oligonucleotide
  Sense strand starting at position 218 of SEQ ID NO: 1883652
ucucauagaugccugacaa

SEQ ID NO: 2207415 - RNA, 19 nt, Artificial Sequence
  Description of Artificial Sequence: Synthetic oligonucleotide
  Antisense strand to SEQ ID NO: 2207414
uugucaggcaucuaugaga

SEQ ID NO: 2207416 - RNA, 19 nt, Artificial Sequence
  Description of Artificial Sequence: Synthetic oligonucleotide
  Sense strand starting at position 2674 of SEQ ID NO: 1883652
gagagaugcugagccauga

SEQ ID NO: 2207417 - RNA, 19 nt, Artificial Sequence
  Description of Artificial Sequence: Synthetic oligonucleotide
  Antisense strand to SEQ ID NO: 2207416
ucauggcucagcaucucuc

SEQ ID NO: 2207418 - RNA, 19 nt, Artificial Sequence
  Description of Artificial Sequence: Synthetic oligonucleotide
  Sense strand starting at position 3531 of SEQ ID NO: 1883652
agacuuggucuguacaucu

SEQ ID NO: 2207419 - RNA, 19 nt, Artificial Sequence
  Description of Artificial Sequence: Synthetic oligonucleotide
  Antisense strand to SEQ ID NO: 2207418
agauguacagaccaagucu

SEQ ID NO: 2207420 - RNA, 19 nt, Artificial Sequence
  Description of Artificial Sequence: Synthetic oligonucleotide
  Sense strand starting at position 2832 of SEQ ID NO: 1883652
gucugauauugguugaaag

SEQ ID NO: 2207421 - RNA, 19 nt, Artificial Sequence
  Description of Artificial Sequence: Synthetic oligonucleotide
  Antisense strand to SEQ ID NO: 2207420
cuuucaaccaauaucagac

SEQ ID NO: 2207422 - RNA, 19 nt, Artificial Sequence
  Description of Artificial Sequence: Synthetic oligonucleotide
  Sense strand starting at position 1056 of SEQ ID NO: 1883652
agacuaguugagggcuuaa

SEQ ID NO: 2207423 - RNA, 19 nt, Artificial Sequence
  Description of Artificial Sequence: Synthetic oligonucleotide
  Antisense strand to SEQ ID NO: 2207422
uuaagcccucaacuagucu

SEQ ID NO: 2207424 - RNA, 19 nt, Artificial Sequence
  Description of Artificial Sequence: Synthetic oligonucleotide
  Sense strand starting at position 219 of SEQ ID NO: 1883652
cucauagaugccugacaau

SEQ ID NO: 2207425 - RNA, 19 nt, Artificial Sequence
  Description of Artificial Sequence: Synthetic oligonucleotide
  Antisense strand to SEQ ID NO: 2207424
auugucaggcaucuaugag

SEQ ID NO: 2207426 - RNA, 19 nt, Artificial Sequence
  Description of Artificial Sequence: Synthetic oligonucleotide
  Sense strand starting at position 2398 of SEQ ID NO: 1883652
ugaagauggugguuugacu

SEQ ID NO: 2207427 - RNA, 19 nt, Artificial Sequence
  Description of Artificial Sequence: Synthetic oligonucleotide
  Antisense strand to SEQ ID NO: 2207426
agucaaaccaccaucuuca

SEQ ID NO: 2207428 - RNA, 19 nt, Artificial Sequence
  Description of Artificial Sequence: Synthetic oligonucleotide
  Sense strand starting at position 2316 of SEQ ID NO: 1883652
auucuacuugauugauagu

SEQ ID NO: 2207429 - RNA, 19 nt, Artificial Sequence
  Description of Artificial Sequence: Synthetic oligonucleotide
  Antisense strand to SEQ ID NO: 2207428
acuaucaaucaaguagaau

SEQ ID NO: 2207430 - RNA, 19 nt, Artificial Sequence
  Description of Artificial Sequence: Synthetic oligonucleotide
  Sense strand starting at position 3930 of SEQ ID NO: 1883652
gucuuccagcuauaauuga

SEQ ID NO: 2207431 - RNA, 19 nt, Artificial Sequence
  Description of Artificial Sequence: Synthetic oligonucleotide
  Antisense strand to SEQ ID NO: 2207430
ucaauuauagcuggaagac

SEQ ID NO: 2207432 - RNA, 19 nt, Artificial Sequence
  Description of Artificial Sequence: Synthetic oligonucleotide
  Sense strand starting at position 2045 of SEQ ID NO: 1883652
uagacucauugguccuuga

SEQ ID NO: 2207433 - RNA, 19 nt, Artificial Sequence
  Description of Artificial Sequence: Synthetic oligonucleotide
  Antisense strand to SEQ ID NO: 2207432
ucaaggaccaaugagucua

SEQ ID NO: 2207434 - RNA, 19 nt, Artificial Sequence
  Description of Artificial Sequence: Synthetic oligonucleotide
  Sense strand starting at position 3421 of SEQ ID NO: 1883652
gaaggucuguuuccaaaug

SEQ ID NO: 2207435 - RNA, 19 nt, Artificial Sequence
  Description of Artificial Sequence: Synthetic oligonucleotide
  Antisense strand to SEQ ID NO: 2207434
cauuuggaaacagaccuuc

SEQ ID NO: 2207436 - RNA, 19 nt, Artificial Sequence
  Description of Artificial Sequence: Synthetic oligonucleotide
  Sense strand starting at position 393 of SEQ ID NO: 1883652
cugauuaguuacucuauau

SEQ ID NO: 2207437 - RNA, 19 nt, Artificial Sequence
  Description of Artificial Sequence: Synthetic oligonucleotide
  Antisense strand to SEQ ID NO: 2207436
auauagaguaacuaaucag

SEQ ID NO: 2207438 - RNA, 19 nt, Artificial Sequence
  Description of Artificial Sequence: Synthetic oligonucleotide
  Sense strand starting at position 2112 of SEQ ID NO: 1883652
cauguagugcuuuaugaag

SEQ ID NO: 2207439 - RNA, 19 nt, Artificial Sequence
  Description of Artificial Sequence: Synthetic oligonucleotide
  Antisense strand to SEQ ID NO: 2207438
cuucauaaagcacuacaug

SEQ ID NO: 2207440 - RNA, 19 nt, Artificial Sequence
  Description of Artificial Sequence: Synthetic oligonucleotide
  Sense strand starting at position 2372 of SEQ ID NO: 1883652
ugaccaaugucaccuguaa

SEQ ID NO: 2207441 - RNA, 19 nt, Artificial Sequence
  Description of Artificial Sequence: Synthetic oligonucleotide
  Antisense strand to SEQ ID NO: 2207440
uuacaggugacauugguca

SEQ ID NO: 2207442 - RNA, 19 nt, Artificial Sequence
  Description of Artificial Sequence: Synthetic oligonucleotide
  Sense strand starting at position 1231 of SEQ ID NO: 1883652
ggaaauagucugugguuaa

SEQ ID NO: 2207443 - RNA, 19 nt, Artificial Sequence
  Description of Artificial Sequence: Synthetic oligonucleotide
  Antisense strand to SEQ ID NO: 2207442
uuaaccacagacuauuucc

SEQ ID NO: 2207444 - RNA, 19 nt, Artificial Sequence
  Description of Artificial Sequence: Synthetic oligonucleotide
  Sense strand starting at position 1230 of SEQ ID NO: 1883652
gggaaauagucugugguua

SEQ ID NO: 2207445 - RNA, 19 nt, Artificial Sequence
  Description of Artificial Sequence: Synthetic oligonucleotide
  Antisense strand to SEQ ID NO: 2207444
uaaccacagacuauuuccc

SEQ ID NO: 2207446 - RNA, 19 nt, Artificial Sequence
  Description of Artificial Sequence: Synthetic oligonucleotide
  Sense strand starting at position 1234 of SEQ ID NO: 1883652
aauagucugugguuaaaca

SEQ ID NO: 2207447 - RNA, 19 nt, Artificial Sequence
  Description of Artificial Sequence: Synthetic oligonucleotide
  Antisense strand to SEQ ID NO: 2207446
uguuuaaccacagacuauu

SEQ ID NO: 2207448 - RNA, 19 nt, Artificial Sequence
  Description of Artificial Sequence: Synthetic oligonucleotide
  Sense strand starting at position 1229 of SEQ ID NO: 1883652
agggaaauagucugugguu

SEQ ID NO: 2207449 - RNA, 19 nt, Artificial Sequence
  Description of Artificial Sequence: Synthetic oligonucleotide
  Antisense strand to SEQ ID NO: 2207448
aaccacagacuauuucccu

SEQ ID NO: 2207450 - RNA, 19 nt, Artificial Sequence
  Description of Artificial Sequence: Synthetic oligonucleotide
  Sense strand starting at position 2649 of SEQ ID NO: 1883653
auaguaaucggcgugcaca

SEQ ID NO: 2207451 - RNA, 19 nt, Artificial Sequence
  Description of Artificial Sequence: Synthetic oligonucleotide
  Antisense strand to SEQ ID NO: 2207450
ugugcacgccgauuacuau

SEQ ID NO: 2207452 - RNA, 19 nt, Artificial Sequence
  Description of Artificial Sequence: Synthetic oligonucleotide
  Sense strand starting at position 3002 of SEQ ID NO: 1883653
cguugugcuaagccuugaa

SEQ ID NO: 2207453 - RNA, 19 nt, Artificial Sequence
  Description of Artificial Sequence: Synthetic oligonucleotide
  Antisense strand to SEQ ID NO: 2207452
uucaaggcuuagcacaacg

SEQ ID NO: 2207454 - RNA, 19 nt, Artificial Sequence
  Description of Artificial Sequence: Synthetic oligonucleotide
  Sense strand starting at position 1668 of SEQ ID NO: 1883653
agugacuuaccagacaugu

SEQ ID NO: 2207455 - RNA, 19 nt, Artificial Sequence
  Description of Artificial Sequence: Synthetic oligonucleotide
  Antisense strand to SEQ ID NO: 2207454
acaugucugguaagucacu

SEQ ID NO: 2207456 - RNA, 19 nt, Artificial Sequence
  Description of Artificial Sequence: Synthetic oligonucleotide
  Sense strand starting at position 2994 of SEQ ID NO: 1883653
gacugucucguugugcuaa

SEQ ID NO: 2207457 - RNA, 19 nt, Artificial Sequence
  Description of Artificial Sequence: Synthetic oligonucleotide
  Antisense strand to SEQ ID NO: 2207456
uuagcacaacgagacaguc

SEQ ID NO: 2207458 - RNA, 19 nt, Artificial Sequence
  Description of Artificial Sequence: Synthetic oligonucleotide
  Sense strand starting at position 3056 of SEQ ID NO: 1883653
uguggagcucaacagauua

SEQ ID NO: 2207459 - RNA, 19 nt, Artificial Sequence
  Description of Artificial Sequence: Synthetic oligonucleotide
  Antisense strand to SEQ ID NO: 2207458
uaaucuguugagcuccaca

SEQ ID NO: 2207460 - RNA, 19 nt, Artificial Sequence
  Description of Artificial Sequence: Synthetic oligonucleotide
  Sense strand starting at position 1004 of SEQ ID NO: 1883653
guuggucgccuggcuaaau

SEQ ID NO: 2207461 - RNA, 19 nt, Artificial Sequence
  Description of Artificial Sequence: Synthetic oligonucleotide
  Antisense strand to SEQ ID NO: 2207460
auuuagccaggcgaccaac

SEQ ID NO: 2207462 - RNA, 19 nt, Artificial Sequence
  Description of Artificial Sequence: Synthetic oligonucleotide
  Sense strand starting at position 3257 of SEQ ID NO: 1883653
agagcuaacaggugauaag

SEQ ID NO: 2207463 - RNA, 19 nt, Artificial Sequence
  Description of Artificial Sequence: Synthetic oligonucleotide
  Antisense strand to SEQ ID NO: 2207462
cuuaucaccuguuagcucu

SEQ ID NO: 2207464 - RNA, 19 nt, Artificial Sequence
  Description of Artificial Sequence: Synthetic oligonucleotide
  Sense strand starting at position 152 of SEQ ID NO: 1883653
uguuauuuauggguguuua

SEQ ID NO: 2207465 - RNA, 19 nt, Artificial Sequence
  Description of Artificial Sequence: Synthetic oligonucleotide
  Antisense strand to SEQ ID NO: 2207464
uaaacacccauaaauaaca

SEQ ID NO: 2207466 - RNA, 19 nt, Artificial Sequence
  Description of Artificial Sequence: Synthetic oligonucleotide
  Sense strand starting at position 2585 of SEQ ID NO: 1883653
ugcgcugcuaauguaauua

SEQ ID NO: 2207467 - RNA, 19 nt, Artificial Sequence
  Description of Artificial Sequence: Synthetic oligonucleotide
  Antisense strand to SEQ ID NO: 2207466
uaauuacauuagcagcgca

SEQ ID NO: 2207468 - RNA, 19 nt, Artificial Sequence
  Description of Artificial Sequence: Synthetic oligonucleotide
  Sense strand starting at position 151 of SEQ ID NO: 1883653
auguuauuuauggguguuu

SEQ ID NO: 2207469 - RNA, 19 nt, Artificial Sequence
  Description of Artificial Sequence: Synthetic oligonucleotide
  Antisense strand to SEQ ID NO: 2207468
aaacacccauaaauaacau

SEQ ID NO: 2207470 - RNA, 19 nt, Artificial Sequence
  Description of Artificial Sequence: Synthetic oligonucleotide
  Sense strand starting at position 153 of SEQ ID NO: 1883653
guuauuuauggguguuuau

SEQ ID NO: 2207471 - RNA, 19 nt, Artificial Sequence
  Description of Artificial Sequence: Synthetic oligonucleotide
  Antisense strand to SEQ ID NO: 2207470
auaaacacccauaaauaac

SEQ ID NO: 2207472 - RNA, 19 nt, Artificial Sequence
  Description of Artificial Sequence: Synthetic oligonucleotide
  Sense strand starting at position 1454 of SEQ ID NO: 1883653
agguuucaggagugaauag

SEQ ID NO: 2207473 - RNA, 19 nt, Artificial Sequence
  Description of Artificial Sequence: Synthetic oligonucleotide
  Antisense strand to SEQ ID NO: 2207472
cuauucacuccugaaaccu

SEQ ID NO: 2207474 - RNA, 19 nt, Artificial Sequence
  Description of Artificial Sequence: Synthetic oligonucleotide
  Sense strand starting at position 3232 of SEQ ID NO: 1883653
ugaggugugaucugaagaa

SEQ ID NO: 2207475 - RNA, 19 nt, Artificial Sequence
  Description of Artificial Sequence: Synthetic oligonucleotide
  Antisense strand to SEQ ID NO: 2207474
uucuucagaucacaccuca

SEQ ID NO: 2207476 - RNA, 19 nt, Artificial Sequence
  Description of Artificial Sequence: Synthetic oligonucleotide
  Sense strand starting at position 1751 of SEQ ID NO: 1883653
aguucuagugacuaacuua

SEQ ID NO: 2207477 - RNA, 19 nt, Artificial Sequence
  Description of Artificial Sequence: Synthetic oligonucleotide
  Antisense strand to SEQ ID NO: 2207476
uaaguuagucacuagaacu

SEQ ID NO: 2207478 - RNA, 19 nt, Artificial Sequence
  Description of Artificial Sequence: Synthetic oligonucleotide
  Sense strand starting at position 3513 of SEQ ID NO: 1883653
acaugauuccuguauguag

SEQ ID NO: 2207479 - RNA, 19 nt, Artificial Sequence
  Description of Artificial Sequence: Synthetic oligonucleotide
  Antisense strand to SEQ ID NO: 2207478
cuacauacaggaaucaugu

SEQ ID NO: 2207480 - RNA, 19 nt, Artificial Sequence
  Description of Artificial Sequence: Synthetic oligonucleotide
  Sense strand starting at position 3544 of SEQ ID NO: 1883653
accaucguccaaugggaaa

SEQ ID NO: 2207481 - RNA, 19 nt, Artificial Sequence
  Description of Artificial Sequence: Synthetic oligonucleotide
  Antisense strand to SEQ ID NO: 2207480
uuucccauuggacgauggu

SEQ ID NO: 2207482 - RNA, 19 nt, Artificial Sequence
  Description of Artificial Sequence: Synthetic oligonucleotide
  Sense strand starting at position 2056 of SEQ ID NO: 1883653
ccaggcauccuggaucuuu

SEQ ID NO: 2207483 - RNA, 19 nt, Artificial Sequence
  Description of Artificial Sequence: Synthetic oligonucleotide
  Antisense strand to SEQ ID NO: 2207482
aaagauccaggaugccugg

SEQ ID NO: 2207484 - RNA, 19 nt, Artificial Sequence
  Description of Artificial Sequence: Synthetic oligonucleotide
  Sense strand starting at position 2589 of SEQ ID NO: 1883653
cugcuaauguaauuaagaa

SEQ ID NO: 2207485 - RNA, 19 nt, Artificial Sequence
  Description of Artificial Sequence: Synthetic oligonucleotide
  Antisense strand to SEQ ID NO: 2207484
uucuuaauuacauuagcag

SEQ ID NO: 2207486 - RNA, 19 nt, Artificial Sequence
  Description of Artificial Sequence: Synthetic oligonucleotide
  Sense strand starting at position 3130 of SEQ ID NO: 1883653
cauuuaauguuacagagag

SEQ ID NO: 2207487 - RNA, 19 nt, Artificial Sequence
  Description of Artificial Sequence: Synthetic oligonucleotide
  Antisense strand to SEQ ID NO: 2207486
cucucuguaacauuaaaug

SEQ ID NO: 2207488 - RNA, 19 nt, Artificial Sequence
  Description of Artificial Sequence: Synthetic oligonucleotide
  Sense strand starting at position 3340 of SEQ ID NO: 1883653
cagcuaauacacgagucua

SEQ ID NO: 2207489 - RNA, 19 nt, Artificial Sequence
  Description of Artificial Sequence: Synthetic oligonucleotide
  Antisense strand to SEQ ID NO: 2207488
uagacucguguauuagcug

SEQ ID NO: 2207490 - RNA, 19 nt, Artificial Sequence
  Description of Artificial Sequence: Synthetic oligonucleotide
  Sense strand starting at position 3907 of SEQ ID NO: 1883653
ugaugaggcugguuucaaa

SEQ ID NO: 2207491 - RNA, 19 nt, Artificial Sequence
  Description of Artificial Sequence: Synthetic oligonucleotide
  Antisense strand to SEQ ID NO: 2207490
uuugaaaccagccucauca

SEQ ID NO: 2207492 - RNA, 19 nt, Artificial Sequence
  Description of Artificial Sequence: Synthetic oligonucleotide
  Sense strand starting at position 3515 of SEQ ID NO: 1883653
augauuccuguauguagga

SEQ ID NO: 2207493 - RNA, 19 nt, Artificial Sequence
  Description of Artificial Sequence: Synthetic oligonucleotide
  Antisense strand to SEQ ID NO: 2207492
uccuacauacaggaaucau

SEQ ID NO: 2207494 - RNA, 19 nt, Artificial Sequence
  Description of Artificial Sequence: Synthetic oligonucleotide
  Sense strand starting at position 2508 of SEQ ID NO: 1883653
ugguacuuagugcaauuau

SEQ ID NO: 2207495 - RNA, 19 nt, Artificial Sequence
  Description of Artificial Sequence: Synthetic oligonucleotide
  Antisense strand to SEQ ID NO: 2207494
auaauugcacuaaguacca

SEQ ID NO: 2207496 - RNA, 19 nt, Artificial Sequence
  Description of Artificial Sequence: Synthetic oligonucleotide
  Sense strand starting at position 954 of SEQ ID NO: 1883653
ccagucagcuucucaaaga

SEQ ID NO: 2207497 - RNA, 19 nt, Artificial Sequence
  Description of Artificial Sequence: Synthetic oligonucleotide
  Antisense strand to SEQ ID NO: 2207496
ucuuugagaagcugacugg

SEQ ID NO: 2207498 - RNA, 19 nt, Artificial Sequence
  Description of Artificial Sequence: Synthetic oligonucleotide
  Sense strand starting at position 1679 of SEQ ID NO: 1883653
agacaugugucagcuuaaa

SEQ ID NO: 2207499 - RNA, 19 nt, Artificial Sequence
  Description of Artificial Sequence: Synthetic oligonucleotide
  Antisense strand to SEQ ID NO: 2207498
uuuaagcugacacaugucu

SEQ ID NO: 2207500 - RNA, 19 nt, Artificial Sequence
  Description of Artificial Sequence: Synthetic oligonucleotide
  Sense strand starting at position 988 of SEQ ID NO: 1883653
ugugcugggagguauaguu

SEQ ID NO: 2207501 - RNA, 19 nt, Artificial Sequence
  Description of Artificial Sequence: Synthetic oligonucleotide
  Antisense strand to SEQ ID NO: 2207500
aacuauaccucccagcaca

SEQ ID NO: 2207502 - RNA, 19 nt, Artificial Sequence
  Description of Artificial Sequence: Synthetic oligonucleotide
  Sense strand starting at position 1176 of SEQ ID NO: 1883653
gugagagucuguuucagau

SEQ ID NO: 2207503 - RNA, 19 nt, Artificial Sequence
  Description of Artificial Sequence: Synthetic oligonucleotide
  Antisense strand to SEQ ID NO: 2207502
aucugaaacagacucucac

SEQ ID NO: 2207504 - RNA, 19 nt, Artificial Sequence
  Description of Artificial Sequence: Synthetic oligonucleotide
  Sense strand starting at position 3145 of SEQ ID NO: 1883653
agagagguggguuguguua

SEQ ID NO: 2207505 - RNA, 19 nt, Artificial Sequence
  Description of Artificial Sequence: Synthetic oligonucleotide
  Antisense strand to SEQ ID NO: 2207504
uaacacaacccaccucucu

SEQ ID NO: 2207506 - RNA, 19 nt, Artificial Sequence
  Description of Artificial Sequence: Synthetic oligonucleotide
  Sense strand starting at position 1402 of SEQ ID NO: 1883653
uuuauucuguggguuuaua

SEQ ID NO: 2207507 - RNA, 19 nt, Artificial Sequence
  Description of Artificial Sequence: Synthetic oligonucleotide
  Antisense strand to SEQ ID NO: 2207506
uauaaacccacagaauaaa

SEQ ID NO: 2207508 - RNA, 19 nt, Artificial Sequence
  Description of Artificial Sequence: Synthetic oligonucleotide
  Sense strand starting at position 3932 of SEQ ID NO: 1883653
accucaaguuauccacgua

SEQ ID NO: 2207509 - RNA, 19 nt, Artificial Sequence
  Description of Artificial Sequence: Synthetic oligonucleotide
  Antisense strand to SEQ ID NO: 2207508
uacguggauaacuugaggu

SEQ ID NO: 2207510 - RNA, 19 nt, Artificial Sequence
  Description of Artificial Sequence: Synthetic oligonucleotide
  Sense strand starting at position 3441 of SEQ ID NO: 1883653
gugguauuggugcaagggu

SEQ ID NO: 2207511 - RNA, 19 nt, Artificial Sequence
  Description of Artificial Sequence: Synthetic oligonucleotide
  Antisense strand to SEQ ID NO: 2207510
acccuugcaccaauaccac

SEQ ID NO: 2207512 - RNA, 19 nt, Artificial Sequence
  Description of Artificial Sequence: Synthetic oligonucleotide
  Sense strand starting at position 1401 of SEQ ID NO: 1883653
cuuuauucuguggguuuau

SEQ ID NO: 2207513 - RNA, 19 nt, Artificial Sequence
  Description of Artificial Sequence: Synthetic oligonucleotide
  Antisense strand to SEQ ID NO: 2207512
auaaacccacagaauaaag

SEQ ID NO: 2207514 - RNA, 19 nt, Artificial Sequence
  Description of Artificial Sequence: Synthetic oligonucleotide
  Sense strand starting at position 3935 of SEQ ID NO: 1883653
ucaaguuauccacguaccu

SEQ ID NO: 2207515 - RNA, 19 nt, Artificial Sequence
  Description of Artificial Sequence: Synthetic oligonucleotide
  Antisense strand to SEQ ID NO: 2207514
agguacguggauaacuuga

SEQ ID NO: 2207516 - RNA, 19 nt, Artificial Sequence
  Description of Artificial Sequence: Synthetic oligonucleotide
  Sense strand starting at position 1398 of SEQ ID NO: 1883653
ucucuuuauucuguggguu

SEQ ID NO: 2207517 - RNA, 19 nt, Artificial Sequence
  Description of Artificial Sequence: Synthetic oligonucleotide
  Antisense strand to SEQ ID NO: 2207516
aacccacagaauaaagaga

SEQ ID NO: 2207518 - RNA, 19 nt, Artificial Sequence
  Description of Artificial Sequence: Synthetic oligonucleotide
  Sense strand starting at position 2854 of SEQ ID NO: 1883653
uggguucuguuauugcaca

SEQ ID NO: 2207519 - RNA, 19 nt, Artificial Sequence
  Description of Artificial Sequence: Synthetic oligonucleotide
  Antisense strand to SEQ ID NO: 2207518
ugugcaauaacagaaccca

SEQ ID NO: 2207520 - RNA, 19 nt, Artificial Sequence
  Description of Artificial Sequence: Synthetic oligonucleotide
  Sense strand starting at position 1399 of SEQ ID NO: 1883653
cucuuuauucuguggguuu

SEQ ID NO: 2207521 - RNA, 19 nt, Artificial Sequence
  Description of Artificial Sequence: Synthetic oligonucleotide
  Antisense strand to SEQ ID NO: 2207520
aaacccacagaauaaagag

SEQ ID NO: 2207522 - RNA, 19 nt, Artificial Sequence
  Description of Artificial Sequence: Synthetic oligonucleotide
  Sense strand starting at position 3483 of SEQ ID NO: 1883653
aggagaaagucuggaaaca

SEQ ID NO: 2207523 - RNA, 19 nt, Artificial Sequence
  Description of Artificial Sequence: Synthetic oligonucleotide
  Antisense strand to SEQ ID NO: 2207522
uguuuccagacuuucuccu

SEQ ID NO: 2207524 - RNA, 19 nt, Artificial Sequence
  Description of Artificial Sequence: Synthetic oligonucleotide
  Sense strand starting at position 1782 of SEQ ID NO: 1883653
gcugcugcuccugaaucuu

SEQ ID NO: 2207525 - RNA, 19 nt, Artificial Sequence
  Description of Artificial Sequence: Synthetic oligonucleotide
  Antisense strand to SEQ ID NO: 2207524
aagauucaggagcagcagc

SEQ ID NO: 2207526 - RNA, 19 nt, Artificial Sequence
  Description of Artificial Sequence: Synthetic oligonucleotide
  Sense strand starting at position 3206 of SEQ ID NO: 1883653
gaaagcuucucugaggaaa

SEQ ID NO: 2207527 - RNA, 19 nt, Artificial Sequence
  Description of Artificial Sequence: Synthetic oligonucleotide
  Antisense strand to SEQ ID NO: 2207526
uuuccucagagaagcuuuc

SEQ ID NO: 2207528 - RNA, 19 nt, Artificial Sequence
  Description of Artificial Sequence: Synthetic oligonucleotide
  Sense strand starting at position 3586 of SEQ ID NO: 1883653
ugcuggguccguuggagau

SEQ ID NO: 2207529 - RNA, 19 nt, Artificial Sequence
  Description of Artificial Sequence: Synthetic oligonucleotide
  Antisense strand to SEQ ID NO: 2207528
aucuccaacggacccagca

SEQ ID NO: 2207530 - RNA, 19 nt, Artificial Sequence
  Description of Artificial Sequence: Synthetic oligonucleotide
  Sense strand starting at position 1993 of SEQ ID NO: 1883654
uuuccauuggagcaaacau

SEQ ID NO: 2207531 - RNA, 19 nt, Artificial Sequence
  Description of Artificial Sequence: Synthetic oligonucleotide
  Antisense strand to SEQ ID NO: 2207530
auguuugcuccaauggaaa

SEQ ID NO: 2207532 - RNA, 19 nt, Artificial Sequence
  Description of Artificial Sequence: Synthetic oligonucleotide
  Sense strand starting at position 2951 of SEQ ID NO: 1883654
cucgauuucuaagugaagc

SEQ ID NO: 2207533 - RNA, 19 nt, Artificial Sequence
  Description of Artificial Sequence: Synthetic oligonucleotide
  Antisense strand to SEQ ID NO: 2207532
gcuucacuuagaaaucgag

SEQ ID NO: 2207534 - RNA, 19 nt, Artificial Sequence
  Description of Artificial Sequence: Synthetic oligonucleotide
  Sense strand starting at position 2191 of SEQ ID NO: 1883654
agggaacuuuaugugacua

SEQ ID NO: 2207535 - RNA, 19 nt, Artificial Sequence
  Description of Artificial Sequence: Synthetic oligonucleotide
  Antisense strand to SEQ ID NO: 2207534
uagucacauaaaguucccu

SEQ ID NO: 2207536 - RNA, 19 nt, Artificial Sequence
  Description of Artificial Sequence: Synthetic oligonucleotide
  Sense strand starting at position 3882 of SEQ ID NO: 1883654
cugaaagaucagggcaauc

SEQ ID NO: 2207537 - RNA, 19 nt, Artificial Sequence
  Description of Artificial Sequence: Synthetic oligonucleotide
  Antisense strand to SEQ ID NO: 2207536
gauugcccugaucuuucag

SEQ ID NO: 2207538 - RNA, 19 nt, Artificial Sequence
  Description of Artificial Sequence: Synthetic oligonucleotide
  Sense strand starting at position 2039 of SEQ ID NO: 1883654
ugauuccugaguuacgaaa

SEQ ID NO: 2207539 - RNA, 19 nt, Artificial Sequence
  Description of Artificial Sequence: Synthetic oligonucleotide
  Antisense strand to SEQ ID NO: 2207538
uuucguaacucaggaauca

SEQ ID NO: 2207540 - RNA, 19 nt, Artificial Sequence
  Description of Artificial Sequence: Synthetic oligonucleotide
  Sense strand starting at position 2229 of SEQ ID NO: 1883654
cuaagaucaugggccauaa

SEQ ID NO: 2207541 - RNA, 19 nt, Artificial Sequence
  Description of Artificial Sequence: Synthetic oligonucleotide
  Antisense strand to SEQ ID NO: 2207540
uuauggcccaugaucuuag

SEQ ID NO: 2207542 - RNA, 19 nt, Artificial Sequence
  Description of Artificial Sequence: Synthetic oligonucleotide
  Sense strand starting at position 2205 of SEQ ID NO: 1883654
gacuacuguuagguggaaa

SEQ ID NO: 2207543 - RNA, 19 nt, Artificial Sequence
  Description of Artificial Sequence: Synthetic oligonucleotide
  Antisense strand to SEQ ID NO: 2207542
uuuccaccuaacaguaguc

SEQ ID NO: 2207544 - RNA, 19 nt, Artificial Sequence
  Description of Artificial Sequence: Synthetic oligonucleotide
  Sense strand starting at position 2192 of SEQ ID NO: 1883654
gggaacuuuaugugacuac

SEQ ID NO: 2207545 - RNA, 19 nt, Artificial Sequence
  Description of Artificial Sequence: Synthetic oligonucleotide
  Antisense strand to SEQ ID NO: 2207544
guagucacauaaaguuccc

SEQ ID NO: 2207546 - RNA, 19 nt, Artificial Sequence
  Description of Artificial Sequence: Synthetic oligonucleotide
  Sense strand starting at position 2115 of SEQ ID NO: 1883654
gcaccuuauucuguuauuu

SEQ ID NO: 2207547 - RNA, 19 nt, Artificial Sequence
  Description of Artificial Sequence: Synthetic oligonucleotide
  Antisense strand to SEQ ID NO: 2207546
aaauaacagaauaaggugc

SEQ ID NO: 2207548 - RNA, 19 nt, Artificial Sequence
  Description of Artificial Sequence: Synthetic oligonucleotide
  Sense strand starting at position 253 of SEQ ID NO: 1883654
gcuuucucgccuguaaagu

SEQ ID NO: 2207549 - RNA, 19 nt, Artificial Sequence
  Description of Artificial Sequence: Synthetic oligonucleotide
  Antisense strand to SEQ ID NO: 2207548
acuuuacaggcgagaaagc

SEQ ID NO: 2207550 - RNA, 19 nt, Artificial Sequence
  Description of Artificial Sequence: Synthetic oligonucleotide
  Sense strand starting at position 803 of SEQ ID NO: 1883654
ggcccucgucugcuaguua

SEQ ID NO: 2207551 - RNA, 19 nt, Artificial Sequence
  Description of Artificial Sequence: Synthetic oligonucleotide
  Antisense strand to SEQ ID NO: 2207550
uaacuagcagacgagggcc

SEQ ID NO: 2207552 - RNA, 19 nt, Artificial Sequence
  Description of Artificial Sequence: Synthetic oligonucleotide
  Sense strand starting at position 2124 of SEQ ID NO: 1883654
ucuguuauuugcucucuau

SEQ ID NO: 2207553 - RNA, 19 nt, Artificial Sequence
  Description of Artificial Sequence: Synthetic oligonucleotide
  Antisense strand to SEQ ID NO: 2207552
auagagagcaaauaacaga

SEQ ID NO: 2207554 - RNA, 19 nt, Artificial Sequence
  Description of Artificial Sequence: Synthetic oligonucleotide
  Sense strand starting at position 2196 of SEQ ID NO: 1883654
acuuuaugugacuacuguu

SEQ ID NO: 2207555 - RNA, 19 nt, Artificial Sequence
  Description of Artificial Sequence: Synthetic oligonucleotide
  Antisense strand to SEQ ID NO: 2207554
aacaguagucacauaaagu

SEQ ID NO: 2207556 - RNA, 19 nt, Artificial Sequence
  Description of Artificial Sequence: Synthetic oligonucleotide
  Sense strand starting at position 3296 of SEQ ID NO: 1883654
gucacuuggccucaagacu

SEQ ID NO: 2207557 - RNA, 19 nt, Artificial Sequence
  Description of Artificial Sequence: Synthetic oligonucleotide
  Antisense strand to SEQ ID NO: 2207556
agucuugaggccaagugac

SEQ ID NO: 2207558 - RNA, 19 nt, Artificial Sequence
  Description of Artificial Sequence: Synthetic oligonucleotide
  Sense strand starting at position 2164 of SEQ ID NO: 1883654
gcuauuacuuagguaaaug

SEQ ID NO: 2207559 - RNA, 19 nt, Artificial Sequence
  Description of Artificial Sequence: Synthetic oligonucleotide
  Antisense strand to SEQ ID NO: 2207558
cauuuaccuaaguaauagc

SEQ ID NO: 2207560 - RNA, 19 nt, Artificial Sequence
  Description of Artificial Sequence: Synthetic oligonucleotide
  Sense strand starting at position 2295 of SEQ ID NO: 1883654
aggaaauucuagcuggcua

SEQ ID NO: 2207561 - RNA, 19 nt, Artificial Sequence
  Description of Artificial Sequence: Synthetic oligonucleotide
  Antisense strand to SEQ ID NO: 2207560
uagccagcuagaauuuccu

SEQ ID NO: 2207562 - RNA, 19 nt, Artificial Sequence
  Description of Artificial Sequence: Synthetic oligonucleotide
  Sense strand starting at position 550 of SEQ ID NO: 1883654
ugcccaggaacuugucaga

SEQ ID NO: 2207563 - RNA, 19 nt, Artificial Sequence
  Description of Artificial Sequence: Synthetic oligonucleotide
  Antisense strand to SEQ ID NO: 2207562
ucugacaaguuccugggca

SEQ ID NO: 2207564 - RNA, 19 nt, Artificial Sequence
  Description of Artificial Sequence: Synthetic oligonucleotide
  Sense strand starting at position 2884 of SEQ ID NO: 1883654
ccaugaugucuguaguacu

SEQ ID NO: 2207565 - RNA, 19 nt, Artificial Sequence
  Description of Artificial Sequence: Synthetic oligonucleotide
  Antisense strand to SEQ ID NO: 2207564
aguacuacagacaucaugg

SEQ ID NO: 2207566 - RNA, 19 nt, Artificial Sequence
  Description of Artificial Sequence: Synthetic oligonucleotide
  Sense strand starting at position 587 of SEQ ID NO: 1883654
uggccaguccugggaauca

SEQ ID NO: 2207567 - RNA, 19 nt, Artificial Sequence
  Description of Artificial Sequence: Synthetic oligonucleotide
  Antisense strand to SEQ ID NO: 2207566
ugauucccaggacuggcca

SEQ ID NO: 2207568 - RNA, 19 nt, Artificial Sequence
  Description of Artificial Sequence: Synthetic oligonucleotide
  Sense strand starting at position 2037 of SEQ ID NO: 1883654
ccugauuccugaguuacga

SEQ ID NO: 2207569 - RNA, 19 nt, Artificial Sequence
  Description of Artificial Sequence: Synthetic oligonucleotide
  Antisense strand to SEQ ID NO: 2207568
ucguaacucaggaaucagg

SEQ ID NO: 2207570 - RNA, 19 nt, Artificial Sequence
  Description of Artificial Sequence: Synthetic oligonucleotide
  Sense strand starting at position 2296 of SEQ ID NO: 1883654
ggaaauucuagcuggcuau

SEQ ID NO: 2207571 - RNA, 19 nt, Artificial Sequence
  Description of Artificial Sequence: Synthetic oligonucleotide
  Antisense strand to SEQ ID NO: 2207570
auagccagcuagaauuucc

SEQ ID NO: 2207572 - RNA, 19 nt, Artificial Sequence
  Description of Artificial Sequence: Synthetic oligonucleotide
  Sense strand starting at position 2882 of SEQ ID NO: 1883654
gaccaugaugucuguagua

SEQ ID NO: 2207573 - RNA, 19 nt, Artificial Sequence
  Description of Artificial Sequence: Synthetic oligonucleotide
  Antisense strand to SEQ ID NO: 2207572
uacuacagacaucaugguc

SEQ ID NO: 2207574 - RNA, 19 nt, Artificial Sequence
  Description of Artificial Sequence: Synthetic oligonucleotide
  Sense strand starting at position 2881 of SEQ ID NO: 1883654
ggaccaugaugucuguagu

SEQ ID NO: 2207575 - RNA, 19 nt, Artificial Sequence
  Description of Artificial Sequence: Synthetic oligonucleotide
  Antisense strand to SEQ ID NO: 2207574
acuacagacaucauggucc

SEQ ID NO: 2207576 - RNA, 19 nt, Artificial Sequence
  Description of Artificial Sequence: Synthetic oligonucleotide
  Sense strand starting at position 3017 of SEQ ID NO: 1883654
gagaaaugcaguuguaagu

SEQ ID NO: 2207577 - RNA, 19 nt, Artificial Sequence
  Description of Artificial Sequence: Synthetic oligonucleotide
  Antisense strand to SEQ ID NO: 2207576
acuuacaacugcauuucuc

SEQ ID NO: 2207578 - RNA, 19 nt, Artificial Sequence
  Description of Artificial Sequence: Synthetic oligonucleotide
  Sense strand starting at position 3115 of SEQ ID NO: 1883654
cccaaauuguccuccaggu

SEQ ID NO: 2207579 - RNA, 19 nt, Artificial Sequence
  Description of Artificial Sequence: Synthetic oligonucleotide
  Antisense strand to SEQ ID NO: 2207578
accuggaggacaauuuggg

SEQ ID NO: 2207580 - RNA, 19 nt, Artificial Sequence
  Description of Artificial Sequence: Synthetic oligonucleotide
  Sense strand starting at position 770 of SEQ ID NO: 1883654
gcacuaaacgcuggacaau

SEQ ID NO: 2207581 - RNA, 19 nt, Artificial Sequence
  Description of Artificial Sequence: Synthetic oligonucleotide
  Antisense strand to SEQ ID NO: 2207580
auuguccagcguuuagugc

SEQ ID NO: 2207582 - RNA, 19 nt, Artificial Sequence
  Description of Artificial Sequence: Synthetic oligonucleotide
  Sense strand starting at position 3274 of SEQ ID NO: 1883654
guaugucacagguggcaaa

SEQ ID NO: 2207583 - RNA, 19 nt, Artificial Sequence
  Description of Artificial Sequence: Synthetic oligonucleotide
  Antisense strand to SEQ ID NO: 2207582
uuugccaccugugacauac

SEQ ID NO: 2207584 - RNA, 19 nt, Artificial Sequence
  Description of Artificial Sequence: Synthetic oligonucleotide
  Sense strand starting at position 2423 of SEQ ID NO: 1883654
gaggcugugugaucccuga

SEQ ID NO: 2207585 - RNA, 19 nt, Artificial Sequence
  Description of Artificial Sequence: Synthetic oligonucleotide
  Antisense strand to SEQ ID NO: 2207584
ucagggaucacacagccuc

SEQ ID NO: 2207586 - RNA, 19 nt, Artificial Sequence
  Description of Artificial Sequence: Synthetic oligonucleotide
  Sense strand starting at position 3793 of SEQ ID NO: 1883654
uugacuccucucggucuua

SEQ ID NO: 2207587 - RNA, 19 nt, Artificial Sequence
  Description of Artificial Sequence: Synthetic oligonucleotide
  Antisense strand to SEQ ID NO: 2207586
uaagaccgagaggagucaa

SEQ ID NO: 2207588 - RNA, 19 nt, Artificial Sequence
  Description of Artificial Sequence: Synthetic oligonucleotide
  Sense strand starting at position 2948 of SEQ ID NO: 1883654
ccucucgauuucuaaguga

SEQ ID NO: 2207589 - RNA, 19 nt, Artificial Sequence
  Description of Artificial Sequence: Synthetic oligonucleotide
  Antisense strand to SEQ ID NO: 2207588
ucacuuagaaaucgagagg

SEQ ID NO: 2207590 - RNA, 19 nt, Artificial Sequence
  Description of Artificial Sequence: Synthetic oligonucleotide
  Sense strand starting at position 2973 of SEQ ID NO: 1883654
agaguuggaucacaauuau

SEQ ID NO: 2207591 - RNA, 19 nt, Artificial Sequence
  Description of Artificial Sequence: Synthetic oligonucleotide
  Antisense strand to SEQ ID NO: 2207590
auaauugugauccaacucu

SEQ ID NO: 2207592 - RNA, 19 nt, Artificial Sequence
  Description of Artificial Sequence: Synthetic oligonucleotide
  Sense strand starting at position 555 of SEQ ID NO: 1883654
aggaacuugucagaaauuc

SEQ ID NO: 2207593 - RNA, 19 nt, Artificial Sequence
  Description of Artificial Sequence: Synthetic oligonucleotide
  Antisense strand to SEQ ID NO: 2207592
gaauuucugacaaguuccu

SEQ ID NO: 2207594 - RNA, 19 nt, Artificial Sequence
  Description of Artificial Sequence: Synthetic oligonucleotide
  Sense strand starting at position 26 of SEQ ID NO: 1883654
gccugauuccugggcccuu

SEQ ID NO: 2207595 - RNA, 19 nt, Artificial Sequence
  Description of Artificial Sequence: Synthetic oligonucleotide
  Antisense strand to SEQ ID NO: 2207594
aagggcccaggaaucaggc

SEQ ID NO: 2207596 - RNA, 19 nt, Artificial Sequence
  Description of Artificial Sequence: Synthetic oligonucleotide
  Sense strand starting at position 807 of SEQ ID NO: 1883654
cucgucugcuaguuaacaa

SEQ ID NO: 2207597 - RNA, 19 nt, Artificial Sequence
  Description of Artificial Sequence: Synthetic oligonucleotide
  Antisense strand to SEQ ID NO: 2207596
uuguuaacuagcagacgag

SEQ ID NO: 2207598 - RNA, 19 nt, Artificial Sequence
  Description of Artificial Sequence: Synthetic oligonucleotide
  Sense strand starting at position 2416 of SEQ ID NO: 1883654
gugguaugaggcuguguga

SEQ ID NO: 2207599 - RNA, 19 nt, Artificial Sequence
  Description of Artificial Sequence: Synthetic oligonucleotide
  Antisense strand to SEQ ID NO: 2207598
ucacacagccucauaccac

SEQ ID NO: 2207600 - RNA, 19 nt, Artificial Sequence
  Description of Artificial Sequence: Synthetic oligonucleotide
  Sense strand starting at position 2427 of SEQ ID NO: 1883654
cugugugaucccugacguc

SEQ ID NO: 2207601 - RNA, 19 nt, Artificial Sequence
  Description of Artificial Sequence: Synthetic oligonucleotide
  Antisense strand to SEQ ID NO: 2207600
gacgucagggaucacacag

SEQ ID NO: 2207602 - RNA, 19 nt, Artificial Sequence
  Description of Artificial Sequence: Synthetic oligonucleotide
  Sense strand starting at position 252 of SEQ ID NO: 1883654
agcuuucucgccuguaaag

SEQ ID NO: 2207603 - RNA, 19 nt, Artificial Sequence
  Description of Artificial Sequence: Synthetic oligonucleotide
  Antisense strand to SEQ ID NO: 2207602
cuuuacaggcgagaaagcu

SEQ ID NO: 2207604 - RNA, 19 nt, Artificial Sequence
  Description of Artificial Sequence: Synthetic oligonucleotide
  Sense strand starting at position 2193 of SEQ ID NO: 1883654
ggaacuuuaugugacuacu

SEQ ID NO: 2207605 - RNA, 19 nt, Artificial Sequence
  Description of Artificial Sequence: Synthetic oligonucleotide
  Antisense strand to SEQ ID NO: 2207604
aguagucacauaaaguucc

SEQ ID NO: 2207606 - RNA, 19 nt, Artificial Sequence
  Description of Artificial Sequence: Synthetic oligonucleotide
  Sense strand starting at position 2968 of SEQ ID NO: 1883654
gccagagaguuggaucaca

SEQ ID NO: 2207607 - RNA, 19 nt, Artificial Sequence
  Description of Artificial Sequence: Synthetic oligonucleotide
  Antisense strand to SEQ ID NO: 2207606
ugugauccaacucucuggc

SEQ ID NO: 2207608 - RNA, 19 nt, Artificial Sequence
  Description of Artificial Sequence: Synthetic oligonucleotide
  Sense strand starting at position 1523 of SEQ ID NO: 1883654
ggucauugcuccgcaccua

SEQ ID NO: 2207609 - RNA, 19 nt, Artificial Sequence
  Description of Artificial Sequence: Synthetic oligonucleotide
  Antisense strand to SEQ ID NO: 2207608
uaggugcggagcaaugacc

SEQ ID NO: 2207610 - RNA, 19 nt, Artificial Sequence
  Description of Artificial Sequence: Synthetic oligonucleotide
  Sense strand starting at position 962 of SEQ ID NO: 1883655
ugaguaguuguauagagaa

SEQ ID NO: 2207611 - RNA, 19 nt, Artificial Sequence
  Description of Artificial Sequence: Synthetic oligonucleotide
  Antisense strand to SEQ ID NO: 2207610
uucucuauacaacuacuca

SEQ ID NO: 2207612 - RNA, 19 nt, Artificial Sequence
  Description of Artificial Sequence: Synthetic oligonucleotide
  Sense strand starting at position 2223 of SEQ ID NO: 1883655
aggugaaccguccagagaa

SEQ ID NO: 2207613 - RNA, 19 nt, Artificial Sequence
  Description of Artificial Sequence: Synthetic oligonucleotide
  Antisense strand to SEQ ID NO: 2207612
uucucuggacgguucaccu

SEQ ID NO: 2207614 - RNA, 19 nt, Artificial Sequence
  Description of Artificial Sequence: Synthetic oligonucleotide
  Sense strand starting at position 1998 of SEQ ID NO: 1883655
gcauguugcgagcuaauua

SEQ ID NO: 2207615 - RNA, 19 nt, Artificial Sequence
  Description of Artificial Sequence: Synthetic oligonucleotide
  Antisense strand to SEQ ID NO: 2207614
uaauuagcucgcaacaugc

SEQ ID NO: 2207616 - RNA, 19 nt, Artificial Sequence
  Description of Artificial Sequence: Synthetic oligonucleotide
  Sense strand starting at position 3252 of SEQ ID NO: 1883655
auugguugucggcugaguu

SEQ ID NO: 2207617 - RNA, 19 nt, Artificial Sequence
  Description of Artificial Sequence: Synthetic oligonucleotide
  Antisense strand to SEQ ID NO: 2207616
aacucagccgacaaccaau

SEQ ID NO: 2207618 - RNA, 19 nt, Artificial Sequence
  Description of Artificial Sequence: Synthetic oligonucleotide
  Sense strand starting at position 3539 of SEQ ID NO: 1883655
uagugacuacauggauaca

SEQ ID NO: 2207619 - RNA, 19 nt, Artificial Sequence
  Description of Artificial Sequence: Synthetic oligonucleotide
  Antisense strand to SEQ ID NO: 2207618
uguauccauguagucacua

SEQ ID NO: 2207620 - RNA, 19 nt, Artificial Sequence
  Description of Artificial Sequence: Synthetic oligonucleotide
  Sense strand starting at position 1261 of SEQ ID NO: 1883655
ugagucauauacuuggaga

SEQ ID NO: 2207621 - RNA, 19 nt, Artificial Sequence
  Description of Artificial Sequence: Synthetic oligonucleotide
  Antisense strand to SEQ ID NO: 2207620
ucuccaaguauaugacuca

SEQ ID NO: 2207622 - RNA, 19 nt, Artificial Sequence
  Description of Artificial Sequence: Synthetic oligonucleotide
  Sense strand starting at position 3003 of SEQ ID NO: 1883655
aagggagugucaucauaag

SEQ ID NO: 2207623 - RNA, 19 nt, Artificial Sequence
  Description of Artificial Sequence: Synthetic oligonucleotide
  Antisense strand to SEQ ID NO: 2207622
cuuaugaugacacucccuu

SEQ ID NO: 2207624 - RNA, 19 nt, Artificial Sequence
  Description of Artificial Sequence: Synthetic oligonucleotide
  Sense strand starting at position 1328 of SEQ ID NO: 1883655
accugugagccugacaaga

SEQ ID NO: 2207625 - RNA, 19 nt, Artificial Sequence
  Description of Artificial Sequence: Synthetic oligonucleotide
  Antisense strand to SEQ ID NO: 2207624
ucuugucaggcucacaggu

SEQ ID NO: 2207626 - RNA, 19 nt, Artificial Sequence
  Description of Artificial Sequence: Synthetic oligonucleotide
  Sense strand starting at position 1765 of SEQ ID NO: 1883655
ugacauaggucucuauaaa

SEQ ID NO: 2207627 - RNA, 19 nt, Artificial Sequence
  Description of Artificial Sequence: Synthetic oligonucleotide
  Antisense strand to SEQ ID NO: 2207626
uuuauagagaccuauguca

SEQ ID NO: 2207628 - RNA, 19 nt, Artificial Sequence
  Description of Artificial Sequence: Synthetic oligonucleotide
  Sense strand starting at position 142 of SEQ ID NO: 1883655
uuaggacucugaucuuaac

SEQ ID NO: 2207629 - RNA, 19 nt, Artificial Sequence
  Description of Artificial Sequence: Synthetic oligonucleotide
  Antisense strand to SEQ ID NO: 2207628
guuaagaucagaguccuaa

SEQ ID NO: 2207630 - RNA, 19 nt, Artificial Sequence
  Description of Artificial Sequence: Synthetic oligonucleotide
  Sense strand starting at position 1151 of SEQ ID NO: 1883655
aucauuacugagcaaaguu

SEQ ID NO: 2207631 - RNA, 19 nt, Artificial Sequence
  Description of Artificial Sequence: Synthetic oligonucleotide
  Antisense strand to SEQ ID NO: 2207630
aacuuugcucaguaaugau

SEQ ID NO: 2207632 - RNA, 19 nt, Artificial Sequence
  Description of Artificial Sequence: Synthetic oligonucleotide
  Sense strand starting at position 2601 of SEQ ID NO: 1883655
uguguagacagugaucaag

SEQ ID NO: 2207633 - RNA, 19 nt, Artificial Sequence
  Description of Artificial Sequence: Synthetic oligonucleotide
  Antisense strand to SEQ ID NO: 2207632
cuugaucacugucuacaca

SEQ ID NO: 2207634 - RNA, 19 nt, Artificial Sequence
  Description of Artificial Sequence: Synthetic oligonucleotide
  Sense strand starting at position 950 of SEQ ID NO: 1883655
aagugaaagaguugaguag

SEQ ID NO: 2207635 - RNA, 19 nt, Artificial Sequence
  Description of Artificial Sequence: Synthetic oligonucleotide
  Antisense strand to SEQ ID NO: 2207634
cuacucaacucuuucacuu

SEQ ID NO: 2207636 - RNA, 19 nt, Artificial Sequence
  Description of Artificial Sequence: Synthetic oligonucleotide
  Sense strand starting at position 2387 of SEQ ID NO: 1883655
aacagaauggaacgucuua

SEQ ID NO: 2207637 - RNA, 19 nt, Artificial Sequence
  Description of Artificial Sequence: Synthetic oligonucleotide
  Antisense strand to SEQ ID NO: 2207636
uaagacguuccauucuguu

SEQ ID NO: 2207638 - RNA, 19 nt, Artificial Sequence
  Description of Artificial Sequence: Synthetic oligonucleotide
  Sense strand starting at position 1505 of SEQ ID NO: 1883655
guauaaguagcugaaacau

SEQ ID NO: 2207639 - RNA, 19 nt, Artificial Sequence
  Description of Artificial Sequence: Synthetic oligonucleotide
  Antisense strand to SEQ ID NO: 2207638
auguuucagcuacuuauac

SEQ ID NO: 2207640 - RNA, 19 nt, Artificial Sequence
  Description of Artificial Sequence: Synthetic oligonucleotide
  Sense strand starting at position 951 of SEQ ID NO: 1883655
agugaaagaguugaguagu

SEQ ID NO: 2207641 - RNA, 19 nt, Artificial Sequence
  Description of Artificial Sequence: Synthetic oligonucleotide
  Antisense strand to SEQ ID NO: 2207640
acuacucaacucuuucacu

SEQ ID NO: 2207642 - RNA, 19 nt, Artificial Sequence
  Description of Artificial Sequence: Synthetic oligonucleotide
  Sense strand starting at position 946 of SEQ ID NO: 1883655
guguaagugaaagaguuga

SEQ ID NO: 2207643 - RNA, 19 nt, Artificial Sequence
  Description of Artificial Sequence: Synthetic oligonucleotide
  Antisense strand to SEQ ID NO: 2207642
ucaacucuuucacuuacac

SEQ ID NO: 2207644 - RNA, 19 nt, Artificial Sequence
  Description of Artificial Sequence: Synthetic oligonucleotide
  Sense strand starting at position 855 of SEQ ID NO: 1883655
acuagaaguagaggcauua

SEQ ID NO: 2207645 - RNA, 19 nt, Artificial Sequence
  Description of Artificial Sequence: Synthetic oligonucleotide
  Antisense strand to SEQ ID NO: 2207644
uaaugccucuacuucuagu

SEQ ID NO: 2207646 - RNA, 19 nt, Artificial Sequence
  Description of Artificial Sequence: Synthetic oligonucleotide
  Sense strand starting at position 2507 of SEQ ID NO: 1883655
aucccuuaguaaucugaga

SEQ ID NO: 2207647 - RNA, 19 nt, Artificial Sequence
  Description of Artificial Sequence: Synthetic oligonucleotide
  Antisense strand to SEQ ID NO: 2207646
ucucagauuacuaagggau

SEQ ID NO: 2207648 - RNA, 19 nt, Artificial Sequence
  Description of Artificial Sequence: Synthetic oligonucleotide
  Sense strand starting at position 82 of SEQ ID NO: 1883655
agaccuuguuauucuaaag

SEQ ID NO: 2207649 - RNA, 19 nt, Artificial Sequence
  Description of Artificial Sequence: Synthetic oligonucleotide
  Antisense strand to SEQ ID NO: 2207648
cuuuagaauaacaaggucu

SEQ ID NO: 2207650 - RNA, 19 nt, Artificial Sequence
  Description of Artificial Sequence: Synthetic oligonucleotide
  Sense strand starting at position 937 of SEQ ID NO: 1883655
uggacuuggguguaaguga

SEQ ID NO: 2207651 - RNA, 19 nt, Artificial Sequence
  Description of Artificial Sequence: Synthetic oligonucleotide
  Antisense strand to SEQ ID NO: 2207650
ucacuuacacccaagucca

SEQ ID NO: 2207652 - RNA, 19 nt, Artificial Sequence
  Description of Artificial Sequence: Synthetic oligonucleotide
  Sense strand starting at position 2616 of SEQ ID NO: 1883655
caagucaaugguuagaguu

SEQ ID NO: 2207653 - RNA, 19 nt, Artificial Sequence
  Description of Artificial Sequence: Synthetic oligonucleotide
  Antisense strand to SEQ ID NO: 2207652
aacucuaaccauugacuug

SEQ ID NO: 2207654 - RNA, 19 nt, Artificial Sequence
  Description of Artificial Sequence: Synthetic oligonucleotide
  Sense strand starting at position 2490 of SEQ ID NO: 1883655
uuuauccagguaugacaau

SEQ ID NO: 2207655 - RNA, 19 nt, Artificial Sequence
  Description of Artificial Sequence: Synthetic oligonucleotide
  Antisense strand to SEQ ID NO: 2207654
auugucauaccuggauaaa

SEQ ID NO: 2207656 - RNA, 19 nt, Artificial Sequence
  Description of Artificial Sequence: Synthetic oligonucleotide
  Sense strand starting at position 2869 of SEQ ID NO: 1883655
cuuacaagagcucaucagu

SEQ ID NO: 2207657 - RNA, 19 nt, Artificial Sequence
  Description of Artificial Sequence: Synthetic oligonucleotide
  Antisense strand to SEQ ID NO: 2207656
acugaugagcucuuguaag

SEQ ID NO: 2207658 - RNA, 19 nt, Artificial Sequence
  Description of Artificial Sequence: Synthetic oligonucleotide
  Sense strand starting at position 285 of SEQ ID NO: 1883655
cgcuuaucacuagagacau

SEQ ID NO: 2207659 - RNA, 19 nt, Artificial Sequence
  Description of Artificial Sequence: Synthetic oligonucleotide
  Antisense strand to SEQ ID NO: 2207658
augucucuagugauaagcg

SEQ ID NO: 2207660 - RNA, 19 nt, Artificial Sequence
  Description of Artificial Sequence: Synthetic oligonucleotide
  Sense strand starting at position 2422 of SEQ ID NO: 1883655
uauaauuaguuggcagaga

SEQ ID NO: 2207661 - RNA, 19 nt, Artificial Sequence
  Description of Artificial Sequence: Synthetic oligonucleotide
  Antisense strand to SEQ ID NO: 2207660
ucucugccaacuaauuaua

SEQ ID NO: 2207662 - RNA, 19 nt, Artificial Sequence
  Description of Artificial Sequence: Synthetic oligonucleotide
  Sense strand starting at position 954 of SEQ ID NO: 1883655
gaaagaguugaguaguugu

SEQ ID NO: 2207663 - RNA, 19 nt, Artificial Sequence
  Description of Artificial Sequence: Synthetic oligonucleotide
  Antisense strand to SEQ ID NO: 2207662
acaacuacucaacucuuuc

SEQ ID NO: 2207664 - RNA, 19 nt, Artificial Sequence
  Description of Artificial Sequence: Synthetic oligonucleotide
  Sense strand starting at position 3235 of SEQ ID NO: 1883655
cauugucuaggcuacagau

SEQ ID NO: 2207665 - RNA, 19 nt, Artificial Sequence
  Description of Artificial Sequence: Synthetic oligonucleotide
  Antisense strand to SEQ ID NO: 2207664
aucuguagccuagacaaug

SEQ ID NO: 2207666 - RNA, 19 nt, Artificial Sequence
  Description of Artificial Sequence: Synthetic oligonucleotide
  Sense strand starting at position 2921 of SEQ ID NO: 1883655
ugcugacuccagggacuaa

SEQ ID NO: 2207667 - RNA, 19 nt, Artificial Sequence
  Description of Artificial Sequence: Synthetic oligonucleotide
  Antisense strand to SEQ ID NO: 2207666
uuagucccuggagucagca

SEQ ID NO: 2207668 - RNA, 19 nt, Artificial Sequence
  Description of Artificial Sequence: Synthetic oligonucleotide
  Sense strand starting at position 2556 of SEQ ID NO: 1883655
uuagauguuucucucagaa

SEQ ID NO: 2207669 - RNA, 19 nt, Artificial Sequence
  Description of Artificial Sequence: Synthetic oligonucleotide
  Antisense strand to SEQ ID NO: 2207668
uucugagagaaacaucuaa

SEQ ID NO: 2207670 - RNA, 19 nt, Artificial Sequence
  Description of Artificial Sequence: Synthetic oligonucleotide
  Sense strand starting at position 2078 of SEQ ID NO: 1883655
gcaccaucugcugaaauau

SEQ ID NO: 2207671 - RNA, 19 nt, Artificial Sequence
  Description of Artificial Sequence: Synthetic oligonucleotide
  Antisense strand to SEQ ID NO: 2207670
auauuucagcagauggugc

SEQ ID NO: 2207672 - RNA, 19 nt, Artificial Sequence
  Description of Artificial Sequence: Synthetic oligonucleotide
  Sense strand starting at position 3561 of SEQ ID NO: 1883655
guauauacauacgugaaga

SEQ ID NO: 2207673 - RNA, 19 nt, Artificial Sequence
  Description of Artificial Sequence: Synthetic oligonucleotide
  Antisense strand to SEQ ID NO: 2207672
ucuucacguauguauauac

SEQ ID NO: 2207674 - RNA, 19 nt, Artificial Sequence
  Description of Artificial Sequence: Synthetic oligonucleotide
  Sense strand starting at position 528 of SEQ ID NO: 1883655
uggacaagauugcuaguau

SEQ ID NO: 2207675 - RNA, 19 nt, Artificial Sequence
  Description of Artificial Sequence: Synthetic oligonucleotide
  Antisense strand to SEQ ID NO: 2207674
auacuagcaaucuugucca

SEQ ID NO: 2207676 - RNA, 19 nt, Artificial Sequence
  Description of Artificial Sequence: Synthetic oligonucleotide
  Sense strand starting at position 3560 of SEQ ID NO: 1883655
aguauauacauacgugaag

SEQ ID NO: 2207677 - RNA, 19 nt, Artificial Sequence
  Description of Artificial Sequence: Synthetic oligonucleotide
  Antisense strand to SEQ ID NO: 2207676
cuucacguauguauauacu

SEQ ID NO: 2207678 - RNA, 19 nt, Artificial Sequence
  Description of Artificial Sequence: Synthetic oligonucleotide
  Sense strand starting at position 2297 of SEQ ID NO: 1883655
gagcaugcuggucaucaaa

SEQ ID NO: 2207679 - RNA, 19 nt, Artificial Sequence
  Description of Artificial Sequence: Synthetic oligonucleotide
  Antisense strand to SEQ ID NO: 2207678
uuugaugaccagcaugcuc

SEQ ID NO: 2207680 - RNA, 19 nt, Artificial Sequence
  Description of Artificial Sequence: Synthetic oligonucleotide
  Sense strand starting at position 1011 of SEQ ID NO: 1883655
aucucagaguccucaucua

SEQ ID NO: 2207681 - RNA, 19 nt, Artificial Sequence
  Description of Artificial Sequence: Synthetic oligonucleotide
  Antisense strand to SEQ ID NO: 2207680
uagaugaggacucugagau

SEQ ID NO: 2207682 - RNA, 19 nt, Artificial Sequence
  Description of Artificial Sequence: Synthetic oligonucleotide
  Sense strand starting at position 2499 of SEQ ID NO: 1883655
guaugacaaucccuuagua

SEQ ID NO: 2207683 - RNA, 19 nt, Artificial Sequence
  Description of Artificial Sequence: Synthetic oligonucleotide
  Antisense strand to SEQ ID NO: 2207682
uacuaagggauugucauac

SEQ ID NO: 2207684 - RNA, 19 nt, Artificial Sequence
  Description of Artificial Sequence: Synthetic oligonucleotide
  Sense strand starting at position 1415 of SEQ ID NO: 1883655
gaugcugugccacaggaau

SEQ ID NO: 2207685 - RNA, 19 nt, Artificial Sequence
  Description of Artificial Sequence: Synthetic oligonucleotide
  Antisense strand to SEQ ID NO: 2207684
auuccuguggcacagcauc

SEQ ID NO: 2207686 - RNA, 19 nt, Artificial Sequence
  Description of Artificial Sequence: Synthetic oligonucleotide
  Sense strand starting at position 1555 of SEQ ID NO: 1883655
ugaaguacuuggcuuaaau

SEQ ID NO: 2207687 - RNA, 19 nt, Artificial Sequence
  Description of Artificial Sequence: Synthetic oligonucleotide
  Antisense strand to SEQ ID NO: 2207686
auuuaagccaaguacuuca

SEQ ID NO: 2207688 - RNA, 19 nt, Artificial Sequence
  Description of Artificial Sequence: Synthetic oligonucleotide
  Sense strand starting at position 2748 of SEQ ID NO: 1883655
uguaccaagcauuauguua

SEQ ID NO: 2207689 - RNA, 19 nt, Artificial Sequence
  Description of Artificial Sequence: Synthetic oligonucleotide
  Antisense strand to SEQ ID NO: 2207688
uaacauaaugcuugguaca

SEQ ID NO: 2207690 - RNA, 19 nt, Artificial Sequence
  Description of Artificial Sequence: Synthetic oligonucleotide
  Sense strand starting at position 958 of SEQ ID NO: 1883656
augguuuccgguguguauu

SEQ ID NO: 2207691 - RNA, 19 nt, Artificial Sequence
  Description of Artificial Sequence: Synthetic oligonucleotide
  Antisense strand to SEQ ID NO: 2207690
aauacacaccggaaaccau

SEQ ID NO: 2207692 - RNA, 19 nt, Artificial Sequence
  Description of Artificial Sequence: Synthetic oligonucleotide
  Sense strand starting at position 2420 of SEQ ID NO: 1883656
augguaagucaggaagguu

SEQ ID NO: 2207693 - RNA, 19 nt, Artificial Sequence
  Description of Artificial Sequence: Synthetic oligonucleotide
  Antisense strand to SEQ ID NO: 2207692
aaccuuccugacuuaccau

SEQ ID NO: 2207694 - RNA, 19 nt, Artificial Sequence
  Description of Artificial Sequence: Synthetic oligonucleotide
  Sense strand starting at position 934 of SEQ ID NO: 1883656
gcccauuaaggagagugua

SEQ ID NO: 2207695 - RNA, 19 nt, Artificial Sequence
  Description of Artificial Sequence: Synthetic oligonucleotide
  Antisense strand to SEQ ID NO: 2207694
uacacucuccuuaaugggc

SEQ ID NO: 2207696 - RNA, 19 nt, Artificial Sequence
  Description of Artificial Sequence: Synthetic oligonucleotide
  Sense strand starting at position 1383 of SEQ ID NO: 1883656
aguggaguagcugaacuuu

SEQ ID NO: 2207697 - RNA, 19 nt, Artificial Sequence
  Description of Artificial Sequence: Synthetic oligonucleotide
  Antisense strand to SEQ ID NO: 2207696
aaaguucagcuacuccacu

SEQ ID NO: 2207698 - RNA, 19 nt, Artificial Sequence
  Description of Artificial Sequence: Synthetic oligonucleotide
  Sense strand starting at position 1398 of SEQ ID NO: 1883656
cuuugauuaaaccguagag

SEQ ID NO: 2207699 - RNA, 19 nt, Artificial Sequence
  Description of Artificial Sequence: Synthetic oligonucleotide
  Antisense strand to SEQ ID NO: 2207698
cucuacgguuuaaucaaag

SEQ ID NO: 2207700 - RNA, 19 nt, Artificial Sequence
  Description of Artificial Sequence: Synthetic oligonucleotide
  Sense strand starting at position 186 of SEQ ID NO: 1883656
ccaucccuugucugggaaa

SEQ ID NO: 2207701 - RNA, 19 nt, Artificial Sequence
  Description of Artificial Sequence: Synthetic oligonucleotide
  Antisense strand to SEQ ID NO: 2207700
uuucccagacaagggaugg

SEQ ID NO: 2207702 - RNA, 19 nt, Artificial Sequence
  Description of Artificial Sequence: Synthetic oligonucleotide
  Sense strand starting at position 1389 of SEQ ID NO: 1883656
guagcugaacuuugauuaa

SEQ ID NO: 2207703 - RNA, 19 nt, Artificial Sequence
  Description of Artificial Sequence: Synthetic oligonucleotide
  Antisense strand to SEQ ID NO: 2207702
uuaaucaaaguucagcuac

SEQ ID NO: 2207704 - RNA, 19 nt, Artificial Sequence
  Description of Artificial Sequence: Synthetic oligonucleotide
  Sense strand starting at position 2151 of SEQ ID NO: 1883656
gccagaaagcguuaaaggu

SEQ ID NO: 2207705 - RNA, 19 nt, Artificial Sequence
  Description of Artificial Sequence: Synthetic oligonucleotide
  Antisense strand to SEQ ID NO: 2207704
accuuuaacgcuuucuggc

SEQ ID NO: 2207706 - RNA, 19 nt, Artificial Sequence
  Description of Artificial Sequence: Synthetic oligonucleotide
  Sense strand starting at position 1251 of SEQ ID NO: 1883656
gccagugcuagcgaagaga

SEQ ID NO: 2207707 - RNA, 19 nt, Artificial Sequence
  Description of Artificial Sequence: Synthetic oligonucleotide
  Antisense strand to SEQ ID NO: 2207706
ucucuucgcuagcacuggc

SEQ ID NO: 2207708 - RNA, 19 nt, Artificial Sequence
  Description of Artificial Sequence: Synthetic oligonucleotide
  Sense strand starting at position 1544 of SEQ ID NO: 1883656
guuguaugaagguguucuu

SEQ ID NO: 2207709 - RNA, 19 nt, Artificial Sequence
  Description of Artificial Sequence: Synthetic oligonucleotide
  Antisense strand to SEQ ID NO: 2207708
aagaacaccuucauacaac

SEQ ID NO: 2207710 - RNA, 19 nt, Artificial Sequence
  Description of Artificial Sequence: Synthetic oligonucleotide
  Sense strand starting at position 2206 of SEQ ID NO: 1883656
acgagugauuuaugacuuc

SEQ ID NO: 2207711 - RNA, 19 nt, Artificial Sequence
  Description of Artificial Sequence: Synthetic oligonucleotide
  Antisense strand to SEQ ID NO: 2207710
gaagucauaaaucacucgu

SEQ ID NO: 2207712 - RNA, 19 nt, Artificial Sequence
  Description of Artificial Sequence: Synthetic oligonucleotide
  Sense strand starting at position 2468 of SEQ ID NO: 1883656
uuaggauuugcgugcgugu

SEQ ID NO: 2207713 - RNA, 19 nt, Artificial Sequence
  Description of Artificial Sequence: Synthetic oligonucleotide
  Antisense strand to SEQ ID NO: 2207712
acacgcacgcaaauccuaa

SEQ ID NO: 2207714 - RNA, 19 nt, Artificial Sequence
  Description of Artificial Sequence: Synthetic oligonucleotide
  Sense strand starting at position 957 of SEQ ID NO: 1883656
caugguuuccgguguguau

SEQ ID NO: 2207715 - RNA, 19 nt, Artificial Sequence
  Description of Artificial Sequence: Synthetic oligonucleotide
  Antisense strand to SEQ ID NO: 2207714
auacacaccggaaaccaug

SEQ ID NO: 2207716 - RNA, 19 nt, Artificial Sequence
  Description of Artificial Sequence: Synthetic oligonucleotide
  Sense strand starting at position 2196 of SEQ ID NO: 1883656
ccgccuuuguacgagugau

SEQ ID NO: 2207717 - RNA, 19 nt, Artificial Sequence
  Description of Artificial Sequence: Synthetic oligonucleotide
  Antisense strand to SEQ ID NO: 2207716
aucacucguacaaaggcgg

SEQ ID NO: 2207718 - RNA, 19 nt, Artificial Sequence
  Description of Artificial Sequence: Synthetic oligonucleotide
  Sense strand starting at position 3165 of SEQ ID NO: 1883657
ggucaaagaucucccaaag

SEQ ID NO: 2207719 - RNA, 19 nt, Artificial Sequence
  Description of Artificial Sequence: Synthetic oligonucleotide
  Antisense strand to SEQ ID NO: 2207718
cuuugggagaucuuugacc

SEQ ID NO: 2207720 - RNA, 19 nt, Artificial Sequence
  Description of Artificial Sequence: Synthetic oligonucleotide
  Sense strand starting at position 959 of SEQ ID NO: 1883657
augguuuccgguguguauu

SEQ ID NO: 2207721 - RNA, 19 nt, Artificial Sequence
  Description of Artificial Sequence: Synthetic oligonucleotide
  Antisense strand to SEQ ID NO: 2207720
aauacacaccggaaaccau

SEQ ID NO: 2207722 - RNA, 19 nt, Artificial Sequence
  Description of Artificial Sequence: Synthetic oligonucleotide
  Sense strand starting at position 126 of SEQ ID NO: 1883657
aaagcagaagccugagaaa

SEQ ID NO: 2207723 - RNA, 19 nt, Artificial Sequence
  Description of Artificial Sequence: Synthetic oligonucleotide
  Antisense strand to SEQ ID NO: 2207722
uuucucaggcuucugcuuu

SEQ ID NO: 2207724 - RNA, 19 nt, Artificial Sequence
  Description of Artificial Sequence: Synthetic oligonucleotide
  Sense strand starting at position 2418 of SEQ ID NO: 1883657
augguaagucaggaagguu

SEQ ID NO: 2207725 - RNA, 19 nt, Artificial Sequence
  Description of Artificial Sequence: Synthetic oligonucleotide
  Antisense strand to SEQ ID NO: 2207724
aaccuuccugacuuaccau

SEQ ID NO: 2207726 - RNA, 19 nt, Artificial Sequence
  Description of Artificial Sequence: Synthetic oligonucleotide
  Sense strand starting at position 998 of SEQ ID NO: 1883657
aggaaagggcauugugaau

SEQ ID NO: 2207727 - RNA, 19 nt, Artificial Sequence
  Description of Artificial Sequence: Synthetic oligonucleotide
  Antisense strand to SEQ ID NO: 2207726
auucacaaugcccuuuccu

SEQ ID NO: 2207728 - RNA, 19 nt, Artificial Sequence
  Description of Artificial Sequence: Synthetic oligonucleotide
  Sense strand starting at position 906 of SEQ ID NO: 1883657
aucguugggacucacuaau

SEQ ID NO: 2207729 - RNA, 19 nt, Artificial Sequence
  Description of Artificial Sequence: Synthetic oligonucleotide
  Antisense strand to SEQ ID NO: 2207728
auuagugagucccaacgau

SEQ ID NO: 2207730 - RNA, 19 nt, Artificial Sequence
  Description of Artificial Sequence: Synthetic oligonucleotide
  Sense strand starting at position 407 of SEQ ID NO: 1883657
uaagauugucguuagagau

SEQ ID NO: 2207731 - RNA, 19 nt, Artificial Sequence
  Description of Artificial Sequence: Synthetic oligonucleotide
  Antisense strand to SEQ ID NO: 2207730
aucucuaacgacaaucuua

SEQ ID NO: 2207732 - RNA, 19 nt, Artificial Sequence
  Description of Artificial Sequence: Synthetic oligonucleotide
  Sense strand starting at position 935 of SEQ ID NO: 1883657
gcccauuaaggagagugua

SEQ ID NO: 2207733 - RNA, 19 nt, Artificial Sequence
  Description of Artificial Sequence: Synthetic oligonucleotide
  Antisense strand to SEQ ID NO: 2207732
uacacucuccuuaaugggc

SEQ ID NO: 2207734 - RNA, 19 nt, Artificial Sequence
  Description of Artificial Sequence: Synthetic oligonucleotide
  Sense strand starting at position 3476 of SEQ ID NO: 1883657
uaccaaugcuagguaaaug

SEQ ID NO: 2207735 - RNA, 19 nt, Artificial Sequence
  Description of Artificial Sequence: Synthetic oligonucleotide
  Antisense strand to SEQ ID NO: 2207734
cauuuaccuagcauuggua

SEQ ID NO: 2207736 - RNA, 19 nt, Artificial Sequence
  Description of Artificial Sequence: Synthetic oligonucleotide
  Sense strand starting at position 1384 of SEQ ID NO: 1883657
aguggaguagcugaacuuu

SEQ ID NO: 2207737 - RNA, 19 nt, Artificial Sequence
  Description of Artificial Sequence: Synthetic oligonucleotide
  Antisense strand to SEQ ID NO: 2207736
aaaguucagcuacuccacu

SEQ ID NO: 2207738 - RNA, 19 nt, Artificial Sequence
  Description of Artificial Sequence: Synthetic oligonucleotide
  Sense strand starting at position 187 of SEQ ID NO: 1883657
ccaucccuugucugggaaa

SEQ ID NO: 2207739 - RNA, 19 nt, Artificial Sequence
  Description of Artificial Sequence: Synthetic oligonucleotide
  Antisense strand to SEQ ID NO: 2207738
uuucccagacaagggaugg

SEQ ID NO: 2207740 - RNA, 19 nt, Artificial Sequence
  Description of Artificial Sequence: Synthetic oligonucleotide
  Sense strand starting at position 3475 of SEQ ID NO: 1883657
uuaccaaugcuagguaaau

SEQ ID NO: 2207741 - RNA, 19 nt, Artificial Sequence
  Description of Artificial Sequence: Synthetic oligonucleotide
  Antisense strand to SEQ ID NO: 2207740
auuuaccuagcauugguaa

SEQ ID NO: 2207742 - RNA, 19 nt, Artificial Sequence
  Description of Artificial Sequence: Synthetic oligonucleotide
  Sense strand starting at position 1390 of SEQ ID NO: 1883657
guagcugaacuuugauuaa

SEQ ID NO: 2207743 - RNA, 19 nt, Artificial Sequence
  Description of Artificial Sequence: Synthetic oligonucleotide
  Antisense strand to SEQ ID NO: 2207742
uuaaucaaaguucagcuac

SEQ ID NO: 2207744 - RNA, 19 nt, Artificial Sequence
  Description of Artificial Sequence: Synthetic oligonucleotide
  Sense strand starting at position 406 of SEQ ID NO: 1883657
uuaagauugucguuagaga

SEQ ID NO: 2207745 - RNA, 19 nt, Artificial Sequence
  Description of Artificial Sequence: Synthetic oligonucleotide
  Antisense strand to SEQ ID NO: 2207744
ucucuaacgacaaucuuaa

SEQ ID NO: 2207746 - RNA, 19 nt, Artificial Sequence
  Description of Artificial Sequence: Synthetic oligonucleotide
  Sense strand starting at position 358 of SEQ ID NO: 1883657
gugacuguuaacuacuguu

SEQ ID NO: 2207747 - RNA, 19 nt, Artificial Sequence
  Description of Artificial Sequence: Synthetic oligonucleotide
  Antisense strand to SEQ ID NO: 2207746
aacaguaguuaacagucac

SEQ ID NO: 2207748 - RNA, 19 nt, Artificial Sequence
  Description of Artificial Sequence: Synthetic oligonucleotide
  Sense strand starting at position 2152 of SEQ ID NO: 1883657
gccagaaagcguuaaaggu

SEQ ID NO: 2207749 - RNA, 19 nt, Artificial Sequence
  Description of Artificial Sequence: Synthetic oligonucleotide
  Antisense strand to SEQ ID NO: 2207748
accuuuaacgcuuucuggc

SEQ ID NO: 2207750 - RNA, 19 nt, Artificial Sequence
  Description of Artificial Sequence: Synthetic oligonucleotide
  Sense strand starting at position 403 of SEQ ID NO: 1883657
uuauuaagauugucguuag

SEQ ID NO: 2207751 - RNA, 19 nt, Artificial Sequence
  Description of Artificial Sequence: Synthetic oligonucleotide
  Antisense strand to SEQ ID NO: 2207750
cuaacgacaaucuuaauaa

SEQ ID NO: 2207752 - RNA, 19 nt, Artificial Sequence
  Description of Artificial Sequence: Synthetic oligonucleotide
  Sense strand starting at position 2864 of SEQ ID NO: 1883657
gccucuuaaguaugugaga

SEQ ID NO: 2207753 - RNA, 19 nt, Artificial Sequence
  Description of Artificial Sequence: Synthetic oligonucleotide
  Antisense strand to SEQ ID NO: 2207752
ucucacauacuuaagaggc

SEQ ID NO: 2207754 - RNA, 19 nt, Artificial Sequence
  Description of Artificial Sequence: Synthetic oligonucleotide
  Sense strand starting at position 348 of SEQ ID NO: 1883657
cuguuaugcagugacuguu

SEQ ID NO: 2207755 - RNA, 19 nt, Artificial Sequence
  Description of Artificial Sequence: Synthetic oligonucleotide
  Antisense strand to SEQ ID NO: 2207754
aacagucacugcauaacag

SEQ ID NO: 2207756 - RNA, 19 nt, Artificial Sequence
  Description of Artificial Sequence: Synthetic oligonucleotide
  Sense strand starting at position 912 of SEQ ID NO: 1883657
gggacucacuaauacauua

SEQ ID NO: 2207757 - RNA, 19 nt, Artificial Sequence
  Description of Artificial Sequence: Synthetic oligonucleotide
  Antisense strand to SEQ ID NO: 2207756
uaauguauuagugaguccc

SEQ ID NO: 2207758 - RNA, 19 nt, Artificial Sequence
  Description of Artificial Sequence: Synthetic oligonucleotide
  Sense strand starting at position 401 of SEQ ID NO: 1883657
uguuauuaagauugucguu

SEQ ID NO: 2207759 - RNA, 19 nt, Artificial Sequence
  Description of Artificial Sequence: Synthetic oligonucleotide
  Antisense strand to SEQ ID NO: 2207758
aacgacaaucuuaauaaca

SEQ ID NO: 2207760 - RNA, 19 nt, Artificial Sequence
  Description of Artificial Sequence: Synthetic oligonucleotide
  Sense strand starting at position 2207 of SEQ ID NO: 1883657
acgagugauuuaugacuuc

SEQ ID NO: 2207761 - RNA, 19 nt, Artificial Sequence
  Description of Artificial Sequence: Synthetic oligonucleotide
  Antisense strand to SEQ ID NO: 2207760
gaagucauaaaucacucgu

SEQ ID NO: 2207762 - RNA, 19 nt, Artificial Sequence
  Description of Artificial Sequence: Synthetic oligonucleotide
  Sense strand starting at position 347 of SEQ ID NO: 1883657
ucuguuaugcagugacugu

SEQ ID NO: 2207763 - RNA, 19 nt, Artificial Sequence
  Description of Artificial Sequence: Synthetic oligonucleotide
  Antisense strand to SEQ ID NO: 2207762
acagucacugcauaacaga

SEQ ID NO: 2207764 - RNA, 19 nt, Artificial Sequence
  Description of Artificial Sequence: Synthetic oligonucleotide
  Sense strand starting at position 2997 of SEQ ID NO: 1883657
guagguuuagccugccauu

SEQ ID NO: 2207765 - RNA, 19 nt, Artificial Sequence
  Description of Artificial Sequence: Synthetic oligonucleotide
  Antisense strand to SEQ ID NO: 2207764
aauggcaggcuaaaccuac

SEQ ID NO: 2207766 - RNA, 19 nt, Artificial Sequence
  Description of Artificial Sequence: Synthetic oligonucleotide
  Sense strand starting at position 958 of SEQ ID NO: 1883657
caugguuuccgguguguau

SEQ ID NO: 2207767 - RNA, 19 nt, Artificial Sequence
  Description of Artificial Sequence: Synthetic oligonucleotide
  Antisense strand to SEQ ID NO: 2207766
auacacaccggaaaccaug

SEQ ID NO: 2207768 - RNA, 19 nt, Artificial Sequence
  Description of Artificial Sequence: Synthetic oligonucleotide
  Sense strand starting at position 2869 of SEQ ID NO: 1883657
uuaaguaugugagacugca

SEQ ID NO: 2207769 - RNA, 19 nt, Artificial Sequence
  Description of Artificial Sequence: Synthetic oligonucleotide
  Antisense strand to SEQ ID NO: 2207768
ugcagucucacauacuuaa

SEQ ID NO: 2207770 - RNA, 19 nt, Artificial Sequence
  Description of Artificial Sequence: Synthetic oligonucleotide
  Sense strand starting at position 404 of SEQ ID NO: 1883657
uauuaagauugucguuaga

SEQ ID NO: 2207771 - RNA, 19 nt, Artificial Sequence
  Description of Artificial Sequence: Synthetic oligonucleotide
  Antisense strand to SEQ ID NO: 2207770
ucuaacgacaaucuuaaua

SEQ ID NO: 2207772 - RNA, 19 nt, Artificial Sequence
  Description of Artificial Sequence: Synthetic oligonucleotide
  Sense strand starting at position 340 of SEQ ID NO: 1883657
uuguuauucuguuaugcag

SEQ ID NO: 2207773 - RNA, 19 nt, Artificial Sequence
  Description of Artificial Sequence: Synthetic oligonucleotide
  Antisense strand to SEQ ID NO: 2207772
cugcauaacagaauaacaa

SEQ ID NO: 2207774 - RNA, 19 nt, Artificial Sequence
  Description of Artificial Sequence: Synthetic oligonucleotide
  Sense strand starting at position 2197 of SEQ ID NO: 1883657
ccgccuuuguacgagugau

SEQ ID NO: 2207775 - RNA, 19 nt, Artificial Sequence
  Description of Artificial Sequence: Synthetic oligonucleotide
  Antisense strand to SEQ ID NO: 2207774
aucacucguacaaaggcgg

SEQ ID NO: 2207776 - RNA, 19 nt, Artificial Sequence
  Description of Artificial Sequence: Synthetic oligonucleotide
  Sense strand starting at position 2315 of SEQ ID NO: 1883658
cauuaaggccugugaccaa

SEQ ID NO: 2207777 - RNA, 19 nt, Artificial Sequence
  Description of Artificial Sequence: Synthetic oligonucleotide
  Antisense strand to SEQ ID NO: 2207776
uuggucacaggccuuaaug

SEQ ID NO: 2207778 - RNA, 19 nt, Artificial Sequence
  Description of Artificial Sequence: Synthetic oligonucleotide
  Sense strand starting at position 2278 of SEQ ID NO: 1883658
auguccuggccaugaacau

SEQ ID NO: 2207779 - RNA, 19 nt, Artificial Sequence
  Description of Artificial Sequence: Synthetic oligonucleotide
  Antisense strand to SEQ ID NO: 2207778
auguucauggccaggacau

SEQ ID NO: 2207780 - RNA, 19 nt, Artificial Sequence
  Description of Artificial Sequence: Synthetic oligonucleotide
  Sense strand starting at position 2033 of SEQ ID NO: 1883659
ggacuuuaauugguugauu

SEQ ID NO: 2207781 - RNA, 19 nt, Artificial Sequence
  Description of Artificial Sequence: Synthetic oligonucleotide
  Antisense strand to SEQ ID NO: 2207780
aaucaaccaauuaaagucc

SEQ ID NO: 2207782 - RNA, 19 nt, Artificial Sequence
  Description of Artificial Sequence: Synthetic oligonucleotide
  Sense strand starting at position 2032 of SEQ ID NO: 1883659
uggacuuuaauugguugau

SEQ ID NO: 2207783 - RNA, 19 nt, Artificial Sequence
  Description of Artificial Sequence: Synthetic oligonucleotide
  Antisense strand to SEQ ID NO: 2207782
aucaaccaauuaaagucca

SEQ ID NO: 2207784 - RNA, 19 nt, Artificial Sequence
  Description of Artificial Sequence: Synthetic oligonucleotide
  Sense strand starting at position 3279 of SEQ ID NO: 1883659
ucaaacauuugguagaauu

SEQ ID NO: 2207785 - RNA, 19 nt, Artificial Sequence
  Description of Artificial Sequence: Synthetic oligonucleotide
  Antisense strand to SEQ ID NO: 2207784
aauucuaccaaauguuuga

SEQ ID NO: 2207786 - RNA, 19 nt, Artificial Sequence
  Description of Artificial Sequence: Synthetic oligonucleotide
  Sense strand starting at position 2314 of SEQ ID NO: 1883659
cauuaaggccugugaccaa

SEQ ID NO: 2207787 - RNA, 19 nt, Artificial Sequence
  Description of Artificial Sequence: Synthetic oligonucleotide
  Antisense strand to SEQ ID NO: 2207786
uuggucacaggccuuaaug

SEQ ID NO: 2207788 - RNA, 19 nt, Artificial Sequence
  Description of Artificial Sequence: Synthetic oligonucleotide
  Sense strand starting at position 3581 of SEQ ID NO: 1883659
uagugagagguuggucaau

SEQ ID NO: 2207789 - RNA, 19 nt, Artificial Sequence
  Description of Artificial Sequence: Synthetic oligonucleotide
  Antisense strand to SEQ ID NO: 2207788
auugaccaaccucucacua

SEQ ID NO: 2207790 - RNA, 19 nt, Artificial Sequence
  Description of Artificial Sequence: Synthetic oligonucleotide
  Sense strand starting at position 3252 of SEQ ID NO: 1883659
uugugaagaaaucguauua

SEQ ID NO: 2207791 - RNA, 19 nt, Artificial Sequence
  Description of Artificial Sequence: Synthetic oligonucleotide
  Antisense strand to SEQ ID NO: 2207790
uaauacgauuucuucacaa

SEQ ID NO: 2207792 - RNA, 19 nt, Artificial Sequence
  Description of Artificial Sequence: Synthetic oligonucleotide
  Sense strand starting at position 1936 of SEQ ID NO: 1883659
gcacacuuguaaguaaaua

SEQ ID NO: 2207793 - RNA, 19 nt, Artificial Sequence
  Description of Artificial Sequence: Synthetic oligonucleotide
  Antisense strand to SEQ ID NO: 2207792
uauuuacuuacaagugugc

SEQ ID NO: 2207794 - RNA, 19 nt, Artificial Sequence
  Description of Artificial Sequence: Synthetic oligonucleotide
  Sense strand starting at position 2277 of SEQ ID NO: 1883659
auguccuggccaugaacau

SEQ ID NO: 2207795 - RNA, 19 nt, Artificial Sequence
  Description of Artificial Sequence: Synthetic oligonucleotide
  Antisense strand to SEQ ID NO: 2207794
auguucauggccaggacau

SEQ ID NO: 2207796 - RNA, 19 nt, Artificial Sequence
  Description of Artificial Sequence: Synthetic oligonucleotide
  Sense strand starting at position 3021 of SEQ ID NO: 1883659
acaaguuaagcuuguauau

SEQ ID NO: 2207797 - RNA, 19 nt, Artificial Sequence
  Description of Artificial Sequence: Synthetic oligonucleotide
  Antisense strand to SEQ ID NO: 2207796
auauacaagcuuaacuugu

SEQ ID NO: 2207798 - RNA, 19 nt, Artificial Sequence
  Description of Artificial Sequence: Synthetic oligonucleotide
  Sense strand starting at position 3739 of SEQ ID NO: 1883659
agguuuauuugggaucuuu

SEQ ID NO: 2207799 - RNA, 19 nt, Artificial Sequence
  Description of Artificial Sequence: Synthetic oligonucleotide
  Antisense strand to SEQ ID NO: 2207798
aaagaucccaaauaaaccu

SEQ ID NO: 2207800 - RNA, 19 nt, Artificial Sequence
  Description of Artificial Sequence: Synthetic oligonucleotide
  Sense strand starting at position 3738 of SEQ ID NO: 1883659
gagguuuauuugggaucuu

SEQ ID NO: 2207801 - RNA, 19 nt, Artificial Sequence
  Description of Artificial Sequence: Synthetic oligonucleotide
  Antisense strand to SEQ ID NO: 2207800
aagaucccaaauaaaccuc

SEQ ID NO: 2207802 - RNA, 19 nt, Artificial Sequence
  Description of Artificial Sequence: Synthetic oligonucleotide
  Sense strand starting at position 3737 of SEQ ID NO: 1883659
ugagguuuauuugggaucu

SEQ ID NO: 2207803 - RNA, 19 nt, Artificial Sequence
  Description of Artificial Sequence: Synthetic oligonucleotide
  Antisense strand to SEQ ID NO: 2207802
agaucccaaauaaaccuca

SEQ ID NO: 2207804 - RNA, 19 nt, Artificial Sequence
  Description of Artificial Sequence: Synthetic oligonucleotide
  Sense strand starting at position 2864 of SEQ ID NO: 1883659
uugcaagaauuacaaagau

SEQ ID NO: 2207805 - RNA, 19 nt, Artificial Sequence
  Description of Artificial Sequence: Synthetic oligonucleotide
  Antisense strand to SEQ ID NO: 2207804
aucuuuguaauucuugcaa

SEQ ID NO: 2207806 - RNA, 19 nt, Artificial Sequence
  Description of Artificial Sequence: Synthetic oligonucleotide
  Sense strand starting at position 666 of SEQ ID NO: 1883659
ggaccauaaugaggucaaa

SEQ ID NO: 2207807 - RNA, 19 nt, Artificial Sequence
  Description of Artificial Sequence: Synthetic oligonucleotide
  Antisense strand to SEQ ID NO: 2207806
uuugaccucauuauggucc

SEQ ID NO: 2207808 - RNA, 19 nt, Artificial Sequence
  Description of Artificial Sequence: Synthetic oligonucleotide
  Sense strand starting at position 1933 of SEQ ID NO: 1883659
ggagcacacuuguaaguaa

SEQ ID NO: 2207809 - RNA, 19 nt, Artificial Sequence
  Description of Artificial Sequence: Synthetic oligonucleotide
  Antisense strand to SEQ ID NO: 2207808
uuacuuacaagugugcucc

SEQ ID NO: 2207810 - RNA, 19 nt, Artificial Sequence
  Description of Artificial Sequence: Synthetic oligonucleotide
  Sense strand starting at position 3023 of SEQ ID NO: 1883659
aaguuaagcuuguauaugu

SEQ ID NO: 2207811 - RNA, 19 nt, Artificial Sequence
  Description of Artificial Sequence: Synthetic oligonucleotide
  Antisense strand to SEQ ID NO: 2207810
acauauacaagcuuaacuu

SEQ ID NO: 2207812 - RNA, 19 nt, Artificial Sequence
  Description of Artificial Sequence: Synthetic oligonucleotide
  Sense strand starting at position 3405 of SEQ ID NO: 1883659
guuucagucuaguggaugu

SEQ ID NO: 2207813 - RNA, 19 nt, Artificial Sequence
  Description of Artificial Sequence: Synthetic oligonucleotide
  Antisense strand to SEQ ID NO: 2207812
acauccacuagacugaaac

SEQ ID NO: 2207814 - RNA, 19 nt, Artificial Sequence
  Description of Artificial Sequence: Synthetic oligonucleotide
  Sense strand starting at position 2325 of SEQ ID NO: 1883660
ggccaugagcaucagacua

SEQ ID NO: 2207815 - RNA, 19 nt, Artificial Sequence
  Description of Artificial Sequence: Synthetic oligonucleotide
  Antisense strand to SEQ ID NO: 2207814
uagucugaugcucauggcc

SEQ ID NO: 2207816 - RNA, 19 nt, Artificial Sequence
  Description of Artificial Sequence: Synthetic oligonucleotide
  Sense strand starting at position 98 of SEQ ID NO: 1883660
gugauugaaguguauuaac

SEQ ID NO: 2207817 - RNA, 19 nt, Artificial Sequence
  Description of Artificial Sequence: Synthetic oligonucleotide
  Antisense strand to SEQ ID NO: 2207816
guuaauacacuucaaucac

SEQ ID NO: 2207818 - RNA, 19 nt, Artificial Sequence
  Description of Artificial Sequence: Synthetic oligonucleotide
  Sense strand starting at position 3929 of SEQ ID NO: 1883660
uugaucuacugguuauuga

SEQ ID NO: 2207819 - RNA, 19 nt, Artificial Sequence
  Description of Artificial Sequence: Synthetic oligonucleotide
  Antisense strand to SEQ ID NO: 2207818
ucaauaaccaguagaucaa

SEQ ID NO: 2207820 - RNA, 19 nt, Artificial Sequence
  Description of Artificial Sequence: Synthetic oligonucleotide
  Sense strand starting at position 357 of SEQ ID NO: 1883660
auacaacucuguguuaaua

SEQ ID NO: 2207821 - RNA, 19 nt, Artificial Sequence
  Description of Artificial Sequence: Synthetic oligonucleotide
  Antisense strand to SEQ ID NO: 2207820
uauuaacacagaguuguau

SEQ ID NO: 2207822 - RNA, 19 nt, Artificial Sequence
  Description of Artificial Sequence: Synthetic oligonucleotide
  Sense strand starting at position 503 of SEQ ID NO: 1883660
aggcuaguaucuuuaaaua

SEQ ID NO: 2207823 - RNA, 19 nt, Artificial Sequence
  Description of Artificial Sequence: Synthetic oligonucleotide
  Antisense strand to SEQ ID NO: 2207822
uauuuaaagauacuagccu

SEQ ID NO: 2207824 - RNA, 19 nt, Artificial Sequence
  Description of Artificial Sequence: Synthetic oligonucleotide
  Sense strand starting at position 2337 of SEQ ID NO: 1883660
cagacuagcguguaauaac

SEQ ID NO: 2207825 - RNA, 19 nt, Artificial Sequence
  Description of Artificial Sequence: Synthetic oligonucleotide
  Antisense strand to SEQ ID NO: 2207824
guuauuacacgcuagucug

SEQ ID NO: 2207826 - RNA, 19 nt, Artificial Sequence
  Description of Artificial Sequence: Synthetic oligonucleotide
  Sense strand starting at position 3617 of SEQ ID NO: 1883660
aguaauagguuggucaauu

SEQ ID NO: 2207827 - RNA, 19 nt, Artificial Sequence
  Description of Artificial Sequence: Synthetic oligonucleotide
  Antisense strand to SEQ ID NO: 2207826
aauugaccaaccuauuacu

SEQ ID NO: 2207828 - RNA, 19 nt, Artificial Sequence
  Description of Artificial Sequence: Synthetic oligonucleotide
  Sense strand starting at position 2773 of SEQ ID NO: 1883660
gguaucaauuaagcucauu

SEQ ID NO: 2207829 - RNA, 19 nt, Artificial Sequence
  Description of Artificial Sequence: Synthetic oligonucleotide
  Antisense strand to SEQ ID NO: 2207828
aaugagcuuaauugauacc

SEQ ID NO: 2207830 - RNA, 19 nt, Artificial Sequence
  Description of Artificial Sequence: Synthetic oligonucleotide
  Sense strand starting at position 3616 of SEQ ID NO: 1883660
uaguaauagguuggucaau

SEQ ID NO: 2207831 - RNA, 19 nt, Artificial Sequence
  Description of Artificial Sequence: Synthetic oligonucleotide
  Antisense strand to SEQ ID NO: 2207830
auugaccaaccuauuacua

SEQ ID NO: 2207832 - RNA, 19 nt, Artificial Sequence
  Description of Artificial Sequence: Synthetic oligonucleotide
  Sense strand starting at position 3615 of SEQ ID NO: 1883660
cuaguaauagguuggucaa

SEQ ID NO: 2207833 - RNA, 19 nt, Artificial Sequence
  Description of Artificial Sequence: Synthetic oligonucleotide
  Antisense strand to SEQ ID NO: 2207832
uugaccaaccuauuacuag

SEQ ID NO: 2207834 - RNA, 19 nt, Artificial Sequence
  Description of Artificial Sequence: Synthetic oligonucleotide
  Sense strand starting at position 109 of SEQ ID NO: 1883660
guauuaacuuguguacuca

SEQ ID NO: 2207835 - RNA, 19 nt, Artificial Sequence
  Description of Artificial Sequence: Synthetic oligonucleotide
  Antisense strand to SEQ ID NO: 2207834
ugaguacacaaguuaauac

SEQ ID NO: 2207836 - RNA, 19 nt, Artificial Sequence
  Description of Artificial Sequence: Synthetic oligonucleotide
  Sense strand starting at position 2335 of SEQ ID NO: 1883660
aucagacuagcguguaaua

SEQ ID NO: 2207837 - RNA, 19 nt, Artificial Sequence
  Description of Artificial Sequence: Synthetic oligonucleotide
  Antisense strand to SEQ ID NO: 2207836
uauuacacgcuagucugau

SEQ ID NO: 2207838 - RNA, 19 nt, Artificial Sequence
  Description of Artificial Sequence: Synthetic oligonucleotide
  Sense strand starting at position 90 of SEQ ID NO: 1883660
ucuugcuagugauugaagu

SEQ ID NO: 2207839 - RNA, 19 nt, Artificial Sequence
  Description of Artificial Sequence: Synthetic oligonucleotide
  Antisense strand to SEQ ID NO: 2207838
acuucaaucacuagcaaga

SEQ ID NO: 2207840 - RNA, 19 nt, Artificial Sequence
  Description of Artificial Sequence: Synthetic oligonucleotide
  Sense strand starting at position 1993 of SEQ ID NO: 1883660
uuguaauuacauugcagca

SEQ ID NO: 2207841 - RNA, 19 nt, Artificial Sequence
  Description of Artificial Sequence: Synthetic oligonucleotide
  Antisense strand to SEQ ID NO: 2207840
ugcugcaauguaauuacaa

SEQ ID NO: 2207842 - RNA, 19 nt, Artificial Sequence
  Description of Artificial Sequence: Synthetic oligonucleotide
  Sense strand starting at position 106 of SEQ ID NO: 1883660
aguguauuaacuuguguac

SEQ ID NO: 2207843 - RNA, 19 nt, Artificial Sequence
  Description of Artificial Sequence: Synthetic oligonucleotide
  Antisense strand to SEQ ID NO: 2207842
guacacaaguuaauacacu

SEQ ID NO: 2207844 - RNA, 19 nt, Artificial Sequence
  Description of Artificial Sequence: Synthetic oligonucleotide
  Sense strand starting at position 2052 of SEQ ID NO: 1883660
gagagaaacuguuauacga

SEQ ID NO: 2207845 - RNA, 19 nt, Artificial Sequence
  Description of Artificial Sequence: Synthetic oligonucleotide
  Antisense strand to SEQ ID NO: 2207844
ucguauaacaguuucucuc

SEQ ID NO: 2207846 - RNA, 19 nt, Artificial Sequence
  Description of Artificial Sequence: Synthetic oligonucleotide
  Sense strand starting at position 3283 of SEQ ID NO: 1883660
ggaaguguuugugaagaaa

SEQ ID NO: 2207847 - RNA, 19 nt, Artificial Sequence
  Description of Artificial Sequence: Synthetic oligonucleotide
  Antisense strand to SEQ ID NO: 2207846
uuucuucacaaacacuucc

SEQ ID NO: 2207848 - RNA, 19 nt, Artificial Sequence
  Description of Artificial Sequence: Synthetic oligonucleotide
  Sense strand starting at position 2054 of SEQ ID NO: 1883660
gagaaacuguuauacgauu

SEQ ID NO: 2207849 - RNA, 19 nt, Artificial Sequence
  Description of Artificial Sequence: Synthetic oligonucleotide
  Antisense strand to SEQ ID NO: 2207848
aaucguauaacaguuucuc

SEQ ID NO: 2207850 - RNA, 19 nt, Artificial Sequence
  Description of Artificial Sequence: Synthetic oligonucleotide
  Sense strand starting at position 179 of SEQ ID NO: 1883660
ggcuaaguaucuuaaccaa

SEQ ID NO: 2207851 - RNA, 19 nt, Artificial Sequence
  Description of Artificial Sequence: Synthetic oligonucleotide
  Antisense strand to SEQ ID NO: 2207850
uugguuaagauacuuagcc

SEQ ID NO: 2207852 - RNA, 19 nt, Artificial Sequence
  Description of Artificial Sequence: Synthetic oligonucleotide
  Sense strand starting at position 3020 of SEQ ID NO: 1883660
ugcaauaucugagaagcau

SEQ ID NO: 2207853 - RNA, 19 nt, Artificial Sequence
  Description of Artificial Sequence: Synthetic oligonucleotide
  Antisense strand to SEQ ID NO: 2207852
augcuucucagauauugca

SEQ ID NO: 2207854 - RNA, 19 nt, Artificial Sequence
  Description of Artificial Sequence: Synthetic oligonucleotide
  Sense strand starting at position 1984 of SEQ ID NO: 1883660
ggagcacacuuguaauuac

SEQ ID NO: 2207855 - RNA, 19 nt, Artificial Sequence
  Description of Artificial Sequence: Synthetic oligonucleotide
  Antisense strand to SEQ ID NO: 2207854
guaauuacaagugugcucc

SEQ ID NO: 2207856 - RNA, 19 nt, Artificial Sequence
  Description of Artificial Sequence: Synthetic oligonucleotide
  Sense strand starting at position 359 of SEQ ID NO: 1883660
acaacucuguguuaauauu

SEQ ID NO: 2207857 - RNA, 19 nt, Artificial Sequence
  Description of Artificial Sequence: Synthetic oligonucleotide
  Antisense strand to SEQ ID NO: 2207856
aauauuaacacagaguugu

SEQ ID NO: 2207858 - RNA, 19 nt, Artificial Sequence
  Description of Artificial Sequence: Synthetic oligonucleotide
  Sense strand starting at position 2340 of SEQ ID NO: 1883660
acuagcguguaauaacauu

SEQ ID NO: 2207859 - RNA, 19 nt, Artificial Sequence
  Description of Artificial Sequence: Synthetic oligonucleotide
  Antisense strand to SEQ ID NO: 2207858
aauguuauuacacgcuagu

SEQ ID NO: 2207860 - RNA, 19 nt, Artificial Sequence
  Description of Artificial Sequence: Synthetic oligonucleotide
  Sense strand starting at position 84 of SEQ ID NO: 1883660
ucacuuucuugcuagugau

SEQ ID NO: 2207861 - RNA, 19 nt, Artificial Sequence
  Description of Artificial Sequence: Synthetic oligonucleotide
  Antisense strand to SEQ ID NO: 2207860
aucacuagcaagaaaguga

SEQ ID NO: 2207862 - RNA, 19 nt, Artificial Sequence
  Description of Artificial Sequence: Synthetic oligonucleotide
  Sense strand starting at position 3936 of SEQ ID NO: 1883660
acugguuauugaggagugu

SEQ ID NO: 2207863 - RNA, 19 nt, Artificial Sequence
  Description of Artificial Sequence: Synthetic oligonucleotide
  Antisense strand to SEQ ID NO: 2207862
acacuccucaauaaccagu

SEQ ID NO: 2207864 - RNA, 19 nt, Artificial Sequence
  Description of Artificial Sequence: Synthetic oligonucleotide
  Sense strand starting at position 3885 of SEQ ID NO: 1883660
uuuaguuugucucaaguua

SEQ ID NO: 2207865 - RNA, 19 nt, Artificial Sequence
  Description of Artificial Sequence: Synthetic oligonucleotide
  Antisense strand to SEQ ID NO: 2207864
uaacuugagacaaacuaaa

SEQ ID NO: 2207866 - RNA, 19 nt, Artificial Sequence
  Description of Artificial Sequence: Synthetic oligonucleotide
  Sense strand starting at position 3945 of SEQ ID NO: 1883660
ugaggaguguguugguuga

SEQ ID NO: 2207867 - RNA, 19 nt, Artificial Sequence
  Description of Artificial Sequence: Synthetic oligonucleotide
  Antisense strand to SEQ ID NO: 2207866
ucaaccaacacacuccuca

SEQ ID NO: 2207868 - RNA, 19 nt, Artificial Sequence
  Description of Artificial Sequence: Synthetic oligonucleotide
  Sense strand starting at position 87 of SEQ ID NO: 1883660
cuuucuugcuagugauuga

SEQ ID NO: 2207869 - RNA, 19 nt, Artificial Sequence
  Description of Artificial Sequence: Synthetic oligonucleotide
  Antisense strand to SEQ ID NO: 2207868
ucaaucacuagcaagaaag

SEQ ID NO: 2207870 - RNA, 19 nt, Artificial Sequence
  Description of Artificial Sequence: Synthetic oligonucleotide
  Sense strand starting at position 108 of SEQ ID NO: 1883660
uguauuaacuuguguacuc

SEQ ID NO: 2207871 - RNA, 19 nt, Artificial Sequence
  Description of Artificial Sequence: Synthetic oligonucleotide
  Antisense strand to SEQ ID NO: 2207870
gaguacacaaguuaauaca

SEQ ID NO: 2207872 - RNA, 19 nt, Artificial Sequence
  Description of Artificial Sequence: Synthetic oligonucleotide
  Sense strand starting at position 2333 of SEQ ID NO: 1883660
gcaucagacuagcguguaa

SEQ ID NO: 2207873 - RNA, 19 nt, Artificial Sequence
  Description of Artificial Sequence: Synthetic oligonucleotide
  Antisense strand to SEQ ID NO: 2207872
uuacacgcuagucugaugc

SEQ ID NO: 2207874 - RNA, 19 nt, Artificial Sequence
  Description of Artificial Sequence: Synthetic oligonucleotide
  Sense strand starting at position 1808 of SEQ ID NO: 1883661
guacgauugggacaaguac

SEQ ID NO: 2207875 - RNA, 19 nt, Artificial Sequence
  Description of Artificial Sequence: Synthetic oligonucleotide
  Antisense strand to SEQ ID NO: 2207874
guacuugucccaaucguac

SEQ ID NO: 2207876 - RNA, 19 nt, Artificial Sequence
  Description of Artificial Sequence: Synthetic oligonucleotide
  Sense strand starting at position 2326 of SEQ ID NO: 1883661
ggccaugagcaucagacua

SEQ ID NO: 2207877 - RNA, 19 nt, Artificial Sequence
  Description of Artificial Sequence: Synthetic oligonucleotide
  Antisense strand to SEQ ID NO: 2207876
uagucugaugcucauggcc

SEQ ID NO: 2207878 - RNA, 19 nt, Artificial Sequence
  Description of Artificial Sequence: Synthetic oligonucleotide
  Sense strand starting at position 1804 of SEQ ID NO: 1883661
aucuguacgauugggacaa

SEQ ID NO: 2207879 - RNA, 19 nt, Artificial Sequence
  Description of Artificial Sequence: Synthetic oligonucleotide
  Antisense strand to SEQ ID NO: 2207878
uugucccaaucguacagau

SEQ ID NO: 2207880 - RNA, 19 nt, Artificial Sequence
  Description of Artificial Sequence: Synthetic oligonucleotide
  Sense strand starting at position 3930 of SEQ ID NO: 1883661
uugaucuacugguuauuga

SEQ ID NO: 2207881 - RNA, 19 nt, Artificial Sequence
  Description of Artificial Sequence: Synthetic oligonucleotide
  Antisense strand to SEQ ID NO: 2207880
ucaauaaccaguagaucaa

SEQ ID NO: 2207882 - RNA, 19 nt, Artificial Sequence
  Description of Artificial Sequence: Synthetic oligonucleotide
  Sense strand starting at position 2338 of SEQ ID NO: 1883661
cagacuagcguguaauaac

SEQ ID NO: 2207883 - RNA, 19 nt, Artificial Sequence
  Description of Artificial Sequence: Synthetic oligonucleotide
  Antisense strand to SEQ ID NO: 2207882
guuauuacacgcuagucug

SEQ ID NO: 2207884 - RNA, 19 nt, Artificial Sequence
  Description of Artificial Sequence: Synthetic oligonucleotide
  Sense strand starting at position 2774 of SEQ ID NO: 1883661
gguaucaauuaagcucauu

SEQ ID NO: 2207885 - RNA, 19 nt, Artificial Sequence
  Description of Artificial Sequence: Synthetic oligonucleotide
  Antisense strand to SEQ ID NO: 2207884
aaugagcuuaauugauacc

SEQ ID NO: 2207886 - RNA, 19 nt, Artificial Sequence
  Description of Artificial Sequence: Synthetic oligonucleotide
  Sense strand starting at position 3618 of SEQ ID NO: 1883661
agugauagguuggucaauu

SEQ ID NO: 2207887 - RNA, 19 nt, Artificial Sequence
  Description of Artificial Sequence: Synthetic oligonucleotide
  Antisense strand to SEQ ID NO: 2207886
aauugaccaaccuaucacu

SEQ ID NO: 2207888 - RNA, 19 nt, Artificial Sequence
  Description of Artificial Sequence: Synthetic oligonucleotide
  Sense strand starting at position 3617 of SEQ ID NO: 1883661
uagugauagguuggucaau

SEQ ID NO: 2207889 - RNA, 19 nt, Artificial Sequence
  Description of Artificial Sequence: Synthetic oligonucleotide
  Antisense strand to SEQ ID NO: 2207888
auugaccaaccuaucacua

SEQ ID NO: 2207890 - RNA, 19 nt, Artificial Sequence
  Description of Artificial Sequence: Synthetic oligonucleotide
  Sense strand starting at position 3345 of SEQ ID NO: 1883661
aagcuaucuugucuuggau

SEQ ID NO: 2207891 - RNA, 19 nt, Artificial Sequence
  Description of Artificial Sequence: Synthetic oligonucleotide
  Antisense strand to SEQ ID NO: 2207890
auccaagacaagauagcuu

SEQ ID NO: 2207892 - RNA, 19 nt, Artificial Sequence
  Description of Artificial Sequence: Synthetic oligonucleotide
  Sense strand starting at position 3344 of SEQ ID NO: 1883661
uaagcuaucuugucuugga

SEQ ID NO: 2207893 - RNA, 19 nt, Artificial Sequence
  Description of Artificial Sequence: Synthetic oligonucleotide
  Antisense strand to SEQ ID NO: 2207892
uccaagacaagauagcuua

SEQ ID NO: 2207894 - RNA, 19 nt, Artificial Sequence
  Description of Artificial Sequence: Synthetic oligonucleotide
  Sense strand starting at position 2336 of SEQ ID NO: 1883661
aucagacuagcguguaaua

SEQ ID NO: 2207895 - RNA, 19 nt, Artificial Sequence
  Description of Artificial Sequence: Synthetic oligonucleotide
  Antisense strand to SEQ ID NO: 2207894
uauuacacgcuagucugau

SEQ ID NO: 2207896 - RNA, 19 nt, Artificial Sequence
  Description of Artificial Sequence: Synthetic oligonucleotide
  Sense strand starting at position 1793 of SEQ ID NO: 1883661
ugagcuuucucaucuguac

SEQ ID NO: 2207897 - RNA, 19 nt, Artificial Sequence
  Description of Artificial Sequence: Synthetic oligonucleotide
  Antisense strand to SEQ ID NO: 2207896
guacagaugagaaagcuca

SEQ ID NO: 2207898 - RNA, 19 nt, Artificial Sequence
  Description of Artificial Sequence: Synthetic oligonucleotide
  Sense strand starting at position 3021 of SEQ ID NO: 1883661
ugcaauaucugagaagcau

SEQ ID NO: 2207899 - RNA, 19 nt, Artificial Sequence
  Description of Artificial Sequence: Synthetic oligonucleotide
  Antisense strand to SEQ ID NO: 2207898
augcuucucagauauugca

SEQ ID NO: 2207900 - RNA, 19 nt, Artificial Sequence
  Description of Artificial Sequence: Synthetic oligonucleotide
  Sense strand starting at position 3347 of SEQ ID NO: 1883661
gcuaucuugucuuggauuu

SEQ ID NO: 2207901 - RNA, 19 nt, Artificial Sequence
  Description of Artificial Sequence: Synthetic oligonucleotide
  Antisense strand to SEQ ID NO: 2207900
aaauccaagacaagauagc

SEQ ID NO: 2207902 - RNA, 19 nt, Artificial Sequence
  Description of Artificial Sequence: Synthetic oligonucleotide
  Sense strand starting at position 2341 of SEQ ID NO: 1883661
acuagcguguaauaacauu

SEQ ID NO: 2207903 - RNA, 19 nt, Artificial Sequence
  Description of Artificial Sequence: Synthetic oligonucleotide
  Antisense strand to SEQ ID NO: 2207902
aauguuauuacacgcuagu

SEQ ID NO: 2207904 - RNA, 19 nt, Artificial Sequence
  Description of Artificial Sequence: Synthetic oligonucleotide
  Sense strand starting at position 3937 of SEQ ID NO: 1883661
acugguuauugaggagugu

SEQ ID NO: 2207905 - RNA, 19 nt, Artificial Sequence
  Description of Artificial Sequence: Synthetic oligonucleotide
  Antisense strand to SEQ ID NO: 2207904
acacuccucaauaaccagu

SEQ ID NO: 2207906 - RNA, 19 nt, Artificial Sequence
  Description of Artificial Sequence: Synthetic oligonucleotide
  Sense strand starting at position 3608 of SEQ ID NO: 1883661
uucuuagccuagugauagg

SEQ ID NO: 2207907 - RNA, 19 nt, Artificial Sequence
  Description of Artificial Sequence: Synthetic oligonucleotide
  Antisense strand to SEQ ID NO: 2207906
ccuaucacuaggcuaagaa

SEQ ID NO: 2207908 - RNA, 19 nt, Artificial Sequence
  Description of Artificial Sequence: Synthetic oligonucleotide
  Sense strand starting at position 3946 of SEQ ID NO: 1883661
ugaggaguguguugguuga

SEQ ID NO: 2207909 - RNA, 19 nt, Artificial Sequence
  Description of Artificial Sequence: Synthetic oligonucleotide
  Antisense strand to SEQ ID NO: 2207908
ucaaccaacacacuccuca

SEQ ID NO: 2207910 - RNA, 19 nt, Artificial Sequence
  Description of Artificial Sequence: Synthetic oligonucleotide
  Sense strand starting at position 3189 of SEQ ID NO: 1883661
cugucauccuuguaguguu

SEQ ID NO: 2207911 - RNA, 19 nt, Artificial Sequence
  Description of Artificial Sequence: Synthetic oligonucleotide
  Antisense strand to SEQ ID NO: 2207910
aacacuacaaggaugacag

SEQ ID NO: 2207912 - RNA, 19 nt, Artificial Sequence
  Description of Artificial Sequence: Synthetic oligonucleotide
  Sense strand starting at position 2334 of SEQ ID NO: 1883661
gcaucagacuagcguguaa

SEQ ID NO: 2207913 - RNA, 19 nt, Artificial Sequence
  Description of Artificial Sequence: Synthetic oligonucleotide
  Antisense strand to SEQ ID NO: 2207912
uuacacgcuagucugaugc

SEQ ID NO: 2207914 - RNA, 19 nt, Artificial Sequence
  Description of Artificial Sequence: Synthetic oligonucleotide
  Sense strand starting at position 2722 of SEQ ID NO: 1883662
ucuauuucucgccaauagu

SEQ ID NO: 2207915 - RNA, 19 nt, Artificial Sequence
  Description of Artificial Sequence: Synthetic oligonucleotide
  Antisense strand to SEQ ID NO: 2207914
acuauuggcgagaaauaga

SEQ ID NO: 2207916 - RNA, 19 nt, Artificial Sequence
  Description of Artificial Sequence: Synthetic oligonucleotide
  Sense strand starting at position 3458 of SEQ ID NO: 1883662
aaucaagagcgauaaucga

SEQ ID NO: 2207917 - RNA, 19 nt, Artificial Sequence
  Description of Artificial Sequence: Synthetic oligonucleotide
  Antisense strand to SEQ ID NO: 2207916
ucgauuaucgcucuugauu

SEQ ID NO: 2207918 - RNA, 19 nt, Artificial Sequence
  Description of Artificial Sequence: Synthetic oligonucleotide
  Sense strand starting at position 3799 of SEQ ID NO: 1883662
uuuccaaaucuggaguuau

SEQ ID NO: 2207919 - RNA, 19 nt, Artificial Sequence
  Description of Artificial Sequence: Synthetic oligonucleotide
  Antisense strand to SEQ ID NO: 2207918
auaacuccagauuuggaaa

SEQ ID NO: 2207920 - RNA, 19 nt, Artificial Sequence
  Description of Artificial Sequence: Synthetic oligonucleotide
  Sense strand starting at position 3515 of SEQ ID NO: 1883662
cucucauagcaguagagaa

SEQ ID NO: 2207921 - RNA, 19 nt, Artificial Sequence
  Description of Artificial Sequence: Synthetic oligonucleotide
  Antisense strand to SEQ ID NO: 2207920
uucucuacugcuaugagag

SEQ ID NO: 2207922 - RNA, 19 nt, Artificial Sequence
  Description of Artificial Sequence: Synthetic oligonucleotide
  Sense strand starting at position 3465 of SEQ ID NO: 1883662
agcgauaaucgauugucgu

SEQ ID NO: 2207923 - RNA, 19 nt, Artificial Sequence
  Description of Artificial Sequence: Synthetic oligonucleotide
  Antisense strand to SEQ ID NO: 2207922
acgacaaucgauuaucgcu

SEQ ID NO: 2207924 - RNA, 19 nt, Artificial Sequence
  Description of Artificial Sequence: Synthetic oligonucleotide
  Sense strand starting at position 1917 of SEQ ID NO: 1883662
guaguagaauaccugaaac

SEQ ID NO: 2207925 - RNA, 19 nt, Artificial Sequence
  Description of Artificial Sequence: Synthetic oligonucleotide
  Antisense strand to SEQ ID NO: 2207924
guuucagguauucuacuac

SEQ ID NO: 2207926 - RNA, 19 nt, Artificial Sequence
  Description of Artificial Sequence: Synthetic oligonucleotide
  Sense strand starting at position 3455 of SEQ ID NO: 1883662
cagaaucaagagcgauaau

SEQ ID NO: 2207927 - RNA, 19 nt, Artificial Sequence
  Description of Artificial Sequence: Synthetic oligonucleotide
  Antisense strand to SEQ ID NO: 2207926
auuaucgcucuugauucug

SEQ ID NO: 2207928 - RNA, 19 nt, Artificial Sequence
  Description of Artificial Sequence: Synthetic oligonucleotide
  Sense strand starting at position 1311 of SEQ ID NO: 1883662
acgguugguggcagaaguu

SEQ ID NO: 2207929 - RNA, 19 nt, Artificial Sequence
  Description of Artificial Sequence: Synthetic oligonucleotide
  Antisense strand to SEQ ID NO: 2207928
aacuucugccaccaaccgu

SEQ ID NO: 2207930 - RNA, 19 nt, Artificial Sequence
  Description of Artificial Sequence: Synthetic oligonucleotide
  Sense strand starting at position 2718 of SEQ ID NO: 1883662
agggucuauuucucgccaa

SEQ ID NO: 2207931 - RNA, 19 nt, Artificial Sequence
  Description of Artificial Sequence: Synthetic oligonucleotide
  Antisense strand to SEQ ID NO: 2207930
uuggcgagaaauagacccu

SEQ ID NO: 2207932 - RNA, 19 nt, Artificial Sequence
  Description of Artificial Sequence: Synthetic oligonucleotide
  Sense strand starting at position 3089 of SEQ ID NO: 1883662
ggccuuuguccagagagga

SEQ ID NO: 2207933 - RNA, 19 nt, Artificial Sequence
  Description of Artificial Sequence: Synthetic oligonucleotide
  Antisense strand to SEQ ID NO: 2207932
uccucucuggacaaaggcc

SEQ ID NO: 2207934 - RNA, 19 nt, Artificial Sequence
  Description of Artificial Sequence: Synthetic oligonucleotide
  Sense strand starting at position 1181 of SEQ ID NO: 1883662
agacaaaguauguacgagu

SEQ ID NO: 2207935 - RNA, 19 nt, Artificial Sequence
  Description of Artificial Sequence: Synthetic oligonucleotide
  Antisense strand to SEQ ID NO: 2207934
acucguacauacuuugucu

SEQ ID NO: 2207936 - RNA, 19 nt, Artificial Sequence
  Description of Artificial Sequence: Synthetic oligonucleotide
  Sense strand starting at position 2721 of SEQ ID NO: 1883662
gucuauuucucgccaauag

SEQ ID NO: 2207937 - RNA, 19 nt, Artificial Sequence
  Description of Artificial Sequence: Synthetic oligonucleotide
  Antisense strand to SEQ ID NO: 2207936
cuauuggcgagaaauagac

SEQ ID NO: 2207938 - RNA, 19 nt, Artificial Sequence
  Description of Artificial Sequence: Synthetic oligonucleotide
  Sense strand starting at position 723 of SEQ ID NO: 1883662
gcgggaucauuugcggaca

SEQ ID NO: 2207939 - RNA, 19 nt, Artificial Sequence
  Description of Artificial Sequence: Synthetic oligonucleotide
  Antisense strand to SEQ ID NO: 2207938
uguccgcaaaugaucccgc

SEQ ID NO: 2207940 - RNA, 19 nt, Artificial Sequence
  Description of Artificial Sequence: Synthetic oligonucleotide
  Sense strand starting at position 1857 of SEQ ID NO: 1883662
ucaagcauucuuugagaag

SEQ ID NO: 2207941 - RNA, 19 nt, Artificial Sequence
  Description of Artificial Sequence: Synthetic oligonucleotide
  Antisense strand to SEQ ID NO: 2207940
cuucucaaagaaugcuuga

SEQ ID NO: 2207942 - RNA, 19 nt, Artificial Sequence
  Description of Artificial Sequence: Synthetic oligonucleotide
  Sense strand starting at position 1855 of SEQ ID NO: 1883662
acucaagcauucuuugaga

SEQ ID NO: 2207943 - RNA, 19 nt, Artificial Sequence
  Description of Artificial Sequence: Synthetic oligonucleotide
  Antisense strand to SEQ ID NO: 2207942
ucucaaagaaugcuugagu

SEQ ID NO: 2207944 - RNA, 19 nt, Artificial Sequence
  Description of Artificial Sequence: Synthetic oligonucleotide
  Sense strand starting at position 3523 of SEQ ID NO: 1883662
gcaguagagaagugauaca

SEQ ID NO: 2207945 - RNA, 19 nt, Artificial Sequence
  Description of Artificial Sequence: Synthetic oligonucleotide
  Antisense strand to SEQ ID NO: 2207944
uguaucacuucucuacugc

SEQ ID NO: 2207946 - RNA, 19 nt, Artificial Sequence
  Description of Artificial Sequence: Synthetic oligonucleotide
  Sense strand starting at position 3551 of SEQ ID NO: 1883662
cacucuggccugggagaau

SEQ ID NO: 2207947 - RNA, 19 nt, Artificial Sequence
  Description of Artificial Sequence: Synthetic oligonucleotide
  Antisense strand to SEQ ID NO: 2207946
auucucccaggccagagug

SEQ ID NO: 2207948 - RNA, 19 nt, Artificial Sequence
  Description of Artificial Sequence: Synthetic oligonucleotide
  Sense strand starting at position 1212 of SEQ ID NO: 1883662
cagaguuaggucuauggca

SEQ ID NO: 2207949 - RNA, 19 nt, Artificial Sequence
  Description of Artificial Sequence: Synthetic oligonucleotide
  Antisense strand to SEQ ID NO: 2207948
ugccauagaccuaacucug

SEQ ID NO: 2207950 - RNA, 19 nt, Artificial Sequence
  Description of Artificial Sequence: Synthetic oligonucleotide
  Sense strand starting at position 2920 of SEQ ID NO: 1883662
ccacgaucacaguaauguu

SEQ ID NO: 2207951 - RNA, 19 nt, Artificial Sequence
  Description of Artificial Sequence: Synthetic oligonucleotide
  Antisense strand to SEQ ID NO: 2207950
aacauuacugugaucgugg

SEQ ID NO: 2207952 - RNA, 19 nt, Artificial Sequence
  Description of Artificial Sequence: Synthetic oligonucleotide
  Sense strand starting at position 3307 of SEQ ID NO: 1883662
gcuugcuuugaccaacaga

SEQ ID NO: 2207953 - RNA, 19 nt, Artificial Sequence
  Description of Artificial Sequence: Synthetic oligonucleotide
  Antisense strand to SEQ ID NO: 2207952
ucuguuggucaaagcaagc

SEQ ID NO: 2207954 - RNA, 19 nt, Artificial Sequence
  Description of Artificial Sequence: Synthetic oligonucleotide
  Sense strand starting at position 3343 of SEQ ID NO: 1883662
uuaugugaucuccaaggcu

SEQ ID NO: 2207955 - RNA, 19 nt, Artificial Sequence
  Description of Artificial Sequence: Synthetic oligonucleotide
  Antisense strand to SEQ ID NO: 2207954
agccuuggagaucacauaa

SEQ ID NO: 2207956 - RNA, 19 nt, Artificial Sequence
  Description of Artificial Sequence: Synthetic oligonucleotide
  Sense strand starting at position 1111 of SEQ ID NO: 1883662
agagauaaaggcuguucuu

SEQ ID NO: 2207957 - RNA, 19 nt, Artificial Sequence
  Description of Artificial Sequence: Synthetic oligonucleotide
  Antisense strand to SEQ ID NO: 2207956
aagaacagccuuuaucucu

SEQ ID NO: 2207958 - RNA, 19 nt, Artificial Sequence
  Description of Artificial Sequence: Synthetic oligonucleotide
  Sense strand starting at position 3086 of SEQ ID NO: 1883662
gaaggccuuuguccagaga

SEQ ID NO: 2207959 - RNA, 19 nt, Artificial Sequence
  Description of Artificial Sequence: Synthetic oligonucleotide
  Antisense strand to SEQ ID NO: 2207958
ucucuggacaaaggccuuc

SEQ ID NO: 2207960 - RNA, 19 nt, Artificial Sequence
  Description of Artificial Sequence: Synthetic oligonucleotide
  Sense strand starting at position 18 of SEQ ID NO: 1883662
gcauuucguaauggucacu

SEQ ID NO: 2207961 - RNA, 19 nt, Artificial Sequence
  Description of Artificial Sequence: Synthetic oligonucleotide
  Antisense strand to SEQ ID NO: 2207960
agugaccauuacgaaaugc

SEQ ID NO: 2207962 - RNA, 19 nt, Artificial Sequence
  Description of Artificial Sequence: Synthetic oligonucleotide
  Sense strand starting at position 3653 of SEQ ID NO: 1883662
gaaggagggcucuggguuu

SEQ ID NO: 2207963 - RNA, 19 nt, Artificial Sequence
  Description of Artificial Sequence: Synthetic oligonucleotide
  Antisense strand to SEQ ID NO: 2207962
aaacccagagcccuccuuc

SEQ ID NO: 2207964 - RNA, 19 nt, Artificial Sequence
  Description of Artificial Sequence: Synthetic oligonucleotide
  Sense strand starting at position 2656 of SEQ ID NO: 1883662
cugaacucauuguuaguga

SEQ ID NO: 2207965 - RNA, 19 nt, Artificial Sequence
  Description of Artificial Sequence: Synthetic oligonucleotide
  Antisense strand to SEQ ID NO: 2207964
ucacuaacaaugaguucag

SEQ ID NO: 2207966 - RNA, 19 nt, Artificial Sequence
  Description of Artificial Sequence: Synthetic oligonucleotide
  Sense strand starting at position 60 of SEQ ID NO: 1883662
ccguuuggaagugaguaau

SEQ ID NO: 2207967 - RNA, 19 nt, Artificial Sequence
  Description of Artificial Sequence: Synthetic oligonucleotide
  Antisense strand to SEQ ID NO: 2207966
auuacucacuuccaaacgg

SEQ ID NO: 2207968 - RNA, 19 nt, Artificial Sequence
  Description of Artificial Sequence: Synthetic oligonucleotide
  Sense strand starting at position 1846 of SEQ ID NO: 1883662
acgcuauggacucaagcau

SEQ ID NO: 2207969 - RNA, 19 nt, Artificial Sequence
  Description of Artificial Sequence: Synthetic oligonucleotide
  Antisense strand to SEQ ID NO: 2207968
augcuugaguccauagcgu

SEQ ID NO: 2207970 - RNA, 19 nt, Artificial Sequence
  Description of Artificial Sequence: Synthetic oligonucleotide
  Sense strand starting at position 2754 of SEQ ID NO: 1883662
gcuguugggagcuguauuu

SEQ ID NO: 2207971 - RNA, 19 nt, Artificial Sequence
  Description of Artificial Sequence: Synthetic oligonucleotide
  Antisense strand to SEQ ID NO: 2207970
aaauacagcucccaacagc

SEQ ID NO: 2207972 - RNA, 19 nt, Artificial Sequence
  Description of Artificial Sequence: Synthetic oligonucleotide
  Sense strand starting at position 3563 of SEQ ID NO: 1883662
ggagaaugggcaugucagu

SEQ ID NO: 2207973 - RNA, 19 nt, Artificial Sequence
  Description of Artificial Sequence: Synthetic oligonucleotide
  Antisense strand to SEQ ID NO: 2207972
acugacaugcccauucucc

SEQ ID NO: 2207974 - RNA, 19 nt, Artificial Sequence
  Description of Artificial Sequence: Synthetic oligonucleotide
  Sense strand starting at position 37 of SEQ ID NO: 1883662
gggucaucucucuaagccu

SEQ ID NO: 2207975 - RNA, 19 nt, Artificial Sequence
  Description of Artificial Sequence: Synthetic oligonucleotide
  Antisense strand to SEQ ID NO: 2207974
aggcuuagagagaugaccc

SEQ ID NO: 2207976 - RNA, 19 nt, Artificial Sequence
  Description of Artificial Sequence: Synthetic oligonucleotide
  Sense strand starting at position 3957 of SEQ ID NO: 1883662
gcugcaaggcaguaagaua

SEQ ID NO: 2207977 - RNA, 19 nt, Artificial Sequence
  Description of Artificial Sequence: Synthetic oligonucleotide
  Antisense strand to SEQ ID NO: 2207976
uaucuuacugccuugcagc

SEQ ID NO: 2207978 - RNA, 19 nt, Artificial Sequence
  Description of Artificial Sequence: Synthetic oligonucleotide
  Sense strand starting at position 1507 of SEQ ID NO: 1883662
acaugugaaacccggcaua

SEQ ID NO: 2207979 - RNA, 19 nt, Artificial Sequence
  Description of Artificial Sequence: Synthetic oligonucleotide
  Antisense strand to SEQ ID NO: 2207978
uaugccggguuucacaugu

SEQ ID NO: 2207980 - RNA, 19 nt, Artificial Sequence
  Description of Artificial Sequence: Synthetic oligonucleotide
  Sense strand starting at position 1100 of SEQ ID NO: 1883662
gcgccuucuccagagauaa

SEQ ID NO: 2207981 - RNA, 19 nt, Artificial Sequence
  Description of Artificial Sequence: Synthetic oligonucleotide
  Antisense strand to SEQ ID NO: 2207980
uuaucucuggagaaggcgc

SEQ ID NO: 2207982 - RNA, 19 nt, Artificial Sequence
  Description of Artificial Sequence: Synthetic oligonucleotide
  Sense strand starting at position 2401 of SEQ ID NO: 1883662
aggauuuaguaaugacacu

SEQ ID NO: 2207983 - RNA, 19 nt, Artificial Sequence
  Description of Artificial Sequence: Synthetic oligonucleotide
  Antisense strand to SEQ ID NO: 2207982
agugucauuacuaaauccu

SEQ ID NO: 2207984 - RNA, 19 nt, Artificial Sequence
  Description of Artificial Sequence: Synthetic oligonucleotide
  Sense strand starting at position 3504 of SEQ ID NO: 1883662
ugaggugguuucucucaua

SEQ ID NO: 2207985 - RNA, 19 nt, Artificial Sequence
  Description of Artificial Sequence: Synthetic oligonucleotide
  Antisense strand to SEQ ID NO: 2207984
uaugagagaaaccaccuca

SEQ ID NO: 2207986 - RNA, 19 nt, Artificial Sequence
  Description of Artificial Sequence: Synthetic oligonucleotide
  Sense strand starting at position 3824 of SEQ ID NO: 1883662
cagccaggguguuuagaau

SEQ ID NO: 2207987 - RNA, 19 nt, Artificial Sequence
  Description of Artificial Sequence: Synthetic oligonucleotide
  Antisense strand to SEQ ID NO: 2207986
auucuaaacacccuggcug

SEQ ID NO: 2207988 - RNA, 19 nt, Artificial Sequence
  Description of Artificial Sequence: Synthetic oligonucleotide
  Sense strand starting at position 3346 of SEQ ID NO: 1883662
ugugaucuccaaggcuuga

SEQ ID NO: 2207989 - RNA, 19 nt, Artificial Sequence
  Description of Artificial Sequence: Synthetic oligonucleotide
  Antisense strand to SEQ ID NO: 2207988
ucaagccuuggagaucaca

SEQ ID NO: 2207990 - RNA, 19 nt, Artificial Sequence
  Description of Artificial Sequence: Synthetic oligonucleotide
  Sense strand starting at position 1098 of SEQ ID NO: 1883662
gagcgccuucuccagagau

SEQ ID NO: 2207991 - RNA, 19 nt, Artificial Sequence
  Description of Artificial Sequence: Synthetic oligonucleotide
  Antisense strand to SEQ ID NO: 2207990
aucucuggagaaggcgcuc

SEQ ID NO: 2207992 - RNA, 19 nt, Artificial Sequence
  Description of Artificial Sequence: Synthetic oligonucleotide
  Sense strand starting at position 3831 of SEQ ID NO: 1883662
gguguuuagaauugucaca

SEQ ID NO: 2207993 - RNA, 19 nt, Artificial Sequence
  Description of Artificial Sequence: Synthetic oligonucleotide
  Antisense strand to SEQ ID NO: 2207992
ugugacaauucuaaacacc

SEQ ID NO: 2207994 - RNA, 19 nt, Artificial Sequence
  Description of Artificial Sequence: Synthetic oligonucleotide
  Sense strand starting at position 1817 of SEQ ID NO: 1883663
gugugcaugcgugcauaua

SEQ ID NO: 2207995 - RNA, 19 nt, Artificial Sequence
  Description of Artificial Sequence: Synthetic oligonucleotide
  Antisense strand to SEQ ID NO: 2207994
uauaugcacgcaugcacac

SEQ ID NO: 2207996 - RNA, 19 nt, Artificial Sequence
  Description of Artificial Sequence: Synthetic oligonucleotide
  Sense strand starting at position 2159 of SEQ ID NO: 1883663
ggacaaaggucugauggaa

SEQ ID NO: 2207997 - RNA, 19 nt, Artificial Sequence
  Description of Artificial Sequence: Synthetic oligonucleotide
  Antisense strand to SEQ ID NO: 2207996
uuccaucagaccuuugucc

SEQ ID NO: 2207998 - RNA, 19 nt, Artificial Sequence
  Description of Artificial Sequence: Synthetic oligonucleotide
  Sense strand starting at position 1818 of SEQ ID NO: 1883663
ugugcaugcgugcauauau

SEQ ID NO: 2207999 - RNA, 19 nt, Artificial Sequence
  Description of Artificial Sequence: Synthetic oligonucleotide
  Antisense strand to SEQ ID NO: 2207998
auauaugcacgcaugcaca

SEQ ID NO: 2208000 - RNA, 19 nt, Artificial Sequence
  Description of Artificial Sequence: Synthetic oligonucleotide
  Sense strand starting at position 2159 of SEQ ID NO: 1883664
ggacaaagaucugauggaa

SEQ ID NO: 2208001 - RNA, 19 nt, Artificial Sequence
  Description of Artificial Sequence: Synthetic oligonucleotide
  Antisense strand to SEQ ID NO: 2208000
uuccaucagaucuuugucc

SEQ ID NO: 2208002 - RNA, 19 nt, Artificial Sequence
  Description of Artificial Sequence: Synthetic oligonucleotide
  Sense strand starting at position 2896 of SEQ ID NO: 1883664
gcuaauuaguuguuuguuu

SEQ ID NO: 2208003 - RNA, 19 nt, Artificial Sequence
  Description of Artificial Sequence: Synthetic oligonucleotide
  Antisense strand to SEQ ID NO: 2208002
aaacaaacaacuaauuagc

SEQ ID NO: 2208004 - RNA, 19 nt, Artificial Sequence
  Description of Artificial Sequence: Synthetic oligonucleotide
  Sense strand starting at position 3610 of SEQ ID NO: 1883665
uugugagaagaauggguaa

SEQ ID NO: 2208005 - RNA, 19 nt, Artificial Sequence
  Description of Artificial Sequence: Synthetic oligonucleotide
  Antisense strand to SEQ ID NO: 2208004
uuacccauucuucucacaa

SEQ ID NO: 2208006 - RNA, 19 nt, Artificial Sequence
  Description of Artificial Sequence: Synthetic oligonucleotide
  Sense strand starting at position 3612 of SEQ ID NO: 1883665
gugagaagaauggguaacu

SEQ ID NO: 2208007 - RNA, 19 nt, Artificial Sequence
  Description of Artificial Sequence: Synthetic oligonucleotide
  Antisense strand to SEQ ID NO: 2208006
aguuacccauucuucucac

SEQ ID NO: 2208008 - RNA, 19 nt, Artificial Sequence
  Description of Artificial Sequence: Synthetic oligonucleotide
  Sense strand starting at position 451 of SEQ ID NO: 1883665
gaguaaagacaaugucaac

SEQ ID NO: 2208009 - RNA, 19 nt, Artificial Sequence
  Description of Artificial Sequence: Synthetic oligonucleotide
  Antisense strand to SEQ ID NO: 2208008
guugacauugucuuuacuc

SEQ ID NO: 2208010 - RNA, 19 nt, Artificial Sequence
  Description of Artificial Sequence: Synthetic oligonucleotide
  Sense strand starting at position 3561 of SEQ ID NO: 1883665
auccacagacugugagaua

SEQ ID NO: 2208011 - RNA, 19 nt, Artificial Sequence
  Description of Artificial Sequence: Synthetic oligonucleotide
  Antisense strand to SEQ ID NO: 2208010
uaucucacagucuguggau

SEQ ID NO: 2208012 - RNA, 19 nt, Artificial Sequence
  Description of Artificial Sequence: Synthetic oligonucleotide
  Sense strand starting at position 2866 of SEQ ID NO: 1883665
guggcucaccaauaacaga

SEQ ID NO: 2208013 - RNA, 19 nt, Artificial Sequence
  Description of Artificial Sequence: Synthetic oligonucleotide
  Antisense strand to SEQ ID NO: 2208012
ucuguuauuggugagccac

SEQ ID NO: 2208014 - RNA, 19 nt, Artificial Sequence
  Description of Artificial Sequence: Synthetic oligonucleotide
  Sense strand starting at position 966 of SEQ ID NO: 1883665
ugauucuuacaugggauau

SEQ ID NO: 2208015 - RNA, 19 nt, Artificial Sequence
  Description of Artificial Sequence: Synthetic oligonucleotide
  Antisense strand to SEQ ID NO: 2208014
auaucccauguaagaauca

SEQ ID NO: 2208016 - RNA, 19 nt, Artificial Sequence
  Description of Artificial Sequence: Synthetic oligonucleotide
  Sense strand starting at position 2560 of SEQ ID NO: 1883665
cucauucugcaccaugaga

SEQ ID NO: 2208017 - RNA, 19 nt, Artificial Sequence
  Description of Artificial Sequence: Synthetic oligonucleotide
  Antisense strand to SEQ ID NO: 2208016
ucucauggugcagaaugag

SEQ ID NO: 2208018 - RNA, 19 nt, Artificial Sequence
  Description of Artificial Sequence: Synthetic oligonucleotide
  Sense strand starting at position 910 of SEQ ID NO: 1883665
ccuauuaagccugaugauu

SEQ ID NO: 2208019 - RNA, 19 nt, Artificial Sequence
  Description of Artificial Sequence: Synthetic oligonucleotide
  Antisense strand to SEQ ID NO: 2208018
aaucaucaggcuuaauagg

SEQ ID NO: 2208020 - RNA, 19 nt, Artificial Sequence
  Description of Artificial Sequence: Synthetic oligonucleotide
  Sense strand starting at position 2355 of SEQ ID NO: 1883665
aucugcuucccagagacau

SEQ ID NO: 2208021 - RNA, 19 nt, Artificial Sequence
  Description of Artificial Sequence: Synthetic oligonucleotide
  Antisense strand to SEQ ID NO: 2208020
augucucugggaagcagau

SEQ ID NO: 2208022 - RNA, 19 nt, Artificial Sequence
  Description of Artificial Sequence: Synthetic oligonucleotide
  Sense strand starting at position 824 of SEQ ID NO: 1883665
uguguucugggacaugaca

SEQ ID NO: 2208023 - RNA, 19 nt, Artificial Sequence
  Description of Artificial Sequence: Synthetic oligonucleotide
  Antisense strand to SEQ ID NO: 2208022
ugucaugucccagaacaca

SEQ ID NO: 2208024 - RNA, 19 nt, Artificial Sequence
  Description of Artificial Sequence: Synthetic oligonucleotide
  Sense strand starting at position 2746 of SEQ ID NO: 1883665
cuuguuuaaccauaaagug

SEQ ID NO: 2208025 - RNA, 19 nt, Artificial Sequence
  Description of Artificial Sequence: Synthetic oligonucleotide
  Antisense strand to SEQ ID NO: 2208024
cacuuuaugguuaaacaag

SEQ ID NO: 2208026 - RNA, 19 nt, Artificial Sequence
  Description of Artificial Sequence: Synthetic oligonucleotide
  Sense strand starting at position 27 of SEQ ID NO: 1883665
acagccucucuggaaagua

SEQ ID NO: 2208027 - RNA, 19 nt, Artificial Sequence
  Description of Artificial Sequence: Synthetic oligonucleotide
  Antisense strand to SEQ ID NO: 2208026
uacuuuccagagaggcugu

SEQ ID NO: 2208028 - RNA, 19 nt, Artificial Sequence
  Description of Artificial Sequence: Synthetic oligonucleotide
  Sense strand starting at position 124 of SEQ ID NO: 1883665
agggaagaaguauguggua

SEQ ID NO: 2208029 - RNA, 19 nt, Artificial Sequence
  Description of Artificial Sequence: Synthetic oligonucleotide
  Antisense strand to SEQ ID NO: 2208028
uaccacauacuucuucccu

SEQ ID NO: 2208030 - RNA, 19 nt, Artificial Sequence
  Description of Artificial Sequence: Synthetic oligonucleotide
  Sense strand starting at position 1420 of SEQ ID NO: 1883665
uggagcucugcacaaauga

SEQ ID NO: 2208031 - RNA, 19 nt, Artificial Sequence
  Description of Artificial Sequence: Synthetic oligonucleotide
  Antisense strand to SEQ ID NO: 2208030
ucauuugugcagagcucca

SEQ ID NO: 2208032 - RNA, 19 nt, Artificial Sequence
  Description of Artificial Sequence: Synthetic oligonucleotide
  Sense strand starting at position 2754 of SEQ ID NO: 1883665
accauaaagugguuacuga

SEQ ID NO: 2208033 - RNA, 19 nt, Artificial Sequence
  Description of Artificial Sequence: Synthetic oligonucleotide
  Antisense strand to SEQ ID NO: 2208032
ucaguaaccacuuuauggu

SEQ ID NO: 2208034 - RNA, 19 nt, Artificial Sequence
  Description of Artificial Sequence: Synthetic oligonucleotide
  Sense strand starting at position 3432 of SEQ ID NO: 1883665
ugccaauaccuacaugagu

SEQ ID NO: 2208035 - RNA, 19 nt, Artificial Sequence
  Description of Artificial Sequence: Synthetic oligonucleotide
  Antisense strand to SEQ ID NO: 2208034
acucauguagguauuggca

SEQ ID NO: 2208036 - RNA, 19 nt, Artificial Sequence
  Description of Artificial Sequence: Synthetic oligonucleotide
  Sense strand starting at position 2562 of SEQ ID NO: 1883665
cauucugcaccaugagaga

SEQ ID NO: 2208037 - RNA, 19 nt, Artificial Sequence
  Description of Artificial Sequence: Synthetic oligonucleotide
  Antisense strand to SEQ ID NO: 2208036
ucucucauggugcagaaug

SEQ ID NO: 2208038 - RNA, 19 nt, Artificial Sequence
  Description of Artificial Sequence: Synthetic oligonucleotide
  Sense strand starting at position 3299 of SEQ ID NO: 1883665
gucacaguccucuaacuga

SEQ ID NO: 2208039 - RNA, 19 nt, Artificial Sequence
  Description of Artificial Sequence: Synthetic oligonucleotide
  Antisense strand to SEQ ID NO: 2208038
ucaguuagaggacugugac

SEQ ID NO: 2208040 - RNA, 19 nt, Artificial Sequence
  Description of Artificial Sequence: Synthetic oligonucleotide
  Sense strand starting at position 1078 of SEQ ID NO: 1883665
cugauauuccuacaagugu

SEQ ID NO: 2208041 - RNA, 19 nt, Artificial Sequence
  Description of Artificial Sequence: Synthetic oligonucleotide
  Antisense strand to SEQ ID NO: 2208040
acacuuguaggaauaucag

SEQ ID NO: 2208042 - RNA, 19 nt, Artificial Sequence
  Description of Artificial Sequence: Synthetic oligonucleotide
  Sense strand starting at position 126 of SEQ ID NO: 1883665
ggaagaaguaugugguaug

SEQ ID NO: 2208043 - RNA, 19 nt, Artificial Sequence
  Description of Artificial Sequence: Synthetic oligonucleotide
  Antisense strand to SEQ ID NO: 2208042
cauaccacauacuucuucc

SEQ ID NO: 2208044 - RNA, 19 nt, Artificial Sequence
  Description of Artificial Sequence: Synthetic oligonucleotide
  Sense strand starting at position 960 of SEQ ID NO: 1883665
gggagcugauucuuacaug

SEQ ID NO: 2208045 - RNA, 19 nt, Artificial Sequence
  Description of Artificial Sequence: Synthetic oligonucleotide
  Antisense strand to SEQ ID NO: 2208044
cauguaagaaucagcuccc

SEQ ID NO: 2208046 - RNA, 19 nt, Artificial Sequence
  Description of Artificial Sequence: Synthetic oligonucleotide
  Sense strand starting at position 2056 of SEQ ID NO: 1883665
aggucacuucucuaagguu

SEQ ID NO: 2208047 - RNA, 19 nt, Artificial Sequence
  Description of Artificial Sequence: Synthetic oligonucleotide
  Antisense strand to SEQ ID NO: 2208046
aaccuuagagaagugaccu

SEQ ID NO: 2208048 - RNA, 19 nt, Artificial Sequence
  Description of Artificial Sequence: Synthetic oligonucleotide
  Sense strand starting at position 2916 of SEQ ID NO: 1883665
gucugaaaucaggguauca

SEQ ID NO: 2208049 - RNA, 19 nt, Artificial Sequence
  Description of Artificial Sequence: Synthetic oligonucleotide
  Antisense strand to SEQ ID NO: 2208048
ugauacccugauuucagac

SEQ ID NO: 2208050 - RNA, 19 nt, Artificial Sequence
  Description of Artificial Sequence: Synthetic oligonucleotide
  Sense strand starting at position 136 of SEQ ID NO: 1883665
ugugguaugagccaaauua

SEQ ID NO: 2208051 - RNA, 19 nt, Artificial Sequence
  Description of Artificial Sequence: Synthetic oligonucleotide
  Antisense strand to SEQ ID NO: 2208050
uaauuuggcucauaccaca

SEQ ID NO: 2208052 - RNA, 19 nt, Artificial Sequence
  Description of Artificial Sequence: Synthetic oligonucleotide
  Sense strand starting at position 2862 of SEQ ID NO: 1883665
caggguggcucaccaauaa

SEQ ID NO: 2208053 - RNA, 19 nt, Artificial Sequence
  Description of Artificial Sequence: Synthetic oligonucleotide
  Antisense strand to SEQ ID NO: 2208052
uuauuggugagccacccug

SEQ ID NO: 2208054 - RNA, 19 nt, Artificial Sequence
  Description of Artificial Sequence: Synthetic oligonucleotide
  Sense strand starting at position 2510 of SEQ ID NO: 1883665
guuccaacaguguaauauu

SEQ ID NO: 2208055 - RNA, 19 nt, Artificial Sequence
  Description of Artificial Sequence: Synthetic oligonucleotide
  Antisense strand to SEQ ID NO: 2208054
aauauuacacuguuggaac

SEQ ID NO: 2208056 - RNA, 19 nt, Artificial Sequence
  Description of Artificial Sequence: Synthetic oligonucleotide
  Sense strand starting at position 2450 of SEQ ID NO: 1883665
aaggaagaauuauaaggau

SEQ ID NO: 2208057 - RNA, 19 nt, Artificial Sequence
  Description of Artificial Sequence: Synthetic oligonucleotide
  Antisense strand to SEQ ID NO: 2208056
auccuuauaauucuuccuu

SEQ ID NO: 2208058 - RNA, 19 nt, Artificial Sequence
  Description of Artificial Sequence: Synthetic oligonucleotide
  Sense strand starting at position 278 of SEQ ID NO: 1883665
ucugacugauguccucaua

SEQ ID NO: 2208059 - RNA, 19 nt, Artificial Sequence
  Description of Artificial Sequence: Synthetic oligonucleotide
  Antisense strand to SEQ ID NO: 2208058
uaugaggacaucagucaga

SEQ ID NO: 2208060 - RNA, 19 nt, Artificial Sequence
  Description of Artificial Sequence: Synthetic oligonucleotide
  Sense strand starting at position 909 of SEQ ID NO: 1883665
cccuauuaagccugaugau

SEQ ID NO: 2208061 - RNA, 19 nt, Artificial Sequence
  Description of Artificial Sequence: Synthetic oligonucleotide
  Antisense strand to SEQ ID NO: 2208060
aucaucaggcuuaauaggg

SEQ ID NO: 2208062 - RNA, 19 nt, Artificial Sequence
  Description of Artificial Sequence: Synthetic oligonucleotide
  Sense strand starting at position 113 of SEQ ID NO: 1883665
cugucuucuguagggaaga

SEQ ID NO: 2208063 - RNA, 19 nt, Artificial Sequence
  Description of Artificial Sequence: Synthetic oligonucleotide
  Antisense strand to SEQ ID NO: 2208062
ucuucccuacagaagacag

SEQ ID NO: 2208064 - RNA, 19 nt, Artificial Sequence
  Description of Artificial Sequence: Synthetic oligonucleotide
  Sense strand starting at position 2155 of SEQ ID NO: 1883665
augucaucuccuuaacugu

SEQ ID NO: 2208065 - RNA, 19 nt, Artificial Sequence
  Description of Artificial Sequence: Synthetic oligonucleotide
  Antisense strand to SEQ ID NO: 2208064
acaguuaaggagaugacau

SEQ ID NO: 2208066 - RNA, 19 nt, Artificial Sequence
  Description of Artificial Sequence: Synthetic oligonucleotide
  Sense strand starting at position 804 of SEQ ID NO: 1883665
gcccuagugggcuaagaug

SEQ ID NO: 2208067 - RNA, 19 nt, Artificial Sequence
  Description of Artificial Sequence: Synthetic oligonucleotide
  Antisense strand to SEQ ID NO: 2208066
caucuuagcccacuagggc

SEQ ID NO: 2208068 - RNA, 19 nt, Artificial Sequence
  Description of Artificial Sequence: Synthetic oligonucleotide
  Sense strand starting at position 2037 of SEQ ID NO: 1883665
gccuaucaccaaggaaguu

SEQ ID NO: 2208069 - RNA, 19 nt, Artificial Sequence
  Description of Artificial Sequence: Synthetic oligonucleotide
  Antisense strand to SEQ ID NO: 2208068
aacuuccuuggugauaggc

SEQ ID NO: 2208070 - RNA, 19 nt, Artificial Sequence
  Description of Artificial Sequence: Synthetic oligonucleotide
  Sense strand starting at position 3335 of SEQ ID NO: 1883665
ucaggagcuacccgacaua

SEQ ID NO: 2208071 - RNA, 19 nt, Artificial Sequence
  Description of Artificial Sequence: Synthetic oligonucleotide
  Antisense strand to SEQ ID NO: 2208070
uaugucggguagcuccuga

SEQ ID NO: 2208072 - RNA, 19 nt, Artificial Sequence
  Description of Artificial Sequence: Synthetic oligonucleotide
  Sense strand starting at position 111 of SEQ ID NO: 1883665
gucugucuucuguagggaa

SEQ ID NO: 2208073 - RNA, 19 nt, Artificial Sequence
  Description of Artificial Sequence: Synthetic oligonucleotide
  Antisense strand to SEQ ID NO: 2208072
uucccuacagaagacagac

SEQ ID NO: 2208074 - RNA, 19 nt, Artificial Sequence
  Description of Artificial Sequence: Synthetic oligonucleotide
  Sense strand starting at position 821 of SEQ ID NO: 1883665
ugauguguucugggacaug

SEQ ID NO: 2208075 - RNA, 19 nt, Artificial Sequence
  Description of Artificial Sequence: Synthetic oligonucleotide
  Antisense strand to SEQ ID NO: 2208074
caugucccagaacacauca

SEQ ID NO: 2208076 - RNA, 19 nt, Artificial Sequence
  Description of Artificial Sequence: Synthetic oligonucleotide
  Sense strand starting at position 2642 of SEQ ID NO: 1883665
cuguuauauuuagaaucag

SEQ ID NO: 2208077 - RNA, 19 nt, Artificial Sequence
  Description of Artificial Sequence: Synthetic oligonucleotide
  Antisense strand to SEQ ID NO: 2208076
cugauucuaaauauaacag

SEQ ID NO: 2208078 - RNA, 19 nt, Artificial Sequence
  Description of Artificial Sequence: Synthetic oligonucleotide
  Sense strand starting at position 2508 of SEQ ID NO: 1883665
ggguuccaacaguguaaua

SEQ ID NO: 2208079 - RNA, 19 nt, Artificial Sequence
  Description of Artificial Sequence: Synthetic oligonucleotide
  Antisense strand to SEQ ID NO: 2208078
uauuacacuguuggaaccc

SEQ ID NO: 2208080 - RNA, 19 nt, Artificial Sequence
  Description of Artificial Sequence: Synthetic oligonucleotide
  Sense strand starting at position 1913 of SEQ ID NO: 1883665
gccucagaaagucgggaua

SEQ ID NO: 2208081 - RNA, 19 nt, Artificial Sequence
  Description of Artificial Sequence: Synthetic oligonucleotide
  Antisense strand to SEQ ID NO: 2208080
uaucccgacuuucugaggc

SEQ ID NO: 2208082 - RNA, 19 nt, Artificial Sequence
  Description of Artificial Sequence: Synthetic oligonucleotide
  Sense strand starting at position 2000 of SEQ ID NO: 1883665
gugagugcugguuaucaaa

SEQ ID NO: 2208083 - RNA, 19 nt, Artificial Sequence
  Description of Artificial Sequence: Synthetic oligonucleotide
  Antisense strand to SEQ ID NO: 2208082
uuugauaaccagcacucac

SEQ ID NO: 2208084 - RNA, 19 nt, Artificial Sequence
  Description of Artificial Sequence: Synthetic oligonucleotide
  Sense strand starting at position 3850 of SEQ ID NO: 1883666
aaauuuaggugauacaaag

SEQ ID NO: 2208085 - RNA, 19 nt, Artificial Sequence
  Description of Artificial Sequence: Synthetic oligonucleotide
  Antisense strand to SEQ ID NO: 2208084
cuuuguaucaccuaaauuu

SEQ ID NO: 2208086 - RNA, 19 nt, Artificial Sequence
  Description of Artificial Sequence: Synthetic oligonucleotide
  Sense strand starting at position 2037 of SEQ ID NO: 1883666
ugcauaauagcccagauaa

SEQ ID NO: 2208087 - RNA, 19 nt, Artificial Sequence
  Description of Artificial Sequence: Synthetic oligonucleotide
  Antisense strand to SEQ ID NO: 2208086
uuaucugggcuauuaugca

SEQ ID NO: 2208088 - RNA, 19 nt, Artificial Sequence
  Description of Artificial Sequence: Synthetic oligonucleotide
  Sense strand starting at position 2201 of SEQ ID NO: 1883666
aucagaagauagucuguaa

SEQ ID NO: 2208089 - RNA, 19 nt, Artificial Sequence
  Description of Artificial Sequence: Synthetic oligonucleotide
  Antisense strand to SEQ ID NO: 2208088
uuacagacuaucuucugau

SEQ ID NO: 2208090 - RNA, 19 nt, Artificial Sequence
  Description of Artificial Sequence: Synthetic oligonucleotide
  Sense strand starting at position 3385 of SEQ ID NO: 1883666
caguuauugguugaaucac

SEQ ID NO: 2208091 - RNA, 19 nt, Artificial Sequence
  Description of Artificial Sequence: Synthetic oligonucleotide
  Antisense strand to SEQ ID NO: 2208090
gugauucaaccaauaacug

SEQ ID NO: 2208092 - RNA, 19 nt, Artificial Sequence
  Description of Artificial Sequence: Synthetic oligonucleotide
  Sense strand starting at position 3961 of SEQ ID NO: 1883666
agggucuuaguguauauua

SEQ ID NO: 2208093 - RNA, 19 nt, Artificial Sequence
  Description of Artificial Sequence: Synthetic oligonucleotide
  Antisense strand to SEQ ID NO: 2208092
uaauauacacuaagacccu

SEQ ID NO: 2208094 - RNA, 19 nt, Artificial Sequence
  Description of Artificial Sequence: Synthetic oligonucleotide
  Sense strand starting at position 3384 of SEQ ID NO: 1883666
acaguuauugguugaauca

SEQ ID NO: 2208095 - RNA, 19 nt, Artificial Sequence
  Description of Artificial Sequence: Synthetic oligonucleotide
  Antisense strand to SEQ ID NO: 2208094
ugauucaaccaauaacugu

SEQ ID NO: 2208096 - RNA, 19 nt, Artificial Sequence
  Description of Artificial Sequence: Synthetic oligonucleotide
  Sense strand starting at position 3963 of SEQ ID NO: 1883666
ggucuuaguguauauuaua

SEQ ID NO: 2208097 - RNA, 19 nt, Artificial Sequence
  Description of Artificial Sequence: Synthetic oligonucleotide
  Antisense strand to SEQ ID NO: 2208096
uauaauauacacuaagacc

SEQ ID NO: 2208098 - RNA, 19 nt, Artificial Sequence
  Description of Artificial Sequence: Synthetic oligonucleotide
  Sense strand starting at position 3383 of SEQ ID NO: 1883666
uacaguuauugguugaauc

SEQ ID NO: 2208099 - RNA, 19 nt, Artificial Sequence
  Description of Artificial Sequence: Synthetic oligonucleotide
  Antisense strand to SEQ ID NO: 2208098
gauucaaccaauaacugua

SEQ ID NO: 2208100 - RNA, 19 nt, Artificial Sequence
  Description of Artificial Sequence: Synthetic oligonucleotide
  Sense strand starting at position 2065 of SEQ ID NO: 1883666
cgcuuagagccugauaaau

SEQ ID NO: 2208101 - RNA, 19 nt, Artificial Sequence
  Description of Artificial Sequence: Synthetic oligonucleotide
  Antisense strand to SEQ ID NO: 2208100
auuuaucaggcucuaagcg

SEQ ID NO: 2208102 - RNA, 19 nt, Artificial Sequence
  Description of Artificial Sequence: Synthetic oligonucleotide
  Sense strand starting at position 2074 of SEQ ID NO: 1883666
ccugauaaaugagaggaaa

SEQ ID NO: 2208103 - RNA, 19 nt, Artificial Sequence
  Description of Artificial Sequence: Synthetic oligonucleotide
  Antisense strand to SEQ ID NO: 2208102
uuuccucucauuuaucagg

SEQ ID NO: 2208104 - RNA, 19 nt, Artificial Sequence
  Description of Artificial Sequence: Synthetic oligonucleotide
  Sense strand starting at position 3603 of SEQ ID NO: 1883666
ucagaaauguugucuuauu

SEQ ID NO: 2208105 - RNA, 19 nt, Artificial Sequence
  Description of Artificial Sequence: Synthetic oligonucleotide
  Antisense strand to SEQ ID NO: 2208104
aauaagacaacauuucuga

SEQ ID NO: 2208106 - RNA, 19 nt, Artificial Sequence
  Description of Artificial Sequence: Synthetic oligonucleotide
  Sense strand starting at position 3779 of SEQ ID NO: 1883666
cgaguuuaaugacuuccua

SEQ ID NO: 2208107 - RNA, 19 nt, Artificial Sequence
  Description of Artificial Sequence: Synthetic oligonucleotide
  Antisense strand to SEQ ID NO: 2208106
uaggaagucauuaaacucg

SEQ ID NO: 2208108 - RNA, 19 nt, Artificial Sequence
  Description of Artificial Sequence: Synthetic oligonucleotide
  Sense strand starting at position 3417 of SEQ ID NO: 1883666
auaauucgugcuuagugaa

SEQ ID NO: 2208109 - RNA, 19 nt, Artificial Sequence
  Description of Artificial Sequence: Synthetic oligonucleotide
  Antisense strand to SEQ ID NO: 2208108
uucacuaagcacgaauuau

SEQ ID NO: 2208110 - RNA, 19 nt, Artificial Sequence
  Description of Artificial Sequence: Synthetic oligonucleotide
  Sense strand starting at position 2331 of SEQ ID NO: 1883666
ccaggacaucuguggcagu

SEQ ID NO: 2208111 - RNA, 19 nt, Artificial Sequence
  Description of Artificial Sequence: Synthetic oligonucleotide
  Antisense strand to SEQ ID NO: 2208110
acugccacagauguccugg

SEQ ID NO: 2208112 - RNA, 19 nt, Artificial Sequence
  Description of Artificial Sequence: Synthetic oligonucleotide
  Sense strand starting at position 2064 of SEQ ID NO: 1883666
ucgcuuagagccugauaaa

SEQ ID NO: 2208113 - RNA, 19 nt, Artificial Sequence
  Description of Artificial Sequence: Synthetic oligonucleotide
  Antisense strand to SEQ ID NO: 2208112
uuuaucaggcucuaagcga

SEQ ID NO: 2208114 - RNA, 19 nt, Artificial Sequence
  Description of Artificial Sequence: Synthetic oligonucleotide
  Sense strand starting at position 3416 of SEQ ID NO: 1883666
aauaauucgugcuuaguga

SEQ ID NO: 2208115 - RNA, 19 nt, Artificial Sequence
  Description of Artificial Sequence: Synthetic oligonucleotide
  Antisense strand to SEQ ID NO: 2208114
ucacuaagcacgaauuauu

SEQ ID NO: 2208116 - RNA, 19 nt, Artificial Sequence
  Description of Artificial Sequence: Synthetic oligonucleotide
  Sense strand starting at position 2067 of SEQ ID NO: 1883666
cuuagagccugauaaauga

SEQ ID NO: 2208117 - RNA, 19 nt, Artificial Sequence
  Description of Artificial Sequence: Synthetic oligonucleotide
  Antisense strand to SEQ ID NO: 2208116
ucauuuaucaggcucuaag

SEQ ID NO: 2208118 - RNA, 19 nt, Artificial Sequence
  Description of Artificial Sequence: Synthetic oligonucleotide
  Sense strand starting at position 3557 of SEQ ID NO: 1883666
ucugaaauauauggcaaua

SEQ ID NO: 2208119 - RNA, 19 nt, Artificial Sequence
  Description of Artificial Sequence: Synthetic oligonucleotide
  Antisense strand to SEQ ID NO: 2208118
uauugccauauauuucaga

SEQ ID NO: 2208120 - RNA, 19 nt, Artificial Sequence
  Description of Artificial Sequence: Synthetic oligonucleotide
  Sense strand starting at position 3956 of SEQ ID NO: 1883666
aaauuagggucuuagugua

SEQ ID NO: 2208121 - RNA, 19 nt, Artificial Sequence
  Description of Artificial Sequence: Synthetic oligonucleotide
  Antisense strand to SEQ ID NO: 2208120
uacacuaagacccuaauuu

SEQ ID NO: 2208122 - RNA, 19 nt, Artificial Sequence
  Description of Artificial Sequence: Synthetic oligonucleotide
  Sense strand starting at position 3787 of SEQ ID NO: 1883666
augacuuccuacuauguuu

SEQ ID NO: 2208123 - RNA, 19 nt, Artificial Sequence
  Description of Artificial Sequence: Synthetic oligonucleotide
  Antisense strand to SEQ ID NO: 2208122
aaacauaguaggaagucau

SEQ ID NO: 2208124 - RNA, 19 nt, Artificial Sequence
  Description of Artificial Sequence: Synthetic oligonucleotide
  Sense strand starting at position 2334 of SEQ ID NO: 1883666
ggacaucuguggcaguacu

SEQ ID NO: 2208125 - RNA, 19 nt, Artificial Sequence
  Description of Artificial Sequence: Synthetic oligonucleotide
  Antisense strand to SEQ ID NO: 2208124
aguacugccacagaugucc

SEQ ID NO: 2208126 - RNA, 19 nt, Artificial Sequence
  Description of Artificial Sequence: Synthetic oligonucleotide
  Sense strand starting at position 2332 of SEQ ID NO: 1883666
caggacaucuguggcagua

SEQ ID NO: 2208127 - RNA, 19 nt, Artificial Sequence
  Description of Artificial Sequence: Synthetic oligonucleotide
  Antisense strand to SEQ ID NO: 2208126
uacugccacagauguccug

SEQ ID NO: 2208128 - RNA, 19 nt, Artificial Sequence
  Description of Artificial Sequence: Synthetic oligonucleotide
  Sense strand starting at position 3380 of SEQ ID NO: 1883666
gcauacaguuauugguuga

SEQ ID NO: 2208129 - RNA, 19 nt, Artificial Sequence
  Description of Artificial Sequence: Synthetic oligonucleotide
  Antisense strand to SEQ ID NO: 2208128
ucaaccaauaacuguaugc

SEQ ID NO: 2208130 - RNA, 19 nt, Artificial Sequence
  Description of Artificial Sequence: Synthetic oligonucleotide
  Sense strand starting at position 3420 of SEQ ID NO: 1883666
auucgugcuuagugaaaca

SEQ ID NO: 2208131 - RNA, 19 nt, Artificial Sequence
  Description of Artificial Sequence: Synthetic oligonucleotide
  Antisense strand to SEQ ID NO: 2208130
uguuucacuaagcacgaau

SEQ ID NO: 2208132 - RNA, 19 nt, Artificial Sequence
  Description of Artificial Sequence: Synthetic oligonucleotide
  Sense strand starting at position 3542 of SEQ ID NO: 1883667
auuugugauccacggguau

SEQ ID NO: 2208133 - RNA, 19 nt, Artificial Sequence
  Description of Artificial Sequence: Synthetic oligonucleotide
  Antisense strand to SEQ ID NO: 2208132
auacccguggaucacaaau

SEQ ID NO: 2208134 - RNA, 19 nt, Artificial Sequence
  Description of Artificial Sequence: Synthetic oligonucleotide
  Sense strand starting at position 501 of SEQ ID NO: 1883667
gggauucuggcuuaacuga

SEQ ID NO: 2208135 - RNA, 19 nt, Artificial Sequence
  Description of Artificial Sequence: Synthetic oligonucleotide
  Antisense strand to SEQ ID NO: 2208134
ucaguuaagccagaauccc

SEQ ID NO: 2208136 - RNA, 19 nt, Artificial Sequence
  Description of Artificial Sequence: Synthetic oligonucleotide
  Sense strand starting at position 3755 of SEQ ID NO: 1883667
augaauaugcaccguauuu

SEQ ID NO: 2208137 - RNA, 19 nt, Artificial Sequence
  Description of Artificial Sequence: Synthetic oligonucleotide
  Antisense strand to SEQ ID NO: 2208136
aaauacggugcauauucau

SEQ ID NO: 2208138 - RNA, 19 nt, Artificial Sequence
  Description of Artificial Sequence: Synthetic oligonucleotide
  Sense strand starting at position 2988 of SEQ ID NO: 1883667
aagucauuugcgcauauca

SEQ ID NO: 2208139 - RNA, 19 nt, Artificial Sequence
  Description of Artificial Sequence: Synthetic oligonucleotide
  Antisense strand to SEQ ID NO: 2208138
ugauaugcgcaaaugacuu

SEQ ID NO: 2208140 - RNA, 19 nt, Artificial Sequence
  Description of Artificial Sequence: Synthetic oligonucleotide
  Sense strand starting at position 2509 of SEQ ID NO: 1883667
caugcuugacuauaggauu

SEQ ID NO: 2208141 - RNA, 19 nt, Artificial Sequence
  Description of Artificial Sequence: Synthetic oligonucleotide
  Antisense strand to SEQ ID NO: 2208140
aauccuauagucaagcaug

SEQ ID NO: 2208142 - RNA, 19 nt, Artificial Sequence
  Description of Artificial Sequence: Synthetic oligonucleotide
  Sense strand starting at position 385 of SEQ ID NO: 1883667
gagagauacugggcucaac

SEQ ID NO: 2208143 - RNA, 19 nt, Artificial Sequence
  Description of Artificial Sequence: Synthetic oligonucleotide
  Antisense strand to SEQ ID NO: 2208142
guugagcccaguaucucuc

SEQ ID NO: 2208144 - RNA, 19 nt, Artificial Sequence
  Description of Artificial Sequence: Synthetic oligonucleotide
  Sense strand starting at position 2274 of SEQ ID NO: 1883667
ggagcccuuccucagauga

SEQ ID NO: 2208145 - RNA, 19 nt, Artificial Sequence
  Description of Artificial Sequence: Synthetic oligonucleotide
  Antisense strand to SEQ ID NO: 2208144
ucaucugaggaagggcucc

SEQ ID NO: 2208146 - RNA, 19 nt, Artificial Sequence
  Description of Artificial Sequence: Synthetic oligonucleotide
  Sense strand starting at position 2716 of SEQ ID NO: 1883667
gaaugcaaaugguugauaa

SEQ ID NO: 2208147 - RNA, 19 nt, Artificial Sequence
  Description of Artificial Sequence: Synthetic oligonucleotide
  Antisense strand to SEQ ID NO: 2208146
uuaucaaccauuugcauuc

SEQ ID NO: 2208148 - RNA, 19 nt, Artificial Sequence
  Description of Artificial Sequence: Synthetic oligonucleotide
  Sense strand starting at position 1025 of SEQ ID NO: 1883667
agaagcuaugcagauacuu

SEQ ID NO: 2208149 - RNA, 19 nt, Artificial Sequence
  Description of Artificial Sequence: Synthetic oligonucleotide
  Antisense strand to SEQ ID NO: 2208148
aaguaucugcauagcuucu

SEQ ID NO: 2208150 - RNA, 19 nt, Artificial Sequence
  Description of Artificial Sequence: Synthetic oligonucleotide
  Sense strand starting at position 2376 of SEQ ID NO: 1883667
augguugauccugauagug

SEQ ID NO: 2208151 - RNA, 19 nt, Artificial Sequence
  Description of Artificial Sequence: Synthetic oligonucleotide
  Antisense strand to SEQ ID NO: 2208150
cacuaucaggaucaaccau

SEQ ID NO: 2208152 - RNA, 19 nt, Artificial Sequence
  Description of Artificial Sequence: Synthetic oligonucleotide
  Sense strand starting at position 2990 of SEQ ID NO: 1883667
gucauuugcgcauaucaua

SEQ ID NO: 2208153 - RNA, 19 nt, Artificial Sequence
  Description of Artificial Sequence: Synthetic oligonucleotide
  Antisense strand to SEQ ID NO: 2208152
uaugauaugcgcaaaugac

SEQ ID NO: 2208154 - RNA, 19 nt, Artificial Sequence
  Description of Artificial Sequence: Synthetic oligonucleotide
  Sense strand starting at position 2758 of SEQ ID NO: 1883667
cguauauggaagcaucaaa

SEQ ID NO: 2208155 - RNA, 19 nt, Artificial Sequence
  Description of Artificial Sequence: Synthetic oligonucleotide
  Antisense strand to SEQ ID NO: 2208154
uuugaugcuuccauauacg

SEQ ID NO: 2208156 - RNA, 19 nt, Artificial Sequence
  Description of Artificial Sequence: Synthetic oligonucleotide
  Sense strand starting at position 2707 of SEQ ID NO: 1883667
cagacaggugaaugcaaau

SEQ ID NO: 2208157 - RNA, 19 nt, Artificial Sequence
  Description of Artificial Sequence: Synthetic oligonucleotide
  Antisense strand to SEQ ID NO: 2208156
auuugcauucaccugucug

SEQ ID NO: 2208158 - RNA, 19 nt, Artificial Sequence
  Description of Artificial Sequence: Synthetic oligonucleotide
  Sense strand starting at position 2717 of SEQ ID NO: 1883667
aaugcaaaugguugauaag

SEQ ID NO: 2208159 - RNA, 19 nt, Artificial Sequence
  Description of Artificial Sequence: Synthetic oligonucleotide
  Antisense strand to SEQ ID NO: 2208158
cuuaucaaccauuugcauu

SEQ ID NO: 2208160 - RNA, 19 nt, Artificial Sequence
  Description of Artificial Sequence: Synthetic oligonucleotide
  Sense strand starting at position 3140 of SEQ ID NO: 1883667
gaauuauagggaugcccau

SEQ ID NO: 2208161 - RNA, 19 nt, Artificial Sequence
  Description of Artificial Sequence: Synthetic oligonucleotide
  Antisense strand to SEQ ID NO: 2208160
augggcaucccuauaauuc

SEQ ID NO: 2208162 - RNA, 19 nt, Artificial Sequence
  Description of Artificial Sequence: Synthetic oligonucleotide
  Sense strand starting at position 2750 of SEQ ID NO: 1883667
uaucaagucguauauggaa

SEQ ID NO: 2208163 - RNA, 19 nt, Artificial Sequence
  Description of Artificial Sequence: Synthetic oligonucleotide
  Antisense strand to SEQ ID NO: 2208162
uuccauauacgacuugaua

SEQ ID NO: 2208164 - RNA, 19 nt, Artificial Sequence
  Description of Artificial Sequence: Synthetic oligonucleotide
  Sense strand starting at position 521 of SEQ ID NO: 1883667
cugagaggauuauugcuga

SEQ ID NO: 2208165 - RNA, 19 nt, Artificial Sequence
  Description of Artificial Sequence: Synthetic oligonucleotide
  Antisense strand to SEQ ID NO: 2208164
ucagcaauaauccucucag

SEQ ID NO: 2208166 - RNA, 19 nt, Artificial Sequence
  Description of Artificial Sequence: Synthetic oligonucleotide
  Sense strand starting at position 556 of SEQ ID NO: 1883667
ccagacaucaucugggagu

SEQ ID NO: 2208167 - RNA, 19 nt, Artificial Sequence
  Description of Artificial Sequence: Synthetic oligonucleotide
  Antisense strand to SEQ ID NO: 2208166
acucccagaugaugucugg

SEQ ID NO: 2208168 - RNA, 19 nt, Artificial Sequence
  Description of Artificial Sequence: Synthetic oligonucleotide
  Sense strand starting at position 1014 of SEQ ID NO: 1883667
ggucucuuugaagaagcua

SEQ ID NO: 2208169 - RNA, 19 nt, Artificial Sequence
  Description of Artificial Sequence: Synthetic oligonucleotide
  Antisense strand to SEQ ID NO: 2208168
uagcuucuucaaagagacc

SEQ ID NO: 2208170 - RNA, 19 nt, Artificial Sequence
  Description of Artificial Sequence: Synthetic oligonucleotide
  Sense strand starting at position 1573 of SEQ ID NO: 1883667
cuuuaauguggcuaagaug

SEQ ID NO: 2208171 - RNA, 19 nt, Artificial Sequence
  Description of Artificial Sequence: Synthetic oligonucleotide
  Antisense strand to SEQ ID NO: 2208170
caucuuagccacauuaaag

SEQ ID NO: 2208172 - RNA, 19 nt, Artificial Sequence
  Description of Artificial Sequence: Synthetic oligonucleotide
  Sense strand starting at position 928 of SEQ ID NO: 1883667
cccggaaagacuugugaag

SEQ ID NO: 2208173 - RNA, 19 nt, Artificial Sequence
  Description of Artificial Sequence: Synthetic oligonucleotide
  Antisense strand to SEQ ID NO: 2208172
cuucacaagucuuuccggg

SEQ ID NO: 2208174 - RNA, 19 nt, Artificial Sequence
  Description of Artificial Sequence: Synthetic oligonucleotide
  Sense strand starting at position 1022 of SEQ ID NO: 1883667
ugaagaagcuaugcagaua

SEQ ID NO: 2208175 - RNA, 19 nt, Artificial Sequence
  Description of Artificial Sequence: Synthetic oligonucleotide
  Antisense strand to SEQ ID NO: 2208174
uaucugcauagcuucuuca

SEQ ID NO: 2208176 - RNA, 19 nt, Artificial Sequence
  Description of Artificial Sequence: Synthetic oligonucleotide
  Sense strand starting at position 2204 of SEQ ID NO: 1883667
acaggaaaguucccuaagu

SEQ ID NO: 2208177 - RNA, 19 nt, Artificial Sequence
  Description of Artificial Sequence: Synthetic oligonucleotide
  Antisense strand to SEQ ID NO: 2208176
acuuagggaacuuuccugu

SEQ ID NO: 2208178 - RNA, 19 nt, Artificial Sequence
  Description of Artificial Sequence: Synthetic oligonucleotide
  Sense strand starting at position 2802 of SEQ ID NO: 1883667
ucuaucuugguuuaucaua

SEQ ID NO: 2208179 - RNA, 19 nt, Artificial Sequence
  Description of Artificial Sequence: Synthetic oligonucleotide
  Antisense strand to SEQ ID NO: 2208178
uaugauaaaccaagauaga

SEQ ID NO: 2208180 - RNA, 19 nt, Artificial Sequence
  Description of Artificial Sequence: Synthetic oligonucleotide
  Sense strand starting at position 2968 of SEQ ID NO: 1883667
ucaucuagucugcagaaau

SEQ ID NO: 2208181 - RNA, 19 nt, Artificial Sequence
  Description of Artificial Sequence: Synthetic oligonucleotide
  Antisense strand to SEQ ID NO: 2208180
auuucugcagacuagauga

SEQ ID NO: 2208182 - RNA, 19 nt, Artificial Sequence
  Description of Artificial Sequence: Synthetic oligonucleotide
  Sense strand starting at position 1230 of SEQ ID NO: 1883667
gggcaucucaggcauggau

SEQ ID NO: 2208183 - RNA, 19 nt, Artificial Sequence
  Description of Artificial Sequence: Synthetic oligonucleotide
  Antisense strand to SEQ ID NO: 2208182
auccaugccugagaugccc

SEQ ID NO: 2208184 - RNA, 19 nt, Artificial Sequence
  Description of Artificial Sequence: Synthetic oligonucleotide
  Sense strand starting at position 508 of SEQ ID NO: 1883667
uggcuuaacugaccugaga

SEQ ID NO: 2208185 - RNA, 19 nt, Artificial Sequence
  Description of Artificial Sequence: Synthetic oligonucleotide
  Antisense strand to SEQ ID NO: 2208184
ucucaggucaguuaagcca

SEQ ID NO: 2208186 - RNA, 19 nt, Artificial Sequence
  Description of Artificial Sequence: Synthetic oligonucleotide
  Sense strand starting at position 3104 of SEQ ID NO: 1883667
agauauuaagcauguugag

SEQ ID NO: 2208187 - RNA, 19 nt, Artificial Sequence
  Description of Artificial Sequence: Synthetic oligonucleotide
  Antisense strand to SEQ ID NO: 2208186
cucaacaugcuuaauaucu

SEQ ID NO: 2208188 - RNA, 19 nt, Artificial Sequence
  Description of Artificial Sequence: Synthetic oligonucleotide
  Sense strand starting at position 2310 of SEQ ID NO: 1883667
uuagauuaggcuggacauu

SEQ ID NO: 2208189 - RNA, 19 nt, Artificial Sequence
  Description of Artificial Sequence: Synthetic oligonucleotide
  Antisense strand to SEQ ID NO: 2208188
aauguccagccuaaucuaa

SEQ ID NO: 2208190 - RNA, 19 nt, Artificial Sequence
  Description of Artificial Sequence: Synthetic oligonucleotide
  Sense strand starting at position 2309 of SEQ ID NO: 1883667
uuuagauuaggcuggacau

SEQ ID NO: 2208191 - RNA, 19 nt, Artificial Sequence
  Description of Artificial Sequence: Synthetic oligonucleotide
  Antisense strand to SEQ ID NO: 2208190
auguccagccuaaucuaaa

SEQ ID NO: 2208192 - RNA, 19 nt, Artificial Sequence
  Description of Artificial Sequence: Synthetic oligonucleotide
  Sense strand starting at position 1959 of SEQ ID NO: 1883667
caagguuuacugugaagac

SEQ ID NO: 2208193 - RNA, 19 nt, Artificial Sequence
  Description of Artificial Sequence: Synthetic oligonucleotide
  Antisense strand to SEQ ID NO: 2208192
gucuucacaguaaaccuug

SEQ ID NO: 2208194 - RNA, 19 nt, Artificial Sequence
  Description of Artificial Sequence: Synthetic oligonucleotide
  Sense strand starting at position 2723 of SEQ ID NO: 1883667
aaugguugauaagcauauu

SEQ ID NO: 2208195 - RNA, 19 nt, Artificial Sequence
  Description of Artificial Sequence: Synthetic oligonucleotide
  Antisense strand to SEQ ID NO: 2208194
aauaugcuuaucaaccauu

SEQ ID NO: 2208196 - RNA, 19 nt, Artificial Sequence
  Description of Artificial Sequence: Synthetic oligonucleotide
  Sense strand starting at position 424 of SEQ ID NO: 1883667
gugggaauuuaucaccaag

SEQ ID NO: 2208197 - RNA, 19 nt, Artificial Sequence
  Description of Artificial Sequence: Synthetic oligonucleotide
  Antisense strand to SEQ ID NO: 2208196
cuuggugauaaauucccac

SEQ ID NO: 2208198 - RNA, 19 nt, Artificial Sequence
  Description of Artificial Sequence: Synthetic oligonucleotide
  Sense strand starting at position 2423 of SEQ ID NO: 1883667
ggagaaacauuugacuugu

SEQ ID NO: 2208199 - RNA, 19 nt, Artificial Sequence
  Description of Artificial Sequence: Synthetic oligonucleotide
  Antisense strand to SEQ ID NO: 2208198
acaagucaaauguuucucc

SEQ ID NO: 2208200 - RNA, 19 nt, Artificial Sequence
  Description of Artificial Sequence: Synthetic oligonucleotide
  Sense strand starting at position 2205 of SEQ ID NO: 1883667
caggaaaguucccuaaguc

SEQ ID NO: 2208201 - RNA, 19 nt, Artificial Sequence
  Description of Artificial Sequence: Synthetic oligonucleotide
  Antisense strand to SEQ ID NO: 2208200
gacuuagggaacuuuccug

SEQ ID NO: 2208202 - RNA, 19 nt, Artificial Sequence
  Description of Artificial Sequence: Synthetic oligonucleotide
  Sense strand starting at position 2987 of SEQ ID NO: 1883667
gaagucauuugcgcauauc

SEQ ID NO: 2208203 - RNA, 19 nt, Artificial Sequence
  Description of Artificial Sequence: Synthetic oligonucleotide
  Antisense strand to SEQ ID NO: 2208202
gauaugcgcaaaugacuuc

SEQ ID NO: 2208204 - RNA, 19 nt, Artificial Sequence
  Description of Artificial Sequence: Synthetic oligonucleotide
  Sense strand starting at position 3084 of SEQ ID NO: 1883667
ccuaauauagaguaucguu

SEQ ID NO: 2208205 - RNA, 19 nt, Artificial Sequence
  Description of Artificial Sequence: Synthetic oligonucleotide
  Antisense strand to SEQ ID NO: 2208204
aacgauacucuauauuagg

SEQ ID NO: 2208206 - RNA, 19 nt, Artificial Sequence
  Description of Artificial Sequence: Synthetic oligonucleotide
  Sense strand starting at position 2362 of SEQ ID NO: 1883667
cggagaugaccguaauggu

SEQ ID NO: 2208207 - RNA, 19 nt, Artificial Sequence
  Description of Artificial Sequence: Synthetic oligonucleotide
  Antisense strand to SEQ ID NO: 2208206
accauuacggucaucuccg

SEQ ID NO: 2208208 - RNA, 19 nt, Artificial Sequence
  Description of Artificial Sequence: Synthetic oligonucleotide
  Sense strand starting at position 3595 of SEQ ID NO: 1883667
gcagaaguuguguaacaua

SEQ ID NO: 2208209 - RNA, 19 nt, Artificial Sequence
  Description of Artificial Sequence: Synthetic oligonucleotide
  Antisense strand to SEQ ID NO: 2208208
uauguuacacaacuucugc

SEQ ID NO: 2208210 - RNA, 19 nt, Artificial Sequence
  Description of Artificial Sequence: Synthetic oligonucleotide
  Sense strand starting at position 3624 of SEQ ID NO: 1883667
ccucaauacugguuccaug

SEQ ID NO: 2208211 - RNA, 19 nt, Artificial Sequence
  Description of Artificial Sequence: Synthetic oligonucleotide
  Antisense strand to SEQ ID NO: 2208210
cauggaaccaguauugagg

SEQ ID NO: 2208212 - RNA, 19 nt, Artificial Sequence
  Description of Artificial Sequence: Synthetic oligonucleotide
  Sense strand starting at position 1844 of SEQ ID NO: 1883668
agauuuagcuuauccuguu

SEQ ID NO: 2208213 - RNA, 19 nt, Artificial Sequence
  Description of Artificial Sequence: Synthetic oligonucleotide
  Antisense strand to SEQ ID NO: 2208212
aacaggauaagcuaaaucu

SEQ ID NO: 2208214 - RNA, 19 nt, Artificial Sequence
  Description of Artificial Sequence: Synthetic oligonucleotide
  Sense strand starting at position 3114 of SEQ ID NO: 1883668
gugccugacaguuccguau

SEQ ID NO: 2208215 - RNA, 19 nt, Artificial Sequence
  Description of Artificial Sequence: Synthetic oligonucleotide
  Antisense strand to SEQ ID NO: 2208214
auacggaacugucaggcac

SEQ ID NO: 2208216 - RNA, 19 nt, Artificial Sequence
  Description of Artificial Sequence: Synthetic oligonucleotide
  Sense strand starting at position 487 of SEQ ID NO: 1883668
acaugucccaccgaaggau

SEQ ID NO: 2208217 - RNA, 19 nt, Artificial Sequence
  Description of Artificial Sequence: Synthetic oligonucleotide
  Antisense strand to SEQ ID NO: 2208216
auccuucggugggacaugu

SEQ ID NO: 2208218 - RNA, 19 nt, Artificial Sequence
  Description of Artificial Sequence: Synthetic oligonucleotide
  Sense strand starting at position 258 of SEQ ID NO: 1883668
gaggguuaauuguuagaaa

SEQ ID NO: 2208219 - RNA, 19 nt, Artificial Sequence
  Description of Artificial Sequence: Synthetic oligonucleotide
  Antisense strand to SEQ ID NO: 2208218
uuucuaacaauuaacccuc

SEQ ID NO: 2208220 - RNA, 19 nt, Artificial Sequence
  Description of Artificial Sequence: Synthetic oligonucleotide
  Sense strand starting at position 3414 of SEQ ID NO: 1883668
ucuauauuaggagguugaa

SEQ ID NO: 2208221 - RNA, 19 nt, Artificial Sequence
  Description of Artificial Sequence: Synthetic oligonucleotide
  Antisense strand to SEQ ID NO: 2208220
uucaaccuccuaauauaga

SEQ ID NO: 2208222 - RNA, 19 nt, Artificial Sequence
  Description of Artificial Sequence: Synthetic oligonucleotide
  Sense strand starting at position 20 of SEQ ID NO: 1883668
gucauugcugaagagacau

SEQ ID NO: 2208223 - RNA, 19 nt, Artificial Sequence
  Description of Artificial Sequence: Synthetic oligonucleotide
  Antisense strand to SEQ ID NO: 2208222
augucucuucagcaaugac

SEQ ID NO: 2208224 - RNA, 19 nt, Artificial Sequence
  Description of Artificial Sequence: Synthetic oligonucleotide
  Sense strand starting at position 3644 of SEQ ID NO: 1883668
guauaauauggccacugga

SEQ ID NO: 2208225 - RNA, 19 nt, Artificial Sequence
  Description of Artificial Sequence: Synthetic oligonucleotide
  Antisense strand to SEQ ID NO: 2208224
uccaguggccauauuauac

SEQ ID NO: 2208226 - RNA, 19 nt, Artificial Sequence
  Description of Artificial Sequence: Synthetic oligonucleotide
  Sense strand starting at position 1314 of SEQ ID NO: 1883668
aggauuaagucuuccaaua

SEQ ID NO: 2208227 - RNA, 19 nt, Artificial Sequence
  Description of Artificial Sequence: Synthetic oligonucleotide
  Antisense strand to SEQ ID NO: 2208226
uauuggaagacuuaauccu

SEQ ID NO: 2208228 - RNA, 19 nt, Artificial Sequence
  Description of Artificial Sequence: Synthetic oligonucleotide
  Sense strand starting at position 247 of SEQ ID NO: 1883668
agucauguagcgaggguua

SEQ ID NO: 2208229 - RNA, 19 nt, Artificial Sequence
  Description of Artificial Sequence: Synthetic oligonucleotide
  Antisense strand to SEQ ID NO: 2208228
uaacccucgcuacaugacu

SEQ ID NO: 2208230 - RNA, 19 nt, Artificial Sequence
  Description of Artificial Sequence: Synthetic oligonucleotide
  Sense strand starting at position 3980 of SEQ ID NO: 1883668
ggaaaucaauguguuaaca

SEQ ID NO: 2208231 - RNA, 19 nt, Artificial Sequence
  Description of Artificial Sequence: Synthetic oligonucleotide
  Antisense strand to SEQ ID NO: 2208230
uguuaacacauugauuucc

SEQ ID NO: 2208232 - RNA, 19 nt, Artificial Sequence
  Description of Artificial Sequence: Synthetic oligonucleotide
  Sense strand starting at position 2732 of SEQ ID NO: 1883668
agcauuugcuaucugugaa

SEQ ID NO: 2208233 - RNA, 19 nt, Artificial Sequence
  Description of Artificial Sequence: Synthetic oligonucleotide
  Antisense strand to SEQ ID NO: 2208232
uucacagauagcaaaugcu

SEQ ID NO: 2208234 - RNA, 19 nt, Artificial Sequence
  Description of Artificial Sequence: Synthetic oligonucleotide
  Sense strand starting at position 3749 of SEQ ID NO: 1883668
augucaaugauguaagggu

SEQ ID NO: 2208235 - RNA, 19 nt, Artificial Sequence
  Description of Artificial Sequence: Synthetic oligonucleotide
  Antisense strand to SEQ ID NO: 2208234
acccuuacaucauugacau

SEQ ID NO: 2208236 - RNA, 19 nt, Artificial Sequence
  Description of Artificial Sequence: Synthetic oligonucleotide
  Sense strand starting at position 3977 of SEQ ID NO: 1883668
uaaggaaaucaauguguua

SEQ ID NO: 2208237 - RNA, 19 nt, Artificial Sequence
  Description of Artificial Sequence: Synthetic oligonucleotide
  Antisense strand to SEQ ID NO: 2208236
uaacacauugauuuccuua

SEQ ID NO: 2208238 - RNA, 19 nt, Artificial Sequence
  Description of Artificial Sequence: Synthetic oligonucleotide
  Sense strand starting at position 310 of SEQ ID NO: 1883668
ccgucuuugaguuugcuuu

SEQ ID NO: 2208239 - RNA, 19 nt, Artificial Sequence
  Description of Artificial Sequence: Synthetic oligonucleotide
  Antisense strand to SEQ ID NO: 2208238
aaagcaaacucaaagacgg

SEQ ID NO: 2208240 - RNA, 19 nt, Artificial Sequence
  Description of Artificial Sequence: Synthetic oligonucleotide
  Sense strand starting at position 2009 of SEQ ID NO: 1883668
aaugaaugaccuugguuau

SEQ ID NO: 2208241 - RNA, 19 nt, Artificial Sequence
  Description of Artificial Sequence: Synthetic oligonucleotide
  Antisense strand to SEQ ID NO: 2208240
auaaccaaggucauucauu

SEQ ID NO: 2208242 - RNA, 19 nt, Artificial Sequence
  Description of Artificial Sequence: Synthetic oligonucleotide
  Sense strand starting at position 2594 of SEQ ID NO: 1883668
cauuauugugcugaugaaa

SEQ ID NO: 2208243 - RNA, 19 nt, Artificial Sequence
  Description of Artificial Sequence: Synthetic oligonucleotide
  Antisense strand to SEQ ID NO: 2208242
uuucaucagcacaauaaug

SEQ ID NO: 2208244 - RNA, 19 nt, Artificial Sequence
  Description of Artificial Sequence: Synthetic oligonucleotide
  Sense strand starting at position 2012 of SEQ ID NO: 1883668
gaaugaccuugguuauuag

SEQ ID NO: 2208245 - RNA, 19 nt, Artificial Sequence
  Description of Artificial Sequence: Synthetic oligonucleotide
  Antisense strand to SEQ ID NO: 2208244
cuaauaaccaaggucauuc

SEQ ID NO: 2208246 - RNA, 19 nt, Artificial Sequence
  Description of Artificial Sequence: Synthetic oligonucleotide
  Sense strand starting at position 3888 of SEQ ID NO: 1883668
agaauaggagccuguaaua

SEQ ID NO: 2208247 - RNA, 19 nt, Artificial Sequence
  Description of Artificial Sequence: Synthetic oligonucleotide
  Antisense strand to SEQ ID NO: 2208246
uauuacaggcuccuauucu

SEQ ID NO: 2208248 - RNA, 19 nt, Artificial Sequence
  Description of Artificial Sequence: Synthetic oligonucleotide
  Sense strand starting at position 3483 of SEQ ID NO: 1883668
uugggauuggccuggaaga

SEQ ID NO: 2208249 - RNA, 19 nt, Artificial Sequence
  Description of Artificial Sequence: Synthetic oligonucleotide
  Antisense strand to SEQ ID NO: 2208248
ucuuccaggccaaucccaa

SEQ ID NO: 2208250 - RNA, 19 nt, Artificial Sequence
  Description of Artificial Sequence: Synthetic oligonucleotide
  Sense strand starting at position 3484 of SEQ ID NO: 1883668
ugggauuggccuggaagau

SEQ ID NO: 2208251 - RNA, 19 nt, Artificial Sequence
  Description of Artificial Sequence: Synthetic oligonucleotide
  Antisense strand to SEQ ID NO: 2208250
aucuuccaggccaauccca

SEQ ID NO: 2208252 - RNA, 19 nt, Artificial Sequence
  Description of Artificial Sequence: Synthetic oligonucleotide
  Sense strand starting at position 1941 of SEQ ID NO: 1883668
uuccucuggcaugagauua

SEQ ID NO: 2208253 - RNA, 19 nt, Artificial Sequence
  Description of Artificial Sequence: Synthetic oligonucleotide
  Antisense strand to SEQ ID NO: 2208252
uaaucucaugccagaggaa

SEQ ID NO: 2208254 - RNA, 19 nt, Artificial Sequence
  Description of Artificial Sequence: Synthetic oligonucleotide
  Sense strand starting at position 1818 of SEQ ID NO: 1883668
cauucugguguccagaaua

SEQ ID NO: 2208255 - RNA, 19 nt, Artificial Sequence
  Description of Artificial Sequence: Synthetic oligonucleotide
  Antisense strand to SEQ ID NO: 2208254
uauucuggacaccagaaug

SEQ ID NO: 2208256 - RNA, 19 nt, Artificial Sequence
  Description of Artificial Sequence: Synthetic oligonucleotide
  Sense strand starting at position 228 of SEQ ID NO: 1883668
cucggucucagauauacag

SEQ ID NO: 2208257 - RNA, 19 nt, Artificial Sequence
  Description of Artificial Sequence: Synthetic oligonucleotide
  Antisense strand to SEQ ID NO: 2208256
cuguauaucugagaccgag

SEQ ID NO: 2208258 - RNA, 19 nt, Artificial Sequence
  Description of Artificial Sequence: Synthetic oligonucleotide
  Sense strand starting at position 428 of SEQ ID NO: 1883668
ugaucuuguaagugaaaga

SEQ ID NO: 2208259 - RNA, 19 nt, Artificial Sequence
  Description of Artificial Sequence: Synthetic oligonucleotide
  Antisense strand to SEQ ID NO: 2208258
ucuuucacuuacaagauca

SEQ ID NO: 2208260 - RNA, 19 nt, Artificial Sequence
  Description of Artificial Sequence: Synthetic oligonucleotide
  Sense strand starting at position 722 of SEQ ID NO: 1883668
ugagucaucacccaugggu

SEQ ID NO: 2208261 - RNA, 19 nt, Artificial Sequence
  Description of Artificial Sequence: Synthetic oligonucleotide
  Antisense strand to SEQ ID NO: 2208260
acccaugggugaugacuca

SEQ ID NO: 2208262 - RNA, 19 nt, Artificial Sequence
  Description of Artificial Sequence: Synthetic oligonucleotide
  Sense strand starting at position 3701 of SEQ ID NO: 1883668
cgaaauuguggccauaaua

SEQ ID NO: 2208263 - RNA, 19 nt, Artificial Sequence
  Description of Artificial Sequence: Synthetic oligonucleotide
  Antisense strand to SEQ ID NO: 2208262
uauuauggccacaauuucg

SEQ ID NO: 2208264 - RNA, 19 nt, Artificial Sequence
  Description of Artificial Sequence: Synthetic oligonucleotide
  Sense strand starting at position 427 of SEQ ID NO: 1883668
uugaucuuguaagugaaag

SEQ ID NO: 2208265 - RNA, 19 nt, Artificial Sequence
  Description of Artificial Sequence: Synthetic oligonucleotide
  Antisense strand to SEQ ID NO: 2208264
cuuucacuuacaagaucaa

SEQ ID NO: 2208266 - RNA, 19 nt, Artificial Sequence
  Description of Artificial Sequence: Synthetic oligonucleotide
  Sense strand starting at position 220 of SEQ ID NO: 1883668
agaagauacucggucucag

SEQ ID NO: 2208267 - RNA, 19 nt, Artificial Sequence
  Description of Artificial Sequence: Synthetic oligonucleotide
  Antisense strand to SEQ ID NO: 2208266
cugagaccgaguaucuucu

SEQ ID NO: 2208268 - RNA, 19 nt, Artificial Sequence
  Description of Artificial Sequence: Synthetic oligonucleotide
  Sense strand starting at position 2010 of SEQ ID NO: 1883668
augaaugaccuugguuauu

SEQ ID NO: 2208269 - RNA, 19 nt, Artificial Sequence
  Description of Artificial Sequence: Synthetic oligonucleotide
  Antisense strand to SEQ ID NO: 2208268
aauaaccaaggucauucau

SEQ ID NO: 2208270 - RNA, 19 nt, Artificial Sequence
  Description of Artificial Sequence: Synthetic oligonucleotide
  Sense strand starting at position 2699 of SEQ ID NO: 1883668
uaaacaucugagugaggca

SEQ ID NO: 2208271 - RNA, 19 nt, Artificial Sequence
  Description of Artificial Sequence: Synthetic oligonucleotide
  Antisense strand to SEQ ID NO: 2208270
ugccucacucagauguuua

SEQ ID NO: 2208272 - RNA, 19 nt, Artificial Sequence
  Description of Artificial Sequence: Synthetic oligonucleotide
  Sense strand starting at position 2683 of SEQ ID NO: 1883668
cauggagaggaguguguaa

SEQ ID NO: 2208273 - RNA, 19 nt, Artificial Sequence
  Description of Artificial Sequence: Synthetic oligonucleotide
  Antisense strand to SEQ ID NO: 2208272
uuacacacuccucuccaug

SEQ ID NO: 2208274 - RNA, 19 nt, Artificial Sequence
  Description of Artificial Sequence: Synthetic oligonucleotide
  Sense strand starting at position 1303 of SEQ ID NO: 1883668
ccggucacugaaggauuaa

SEQ ID NO: 2208275 - RNA, 19 nt, Artificial Sequence
  Description of Artificial Sequence: Synthetic oligonucleotide
  Antisense strand to SEQ ID NO: 2208274
uuaauccuucagugaccgg

SEQ ID NO: 2208276 - RNA, 19 nt, Artificial Sequence
  Description of Artificial Sequence: Synthetic oligonucleotide
  Sense strand starting at position 3197 of SEQ ID NO: 1883668
ucagauaaacauuguagca

SEQ ID NO: 2208277 - RNA, 19 nt, Artificial Sequence
  Description of Artificial Sequence: Synthetic oligonucleotide
  Antisense strand to SEQ ID NO: 2208276
ugcuacaauguuuaucuga

SEQ ID NO: 2208278 - RNA, 19 nt, Artificial Sequence
  Description of Artificial Sequence: Synthetic oligonucleotide
  Sense strand starting at position 3723 of SEQ ID NO: 1883668
caacuuguuuaggcagaaa

SEQ ID NO: 2208279 - RNA, 19 nt, Artificial Sequence
  Description of Artificial Sequence: Synthetic oligonucleotide
  Antisense strand to SEQ ID NO: 2208278
uuucugccuaaacaaguug

SEQ ID NO: 2208280 - RNA, 19 nt, Artificial Sequence
  Description of Artificial Sequence: Synthetic oligonucleotide
  Sense strand starting at position 3275 of SEQ ID NO: 1883668
acugaauucuggcugaauu

SEQ ID NO: 2208281 - RNA, 19 nt, Artificial Sequence
  Description of Artificial Sequence: Synthetic oligonucleotide
  Antisense strand to SEQ ID NO: 2208280
aauucagccagaauucagu

SEQ ID NO: 2208282 - RNA, 19 nt, Artificial Sequence
  Description of Artificial Sequence: Synthetic oligonucleotide
  Sense strand starting at position 1952 of SEQ ID NO: 1883668
ugagauuacugguucccau

SEQ ID NO: 2208283 - RNA, 19 nt, Artificial Sequence
  Description of Artificial Sequence: Synthetic oligonucleotide
  Antisense strand to SEQ ID NO: 2208282
augggaaccaguaaucuca

SEQ ID NO: 2208284 - RNA, 19 nt, Artificial Sequence
  Description of Artificial Sequence: Synthetic oligonucleotide
  Sense strand starting at position 3276 of SEQ ID NO: 1883668
cugaauucuggcugaauua

SEQ ID NO: 2208285 - RNA, 19 nt, Artificial Sequence
  Description of Artificial Sequence: Synthetic oligonucleotide
  Antisense strand to SEQ ID NO: 2208284
uaauucagccagaauucag

SEQ ID NO: 2208286 - RNA, 19 nt, Artificial Sequence
  Description of Artificial Sequence: Synthetic oligonucleotide
  Sense strand starting at position 2898 of SEQ ID NO: 1883668
ccuccaucugaugggcaaa

SEQ ID NO: 2208287 - RNA, 19 nt, Artificial Sequence
  Description of Artificial Sequence: Synthetic oligonucleotide
  Antisense strand to SEQ ID NO: 2208286
uuugcccaucagauggagg

SEQ ID NO: 2208288 - RNA, 19 nt, Artificial Sequence
  Description of Artificial Sequence: Synthetic oligonucleotide
  Sense strand starting at position 289 of SEQ ID NO: 1883668
cucagauauuuauaguaag

SEQ ID NO: 2208289 - RNA, 19 nt, Artificial Sequence
  Description of Artificial Sequence: Synthetic oligonucleotide
  Antisense strand to SEQ ID NO: 2208288
cuuacuauaaauaucugag

SEQ ID NO: 2208290 - RNA, 19 nt, Artificial Sequence
  Description of Artificial Sequence: Synthetic oligonucleotide
  Sense strand starting at position 724 of SEQ ID NO: 1883668
agucaucacccauggguaa

SEQ ID NO: 2208291 - RNA, 19 nt, Artificial Sequence
  Description of Artificial Sequence: Synthetic oligonucleotide
  Antisense strand to SEQ ID NO: 2208290
uuacccaugggugaugacu

SEQ ID NO: 2208292 - RNA, 19 nt, Artificial Sequence
  Description of Artificial Sequence: Synthetic oligonucleotide
  Sense strand starting at position 103 of SEQ ID NO: 1883669
aaagaaugacgcugaacaa

SEQ ID NO: 2208293 - RNA, 19 nt, Artificial Sequence
  Description of Artificial Sequence: Synthetic oligonucleotide
  Antisense strand to SEQ ID NO: 2208292
uuguucagcgucauucuuu

SEQ ID NO: 2208294 - RNA, 19 nt, Artificial Sequence
  Description of Artificial Sequence: Synthetic oligonucleotide
  Sense strand starting at position 1562 of SEQ ID NO: 1883669
ggaggcucuacauggagaa

SEQ ID NO: 2208295 - RNA, 19 nt, Artificial Sequence
  Description of Artificial Sequence: Synthetic oligonucleotide
  Antisense strand to SEQ ID NO: 2208294
uucuccauguagagccucc

SEQ ID NO: 2208296 - RNA, 19 nt, Artificial Sequence
  Description of Artificial Sequence: Synthetic oligonucleotide
  Sense strand starting at position 3882 of SEQ ID NO: 1883669
ucuucuagagaguaaucuu

SEQ ID NO: 2208297 - RNA, 19 nt, Artificial Sequence
  Description of Artificial Sequence: Synthetic oligonucleotide
  Antisense strand to SEQ ID NO: 2208296
aagauuacucucuagaaga

SEQ ID NO: 2208298 - RNA, 19 nt, Artificial Sequence
  Description of Artificial Sequence: Synthetic oligonucleotide
  Sense strand starting at position 844 of SEQ ID NO: 1883669
uuguauuucuaguuaagca

SEQ ID NO: 2208299 - RNA, 19 nt, Artificial Sequence
  Description of Artificial Sequence: Synthetic oligonucleotide
  Antisense strand to SEQ ID NO: 2208298
ugcuuaacuagaaauacaa

SEQ ID NO: 2208300 - RNA, 19 nt, Artificial Sequence
  Description of Artificial Sequence: Synthetic oligonucleotide
  Sense strand starting at position 534 of SEQ ID NO: 1883669
gcuccaacugaagauguua

SEQ ID NO: 2208301 - RNA, 19 nt, Artificial Sequence
  Description of Artificial Sequence: Synthetic oligonucleotide
  Antisense strand to SEQ ID NO: 2208300
uaacaucuucaguuggagc

SEQ ID NO: 2208302 - RNA, 19 nt, Artificial Sequence
  Description of Artificial Sequence: Synthetic oligonucleotide
  Sense strand starting at position 2847 of SEQ ID NO: 1883669
ccucauguuguggaacaua

SEQ ID NO: 2208303 - RNA, 19 nt, Artificial Sequence
  Description of Artificial Sequence: Synthetic oligonucleotide
  Antisense strand to SEQ ID NO: 2208302
uauguuccacaacaugagg

SEQ ID NO: 2208304 - RNA, 19 nt, Artificial Sequence
  Description of Artificial Sequence: Synthetic oligonucleotide
  Sense strand starting at position 2785 of SEQ ID NO: 1883669
uuccucauuccugagguga

SEQ ID NO: 2208305 - RNA, 19 nt, Artificial Sequence
  Description of Artificial Sequence: Synthetic oligonucleotide
  Antisense strand to SEQ ID NO: 2208304
ucaccucaggaaugaggaa

SEQ ID NO: 2208306 - RNA, 19 nt, Artificial Sequence
  Description of Artificial Sequence: Synthetic oligonucleotide
  Sense strand starting at position 2870 of SEQ ID NO: 1883669
ccaauaguuccuugaggga

SEQ ID NO: 2208307 - RNA, 19 nt, Artificial Sequence
  Description of Artificial Sequence: Synthetic oligonucleotide
  Antisense strand to SEQ ID NO: 2208306
ucccucaaggaacuauugg

SEQ ID NO: 2208308 - RNA, 19 nt, Artificial Sequence
  Description of Artificial Sequence: Synthetic oligonucleotide
  Sense strand starting at position 3885 of SEQ ID NO: 1883669
ucuagagaguaaucuucua

SEQ ID NO: 2208309 - RNA, 19 nt, Artificial Sequence
  Description of Artificial Sequence: Synthetic oligonucleotide
  Antisense strand to SEQ ID NO: 2208308
uagaagauuacucucuaga

SEQ ID NO: 2208310 - RNA, 19 nt, Artificial Sequence
  Description of Artificial Sequence: Synthetic oligonucleotide
  Sense strand starting at position 1196 of SEQ ID NO: 1883669
uacuguagugguuacagaa

SEQ ID NO: 2208311 - RNA, 19 nt, Artificial Sequence
  Description of Artificial Sequence: Synthetic oligonucleotide
  Antisense strand to SEQ ID NO: 2208310
uucuguaaccacuacagua

SEQ ID NO: 2208312 - RNA, 19 nt, Artificial Sequence
  Description of Artificial Sequence: Synthetic oligonucleotide
  Sense strand starting at position 2311 of SEQ ID NO: 1883669
aggugucuacuagaggcaa

SEQ ID NO: 2208313 - RNA, 19 nt, Artificial Sequence
  Description of Artificial Sequence: Synthetic oligonucleotide
  Antisense strand to SEQ ID NO: 2208312
uugccucuaguagacaccu

SEQ ID NO: 2208314 - RNA, 19 nt, Artificial Sequence
  Description of Artificial Sequence: Synthetic oligonucleotide
  Sense strand starting at position 840 of SEQ ID NO: 1883669
gcuauuguauuucuaguua

SEQ ID NO: 2208315 - RNA, 19 nt, Artificial Sequence
  Description of Artificial Sequence: Synthetic oligonucleotide
  Antisense strand to SEQ ID NO: 2208314
uaacuagaaauacaauagc

SEQ ID NO: 2208316 - RNA, 19 nt, Artificial Sequence
  Description of Artificial Sequence: Synthetic oligonucleotide
  Sense strand starting at position 807 of SEQ ID NO: 1883669
gguuauagccucuauagac

SEQ ID NO: 2208317 - RNA, 19 nt, Artificial Sequence
  Description of Artificial Sequence: Synthetic oligonucleotide
  Antisense strand to SEQ ID NO: 2208316
gucuauagaggcuauaacc

SEQ ID NO: 2208318 - RNA, 19 nt, Artificial Sequence
  Description of Artificial Sequence: Synthetic oligonucleotide
  Sense strand starting at position 1014 of SEQ ID NO: 1883669
cugguauuccuagaaugca

SEQ ID NO: 2208319 - RNA, 19 nt, Artificial Sequence
  Description of Artificial Sequence: Synthetic oligonucleotide
  Antisense strand to SEQ ID NO: 2208318
ugcauucuaggaauaccag

SEQ ID NO: 2208320 - RNA, 19 nt, Artificial Sequence
  Description of Artificial Sequence: Synthetic oligonucleotide
  Sense strand starting at position 2989 of SEQ ID NO: 1883669
gagggcuugcuccacaaua

SEQ ID NO: 2208321 - RNA, 19 nt, Artificial Sequence
  Description of Artificial Sequence: Synthetic oligonucleotide
  Antisense strand to SEQ ID NO: 2208320
uauuguggagcaagcccuc

SEQ ID NO: 2208322 - RNA, 19 nt, Artificial Sequence
  Description of Artificial Sequence: Synthetic oligonucleotide
  Sense strand starting at position 2474 of SEQ ID NO: 1883669
ucccgaugaucucccagaa

SEQ ID NO: 2208323 - RNA, 19 nt, Artificial Sequence
  Description of Artificial Sequence: Synthetic oligonucleotide
  Antisense strand to SEQ ID NO: 2208322
uucugggagaucaucggga

SEQ ID NO: 2208324 - RNA, 19 nt, Artificial Sequence
  Description of Artificial Sequence: Synthetic oligonucleotide
  Sense strand starting at position 2490 of SEQ ID NO: 1883669
gaaggaaauaagugucugu

SEQ ID NO: 2208325 - RNA, 19 nt, Artificial Sequence
  Description of Artificial Sequence: Synthetic oligonucleotide
  Antisense strand to SEQ ID NO: 2208324
acagacacuuauuuccuuc

SEQ ID NO: 2208326 - RNA, 19 nt, Artificial Sequence
  Description of Artificial Sequence: Synthetic oligonucleotide
  Sense strand starting at position 1663 of SEQ ID NO: 1883669
gaaugaaugaaacguuggu

SEQ ID NO: 2208327 - RNA, 19 nt, Artificial Sequence
  Description of Artificial Sequence: Synthetic oligonucleotide
  Antisense strand to SEQ ID NO: 2208326
accaacguuucauucauuc

SEQ ID NO: 2208328 - RNA, 19 nt, Artificial Sequence
  Description of Artificial Sequence: Synthetic oligonucleotide
  Sense strand starting at position 838 of SEQ ID NO: 1883669
cugcuauuguauuucuagu

SEQ ID NO: 2208329 - RNA, 19 nt, Artificial Sequence
  Description of Artificial Sequence: Synthetic oligonucleotide
  Antisense strand to SEQ ID NO: 2208328
acuagaaauacaauagcag

SEQ ID NO: 2208330 - RNA, 19 nt, Artificial Sequence
  Description of Artificial Sequence: Synthetic oligonucleotide
  Sense strand starting at position 2859 of SEQ ID NO: 1883669
gaacauauccgccaauagu

SEQ ID NO: 2208331 - RNA, 19 nt, Artificial Sequence
  Description of Artificial Sequence: Synthetic oligonucleotide
  Antisense strand to SEQ ID NO: 2208330
acuauuggcggauauguuc

SEQ ID NO: 2208332 - RNA, 19 nt, Artificial Sequence
  Description of Artificial Sequence: Synthetic oligonucleotide
  Sense strand starting at position 3028 of SEQ ID NO: 1883669
gagaaacucuacgucauug

SEQ ID NO: 2208333 - RNA, 19 nt, Artificial Sequence
  Description of Artificial Sequence: Synthetic oligonucleotide
  Antisense strand to SEQ ID NO: 2208332
caaugacguagaguuucuc

SEQ ID NO: 2208334 - RNA, 19 nt, Artificial Sequence
  Description of Artificial Sequence: Synthetic oligonucleotide
  Sense strand starting at position 467 of SEQ ID NO: 1883669
auaugaagucccgagcuau

SEQ ID NO: 2208335 - RNA, 19 nt, Artificial Sequence
  Description of Artificial Sequence: Synthetic oligonucleotide
  Antisense strand to SEQ ID NO: 2208334
auagcucgggacuucauau

SEQ ID NO: 2208336 - RNA, 19 nt, Artificial Sequence
  Description of Artificial Sequence: Synthetic oligonucleotide
  Sense strand starting at position 2857 of SEQ ID NO: 1883669
uggaacauauccgccaaua

SEQ ID NO: 2208337 - RNA, 19 nt, Artificial Sequence
  Description of Artificial Sequence: Synthetic oligonucleotide
  Antisense strand to SEQ ID NO: 2208336
uauuggcggauauguucca

SEQ ID NO: 2208338 - RNA, 19 nt, Artificial Sequence
  Description of Artificial Sequence: Synthetic oligonucleotide
  Sense strand starting at position 3901 of SEQ ID NO: 1883669
cuaauuacuugcuuugaga

SEQ ID NO: 2208339 - RNA, 19 nt, Artificial Sequence
  Description of Artificial Sequence: Synthetic oligonucleotide
  Antisense strand to SEQ ID NO: 2208338
ucucaaagcaaguaauuag

SEQ ID NO: 2208340 - RNA, 19 nt, Artificial Sequence
  Description of Artificial Sequence: Synthetic oligonucleotide
  Sense strand starting at position 505 of SEQ ID NO: 1883669
acugucuuuggucagacuu

SEQ ID NO: 2208341 - RNA, 19 nt, Artificial Sequence
  Description of Artificial Sequence: Synthetic oligonucleotide
  Antisense strand to SEQ ID NO: 2208340
aagucugaccaaagacagu

SEQ ID NO: 2208342 - RNA, 19 nt, Artificial Sequence
  Description of Artificial Sequence: Synthetic oligonucleotide
  Sense strand starting at position 3027 of SEQ ID NO: 1883669
ugagaaacucuacgucauu

SEQ ID NO: 2208343 - RNA, 19 nt, Artificial Sequence
  Description of Artificial Sequence: Synthetic oligonucleotide
  Antisense strand to SEQ ID NO: 2208342
aaugacguagaguuucuca

SEQ ID NO: 2208344 - RNA, 19 nt, Artificial Sequence
  Description of Artificial Sequence: Synthetic oligonucleotide
  Sense strand starting at position 2778 of SEQ ID NO: 1883669
ggucuuauuccucauuccu

SEQ ID NO: 2208345 - RNA, 19 nt, Artificial Sequence
  Description of Artificial Sequence: Synthetic oligonucleotide
  Antisense strand to SEQ ID NO: 2208344
aggaaugaggaauaagacc

SEQ ID NO: 2208346 - RNA, 19 nt, Artificial Sequence
  Description of Artificial Sequence: Synthetic oligonucleotide
  Sense strand starting at position 1017 of SEQ ID NO: 1883669
guauuccuagaaugcauga

SEQ ID NO: 2208347 - RNA, 19 nt, Artificial Sequence
  Description of Artificial Sequence: Synthetic oligonucleotide
  Antisense strand to SEQ ID NO: 2208346
ucaugcauucuaggaauac

SEQ ID NO: 2208348 - RNA, 19 nt, Artificial Sequence
  Description of Artificial Sequence: Synthetic oligonucleotide
  Sense strand starting at position 2991 of SEQ ID NO: 1883669
gggcuugcuccacaauauu

SEQ ID NO: 2208349 - RNA, 19 nt, Artificial Sequence
  Description of Artificial Sequence: Synthetic oligonucleotide
  Antisense strand to SEQ ID NO: 2208348
aauauuguggagcaagccc

SEQ ID NO: 2208350 - RNA, 19 nt, Artificial Sequence
  Description of Artificial Sequence: Synthetic oligonucleotide
  Sense strand starting at position 717 of SEQ ID NO: 1883669
cuaucauaggguuguuaca

SEQ ID NO: 2208351 - RNA, 19 nt, Artificial Sequence
  Description of Artificial Sequence: Synthetic oligonucleotide
  Antisense strand to SEQ ID NO: 2208350
uguaacaacccuaugauag

SEQ ID NO: 2208352 - RNA, 19 nt, Artificial Sequence
  Description of Artificial Sequence: Synthetic oligonucleotide
  Sense strand starting at position 1517 of SEQ ID NO: 1883669
gucacaguagaaugcauau

SEQ ID NO: 2208353 - RNA, 19 nt, Artificial Sequence
  Description of Artificial Sequence: Synthetic oligonucleotide
  Antisense strand to SEQ ID NO: 2208352
auaugcauucuacugugac

SEQ ID NO: 2208354 - RNA, 19 nt, Artificial Sequence
  Description of Artificial Sequence: Synthetic oligonucleotide
  Sense strand starting at position 2697 of SEQ ID NO: 1883669
gguaauuccuaugcacauc

SEQ ID NO: 2208355 - RNA, 19 nt, Artificial Sequence
  Description of Artificial Sequence: Synthetic oligonucleotide
  Antisense strand to SEQ ID NO: 2208354
gaugugcauaggaauuacc

SEQ ID NO: 2208356 - RNA, 19 nt, Artificial Sequence
  Description of Artificial Sequence: Synthetic oligonucleotide
  Sense strand starting at position 500 of SEQ ID NO: 1883669
uuauaacugucuuugguca

SEQ ID NO: 2208357 - RNA, 19 nt, Artificial Sequence
  Description of Artificial Sequence: Synthetic oligonucleotide
  Antisense strand to SEQ ID NO: 2208356
ugaccaaagacaguuauaa

SEQ ID NO: 2208358 - RNA, 19 nt, Artificial Sequence
  Description of Artificial Sequence: Synthetic oligonucleotide
  Sense strand starting at position 2696 of SEQ ID NO: 1883669
ugguaauuccuaugcacau

SEQ ID NO: 2208359 - RNA, 19 nt, Artificial Sequence
  Description of Artificial Sequence: Synthetic oligonucleotide
  Antisense strand to SEQ ID NO: 2208358
augugcauaggaauuacca

SEQ ID NO: 2208360 - RNA, 19 nt, Artificial Sequence
  Description of Artificial Sequence: Synthetic oligonucleotide
  Sense strand starting at position 2947 of SEQ ID NO: 1883669
ggcugaguucuagguugaa

SEQ ID NO: 2208361 - RNA, 19 nt, Artificial Sequence
  Description of Artificial Sequence: Synthetic oligonucleotide
  Antisense strand to SEQ ID NO: 2208360
uucaaccuagaacucagcc

SEQ ID NO: 2208362 - RNA, 19 nt, Artificial Sequence
  Description of Artificial Sequence: Synthetic oligonucleotide
  Sense strand starting at position 2856 of SEQ ID NO: 1883669
guggaacauauccgccaau

SEQ ID NO: 2208363 - RNA, 19 nt, Artificial Sequence
  Description of Artificial Sequence: Synthetic oligonucleotide
  Antisense strand to SEQ ID NO: 2208362
auuggcggauauguuccac

SEQ ID NO: 2208364 - RNA, 19 nt, Artificial Sequence
  Description of Artificial Sequence: Synthetic oligonucleotide
  Sense strand starting at position 1620 of SEQ ID NO: 1883669
caaugucugguauguaauc

SEQ ID NO: 2208365 - RNA, 19 nt, Artificial Sequence
  Description of Artificial Sequence: Synthetic oligonucleotide
  Antisense strand to SEQ ID NO: 2208364
gauuacauaccagacauug

SEQ ID NO: 2208366 - RNA, 19 nt, Artificial Sequence
  Description of Artificial Sequence: Synthetic oligonucleotide
  Sense strand starting at position 3161 of SEQ ID NO: 1883669
gacacaaucgagugucuuu

SEQ ID NO: 2208367 - RNA, 19 nt, Artificial Sequence
  Description of Artificial Sequence: Synthetic oligonucleotide
  Antisense strand to SEQ ID NO: 2208366
aaagacacucgauuguguc

SEQ ID NO: 2208368 - RNA, 19 nt, Artificial Sequence
  Description of Artificial Sequence: Synthetic oligonucleotide
  Sense strand starting at position 3126 of SEQ ID NO: 1883669
gcuuuaggaucuucucuuu

SEQ ID NO: 2208369 - RNA, 19 nt, Artificial Sequence
  Description of Artificial Sequence: Synthetic oligonucleotide
  Antisense strand to SEQ ID NO: 2208368
aaagagaagauccuaaagc

SEQ ID NO: 2208370 - RNA, 19 nt, Artificial Sequence
  Description of Artificial Sequence: Synthetic oligonucleotide
  Sense strand starting at position 1003 of SEQ ID NO: 1883669
ucuccuuuacccugguauu

SEQ ID NO: 2208371 - RNA, 19 nt, Artificial Sequence
  Description of Artificial Sequence: Synthetic oligonucleotide
  Antisense strand to SEQ ID NO: 2208370
aauaccaggguaaaggaga

SEQ ID NO: 2208372 - RNA, 19 nt, Artificial Sequence
  Description of Artificial Sequence: Synthetic oligonucleotide
  Sense strand starting at position 3881 of SEQ ID NO: 1883670
uuaugcuagugauuuaucu

SEQ ID NO: 2208373 - RNA, 19 nt, Artificial Sequence
  Description of Artificial Sequence: Synthetic oligonucleotide
  Antisense strand to SEQ ID NO: 2208372
agauaaaucacuagcauaa

SEQ ID NO: 2208374 - RNA, 19 nt, Artificial Sequence
  Description of Artificial Sequence: Synthetic oligonucleotide
  Sense strand starting at position 3157 of SEQ ID NO: 1883670
ucaagauuccaguagcaag

SEQ ID NO: 2208375 - RNA, 19 nt, Artificial Sequence
  Description of Artificial Sequence: Synthetic oligonucleotide
  Antisense strand to SEQ ID NO: 2208374
cuugcuacuggaaucuuga

SEQ ID NO: 2208376 - RNA, 19 nt, Artificial Sequence
  Description of Artificial Sequence: Synthetic oligonucleotide
  Sense strand starting at position 3966 of SEQ ID NO: 1883670
ugaugagucugaccuaaag

SEQ ID NO: 2208377 - RNA, 19 nt, Artificial Sequence
  Description of Artificial Sequence: Synthetic oligonucleotide
  Antisense strand to SEQ ID NO: 2208376
cuuuaggucagacucauca

SEQ ID NO: 2208378 - RNA, 19 nt, Artificial Sequence
  Description of Artificial Sequence: Synthetic oligonucleotide
  Sense strand starting at position 1291 of SEQ ID NO: 1883670
ggauucucccacgaguaaa

SEQ ID NO: 2208379 - RNA, 19 nt, Artificial Sequence
  Description of Artificial Sequence: Synthetic oligonucleotide
  Antisense strand to SEQ ID NO: 2208378
uuuacucgugggagaaucc

SEQ ID NO: 2208380 - RNA, 19 nt, Artificial Sequence
  Description of Artificial Sequence: Synthetic oligonucleotide
  Sense strand starting at position 3885 of SEQ ID NO: 1883670
gcuagugauuuaucuguga

SEQ ID NO: 2208381 - RNA, 19 nt, Artificial Sequence
  Description of Artificial Sequence: Synthetic oligonucleotide
  Antisense strand to SEQ ID NO: 2208380
ucacagauaaaucacuagc

SEQ ID NO: 2208382 - RNA, 19 nt, Artificial Sequence
  Description of Artificial Sequence: Synthetic oligonucleotide
  Sense strand starting at position 2028 of SEQ ID NO: 1883670
gucguugcuccagaaauuu

SEQ ID NO: 2208383 - RNA, 19 nt, Artificial Sequence
  Description of Artificial Sequence: Synthetic oligonucleotide
  Antisense strand to SEQ ID NO: 2208382
aaauuucuggagcaacgac

SEQ ID NO: 2208384 - RNA, 19 nt, Artificial Sequence
  Description of Artificial Sequence: Synthetic oligonucleotide
  Sense strand starting at position 1357 of SEQ ID NO: 1883670
gcucuuacuccagaauuga

SEQ ID NO: 2208385 - RNA, 19 nt, Artificial Sequence
  Description of Artificial Sequence: Synthetic oligonucleotide
  Antisense strand to SEQ ID NO: 2208384
ucaauucuggaguaagagc

SEQ ID NO: 2208386 - RNA, 19 nt, Artificial Sequence
  Description of Artificial Sequence: Synthetic oligonucleotide
  Sense strand starting at position 3963 of SEQ ID NO: 1883670
uaaugaugagucugaccua

SEQ ID NO: 2208387 - RNA, 19 nt, Artificial Sequence
  Description of Artificial Sequence: Synthetic oligonucleotide
  Antisense strand to SEQ ID NO: 2208386
uaggucagacucaucauua

SEQ ID NO: 2208388 - RNA, 19 nt, Artificial Sequence
  Description of Artificial Sequence: Synthetic oligonucleotide
  Sense strand starting at position 1229 of SEQ ID NO: 1883670
cuuucuguaggccaagaaa

SEQ ID NO: 2208389 - RNA, 19 nt, Artificial Sequence
  Description of Artificial Sequence: Synthetic oligonucleotide
  Antisense strand to SEQ ID NO: 2208388
uuucuuggccuacagaaag

SEQ ID NO: 2208390 - RNA, 19 nt, Artificial Sequence
  Description of Artificial Sequence: Synthetic oligonucleotide
  Sense strand starting at position 3553 of SEQ ID NO: 1883670
gaguacugccgggaaucaa

SEQ ID NO: 2208391 - RNA, 19 nt, Artificial Sequence
  Description of Artificial Sequence: Synthetic oligonucleotide
  Antisense strand to SEQ ID NO: 2208390
uugauucccggcaguacuc

SEQ ID NO: 2208392 - RNA, 19 nt, Artificial Sequence
  Description of Artificial Sequence: Synthetic oligonucleotide
  Sense strand starting at position 291 of SEQ ID NO: 1883670
gcagaagaauuccuaagug

SEQ ID NO: 2208393 - RNA, 19 nt, Artificial Sequence
  Description of Artificial Sequence: Synthetic oligonucleotide
  Antisense strand to SEQ ID NO: 2208392
cacuuaggaauucuucugc

SEQ ID NO: 2208394 - RNA, 19 nt, Artificial Sequence
  Description of Artificial Sequence: Synthetic oligonucleotide
  Sense strand starting at position 3569 of SEQ ID NO: 1883670
caaagaaccguguauaucu

SEQ ID NO: 2208395 - RNA, 19 nt, Artificial Sequence
  Description of Artificial Sequence: Synthetic oligonucleotide
  Antisense strand to SEQ ID NO: 2208394
agauauacacgguucuuug

SEQ ID NO: 2208396 - RNA, 19 nt, Artificial Sequence
  Description of Artificial Sequence: Synthetic oligonucleotide
  Sense strand starting at position 1146 of SEQ ID NO: 1883670
auguaaacccaauggguau

SEQ ID NO: 2208397 - RNA, 19 nt, Artificial Sequence
  Description of Artificial Sequence: Synthetic oligonucleotide
  Antisense strand to SEQ ID NO: 2208396
auacccauuggguuuacau

SEQ ID NO: 2208398 - RNA, 19 nt, Artificial Sequence
  Description of Artificial Sequence: Synthetic oligonucleotide
  Sense strand starting at position 633 of SEQ ID NO: 1883670
uugaaauuaacugagcgua

SEQ ID NO: 2208399 - RNA, 19 nt, Artificial Sequence
  Description of Artificial Sequence: Synthetic oligonucleotide
  Antisense strand to SEQ ID NO: 2208398
uacgcucaguuaauuucaa

SEQ ID NO: 2208400 - RNA, 19 nt, Artificial Sequence
  Description of Artificial Sequence: Synthetic oligonucleotide
  Sense strand starting at position 638 of SEQ ID NO: 1883670
auuaacugagcguaauaug

SEQ ID NO: 2208401 - RNA, 19 nt, Artificial Sequence
  Description of Artificial Sequence: Synthetic oligonucleotide
  Antisense strand to SEQ ID NO: 2208400
cauauuacgcucaguuaau

SEQ ID NO: 2208402 - RNA, 19 nt, Artificial Sequence
  Description of Artificial Sequence: Synthetic oligonucleotide
  Sense strand starting at position 1411 of SEQ ID NO: 1883670
aaucuagauuuguaugaag

SEQ ID NO: 2208403 - RNA, 19 nt, Artificial Sequence
  Description of Artificial Sequence: Synthetic oligonucleotide
  Antisense strand to SEQ ID NO: 2208402
cuucauacaaaucuagauu

SEQ ID NO: 2208404 - RNA, 19 nt, Artificial Sequence
  Description of Artificial Sequence: Synthetic oligonucleotide
  Sense strand starting at position 582 of SEQ ID NO: 1883670
gguauuaauguagaugcca

SEQ ID NO: 2208405 - RNA, 19 nt, Artificial Sequence
  Description of Artificial Sequence: Synthetic oligonucleotide
  Antisense strand to SEQ ID NO: 2208404
uggcaucuacauuaauacc

SEQ ID NO: 2208406 - RNA, 19 nt, Artificial Sequence
  Description of Artificial Sequence: Synthetic oligonucleotide
  Sense strand starting at position 1741 of SEQ ID NO: 1883670
accuuaaugcucgaaaucu

SEQ ID NO: 2208407 - RNA, 19 nt, Artificial Sequence
  Description of Artificial Sequence: Synthetic oligonucleotide
  Antisense strand to SEQ ID NO: 2208406
agauuucgagcauuaaggu

SEQ ID NO: 2208408 - RNA, 19 nt, Artificial Sequence
  Description of Artificial Sequence: Synthetic oligonucleotide
  Sense strand starting at position 3701 of SEQ ID NO: 1883670
aggcgaaucagugaaaguu

SEQ ID NO: 2208409 - RNA, 19 nt, Artificial Sequence
  Description of Artificial Sequence: Synthetic oligonucleotide
  Antisense strand to SEQ ID NO: 2208408
aacuuucacugauucgccu

SEQ ID NO: 2208410 - RNA, 19 nt, Artificial Sequence
  Description of Artificial Sequence: Synthetic oligonucleotide
  Sense strand starting at position 1387 of SEQ ID NO: 1883670
uguuauaaaucuguugaga

SEQ ID NO: 2208411 - RNA, 19 nt, Artificial Sequence
  Description of Artificial Sequence: Synthetic oligonucleotide
  Antisense strand to SEQ ID NO: 2208410
ucucaacagauuuauaaca

SEQ ID NO: 2208412 - RNA, 19 nt, Artificial Sequence
  Description of Artificial Sequence: Synthetic oligonucleotide
  Sense strand starting at position 3890 of SEQ ID NO: 1883670
ugauuuaucugugaaggga

SEQ ID NO: 2208413 - RNA, 19 nt, Artificial Sequence
  Description of Artificial Sequence: Synthetic oligonucleotide
  Antisense strand to SEQ ID NO: 2208412
ucccuucacagauaaauca

SEQ ID NO: 2208414 - RNA, 19 nt, Artificial Sequence
  Description of Artificial Sequence: Synthetic oligonucleotide
  Sense strand starting at position 316 of SEQ ID NO: 1883670
agucuuggccucuaucaag

SEQ ID NO: 2208415 - RNA, 19 nt, Artificial Sequence
  Description of Artificial Sequence: Synthetic oligonucleotide
  Antisense strand to SEQ ID NO: 2208414
cuugauagaggccaagacu

SEQ ID NO: 2208416 - RNA, 19 nt, Artificial Sequence
  Description of Artificial Sequence: Synthetic oligonucleotide
  Sense strand starting at position 3171 of SEQ ID NO: 1883670
gcaagagugcaucagaucu

SEQ ID NO: 2208417 - RNA, 19 nt, Artificial Sequence
  Description of Artificial Sequence: Synthetic oligonucleotide
  Antisense strand to SEQ ID NO: 2208416
agaucugaugcacucuugc

SEQ ID NO: 2208418 - RNA, 19 nt, Artificial Sequence
  Description of Artificial Sequence: Synthetic oligonucleotide
  Sense strand starting at position 1095 of SEQ ID NO: 1883670
aagugugaagugcauacua

SEQ ID NO: 2208419 - RNA, 19 nt, Artificial Sequence
  Description of Artificial Sequence: Synthetic oligonucleotide
  Antisense strand to SEQ ID NO: 2208418
uaguaugcacuucacacuu

SEQ ID NO: 2208420 - RNA, 19 nt, Artificial Sequence
  Description of Artificial Sequence: Synthetic oligonucleotide
  Sense strand starting at position 1097 of SEQ ID NO: 1883670
gugugaagugcauacuaaa

SEQ ID NO: 2208421 - RNA, 19 nt, Artificial Sequence
  Description of Artificial Sequence: Synthetic oligonucleotide
  Antisense strand to SEQ ID NO: 2208420
uuuaguaugcacuucacac

SEQ ID NO: 2208422 - RNA, 19 nt, Artificial Sequence
  Description of Artificial Sequence: Synthetic oligonucleotide
  Sense strand starting at position 1414 of SEQ ID NO: 1883670
cuagauuuguaugaagauc

SEQ ID NO: 2208423 - RNA, 19 nt, Artificial Sequence
  Description of Artificial Sequence: Synthetic oligonucleotide
  Antisense strand to SEQ ID NO: 2208422
gaucuucauacaaaucuag

SEQ ID NO: 2208424 - RNA, 19 nt, Artificial Sequence
  Description of Artificial Sequence: Synthetic oligonucleotide
  Sense strand starting at position 1290 of SEQ ID NO: 1883670
gggauucucccacgaguaa

SEQ ID NO: 2208425 - RNA, 19 nt, Artificial Sequence
  Description of Artificial Sequence: Synthetic oligonucleotide
  Antisense strand to SEQ ID NO: 2208424
uuacucgugggagaauccc

SEQ ID NO: 2208426 - RNA, 19 nt, Artificial Sequence
  Description of Artificial Sequence: Synthetic oligonucleotide
  Sense strand starting at position 3168 of SEQ ID NO: 1883670
guagcaagagugcaucaga

SEQ ID NO: 2208427 - RNA, 19 nt, Artificial Sequence
  Description of Artificial Sequence: Synthetic oligonucleotide
  Antisense strand to SEQ ID NO: 2208426
ucugaugcacucuugcuac

SEQ ID NO: 2208428 - RNA, 19 nt, Artificial Sequence
  Description of Artificial Sequence: Synthetic oligonucleotide
  Sense strand starting at position 635 of SEQ ID NO: 1883670
gaaauuaacugagcguaau

SEQ ID NO: 2208429 - RNA, 19 nt, Artificial Sequence
  Description of Artificial Sequence: Synthetic oligonucleotide
  Antisense strand to SEQ ID NO: 2208428
auuacgcucaguuaauuuc

SEQ ID NO: 2208430 - RNA, 19 nt, Artificial Sequence
  Description of Artificial Sequence: Synthetic oligonucleotide
  Sense strand starting at position 3567 of SEQ ID NO: 1883670
aucaaagaaccguguauau

SEQ ID NO: 2208431 - RNA, 19 nt, Artificial Sequence
  Description of Artificial Sequence: Synthetic oligonucleotide
  Antisense strand to SEQ ID NO: 2208430
auauacacgguucuuugau

SEQ ID NO: 2208432 - RNA, 19 nt, Artificial Sequence
  Description of Artificial Sequence: Synthetic oligonucleotide
  Sense strand starting at position 3179 of SEQ ID NO: 1883670
gcaucagaucucuguaagg

SEQ ID NO: 2208433 - RNA, 19 nt, Artificial Sequence
  Description of Artificial Sequence: Synthetic oligonucleotide
  Antisense strand to SEQ ID NO: 2208432
ccuuacagagaucugaugc

SEQ ID NO: 2208434 - RNA, 19 nt, Artificial Sequence
  Description of Artificial Sequence: Synthetic oligonucleotide
  Sense strand starting at position 408 of SEQ ID NO: 1883670
agccauaucucaguccaga

SEQ ID NO: 2208435 - RNA, 19 nt, Artificial Sequence
  Description of Artificial Sequence: Synthetic oligonucleotide
  Antisense strand to SEQ ID NO: 2208434
ucuggacugagauauggcu

SEQ ID NO: 2208436 - RNA, 19 nt, Artificial Sequence
  Description of Artificial Sequence: Synthetic oligonucleotide
  Sense strand starting at position 1580 of SEQ ID NO: 1883670
guguaagacagacgaucuu

SEQ ID NO: 2208437 - RNA, 19 nt, Artificial Sequence
  Description of Artificial Sequence: Synthetic oligonucleotide
  Antisense strand to SEQ ID NO: 2208436
aagaucgucugucuuacac

SEQ ID NO: 2208438 - RNA, 19 nt, Artificial Sequence
  Description of Artificial Sequence: Synthetic oligonucleotide
  Sense strand starting at position 3552 of SEQ ID NO: 1883670
agaguacugccgggaauca

SEQ ID NO: 2208439 - RNA, 19 nt, Artificial Sequence
  Description of Artificial Sequence: Synthetic oligonucleotide
  Antisense strand to SEQ ID NO: 2208438
ugauucccggcaguacucu

SEQ ID NO: 2208440 - RNA, 19 nt, Artificial Sequence
  Description of Artificial Sequence: Synthetic oligonucleotide
  Sense strand starting at position 1490 of SEQ ID NO: 1883670
uuuauuaagugauuccagu

SEQ ID NO: 2208441 - RNA, 19 nt, Artificial Sequence
  Description of Artificial Sequence: Synthetic oligonucleotide
  Antisense strand to SEQ ID NO: 2208440
acuggaaucacuuaauaaa

SEQ ID NO: 2208442 - RNA, 19 nt, Artificial Sequence
  Description of Artificial Sequence: Synthetic oligonucleotide
  Sense strand starting at position 158 of SEQ ID NO: 1883670
uuucucuuuguguauacau

SEQ ID NO: 2208443 - RNA, 19 nt, Artificial Sequence
  Description of Artificial Sequence: Synthetic oligonucleotide
  Antisense strand to SEQ ID NO: 2208442
auguauacacaaagagaaa

SEQ ID NO: 2208444 - RNA, 19 nt, Artificial Sequence
  Description of Artificial Sequence: Synthetic oligonucleotide
  Sense strand starting at position 1539 of SEQ ID NO: 1883670
ggcaaugcuaaauguugaa

SEQ ID NO: 2208445 - RNA, 19 nt, Artificial Sequence
  Description of Artificial Sequence: Synthetic oligonucleotide
  Antisense strand to SEQ ID NO: 2208444
uucaacauuuagcauugcc

SEQ ID NO: 2208446 - RNA, 19 nt, Artificial Sequence
  Description of Artificial Sequence: Synthetic oligonucleotide
  Sense strand starting at position 1483 of SEQ ID NO: 1883670
agucacauuuauuaaguga

SEQ ID NO: 2208447 - RNA, 19 nt, Artificial Sequence
  Description of Artificial Sequence: Synthetic oligonucleotide
  Antisense strand to SEQ ID NO: 2208446
ucacuuaauaaaugugacu

SEQ ID NO: 2208448 - RNA, 19 nt, Artificial Sequence
  Description of Artificial Sequence: Synthetic oligonucleotide
  Sense strand starting at position 1132 of SEQ ID NO: 1883670
acuuacuguaagugaugua

SEQ ID NO: 2208449 - RNA, 19 nt, Artificial Sequence
  Description of Artificial Sequence: Synthetic oligonucleotide
  Antisense strand to SEQ ID NO: 2208448
uacaucacuuacaguaagu

SEQ ID NO: 2208450 - RNA, 19 nt, Artificial Sequence
  Description of Artificial Sequence: Synthetic oligonucleotide
  Sense strand starting at position 3052 of SEQ ID NO: 1883670
guuagaggucccuggagug

SEQ ID NO: 2208451 - RNA, 19 nt, Artificial Sequence
  Description of Artificial Sequence: Synthetic oligonucleotide
  Antisense strand to SEQ ID NO: 2208450
cacuccagggaccucuaac

SEQ ID NO: 2208452 - RNA, 19 nt, Artificial Sequence
  Description of Artificial Sequence: Synthetic oligonucleotide
  Sense strand starting at position 2391 of SEQ ID NO: 1883671
acaacauaugcuuagacga

SEQ ID NO: 2208453 - RNA, 19 nt, Artificial Sequence
  Description of Artificial Sequence: Synthetic oligonucleotide
  Antisense strand to SEQ ID NO: 2208452
ucgucuaagcauauguugu

SEQ ID NO: 2208454 - RNA, 19 nt, Artificial Sequence
  Description of Artificial Sequence: Synthetic oligonucleotide
  Sense strand starting at position 2388 of SEQ ID NO: 1883671
gggacaacauaugcuuaga

SEQ ID NO: 2208455 - RNA, 19 nt, Artificial Sequence
  Description of Artificial Sequence: Synthetic oligonucleotide
  Antisense strand to SEQ ID NO: 2208454
ucuaagcauauguuguccc

SEQ ID NO: 2208456 - RNA, 19 nt, Artificial Sequence
  Description of Artificial Sequence: Synthetic oligonucleotide
  Sense strand starting at position 2398 of SEQ ID NO: 1883671
augcuuagacgagaacauu

SEQ ID NO: 2208457 - RNA, 19 nt, Artificial Sequence
  Description of Artificial Sequence: Synthetic oligonucleotide
  Antisense strand to SEQ ID NO: 2208456
aauguucucgucuaagcau

SEQ ID NO: 2208458 - RNA, 19 nt, Artificial Sequence
  Description of Artificial Sequence: Synthetic oligonucleotide
  Sense strand starting at position 3619 of SEQ ID NO: 1883671
aaagaaauucgccagugga

SEQ ID NO: 2208459 - RNA, 19 nt, Artificial Sequence
  Description of Artificial Sequence: Synthetic oligonucleotide
  Antisense strand to SEQ ID NO: 2208458
uccacuggcgaauuucuuu

SEQ ID NO: 2208460 - RNA, 19 nt, Artificial Sequence
  Description of Artificial Sequence: Synthetic oligonucleotide
  Sense strand starting at position 3673 of SEQ ID NO: 1883671
uuccuagaauggucuagaa

SEQ ID NO: 2208461 - RNA, 19 nt, Artificial Sequence
  Description of Artificial Sequence: Synthetic oligonucleotide
  Antisense strand to SEQ ID NO: 2208460
uucuagaccauucuaggaa

SEQ ID NO: 2208462 - RNA, 19 nt, Artificial Sequence
  Description of Artificial Sequence: Synthetic oligonucleotide
  Sense strand starting at position 3296 of SEQ ID NO: 1883671
ccuccugaucauggauaca

SEQ ID NO: 2208463 - RNA, 19 nt, Artificial Sequence
  Description of Artificial Sequence: Synthetic oligonucleotide
  Antisense strand to SEQ ID NO: 2208462
uguauccaugaucaggagg

SEQ ID NO: 2208464 - RNA, 19 nt, Artificial Sequence
  Description of Artificial Sequence: Synthetic oligonucleotide
  Sense strand starting at position 463 of SEQ ID NO: 1883671
aggcgcuucucauuuacca

SEQ ID NO: 2208465 - RNA, 19 nt, Artificial Sequence
  Description of Artificial Sequence: Synthetic oligonucleotide
  Antisense strand to SEQ ID NO: 2208464
ugguaaaugagaagcgccu

SEQ ID NO: 2208466 - RNA, 19 nt, Artificial Sequence
  Description of Artificial Sequence: Synthetic oligonucleotide
  Sense strand starting at position 3667 of SEQ ID NO: 1883671
cuggucuuccuagaauggu

SEQ ID NO: 2208467 - RNA, 19 nt, Artificial Sequence
  Description of Artificial Sequence: Synthetic oligonucleotide
  Antisense strand to SEQ ID NO: 2208466
accauucuaggaagaccag

SEQ ID NO: 2208468 - RNA, 19 nt, Artificial Sequence
  Description of Artificial Sequence: Synthetic oligonucleotide
  Sense strand starting at position 2539 of SEQ ID NO: 1883671
cccauuucgagcgaguugu

SEQ ID NO: 2208469 - RNA, 19 nt, Artificial Sequence
  Description of Artificial Sequence: Synthetic oligonucleotide
  Antisense strand to SEQ ID NO: 2208468
acaacucgcucgaaauggg

SEQ ID NO: 2208470 - RNA, 19 nt, Artificial Sequence
  Description of Artificial Sequence: Synthetic oligonucleotide
  Sense strand starting at position 3582 of SEQ ID NO: 1883671
uaacgauuauguucuagau

SEQ ID NO: 2208471 - RNA, 19 nt, Artificial Sequence
  Description of Artificial Sequence: Synthetic oligonucleotide
  Antisense strand to SEQ ID NO: 2208470
aucuagaacauaaucguua

SEQ ID NO: 2208472 - RNA, 19 nt, Artificial Sequence
  Description of Artificial Sequence: Synthetic oligonucleotide
  Sense strand starting at position 3570 of SEQ ID NO: 1883671
cguccaaauauguaacgau

SEQ ID NO: 2208473 - RNA, 19 nt, Artificial Sequence
  Description of Artificial Sequence: Synthetic oligonucleotide
  Antisense strand to SEQ ID NO: 2208472
aucguuacauauuuggacg

SEQ ID NO: 2208474 - RNA, 19 nt, Artificial Sequence
  Description of Artificial Sequence: Synthetic oligonucleotide
  Sense strand starting at position 1973 of SEQ ID NO: 1883671
ccguguucugagggagaaa

SEQ ID NO: 2208475 - RNA, 19 nt, Artificial Sequence
  Description of Artificial Sequence: Synthetic oligonucleotide
  Antisense strand to SEQ ID NO: 2208474
uuucucccucagaacacgg

SEQ ID NO: 2208476 - RNA, 19 nt, Artificial Sequence
  Description of Artificial Sequence: Synthetic oligonucleotide
  Sense strand starting at position 1275 of SEQ ID NO: 1883671
gguagcucuggguggagaa

SEQ ID NO: 2208477 - RNA, 19 nt, Artificial Sequence
  Description of Artificial Sequence: Synthetic oligonucleotide
  Antisense strand to SEQ ID NO: 2208476
uucuccacccagagcuacc

SEQ ID NO: 2208478 - RNA, 19 nt, Artificial Sequence
  Description of Artificial Sequence: Synthetic oligonucleotide
  Sense strand starting at position 3562 of SEQ ID NO: 1883671
ucucgacucguccaaauau

SEQ ID NO: 2208479 - RNA, 19 nt, Artificial Sequence
  Description of Artificial Sequence: Synthetic oligonucleotide
  Antisense strand to SEQ ID NO: 2208478
auauuuggacgagucgaga

SEQ ID NO: 2208480 - RNA, 19 nt, Artificial Sequence
  Description of Artificial Sequence: Synthetic oligonucleotide
  Sense strand starting at position 3359 of SEQ ID NO: 1883671
gguggcauaucuguaauaa

SEQ ID NO: 2208481 - RNA, 19 nt, Artificial Sequence
  Description of Artificial Sequence: Synthetic oligonucleotide
  Antisense strand to SEQ ID NO: 2208480
uuauuacagauaugccacc

SEQ ID NO: 2208482 - RNA, 19 nt, Artificial Sequence
  Description of Artificial Sequence: Synthetic oligonucleotide
  Sense strand starting at position 2039 of SEQ ID NO: 1883671
caagauguugccgaggguu

SEQ ID NO: 2208483 - RNA, 19 nt, Artificial Sequence
  Description of Artificial Sequence: Synthetic oligonucleotide
  Antisense strand to SEQ ID NO: 2208482
aacccucggcaacaucuug

SEQ ID NO: 2208484 - RNA, 19 nt, Artificial Sequence
  Description of Artificial Sequence: Synthetic oligonucleotide
  Sense strand starting at position 3670 of SEQ ID NO: 1883671
gucuuccuagaauggucua

SEQ ID NO: 2208485 - RNA, 19 nt, Artificial Sequence
  Description of Artificial Sequence: Synthetic oligonucleotide
  Antisense strand to SEQ ID NO: 2208484
uagaccauucuaggaagac

SEQ ID NO: 2208486 - RNA, 19 nt, Artificial Sequence
  Description of Artificial Sequence: Synthetic oligonucleotide
  Sense strand starting at position 3622 of SEQ ID NO: 1883671
gaaauucgccaguggauua

SEQ ID NO: 2208487 - RNA, 19 nt, Artificial Sequence
  Description of Artificial Sequence: Synthetic oligonucleotide
  Antisense strand to SEQ ID NO: 2208486
uaauccacuggcgaauuuc

SEQ ID NO: 2208488 - RNA, 19 nt, Artificial Sequence
  Description of Artificial Sequence: Synthetic oligonucleotide
  Sense strand starting at position 3662 of SEQ ID NO: 1883671
uuucucuggucuuccuaga

SEQ ID NO: 2208489 - RNA, 19 nt, Artificial Sequence
  Description of Artificial Sequence: Synthetic oligonucleotide
  Antisense strand to SEQ ID NO: 2208488
ucuaggaagaccagagaaa

SEQ ID NO: 2208490 - RNA, 19 nt, Artificial Sequence
  Description of Artificial Sequence: Synthetic oligonucleotide
  Sense strand starting at position 1530 of SEQ ID NO: 1883671
guagaaacucacugcaugu

SEQ ID NO: 2208491 - RNA, 19 nt, Artificial Sequence
  Description of Artificial Sequence: Synthetic oligonucleotide
  Antisense strand to SEQ ID NO: 2208490
acaugcagugaguuucuac

SEQ ID NO: 2208492 - RNA, 19 nt, Artificial Sequence
  Description of Artificial Sequence: Synthetic oligonucleotide
  Sense strand starting at position 3595 of SEQ ID NO: 1883671
cuagaucagcucuggucua

SEQ ID NO: 2208493 - RNA, 19 nt, Artificial Sequence
  Description of Artificial Sequence: Synthetic oligonucleotide
  Antisense strand to SEQ ID NO: 2208492
uagaccagagcugaucuag

SEQ ID NO: 2208494 - RNA, 19 nt, Artificial Sequence
  Description of Artificial Sequence: Synthetic oligonucleotide
  Sense strand starting at position 1583 of SEQ ID NO: 1883671
agcucuugagcuggacauu

SEQ ID NO: 2208495 - RNA, 19 nt, Artificial Sequence
  Description of Artificial Sequence: Synthetic oligonucleotide
  Antisense strand to SEQ ID NO: 2208494
aauguccagcucaagagcu

SEQ ID NO: 2208496 - RNA, 19 nt, Artificial Sequence
  Description of Artificial Sequence: Synthetic oligonucleotide
  Sense strand starting at position 3308 of SEQ ID NO: 1883671
ggauacagcguguauucuu

SEQ ID NO: 2208497 - RNA, 19 nt, Artificial Sequence
  Description of Artificial Sequence: Synthetic oligonucleotide
  Antisense strand to SEQ ID NO: 2208496
aagaauacacgcuguaucc

SEQ ID NO: 2208498 - RNA, 19 nt, Artificial Sequence
  Description of Artificial Sequence: Synthetic oligonucleotide
  Sense strand starting at position 1726 of SEQ ID NO: 1883671
gucucuaccuggucuuuga

SEQ ID NO: 2208499 - RNA, 19 nt, Artificial Sequence
  Description of Artificial Sequence: Synthetic oligonucleotide
  Antisense strand to SEQ ID NO: 2208498
ucaaagaccagguagagac

SEQ ID NO: 2208500 - RNA, 19 nt, Artificial Sequence
  Description of Artificial Sequence: Synthetic oligonucleotide
  Sense strand starting at position 2041 of SEQ ID NO: 1883671
agauguugccgaggguuga

SEQ ID NO: 2208501 - RNA, 19 nt, Artificial Sequence
  Description of Artificial Sequence: Synthetic oligonucleotide
  Antisense strand to SEQ ID NO: 2208500
ucaacccucggcaacaucu

SEQ ID NO: 2208502 - RNA, 19 nt, Artificial Sequence
  Description of Artificial Sequence: Synthetic oligonucleotide
  Sense strand starting at position 2042 of SEQ ID NO: 1883671
gauguugccgaggguugaa

SEQ ID NO: 2208503 - RNA, 19 nt, Artificial Sequence
  Description of Artificial Sequence: Synthetic oligonucleotide
  Antisense strand to SEQ ID NO: 2208502
uucaacccucggcaacauc

SEQ ID NO: 2208504 - RNA, 19 nt, Artificial Sequence
  Description of Artificial Sequence: Synthetic oligonucleotide
  Sense strand starting at position 2278 of SEQ ID NO: 1883671
agaagaguaagucgccgau

SEQ ID NO: 2208505 - RNA, 19 nt, Artificial Sequence
  Description of Artificial Sequence: Synthetic oligonucleotide
  Antisense strand to SEQ ID NO: 2208504
aucggcgacuuacucuucu

SEQ ID NO: 2208506 - RNA, 19 nt, Artificial Sequence
  Description of Artificial Sequence: Synthetic oligonucleotide
  Sense strand starting at position 3560 of SEQ ID NO: 1883671
ucucucgacucguccaaau

SEQ ID NO: 2208507 - RNA, 19 nt, Artificial Sequence
  Description of Artificial Sequence: Synthetic oligonucleotide
  Antisense strand to SEQ ID NO: 2208506
auuuggacgagucgagaga

SEQ ID NO: 2208508 - RNA, 19 nt, Artificial Sequence
  Description of Artificial Sequence: Synthetic oligonucleotide
  Sense strand starting at position 3441 of SEQ ID NO: 1883671
gcuccaguccucugcaaag

SEQ ID NO: 2208509 - RNA, 19 nt, Artificial Sequence
  Description of Artificial Sequence: Synthetic oligonucleotide
  Antisense strand to SEQ ID NO: 2208508
cuuugcagaggacuggagc

SEQ ID NO: 2208510 - RNA, 19 nt, Artificial Sequence
  Description of Artificial Sequence: Synthetic oligonucleotide
  Sense strand starting at position 2344 of SEQ ID NO: 1883671
agagaaugucgccgauggu

SEQ ID NO: 2208511 - RNA, 19 nt, Artificial Sequence
  Description of Artificial Sequence: Synthetic oligonucleotide
  Antisense strand to SEQ ID NO: 2208510
accaucggcgacauucucu

SEQ ID NO: 2208512 - RNA, 19 nt, Artificial Sequence
  Description of Artificial Sequence: Synthetic oligonucleotide
  Sense strand starting at position 3632 of SEQ ID NO: 1883671
aguggauuauaccauauag

SEQ ID NO: 2208513 - RNA, 19 nt, Artificial Sequence
  Description of Artificial Sequence: Synthetic oligonucleotide
  Antisense strand to SEQ ID NO: 2208512
cuauaugguauaauccacu

SEQ ID NO: 2208514 - RNA, 19 nt, Artificial Sequence
  Description of Artificial Sequence: Synthetic oligonucleotide
  Sense strand starting at position 2330 of SEQ ID NO: 1883671
gaaauacgcuuagaagaga

SEQ ID NO: 2208515 - RNA, 19 nt, Artificial Sequence
  Description of Artificial Sequence: Synthetic oligonucleotide
  Antisense strand to SEQ ID NO: 2208514
ucucuucuaagcguauuuc

SEQ ID NO: 2208516 - RNA, 19 nt, Artificial Sequence
  Description of Artificial Sequence: Synthetic oligonucleotide
  Sense strand starting at position 3193 of SEQ ID NO: 1883671
aaauuugccugagaccguu

SEQ ID NO: 2208517 - RNA, 19 nt, Artificial Sequence
  Description of Artificial Sequence: Synthetic oligonucleotide
  Antisense strand to SEQ ID NO: 2208516
aacggucucaggcaaauuu

SEQ ID NO: 2208518 - RNA, 19 nt, Artificial Sequence
  Description of Artificial Sequence: Synthetic oligonucleotide
  Sense strand starting at position 3311 of SEQ ID NO: 1883671
uacagcguguauucuuauu

SEQ ID NO: 2208519 - RNA, 19 nt, Artificial Sequence
  Description of Artificial Sequence: Synthetic oligonucleotide
  Antisense strand to SEQ ID NO: 2208518
aauaagaauacacgcugua

SEQ ID NO: 2208520 - RNA, 19 nt, Artificial Sequence
  Description of Artificial Sequence: Synthetic oligonucleotide
  Sense strand starting at position 2393 of SEQ ID NO: 1883671
aacauaugcuuagacgaga

SEQ ID NO: 2208521 - RNA, 19 nt, Artificial Sequence
  Description of Artificial Sequence: Synthetic oligonucleotide
  Antisense strand to SEQ ID NO: 2208520
ucucgucuaagcauauguu

SEQ ID NO: 2208522 - RNA, 19 nt, Artificial Sequence
  Description of Artificial Sequence: Synthetic oligonucleotide
  Sense strand starting at position 2410 of SEQ ID NO: 1883671
gaacauugccggugguguu

SEQ ID NO: 2208523 - RNA, 19 nt, Artificial Sequence
  Description of Artificial Sequence: Synthetic oligonucleotide
  Antisense strand to SEQ ID NO: 2208522
aacaccaccggcaauguuc

SEQ ID NO: 2208524 - RNA, 19 nt, Artificial Sequence
  Description of Artificial Sequence: Synthetic oligonucleotide
  Sense strand starting at position 1823 of SEQ ID NO: 1883671
aaggaagucugagguuaaa

SEQ ID NO: 2208525 - RNA, 19 nt, Artificial Sequence
  Description of Artificial Sequence: Synthetic oligonucleotide
  Antisense strand to SEQ ID NO: 2208524
uuuaaccucagacuuccuu

SEQ ID NO: 2208526 - RNA, 19 nt, Artificial Sequence
  Description of Artificial Sequence: Synthetic oligonucleotide
  Sense strand starting at position 3721 of SEQ ID NO: 1883671
ggaucaauguacuggauua

SEQ ID NO: 2208527 - RNA, 19 nt, Artificial Sequence
  Description of Artificial Sequence: Synthetic oligonucleotide
  Antisense strand to SEQ ID NO: 2208526
uaauccaguacauugaucc

SEQ ID NO: 2208528 - RNA, 19 nt, Artificial Sequence
  Description of Artificial Sequence: Synthetic oligonucleotide
  Sense strand starting at position 2284 of SEQ ID NO: 1883671
guaagucgccgauggcaua

SEQ ID NO: 2208529 - RNA, 19 nt, Artificial Sequence
  Description of Artificial Sequence: Synthetic oligonucleotide
  Antisense strand to SEQ ID NO: 2208528
uaugccaucggcgacuuac

SEQ ID NO: 2208530 - RNA, 19 nt, Artificial Sequence
  Description of Artificial Sequence: Synthetic oligonucleotide
  Sense strand starting at position 3584 of SEQ ID NO: 1883671
acgauuauguucuagauca

SEQ ID NO: 2208531 - RNA, 19 nt, Artificial Sequence
  Description of Artificial Sequence: Synthetic oligonucleotide
  Antisense strand to SEQ ID NO: 2208530
ugaucuagaacauaaucgu

SEQ ID NO: 2208532 - RNA, 19 nt, Artificial Sequence
  Description of Artificial Sequence: Synthetic oligonucleotide
  Sense strand starting at position 2535 of SEQ ID NO: 1883672
ucaacuggacucugaugau

SEQ ID NO: 2208533 - RNA, 19 nt, Artificial Sequence
  Description of Artificial Sequence: Synthetic oligonucleotide
  Antisense strand to SEQ ID NO: 2208532
aucaucagaguccaguuga

SEQ ID NO: 2208534 - RNA, 19 nt, Artificial Sequence
  Description of Artificial Sequence: Synthetic oligonucleotide
  Sense strand starting at position 2566 of SEQ ID NO: 1883672
uggaauggcccucauauca

SEQ ID NO: 2208535 - RNA, 19 nt, Artificial Sequence
  Description of Artificial Sequence: Synthetic oligonucleotide
  Antisense strand to SEQ ID NO: 2208534
ugauaugagggccauucca

SEQ ID NO: 2208536 - RNA, 19 nt, Artificial Sequence
  Description of Artificial Sequence: Synthetic oligonucleotide
  Sense strand starting at position 2447 of SEQ ID NO: 1883672
ccuugaggacgucaucaaa

SEQ ID NO: 2208537 - RNA, 19 nt, Artificial Sequence
  Description of Artificial Sequence: Synthetic oligonucleotide
  Antisense strand to SEQ ID NO: 2208536
uuugaugacguccucaagg

SEQ ID NO: 2208538 - RNA, 19 nt, Artificial Sequence
  Description of Artificial Sequence: Synthetic oligonucleotide
  Sense strand starting at position 1081 of SEQ ID NO: 1883672
gcucguauaccuccugcau

SEQ ID NO: 2208539 - RNA, 19 nt, Artificial Sequence
  Description of Artificial Sequence: Synthetic oligonucleotide
  Antisense strand to SEQ ID NO: 2208538
augcaggagguauacgagc

SEQ ID NO: 2208540 - RNA, 19 nt, Artificial Sequence
  Description of Artificial Sequence: Synthetic oligonucleotide
  Sense strand starting at position 346 of SEQ ID NO: 1883672
ugcucacuuggcugauuua

SEQ ID NO: 2208541 - RNA, 19 nt, Artificial Sequence
  Description of Artificial Sequence: Synthetic oligonucleotide
  Antisense strand to SEQ ID NO: 2208540
uaaaucagccaagugagca

SEQ ID NO: 2208542 - RNA, 19 nt, Artificial Sequence
  Description of Artificial Sequence: Synthetic oligonucleotide
  Sense strand starting at position 3843 of SEQ ID NO: 1883672
gugagaacuuguccagaga

SEQ ID NO: 2208543 - RNA, 19 nt, Artificial Sequence
  Description of Artificial Sequence: Synthetic oligonucleotide
  Antisense strand to SEQ ID NO: 2208542
ucucuggacaaguucucac

SEQ ID NO: 2208544 - RNA, 19 nt, Artificial Sequence
  Description of Artificial Sequence: Synthetic oligonucleotide
  Sense strand starting at position 3312 of SEQ ID NO: 1883672
uccagucagcuccagaaua

SEQ ID NO: 2208545 - RNA, 19 nt, Artificial Sequence
  Description of Artificial Sequence: Synthetic oligonucleotide
  Antisense strand to SEQ ID NO: 2208544
uauucuggagcugacugga

SEQ ID NO: 2208546 - RNA, 19 nt, Artificial Sequence
  Description of Artificial Sequence: Synthetic oligonucleotide
  Sense strand starting at position 1330 of SEQ ID NO: 1883672
ggugacagacuguauuagu

SEQ ID NO: 2208547 - RNA, 19 nt, Artificial Sequence
  Description of Artificial Sequence: Synthetic oligonucleotide
  Antisense strand to SEQ ID NO: 2208546
acuaauacagucugucacc

SEQ ID NO: 2208548 - RNA, 19 nt, Artificial Sequence
  Description of Artificial Sequence: Synthetic oligonucleotide
  Sense strand starting at position 3214 of SEQ ID NO: 1883672
agccucauucuggaaucuu

SEQ ID NO: 2208549 - RNA, 19 nt, Artificial Sequence
  Description of Artificial Sequence: Synthetic oligonucleotide
  Antisense strand to SEQ ID NO: 2208548
aagauuccagaaugaggcu

SEQ ID NO: 2208550 - RNA, 19 nt, Artificial Sequence
  Description of Artificial Sequence: Synthetic oligonucleotide
  Sense strand starting at position 426 of SEQ ID NO: 1883672
ugcgaauauguuuaagaau

SEQ ID NO: 2208551 - RNA, 19 nt, Artificial Sequence
  Description of Artificial Sequence: Synthetic oligonucleotide
  Antisense strand to SEQ ID NO: 2208550
auucuuaaacauauucgca

SEQ ID NO: 2208552 - RNA, 19 nt, Artificial Sequence
  Description of Artificial Sequence: Synthetic oligonucleotide
  Sense strand starting at position 3490 of SEQ ID NO: 1883672
gacacuucccuccgaggaa

SEQ ID NO: 2208553 - RNA, 19 nt, Artificial Sequence
  Description of Artificial Sequence: Synthetic oligonucleotide
  Antisense strand to SEQ ID NO: 2208552
uuccucggagggaaguguc

SEQ ID NO: 2208554 - RNA, 19 nt, Artificial Sequence
  Description of Artificial Sequence: Synthetic oligonucleotide
  Sense strand starting at position 3137 of SEQ ID NO: 1883672
agggcuucucuuuggaaga

SEQ ID NO: 2208555 - RNA, 19 nt, Artificial Sequence
  Description of Artificial Sequence: Synthetic oligonucleotide
  Antisense strand to SEQ ID NO: 2208554
ucuuccaaagagaagcccu

SEQ ID NO: 2208556 - RNA, 19 nt, Artificial Sequence
  Description of Artificial Sequence: Synthetic oligonucleotide
  Sense strand starting at position 3136 of SEQ ID NO: 1883672
gagggcuucucuuuggaag

SEQ ID NO: 2208557 - RNA, 19 nt, Artificial Sequence
  Description of Artificial Sequence: Synthetic oligonucleotide
  Antisense strand to SEQ ID NO: 2208556
cuuccaaagagaagcccuc

SEQ ID NO: 2208558 - RNA, 19 nt, Artificial Sequence
  Description of Artificial Sequence: Synthetic oligonucleotide
  Sense strand starting at position 477 of SEQ ID NO: 1883672
agaauaacucaaugucugu

SEQ ID NO: 2208559 - RNA, 19 nt, Artificial Sequence
  Description of Artificial Sequence: Synthetic oligonucleotide
  Antisense strand to SEQ ID NO: 2208558
acagacauugaguuauucu

SEQ ID NO: 2208560 - RNA, 19 nt, Artificial Sequence
  Description of Artificial Sequence: Synthetic oligonucleotide
  Sense strand starting at position 2992 of SEQ ID NO: 1883672
cucuuaggccuuggagaca

SEQ ID NO: 2208561 - RNA, 19 nt, Artificial Sequence
  Description of Artificial Sequence: Synthetic oligonucleotide
  Antisense strand to SEQ ID NO: 2208560
ugucuccaaggccuaagag

SEQ ID NO: 2208562 - RNA, 19 nt, Artificial Sequence
  Description of Artificial Sequence: Synthetic oligonucleotide
  Sense strand starting at position 3340 of SEQ ID NO: 1883672
guguaaucccagggacauc

SEQ ID NO: 2208563 - RNA, 19 nt, Artificial Sequence
  Description of Artificial Sequence: Synthetic oligonucleotide
  Antisense strand to SEQ ID NO: 2208562
gaugucccugggauuacac

SEQ ID NO: 2208564 - RNA, 19 nt, Artificial Sequence
  Description of Artificial Sequence: Synthetic oligonucleotide
  Sense strand starting at position 670 of SEQ ID NO: 1883672
cuauguuccaggugacaag

SEQ ID NO: 2208565 - RNA, 19 nt, Artificial Sequence
  Description of Artificial Sequence: Synthetic oligonucleotide
  Antisense strand to SEQ ID NO: 2208564
cuugucaccuggaacauag

SEQ ID NO: 2208566 - RNA, 19 nt, Artificial Sequence
  Description of Artificial Sequence: Synthetic oligonucleotide
  Sense strand starting at position 3679 of SEQ ID NO: 1883672
auccuugcccucugagaaa

SEQ ID NO: 2208567 - RNA, 19 nt, Artificial Sequence
  Description of Artificial Sequence: Synthetic oligonucleotide
  Antisense strand to SEQ ID NO: 2208566
uuucucagagggcaaggau

SEQ ID NO: 2208568 - RNA, 19 nt, Artificial Sequence
  Description of Artificial Sequence: Synthetic oligonucleotide
  Sense strand starting at position 3262 of SEQ ID NO: 1883672
gccuuccacccauauguga

SEQ ID NO: 2208569 - RNA, 19 nt, Artificial Sequence
  Description of Artificial Sequence: Synthetic oligonucleotide
  Antisense strand to SEQ ID NO: 2208568
ucacauauggguggaaggc

SEQ ID NO: 2208570 - RNA, 19 nt, Artificial Sequence
  Description of Artificial Sequence: Synthetic oligonucleotide
  Sense strand starting at position 420 of SEQ ID NO: 1883672
uaugauugcgaauauguuu

SEQ ID NO: 2208571 - RNA, 19 nt, Artificial Sequence
  Description of Artificial Sequence: Synthetic oligonucleotide
  Antisense strand to SEQ ID NO: 2208570
aaacauauucgcaaucaua

SEQ ID NO: 2208572 - RNA, 19 nt, Artificial Sequence
  Description of Artificial Sequence: Synthetic oligonucleotide
  Sense strand starting at position 25 of SEQ ID NO: 1883672
caaauuaggccagguguga

SEQ ID NO: 2208573 - RNA, 19 nt, Artificial Sequence
  Description of Artificial Sequence: Synthetic oligonucleotide
  Antisense strand to SEQ ID NO: 2208572
ucacaccuggccuaauuug

SEQ ID NO: 2208574 - RNA, 19 nt, Artificial Sequence
  Description of Artificial Sequence: Synthetic oligonucleotide
  Sense strand starting at position 425 of SEQ ID NO: 1883672
uugcgaauauguuuaagaa

SEQ ID NO: 2208575 - RNA, 19 nt, Artificial Sequence
  Description of Artificial Sequence: Synthetic oligonucleotide
  Antisense strand to SEQ ID NO: 2208574
uucuuaaacauauucgcaa

SEQ ID NO: 2208576 - RNA, 19 nt, Artificial Sequence
  Description of Artificial Sequence: Synthetic oligonucleotide
  Sense strand starting at position 2437 of SEQ ID NO: 1883672
uccauugcuuccuugagga

SEQ ID NO: 2208577 - RNA, 19 nt, Artificial Sequence
  Description of Artificial Sequence: Synthetic oligonucleotide
  Antisense strand to SEQ ID NO: 2208576
uccucaaggaagcaaugga

SEQ ID NO: 2208578 - RNA, 19 nt, Artificial Sequence
  Description of Artificial Sequence: Synthetic oligonucleotide
  Sense strand starting at position 3060 of SEQ ID NO: 1883672
ugcucauugccguuguguu

SEQ ID NO: 2208579 - RNA, 19 nt, Artificial Sequence
  Description of Artificial Sequence: Synthetic oligonucleotide
  Antisense strand to SEQ ID NO: 2208578
aacacaacggcaaugagca

SEQ ID NO: 2208580 - RNA, 19 nt, Artificial Sequence
  Description of Artificial Sequence: Synthetic oligonucleotide
  Sense strand starting at position 407 of SEQ ID NO: 1883672
gggucacucuuuguaugau

SEQ ID NO: 2208581 - RNA, 19 nt, Artificial Sequence
  Description of Artificial Sequence: Synthetic oligonucleotide
  Antisense strand to SEQ ID NO: 2208580
aucauacaaagagugaccc

SEQ ID NO: 2208582 - RNA, 19 nt, Artificial Sequence
  Description of Artificial Sequence: Synthetic oligonucleotide
  Sense strand starting at position 2831 of SEQ ID NO: 1883672
ccuucugcucccugaggga

SEQ ID NO: 2208583 - RNA, 19 nt, Artificial Sequence
  Description of Artificial Sequence: Synthetic oligonucleotide
  Antisense strand to SEQ ID NO: 2208582
ucccucagggagcagaagg

SEQ ID NO: 2208584 - RNA, 19 nt, Artificial Sequence
  Description of Artificial Sequence: Synthetic oligonucleotide
  Sense strand starting at position 3339 of SEQ ID NO: 1883672
cguguaaucccagggacau

SEQ ID NO: 2208585 - RNA, 19 nt, Artificial Sequence
  Description of Artificial Sequence: Synthetic oligonucleotide
  Antisense strand to SEQ ID NO: 2208584
augucccugggauuacacg

SEQ ID NO: 2208586 - RNA, 19 nt, Artificial Sequence
  Description of Artificial Sequence: Synthetic oligonucleotide
  Sense strand starting at position 2064 of SEQ ID NO: 1883672
gguguucgugcgccaguga

SEQ ID NO: 2208587 - RNA, 19 nt, Artificial Sequence
  Description of Artificial Sequence: Synthetic oligonucleotide
  Antisense strand to SEQ ID NO: 2208586
ucacuggcgcacgaacacc

SEQ ID NO: 2208588 - RNA, 19 nt, Artificial Sequence
  Description of Artificial Sequence: Synthetic oligonucleotide
  Sense strand starting at position 160 of SEQ ID NO: 1883672
gcacaagguuuggcucaga

SEQ ID NO: 2208589 - RNA, 19 nt, Artificial Sequence
  Description of Artificial Sequence: Synthetic oligonucleotide
  Antisense strand to SEQ ID NO: 2208588
ucugagccaaaccuugugc

SEQ ID NO: 2208590 - RNA, 19 nt, Artificial Sequence
  Description of Artificial Sequence: Synthetic oligonucleotide
  Sense strand starting at position 3369 of SEQ ID NO: 1883672
ggccucaggcugugacaaa

SEQ ID NO: 2208591 - RNA, 19 nt, Artificial Sequence
  Description of Artificial Sequence: Synthetic oligonucleotide
  Antisense strand to SEQ ID NO: 2208590
uuugucacagccugaggcc

SEQ ID NO: 2208592 - RNA, 19 nt, Artificial Sequence
  Description of Artificial Sequence: Synthetic oligonucleotide
  Sense strand starting at position 3943 of SEQ ID NO: 1883672
gguuugugggcugggauua

SEQ ID NO: 2208593 - RNA, 19 nt, Artificial Sequence
  Description of Artificial Sequence: Synthetic oligonucleotide
  Antisense strand to SEQ ID NO: 2208592
uaaucccagcccacaaacc

SEQ ID NO: 2208594 - RNA, 19 nt, Artificial Sequence
  Description of Artificial Sequence: Synthetic oligonucleotide
  Sense strand starting at position 3942 of SEQ ID NO: 1883672
agguuugugggcugggauu

SEQ ID NO: 2208595 - RNA, 19 nt, Artificial Sequence
  Description of Artificial Sequence: Synthetic oligonucleotide
  Antisense strand to SEQ ID NO: 2208594
aaucccagcccacaaaccu

SEQ ID NO: 2208596 - RNA, 19 nt, Artificial Sequence
  Description of Artificial Sequence: Synthetic oligonucleotide
  Sense strand starting at position 3327 of SEQ ID NO: 1883672
aauaauuagcaccguguaa

SEQ ID NO: 2208597 - RNA, 19 nt, Artificial Sequence
  Description of Artificial Sequence: Synthetic oligonucleotide
  Antisense strand to SEQ ID NO: 2208596
uuacacggugcuaauuauu

SEQ ID NO: 2208598 - RNA, 19 nt, Artificial Sequence
  Description of Artificial Sequence: Synthetic oligonucleotide
  Sense strand starting at position 921 of SEQ ID NO: 1883672
cugagagauucugcugcuu

SEQ ID NO: 2208599 - RNA, 19 nt, Artificial Sequence
  Description of Artificial Sequence: Synthetic oligonucleotide
  Antisense strand to SEQ ID NO: 2208598
aagcagcagaaucucucag

SEQ ID NO: 2208600 - RNA, 19 nt, Artificial Sequence
  Description of Artificial Sequence: Synthetic oligonucleotide
  Sense strand starting at position 981 of SEQ ID NO: 1883672
ggcugcagccuugaguaau

SEQ ID NO: 2208601 - RNA, 19 nt, Artificial Sequence
  Description of Artificial Sequence: Synthetic oligonucleotide
  Antisense strand to SEQ ID NO: 2208600
auuacucaaggcugcagcc

SEQ ID NO: 2208602 - RNA, 19 nt, Artificial Sequence
  Description of Artificial Sequence: Synthetic oligonucleotide
  Sense strand starting at position 413 of SEQ ID NO: 1883672
cucuuuguaugauugcgaa

SEQ ID NO: 2208603 - RNA, 19 nt, Artificial Sequence
  Description of Artificial Sequence: Synthetic oligonucleotide
  Antisense strand to SEQ ID NO: 2208602
uucgcaaucauacaaagag

SEQ ID NO: 2208604 - RNA, 19 nt, Artificial Sequence
  Description of Artificial Sequence: Synthetic oligonucleotide
  Sense strand starting at position 626 of SEQ ID NO: 1883672
ugucaccgucucugacaau

SEQ ID NO: 2208605 - RNA, 19 nt, Artificial Sequence
  Description of Artificial Sequence: Synthetic oligonucleotide
  Antisense strand to SEQ ID NO: 2208604
auugucagagacggugaca

SEQ ID NO: 2208606 - RNA, 19 nt, Artificial Sequence
  Description of Artificial Sequence: Synthetic oligonucleotide
  Sense strand starting at position 271 of SEQ ID NO: 1883672
uguugaagggcuugugagu

SEQ ID NO: 2208607 - RNA, 19 nt, Artificial Sequence
  Description of Artificial Sequence: Synthetic oligonucleotide
  Antisense strand to SEQ ID NO: 2208606
acucacaagcccuucaaca

SEQ ID NO: 2208608 - RNA, 19 nt, Artificial Sequence
  Description of Artificial Sequence: Synthetic oligonucleotide
  Sense strand starting at position 2394 of SEQ ID NO: 1883672
aggccucucuguucucuua

SEQ ID NO: 2208609 - RNA, 19 nt, Artificial Sequence
  Description of Artificial Sequence: Synthetic oligonucleotide
  Antisense strand to SEQ ID NO: 2208608
uaagagaacagagaggccu

SEQ ID NO: 2208610 - RNA, 19 nt, Artificial Sequence
  Description of Artificial Sequence: Synthetic oligonucleotide
  Sense strand starting at position 3329 of SEQ ID NO: 1883672
uaauuagcaccguguaauc

SEQ ID NO: 2208611 - RNA, 19 nt, Artificial Sequence
  Description of Artificial Sequence: Synthetic oligonucleotide
  Antisense strand to SEQ ID NO: 2208610
gauuacacggugcuaauua

SEQ ID NO: 2208612 - RNA, 19 nt, Artificial Sequence
  Description of Artificial Sequence: Synthetic oligonucleotide
  Sense strand starting at position 453 of SEQ ID NO: 1883674
cuggauagcccugacuaau

SEQ ID NO: 2208613 - RNA, 19 nt, Artificial Sequence
  Description of Artificial Sequence: Synthetic oligonucleotide
  Antisense strand to SEQ ID NO: 2208612
auuagucagggcuauccag

SEQ ID NO: 2208614 - RNA, 19 nt, Artificial Sequence
  Description of Artificial Sequence: Synthetic oligonucleotide
  Sense strand starting at position 235 of SEQ ID NO: 1883674
ugaguugcuaaggacuuaa

SEQ ID NO: 2208615 - RNA, 19 nt, Artificial Sequence
  Description of Artificial Sequence: Synthetic oligonucleotide
  Antisense strand to SEQ ID NO: 2208614
uuaaguccuuagcaacuca

SEQ ID NO: 2208616 - RNA, 19 nt, Artificial Sequence
  Description of Artificial Sequence: Synthetic oligonucleotide
  Sense strand starting at position 1203 of SEQ ID NO: 1883674
ggaauaugacagcgaauua

SEQ ID NO: 2208617 - RNA, 19 nt, Artificial Sequence
  Description of Artificial Sequence: Synthetic oligonucleotide
  Antisense strand to SEQ ID NO: 2208616
uaauucgcugucauauucc

SEQ ID NO: 2208618 - RNA, 19 nt, Artificial Sequence
  Description of Artificial Sequence: Synthetic oligonucleotide
  Sense strand starting at position 801 of SEQ ID NO: 1883674
ucuauuugcuaguuuccua

SEQ ID NO: 2208619 - RNA, 19 nt, Artificial Sequence
  Description of Artificial Sequence: Synthetic oligonucleotide
  Antisense strand to SEQ ID NO: 2208618
uaggaaacuagcaaauaga

SEQ ID NO: 2208620 - RNA, 19 nt, Artificial Sequence
  Description of Artificial Sequence: Synthetic oligonucleotide
  Sense strand starting at position 1507 of SEQ ID NO: 1883674
gggcaaacaucaguaaauu

SEQ ID NO: 2208621 - RNA, 19 nt, Artificial Sequence
  Description of Artificial Sequence: Synthetic oligonucleotide
  Antisense strand to SEQ ID NO: 2208620
aauuuacugauguuugccc

SEQ ID NO: 2208622 - RNA, 19 nt, Artificial Sequence
  Description of Artificial Sequence: Synthetic oligonucleotide
  Sense strand starting at position 537 of SEQ ID NO: 1883674
gaggcuugcagugaaauga

SEQ ID NO: 2208623 - RNA, 19 nt, Artificial Sequence
  Description of Artificial Sequence: Synthetic oligonucleotide
  Antisense strand to SEQ ID NO: 2208622
ucauuucacugcaagccuc

SEQ ID NO: 2208624 - RNA, 19 nt, Artificial Sequence
  Description of Artificial Sequence: Synthetic oligonucleotide
  Sense strand starting at position 1227 of SEQ ID NO: 1883674
aguccuuguccuuacaaag

SEQ ID NO: 2208625 - RNA, 19 nt, Artificial Sequence
  Description of Artificial Sequence: Synthetic oligonucleotide
  Antisense strand to SEQ ID NO: 2208624
cuuuguaaggacaaggacu

SEQ ID NO: 2208626 - RNA, 19 nt, Artificial Sequence
  Description of Artificial Sequence: Synthetic oligonucleotide
  Sense strand starting at position 1140 of SEQ ID NO: 1883674
caguguguucguuuguuca

SEQ ID NO: 2208627 - RNA, 19 nt, Artificial Sequence
  Description of Artificial Sequence: Synthetic oligonucleotide
  Antisense strand to SEQ ID NO: 2208626
ugaacaaacgaacacacug

SEQ ID NO: 2208628 - RNA, 19 nt, Artificial Sequence
  Description of Artificial Sequence: Synthetic oligonucleotide
  Sense strand starting at position 891 of SEQ ID NO: 1883674
uguucauugcaguagggaa

SEQ ID NO: 2208629 - RNA, 19 nt, Artificial Sequence
  Description of Artificial Sequence: Synthetic oligonucleotide
  Antisense strand to SEQ ID NO: 2208628
uucccuacugcaaugaaca

SEQ ID NO: 2208630 - RNA, 19 nt, Artificial Sequence
  Description of Artificial Sequence: Synthetic oligonucleotide
  Sense strand starting at position 452 of SEQ ID NO: 1883674
ucuggauagcccugacuaa

SEQ ID NO: 2208631 - RNA, 19 nt, Artificial Sequence
  Description of Artificial Sequence: Synthetic oligonucleotide
  Antisense strand to SEQ ID NO: 2208630
uuagucagggcuauccaga

SEQ ID NO: 2208632 - RNA, 19 nt, Artificial Sequence
  Description of Artificial Sequence: Synthetic oligonucleotide
  Sense strand starting at position 345 of SEQ ID NO: 1883674
ugugaaauccugugaacca

SEQ ID NO: 2208633 - RNA, 19 nt, Artificial Sequence
  Description of Artificial Sequence: Synthetic oligonucleotide
  Antisense strand to SEQ ID NO: 2208632
ugguucacaggauuucaca

SEQ ID NO: 2208634 - RNA, 19 nt, Artificial Sequence
  Description of Artificial Sequence: Synthetic oligonucleotide
  Sense strand starting at position 52 of SEQ ID NO: 1883674
acauuaacacugugauggu

SEQ ID NO: 2208635 - RNA, 19 nt, Artificial Sequence
  Description of Artificial Sequence: Synthetic oligonucleotide
  Antisense strand to SEQ ID NO: 2208634
accaucacaguguuaaugu

SEQ ID NO: 2208636 - RNA, 19 nt, Artificial Sequence
  Description of Artificial Sequence: Synthetic oligonucleotide
  Sense strand starting at position 106 of SEQ ID NO: 1883674
ccacauguuugguuaaaca

SEQ ID NO: 2208637 - RNA, 19 nt, Artificial Sequence
  Description of Artificial Sequence: Synthetic oligonucleotide
  Antisense strand to SEQ ID NO: 2208636
uguuuaaccaaacaugugg

SEQ ID NO: 2208638 - RNA, 19 nt, Artificial Sequence
  Description of Artificial Sequence: Synthetic oligonucleotide
  Sense strand starting at position 670 of SEQ ID NO: 1883674
gagucagugguggagucua

SEQ ID NO: 2208639 - RNA, 19 nt, Artificial Sequence
  Description of Artificial Sequence: Synthetic oligonucleotide
  Antisense strand to SEQ ID NO: 2208638
uagacuccaccacugacuc

SEQ ID NO: 2208640 - RNA, 19 nt, Artificial Sequence
  Description of Artificial Sequence: Synthetic oligonucleotide
  Sense strand starting at position 1114 of SEQ ID NO: 1883674
acuuuaaaccauggcagua

SEQ ID NO: 2208641 - RNA, 19 nt, Artificial Sequence
  Description of Artificial Sequence: Synthetic oligonucleotide
  Antisense strand to SEQ ID NO: 2208640
uacugccaugguuuaaagu

SEQ ID NO: 2208642 - RNA, 19 nt, Artificial Sequence
  Description of Artificial Sequence: Synthetic oligonucleotide
  Sense strand starting at position 904 of SEQ ID NO: 1883674
agggaacuuugguauuuau

SEQ ID NO: 2208643 - RNA, 19 nt, Artificial Sequence
  Description of Artificial Sequence: Synthetic oligonucleotide
  Antisense strand to SEQ ID NO: 2208642
auaaauaccaaaguucccu

SEQ ID NO: 2208644 - RNA, 19 nt, Artificial Sequence
  Description of Artificial Sequence: Synthetic oligonucleotide
  Sense strand starting at position 3407 of SEQ ID NO: 1883674
cggaucuuucgccagaaac

SEQ ID NO: 2208645 - RNA, 19 nt, Artificial Sequence
  Description of Artificial Sequence: Synthetic oligonucleotide
  Antisense strand to SEQ ID NO: 2208644
guuucuggcgaaagauccg

SEQ ID NO: 2208646 - RNA, 19 nt, Artificial Sequence
  Description of Artificial Sequence: Synthetic oligonucleotide
  Sense strand starting at position 105 of SEQ ID NO: 1883674
cccacauguuugguuaaac

SEQ ID NO: 2208647 - RNA, 19 nt, Artificial Sequence
  Description of Artificial Sequence: Synthetic oligonucleotide
  Antisense strand to SEQ ID NO: 2208646
guuuaaccaaacauguggg

SEQ ID NO: 2208648 - RNA, 19 nt, Artificial Sequence
  Description of Artificial Sequence: Synthetic oligonucleotide
  Sense strand starting at position 747 of SEQ ID NO: 1883674
gugauuggguccuuggacu

SEQ ID NO: 2208649 - RNA, 19 nt, Artificial Sequence
  Description of Artificial Sequence: Synthetic oligonucleotide
  Antisense strand to SEQ ID NO: 2208648
aguccaaggacccaaucac

SEQ ID NO: 2208650 - RNA, 19 nt, Artificial Sequence
  Description of Artificial Sequence: Synthetic oligonucleotide
  Sense strand starting at position 536 of SEQ ID NO: 1883674
ggaggcuugcagugaaaug

SEQ ID NO: 2208651 - RNA, 19 nt, Artificial Sequence
  Description of Artificial Sequence: Synthetic oligonucleotide
  Antisense strand to SEQ ID NO: 2208650
cauuucacugcaagccucc

SEQ ID NO: 2208652 - RNA, 19 nt, Artificial Sequence
  Description of Artificial Sequence: Synthetic oligonucleotide
  Sense strand starting at position 230 of SEQ ID NO: 1883674
cccagugaguugcuaagga

SEQ ID NO: 2208653 - RNA, 19 nt, Artificial Sequence
  Description of Artificial Sequence: Synthetic oligonucleotide
  Antisense strand to SEQ ID NO: 2208652
uccuuagcaacucacuggg

SEQ ID NO: 2208654 - RNA, 19 nt, Artificial Sequence
  Description of Artificial Sequence: Synthetic oligonucleotide
  Sense strand starting at position 1173 of SEQ ID NO: 1883674
guuaaagcauuacuacagu

SEQ ID NO: 2208655 - RNA, 19 nt, Artificial Sequence
  Description of Artificial Sequence: Synthetic oligonucleotide
  Antisense strand to SEQ ID NO: 2208654
acuguaguaaugcuuuaac

SEQ ID NO: 2208656 - RNA, 19 nt, Artificial Sequence
  Description of Artificial Sequence: Synthetic oligonucleotide
  Sense strand starting at position 820 of SEQ ID NO: 1883674
ucaguucuaugagcuauca

SEQ ID NO: 2208657 - RNA, 19 nt, Artificial Sequence
  Description of Artificial Sequence: Synthetic oligonucleotide
  Antisense strand to SEQ ID NO: 2208656
ugauagcucauagaacuga

SEQ ID NO: 2208658 - RNA, 19 nt, Artificial Sequence
  Description of Artificial Sequence: Synthetic oligonucleotide
  Sense strand starting at position 817 of SEQ ID NO: 1883674
cuaucaguucuaugagcua

SEQ ID NO: 2208659 - RNA, 19 nt, Artificial Sequence
  Description of Artificial Sequence: Synthetic oligonucleotide
  Antisense strand to SEQ ID NO: 2208658
uagcucauagaacugauag

SEQ ID NO: 2208660 - RNA, 19 nt, Artificial Sequence
  Description of Artificial Sequence: Synthetic oligonucleotide
  Sense strand starting at position 578 of SEQ ID NO: 1883674
accaauaguggcuguuaua

SEQ ID NO: 2208661 - RNA, 19 nt, Artificial Sequence
  Description of Artificial Sequence: Synthetic oligonucleotide
  Antisense strand to SEQ ID NO: 2208660
uauaacagccacuauuggu

SEQ ID NO: 2208662 - RNA, 19 nt, Artificial Sequence
  Description of Artificial Sequence: Synthetic oligonucleotide
  Sense strand starting at position 209 of SEQ ID NO: 1883674
ccauaaugucacugggcuu

SEQ ID NO: 2208663 - RNA, 19 nt, Artificial Sequence
  Description of Artificial Sequence: Synthetic oligonucleotide
  Antisense strand to SEQ ID NO: 2208662
aagcccagugacauuaugg

SEQ ID NO: 2208664 - RNA, 19 nt, Artificial Sequence
  Description of Artificial Sequence: Synthetic oligonucleotide
  Sense strand starting at position 700 of SEQ ID NO: 1883674
gucuuaugucaauagcagu

SEQ ID NO: 2208665 - RNA, 19 nt, Artificial Sequence
  Description of Artificial Sequence: Synthetic oligonucleotide
  Antisense strand to SEQ ID NO: 2208664
acugcuauugacauaagac

SEQ ID NO: 2208666 - RNA, 19 nt, Artificial Sequence
  Description of Artificial Sequence: Synthetic oligonucleotide
  Sense strand starting at position 1030 of SEQ ID NO: 1883674
ggcauaaaucguuauguuu

SEQ ID NO: 2208667 - RNA, 19 nt, Artificial Sequence
  Description of Artificial Sequence: Synthetic oligonucleotide
  Antisense strand to SEQ ID NO: 2208666
aaacauaacgauuuaugcc

SEQ ID NO: 2208668 - RNA, 19 nt, Artificial Sequence
  Description of Artificial Sequence: Synthetic oligonucleotide
  Sense strand starting at position 811 of SEQ ID NO: 1883674
aguuuccuaucaguucuau

SEQ ID NO: 2208669 - RNA, 19 nt, Artificial Sequence
  Description of Artificial Sequence: Synthetic oligonucleotide
  Antisense strand to SEQ ID NO: 2208668
auagaacugauaggaaacu

SEQ ID NO: 2208670 - RNA, 19 nt, Artificial Sequence
  Description of Artificial Sequence: Synthetic oligonucleotide
  Sense strand starting at position 1073 of SEQ ID NO: 1883674
agaaacagauacuaaugua

SEQ ID NO: 2208671 - RNA, 19 nt, Artificial Sequence
  Description of Artificial Sequence: Synthetic oligonucleotide
  Antisense strand to SEQ ID NO: 2208670
uacauuaguaucuguuucu

SEQ ID NO: 2208672 - RNA, 19 nt, Artificial Sequence
  Description of Artificial Sequence: Synthetic oligonucleotide
  Sense strand starting at position 133 of SEQ ID NO: 1883674
gauauugcugugcagguau

SEQ ID NO: 2208673 - RNA, 19 nt, Artificial Sequence
  Description of Artificial Sequence: Synthetic oligonucleotide
  Antisense strand to SEQ ID NO: 2208672
auaccugcacagcaauauc

SEQ ID NO: 2208674 - RNA, 19 nt, Artificial Sequence
  Description of Artificial Sequence: Synthetic oligonucleotide
  Sense strand starting at position 577 of SEQ ID NO: 1883674
caccaauaguggcuguuau

SEQ ID NO: 2208675 - RNA, 19 nt, Artificial Sequence
  Description of Artificial Sequence: Synthetic oligonucleotide
  Antisense strand to SEQ ID NO: 2208674
auaacagccacuauuggug

SEQ ID NO: 2208676 - RNA, 19 nt, Artificial Sequence
  Description of Artificial Sequence: Synthetic oligonucleotide
  Sense strand starting at position 839 of SEQ ID NO: 1883674
guugccuuccaaugaauuc

SEQ ID NO: 2208677 - RNA, 19 nt, Artificial Sequence
  Description of Artificial Sequence: Synthetic oligonucleotide
  Antisense strand to SEQ ID NO: 2208676
gaauucauuggaaggcaac

SEQ ID NO: 2208678 - RNA, 19 nt, Artificial Sequence
  Description of Artificial Sequence: Synthetic oligonucleotide
  Sense strand starting at position 590 of SEQ ID NO: 1883674
uguuauacuuugccuacca

SEQ ID NO: 2208679 - RNA, 19 nt, Artificial Sequence
  Description of Artificial Sequence: Synthetic oligonucleotide
  Antisense strand to SEQ ID NO: 2208678
ugguaggcaaaguauaaca

SEQ ID NO: 2208680 - RNA, 19 nt, Artificial Sequence
  Description of Artificial Sequence: Synthetic oligonucleotide
  Sense strand starting at position 291 of SEQ ID NO: 1883674
gcugaaaugucagcucuau

SEQ ID NO: 2208681 - RNA, 19 nt, Artificial Sequence
  Description of Artificial Sequence: Synthetic oligonucleotide
  Antisense strand to SEQ ID NO: 2208680
auagagcugacauuucagc

SEQ ID NO: 2208682 - RNA, 19 nt, Artificial Sequence
  Description of Artificial Sequence: Synthetic oligonucleotide
  Sense strand starting at position 223 of SEQ ID NO: 1883674
ggcuuuacccagugaguug

SEQ ID NO: 2208683 - RNA, 19 nt, Artificial Sequence
  Description of Artificial Sequence: Synthetic oligonucleotide
  Antisense strand to SEQ ID NO: 2208682
caacucacuggguaaagcc

SEQ ID NO: 2208684 - RNA, 19 nt, Artificial Sequence
  Description of Artificial Sequence: Synthetic oligonucleotide
  Sense strand starting at position 1029 of SEQ ID NO: 1883674
aggcauaaaucguuauguu

SEQ ID NO: 2208685 - RNA, 19 nt, Artificial Sequence
  Description of Artificial Sequence: Synthetic oligonucleotide
  Antisense strand to SEQ ID NO: 2208684
aacauaacgauuuaugccu

SEQ ID NO: 2208686 - RNA, 19 nt, Artificial Sequence
  Description of Artificial Sequence: Synthetic oligonucleotide
  Sense strand starting at position 103 of SEQ ID NO: 1883674
ugcccacauguuugguuaa

SEQ ID NO: 2208687 - RNA, 19 nt, Artificial Sequence
  Description of Artificial Sequence: Synthetic oligonucleotide
  Antisense strand to SEQ ID NO: 2208686
uuaaccaaacaugugggca

SEQ ID NO: 2208688 - RNA, 19 nt, Artificial Sequence
  Description of Artificial Sequence: Synthetic oligonucleotide
  Sense strand starting at position 132 of SEQ ID NO: 1883674
agauauugcugugcaggua

SEQ ID NO: 2208689 - RNA, 19 nt, Artificial Sequence
  Description of Artificial Sequence: Synthetic oligonucleotide
  Antisense strand to SEQ ID NO: 2208688
uaccugcacagcaauaucu

SEQ ID NO: 2208690 - RNA, 19 nt, Artificial Sequence
  Description of Artificial Sequence: Synthetic oligonucleotide
  Sense strand starting at position 681 of SEQ ID NO: 1883674
ggagucuauuuaugcagga

SEQ ID NO: 2208691 - RNA, 19 nt, Artificial Sequence
  Description of Artificial Sequence: Synthetic oligonucleotide
  Antisense strand to SEQ ID NO: 2208690
uccugcauaaauagacucc

SEQ ID NO: 2208692 - RNA, 19 nt, Artificial Sequence
  Description of Artificial Sequence: Synthetic oligonucleotide
  Sense strand starting at position 2566 of SEQ ID NO: 1883675
uggcuauuaggacaccuau

SEQ ID NO: 2208693 - RNA, 19 nt, Artificial Sequence
  Description of Artificial Sequence: Synthetic oligonucleotide
  Antisense strand to SEQ ID NO: 2208692
auagguguccuaauagcca

SEQ ID NO: 2208694 - RNA, 19 nt, Artificial Sequence
  Description of Artificial Sequence: Synthetic oligonucleotide
  Sense strand starting at position 436 of SEQ ID NO: 1883675
aacaauaucccugggaggu

SEQ ID NO: 2208695 - RNA, 19 nt, Artificial Sequence
  Description of Artificial Sequence: Synthetic oligonucleotide
  Antisense strand to SEQ ID NO: 2208694
accucccagggauauuguu

SEQ ID NO: 2208696 - RNA, 19 nt, Artificial Sequence
  Description of Artificial Sequence: Synthetic oligonucleotide
  Sense strand starting at position 1950 of SEQ ID NO: 1883675
agagaauuccuaggagcug

SEQ ID NO: 2208697 - RNA, 19 nt, Artificial Sequence
  Description of Artificial Sequence: Synthetic oligonucleotide
  Antisense strand to SEQ ID NO: 2208696
cagcuccuaggaauucucu

SEQ ID NO: 2208698 - RNA, 19 nt, Artificial Sequence
  Description of Artificial Sequence: Synthetic oligonucleotide
  Sense strand starting at position 2018 of SEQ ID NO: 1883675
uuuguaugaggucacaaug

SEQ ID NO: 2208699 - RNA, 19 nt, Artificial Sequence
  Description of Artificial Sequence: Synthetic oligonucleotide
  Antisense strand to SEQ ID NO: 2208698
cauugugaccucauacaaa

SEQ ID NO: 2208700 - RNA, 19 nt, Artificial Sequence
  Description of Artificial Sequence: Synthetic oligonucleotide
  Sense strand starting at position 437 of SEQ ID NO: 1883675
acaauaucccugggagguu

SEQ ID NO: 2208701 - RNA, 19 nt, Artificial Sequence
  Description of Artificial Sequence: Synthetic oligonucleotide
  Antisense strand to SEQ ID NO: 2208700
aaccucccagggauauugu

SEQ ID NO: 2208702 - RNA, 19 nt, Artificial Sequence
  Description of Artificial Sequence: Synthetic oligonucleotide
  Sense strand starting at position 3779 of SEQ ID NO: 1883675
uguacacuuucugcgauuu

SEQ ID NO: 2208703 - RNA, 19 nt, Artificial Sequence
  Description of Artificial Sequence: Synthetic oligonucleotide
  Antisense strand to SEQ ID NO: 2208702
aaaucgcagaaaguguaca

SEQ ID NO: 2208704 - RNA, 19 nt, Artificial Sequence
  Description of Artificial Sequence: Synthetic oligonucleotide
  Sense strand starting at position 1857 of SEQ ID NO: 1883675
uuuacuauucgacaggugu

SEQ ID NO: 2208705 - RNA, 19 nt, Artificial Sequence
  Description of Artificial Sequence: Synthetic oligonucleotide
  Antisense strand to SEQ ID NO: 2208704
acaccugucgaauaguaaa

SEQ ID NO: 2208706 - RNA, 19 nt, Artificial Sequence
  Description of Artificial Sequence: Synthetic oligonucleotide
  Sense strand starting at position 635 of SEQ ID NO: 1883675
gucauaucugucuauuacg

SEQ ID NO: 2208707 - RNA, 19 nt, Artificial Sequence
  Description of Artificial Sequence: Synthetic oligonucleotide
  Antisense strand to SEQ ID NO: 2208706
cguaauagacagauaugac

SEQ ID NO: 2208708 - RNA, 19 nt, Artificial Sequence
  Description of Artificial Sequence: Synthetic oligonucleotide
  Sense strand starting at position 634 of SEQ ID NO: 1883675
agucauaucugucuauuac

SEQ ID NO: 2208709 - RNA, 19 nt, Artificial Sequence
  Description of Artificial Sequence: Synthetic oligonucleotide
  Antisense strand to SEQ ID NO: 2208708
guaauagacagauaugacu

SEQ ID NO: 2208710 - RNA, 19 nt, Artificial Sequence
  Description of Artificial Sequence: Synthetic oligonucleotide
  Sense strand starting at position 3474 of SEQ ID NO: 1883675
cgauauucggagugauauc

SEQ ID NO: 2208711 - RNA, 19 nt, Artificial Sequence
  Description of Artificial Sequence: Synthetic oligonucleotide
  Antisense strand to SEQ ID NO: 2208710
gauaucacuccgaauaucg

SEQ ID NO: 2208712 - RNA, 19 nt, Artificial Sequence
  Description of Artificial Sequence: Synthetic oligonucleotide
  Sense strand starting at position 565 of SEQ ID NO: 1883675
accucucggucucugaaua

SEQ ID NO: 2208713 - RNA, 19 nt, Artificial Sequence
  Description of Artificial Sequence: Synthetic oligonucleotide
  Antisense strand to SEQ ID NO: 2208712
uauucagagaccgagaggu

SEQ ID NO: 2208714 - RNA, 19 nt, Artificial Sequence
  Description of Artificial Sequence: Synthetic oligonucleotide
  Sense strand starting at position 2298 of SEQ ID NO: 1883675
gcaauucccuugcuagaac

SEQ ID NO: 2208715 - RNA, 19 nt, Artificial Sequence
  Description of Artificial Sequence: Synthetic oligonucleotide
  Antisense strand to SEQ ID NO: 2208714
guucuagcaagggaauugc

SEQ ID NO: 2208716 - RNA, 19 nt, Artificial Sequence
  Description of Artificial Sequence: Synthetic oligonucleotide
  Sense strand starting at position 270 of SEQ ID NO: 1883675
acuguuguaucuuuacacu

SEQ ID NO: 2208717 - RNA, 19 nt, Artificial Sequence
  Description of Artificial Sequence: Synthetic oligonucleotide
  Antisense strand to SEQ ID NO: 2208716
aguguaaagauacaacagu

SEQ ID NO: 2208718 - RNA, 19 nt, Artificial Sequence
  Description of Artificial Sequence: Synthetic oligonucleotide
  Sense strand starting at position 1855 of SEQ ID NO: 1883675
gauuuacuauucgacaggu

SEQ ID NO: 2208719 - RNA, 19 nt, Artificial Sequence
  Description of Artificial Sequence: Synthetic oligonucleotide
  Antisense strand to SEQ ID NO: 2208718
accugucgaauaguaaauc

SEQ ID NO: 2208720 - RNA, 19 nt, Artificial Sequence
  Description of Artificial Sequence: Synthetic oligonucleotide
  Sense strand starting at position 533 of SEQ ID NO: 1883675
guauacuuccuccgauauu

SEQ ID NO: 2208721 - RNA, 19 nt, Artificial Sequence
  Description of Artificial Sequence: Synthetic oligonucleotide
  Antisense strand to SEQ ID NO: 2208720
aauaucggaggaaguauac

SEQ ID NO: 2208722 - RNA, 19 nt, Artificial Sequence
  Description of Artificial Sequence: Synthetic oligonucleotide
  Sense strand starting at position 566 of SEQ ID NO: 1883675
ccucucggucucugaauau

SEQ ID NO: 2208723 - RNA, 19 nt, Artificial Sequence
  Description of Artificial Sequence: Synthetic oligonucleotide
  Antisense strand to SEQ ID NO: 2208722
auauucagagaccgagagg

SEQ ID NO: 2208724 - RNA, 19 nt, Artificial Sequence
  Description of Artificial Sequence: Synthetic oligonucleotide
  Sense strand starting at position 718 of SEQ ID NO: 1883675
gccugcgaugcugaaauua

SEQ ID NO: 2208725 - RNA, 19 nt, Artificial Sequence
  Description of Artificial Sequence: Synthetic oligonucleotide
  Antisense strand to SEQ ID NO: 2208724
uaauuucagcaucgcaggc

SEQ ID NO: 2208726 - RNA, 19 nt, Artificial Sequence
  Description of Artificial Sequence: Synthetic oligonucleotide
  Sense strand starting at position 531 of SEQ ID NO: 1883675
guguauacuuccuccgaua

SEQ ID NO: 2208727 - RNA, 19 nt, Artificial Sequence
  Description of Artificial Sequence: Synthetic oligonucleotide
  Antisense strand to SEQ ID NO: 2208726
uaucggaggaaguauacac

SEQ ID NO: 2208728 - RNA, 19 nt, Artificial Sequence
  Description of Artificial Sequence: Synthetic oligonucleotide
  Sense strand starting at position 530 of SEQ ID NO: 1883675
gguguauacuuccuccgau

SEQ ID NO: 2208729 - RNA, 19 nt, Artificial Sequence
  Description of Artificial Sequence: Synthetic oligonucleotide
  Antisense strand to SEQ ID NO: 2208728
aucggaggaaguauacacc

SEQ ID NO: 2208730 - RNA, 19 nt, Artificial Sequence
  Description of Artificial Sequence: Synthetic oligonucleotide
  Sense strand starting at position 498 of SEQ ID NO: 1883675
guggaauauuauuaaggac

SEQ ID NO: 2208731 - RNA, 19 nt, Artificial Sequence
  Description of Artificial Sequence: Synthetic oligonucleotide
  Antisense strand to SEQ ID NO: 2208730
guccuuaauaauauuccac

SEQ ID NO: 2208732 - RNA, 19 nt, Artificial Sequence
  Description of Artificial Sequence: Synthetic oligonucleotide
  Sense strand starting at position 3641 of SEQ ID NO: 1883675
ggugugauugggcgucaca

SEQ ID NO: 2208733 - RNA, 19 nt, Artificial Sequence
  Description of Artificial Sequence: Synthetic oligonucleotide
  Antisense strand to SEQ ID NO: 2208732
ugugacgcccaaucacacc

SEQ ID NO: 2208734 - RNA, 19 nt, Artificial Sequence
  Description of Artificial Sequence: Synthetic oligonucleotide
  Sense strand starting at position 3616 of SEQ ID NO: 1883675
guaucacagcuguguuucu

SEQ ID NO: 2208735 - RNA, 19 nt, Artificial Sequence
  Description of Artificial Sequence: Synthetic oligonucleotide
  Antisense strand to SEQ ID NO: 2208734
agaaacacagcugugauac

SEQ ID NO: 2208736 - RNA, 19 nt, Artificial Sequence
  Description of Artificial Sequence: Synthetic oligonucleotide
  Sense strand starting at position 438 of SEQ ID NO: 1883675
caauaucccugggagguuu

SEQ ID NO: 2208737 - RNA, 19 nt, Artificial Sequence
  Description of Artificial Sequence: Synthetic oligonucleotide
  Antisense strand to SEQ ID NO: 2208736
aaaccucccagggauauug

SEQ ID NO: 2208738 - RNA, 19 nt, Artificial Sequence
  Description of Artificial Sequence: Synthetic oligonucleotide
  Sense strand starting at position 3234 of SEQ ID NO: 1883675
ggaggcaucccucgcgagu

SEQ ID NO: 2208739 - RNA, 19 nt, Artificial Sequence
  Description of Artificial Sequence: Synthetic oligonucleotide
  Antisense strand to SEQ ID NO: 2208738
acucgcgagggaugccucc

SEQ ID NO: 2208740 - RNA, 19 nt, Artificial Sequence
  Description of Artificial Sequence: Synthetic oligonucleotide
  Sense strand starting at position 1951 of SEQ ID NO: 1883675
gagaauuccuaggagcugu

SEQ ID NO: 2208741 - RNA, 19 nt, Artificial Sequence
  Description of Artificial Sequence: Synthetic oligonucleotide
  Antisense strand to SEQ ID NO: 2208740
acagcuccuaggaauucuc

SEQ ID NO: 2208742 - RNA, 19 nt, Artificial Sequence
  Description of Artificial Sequence: Synthetic oligonucleotide
  Sense strand starting at position 1762 of SEQ ID NO: 1883675
cuaagauccuuaggaccga

SEQ ID NO: 2208743 - RNA, 19 nt, Artificial Sequence
  Description of Artificial Sequence: Synthetic oligonucleotide
  Antisense strand to SEQ ID NO: 2208742
ucgguccuaaggaucuuag

SEQ ID NO: 2208744 - RNA, 19 nt, Artificial Sequence
  Description of Artificial Sequence: Synthetic oligonucleotide
  Sense strand starting at position 918 of SEQ ID NO: 1883675
ccuucuggcucuuagaaca

SEQ ID NO: 2208745 - RNA, 19 nt, Artificial Sequence
  Description of Artificial Sequence: Synthetic oligonucleotide
  Antisense strand to SEQ ID NO: 2208744
uguucuaagagccagaagg

SEQ ID NO: 2208746 - RNA, 19 nt, Artificial Sequence
  Description of Artificial Sequence: Synthetic oligonucleotide
  Sense strand starting at position 3471 of SEQ ID NO: 1883675
uuacgauauucggagugau

SEQ ID NO: 2208747 - RNA, 19 nt, Artificial Sequence
  Description of Artificial Sequence: Synthetic oligonucleotide
  Antisense strand to SEQ ID NO: 2208746
aucacuccgaauaucguaa

SEQ ID NO: 2208748 - RNA, 19 nt, Artificial Sequence
  Description of Artificial Sequence: Synthetic oligonucleotide
  Sense strand starting at position 2159 of SEQ ID NO: 1883675
uuguaugcgucagagagaa

SEQ ID NO: 2208749 - RNA, 19 nt, Artificial Sequence
  Description of Artificial Sequence: Synthetic oligonucleotide
  Antisense strand to SEQ ID NO: 2208748
uucucucugacgcauacaa

SEQ ID NO: 2208750 - RNA, 19 nt, Artificial Sequence
  Description of Artificial Sequence: Synthetic oligonucleotide
  Sense strand starting at position 109 of SEQ ID NO: 1883675
ucacaugucuucugcagac

SEQ ID NO: 2208751 - RNA, 19 nt, Artificial Sequence
  Description of Artificial Sequence: Synthetic oligonucleotide
  Antisense strand to SEQ ID NO: 2208750
gucugcagaagacauguga

SEQ ID NO: 2208752 - RNA, 19 nt, Artificial Sequence
  Description of Artificial Sequence: Synthetic oligonucleotide
  Sense strand starting at position 3778 of SEQ ID NO: 1883675
guguacacuuucugcgauu

SEQ ID NO: 2208753 - RNA, 19 nt, Artificial Sequence
  Description of Artificial Sequence: Synthetic oligonucleotide
  Antisense strand to SEQ ID NO: 2208752
aaucgcagaaaguguacac

SEQ ID NO: 2208754 - RNA, 19 nt, Artificial Sequence
  Description of Artificial Sequence: Synthetic oligonucleotide
  Sense strand starting at position 2649 of SEQ ID NO: 1883676
gcugcaaugggugaagaaa

SEQ ID NO: 2208755 - RNA, 19 nt, Artificial Sequence
  Description of Artificial Sequence: Synthetic oligonucleotide
  Antisense strand to SEQ ID NO: 2208754
uuucuucacccauugcagc

SEQ ID NO: 2208756 - RNA, 19 nt, Artificial Sequence
  Description of Artificial Sequence: Synthetic oligonucleotide
  Sense strand starting at position 3813 of SEQ ID NO: 1883676
uaguauuugugacuggcuu

SEQ ID NO: 2208757 - RNA, 19 nt, Artificial Sequence
  Description of Artificial Sequence: Synthetic oligonucleotide
  Antisense strand to SEQ ID NO: 2208756
aagccagucacaaauacua

SEQ ID NO: 2208758 - RNA, 19 nt, Artificial Sequence
  Description of Artificial Sequence: Synthetic oligonucleotide
  Sense strand starting at position 46 of SEQ ID NO: 1883676
gguggcugacccuaacaau

SEQ ID NO: 2208759 - RNA, 19 nt, Artificial Sequence
  Description of Artificial Sequence: Synthetic oligonucleotide
  Antisense strand to SEQ ID NO: 2208758
auuguuagggucagccacc

SEQ ID NO: 2208760 - RNA, 19 nt, Artificial Sequence
  Description of Artificial Sequence: Synthetic oligonucleotide
  Sense strand starting at position 1991 of SEQ ID NO: 1883676
gcaccagaacaguggagau

SEQ ID NO: 2208761 - RNA, 19 nt, Artificial Sequence
  Description of Artificial Sequence: Synthetic oligonucleotide
  Antisense strand to SEQ ID NO: 2208760
aucuccacuguucuggugc

SEQ ID NO: 2208762 - RNA, 19 nt, Artificial Sequence
  Description of Artificial Sequence: Synthetic oligonucleotide
  Sense strand starting at position 3011 of SEQ ID NO: 1883676
uguccauuguguuuauuua

SEQ ID NO: 2208763 - RNA, 19 nt, Artificial Sequence
  Description of Artificial Sequence: Synthetic oligonucleotide
  Antisense strand to SEQ ID NO: 2208762
uaaauaaacacaauggaca

SEQ ID NO: 2208764 - RNA, 19 nt, Artificial Sequence
  Description of Artificial Sequence: Synthetic oligonucleotide
  Sense strand starting at position 2516 of SEQ ID NO: 1883676
gcaacacuucuauggauau

SEQ ID NO: 2208765 - RNA, 19 nt, Artificial Sequence
  Description of Artificial Sequence: Synthetic oligonucleotide
  Antisense strand to SEQ ID NO: 2208764
auauccauagaaguguugc

SEQ ID NO: 2208766 - RNA, 19 nt, Artificial Sequence
  Description of Artificial Sequence: Synthetic oligonucleotide
  Sense strand starting at position 3560 of SEQ ID NO: 1883676
uuuaaauugcgguaaacua

SEQ ID NO: 2208767 - RNA, 19 nt, Artificial Sequence
  Description of Artificial Sequence: Synthetic oligonucleotide
  Antisense strand to SEQ ID NO: 2208766
uaguuuaccgcaauuuaaa

SEQ ID NO: 2208768 - RNA, 19 nt, Artificial Sequence
  Description of Artificial Sequence: Synthetic oligonucleotide
  Sense strand starting at position 2153 of SEQ ID NO: 1883676
ugcugacugguugagaagu

SEQ ID NO: 2208769 - RNA, 19 nt, Artificial Sequence
  Description of Artificial Sequence: Synthetic oligonucleotide
  Antisense strand to SEQ ID NO: 2208768
acuucucaaccagucagca

SEQ ID NO: 2208770 - RNA, 19 nt, Artificial Sequence
  Description of Artificial Sequence: Synthetic oligonucleotide
  Sense strand starting at position 2151 of SEQ ID NO: 1883676
auugcugacugguugagaa

SEQ ID NO: 2208771 - RNA, 19 nt, Artificial Sequence
  Description of Artificial Sequence: Synthetic oligonucleotide
  Antisense strand to SEQ ID NO: 2208770
uucucaaccagucagcaau

SEQ ID NO: 2208772 - RNA, 19 nt, Artificial Sequence
  Description of Artificial Sequence: Synthetic oligonucleotide
  Sense strand starting at position 2648 of SEQ ID NO: 1883676
ggcugcaaugggugaagaa

SEQ ID NO: 2208773 - RNA, 19 nt, Artificial Sequence
  Description of Artificial Sequence: Synthetic oligonucleotide
  Antisense strand to SEQ ID NO: 2208772
uucuucacccauugcagcc

SEQ ID NO: 2208774 - RNA, 19 nt, Artificial Sequence
  Description of Artificial Sequence: Synthetic oligonucleotide
  Sense strand starting at position 3567 of SEQ ID NO: 1883676
ugcgguaaacuacauguaa

SEQ ID NO: 2208775 - RNA, 19 nt, Artificial Sequence
  Description of Artificial Sequence: Synthetic oligonucleotide
  Antisense strand to SEQ ID NO: 2208774
uuacauguaguuuaccgca

SEQ ID NO: 2208776 - RNA, 19 nt, Artificial Sequence
  Description of Artificial Sequence: Synthetic oligonucleotide
  Sense strand starting at position 2991 of SEQ ID NO: 1883676
gcauaaagcuuaucagacu

SEQ ID NO: 2208777 - RNA, 19 nt, Artificial Sequence
  Description of Artificial Sequence: Synthetic oligonucleotide
  Antisense strand to SEQ ID NO: 2208776
agucugauaagcuuuaugc

SEQ ID NO: 2208778 - RNA, 19 nt, Artificial Sequence
  Description of Artificial Sequence: Synthetic oligonucleotide
  Sense strand starting at position 2148 of SEQ ID NO: 1883676
gggauugcugacugguuga

SEQ ID NO: 2208779 - RNA, 19 nt, Artificial Sequence
  Description of Artificial Sequence: Synthetic oligonucleotide
  Antisense strand to SEQ ID NO: 2208778
ucaaccagucagcaauccc

SEQ ID NO: 2208780 - RNA, 19 nt, Artificial Sequence
  Description of Artificial Sequence: Synthetic oligonucleotide
  Sense strand starting at position 2465 of SEQ ID NO: 1883676
ucauuaacccugugagggu

SEQ ID NO: 2208781 - RNA, 19 nt, Artificial Sequence
  Description of Artificial Sequence: Synthetic oligonucleotide
  Antisense strand to SEQ ID NO: 2208780
acccucacaggguuaauga

SEQ ID NO: 2208782 - RNA, 19 nt, Artificial Sequence
  Description of Artificial Sequence: Synthetic oligonucleotide
  Sense strand starting at position 3405 of SEQ ID NO: 1883676
gugaaacucugucuuacac

SEQ ID NO: 2208783 - RNA, 19 nt, Artificial Sequence
  Description of Artificial Sequence: Synthetic oligonucleotide
  Antisense strand to SEQ ID NO: 2208782
guguaagacagaguuucac

SEQ ID NO: 2208784 - RNA, 19 nt, Artificial Sequence
  Description of Artificial Sequence: Synthetic oligonucleotide
  Sense strand starting at position 2419 of SEQ ID NO: 1883676
guugaugccugacuacaau

SEQ ID NO: 2208785 - RNA, 19 nt, Artificial Sequence
  Description of Artificial Sequence: Synthetic oligonucleotide
  Antisense strand to SEQ ID NO: 2208784
auuguagucaggcaucaac

SEQ ID NO: 2208786 - RNA, 19 nt, Artificial Sequence
  Description of Artificial Sequence: Synthetic oligonucleotide
  Sense strand starting at position 3896 of SEQ ID NO: 1883676
ugaauaauauucucucguu

SEQ ID NO: 2208787 - RNA, 19 nt, Artificial Sequence
  Description of Artificial Sequence: Synthetic oligonucleotide
  Antisense strand to SEQ ID NO: 2208786
aacgagagaauauuauuca

SEQ ID NO: 2208788 - RNA, 19 nt, Artificial Sequence
  Description of Artificial Sequence: Synthetic oligonucleotide
  Sense strand starting at position 3480 of SEQ ID NO: 1883676
ggagaagacuuagacauau

SEQ ID NO: 2208789 - RNA, 19 nt, Artificial Sequence
  Description of Artificial Sequence: Synthetic oligonucleotide
  Antisense strand to SEQ ID NO: 2208788
auaugucuaagucuucucc

SEQ ID NO: 2208790 - RNA, 19 nt, Artificial Sequence
  Description of Artificial Sequence: Synthetic oligonucleotide
  Sense strand starting at position 3770 of SEQ ID NO: 1883676
cuauaagcuugacuauguu

SEQ ID NO: 2208791 - RNA, 19 nt, Artificial Sequence
  Description of Artificial Sequence: Synthetic oligonucleotide
  Antisense strand to SEQ ID NO: 2208790
aacauagucaagcuuauag

SEQ ID NO: 2208792 - RNA, 19 nt, Artificial Sequence
  Description of Artificial Sequence: Synthetic oligonucleotide
  Sense strand starting at position 3000 of SEQ ID NO: 1883676
uuaucagacuguguccauu

SEQ ID NO: 2208793 - RNA, 19 nt, Artificial Sequence
  Description of Artificial Sequence: Synthetic oligonucleotide
  Antisense strand to SEQ ID NO: 2208792
aauggacacagucugauaa

SEQ ID NO: 2208794 - RNA, 19 nt, Artificial Sequence
  Description of Artificial Sequence: Synthetic oligonucleotide
  Sense strand starting at position 3909 of SEQ ID NO: 1883676
cucguuuguguauacaaca

SEQ ID NO: 2208795 - RNA, 19 nt, Artificial Sequence
  Description of Artificial Sequence: Synthetic oligonucleotide
  Antisense strand to SEQ ID NO: 2208794
uguuguauacacaaacgag

SEQ ID NO: 2208796 - RNA, 19 nt, Artificial Sequence
  Description of Artificial Sequence: Synthetic oligonucleotide
  Sense strand starting at position 3046 of SEQ ID NO: 1883676
acuaguaguucuguuuaua

SEQ ID NO: 2208797 - RNA, 19 nt, Artificial Sequence
  Description of Artificial Sequence: Synthetic oligonucleotide
  Antisense strand to SEQ ID NO: 2208796
uauaaacagaacuacuagu

SEQ ID NO: 2208798 - RNA, 19 nt, Artificial Sequence
  Description of Artificial Sequence: Synthetic oligonucleotide
  Sense strand starting at position 3058 of SEQ ID NO: 1883676
guuuauagcuauccaucuu

SEQ ID NO: 2208799 - RNA, 19 nt, Artificial Sequence
  Description of Artificial Sequence: Synthetic oligonucleotide
  Antisense strand to SEQ ID NO: 2208798
aagauggauagcuauaaac

SEQ ID NO: 2208800 - RNA, 19 nt, Artificial Sequence
  Description of Artificial Sequence: Synthetic oligonucleotide
  Sense strand starting at position 3049 of SEQ ID NO: 1883676
aguaguucuguuuauagcu

SEQ ID NO: 2208801 - RNA, 19 nt, Artificial Sequence
  Description of Artificial Sequence: Synthetic oligonucleotide
  Antisense strand to SEQ ID NO: 2208800
agcuauaaacagaacuacu

SEQ ID NO: 2208802 - RNA, 19 nt, Artificial Sequence
  Description of Artificial Sequence: Synthetic oligonucleotide
  Sense strand starting at position 2193 of SEQ ID NO: 1883676
aggagaugcugagucguuu

SEQ ID NO: 2208803 - RNA, 19 nt, Artificial Sequence
  Description of Artificial Sequence: Synthetic oligonucleotide
  Antisense strand to SEQ ID NO: 2208802
aaacgacucagcaucuccu

SEQ ID NO: 2208804 - RNA, 19 nt, Artificial Sequence
  Description of Artificial Sequence: Synthetic oligonucleotide
  Sense strand starting at position 2415 of SEQ ID NO: 1883676
gcugguugaugccugacua

SEQ ID NO: 2208805 - RNA, 19 nt, Artificial Sequence
  Description of Artificial Sequence: Synthetic oligonucleotide
  Antisense strand to SEQ ID NO: 2208804
uagucaggcaucaaccagc

SEQ ID NO: 2208806 - RNA, 19 nt, Artificial Sequence
  Description of Artificial Sequence: Synthetic oligonucleotide
  Sense strand starting at position 2625 of SEQ ID NO: 1883676
cccagagcuucucuugcau

SEQ ID NO: 2208807 - RNA, 19 nt, Artificial Sequence
  Description of Artificial Sequence: Synthetic oligonucleotide
  Antisense strand to SEQ ID NO: 2208806
augcaagagaagcucuggg

SEQ ID NO: 2208808 - RNA, 19 nt, Artificial Sequence
  Description of Artificial Sequence: Synthetic oligonucleotide
  Sense strand starting at position 2871 of SEQ ID NO: 1883676
gcagcaauacccugucuca

SEQ ID NO: 2208809 - RNA, 19 nt, Artificial Sequence
  Description of Artificial Sequence: Synthetic oligonucleotide
  Antisense strand to SEQ ID NO: 2208808
ugagacaggguauugcugc

SEQ ID NO: 2208810 - RNA, 19 nt, Artificial Sequence
  Description of Artificial Sequence: Synthetic oligonucleotide
  Sense strand starting at position 2914 of SEQ ID NO: 1883676
gugcuuacucaaugguagu

SEQ ID NO: 2208811 - RNA, 19 nt, Artificial Sequence
  Description of Artificial Sequence: Synthetic oligonucleotide
  Antisense strand to SEQ ID NO: 2208810
acuaccauugaguaagcac

SEQ ID NO: 2208812 - RNA, 19 nt, Artificial Sequence
  Description of Artificial Sequence: Synthetic oligonucleotide
  Sense strand starting at position 2387 of SEQ ID NO: 1883676
ggaaaugagucagagcaca

SEQ ID NO: 2208813 - RNA, 19 nt, Artificial Sequence
  Description of Artificial Sequence: Synthetic oligonucleotide
  Antisense strand to SEQ ID NO: 2208812
ugugcucugacucauuucc

SEQ ID NO: 2208814 - RNA, 19 nt, Artificial Sequence
  Description of Artificial Sequence: Synthetic oligonucleotide
  Sense strand starting at position 2660 of SEQ ID NO: 1883676
ugaagaaaguuauaucuuc

SEQ ID NO: 2208815 - RNA, 19 nt, Artificial Sequence
  Description of Artificial Sequence: Synthetic oligonucleotide
  Antisense strand to SEQ ID NO: 2208814
gaagauauaacuuucuuca

SEQ ID NO: 2208816 - RNA, 19 nt, Artificial Sequence
  Description of Artificial Sequence: Synthetic oligonucleotide
  Sense strand starting at position 3006 of SEQ ID NO: 1883676
gacuguguccauuguguuu

SEQ ID NO: 2208817 - RNA, 19 nt, Artificial Sequence
  Description of Artificial Sequence: Synthetic oligonucleotide
  Antisense strand to SEQ ID NO: 2208816
aaacacaauggacacaguc

SEQ ID NO: 2208818 - RNA, 19 nt, Artificial Sequence
  Description of Artificial Sequence: Synthetic oligonucleotide
  Sense strand starting at position 3691 of SEQ ID NO: 1883676
aaacucgauuuccguuaaa

SEQ ID NO: 2208819 - RNA, 19 nt, Artificial Sequence
  Description of Artificial Sequence: Synthetic oligonucleotide
  Antisense strand to SEQ ID NO: 2208818
uuuaacggaaaucgaguuu

SEQ ID NO: 2208820 - RNA, 19 nt, Artificial Sequence
  Description of Artificial Sequence: Synthetic oligonucleotide
  Sense strand starting at position 3904 of SEQ ID NO: 1883676
auucucucguuuguguaua

SEQ ID NO: 2208821 - RNA, 19 nt, Artificial Sequence
  Description of Artificial Sequence: Synthetic oligonucleotide
  Antisense strand to SEQ ID NO: 2208820
uauacacaaacgagagaau

SEQ ID NO: 2208822 - RNA, 19 nt, Artificial Sequence
  Description of Artificial Sequence: Synthetic oligonucleotide
  Sense strand starting at position 3901 of SEQ ID NO: 1883676
aauauucucucguuugugu

SEQ ID NO: 2208823 - RNA, 19 nt, Artificial Sequence
  Description of Artificial Sequence: Synthetic oligonucleotide
  Antisense strand to SEQ ID NO: 2208822
acacaaacgagagaauauu

SEQ ID NO: 2208824 - RNA, 19 nt, Artificial Sequence
  Description of Artificial Sequence: Synthetic oligonucleotide
  Sense strand starting at position 2314 of SEQ ID NO: 1883676
uucuaucuaugggagcaau

SEQ ID NO: 2208825 - RNA, 19 nt, Artificial Sequence
  Description of Artificial Sequence: Synthetic oligonucleotide
  Antisense strand to SEQ ID NO: 2208824
auugcucccauagauagaa

SEQ ID NO: 2208826 - RNA, 19 nt, Artificial Sequence
  Description of Artificial Sequence: Synthetic oligonucleotide
  Sense strand starting at position 3903 of SEQ ID NO: 1883676
uauucucucguuuguguau

SEQ ID NO: 2208827 - RNA, 19 nt, Artificial Sequence
  Description of Artificial Sequence: Synthetic oligonucleotide
  Antisense strand to SEQ ID NO: 2208826
auacacaaacgagagaaua

SEQ ID NO: 2208828 - RNA, 19 nt, Artificial Sequence
  Description of Artificial Sequence: Synthetic oligonucleotide
  Sense strand starting at position 2305 of SEQ ID NO: 1883676
agugucagauucuaucuau

SEQ ID NO: 2208829 - RNA, 19 nt, Artificial Sequence
  Description of Artificial Sequence: Synthetic oligonucleotide
  Antisense strand to SEQ ID NO: 2208828
auagauagaaucugacacu

SEQ ID NO: 2208830 - RNA, 19 nt, Artificial Sequence
  Description of Artificial Sequence: Synthetic oligonucleotide
  Sense strand starting at position 2312 of SEQ ID NO: 1883676
gauucuaucuaugggagca

SEQ ID NO: 2208831 - RNA, 19 nt, Artificial Sequence
  Description of Artificial Sequence: Synthetic oligonucleotide
  Antisense strand to SEQ ID NO: 2208830
ugcucccauagauagaauc

SEQ ID NO: 2208832 - RNA, 19 nt, Artificial Sequence
  Description of Artificial Sequence: Synthetic oligonucleotide
  Sense strand starting at position 2300 of SEQ ID NO: 1883676
uguccagugucagauucua

SEQ ID NO: 2208833 - RNA, 19 nt, Artificial Sequence
  Description of Artificial Sequence: Synthetic oligonucleotide
  Antisense strand to SEQ ID NO: 2208832
uagaaucugacacuggaca

SEQ ID NO: 2208834 - RNA, 19 nt, Artificial Sequence
  Description of Artificial Sequence: Synthetic oligonucleotide
  Sense strand starting at position 3125 of SEQ ID NO: 1883677
agaugagagaauugcuuua

SEQ ID NO: 2208835 - RNA, 19 nt, Artificial Sequence
  Description of Artificial Sequence: Synthetic oligonucleotide
  Antisense strand to SEQ ID NO: 2208834
uaaagcaauucucucaucu

SEQ ID NO: 2208836 - RNA, 19 nt, Artificial Sequence
  Description of Artificial Sequence: Synthetic oligonucleotide
  Sense strand starting at position 2628 of SEQ ID NO: 1883677
cgagaaagcaauggauuga

SEQ ID NO: 2208837 - RNA, 19 nt, Artificial Sequence
  Description of Artificial Sequence: Synthetic oligonucleotide
  Antisense strand to SEQ ID NO: 2208836
ucaauccauugcuuucucg

SEQ ID NO: 2208838 - RNA, 19 nt, Artificial Sequence
  Description of Artificial Sequence: Synthetic oligonucleotide
  Sense strand starting at position 2095 of SEQ ID NO: 1883677
gugaauuugccgugaauga

SEQ ID NO: 2208839 - RNA, 19 nt, Artificial Sequence
  Description of Artificial Sequence: Synthetic oligonucleotide
  Antisense strand to SEQ ID NO: 2208838
ucauucacggcaaauucac

SEQ ID NO: 2208840 - RNA, 19 nt, Artificial Sequence
  Description of Artificial Sequence: Synthetic oligonucleotide
  Sense strand starting at position 3130 of SEQ ID NO: 1883677
agagaauugcuuuaggcca

SEQ ID NO: 2208841 - RNA, 19 nt, Artificial Sequence
  Description of Artificial Sequence: Synthetic oligonucleotide
  Antisense strand to SEQ ID NO: 2208840
uggccuaaagcaauucucu

SEQ ID NO: 2208842 - RNA, 19 nt, Artificial Sequence
  Description of Artificial Sequence: Synthetic oligonucleotide
  Sense strand starting at position 3135 of SEQ ID NO: 1883677
auugcuuuaggccaggaga

SEQ ID NO: 2208843 - RNA, 19 nt, Artificial Sequence
  Description of Artificial Sequence: Synthetic oligonucleotide
  Antisense strand to SEQ ID NO: 2208842
ucuccuggccuaaagcaau

SEQ ID NO: 2208844 - RNA, 19 nt, Artificial Sequence
  Description of Artificial Sequence: Synthetic oligonucleotide
  Sense strand starting at position 1998 of SEQ ID NO: 1883677
ugaccaagaucagcugauu

SEQ ID NO: 2208845 - RNA, 19 nt, Artificial Sequence
  Description of Artificial Sequence: Synthetic oligonucleotide
  Antisense strand to SEQ ID NO: 2208844
aaucagcugaucuugguca

SEQ ID NO: 2208846 - RNA, 19 nt, Artificial Sequence
  Description of Artificial Sequence: Synthetic oligonucleotide
  Sense strand starting at position 2686 of SEQ ID NO: 1883677
ugcugcagacuuuauagaa

SEQ ID NO: 2208847 - RNA, 19 nt, Artificial Sequence
  Description of Artificial Sequence: Synthetic oligonucleotide
  Antisense strand to SEQ ID NO: 2208846
uucuauaaagucugcagca

SEQ ID NO: 2208848 - RNA, 19 nt, Artificial Sequence
  Description of Artificial Sequence: Synthetic oligonucleotide
  Sense strand starting at position 2399 of SEQ ID NO: 1883677
gcaggagaccuagaguugu

SEQ ID NO: 2208849 - RNA, 19 nt, Artificial Sequence
  Description of Artificial Sequence: Synthetic oligonucleotide
  Antisense strand to SEQ ID NO: 2208848
acaacucuaggucuccugc

SEQ ID NO: 2208850 - RNA, 19 nt, Artificial Sequence
  Description of Artificial Sequence: Synthetic oligonucleotide
  Sense strand starting at position 3311 of SEQ ID NO: 1883677
uaugaucaugccuggauga

SEQ ID NO: 2208851 - RNA, 19 nt, Artificial Sequence
  Description of Artificial Sequence: Synthetic oligonucleotide
  Antisense strand to SEQ ID NO: 2208850
ucauccaggcaugaucaua

SEQ ID NO: 2208852 - RNA, 19 nt, Artificial Sequence
  Description of Artificial Sequence: Synthetic oligonucleotide
  Sense strand starting at position 2474 of SEQ ID NO: 1883677
aagggagaguguuucccau

SEQ ID NO: 2208853 - RNA, 19 nt, Artificial Sequence
  Description of Artificial Sequence: Synthetic oligonucleotide
  Antisense strand to SEQ ID NO: 2208852
augggaaacacucucccuu

SEQ ID NO: 2208854 - RNA, 19 nt, Artificial Sequence
  Description of Artificial Sequence: Synthetic oligonucleotide
  Sense strand starting at position 2476 of SEQ ID NO: 1883677
gggagaguguuucccauaa

SEQ ID NO: 2208855 - RNA, 19 nt, Artificial Sequence
  Description of Artificial Sequence: Synthetic oligonucleotide
  Antisense strand to SEQ ID NO: 2208854
uuaugggaaacacucuccc

SEQ ID NO: 2208856 - RNA, 19 nt, Artificial Sequence
  Description of Artificial Sequence: Synthetic oligonucleotide
  Sense strand starting at position 322 of SEQ ID NO: 1883677
gcuguuugagaucaccuga

SEQ ID NO: 2208857 - RNA, 19 nt, Artificial Sequence
  Description of Artificial Sequence: Synthetic oligonucleotide
  Antisense strand to SEQ ID NO: 2208856
ucaggugaucucaaacagc

SEQ ID NO: 2208858 - RNA, 19 nt, Artificial Sequence
  Description of Artificial Sequence: Synthetic oligonucleotide
  Sense strand starting at position 3166 of SEQ ID NO: 1883677
ugagcaaugaugugagacu

SEQ ID NO: 2208859 - RNA, 19 nt, Artificial Sequence
  Description of Artificial Sequence: Synthetic oligonucleotide
  Antisense strand to SEQ ID NO: 2208858
agucucacaucauugcuca

SEQ ID NO: 2208860 - RNA, 19 nt, Artificial Sequence
  Description of Artificial Sequence: Synthetic oligonucleotide
  Sense strand starting at position 2318 of SEQ ID NO: 1883677
acagguuucucaccugaac

SEQ ID NO: 2208861 - RNA, 19 nt, Artificial Sequence
  Description of Artificial Sequence: Synthetic oligonucleotide
  Antisense strand to SEQ ID NO: 2208860
guucaggugagaaaccugu

SEQ ID NO: 2208862 - RNA, 19 nt, Artificial Sequence
  Description of Artificial Sequence: Synthetic oligonucleotide
  Sense strand starting at position 2676 of SEQ ID NO: 1883677
gacaaagacuugcugcaga

SEQ ID NO: 2208863 - RNA, 19 nt, Artificial Sequence
  Description of Artificial Sequence: Synthetic oligonucleotide
  Antisense strand to SEQ ID NO: 2208862
ucugcagcaagucuuuguc

SEQ ID NO: 2208864 - RNA, 19 nt, Artificial Sequence
  Description of Artificial Sequence: Synthetic oligonucleotide
  Sense strand starting at position 2681 of SEQ ID NO: 1883677
agacuugcugcagacuuua

SEQ ID NO: 2208865 - RNA, 19 nt, Artificial Sequence
  Description of Artificial Sequence: Synthetic oligonucleotide
  Antisense strand to SEQ ID NO: 2208864
uaaagucugcagcaagucu

SEQ ID NO: 2208866 - RNA, 19 nt, Artificial Sequence
  Description of Artificial Sequence: Synthetic oligonucleotide
  Sense strand starting at position 2786 of SEQ ID NO: 1883677
auugaagcauuugaugaua

SEQ ID NO: 2208867 - RNA, 19 nt, Artificial Sequence
  Description of Artificial Sequence: Synthetic oligonucleotide
  Antisense strand to SEQ ID NO: 2208866
uaucaucaaaugcuucaau

SEQ ID NO: 2208868 - RNA, 19 nt, Artificial Sequence
  Description of Artificial Sequence: Synthetic oligonucleotide
  Sense strand starting at position 2627 of SEQ ID NO: 1883677
gcgagaaagcaauggauug

SEQ ID NO: 2208869 - RNA, 19 nt, Artificial Sequence
  Description of Artificial Sequence: Synthetic oligonucleotide
  Antisense strand to SEQ ID NO: 2208868
caauccauugcuuucucgc

SEQ ID NO: 2208870 - RNA, 19 nt, Artificial Sequence
  Description of Artificial Sequence: Synthetic oligonucleotide
  Sense strand starting at position 2619 of SEQ ID NO: 1883677
aaugcauugcgagaaagca

SEQ ID NO: 2208871 - RNA, 19 nt, Artificial Sequence
  Description of Artificial Sequence: Synthetic oligonucleotide
  Antisense strand to SEQ ID NO: 2208870
ugcuuucucgcaaugcauu

SEQ ID NO: 2208872 - RNA, 19 nt, Artificial Sequence
  Description of Artificial Sequence: Synthetic oligonucleotide
  Sense strand starting at position 260 of SEQ ID NO: 1883677
gagaacucugccuguacua

SEQ ID NO: 2208873 - RNA, 19 nt, Artificial Sequence
  Description of Artificial Sequence: Synthetic oligonucleotide
  Antisense strand to SEQ ID NO: 2208872
uaguacaggcagaguucuc

SEQ ID NO: 2208874 - RNA, 19 nt, Artificial Sequence
  Description of Artificial Sequence: Synthetic oligonucleotide
  Sense strand starting at position 259 of SEQ ID NO: 1883677
ggagaacucugccuguacu

SEQ ID NO: 2208875 - RNA, 19 nt, Artificial Sequence
  Description of Artificial Sequence: Synthetic oligonucleotide
  Antisense strand to SEQ ID NO: 2208874
aguacaggcagaguucucc

SEQ ID NO: 2208876 - RNA, 19 nt, Artificial Sequence
  Description of Artificial Sequence: Synthetic oligonucleotide
  Sense strand starting at position 2788 of SEQ ID NO: 1883677
ugaagcauuugaugauaag

SEQ ID NO: 2208877 - RNA, 19 nt, Artificial Sequence
  Description of Artificial Sequence: Synthetic oligonucleotide
  Antisense strand to SEQ ID NO: 2208876
cuuaucaucaaaugcuuca

SEQ ID NO: 2208878 - RNA, 19 nt, Artificial Sequence
  Description of Artificial Sequence: Synthetic oligonucleotide
  Sense strand starting at position 240 of SEQ ID NO: 1883677
cuugauauugcgggugaag

SEQ ID NO: 2208879 - RNA, 19 nt, Artificial Sequence
  Description of Artificial Sequence: Synthetic oligonucleotide
  Antisense strand to SEQ ID NO: 2208878
cuucacccgcaauaucaag

SEQ ID NO: 2208880 - RNA, 19 nt, Artificial Sequence
  Description of Artificial Sequence: Synthetic oligonucleotide
  Sense strand starting at position 3119 of SEQ ID NO: 1883677
aggucaagaugagagaauu

SEQ ID NO: 2208881 - RNA, 19 nt, Artificial Sequence
  Description of Artificial Sequence: Synthetic oligonucleotide
  Antisense strand to SEQ ID NO: 2208880
aauucucucaucuugaccu

SEQ ID NO: 2208882 - RNA, 19 nt, Artificial Sequence
  Description of Artificial Sequence: Synthetic oligonucleotide
  Sense strand starting at position 2405 of SEQ ID NO: 1883677
gaccuagaguugucuuugu

SEQ ID NO: 2208883 - RNA, 19 nt, Artificial Sequence
  Description of Artificial Sequence: Synthetic oligonucleotide
  Antisense strand to SEQ ID NO: 2208882
acaaagacaacucuagguc

SEQ ID NO: 2208884 - RNA, 19 nt, Artificial Sequence
  Description of Artificial Sequence: Synthetic oligonucleotide
  Sense strand starting at position 3087 of SEQ ID NO: 1883677
guggcucaugcuuauagua

SEQ ID NO: 2208885 - RNA, 19 nt, Artificial Sequence
  Description of Artificial Sequence: Synthetic oligonucleotide
  Antisense strand to SEQ ID NO: 2208884
uacuauaagcaugagccac

SEQ ID NO: 2208886 - RNA, 19 nt, Artificial Sequence
  Description of Artificial Sequence: Synthetic oligonucleotide
  Sense strand starting at position 2110 of SEQ ID NO: 1883677
augagcuuccacugucagu

SEQ ID NO: 2208887 - RNA, 19 nt, Artificial Sequence
  Description of Artificial Sequence: Synthetic oligonucleotide
  Antisense strand to SEQ ID NO: 2208886
acugacaguggaagcucau

SEQ ID NO: 2208888 - RNA, 19 nt, Artificial Sequence
  Description of Artificial Sequence: Synthetic oligonucleotide
  Sense strand starting at position 2371 of SEQ ID NO: 1883677
cguuuagucccaugggagu

SEQ ID NO: 2208889 - RNA, 19 nt, Artificial Sequence
  Description of Artificial Sequence: Synthetic oligonucleotide
  Antisense strand to SEQ ID NO: 2208888
acucccaugggacuaaacg

SEQ ID NO: 2208890 - RNA, 19 nt, Artificial Sequence
  Description of Artificial Sequence: Synthetic oligonucleotide
  Sense strand starting at position 2415 of SEQ ID NO: 1883677
ugucuuugugcguagacac

SEQ ID NO: 2208891 - RNA, 19 nt, Artificial Sequence
  Description of Artificial Sequence: Synthetic oligonucleotide
  Antisense strand to SEQ ID NO: 2208890
gugucuacgcacaaagaca

SEQ ID NO: 2208892 - RNA, 19 nt, Artificial Sequence
  Description of Artificial Sequence: Synthetic oligonucleotide
  Sense strand starting at position 2508 of SEQ ID NO: 1883677
cauacagucaugcgugagu

SEQ ID NO: 2208893 - RNA, 19 nt, Artificial Sequence
  Description of Artificial Sequence: Synthetic oligonucleotide
  Antisense strand to SEQ ID NO: 2208892
acucacgcaugacuguaug

SEQ ID NO: 2208894 - RNA, 19 nt, Artificial Sequence
  Description of Artificial Sequence: Synthetic oligonucleotide
  Sense strand starting at position 2771 of SEQ ID NO: 1883677
gguguuugaugagaaauug

SEQ ID NO: 2208895 - RNA, 19 nt, Artificial Sequence
  Description of Artificial Sequence: Synthetic oligonucleotide
  Antisense strand to SEQ ID NO: 2208894
caauuucucaucaaacacc

SEQ ID NO: 2208896 - RNA, 19 nt, Artificial Sequence
  Description of Artificial Sequence: Synthetic oligonucleotide
  Sense strand starting at position 2478 of SEQ ID NO: 1883677
gagaguguuucccauaagg

SEQ ID NO: 2208897 - RNA, 19 nt, Artificial Sequence
  Description of Artificial Sequence: Synthetic oligonucleotide
  Antisense strand to SEQ ID NO: 2208896
ccuuaugggaaacacucuc

SEQ ID NO: 2208898 - RNA, 19 nt, Artificial Sequence
  Description of Artificial Sequence: Synthetic oligonucleotide
  Sense strand starting at position 2414 of SEQ ID NO: 1883677
uugucuuugugcguagaca

SEQ ID NO: 2208899 - RNA, 19 nt, Artificial Sequence
  Description of Artificial Sequence: Synthetic oligonucleotide
  Antisense strand to SEQ ID NO: 2208898
ugucuacgcacaaagacaa

SEQ ID NO: 2208900 - RNA, 19 nt, Artificial Sequence
  Description of Artificial Sequence: Synthetic oligonucleotide
  Sense strand starting at position 2873 of SEQ ID NO: 1883677
acagcagacuuacaguuua

SEQ ID NO: 2208901 - RNA, 19 nt, Artificial Sequence
  Description of Artificial Sequence: Synthetic oligonucleotide
  Antisense strand to SEQ ID NO: 2208900
uaaacuguaagucugcugu

SEQ ID NO: 2208902 - RNA, 19 nt, Artificial Sequence
  Description of Artificial Sequence: Synthetic oligonucleotide
  Sense strand starting at position 2410 of SEQ ID NO: 1883677
agaguugucuuugugcgua

SEQ ID NO: 2208903 - RNA, 19 nt, Artificial Sequence
  Description of Artificial Sequence: Synthetic oligonucleotide
  Antisense strand to SEQ ID NO: 2208902
uacgcacaaagacaacucu

SEQ ID NO: 2208904 - RNA, 19 nt, Artificial Sequence
  Description of Artificial Sequence: Synthetic oligonucleotide
  Sense strand starting at position 2412 of SEQ ID NO: 1883677
aguugucuuugugcguaga

SEQ ID NO: 2208905 - RNA, 19 nt, Artificial Sequence
  Description of Artificial Sequence: Synthetic oligonucleotide
  Antisense strand to SEQ ID NO: 2208904
ucuacgcacaaagacaacu

SEQ ID NO: 2208906 - RNA, 19 nt, Artificial Sequence
  Description of Artificial Sequence: Synthetic oligonucleotide
  Sense strand starting at position 2093 of SEQ ID NO: 1883677
augugaauuugccgugaau

SEQ ID NO: 2208907 - RNA, 19 nt, Artificial Sequence
  Description of Artificial Sequence: Synthetic oligonucleotide
  Antisense strand to SEQ ID NO: 2208906
auucacggcaaauucacau

SEQ ID NO: 2208908 - RNA, 19 nt, Artificial Sequence
  Description of Artificial Sequence: Synthetic oligonucleotide
  Sense strand starting at position 2409 of SEQ ID NO: 1883677
uagaguugucuuugugcgu

SEQ ID NO: 2208909 - RNA, 19 nt, Artificial Sequence
  Description of Artificial Sequence: Synthetic oligonucleotide
  Antisense strand to SEQ ID NO: 2208908
acgcacaaagacaacucua

SEQ ID NO: 2208910 - RNA, 19 nt, Artificial Sequence
  Description of Artificial Sequence: Synthetic oligonucleotide
  Sense strand starting at position 2369 of SEQ ID NO: 1883677
accguuuagucccauggga

SEQ ID NO: 2208911 - RNA, 19 nt, Artificial Sequence
  Description of Artificial Sequence: Synthetic oligonucleotide
  Antisense strand to SEQ ID NO: 2208910
ucccaugggacuaaacggu

SEQ ID NO: 2208912 - RNA, 19 nt, Artificial Sequence
  Description of Artificial Sequence: Synthetic oligonucleotide
  Sense strand starting at position 2908 of SEQ ID NO: 1883677
guuucuauguccuggacca

SEQ ID NO: 2208913 - RNA, 19 nt, Artificial Sequence
  Description of Artificial Sequence: Synthetic oligonucleotide
  Antisense strand to SEQ ID NO: 2208912
ugguccaggacauagaaac

SEQ ID NO: 2208914 - RNA, 19 nt, Artificial Sequence
  Description of Artificial Sequence: Synthetic oligonucleotide
  Sense strand starting at position 2961 of SEQ ID NO: 1883678
uucaauggucuagagguga

SEQ ID NO: 2208915 - RNA, 19 nt, Artificial Sequence
  Description of Artificial Sequence: Synthetic oligonucleotide
  Antisense strand to SEQ ID NO: 2208914
ucaccucuagaccauugaa

SEQ ID NO: 2208916 - RNA, 19 nt, Artificial Sequence
  Description of Artificial Sequence: Synthetic oligonucleotide
  Sense strand starting at position 2580 of SEQ ID NO: 1883678
gcaugaugaaagggugaga

SEQ ID NO: 2208917 - RNA, 19 nt, Artificial Sequence
  Description of Artificial Sequence: Synthetic oligonucleotide
  Antisense strand to SEQ ID NO: 2208916
ucucacccuuucaucaugc

SEQ ID NO: 2208918 - RNA, 19 nt, Artificial Sequence
  Description of Artificial Sequence: Synthetic oligonucleotide
  Sense strand starting at position 969 of SEQ ID NO: 1883678
cugguugacugacuggaaa

SEQ ID NO: 2208919 - RNA, 19 nt, Artificial Sequence
  Description of Artificial Sequence: Synthetic oligonucleotide
  Antisense strand to SEQ ID NO: 2208918
uuuccagucagucaaccag

SEQ ID NO: 2208920 - RNA, 19 nt, Artificial Sequence
  Description of Artificial Sequence: Synthetic oligonucleotide
  Sense strand starting at position 3654 of SEQ ID NO: 1883678
ugacaaaggucagcauaaa

SEQ ID NO: 2208921 - RNA, 19 nt, Artificial Sequence
  Description of Artificial Sequence: Synthetic oligonucleotide
  Antisense strand to SEQ ID NO: 2208920
uuuaugcugaccuuuguca

SEQ ID NO: 2208922 - RNA, 19 nt, Artificial Sequence
  Description of Artificial Sequence: Synthetic oligonucleotide
  Sense strand starting at position 3160 of SEQ ID NO: 1883678
ucaucuggauuauccagau

SEQ ID NO: 2208923 - RNA, 19 nt, Artificial Sequence
  Description of Artificial Sequence: Synthetic oligonucleotide
  Antisense strand to SEQ ID NO: 2208922
aucuggauaauccagauga

SEQ ID NO: 2208924 - RNA, 19 nt, Artificial Sequence
  Description of Artificial Sequence: Synthetic oligonucleotide
  Sense strand starting at position 710 of SEQ ID NO: 1883678
uugaaauauugauuccuug

SEQ ID NO: 2208925 - RNA, 19 nt, Artificial Sequence
  Description of Artificial Sequence: Synthetic oligonucleotide
  Antisense strand to SEQ ID NO: 2208924
caaggaaucaauauuucaa

SEQ ID NO: 2208926 - RNA, 19 nt, Artificial Sequence
  Description of Artificial Sequence: Synthetic oligonucleotide
  Sense strand starting at position 355 of SEQ ID NO: 1883678
ucuuaaaugcaaggaauau

SEQ ID NO: 2208927 - RNA, 19 nt, Artificial Sequence
  Description of Artificial Sequence: Synthetic oligonucleotide
  Antisense strand to SEQ ID NO: 2208926
auauuccuugcauuuaaga

SEQ ID NO: 2208928 - RNA, 19 nt, Artificial Sequence
  Description of Artificial Sequence: Synthetic oligonucleotide
  Sense strand starting at position 2384 of SEQ ID NO: 1883678
gugucucagauuugauugu

SEQ ID NO: 2208929 - RNA, 19 nt, Artificial Sequence
  Description of Artificial Sequence: Synthetic oligonucleotide
  Antisense strand to SEQ ID NO: 2208928
acaaucaaaucugagacac

SEQ ID NO: 2208930 - RNA, 19 nt, Artificial Sequence
  Description of Artificial Sequence: Synthetic oligonucleotide
  Sense strand starting at position 2706 of SEQ ID NO: 1883678
uuuguaucucaaggacaag

SEQ ID NO: 2208931 - RNA, 19 nt, Artificial Sequence
  Description of Artificial Sequence: Synthetic oligonucleotide
  Antisense strand to SEQ ID NO: 2208930
cuuguccuugagauacaaa

SEQ ID NO: 2208932 - RNA, 19 nt, Artificial Sequence
  Description of Artificial Sequence: Synthetic oligonucleotide
  Sense strand starting at position 3960 of SEQ ID NO: 1883678
ugccaaggugaucacauua

SEQ ID NO: 2208933 - RNA, 19 nt, Artificial Sequence
  Description of Artificial Sequence: Synthetic oligonucleotide
  Antisense strand to SEQ ID NO: 2208932
uaaugugaucaccuuggca

SEQ ID NO: 2208934 - RNA, 19 nt, Artificial Sequence
  Description of Artificial Sequence: Synthetic oligonucleotide
  Sense strand starting at position 2966 of SEQ ID NO: 1883678
uggucuagaggugaaguau

SEQ ID NO: 2208935 - RNA, 19 nt, Artificial Sequence
  Description of Artificial Sequence: Synthetic oligonucleotide
  Antisense strand to SEQ ID NO: 2208934
auacuucaccucuagacca

SEQ ID NO: 2208936 - RNA, 19 nt, Artificial Sequence
  Description of Artificial Sequence: Synthetic oligonucleotide
  Sense strand starting at position 3867 of SEQ ID NO: 1883678
gauguagugggcuagauag

SEQ ID NO: 2208937 - RNA, 19 nt, Artificial Sequence
  Description of Artificial Sequence: Synthetic oligonucleotide
  Antisense strand to SEQ ID NO: 2208936
cuaucuagcccacuacauc

SEQ ID NO: 2208938 - RNA, 19 nt, Artificial Sequence
  Description of Artificial Sequence: Synthetic oligonucleotide
  Sense strand starting at position 1667 of SEQ ID NO: 1883678
gaauccaggcucgaagagu

SEQ ID NO: 2208939 - RNA, 19 nt, Artificial Sequence
  Description of Artificial Sequence: Synthetic oligonucleotide
  Antisense strand to SEQ ID NO: 2208938
acucuucgagccuggauuc

SEQ ID NO: 2208940 - RNA, 19 nt, Artificial Sequence
  Description of Artificial Sequence: Synthetic oligonucleotide
  Sense strand starting at position 1681 of SEQ ID NO: 1883678
agagucaacucugugauaa

SEQ ID NO: 2208941 - RNA, 19 nt, Artificial Sequence
  Description of Artificial Sequence: Synthetic oligonucleotide
  Antisense strand to SEQ ID NO: 2208940
uuaucacagaguugacucu

SEQ ID NO: 2208942 - RNA, 19 nt, Artificial Sequence
  Description of Artificial Sequence: Synthetic oligonucleotide
  Sense strand starting at position 340 of SEQ ID NO: 1883678
gggaauaaaucugucucuu

SEQ ID NO: 2208943 - RNA, 19 nt, Artificial Sequence
  Description of Artificial Sequence: Synthetic oligonucleotide
  Antisense strand to SEQ ID NO: 2208942
aagagacagauuuauuccc

SEQ ID NO: 2208944 - RNA, 19 nt, Artificial Sequence
  Description of Artificial Sequence: Synthetic oligonucleotide
  Sense strand starting at position 2499 of SEQ ID NO: 1883678
uucugaagccuccauugau

SEQ ID NO: 2208945 - RNA, 19 nt, Artificial Sequence
  Description of Artificial Sequence: Synthetic oligonucleotide
  Antisense strand to SEQ ID NO: 2208944
aucaauggaggcuucagaa

SEQ ID NO: 2208946 - RNA, 19 nt, Artificial Sequence
  Description of Artificial Sequence: Synthetic oligonucleotide
  Sense strand starting at position 2992 of SEQ ID NO: 1883678
ggaugugucgugcugagcu

SEQ ID NO: 2208947 - RNA, 19 nt, Artificial Sequence
  Description of Artificial Sequence: Synthetic oligonucleotide
  Antisense strand to SEQ ID NO: 2208946
agcucagcacgacacaucc

SEQ ID NO: 2208948 - RNA, 19 nt, Artificial Sequence
  Description of Artificial Sequence: Synthetic oligonucleotide
  Sense strand starting at position 1682 of SEQ ID NO: 1883678
gagucaacucugugauaaa

SEQ ID NO: 2208949 - RNA, 19 nt, Artificial Sequence
  Description of Artificial Sequence: Synthetic oligonucleotide
  Antisense strand to SEQ ID NO: 2208948
uuuaucacagaguugacuc

SEQ ID NO: 2208950 - RNA, 19 nt, Artificial Sequence
  Description of Artificial Sequence: Synthetic oligonucleotide
  Sense strand starting at position 1680 of SEQ ID NO: 1883678
aagagucaacucugugaua

SEQ ID NO: 2208951 - RNA, 19 nt, Artificial Sequence
  Description of Artificial Sequence: Synthetic oligonucleotide
  Antisense strand to SEQ ID NO: 2208950
uaucacagaguugacucuu

SEQ ID NO: 2208952 - RNA, 19 nt, Artificial Sequence
  Description of Artificial Sequence: Synthetic oligonucleotide
  Sense strand starting at position 3145 of SEQ ID NO: 1883678
cagauuagacugggcucau

SEQ ID NO: 2208953 - RNA, 19 nt, Artificial Sequence
  Description of Artificial Sequence: Synthetic oligonucleotide
  Antisense strand to SEQ ID NO: 2208952
augagcccagucuaaucug

SEQ ID NO: 2208954 - RNA, 19 nt, Artificial Sequence
  Description of Artificial Sequence: Synthetic oligonucleotide
  Sense strand starting at position 3117 of SEQ ID NO: 1883678
uaccgaugugaguaaacuu

SEQ ID NO: 2208955 - RNA, 19 nt, Artificial Sequence
  Description of Artificial Sequence: Synthetic oligonucleotide
  Antisense strand to SEQ ID NO: 2208954
aaguuuacucacaucggua

SEQ ID NO: 2208956 - RNA, 19 nt, Artificial Sequence
  Description of Artificial Sequence: Synthetic oligonucleotide
  Sense strand starting at position 2502 of SEQ ID NO: 1883678
ugaagccuccauugauaac

SEQ ID NO: 2208957 - RNA, 19 nt, Artificial Sequence
  Description of Artificial Sequence: Synthetic oligonucleotide
  Antisense strand to SEQ ID NO: 2208956
guuaucaauggaggcuuca

SEQ ID NO: 2208958 - RNA, 19 nt, Artificial Sequence
  Description of Artificial Sequence: Synthetic oligonucleotide
  Sense strand starting at position 2568 of SEQ ID NO: 1883678
cucuguucgcccgcaugau

SEQ ID NO: 2208959 - RNA, 19 nt, Artificial Sequence
  Description of Artificial Sequence: Synthetic oligonucleotide
  Antisense strand to SEQ ID NO: 2208958
aucaugcgggcgaacagag

SEQ ID NO: 2208960 - RNA, 19 nt, Artificial Sequence
  Description of Artificial Sequence: Synthetic oligonucleotide
  Sense strand starting at position 2425 of SEQ ID NO: 1883678
cucauugucugauugagac

SEQ ID NO: 2208961 - RNA, 19 nt, Artificial Sequence
  Description of Artificial Sequence: Synthetic oligonucleotide
  Antisense strand to SEQ ID NO: 2208960
gucucaaucagacaaugag

SEQ ID NO: 2208962 - RNA, 19 nt, Artificial Sequence
  Description of Artificial Sequence: Synthetic oligonucleotide
  Sense strand starting at position 2965 of SEQ ID NO: 1883678
auggucuagaggugaagua

SEQ ID NO: 2208963 - RNA, 19 nt, Artificial Sequence
  Description of Artificial Sequence: Synthetic oligonucleotide
  Antisense strand to SEQ ID NO: 2208962
uacuucaccucuagaccau

SEQ ID NO: 2208964 - RNA, 19 nt, Artificial Sequence
  Description of Artificial Sequence: Synthetic oligonucleotide
  Sense strand starting at position 755 of SEQ ID NO: 1883678
caucuuucuguuggagaau

SEQ ID NO: 2208965 - RNA, 19 nt, Artificial Sequence
  Description of Artificial Sequence: Synthetic oligonucleotide
  Antisense strand to SEQ ID NO: 2208964
auucuccaacagaaagaug

SEQ ID NO: 2208966 - RNA, 19 nt, Artificial Sequence
  Description of Artificial Sequence: Synthetic oligonucleotide
  Sense strand starting at position 3787 of SEQ ID NO: 1883678
aagcucugggauuguaaau

SEQ ID NO: 2208967 - RNA, 19 nt, Artificial Sequence
  Description of Artificial Sequence: Synthetic oligonucleotide
  Antisense strand to SEQ ID NO: 2208966
auuuacaaucccagagcuu

SEQ ID NO: 2208968 - RNA, 19 nt, Artificial Sequence
  Description of Artificial Sequence: Synthetic oligonucleotide
  Sense strand starting at position 2997 of SEQ ID NO: 1883678
ugucgugcugagcuguauu

SEQ ID NO: 2208969 - RNA, 19 nt, Artificial Sequence
  Description of Artificial Sequence: Synthetic oligonucleotide
  Antisense strand to SEQ ID NO: 2208968
aauacagcucagcacgaca

SEQ ID NO: 2208970 - RNA, 19 nt, Artificial Sequence
  Description of Artificial Sequence: Synthetic oligonucleotide
  Sense strand starting at position 3714 of SEQ ID NO: 1883678
gagccauagaguugugaaa

SEQ ID NO: 2208971 - RNA, 19 nt, Artificial Sequence
  Description of Artificial Sequence: Synthetic oligonucleotide
  Antisense strand to SEQ ID NO: 2208970
uuucacaacucuauggcuc

SEQ ID NO: 2208972 - RNA, 19 nt, Artificial Sequence
  Description of Artificial Sequence: Synthetic oligonucleotide
  Sense strand starting at position 3878 of SEQ ID NO: 1883678
cuagauaguugucuccaaa

SEQ ID NO: 2208973 - RNA, 19 nt, Artificial Sequence
  Description of Artificial Sequence: Synthetic oligonucleotide
  Antisense strand to SEQ ID NO: 2208972
uuuggagacaacuaucuag

SEQ ID NO: 2208974 - RNA, 19 nt, Artificial Sequence
  Description of Artificial Sequence: Synthetic oligonucleotide
  Sense strand starting at position 3270 of SEQ ID NO: 1883678
ggauucuucccgcauugga

SEQ ID NO: 2208975 - RNA, 19 nt, Artificial Sequence
  Description of Artificial Sequence: Synthetic oligonucleotide
  Antisense strand to SEQ ID NO: 2208974
uccaaugcgggaagaaucc

SEQ ID NO: 2208976 - RNA, 19 nt, Artificial Sequence
  Description of Artificial Sequence: Synthetic oligonucleotide
  Sense strand starting at position 1243 of SEQ ID NO: 1883678
uagugaggaucugcuacau

SEQ ID NO: 2208977 - RNA, 19 nt, Artificial Sequence
  Description of Artificial Sequence: Synthetic oligonucleotide
  Antisense strand to SEQ ID NO: 2208976
auguagcagauccucacua

SEQ ID NO: 2208978 - RNA, 19 nt, Artificial Sequence
  Description of Artificial Sequence: Synthetic oligonucleotide
  Sense strand starting at position 1235 of SEQ ID NO: 1883678
uccuguguuagugaggauc

SEQ ID NO: 2208979 - RNA, 19 nt, Artificial Sequence
  Description of Artificial Sequence: Synthetic oligonucleotide
  Antisense strand to SEQ ID NO: 2208978
gauccucacuaacacagga

SEQ ID NO: 2208980 - RNA, 19 nt, Artificial Sequence
  Description of Artificial Sequence: Synthetic oligonucleotide
  Sense strand starting at position 1057 of SEQ ID NO: 1883678
cugugaacuggcugaacua

SEQ ID NO: 2208981 - RNA, 19 nt, Artificial Sequence
  Description of Artificial Sequence: Synthetic oligonucleotide
  Antisense strand to SEQ ID NO: 2208980
uaguucagccaguucacag

SEQ ID NO: 2208982 - RNA, 19 nt, Artificial Sequence
  Description of Artificial Sequence: Synthetic oligonucleotide
  Sense strand starting at position 1503 of SEQ ID NO: 1883678
auaguauuggacuggcuca

SEQ ID NO: 2208983 - RNA, 19 nt, Artificial Sequence
  Description of Artificial Sequence: Synthetic oligonucleotide
  Antisense strand to SEQ ID NO: 2208982
ugagccaguccaauacuau

SEQ ID NO: 2208984 - RNA, 19 nt, Artificial Sequence
  Description of Artificial Sequence: Synthetic oligonucleotide
  Sense strand starting at position 59 of SEQ ID NO: 1883678
acaugcauguuucugaaac

SEQ ID NO: 2208985 - RNA, 19 nt, Artificial Sequence
  Description of Artificial Sequence: Synthetic oligonucleotide
  Antisense strand to SEQ ID NO: 2208984
guuucagaaacaugcaugu

SEQ ID NO: 2208986 - RNA, 19 nt, Artificial Sequence
  Description of Artificial Sequence: Synthetic oligonucleotide
  Sense strand starting at position 3579 of SEQ ID NO: 1883678
guuauaaagggcuguaaug

SEQ ID NO: 2208987 - RNA, 19 nt, Artificial Sequence
  Description of Artificial Sequence: Synthetic oligonucleotide
  Antisense strand to SEQ ID NO: 2208986
cauuacagcccuuuauaac

SEQ ID NO: 2208988 - RNA, 19 nt, Artificial Sequence
  Description of Artificial Sequence: Synthetic oligonucleotide
  Sense strand starting at position 3959 of SEQ ID NO: 1883678
uugccaaggugaucacauu

SEQ ID NO: 2208989 - RNA, 19 nt, Artificial Sequence
  Description of Artificial Sequence: Synthetic oligonucleotide
  Antisense strand to SEQ ID NO: 2208988
aaugugaucaccuuggcaa

SEQ ID NO: 2208990 - RNA, 19 nt, Artificial Sequence
  Description of Artificial Sequence: Synthetic oligonucleotide
  Sense strand starting at position 851 of SEQ ID NO: 1883678
ggaagaaggcuguguucau

SEQ ID NO: 2208991 - RNA, 19 nt, Artificial Sequence
  Description of Artificial Sequence: Synthetic oligonucleotide
  Antisense strand to SEQ ID NO: 2208990
augaacacagccuucuucc

SEQ ID NO: 2208992 - RNA, 19 nt, Artificial Sequence
  Description of Artificial Sequence: Synthetic oligonucleotide
  Sense strand starting at position 3070 of SEQ ID NO: 1883678
aaucccugagccugugaau

SEQ ID NO: 2208993 - RNA, 19 nt, Artificial Sequence
  Description of Artificial Sequence: Synthetic oligonucleotide
  Antisense strand to SEQ ID NO: 2208992
auucacaggcucagggauu

SEQ ID NO: 2208994 - RNA, 19 nt, Artificial Sequence
  Description of Artificial Sequence: Synthetic oligonucleotide
  Sense strand starting at position 819 of SEQ ID NO: 1883679
caugacugauuagucaaga

SEQ ID NO: 2208995 - RNA, 19 nt, Artificial Sequence
  Description of Artificial Sequence: Synthetic oligonucleotide
  Antisense strand to SEQ ID NO: 2208994
ucuugacuaaucagucaug

SEQ ID NO: 2208996 - RNA, 19 nt, Artificial Sequence
  Description of Artificial Sequence: Synthetic oligonucleotide
  Sense strand starting at position 820 of SEQ ID NO: 1883679
augacugauuagucaagau

SEQ ID NO: 2208997 - RNA, 19 nt, Artificial Sequence
  Description of Artificial Sequence: Synthetic oligonucleotide
  Antisense strand to SEQ ID NO: 2208996
aucuugacuaaucagucau

SEQ ID NO: 2208998 - RNA, 19 nt, Artificial Sequence
  Description of Artificial Sequence: Synthetic oligonucleotide
  Sense strand starting at position 832 of SEQ ID NO: 1883679
ucaagauuaugagucuaga

SEQ ID NO: 2208999 - RNA, 19 nt, Artificial Sequence
  Description of Artificial Sequence: Synthetic oligonucleotide
  Antisense strand to SEQ ID NO: 2208998
ucuagacucauaaucuuga

SEQ ID NO: 2209000 - RNA, 19 nt, Artificial Sequence
  Description of Artificial Sequence: Synthetic oligonucleotide
  Sense strand starting at position 1704 of SEQ ID NO: 1883679
ggguguuauagauacgaaa

SEQ ID NO: 2209001 - RNA, 19 nt, Artificial Sequence
  Description of Artificial Sequence: Synthetic oligonucleotide
  Antisense strand to SEQ ID NO: 2209000
uuucguaucuauaacaccc

SEQ ID NO: 2209002 - RNA, 19 nt, Artificial Sequence
  Description of Artificial Sequence: Synthetic oligonucleotide
  Sense strand starting at position 1925 of SEQ ID NO: 1883679
guuguaaaccuugaaauua

SEQ ID NO: 2209003 - RNA, 19 nt, Artificial Sequence
  Description of Artificial Sequence: Synthetic oligonucleotide
  Antisense strand to SEQ ID NO: 2209002
uaauuucaagguuuacaac

SEQ ID NO: 2209004 - RNA, 19 nt, Artificial Sequence
  Description of Artificial Sequence: Synthetic oligonucleotide
  Sense strand starting at position 767 of SEQ ID NO: 1883679
cggagugggcuagaaauaa

SEQ ID NO: 2209005 - RNA, 19 nt, Artificial Sequence
  Description of Artificial Sequence: Synthetic oligonucleotide
  Antisense strand to SEQ ID NO: 2209004
uuauuucuagcccacuccg

SEQ ID NO: 2209006 - RNA, 19 nt, Artificial Sequence
  Description of Artificial Sequence: Synthetic oligonucleotide
  Sense strand starting at position 399 of SEQ ID NO: 1883679
ccuuuauuugcuuaagugu

SEQ ID NO: 2209007 - RNA, 19 nt, Artificial Sequence
  Description of Artificial Sequence: Synthetic oligonucleotide
  Antisense strand to SEQ ID NO: 2209006
acacuuaagcaaauaaagg

SEQ ID NO: 2209008 - RNA, 19 nt, Artificial Sequence
  Description of Artificial Sequence: Synthetic oligonucleotide
  Sense strand starting at position 1937 of SEQ ID NO: 1883679
gaaauuaguccuggacuga

SEQ ID NO: 2209009 - RNA, 19 nt, Artificial Sequence
  Description of Artificial Sequence: Synthetic oligonucleotide
  Antisense strand to SEQ ID NO: 2209008
ucaguccaggacuaauuuc

SEQ ID NO: 2209010 - RNA, 19 nt, Artificial Sequence
  Description of Artificial Sequence: Synthetic oligonucleotide
  Sense strand starting at position 316 of SEQ ID NO: 1883679
cuggcauuugccuaacugu

SEQ ID NO: 2209011 - RNA, 19 nt, Artificial Sequence
  Description of Artificial Sequence: Synthetic oligonucleotide
  Antisense strand to SEQ ID NO: 2209010
acaguuaggcaaaugccag

SEQ ID NO: 2209012 - RNA, 19 nt, Artificial Sequence
  Description of Artificial Sequence: Synthetic oligonucleotide
  Sense strand starting at position 1853 of SEQ ID NO: 1883679
ggaggcaucgaauagcaaa

SEQ ID NO: 2209013 - RNA, 19 nt, Artificial Sequence
  Description of Artificial Sequence: Synthetic oligonucleotide
  Antisense strand to SEQ ID NO: 2209012
uuugcuauucgaugccucc

SEQ ID NO: 2209014 - RNA, 19 nt, Artificial Sequence
  Description of Artificial Sequence: Synthetic oligonucleotide
  Sense strand starting at position 1190 of SEQ ID NO: 1883679
cuucuuuggagguaaguaa

SEQ ID NO: 2209015 - RNA, 19 nt, Artificial Sequence
  Description of Artificial Sequence: Synthetic oligonucleotide
  Antisense strand to SEQ ID NO: 2209014
uuacuuaccuccaaagaag

SEQ ID NO: 2209016 - RNA, 19 nt, Artificial Sequence
  Description of Artificial Sequence: Synthetic oligonucleotide
  Sense strand starting at position 880 of SEQ ID NO: 1883679
gucacaggauuauugaauu

SEQ ID NO: 2209017 - RNA, 19 nt, Artificial Sequence
  Description of Artificial Sequence: Synthetic oligonucleotide
  Antisense strand to SEQ ID NO: 2209016
aauucaauaauccugugac

SEQ ID NO: 2209018 - RNA, 19 nt, Artificial Sequence
  Description of Artificial Sequence: Synthetic oligonucleotide
  Sense strand starting at position 248 of SEQ ID NO: 1883679
uguagaggaguguaccaua

SEQ ID NO: 2209019 - RNA, 19 nt, Artificial Sequence
  Description of Artificial Sequence: Synthetic oligonucleotide
  Antisense strand to SEQ ID NO: 2209018
uaugguacacuccucuaca

SEQ ID NO: 2209020 - RNA, 19 nt, Artificial Sequence
  Description of Artificial Sequence: Synthetic oligonucleotide
  Sense strand starting at position 27 of SEQ ID NO: 1883679
uauauugaggcuuggaaac

SEQ ID NO: 2209021 - RNA, 19 nt, Artificial Sequence
  Description of Artificial Sequence: Synthetic oligonucleotide
  Antisense strand to SEQ ID NO: 2209020
guuuccaagccucaauaua

SEQ ID NO: 2209022 - RNA, 19 nt, Artificial Sequence
  Description of Artificial Sequence: Synthetic oligonucleotide
  Sense strand starting at position 2856 of SEQ ID NO: 1883679
gcgacuucucccgcccuau

SEQ ID NO: 2209023 - RNA, 19 nt, Artificial Sequence
  Description of Artificial Sequence: Synthetic oligonucleotide
  Antisense strand to SEQ ID NO: 2209022
auagggcgggagaagucgc

SEQ ID NO: 2209024 - RNA, 19 nt, Artificial Sequence
  Description of Artificial Sequence: Synthetic oligonucleotide
  Sense strand starting at position 1933 of SEQ ID NO: 1883679
ccuugaaauuaguccugga

SEQ ID NO: 2209025 - RNA, 19 nt, Artificial Sequence
  Description of Artificial Sequence: Synthetic oligonucleotide
  Antisense strand to SEQ ID NO: 2209024
uccaggacuaauuucaagg

SEQ ID NO: 2209026 - RNA, 19 nt, Artificial Sequence
  Description of Artificial Sequence: Synthetic oligonucleotide
  Sense strand starting at position 306 of SEQ ID NO: 1883679
uuccuaauugcuggcauuu

SEQ ID NO: 2209027 - RNA, 19 nt, Artificial Sequence
  Description of Artificial Sequence: Synthetic oligonucleotide
  Antisense strand to SEQ ID NO: 2209026
aaaugccagcaauuaggaa

SEQ ID NO: 2209028 - RNA, 19 nt, Artificial Sequence
  Description of Artificial Sequence: Synthetic oligonucleotide
  Sense strand starting at position 765 of SEQ ID NO: 1883679
uucggagugggcuagaaau

SEQ ID NO: 2209029 - RNA, 19 nt, Artificial Sequence
  Description of Artificial Sequence: Synthetic oligonucleotide
  Antisense strand to SEQ ID NO: 2209028
auuucuagcccacuccgaa

SEQ ID NO: 2209030 - RNA, 19 nt, Artificial Sequence
  Description of Artificial Sequence: Synthetic oligonucleotide
  Sense strand starting at position 1240 of SEQ ID NO: 1883679
gcagcugugcaguuuguaa

SEQ ID NO: 2209031 - RNA, 19 nt, Artificial Sequence
  Description of Artificial Sequence: Synthetic oligonucleotide
  Antisense strand to SEQ ID NO: 2209030
uuacaaacugcacagcugc

SEQ ID NO: 2209032 - RNA, 19 nt, Artificial Sequence
  Description of Artificial Sequence: Synthetic oligonucleotide
  Sense strand starting at position 816 of SEQ ID NO: 1883679
ccucaugacugauuaguca

SEQ ID NO: 2209033 - RNA, 19 nt, Artificial Sequence
  Description of Artificial Sequence: Synthetic oligonucleotide
  Antisense strand to SEQ ID NO: 2209032
ugacuaaucagucaugagg

SEQ ID NO: 2209034 - RNA, 19 nt, Artificial Sequence
  Description of Artificial Sequence: Synthetic oligonucleotide
  Sense strand starting at position 1881 of SEQ ID NO: 1883679
aggaguagucccuggauua

SEQ ID NO: 2209035 - RNA, 19 nt, Artificial Sequence
  Description of Artificial Sequence: Synthetic oligonucleotide
  Antisense strand to SEQ ID NO: 2209034
uaauccagggacuacuccu

SEQ ID NO: 2209036 - RNA, 19 nt, Artificial Sequence
  Description of Artificial Sequence: Synthetic oligonucleotide
  Sense strand starting at position 233 of SEQ ID NO: 1883679
cugaaugaccaugggugua

SEQ ID NO: 2209037 - RNA, 19 nt, Artificial Sequence
  Description of Artificial Sequence: Synthetic oligonucleotide
  Antisense strand to SEQ ID NO: 2209036
uacacccauggucauucag

SEQ ID NO: 2209038 - RNA, 19 nt, Artificial Sequence
  Description of Artificial Sequence: Synthetic oligonucleotide
  Sense strand starting at position 1732 of SEQ ID NO: 1883679
uggcguuaccaacauuaaa

SEQ ID NO: 2209039 - RNA, 19 nt, Artificial Sequence
  Description of Artificial Sequence: Synthetic oligonucleotide
  Antisense strand to SEQ ID NO: 2209038
uuuaauguugguaacgcca

SEQ ID NO: 2209040 - RNA, 19 nt, Artificial Sequence
  Description of Artificial Sequence: Synthetic oligonucleotide
  Sense strand starting at position 398 of SEQ ID NO: 1883679
gccuuuauuugcuuaagug

SEQ ID NO: 2209041 - RNA, 19 nt, Artificial Sequence
  Description of Artificial Sequence: Synthetic oligonucleotide
  Antisense strand to SEQ ID NO: 2209040
cacuuaagcaaauaaaggc

SEQ ID NO: 2209042 - RNA, 19 nt, Artificial Sequence
  Description of Artificial Sequence: Synthetic oligonucleotide
  Sense strand starting at position 98 of SEQ ID NO: 1883679
aaggaauccuugcuagggu

SEQ ID NO: 2209043 - RNA, 19 nt, Artificial Sequence
  Description of Artificial Sequence: Synthetic oligonucleotide
  Antisense strand to SEQ ID NO: 2209042
acccuagcaaggauuccuu

SEQ ID NO: 2209044 - RNA, 19 nt, Artificial Sequence
  Description of Artificial Sequence: Synthetic oligonucleotide
  Sense strand starting at position 963 of SEQ ID NO: 1883679
cucagcguuggagaauuau

SEQ ID NO: 2209045 - RNA, 19 nt, Artificial Sequence
  Description of Artificial Sequence: Synthetic oligonucleotide
  Antisense strand to SEQ ID NO: 2209044
auaauucuccaacgcugag

SEQ ID NO: 2209046 - RNA, 19 nt, Artificial Sequence
  Description of Artificial Sequence: Synthetic oligonucleotide
  Sense strand starting at position 1481 of SEQ ID NO: 1883679
gcuuacugaguuuggagaa

SEQ ID NO: 2209047 - RNA, 19 nt, Artificial Sequence
  Description of Artificial Sequence: Synthetic oligonucleotide
  Antisense strand to SEQ ID NO: 2209046
uucuccaaacucaguaagc

SEQ ID NO: 2209048 - RNA, 19 nt, Artificial Sequence
  Description of Artificial Sequence: Synthetic oligonucleotide
  Sense strand starting at position 1546 of SEQ ID NO: 1883679
gggugagcucaaugaaucu

SEQ ID NO: 2209049 - RNA, 19 nt, Artificial Sequence
  Description of Artificial Sequence: Synthetic oligonucleotide
  Antisense strand to SEQ ID NO: 2209048
agauucauugagcucaccc

SEQ ID NO: 2209050 - RNA, 19 nt, Artificial Sequence
  Description of Artificial Sequence: Synthetic oligonucleotide
  Sense strand starting at position 397 of SEQ ID NO: 1883679
ugccuuuauuugcuuaagu

SEQ ID NO: 2209051 - RNA, 19 nt, Artificial Sequence
  Description of Artificial Sequence: Synthetic oligonucleotide
  Antisense strand to SEQ ID NO: 2209050
acuuaagcaaauaaaggca

SEQ ID NO: 2209052 - RNA, 19 nt, Artificial Sequence
  Description of Artificial Sequence: Synthetic oligonucleotide
  Sense strand starting at position 268 of SEQ ID NO: 1883679
aauaacuguggguguuaga

SEQ ID NO: 2209053 - RNA, 19 nt, Artificial Sequence
  Description of Artificial Sequence: Synthetic oligonucleotide
  Antisense strand to SEQ ID NO: 2209052
ucuaacacccacaguuauu

SEQ ID NO: 2209054 - RNA, 19 nt, Artificial Sequence
  Description of Artificial Sequence: Synthetic oligonucleotide
  Sense strand starting at position 1882 of SEQ ID NO: 1883679
ggaguagucccuggauuau

SEQ ID NO: 2209055 - RNA, 19 nt, Artificial Sequence
  Description of Artificial Sequence: Synthetic oligonucleotide
  Antisense strand to SEQ ID NO: 2209054
auaauccagggacuacucc

SEQ ID NO: 2209056 - RNA, 19 nt, Artificial Sequence
  Description of Artificial Sequence: Synthetic oligonucleotide
  Sense strand starting at position 1636 of SEQ ID NO: 1883679
ggcggagguccauauucca

SEQ ID NO: 2209057 - RNA, 19 nt, Artificial Sequence
  Description of Artificial Sequence: Synthetic oligonucleotide
  Antisense strand to SEQ ID NO: 2209056
uggaauauggaccuccgcc

SEQ ID NO: 2209058 - RNA, 19 nt, Artificial Sequence
  Description of Artificial Sequence: Synthetic oligonucleotide
  Sense strand starting at position 1924 of SEQ ID NO: 1883679
uguuguaaaccuugaaauu

SEQ ID NO: 2209059 - RNA, 19 nt, Artificial Sequence
  Description of Artificial Sequence: Synthetic oligonucleotide
  Antisense strand to SEQ ID NO: 2209058
aauuucaagguuuacaaca

SEQ ID NO: 2209060 - RNA, 19 nt, Artificial Sequence
  Description of Artificial Sequence: Synthetic oligonucleotide
  Sense strand starting at position 2584 of SEQ ID NO: 1883679
cggaguaucagaggccaga

SEQ ID NO: 2209061 - RNA, 19 nt, Artificial Sequence
  Description of Artificial Sequence: Synthetic oligonucleotide
  Antisense strand to SEQ ID NO: 2209060
ucuggccucugauacuccg

SEQ ID NO: 2209062 - RNA, 19 nt, Artificial Sequence
  Description of Artificial Sequence: Synthetic oligonucleotide
  Sense strand starting at position 171 of SEQ ID NO: 1883679
agcagaaggucagucuaau

SEQ ID NO: 2209063 - RNA, 19 nt, Artificial Sequence
  Description of Artificial Sequence: Synthetic oligonucleotide
  Antisense strand to SEQ ID NO: 2209062
auuagacugaccuucugcu

SEQ ID NO: 2209064 - RNA, 19 nt, Artificial Sequence
  Description of Artificial Sequence: Synthetic oligonucleotide
  Sense strand starting at position 2268 of SEQ ID NO: 1883679
ggcucuaagcgcuuugcga

SEQ ID NO: 2209065 - RNA, 19 nt, Artificial Sequence
  Description of Artificial Sequence: Synthetic oligonucleotide
  Antisense strand to SEQ ID NO: 2209064
ucgcaaagcgcuuagagcc

SEQ ID NO: 2209066 - RNA, 19 nt, Artificial Sequence
  Description of Artificial Sequence: Synthetic oligonucleotide
  Sense strand starting at position 9 of SEQ ID NO: 1883679
cugcaauuaguugacaguu

SEQ ID NO: 2209067 - RNA, 19 nt, Artificial Sequence
  Description of Artificial Sequence: Synthetic oligonucleotide
  Antisense strand to SEQ ID NO: 2209066
aacugucaacuaauugcag

SEQ ID NO: 2209068 - RNA, 19 nt, Artificial Sequence
  Description of Artificial Sequence: Synthetic oligonucleotide
  Sense strand starting at position 1804 of SEQ ID NO: 1883679
aaacguaucuuuguaauga

SEQ ID NO: 2209069 - RNA, 19 nt, Artificial Sequence
  Description of Artificial Sequence: Synthetic oligonucleotide
  Antisense strand to SEQ ID NO: 2209068
ucauuacaaagauacguuu

SEQ ID NO: 2209070 - RNA, 19 nt, Artificial Sequence
  Description of Artificial Sequence: Synthetic oligonucleotide
  Sense strand starting at position 2009 of SEQ ID NO: 1883679
auggaaagucuauggcagu

SEQ ID NO: 2209071 - RNA, 19 nt, Artificial Sequence
  Description of Artificial Sequence: Synthetic oligonucleotide
  Antisense strand to SEQ ID NO: 2209070
acugccauagacuuuccau

SEQ ID NO: 2209072 - RNA, 19 nt, Artificial Sequence
  Description of Artificial Sequence: Synthetic oligonucleotide
  Sense strand starting at position 2269 of SEQ ID NO: 1883679
gcucuaagcgcuuugcgau

SEQ ID NO: 2209073 - RNA, 19 nt, Artificial Sequence
  Description of Artificial Sequence: Synthetic oligonucleotide
  Antisense strand to SEQ ID NO: 2209072
aucgcaaagcgcuuagagc

SEQ ID NO: 2209074 - RNA, 19 nt, Artificial Sequence
  Description of Artificial Sequence: Synthetic oligonucleotide
  Sense strand starting at position 2319 of SEQ ID NO: 1883680
cauuaaggccugugaccaa

SEQ ID NO: 2209075 - RNA, 19 nt, Artificial Sequence
  Description of Artificial Sequence: Synthetic oligonucleotide
  Antisense strand to SEQ ID NO: 2209074
uuggucacaggccuuaaug

SEQ ID NO: 2209076 - RNA, 19 nt, Artificial Sequence
  Description of Artificial Sequence: Synthetic oligonucleotide
  Sense strand starting at position 2282 of SEQ ID NO: 1883680
auguccuggccaugaacau

SEQ ID NO: 2209077 - RNA, 19 nt, Artificial Sequence
  Description of Artificial Sequence: Synthetic oligonucleotide
  Antisense strand to SEQ ID NO: 2209076
auguucauggccaggacau

SEQ ID NO: 2209078 - RNA, 19 nt, Artificial Sequence
  Description of Artificial Sequence: Synthetic oligonucleotide
  Sense strand starting at position 2037 of SEQ ID NO: 1883681
ggacuuuaauugguugauu

SEQ ID NO: 2209079 - RNA, 19 nt, Artificial Sequence
  Description of Artificial Sequence: Synthetic oligonucleotide
  Antisense strand to SEQ ID NO: 2209078
aaucaaccaauuaaagucc

SEQ ID NO: 2209080 - RNA, 19 nt, Artificial Sequence
  Description of Artificial Sequence: Synthetic oligonucleotide
  Sense strand starting at position 2036 of SEQ ID NO: 1883681
uggacuuuaauugguugau

SEQ ID NO: 2209081 - RNA, 19 nt, Artificial Sequence
  Description of Artificial Sequence: Synthetic oligonucleotide
  Antisense strand to SEQ ID NO: 2209080
aucaaccaauuaaagucca

SEQ ID NO: 2209082 - RNA, 19 nt, Artificial Sequence
  Description of Artificial Sequence: Synthetic oligonucleotide
  Sense strand starting at position 3283 of SEQ ID NO: 1883681
ucaaacauuugguagaauu

SEQ ID NO: 2209083 - RNA, 19 nt, Artificial Sequence
  Description of Artificial Sequence: Synthetic oligonucleotide
  Antisense strand to SEQ ID NO: 2209082
aauucuaccaaauguuuga

SEQ ID NO: 2209084 - RNA, 19 nt, Artificial Sequence
  Description of Artificial Sequence: Synthetic oligonucleotide
  Sense strand starting at position 2318 of SEQ ID NO: 1883681
cauuaaggccugugaccaa

SEQ ID NO: 2209085 - RNA, 19 nt, Artificial Sequence
  Description of Artificial Sequence: Synthetic oligonucleotide
  Antisense strand to SEQ ID NO: 2209084
uuggucacaggccuuaaug

SEQ ID NO: 2209086 - RNA, 19 nt, Artificial Sequence
  Description of Artificial Sequence: Synthetic oligonucleotide
  Sense strand starting at position 3585 of SEQ ID NO: 1883681
uagugagagguuggucaau

SEQ ID NO: 2209087 - RNA, 19 nt, Artificial Sequence
  Description of Artificial Sequence: Synthetic oligonucleotide
  Antisense strand to SEQ ID NO: 2209086
auugaccaaccucucacua

SEQ ID NO: 2209088 - RNA, 19 nt, Artificial Sequence
  Description of Artificial Sequence: Synthetic oligonucleotide
  Sense strand starting at position 3256 of SEQ ID NO: 1883681
uugugaagaaaucguauua

SEQ ID NO: 2209089 - RNA, 19 nt, Artificial Sequence
  Description of Artificial Sequence: Synthetic oligonucleotide
  Antisense strand to SEQ ID NO: 2209088
uaauacgauuucuucacaa

SEQ ID NO: 2209090 - RNA, 19 nt, Artificial Sequence
  Description of Artificial Sequence: Synthetic oligonucleotide
  Sense strand starting at position 1940 of SEQ ID NO: 1883681
gcacacuuguaaguaaaua

SEQ ID NO: 2209091 - RNA, 19 nt, Artificial Sequence
  Description of Artificial Sequence: Synthetic oligonucleotide
  Antisense strand to SEQ ID NO: 2209090
uauuuacuuacaagugugc

SEQ ID NO: 2209092 - RNA, 19 nt, Artificial Sequence
  Description of Artificial Sequence: Synthetic oligonucleotide
  Sense strand starting at position 2281 of SEQ ID NO: 1883681
auguccuggccaugaacau

SEQ ID NO: 2209093 - RNA, 19 nt, Artificial Sequence
  Description of Artificial Sequence: Synthetic oligonucleotide
  Antisense strand to SEQ ID NO: 2209092
auguucauggccaggacau

SEQ ID NO: 2209094 - RNA, 19 nt, Artificial Sequence
  Description of Artificial Sequence: Synthetic oligonucleotide
  Sense strand starting at position 3025 of SEQ ID NO: 1883681
acaaguuaagcuuguauau

SEQ ID NO: 2209095 - RNA, 19 nt, Artificial Sequence
  Description of Artificial Sequence: Synthetic oligonucleotide
  Antisense strand to SEQ ID NO: 2209094
auauacaagcuuaacuugu

SEQ ID NO: 2209096 - RNA, 19 nt, Artificial Sequence
  Description of Artificial Sequence: Synthetic oligonucleotide
  Sense strand starting at position 3743 of SEQ ID NO: 1883681
agguuuauuugggaucuuu

SEQ ID NO: 2209097 - RNA, 19 nt, Artificial Sequence
  Description of Artificial Sequence: Synthetic oligonucleotide
  Antisense strand to SEQ ID NO: 2209096
aaagaucccaaauaaaccu

SEQ ID NO: 2209098 - RNA, 19 nt, Artificial Sequence
  Description of Artificial Sequence: Synthetic oligonucleotide
  Sense strand starting at position 3742 of SEQ ID NO: 1883681
gagguuuauuugggaucuu

SEQ ID NO: 2209099 - RNA, 19 nt, Artificial Sequence
  Description of Artificial Sequence: Synthetic oligonucleotide
  Antisense strand to SEQ ID NO: 2209098
aagaucccaaauaaaccuc

SEQ ID NO: 2209100 - RNA, 19 nt, Artificial Sequence
  Description of Artificial Sequence: Synthetic oligonucleotide
  Sense strand starting at position 3741 of SEQ ID NO: 1883681
ugagguuuauuugggaucu

SEQ ID NO: 2209101 - RNA, 19 nt, Artificial Sequence
  Description of Artificial Sequence: Synthetic oligonucleotide
  Antisense strand to SEQ ID NO: 2209100
agaucccaaauaaaccuca

SEQ ID NO: 2209102 - RNA, 19 nt, Artificial Sequence
  Description of Artificial Sequence: Synthetic oligonucleotide
  Sense strand starting at position 2868 of SEQ ID NO: 1883681
uugcaagaauuacaaagau

SEQ ID NO: 2209103 - RNA, 19 nt, Artificial Sequence
  Description of Artificial Sequence: Synthetic oligonucleotide
  Antisense strand to SEQ ID NO: 2209102
aucuuuguaauucuugcaa

SEQ ID NO: 2209104 - RNA, 19 nt, Artificial Sequence
  Description of Artificial Sequence: Synthetic oligonucleotide
  Sense strand starting at position 670 of SEQ ID NO: 1883681
ggaccauaaugaggucaaa

SEQ ID NO: 2209105 - RNA, 19 nt, Artificial Sequence
  Description of Artificial Sequence: Synthetic oligonucleotide
  Antisense strand to SEQ ID NO: 2209104
uuugaccucauuauggucc

SEQ ID NO: 2209106 - RNA, 19 nt, Artificial Sequence
  Description of Artificial Sequence: Synthetic oligonucleotide
  Sense strand starting at position 1937 of SEQ ID NO: 1883681
ggagcacacuuguaaguaa

SEQ ID NO: 2209107 - RNA, 19 nt, Artificial Sequence
  Description of Artificial Sequence: Synthetic oligonucleotide
  Antisense strand to SEQ ID NO: 2209106
uuacuuacaagugugcucc

SEQ ID NO: 2209108 - RNA, 19 nt, Artificial Sequence
  Description of Artificial Sequence: Synthetic oligonucleotide
  Sense strand starting at position 3027 of SEQ ID NO: 1883681
aaguuaagcuuguauaugu

SEQ ID NO: 2209109 - RNA, 19 nt, Artificial Sequence
  Description of Artificial Sequence: Synthetic oligonucleotide
  Antisense strand to SEQ ID NO: 2209108
acauauacaagcuuaacuu

SEQ ID NO: 2209110 - RNA, 19 nt, Artificial Sequence
  Description of Artificial Sequence: Synthetic oligonucleotide
  Sense strand starting at position 3409 of SEQ ID NO: 1883681
guuucagucuaguggaugu

SEQ ID NO: 2209111 - RNA, 19 nt, Artificial Sequence
  Description of Artificial Sequence: Synthetic oligonucleotide
  Antisense strand to SEQ ID NO: 2209110
acauccacuagacugaaac

SEQ ID NO: 2209112 - RNA, 19 nt, Artificial Sequence
  Description of Artificial Sequence: Synthetic oligonucleotide
  Sense strand starting at position 302 of SEQ ID NO: 1883682
uauuaagcagucuaaugga

SEQ ID NO: 2209113 - RNA, 19 nt, Artificial Sequence
  Description of Artificial Sequence: Synthetic oligonucleotide
  Antisense strand to SEQ ID NO: 2209112
uccauuagacugcuuaaua

SEQ ID NO: 2209114 - RNA, 19 nt, Artificial Sequence
  Description of Artificial Sequence: Synthetic oligonucleotide
  Sense strand starting at position 651 of SEQ ID NO: 1883682
ugaguuuaaguauacugau

SEQ ID NO: 2209115 - RNA, 19 nt, Artificial Sequence
  Description of Artificial Sequence: Synthetic oligonucleotide
  Antisense strand to SEQ ID NO: 2209114
aucaguauacuuaaacuca

SEQ ID NO: 2209116 - RNA, 19 nt, Artificial Sequence
  Description of Artificial Sequence: Synthetic oligonucleotide
  Sense strand starting at position 3750 of SEQ ID NO: 1883682
gauccaucgcaagaucaug

SEQ ID NO: 2209117 - RNA, 19 nt, Artificial Sequence
  Description of Artificial Sequence: Synthetic oligonucleotide
  Antisense strand to SEQ ID NO: 2209116
caugaucuugcgauggauc

SEQ ID NO: 2209118 - RNA, 19 nt, Artificial Sequence
  Description of Artificial Sequence: Synthetic oligonucleotide
  Sense strand starting at position 1320 of SEQ ID NO: 1883682
gaauguuguaagugaaaga

SEQ ID NO: 2209119 - RNA, 19 nt, Artificial Sequence
  Description of Artificial Sequence: Synthetic oligonucleotide
  Antisense strand to SEQ ID NO: 2209118
ucuuucacuuacaacauuc

SEQ ID NO: 2209120 - RNA, 19 nt, Artificial Sequence
  Description of Artificial Sequence: Synthetic oligonucleotide
  Sense strand starting at position 648 of SEQ ID NO: 1883682
agaugaguuuaaguauacu

SEQ ID NO: 2209121 - RNA, 19 nt, Artificial Sequence
  Description of Artificial Sequence: Synthetic oligonucleotide
  Antisense strand to SEQ ID NO: 2209120
aguauacuuaaacucaucu

SEQ ID NO: 2209122 - RNA, 19 nt, Artificial Sequence
  Description of Artificial Sequence: Synthetic oligonucleotide
  Sense strand starting at position 1460 of SEQ ID NO: 1883682
cagcuuuaauggguaggaa

SEQ ID NO: 2209123 - RNA, 19 nt, Artificial Sequence
  Description of Artificial Sequence: Synthetic oligonucleotide
  Antisense strand to SEQ ID NO: 2209122
uuccuacccauuaaagcug

SEQ ID NO: 2209124 - RNA, 19 nt, Artificial Sequence
  Description of Artificial Sequence: Synthetic oligonucleotide
  Sense strand starting at position 1311 of SEQ ID NO: 1883682
ggaccucaagaauguugua

SEQ ID NO: 2209125 - RNA, 19 nt, Artificial Sequence
  Description of Artificial Sequence: Synthetic oligonucleotide
  Antisense strand to SEQ ID NO: 2209124
uacaacauucuugaggucc

SEQ ID NO: 2209126 - RNA, 19 nt, Artificial Sequence
  Description of Artificial Sequence: Synthetic oligonucleotide
  Sense strand starting at position 3923 of SEQ ID NO: 1883682
gagaucaguuggguuccaa

SEQ ID NO: 2209127 - RNA, 19 nt, Artificial Sequence
  Description of Artificial Sequence: Synthetic oligonucleotide
  Antisense strand to SEQ ID NO: 2209126
uuggaacccaacugaucuc

SEQ ID NO: 2209128 - RNA, 19 nt, Artificial Sequence
  Description of Artificial Sequence: Synthetic oligonucleotide
  Sense strand starting at position 3756 of SEQ ID NO: 1883682
ucgcaagaucaugggauga

SEQ ID NO: 2209129 - RNA, 19 nt, Artificial Sequence
  Description of Artificial Sequence: Synthetic oligonucleotide
  Antisense strand to SEQ ID NO: 2209128
ucaucccaugaucuugcga

SEQ ID NO: 2209130 - RNA, 19 nt, Artificial Sequence
  Description of Artificial Sequence: Synthetic oligonucleotide
  Sense strand starting at position 796 of SEQ ID NO: 1883682
ucaggcuuuguauauauua

SEQ ID NO: 2209131 - RNA, 19 nt, Artificial Sequence
  Description of Artificial Sequence: Synthetic oligonucleotide
  Antisense strand to SEQ ID NO: 2209130
uaauauauacaaagccuga

SEQ ID NO: 2209132 - RNA, 19 nt, Artificial Sequence
  Description of Artificial Sequence: Synthetic oligonucleotide
  Sense strand starting at position 2921 of SEQ ID NO: 1883682
agaaguguaggcgaaguaa

SEQ ID NO: 2209133 - RNA, 19 nt, Artificial Sequence
  Description of Artificial Sequence: Synthetic oligonucleotide
  Antisense strand to SEQ ID NO: 2209132
uuacuucgccuacacuucu

SEQ ID NO: 2209134 - RNA, 19 nt, Artificial Sequence
  Description of Artificial Sequence: Synthetic oligonucleotide
  Sense strand starting at position 3656 of SEQ ID NO: 1883682
guaaaucagcgugauggga

SEQ ID NO: 2209135 - RNA, 19 nt, Artificial Sequence
  Description of Artificial Sequence: Synthetic oligonucleotide
  Antisense strand to SEQ ID NO: 2209134
ucccaucacgcugauuuac

SEQ ID NO: 2209136 - RNA, 19 nt, Artificial Sequence
  Description of Artificial Sequence: Synthetic oligonucleotide
  Sense strand starting at position 2844 of SEQ ID NO: 1883682
gggagacuucugugcagag

SEQ ID NO: 2209137 - RNA, 19 nt, Artificial Sequence
  Description of Artificial Sequence: Synthetic oligonucleotide
  Antisense strand to SEQ ID NO: 2209136
cucugcacagaagucuccc

SEQ ID NO: 2209138 - RNA, 19 nt, Artificial Sequence
  Description of Artificial Sequence: Synthetic oligonucleotide
  Sense strand starting at position 2882 of SEQ ID NO: 1883682
gaguaugugaccuggagca

SEQ ID NO: 2209139 - RNA, 19 nt, Artificial Sequence
  Description of Artificial Sequence: Synthetic oligonucleotide
  Antisense strand to SEQ ID NO: 2209138
ugcuccaggucacauacuc

SEQ ID NO: 2209140 - RNA, 19 nt, Artificial Sequence
  Description of Artificial Sequence: Synthetic oligonucleotide
  Sense strand starting at position 664 of SEQ ID NO: 1883682
acugauuugugugauaaau

SEQ ID NO: 2209141 - RNA, 19 nt, Artificial Sequence
  Description of Artificial Sequence: Synthetic oligonucleotide
  Antisense strand to SEQ ID NO: 2209140
auuuaucacacaaaucagu

SEQ ID NO: 2209142 - RNA, 19 nt, Artificial Sequence
  Description of Artificial Sequence: Synthetic oligonucleotide
  Sense strand starting at position 3896 of SEQ ID NO: 1883682
gugacucuuucccuaaagu

SEQ ID NO: 2209143 - RNA, 19 nt, Artificial Sequence
  Description of Artificial Sequence: Synthetic oligonucleotide
  Antisense strand to SEQ ID NO: 2209142
acuuuagggaaagagucac

SEQ ID NO: 2209144 - RNA, 19 nt, Artificial Sequence
  Description of Artificial Sequence: Synthetic oligonucleotide
  Sense strand starting at position 906 of SEQ ID NO: 1883682
acugaaugucucugugagu

SEQ ID NO: 2209145 - RNA, 19 nt, Artificial Sequence
  Description of Artificial Sequence: Synthetic oligonucleotide
  Antisense strand to SEQ ID NO: 2209144
acucacagagacauucagu

SEQ ID NO: 2209146 - RNA, 19 nt, Artificial Sequence
  Description of Artificial Sequence: Synthetic oligonucleotide
  Sense strand starting at position 3855 of SEQ ID NO: 1883682
auugauagcguaugugaca

SEQ ID NO: 2209147 - RNA, 19 nt, Artificial Sequence
  Description of Artificial Sequence: Synthetic oligonucleotide
  Antisense strand to SEQ ID NO: 2209146
ugucacauacgcuaucaau

SEQ ID NO: 2209148 - RNA, 19 nt, Artificial Sequence
  Description of Artificial Sequence: Synthetic oligonucleotide
  Sense strand starting at position 3758 of SEQ ID NO: 1883682
gcaagaucaugggaugaaa

SEQ ID NO: 2209149 - RNA, 19 nt, Artificial Sequence
  Description of Artificial Sequence: Synthetic oligonucleotide
  Antisense strand to SEQ ID NO: 2209148
uuucaucccaugaucuugc

SEQ ID NO: 2209150 - RNA, 19 nt, Artificial Sequence
  Description of Artificial Sequence: Synthetic oligonucleotide
  Sense strand starting at position 3892 of SEQ ID NO: 1883682
agcugugacucuuucccua

SEQ ID NO: 2209151 - RNA, 19 nt, Artificial Sequence
  Description of Artificial Sequence: Synthetic oligonucleotide
  Antisense strand to SEQ ID NO: 2209150
uagggaaagagucacagcu

SEQ ID NO: 2209152 - RNA, 19 nt, Artificial Sequence
  Description of Artificial Sequence: Synthetic oligonucleotide
  Sense strand starting at position 1479 of SEQ ID NO: 1883682
gagauuuccuucugaggug

SEQ ID NO: 2209153 - RNA, 19 nt, Artificial Sequence
  Description of Artificial Sequence: Synthetic oligonucleotide
  Antisense strand to SEQ ID NO: 2209152
caccucagaaggaaaucuc

SEQ ID NO: 2209154 - RNA, 19 nt, Artificial Sequence
  Description of Artificial Sequence: Synthetic oligonucleotide
  Sense strand starting at position 3653 of SEQ ID NO: 1883682
ccuguaaaucagcgugaug

SEQ ID NO: 2209155 - RNA, 19 nt, Artificial Sequence
  Description of Artificial Sequence: Synthetic oligonucleotide
  Antisense strand to SEQ ID NO: 2209154
caucacgcugauuuacagg

SEQ ID NO: 2209156 - RNA, 19 nt, Artificial Sequence
  Description of Artificial Sequence: Synthetic oligonucleotide
  Sense strand starting at position 1411 of SEQ ID NO: 1883682
gcagacuagugguugccau

SEQ ID NO: 2209157 - RNA, 19 nt, Artificial Sequence
  Description of Artificial Sequence: Synthetic oligonucleotide
  Antisense strand to SEQ ID NO: 2209156
auggcaaccacuagucugc

SEQ ID NO: 2209158 - RNA, 19 nt, Artificial Sequence
  Description of Artificial Sequence: Synthetic oligonucleotide
  Sense strand starting at position 661 of SEQ ID NO: 1883682
uauacugauuugugugaua

SEQ ID NO: 2209159 - RNA, 19 nt, Artificial Sequence
  Description of Artificial Sequence: Synthetic oligonucleotide
  Antisense strand to SEQ ID NO: 2209158
uaucacacaaaucaguaua

SEQ ID NO: 2209160 - RNA, 19 nt, Artificial Sequence
  Description of Artificial Sequence: Synthetic oligonucleotide
  Sense strand starting at position 654 of SEQ ID NO: 1883682
guuuaaguauacugauuug

SEQ ID NO: 2209161 - RNA, 19 nt, Artificial Sequence
  Description of Artificial Sequence: Synthetic oligonucleotide
  Antisense strand to SEQ ID NO: 2209160
caaaucaguauacuuaaac

SEQ ID NO: 2209162 - RNA, 19 nt, Artificial Sequence
  Description of Artificial Sequence: Synthetic oligonucleotide
  Sense strand starting at position 2119 of SEQ ID NO: 1883682
gcauguauguucucucauu

SEQ ID NO: 2209163 - RNA, 19 nt, Artificial Sequence
  Description of Artificial Sequence: Synthetic oligonucleotide
  Antisense strand to SEQ ID NO: 2209162
aaugagagaacauacaugc

SEQ ID NO: 2209164 - RNA, 19 nt, Artificial Sequence
  Description of Artificial Sequence: Synthetic oligonucleotide
  Sense strand starting at position 3779 of SEQ ID NO: 1883682
agcaguaguccacggugau

SEQ ID NO: 2209165 - RNA, 19 nt, Artificial Sequence
  Description of Artificial Sequence: Synthetic oligonucleotide
  Antisense strand to SEQ ID NO: 2209164
aucaccguggacuacugcu

SEQ ID NO: 2209166 - RNA, 19 nt, Artificial Sequence
  Description of Artificial Sequence: Synthetic oligonucleotide
  Sense strand starting at position 2951 of SEQ ID NO: 1883682
cagcguaggucuguccaga

SEQ ID NO: 2209167 - RNA, 19 nt, Artificial Sequence
  Description of Artificial Sequence: Synthetic oligonucleotide
  Antisense strand to SEQ ID NO: 2209166
ucuggacagaccuacgcug

SEQ ID NO: 2209168 - RNA, 19 nt, Artificial Sequence
  Description of Artificial Sequence: Synthetic oligonucleotide
  Sense strand starting at position 3780 of SEQ ID NO: 1883682
gcaguaguccacggugauu

SEQ ID NO: 2209169 - RNA, 19 nt, Artificial Sequence
  Description of Artificial Sequence: Synthetic oligonucleotide
  Antisense strand to SEQ ID NO: 2209168
aaucaccguggacuacugc

SEQ ID NO: 2209170 - RNA, 19 nt, Artificial Sequence
  Description of Artificial Sequence: Synthetic oligonucleotide
  Sense strand starting at position 3652 of SEQ ID NO: 1883682
gccuguaaaucagcgugau

SEQ ID NO: 2209171 - RNA, 19 nt, Artificial Sequence
  Description of Artificial Sequence: Synthetic oligonucleotide
  Antisense strand to SEQ ID NO: 2209170
aucacgcugauuuacaggc

SEQ ID NO: 2209172 - RNA, 19 nt, Artificial Sequence
  Description of Artificial Sequence: Synthetic oligonucleotide
  Sense strand starting at position 3747 of SEQ ID NO: 1883682
agggauccaucgcaagauc

SEQ ID NO: 2209173 - RNA, 19 nt, Artificial Sequence
  Description of Artificial Sequence: Synthetic oligonucleotide
  Antisense strand to SEQ ID NO: 2209172
gaucuugcgauggaucccu

SEQ ID NO: 2209174 - RNA, 19 nt, Artificial Sequence
  Description of Artificial Sequence: Synthetic oligonucleotide
  Sense strand starting at position 1316 of SEQ ID NO: 1883682
ucaagaauguuguaaguga

SEQ ID NO: 2209175 - RNA, 19 nt, Artificial Sequence
  Description of Artificial Sequence: Synthetic oligonucleotide
  Antisense strand to SEQ ID NO: 2209174
ucacuuacaacauucuuga

SEQ ID NO: 2209176 - RNA, 19 nt, Artificial Sequence
  Description of Artificial Sequence: Synthetic oligonucleotide
  Sense strand starting at position 3860 of SEQ ID NO: 1883682
uagcguaugugacaccaaa

SEQ ID NO: 2209177 - RNA, 19 nt, Artificial Sequence
  Description of Artificial Sequence: Synthetic oligonucleotide
  Antisense strand to SEQ ID NO: 2209176
uuuggugucacauacgcua

SEQ ID NO: 2209178 - RNA, 19 nt, Artificial Sequence
  Description of Artificial Sequence: Synthetic oligonucleotide
  Sense strand starting at position 3927 of SEQ ID NO: 1883682
ucaguuggguuccaagcau

SEQ ID NO: 2209179 - RNA, 19 nt, Artificial Sequence
  Description of Artificial Sequence: Synthetic oligonucleotide
  Antisense strand to SEQ ID NO: 2209178
augcuuggaacccaacuga

SEQ ID NO: 2209180 - RNA, 19 nt, Artificial Sequence
  Description of Artificial Sequence: Synthetic oligonucleotide
  Sense strand starting at position 3848 of SEQ ID NO: 1883682
ggguauuauugauagcgua

SEQ ID NO: 2209181 - RNA, 19 nt, Artificial Sequence
  Description of Artificial Sequence: Synthetic oligonucleotide
  Antisense strand to SEQ ID NO: 2209180
uacgcuaucaauaauaccc

SEQ ID NO: 2209182 - RNA, 19 nt, Artificial Sequence
  Description of Artificial Sequence: Synthetic oligonucleotide
  Sense strand starting at position 1314 of SEQ ID NO: 1883682
ccucaagaauguuguaagu

SEQ ID NO: 2209183 - RNA, 19 nt, Artificial Sequence
  Description of Artificial Sequence: Synthetic oligonucleotide
  Antisense strand to SEQ ID NO: 2209182
acuuacaacauucuugagg

SEQ ID NO: 2209184 - RNA, 19 nt, Artificial Sequence
  Description of Artificial Sequence: Synthetic oligonucleotide
  Sense strand starting at position 3851 of SEQ ID NO: 1883682
uauuauugauagcguaugu

SEQ ID NO: 2209185 - RNA, 19 nt, Artificial Sequence
  Description of Artificial Sequence: Synthetic oligonucleotide
  Antisense strand to SEQ ID NO: 2209184
acauacgcuaucaauaaua

SEQ ID NO: 2209186 - RNA, 19 nt, Artificial Sequence
  Description of Artificial Sequence: Synthetic oligonucleotide
  Sense strand starting at position 1497 of SEQ ID NO: 1883683
ccguaauauuuggauuuag

SEQ ID NO: 2209187 - RNA, 19 nt, Artificial Sequence
  Description of Artificial Sequence: Synthetic oligonucleotide
  Antisense strand to SEQ ID NO: 2209186
cuaaauccaaauauuacgg

SEQ ID NO: 2209188 - RNA, 19 nt, Artificial Sequence
  Description of Artificial Sequence: Synthetic oligonucleotide
  Sense strand starting at position 3234 of SEQ ID NO: 1883683
cggauuugccgucacugaa

SEQ ID NO: 2209189 - RNA, 19 nt, Artificial Sequence
  Description of Artificial Sequence: Synthetic oligonucleotide
  Antisense strand to SEQ ID NO: 2209188
uucagugacggcaaauccg

SEQ ID NO: 2209190 - RNA, 19 nt, Artificial Sequence
  Description of Artificial Sequence: Synthetic oligonucleotide
  Sense strand starting at position 1588 of SEQ ID NO: 1883683
acaagaggccaguaguuaa

SEQ ID NO: 2209191 - RNA, 19 nt, Artificial Sequence
  Description of Artificial Sequence: Synthetic oligonucleotide
  Antisense strand to SEQ ID NO: 2209190
uuaacuacuggccucuugu

SEQ ID NO: 2209192 - RNA, 19 nt, Artificial Sequence
  Description of Artificial Sequence: Synthetic oligonucleotide
  Sense strand starting at position 2031 of SEQ ID NO: 1883683
gccggugucaauguaagca

SEQ ID NO: 2209193 - RNA, 19 nt, Artificial Sequence
  Description of Artificial Sequence: Synthetic oligonucleotide
  Antisense strand to SEQ ID NO: 2209192
ugcuuacauugacaccggc

SEQ ID NO: 2209194 - RNA, 19 nt, Artificial Sequence
  Description of Artificial Sequence: Synthetic oligonucleotide
  Sense strand starting at position 839 of SEQ ID NO: 1883683
cguaaucugccugcuucua

SEQ ID NO: 2209195 - RNA, 19 nt, Artificial Sequence
  Description of Artificial Sequence: Synthetic oligonucleotide
  Antisense strand to SEQ ID NO: 2209194
uagaagcaggcagauuacg

SEQ ID NO: 2209196 - RNA, 19 nt, Artificial Sequence
  Description of Artificial Sequence: Synthetic oligonucleotide
  Sense strand starting at position 2990 of SEQ ID NO: 1883683
agaaaugaaucaguuuagu

SEQ ID NO: 2209197 - RNA, 19 nt, Artificial Sequence
  Description of Artificial Sequence: Synthetic oligonucleotide
  Antisense strand to SEQ ID NO: 2209196
acuaaacugauucauuucu

SEQ ID NO: 2209198 - RNA, 19 nt, Artificial Sequence
  Description of Artificial Sequence: Synthetic oligonucleotide
  Sense strand starting at position 2376 of SEQ ID NO: 1883683
gggaaagugcaucauguac

SEQ ID NO: 2209199 - RNA, 19 nt, Artificial Sequence
  Description of Artificial Sequence: Synthetic oligonucleotide
  Antisense strand to SEQ ID NO: 2209198
guacaugaugcacuuuccc

SEQ ID NO: 2209200 - RNA, 19 nt, Artificial Sequence
  Description of Artificial Sequence: Synthetic oligonucleotide
  Sense strand starting at position 3932 of SEQ ID NO: 1883683
acucuagacgguuacuauu

SEQ ID NO: 2209201 - RNA, 19 nt, Artificial Sequence
  Description of Artificial Sequence: Synthetic oligonucleotide
  Antisense strand to SEQ ID NO: 2209200
aauaguaaccgucuagagu

SEQ ID NO: 2209202 - RNA, 19 nt, Artificial Sequence
  Description of Artificial Sequence: Synthetic oligonucleotide
  Sense strand starting at position 1496 of SEQ ID NO: 1883683
accguaauauuuggauuua

SEQ ID NO: 2209203 - RNA, 19 nt, Artificial Sequence
  Description of Artificial Sequence: Synthetic oligonucleotide
  Antisense strand to SEQ ID NO: 2209202
uaaauccaaauauuacggu

SEQ ID NO: 2209204 - RNA, 19 nt, Artificial Sequence
  Description of Artificial Sequence: Synthetic oligonucleotide
  Sense strand starting at position 3644 of SEQ ID NO: 1883683
ugggaagcauugguuaaau

SEQ ID NO: 2209205 - RNA, 19 nt, Artificial Sequence
  Description of Artificial Sequence: Synthetic oligonucleotide
  Antisense strand to SEQ ID NO: 2209204
auuuaaccaaugcuuccca

SEQ ID NO: 2209206 - RNA, 19 nt, Artificial Sequence
  Description of Artificial Sequence: Synthetic oligonucleotide
  Sense strand starting at position 2756 of SEQ ID NO: 1883683
cagugaggucuggaguuca

SEQ ID NO: 2209207 - RNA, 19 nt, Artificial Sequence
  Description of Artificial Sequence: Synthetic oligonucleotide
  Antisense strand to SEQ ID NO: 2209206
ugaacuccagaccucacug

SEQ ID NO: 2209208 - RNA, 19 nt, Artificial Sequence
  Description of Artificial Sequence: Synthetic oligonucleotide
  Sense strand starting at position 1151 of SEQ ID NO: 1883683
guccuaucuguugauaacu

SEQ ID NO: 2209209 - RNA, 19 nt, Artificial Sequence
  Description of Artificial Sequence: Synthetic oligonucleotide
  Antisense strand to SEQ ID NO: 2209208
aguuaucaacagauaggac

SEQ ID NO: 2209210 - RNA, 19 nt, Artificial Sequence
  Description of Artificial Sequence: Synthetic oligonucleotide
  Sense strand starting at position 1094 of SEQ ID NO: 1883683
acauuucgguaagaauaca

SEQ ID NO: 2209211 - RNA, 19 nt, Artificial Sequence
  Description of Artificial Sequence: Synthetic oligonucleotide
  Antisense strand to SEQ ID NO: 2209210
uguauucuuaccgaaaugu

SEQ ID NO: 2209212 - RNA, 19 nt, Artificial Sequence
  Description of Artificial Sequence: Synthetic oligonucleotide
  Sense strand starting at position 1785 of SEQ ID NO: 1883683
gucucaaauccaugggcuu

SEQ ID NO: 2209213 - RNA, 19 nt, Artificial Sequence
  Description of Artificial Sequence: Synthetic oligonucleotide
  Antisense strand to SEQ ID NO: 2209212
aagcccauggauuugagac

SEQ ID NO: 2209214 - RNA, 19 nt, Artificial Sequence
  Description of Artificial Sequence: Synthetic oligonucleotide
  Sense strand starting at position 1148 of SEQ ID NO: 1883683
uuuguccuaucuguugaua

SEQ ID NO: 2209215 - RNA, 19 nt, Artificial Sequence
  Description of Artificial Sequence: Synthetic oligonucleotide
  Antisense strand to SEQ ID NO: 2209214
uaucaacagauaggacaaa

SEQ ID NO: 2209216 - RNA, 19 nt, Artificial Sequence
  Description of Artificial Sequence: Synthetic oligonucleotide
  Sense strand starting at position 1773 of SEQ ID NO: 1883683
gcuggaagcucagucucaa

SEQ ID NO: 2209217 - RNA, 19 nt, Artificial Sequence
  Description of Artificial Sequence: Synthetic oligonucleotide
  Antisense strand to SEQ ID NO: 2209216
uugagacugagcuuccagc

SEQ ID NO: 2209218 - RNA, 19 nt, Artificial Sequence
  Description of Artificial Sequence: Synthetic oligonucleotide
  Sense strand starting at position 3265 of SEQ ID NO: 1883683
ccaacuguugcagguauua

SEQ ID NO: 2209219 - RNA, 19 nt, Artificial Sequence
  Description of Artificial Sequence: Synthetic oligonucleotide
  Antisense strand to SEQ ID NO: 2209218
uaauaccugcaacaguugg

SEQ ID NO: 2209220 - RNA, 19 nt, Artificial Sequence
  Description of Artificial Sequence: Synthetic oligonucleotide
  Sense strand starting at position 1633 of SEQ ID NO: 1883683
aguuaagauggucguucau

SEQ ID NO: 2209221 - RNA, 19 nt, Artificial Sequence
  Description of Artificial Sequence: Synthetic oligonucleotide
  Antisense strand to SEQ ID NO: 2209220
augaacgaccaucuuaacu

SEQ ID NO: 2209222 - RNA, 19 nt, Artificial Sequence
  Description of Artificial Sequence: Synthetic oligonucleotide
  Sense strand starting at position 646 of SEQ ID NO: 1883683
gccugcuuugcucaauuaa

SEQ ID NO: 2209223 - RNA, 19 nt, Artificial Sequence
  Description of Artificial Sequence: Synthetic oligonucleotide
  Antisense strand to SEQ ID NO: 2209222
uuaauugagcaaagcaggc

SEQ ID NO: 2209224 - RNA, 19 nt, Artificial Sequence
  Description of Artificial Sequence: Synthetic oligonucleotide
  Sense strand starting at position 1089 of SEQ ID NO: 1883683
auauuacauuucgguaaga

SEQ ID NO: 2209225 - RNA, 19 nt, Artificial Sequence
  Description of Artificial Sequence: Synthetic oligonucleotide
  Antisense strand to SEQ ID NO: 2209224
ucuuaccgaaauguaauau

SEQ ID NO: 2209226 - RNA, 19 nt, Artificial Sequence
  Description of Artificial Sequence: Synthetic oligonucleotide
  Sense strand starting at position 1635 of SEQ ID NO: 1883683
uuaagauggucguucaugu

SEQ ID NO: 2209227 - RNA, 19 nt, Artificial Sequence
  Description of Artificial Sequence: Synthetic oligonucleotide
  Antisense strand to SEQ ID NO: 2209226
acaugaacgaccaucuuaa

SEQ ID NO: 2209228 - RNA, 19 nt, Artificial Sequence
  Description of Artificial Sequence: Synthetic oligonucleotide
  Sense strand starting at position 458 of SEQ ID NO: 1883683
augucuauuugguagcuua

SEQ ID NO: 2209229 - RNA, 19 nt, Artificial Sequence
  Description of Artificial Sequence: Synthetic oligonucleotide
  Antisense strand to SEQ ID NO: 2209228
uaagcuaccaaauagacau

SEQ ID NO: 2209230 - RNA, 19 nt, Artificial Sequence
  Description of Artificial Sequence: Synthetic oligonucleotide
  Sense strand starting at position 681 of SEQ ID NO: 1883683
aggauuugcuguggaaugu

SEQ ID NO: 2209231 - RNA, 19 nt, Artificial Sequence
  Description of Artificial Sequence: Synthetic oligonucleotide
  Antisense strand to SEQ ID NO: 2209230
acauuccacagcaaauccu

SEQ ID NO: 2209232 - RNA, 19 nt, Artificial Sequence
  Description of Artificial Sequence: Synthetic oligonucleotide
  Sense strand starting at position 2330 of SEQ ID NO: 1883683
ucugacuguucugagauaa

SEQ ID NO: 2209233 - RNA, 19 nt, Artificial Sequence
  Description of Artificial Sequence: Synthetic oligonucleotide
  Antisense strand to SEQ ID NO: 2209232
uuaucucagaacagucaga

SEQ ID NO: 2209234 - RNA, 19 nt, Artificial Sequence
  Description of Artificial Sequence: Synthetic oligonucleotide
  Sense strand starting at position 2174 of SEQ ID NO: 1883683
agucaaguuugggaacauu

SEQ ID NO: 2209235 - RNA, 19 nt, Artificial Sequence
  Description of Artificial Sequence: Synthetic oligonucleotide
  Antisense strand to SEQ ID NO: 2209234
aauguucccaaacuugacu

SEQ ID NO: 2209236 - RNA, 19 nt, Artificial Sequence
  Description of Artificial Sequence: Synthetic oligonucleotide
  Sense strand starting at position 838 of SEQ ID NO: 1883683
acguaaucugccugcuucu

SEQ ID NO: 2209237 - RNA, 19 nt, Artificial Sequence
  Description of Artificial Sequence: Synthetic oligonucleotide
  Antisense strand to SEQ ID NO: 2209236
agaagcaggcagauuacgu

SEQ ID NO: 2209238 - RNA, 19 nt, Artificial Sequence
  Description of Artificial Sequence: Synthetic oligonucleotide
  Sense strand starting at position 3212 of SEQ ID NO: 1883683
ggaacaaacugaugugcaa

SEQ ID NO: 2209239 - RNA, 19 nt, Artificial Sequence
  Description of Artificial Sequence: Synthetic oligonucleotide
  Antisense strand to SEQ ID NO: 2209238
uugcacaucaguuuguucc

SEQ ID NO: 2209240 - RNA, 19 nt, Artificial Sequence
  Description of Artificial Sequence: Synthetic oligonucleotide
  Sense strand starting at position 2173 of SEQ ID NO: 1883683
cagucaaguuugggaacau

SEQ ID NO: 2209241 - RNA, 19 nt, Artificial Sequence
  Description of Artificial Sequence: Synthetic oligonucleotide
  Antisense strand to SEQ ID NO: 2209240
auguucccaaacuugacug

SEQ ID NO: 2209242 - RNA, 19 nt, Artificial Sequence
  Description of Artificial Sequence: Synthetic oligonucleotide
  Sense strand starting at position 2329 of SEQ ID NO: 1883683
uucugacuguucugagaua

SEQ ID NO: 2209243 - RNA, 19 nt, Artificial Sequence
  Description of Artificial Sequence: Synthetic oligonucleotide
  Antisense strand to SEQ ID NO: 2209242
uaucucagaacagucagaa

SEQ ID NO: 2209244 - RNA, 19 nt, Artificial Sequence
  Description of Artificial Sequence: Synthetic oligonucleotide
  Sense strand starting at position 2320 of SEQ ID NO: 1883683
gaaccugacuucugacugu

SEQ ID NO: 2209245 - RNA, 19 nt, Artificial Sequence
  Description of Artificial Sequence: Synthetic oligonucleotide
  Antisense strand to SEQ ID NO: 2209244
acagucagaagucagguuc

SEQ ID NO: 2209246 - RNA, 19 nt, Artificial Sequence
  Description of Artificial Sequence: Synthetic oligonucleotide
  Sense strand starting at position 970 of SEQ ID NO: 1883683
gagugccacuuaggauuaa

SEQ ID NO: 2209247 - RNA, 19 nt, Artificial Sequence
  Description of Artificial Sequence: Synthetic oligonucleotide
  Antisense strand to SEQ ID NO: 2209246
uuaauccuaaguggcacuc

SEQ ID NO: 2209248 - RNA, 19 nt, Artificial Sequence
  Description of Artificial Sequence: Synthetic oligonucleotide
  Sense strand starting at position 585 of SEQ ID NO: 1883683
gcacaauuaugcuacaagu

SEQ ID NO: 2209249 - RNA, 19 nt, Artificial Sequence
  Description of Artificial Sequence: Synthetic oligonucleotide
  Antisense strand to SEQ ID NO: 2209248
acuuguagcauaauugugc

SEQ ID NO: 2209250 - RNA, 19 nt, Artificial Sequence
  Description of Artificial Sequence: Synthetic oligonucleotide
  Sense strand starting at position 2172 of SEQ ID NO: 1883683
gcagucaaguuugggaaca

SEQ ID NO: 2209251 - RNA, 19 nt, Artificial Sequence
  Description of Artificial Sequence: Synthetic oligonucleotide
  Antisense strand to SEQ ID NO: 2209250
uguucccaaacuugacugc

SEQ ID NO: 2209252 - RNA, 19 nt, Artificial Sequence
  Description of Artificial Sequence: Synthetic oligonucleotide
  Sense strand starting at position 1150 of SEQ ID NO: 1883683
uguccuaucuguugauaac

SEQ ID NO: 2209253 - RNA, 19 nt, Artificial Sequence
  Description of Artificial Sequence: Synthetic oligonucleotide
  Antisense strand to SEQ ID NO: 2209252
guuaucaacagauaggaca

SEQ ID NO: 2209254 - RNA, 19 nt, Artificial Sequence
  Description of Artificial Sequence: Synthetic oligonucleotide
  Sense strand starting at position 1300 of SEQ ID NO: 1883684
ucugcuucccaggagacaa

SEQ ID NO: 2209255 - RNA, 19 nt, Artificial Sequence
  Description of Artificial Sequence: Synthetic oligonucleotide
  Antisense strand to SEQ ID NO: 2209254
uugucuccugggaagcaga

SEQ ID NO: 2209256 - RNA, 19 nt, Artificial Sequence
  Description of Artificial Sequence: Synthetic oligonucleotide
  Sense strand starting at position 1586 of SEQ ID NO: 1883684
gauggaaaucccuguacac

SEQ ID NO: 2209257 - RNA, 19 nt, Artificial Sequence
  Description of Artificial Sequence: Synthetic oligonucleotide
  Antisense strand to SEQ ID NO: 2209256
guguacagggauuuccauc

SEQ ID NO: 2209258 - RNA, 19 nt, Artificial Sequence
  Description of Artificial Sequence: Synthetic oligonucleotide
  Sense strand starting at position 2315 of SEQ ID NO: 1883684
ugaaguugacucugaaauu

SEQ ID NO: 2209259 - RNA, 19 nt, Artificial Sequence
  Description of Artificial Sequence: Synthetic oligonucleotide
  Antisense strand to SEQ ID NO: 2209258
aauuucagagucaacuuca

SEQ ID NO: 2209260 - RNA, 19 nt, Artificial Sequence
  Description of Artificial Sequence: Synthetic oligonucleotide
  Sense strand starting at position 1469 of SEQ ID NO: 1883684
ccugucucaugaccagaga

SEQ ID NO: 2209261 - RNA, 19 nt, Artificial Sequence
  Description of Artificial Sequence: Synthetic oligonucleotide
  Antisense strand to SEQ ID NO: 2209260
ucucuggucaugagacagg

SEQ ID NO: 2209262 - RNA, 19 nt, Artificial Sequence
  Description of Artificial Sequence: Synthetic oligonucleotide
  Sense strand starting at position 3446 of SEQ ID NO: 1883684
augaccucuuugucagaua

SEQ ID NO: 2209263 - RNA, 19 nt, Artificial Sequence
  Description of Artificial Sequence: Synthetic oligonucleotide
  Antisense strand to SEQ ID NO: 2209262
uaucugacaaagaggucau

SEQ ID NO: 2209264 - RNA, 19 nt, Artificial Sequence
  Description of Artificial Sequence: Synthetic oligonucleotide
  Sense strand starting at position 3444 of SEQ ID NO: 1883684
auaugaccucuuugucaga

SEQ ID NO: 2209265 - RNA, 19 nt, Artificial Sequence
  Description of Artificial Sequence: Synthetic oligonucleotide
  Antisense strand to SEQ ID NO: 2209264
ucugacaaagaggucauau

SEQ ID NO: 2209266 - RNA, 19 nt, Artificial Sequence
  Description of Artificial Sequence: Synthetic oligonucleotide
  Sense strand starting at position 1282 of SEQ ID NO: 1883684
ugagcugucagguaggauu

SEQ ID NO: 2209267 - RNA, 19 nt, Artificial Sequence
  Description of Artificial Sequence: Synthetic oligonucleotide
  Antisense strand to SEQ ID NO: 2209266
aauccuaccugacagcuca

SEQ ID NO: 2209268 - RNA, 19 nt, Artificial Sequence
  Description of Artificial Sequence: Synthetic oligonucleotide
  Sense strand starting at position 2316 of SEQ ID NO: 1883684
gaaguugacucugaaauuu

SEQ ID NO: 2209269 - RNA, 19 nt, Artificial Sequence
  Description of Artificial Sequence: Synthetic oligonucleotide
  Antisense strand to SEQ ID NO: 2209268
aaauuucagagucaacuuc

SEQ ID NO: 2209270 - RNA, 19 nt, Artificial Sequence
  Description of Artificial Sequence: Synthetic oligonucleotide
  Sense strand starting at position 1659 of SEQ ID NO: 1883684
ccggucucuccugagacuu

SEQ ID NO: 2209271 - RNA, 19 nt, Artificial Sequence
  Description of Artificial Sequence: Synthetic oligonucleotide
  Antisense strand to SEQ ID NO: 2209270
aagucucaggagagaccgg

SEQ ID NO: 2209272 - RNA, 19 nt, Artificial Sequence
  Description of Artificial Sequence: Synthetic oligonucleotide
  Sense strand starting at position 63 of SEQ ID NO: 1883684
guguauguuucuucaggga

SEQ ID NO: 2209273 - RNA, 19 nt, Artificial Sequence
  Description of Artificial Sequence: Synthetic oligonucleotide
  Antisense strand to SEQ ID NO: 2209272
ucccugaagaaacauacac

SEQ ID NO: 2209274 - RNA, 19 nt, Artificial Sequence
  Description of Artificial Sequence: Synthetic oligonucleotide
  Sense strand starting at position 1424 of SEQ ID NO: 1883684
gcugaugagccagggcuua

SEQ ID NO: 2209275 - RNA, 19 nt, Artificial Sequence
  Description of Artificial Sequence: Synthetic oligonucleotide
  Antisense strand to SEQ ID NO: 2209274
uaagcccuggcucaucagc

SEQ ID NO: 2209276 - RNA, 19 nt, Artificial Sequence
  Description of Artificial Sequence: Synthetic oligonucleotide
  Sense strand starting at position 2176 of SEQ ID NO: 1883684
ucuccuucccgcuaaguuu

SEQ ID NO: 2209277 - RNA, 19 nt, Artificial Sequence
  Description of Artificial Sequence: Synthetic oligonucleotide
  Antisense strand to SEQ ID NO: 2209276
aaacuuagcgggaaggaga

SEQ ID NO: 2209278 - RNA, 19 nt, Artificial Sequence
  Description of Artificial Sequence: Synthetic oligonucleotide
  Sense strand starting at position 779 of SEQ ID NO: 1883684
cugugugcuuccucccauu

SEQ ID NO: 2209279 - RNA, 19 nt, Artificial Sequence
  Description of Artificial Sequence: Synthetic oligonucleotide
  Antisense strand to SEQ ID NO: 2209278
aaugggaggaagcacacag

SEQ ID NO: 2209280 - RNA, 19 nt, Artificial Sequence
  Description of Artificial Sequence: Synthetic oligonucleotide
  Sense strand starting at position 560 of SEQ ID NO: 1883684
agccuuaccucugaagacu

SEQ ID NO: 2209281 - RNA, 19 nt, Artificial Sequence
  Description of Artificial Sequence: Synthetic oligonucleotide
  Antisense strand to SEQ ID NO: 2209280
agucuucagagguaaggcu

SEQ ID NO: 2209282 - RNA, 19 nt, Artificial Sequence
  Description of Artificial Sequence: Synthetic oligonucleotide
  Sense strand starting at position 3447 of SEQ ID NO: 1883684
ugaccucuuugucagauau

SEQ ID NO: 2209283 - RNA, 19 nt, Artificial Sequence
  Description of Artificial Sequence: Synthetic oligonucleotide
  Antisense strand to SEQ ID NO: 2209282
auaucugacaaagagguca

SEQ ID NO: 2209284 - RNA, 19 nt, Artificial Sequence
  Description of Artificial Sequence: Synthetic oligonucleotide
  Sense strand starting at position 3454 of SEQ ID NO: 1883684
uuugucagauaugguuuau

SEQ ID NO: 2209285 - RNA, 19 nt, Artificial Sequence
  Description of Artificial Sequence: Synthetic oligonucleotide
  Antisense strand to SEQ ID NO: 2209284
auaaaccauaucugacaaa

SEQ ID NO: 2209286 - RNA, 19 nt, Artificial Sequence
  Description of Artificial Sequence: Synthetic oligonucleotide
  Sense strand starting at position 1658 of SEQ ID NO: 1883684
uccggucucuccugagacu

SEQ ID NO: 2209287 - RNA, 19 nt, Artificial Sequence
  Description of Artificial Sequence: Synthetic oligonucleotide
  Antisense strand to SEQ ID NO: 2209286
agucucaggagagaccgga

SEQ ID NO: 2209288 - RNA, 19 nt, Artificial Sequence
  Description of Artificial Sequence: Synthetic oligonucleotide
  Sense strand starting at position 1649 of SEQ ID NO: 1883684
gcaugauguuccggucucu

SEQ ID NO: 2209289 - RNA, 19 nt, Artificial Sequence
  Description of Artificial Sequence: Synthetic oligonucleotide
  Antisense strand to SEQ ID NO: 2209288
agagaccggaacaucaugc

SEQ ID NO: 2209290 - RNA, 19 nt, Artificial Sequence
  Description of Artificial Sequence: Synthetic oligonucleotide
  Sense strand starting at position 3598 of SEQ ID NO: 1883685
gugagagguuggucaauau

SEQ ID NO: 2209291 - RNA, 19 nt, Artificial Sequence
  Description of Artificial Sequence: Synthetic oligonucleotide
  Antisense strand to SEQ ID NO: 2209290
auauugaccaaccucucac

SEQ ID NO: 2209292 - RNA, 19 nt, Artificial Sequence
  Description of Artificial Sequence: Synthetic oligonucleotide
  Sense strand starting at position 2307 of SEQ ID NO: 1883685
gcaucagaccagcguguaa

SEQ ID NO: 2209293 - RNA, 19 nt, Artificial Sequence
  Description of Artificial Sequence: Synthetic oligonucleotide
  Antisense strand to SEQ ID NO: 2209292
uuacacgcuggucugaugc

SEQ ID NO: 2209294 - RNA, 19 nt, Artificial Sequence
  Description of Artificial Sequence: Synthetic oligonucleotide
  Sense strand starting at position 1509 of SEQ ID NO: 1883686
gucuuuacgagcuuugcca

SEQ ID NO: 2209295 - RNA, 19 nt, Artificial Sequence
  Description of Artificial Sequence: Synthetic oligonucleotide
  Antisense strand to SEQ ID NO: 2209294
uggcaaagcucguaaagac

SEQ ID NO: 2209296 - RNA, 19 nt, Artificial Sequence
  Description of Artificial Sequence: Synthetic oligonucleotide
  Sense strand starting at position 3304 of SEQ ID NO: 1883686
cuuuguauggaagagaguu

SEQ ID NO: 2209297 - RNA, 19 nt, Artificial Sequence
  Description of Artificial Sequence: Synthetic oligonucleotide
  Antisense strand to SEQ ID NO: 2209296
aacucucuuccauacaaag

SEQ ID NO: 2209298 - RNA, 19 nt, Artificial Sequence
  Description of Artificial Sequence: Synthetic oligonucleotide
  Sense strand starting at position 716 of SEQ ID NO: 1883686
gagguaugagcagaaguua

SEQ ID NO: 2209299 - RNA, 19 nt, Artificial Sequence
  Description of Artificial Sequence: Synthetic oligonucleotide
  Antisense strand to SEQ ID NO: 2209298
uaacuucugcucauaccuc

SEQ ID NO: 2209300 - RNA, 19 nt, Artificial Sequence
  Description of Artificial Sequence: Synthetic oligonucleotide
  Sense strand starting at position 2019 of SEQ ID NO: 1883686
gugggagaacuuuggacua

SEQ ID NO: 2209301 - RNA, 19 nt, Artificial Sequence
  Description of Artificial Sequence: Synthetic oligonucleotide
  Antisense strand to SEQ ID NO: 2209300
uaguccaaaguucucccac

SEQ ID NO: 2209302 - RNA, 19 nt, Artificial Sequence
  Description of Artificial Sequence: Synthetic oligonucleotide
  Sense strand starting at position 2277 of SEQ ID NO: 1883686
uggauuacuuaccuggauu

SEQ ID NO: 2209303 - RNA, 19 nt, Artificial Sequence
  Description of Artificial Sequence: Synthetic oligonucleotide
  Antisense strand to SEQ ID NO: 2209302
aauccagguaaguaaucca

SEQ ID NO: 2209304 - RNA, 19 nt, Artificial Sequence
  Description of Artificial Sequence: Synthetic oligonucleotide
  Sense strand starting at position 2276 of SEQ ID NO: 1883686
uuggauuacuuaccuggau

SEQ ID NO: 2209305 - RNA, 19 nt, Artificial Sequence
  Description of Artificial Sequence: Synthetic oligonucleotide
  Antisense strand to SEQ ID NO: 2209304
auccagguaaguaauccaa

SEQ ID NO: 2209306 - RNA, 19 nt, Artificial Sequence
  Description of Artificial Sequence: Synthetic oligonucleotide
  Sense strand starting at position 2013 of SEQ ID NO: 1883686
ggcauugugggagaacuuu

SEQ ID NO: 2209307 - RNA, 19 nt, Artificial Sequence
  Description of Artificial Sequence: Synthetic oligonucleotide
  Antisense strand to SEQ ID NO: 2209306
aaaguucucccacaaugcc

SEQ ID NO: 2209308 - RNA, 19 nt, Artificial Sequence
  Description of Artificial Sequence: Synthetic oligonucleotide
  Sense strand starting at position 1657 of SEQ ID NO: 1883686
ucaguacuggcagauacua

SEQ ID NO: 2209309 - RNA, 19 nt, Artificial Sequence
  Description of Artificial Sequence: Synthetic oligonucleotide
  Antisense strand to SEQ ID NO: 2209308
uaguaucugccaguacuga

SEQ ID NO: 2209310 - RNA, 19 nt, Artificial Sequence
  Description of Artificial Sequence: Synthetic oligonucleotide
  Sense strand starting at position 3616 of SEQ ID NO: 1883686
gauaccuuauguuuggaga

SEQ ID NO: 2209311 - RNA, 19 nt, Artificial Sequence
  Description of Artificial Sequence: Synthetic oligonucleotide
  Antisense strand to SEQ ID NO: 2209310
ucuccaaacauaagguauc

SEQ ID NO: 2209312 - RNA, 19 nt, Artificial Sequence
  Description of Artificial Sequence: Synthetic oligonucleotide
  Sense strand starting at position 97 of SEQ ID NO: 1883686
cuaggcuaccuggauuauu

SEQ ID NO: 2209313 - RNA, 19 nt, Artificial Sequence
  Description of Artificial Sequence: Synthetic oligonucleotide
  Antisense strand to SEQ ID NO: 2209312
aauaauccagguagccuag

SEQ ID NO: 2209314 - RNA, 19 nt, Artificial Sequence
  Description of Artificial Sequence: Synthetic oligonucleotide
  Sense strand starting at position 3849 of SEQ ID NO: 1883686
cugcuuauuagagggaaac

SEQ ID NO: 2209315 - RNA, 19 nt, Artificial Sequence
  Description of Artificial Sequence: Synthetic oligonucleotide
  Antisense strand to SEQ ID NO: 2209314
guuucccucuaauaagcag

SEQ ID NO: 2209316 - RNA, 19 nt, Artificial Sequence
  Description of Artificial Sequence: Synthetic oligonucleotide
  Sense strand starting at position 1841 of SEQ ID NO: 1883686
cuuaaucacuggcuaagaa

SEQ ID NO: 2209317 - RNA, 19 nt, Artificial Sequence
  Description of Artificial Sequence: Synthetic oligonucleotide
  Antisense strand to SEQ ID NO: 2209316
uucuuagccagugauuaag

SEQ ID NO: 2209318 - RNA, 19 nt, Artificial Sequence
  Description of Artificial Sequence: Synthetic oligonucleotide
  Sense strand starting at position 251 of SEQ ID NO: 1883686
cgauuaaugggcugaagag

SEQ ID NO: 2209319 - RNA, 19 nt, Artificial Sequence
  Description of Artificial Sequence: Synthetic oligonucleotide
  Antisense strand to SEQ ID NO: 2209318
cucuucagcccauuaaucg

SEQ ID NO: 2209320 - RNA, 19 nt, Artificial Sequence
  Description of Artificial Sequence: Synthetic oligonucleotide
  Sense strand starting at position 2231 of SEQ ID NO: 1883686
uugugaauuaugugggaag

SEQ ID NO: 2209321 - RNA, 19 nt, Artificial Sequence
  Description of Artificial Sequence: Synthetic oligonucleotide
  Antisense strand to SEQ ID NO: 2209320
cuucccacauaauucacaa

SEQ ID NO: 2209322 - RNA, 19 nt, Artificial Sequence
  Description of Artificial Sequence: Synthetic oligonucleotide
  Sense strand starting at position 3505 of SEQ ID NO: 1883686
ugacauacugaguagcuuu

SEQ ID NO: 2209323 - RNA, 19 nt, Artificial Sequence
  Description of Artificial Sequence: Synthetic oligonucleotide
  Antisense strand to SEQ ID NO: 2209322
aaagcuacucaguauguca

SEQ ID NO: 2209324 - RNA, 19 nt, Artificial Sequence
  Description of Artificial Sequence: Synthetic oligonucleotide
  Sense strand starting at position 3296 of SEQ ID NO: 1883686
aaggaaugcuuuguaugga

SEQ ID NO: 2209325 - RNA, 19 nt, Artificial Sequence
  Description of Artificial Sequence: Synthetic oligonucleotide
  Antisense strand to SEQ ID NO: 2209324
uccauacaaagcauuccuu

SEQ ID NO: 2209326 - RNA, 19 nt, Artificial Sequence
  Description of Artificial Sequence: Synthetic oligonucleotide
  Sense strand starting at position 1410 of SEQ ID NO: 1883686
caaguuauccgggauucuu

SEQ ID NO: 2209327 - RNA, 19 nt, Artificial Sequence
  Description of Artificial Sequence: Synthetic oligonucleotide
  Antisense strand to SEQ ID NO: 2209326
aagaaucccggauaacuug

SEQ ID NO: 2209328 - RNA, 19 nt, Artificial Sequence
  Description of Artificial Sequence: Synthetic oligonucleotide
  Sense strand starting at position 3901 of SEQ ID NO: 1883686
ggucuagucacauaaggca

SEQ ID NO: 2209329 - RNA, 19 nt, Artificial Sequence
  Description of Artificial Sequence: Synthetic oligonucleotide
  Antisense strand to SEQ ID NO: 2209328
ugccuuaugugacuagacc

SEQ ID NO: 2209330 - RNA, 19 nt, Artificial Sequence
  Description of Artificial Sequence: Synthetic oligonucleotide
  Sense strand starting at position 60 of SEQ ID NO: 1883686
agguuaauguacuugggau

SEQ ID NO: 2209331 - RNA, 19 nt, Artificial Sequence
  Description of Artificial Sequence: Synthetic oligonucleotide
  Antisense strand to SEQ ID NO: 2209330
aucccaaguacauuaaccu

SEQ ID NO: 2209332 - RNA, 19 nt, Artificial Sequence
  Description of Artificial Sequence: Synthetic oligonucleotide
  Sense strand starting at position 704 of SEQ ID NO: 1883686
caauucugccuggagguau

SEQ ID NO: 2209333 - RNA, 19 nt, Artificial Sequence
  Description of Artificial Sequence: Synthetic oligonucleotide
  Antisense strand to SEQ ID NO: 2209332
auaccuccaggcagaauug

SEQ ID NO: 2209334 - RNA, 19 nt, Artificial Sequence
  Description of Artificial Sequence: Synthetic oligonucleotide
  Sense strand starting at position 3299 of SEQ ID NO: 1883686
gaaugcuuuguauggaaga

SEQ ID NO: 2209335 - RNA, 19 nt, Artificial Sequence
  Description of Artificial Sequence: Synthetic oligonucleotide
  Antisense strand to SEQ ID NO: 2209334
ucuuccauacaaagcauuc

SEQ ID NO: 2209336 - RNA, 19 nt, Artificial Sequence
  Description of Artificial Sequence: Synthetic oligonucleotide
  Sense strand starting at position 1810 of SEQ ID NO: 1883686
agagaauggcucuggguua

SEQ ID NO: 2209337 - RNA, 19 nt, Artificial Sequence
  Description of Artificial Sequence: Synthetic oligonucleotide
  Antisense strand to SEQ ID NO: 2209336
uaacccagagccauucucu

SEQ ID NO: 2209338 - RNA, 19 nt, Artificial Sequence
  Description of Artificial Sequence: Synthetic oligonucleotide
  Sense strand starting at position 61 of SEQ ID NO: 1883686
gguuaauguacuugggaug

SEQ ID NO: 2209339 - RNA, 19 nt, Artificial Sequence
  Description of Artificial Sequence: Synthetic oligonucleotide
  Antisense strand to SEQ ID NO: 2209338
caucccaaguacauuaacc

SEQ ID NO: 2209340 - RNA, 19 nt, Artificial Sequence
  Description of Artificial Sequence: Synthetic oligonucleotide
  Sense strand starting at position 2529 of SEQ ID NO: 1883686
ugcagaaagcuaugaucac

SEQ ID NO: 2209341 - RNA, 19 nt, Artificial Sequence
  Description of Artificial Sequence: Synthetic oligonucleotide
  Antisense strand to SEQ ID NO: 2209340
gugaucauagcuuucugca

SEQ ID NO: 2209342 - RNA, 19 nt, Artificial Sequence
  Description of Artificial Sequence: Synthetic oligonucleotide
  Sense strand starting at position 703 of SEQ ID NO: 1883686
acaauucugccuggaggua

SEQ ID NO: 2209343 - RNA, 19 nt, Artificial Sequence
  Description of Artificial Sequence: Synthetic oligonucleotide
  Antisense strand to SEQ ID NO: 2209342
uaccuccaggcagaauugu

SEQ ID NO: 2209344 - RNA, 19 nt, Artificial Sequence
  Description of Artificial Sequence: Synthetic oligonucleotide
  Sense strand starting at position 628 of SEQ ID NO: 1883686
cguuguuuagaauaguaac

SEQ ID NO: 2209345 - RNA, 19 nt, Artificial Sequence
  Description of Artificial Sequence: Synthetic oligonucleotide
  Antisense strand to SEQ ID NO: 2209344
guuacuauucuaaacaacg

SEQ ID NO: 2209346 - RNA, 19 nt, Artificial Sequence
  Description of Artificial Sequence: Synthetic oligonucleotide
  Sense strand starting at position 918 of SEQ ID NO: 1883686
uuaguucugggauguuaca

SEQ ID NO: 2209347 - RNA, 19 nt, Artificial Sequence
  Description of Artificial Sequence: Synthetic oligonucleotide
  Antisense strand to SEQ ID NO: 2209346
uguaacaucccagaacuaa

SEQ ID NO: 2209348 - RNA, 19 nt, Artificial Sequence
  Description of Artificial Sequence: Synthetic oligonucleotide
  Sense strand starting at position 915 of SEQ ID NO: 1883686
acauuaguucugggauguu

SEQ ID NO: 2209349 - RNA, 19 nt, Artificial Sequence
  Description of Artificial Sequence: Synthetic oligonucleotide
  Antisense strand to SEQ ID NO: 2209348
aacaucccagaacuaaugu

SEQ ID NO: 2209350 - RNA, 19 nt, Artificial Sequence
  Description of Artificial Sequence: Synthetic oligonucleotide
  Sense strand starting at position 3777 of SEQ ID NO: 1883686
cgaggaauugcacagugca

SEQ ID NO: 2209351 - RNA, 19 nt, Artificial Sequence
  Description of Artificial Sequence: Synthetic oligonucleotide
  Antisense strand to SEQ ID NO: 2209350
ugcacugugcaauuccucg

SEQ ID NO: 2209352 - RNA, 19 nt, Artificial Sequence
  Description of Artificial Sequence: Synthetic oligonucleotide
  Sense strand starting at position 3657 of SEQ ID NO: 1883686
cccagacuauaguuguauu

SEQ ID NO: 2209353 - RNA, 19 nt, Artificial Sequence
  Description of Artificial Sequence: Synthetic oligonucleotide
  Antisense strand to SEQ ID NO: 2209352
aauacaacuauagucuggg

SEQ ID NO: 2209354 - RNA, 19 nt, Artificial Sequence
  Description of Artificial Sequence: Synthetic oligonucleotide
  Sense strand starting at position 702 of SEQ ID NO: 1883686
gacaauucugccuggaggu

SEQ ID NO: 2209355 - RNA, 19 nt, Artificial Sequence
  Description of Artificial Sequence: Synthetic oligonucleotide
  Antisense strand to SEQ ID NO: 2209354
accuccaggcagaauuguc

SEQ ID NO: 2209356 - RNA, 19 nt, Artificial Sequence
  Description of Artificial Sequence: Synthetic oligonucleotide
  Sense strand starting at position 2103 of SEQ ID NO: 1883686
cacagauggcuuuggguua

SEQ ID NO: 2209357 - RNA, 19 nt, Artificial Sequence
  Description of Artificial Sequence: Synthetic oligonucleotide
  Antisense strand to SEQ ID NO: 2209356
uaacccaaagccaucugug

SEQ ID NO: 2209358 - RNA, 19 nt, Artificial Sequence
  Description of Artificial Sequence: Synthetic oligonucleotide
  Sense strand starting at position 1563 of SEQ ID NO: 1883686
accugauacuggucccuuu

SEQ ID NO: 2209359 - RNA, 19 nt, Artificial Sequence
  Description of Artificial Sequence: Synthetic oligonucleotide
  Antisense strand to SEQ ID NO: 2209358
aaagggaccaguaucaggu

SEQ ID NO: 2209360 - RNA, 19 nt, Artificial Sequence
  Description of Artificial Sequence: Synthetic oligonucleotide
  Sense strand starting at position 1419 of SEQ ID NO: 1883686
cgggauucuucucucuuaa

SEQ ID NO: 2209361 - RNA, 19 nt, Artificial Sequence
  Description of Artificial Sequence: Synthetic oligonucleotide
  Antisense strand to SEQ ID NO: 2209360
uuaagagagaagaaucccg

SEQ ID NO: 2209362 - RNA, 19 nt, Artificial Sequence
  Description of Artificial Sequence: Synthetic oligonucleotide
  Sense strand starting at position 2220 of SEQ ID NO: 1883686
auuaccuugguuugugaau

SEQ ID NO: 2209363 - RNA, 19 nt, Artificial Sequence
  Description of Artificial Sequence: Synthetic oligonucleotide
  Antisense strand to SEQ ID NO: 2209362
auucacaaaccaagguaau

SEQ ID NO: 2209364 - RNA, 19 nt, Artificial Sequence
  Description of Artificial Sequence: Synthetic oligonucleotide
  Sense strand starting at position 639 of SEQ ID NO: 1883686
auaguaacaugucuagcua

SEQ ID NO: 2209365 - RNA, 19 nt, Artificial Sequence
  Description of Artificial Sequence: Synthetic oligonucleotide
  Antisense strand to SEQ ID NO: 2209364
uagcuagacauguuacuau

SEQ ID NO: 2209366 - RNA, 19 nt, Artificial Sequence
  Description of Artificial Sequence: Synthetic oligonucleotide
  Sense strand starting at position 3685 of SEQ ID NO: 1883686
gguuuauuacggcaaugua

SEQ ID NO: 2209367 - RNA, 19 nt, Artificial Sequence
  Description of Artificial Sequence: Synthetic oligonucleotide
  Antisense strand to SEQ ID NO: 2209366
uacauugccguaauaaacc

SEQ ID NO: 2209368 - RNA, 19 nt, Artificial Sequence
  Description of Artificial Sequence: Synthetic oligonucleotide
  Sense strand starting at position 1694 of SEQ ID NO: 1883686
ugaacugcuuugccuaaga

SEQ ID NO: 2209369 - RNA, 19 nt, Artificial Sequence
  Description of Artificial Sequence: Synthetic oligonucleotide
  Antisense strand to SEQ ID NO: 2209368
ucuuaggcaaagcaguuca

SEQ ID NO: 2209370 - RNA, 19 nt, Artificial Sequence
  Description of Artificial Sequence: Synthetic oligonucleotide
  Sense strand starting at position 1406 of SEQ ID NO: 1883686
ugggcaaguuauccgggau

SEQ ID NO: 2209371 - RNA, 19 nt, Artificial Sequence
  Description of Artificial Sequence: Synthetic oligonucleotide
  Antisense strand to SEQ ID NO: 2209370
aucccggauaacuugccca

SEQ ID NO: 2209372 - RNA, 19 nt, Artificial Sequence
  Description of Artificial Sequence: Synthetic oligonucleotide
  Sense strand starting at position 1418 of SEQ ID NO: 1883686
ccgggauucuucucucuua

SEQ ID NO: 2209373 - RNA, 19 nt, Artificial Sequence
  Description of Artificial Sequence: Synthetic oligonucleotide
  Antisense strand to SEQ ID NO: 2209372
uaagagagaagaaucccgg

SEQ ID NO: 2209374 - RNA, 19 nt, Artificial Sequence
  Description of Artificial Sequence: Synthetic oligonucleotide
  Sense strand starting at position 1585 of SEQ ID NO: 1883687
guugguuauauggaauuga

SEQ ID NO: 2209375 - RNA, 19 nt, Artificial Sequence
  Description of Artificial Sequence: Synthetic oligonucleotide
  Antisense strand to SEQ ID NO: 2209374
ucaauuccauauaaccaac

SEQ ID NO: 2209376 - RNA, 19 nt, Artificial Sequence
  Description of Artificial Sequence: Synthetic oligonucleotide
  Sense strand starting at position 3451 of SEQ ID NO: 1883687
ugucuuggaguggaauaca

SEQ ID NO: 2209377 - RNA, 19 nt, Artificial Sequence
  Description of Artificial Sequence: Synthetic oligonucleotide
  Antisense strand to SEQ ID NO: 2209376
uguauuccacuccaagaca

SEQ ID NO: 2209378 - RNA, 19 nt, Artificial Sequence
  Description of Artificial Sequence: Synthetic oligonucleotide
  Sense strand starting at position 2801 of SEQ ID NO: 1883687
uucugugaucaucaaauug

SEQ ID NO: 2209379 - RNA, 19 nt, Artificial Sequence
  Description of Artificial Sequence: Synthetic oligonucleotide
  Antisense strand to SEQ ID NO: 2209378
caauuugaugaucacagaa

SEQ ID NO: 2209380 - RNA, 19 nt, Artificial Sequence
  Description of Artificial Sequence: Synthetic oligonucleotide
  Sense strand starting at position 2815 of SEQ ID NO: 1883687
aauugaggauguccugaau

SEQ ID NO: 2209381 - RNA, 19 nt, Artificial Sequence
  Description of Artificial Sequence: Synthetic oligonucleotide
  Antisense strand to SEQ ID NO: 2209380
auucaggacauccucaauu

SEQ ID NO: 2209382 - RNA, 19 nt, Artificial Sequence
  Description of Artificial Sequence: Synthetic oligonucleotide
  Sense strand starting at position 3886 of SEQ ID NO: 1883687
cuucuuauuggguaagauu

SEQ ID NO: 2209383 - RNA, 19 nt, Artificial Sequence
  Description of Artificial Sequence: Synthetic oligonucleotide
  Antisense strand to SEQ ID NO: 2209382
aaucuuacccaauaagaag

SEQ ID NO: 2209384 - RNA, 19 nt, Artificial Sequence
  Description of Artificial Sequence: Synthetic oligonucleotide
  Sense strand starting at position 3077 of SEQ ID NO: 1883687
ggguuagagcaucacauua

SEQ ID NO: 2209385 - RNA, 19 nt, Artificial Sequence
  Description of Artificial Sequence: Synthetic oligonucleotide
  Antisense strand to SEQ ID NO: 2209384
uaaugugaugcucuaaccc

SEQ ID NO: 2209386 - RNA, 19 nt, Artificial Sequence
  Description of Artificial Sequence: Synthetic oligonucleotide
  Sense strand starting at position 1270 of SEQ ID NO: 1883687
aggaaauauucuccaugua

SEQ ID NO: 2209387 - RNA, 19 nt, Artificial Sequence
  Description of Artificial Sequence: Synthetic oligonucleotide
  Antisense strand to SEQ ID NO: 2209386
uacauggagaauauuuccu

SEQ ID NO: 2209388 - RNA, 19 nt, Artificial Sequence
  Description of Artificial Sequence: Synthetic oligonucleotide
  Sense strand starting at position 3784 of SEQ ID NO: 1883687
acauuaaaugccugaaaug

SEQ ID NO: 2209389 - RNA, 19 nt, Artificial Sequence
  Description of Artificial Sequence: Synthetic oligonucleotide
  Antisense strand to SEQ ID NO: 2209388
cauuucaggcauuuaaugu

SEQ ID NO: 2209390 - RNA, 19 nt, Artificial Sequence
  Description of Artificial Sequence: Synthetic oligonucleotide
  Sense strand starting at position 2571 of SEQ ID NO: 1883687
gaaagaaagcuuuggugga

SEQ ID NO: 2209391 - RNA, 19 nt, Artificial Sequence
  Description of Artificial Sequence: Synthetic oligonucleotide
  Antisense strand to SEQ ID NO: 2209390
uccaccaaagcuuucuuuc

SEQ ID NO: 2209392 - RNA, 19 nt, Artificial Sequence
  Description of Artificial Sequence: Synthetic oligonucleotide
  Sense strand starting at position 3041 of SEQ ID NO: 1883687
agagaacgaugauuaguuu

SEQ ID NO: 2209393 - RNA, 19 nt, Artificial Sequence
  Description of Artificial Sequence: Synthetic oligonucleotide
  Antisense strand to SEQ ID NO: 2209392
aaacuaaucaucguucucu

SEQ ID NO: 2209394 - RNA, 19 nt, Artificial Sequence
  Description of Artificial Sequence: Synthetic oligonucleotide
  Sense strand starting at position 3752 of SEQ ID NO: 1883687
aucugaucuguagacucuu

SEQ ID NO: 2209395 - RNA, 19 nt, Artificial Sequence
  Description of Artificial Sequence: Synthetic oligonucleotide
  Antisense strand to SEQ ID NO: 2209394
aagagucuacagaucagau

SEQ ID NO: 2209396 - RNA, 19 nt, Artificial Sequence
  Description of Artificial Sequence: Synthetic oligonucleotide
  Sense strand starting at position 2575 of SEQ ID NO: 1883687
gaaagcuuugguggaagga

SEQ ID NO: 2209397 - RNA, 19 nt, Artificial Sequence
  Description of Artificial Sequence: Synthetic oligonucleotide
  Antisense strand to SEQ ID NO: 2209396
uccuuccaccaaagcuuuc

SEQ ID NO: 2209398 - RNA, 19 nt, Artificial Sequence
  Description of Artificial Sequence: Synthetic oligonucleotide
  Sense strand starting at position 2253 of SEQ ID NO: 1883687
gccggaauuuaugcuuaug

SEQ ID NO: 2209399 - RNA, 19 nt, Artificial Sequence
  Description of Artificial Sequence: Synthetic oligonucleotide
  Antisense strand to SEQ ID NO: 2209398
cauaagcauaaauuccggc

SEQ ID NO: 2209400 - RNA, 19 nt, Artificial Sequence
  Description of Artificial Sequence: Synthetic oligonucleotide
  Sense strand starting at position 3131 of SEQ ID NO: 1883687
ugacuauggacuugcaaag

SEQ ID NO: 2209401 - RNA, 19 nt, Artificial Sequence
  Description of Artificial Sequence: Synthetic oligonucleotide
  Antisense strand to SEQ ID NO: 2209400
cuuugcaaguccauaguca

SEQ ID NO: 2209402 - RNA, 19 nt, Artificial Sequence
  Description of Artificial Sequence: Synthetic oligonucleotide
  Sense strand starting at position 1165 of SEQ ID NO: 1883687
auugguugucuagacuuaa

SEQ ID NO: 2209403 - RNA, 19 nt, Artificial Sequence
  Description of Artificial Sequence: Synthetic oligonucleotide
  Antisense strand to SEQ ID NO: 2209402
uuaagucuagacaaccaau

SEQ ID NO: 2209404 - RNA, 19 nt, Artificial Sequence
  Description of Artificial Sequence: Synthetic oligonucleotide
  Sense strand starting at position 3746 of SEQ ID NO: 1883687
gggauuaucugaucuguag

SEQ ID NO: 2209405 - RNA, 19 nt, Artificial Sequence
  Description of Artificial Sequence: Synthetic oligonucleotide
  Antisense strand to SEQ ID NO: 2209404
cuacagaucagauaauccc

SEQ ID NO: 2209406 - RNA, 19 nt, Artificial Sequence
  Description of Artificial Sequence: Synthetic oligonucleotide
  Sense strand starting at position 3850 of SEQ ID NO: 1883687
cagauauguuagguggaug

SEQ ID NO: 2209407 - RNA, 19 nt, Artificial Sequence
  Description of Artificial Sequence: Synthetic oligonucleotide
  Antisense strand to SEQ ID NO: 2209406
cauccaccuaacauaucug

SEQ ID NO: 2209408 - RNA, 19 nt, Artificial Sequence
  Description of Artificial Sequence: Synthetic oligonucleotide
  Sense strand starting at position 3606 of SEQ ID NO: 1883687
ggaguuacugagcagcaga

SEQ ID NO: 2209409 - RNA, 19 nt, Artificial Sequence
  Description of Artificial Sequence: Synthetic oligonucleotide
  Antisense strand to SEQ ID NO: 2209408
ucugcugcucaguaacucc

SEQ ID NO: 2209410 - RNA, 19 nt, Artificial Sequence
  Description of Artificial Sequence: Synthetic oligonucleotide
  Sense strand starting at position 1322 of SEQ ID NO: 1883687
ugcugacaucauugaugaa

SEQ ID NO: 2209411 - RNA, 19 nt, Artificial Sequence
  Description of Artificial Sequence: Synthetic oligonucleotide
  Antisense strand to SEQ ID NO: 2209410
uucaucaaugaugucagca

SEQ ID NO: 2209412 - RNA, 19 nt, Artificial Sequence
  Description of Artificial Sequence: Synthetic oligonucleotide
  Sense strand starting at position 3122 of SEQ ID NO: 1883687
caauguaugugacuaugga

SEQ ID NO: 2209413 - RNA, 19 nt, Artificial Sequence
  Description of Artificial Sequence: Synthetic oligonucleotide
  Antisense strand to SEQ ID NO: 2209412
uccauagucacauacauug

SEQ ID NO: 2209414 - RNA, 19 nt, Artificial Sequence
  Description of Artificial Sequence: Synthetic oligonucleotide
  Sense strand starting at position 1578 of SEQ ID NO: 1883687
gaaaucaguugguuauaug

SEQ ID NO: 2209415 - RNA, 19 nt, Artificial Sequence
  Description of Artificial Sequence: Synthetic oligonucleotide
  Antisense strand to SEQ ID NO: 2209414
cauauaaccaacugauuuc

SEQ ID NO: 2209416 - RNA, 19 nt, Artificial Sequence
  Description of Artificial Sequence: Synthetic oligonucleotide
  Sense strand starting at position 2127 of SEQ ID NO: 1883687
acaggcaucuaaguaucaa

SEQ ID NO: 2209417 - RNA, 19 nt, Artificial Sequence
  Description of Artificial Sequence: Synthetic oligonucleotide
  Antisense strand to SEQ ID NO: 2209416
uugauacuuagaugccugu

SEQ ID NO: 2209418 - RNA, 19 nt, Artificial Sequence
  Description of Artificial Sequence: Synthetic oligonucleotide
  Sense strand starting at position 18 of SEQ ID NO: 1883687
uauucuguugcagagauug

SEQ ID NO: 2209419 - RNA, 19 nt, Artificial Sequence
  Description of Artificial Sequence: Synthetic oligonucleotide
  Antisense strand to SEQ ID NO: 2209418
caaucucugcaacagaaua

SEQ ID NO: 2209420 - RNA, 19 nt, Artificial Sequence
  Description of Artificial Sequence: Synthetic oligonucleotide
  Sense strand starting at position 3260 of SEQ ID NO: 1883687
uuaucugacuaguugacau

SEQ ID NO: 2209421 - RNA, 19 nt, Artificial Sequence
  Description of Artificial Sequence: Synthetic oligonucleotide
  Antisense strand to SEQ ID NO: 2209420
augucaacuagucagauaa

SEQ ID NO: 2209422 - RNA, 19 nt, Artificial Sequence
  Description of Artificial Sequence: Synthetic oligonucleotide
  Sense strand starting at position 1169 of SEQ ID NO: 1883687
guugucuagacuuaaguga

SEQ ID NO: 2209423 - RNA, 19 nt, Artificial Sequence
  Description of Artificial Sequence: Synthetic oligonucleotide
  Antisense strand to SEQ ID NO: 2209422
ucacuuaagucuagacaac

SEQ ID NO: 2209424 - RNA, 19 nt, Artificial Sequence
  Description of Artificial Sequence: Synthetic oligonucleotide
  Sense strand starting at position 171 of SEQ ID NO: 1883687
gcguguaggaaauagaauu

SEQ ID NO: 2209425 - RNA, 19 nt, Artificial Sequence
  Description of Artificial Sequence: Synthetic oligonucleotide
  Antisense strand to SEQ ID NO: 2209424
aauucuauuuccuacacgc

SEQ ID NO: 2209426 - RNA, 19 nt, Artificial Sequence
  Description of Artificial Sequence: Synthetic oligonucleotide
  Sense strand starting at position 1577 of SEQ ID NO: 1883687
ugaaaucaguugguuauau

SEQ ID NO: 2209427 - RNA, 19 nt, Artificial Sequence
  Description of Artificial Sequence: Synthetic oligonucleotide
  Antisense strand to SEQ ID NO: 2209426
auauaaccaacugauuuca

SEQ ID NO: 2209428 - RNA, 19 nt, Artificial Sequence
  Description of Artificial Sequence: Synthetic oligonucleotide
  Sense strand starting at position 3885 of SEQ ID NO: 1883687
ucuucuuauuggguaagau

SEQ ID NO: 2209429 - RNA, 19 nt, Artificial Sequence
  Description of Artificial Sequence: Synthetic oligonucleotide
  Antisense strand to SEQ ID NO: 2209428
aucuuacccaauaagaaga

SEQ ID NO: 2209430 - RNA, 19 nt, Artificial Sequence
  Description of Artificial Sequence: Synthetic oligonucleotide
  Sense strand starting at position 1576 of SEQ ID NO: 1883687
cugaaaucaguugguuaua

SEQ ID NO: 2209431 - RNA, 19 nt, Artificial Sequence
  Description of Artificial Sequence: Synthetic oligonucleotide
  Antisense strand to SEQ ID NO: 2209430
uauaaccaacugauuucag

SEQ ID NO: 2209432 - RNA, 19 nt, Artificial Sequence
  Description of Artificial Sequence: Synthetic oligonucleotide
  Sense strand starting at position 1090 of SEQ ID NO: 1883687
ucaaauuggccauguagga

SEQ ID NO: 2209433 - RNA, 19 nt, Artificial Sequence
  Description of Artificial Sequence: Synthetic oligonucleotide
  Antisense strand to SEQ ID NO: 2209432
uccuacauggccaauuuga

SEQ ID NO: 2209434 - RNA, 19 nt, Artificial Sequence
  Description of Artificial Sequence: Synthetic oligonucleotide
  Sense strand starting at position 3609 of SEQ ID NO: 1883687
guuacugagcagcagaauu

SEQ ID NO: 2209435 - RNA, 19 nt, Artificial Sequence
  Description of Artificial Sequence: Synthetic oligonucleotide
  Antisense strand to SEQ ID NO: 2209434
aauucugcugcucaguaac

SEQ ID NO: 2209436 - RNA, 19 nt, Artificial Sequence
  Description of Artificial Sequence: Synthetic oligonucleotide
  Sense strand starting at position 272 of SEQ ID NO: 1883687
gauaaagcauuugaguaga

SEQ ID NO: 2209437 - RNA, 19 nt, Artificial Sequence
  Description of Artificial Sequence: Synthetic oligonucleotide
  Antisense strand to SEQ ID NO: 2209436
ucuacucaaaugcuuuauc

SEQ ID NO: 2209438 - RNA, 19 nt, Artificial Sequence
  Description of Artificial Sequence: Synthetic oligonucleotide
  Sense strand starting at position 3050 of SEQ ID NO: 1883687
ugauuaguuucuccuaaug

SEQ ID NO: 2209439 - RNA, 19 nt, Artificial Sequence
  Description of Artificial Sequence: Synthetic oligonucleotide
  Antisense strand to SEQ ID NO: 2209438
cauuaggagaaacuaauca

SEQ ID NO: 2209440 - RNA, 19 nt, Artificial Sequence
  Description of Artificial Sequence: Synthetic oligonucleotide
  Sense strand starting at position 3622 of SEQ ID NO: 1883687
agaauugauucuucugucu

SEQ ID NO: 2209441 - RNA, 19 nt, Artificial Sequence
  Description of Artificial Sequence: Synthetic oligonucleotide
  Antisense strand to SEQ ID NO: 2209440
agacagaagaaucaauucu

SEQ ID NO: 2209442 - RNA, 19 nt, Artificial Sequence
  Description of Artificial Sequence: Synthetic oligonucleotide
  Sense strand starting at position 2732 of SEQ ID NO: 1883687
aggagugauuuauaaguau

SEQ ID NO: 2209443 - RNA, 19 nt, Artificial Sequence
  Description of Artificial Sequence: Synthetic oligonucleotide
  Antisense strand to SEQ ID NO: 2209442
auacuuauaaaucacuccu

SEQ ID NO: 2209444 - RNA, 19 nt, Artificial Sequence
  Description of Artificial Sequence: Synthetic oligonucleotide
  Sense strand starting at position 1055 of SEQ ID NO: 1883687
ccauguuuauguuuaagga

SEQ ID NO: 2209445 - RNA, 19 nt, Artificial Sequence
  Description of Artificial Sequence: Synthetic oligonucleotide
  Antisense strand to SEQ ID NO: 2209444
uccuuaaacauaaacaugg

SEQ ID NO: 2209446 - RNA, 19 nt, Artificial Sequence
  Description of Artificial Sequence: Synthetic oligonucleotide
  Sense strand starting at position 1774 of SEQ ID NO: 1883687
guguccuucccuuacaaug

SEQ ID NO: 2209447 - RNA, 19 nt, Artificial Sequence
  Description of Artificial Sequence: Synthetic oligonucleotide
  Antisense strand to SEQ ID NO: 2209446
cauuguaagggaaggacac

SEQ ID NO: 2209448 - RNA, 19 nt, Artificial Sequence
  Description of Artificial Sequence: Synthetic oligonucleotide
  Sense strand starting at position 1836 of SEQ ID NO: 1883687
ccuggucuaccaugugaaa

SEQ ID NO: 2209449 - RNA, 19 nt, Artificial Sequence
  Description of Artificial Sequence: Synthetic oligonucleotide
  Antisense strand to SEQ ID NO: 2209448
uuucacaugguagaccagg

SEQ ID NO: 2209450 - RNA, 19 nt, Artificial Sequence
  Description of Artificial Sequence: Synthetic oligonucleotide
  Sense strand starting at position 3368 of SEQ ID NO: 1883687
ugucccuauuuggaagaua

SEQ ID NO: 2209451 - RNA, 19 nt, Artificial Sequence
  Description of Artificial Sequence: Synthetic oligonucleotide
  Antisense strand to SEQ ID NO: 2209450
uaucuuccaaauagggaca

SEQ ID NO: 2209452 - RNA, 19 nt, Artificial Sequence
  Description of Artificial Sequence: Synthetic oligonucleotide
  Sense strand starting at position 29 of SEQ ID NO: 1883687
agagauugcuuccucacuu

SEQ ID NO: 2209453 - RNA, 19 nt, Artificial Sequence
  Description of Artificial Sequence: Synthetic oligonucleotide
  Antisense strand to SEQ ID NO: 2209452
aagugaggaagcaaucucu

SEQ ID NO: 2209454 - RNA, 19 nt, Artificial Sequence
  Description of Artificial Sequence: Synthetic oligonucleotide
  Sense strand starting at position 2015 of SEQ ID NO: 1883688
uggaauaagcuuuauaucu

SEQ ID NO: 2209455 - RNA, 19 nt, Artificial Sequence
  Description of Artificial Sequence: Synthetic oligonucleotide
  Antisense strand to SEQ ID NO: 2209454
agauauaaagcuuauucca

SEQ ID NO: 2209456 - RNA, 19 nt, Artificial Sequence
  Description of Artificial Sequence: Synthetic oligonucleotide
  Sense strand starting at position 2168 of SEQ ID NO: 1883688
uccaaagagccaugauaga

SEQ ID NO: 2209457 - RNA, 19 nt, Artificial Sequence
  Description of Artificial Sequence: Synthetic oligonucleotide
  Antisense strand to SEQ ID NO: 2209456
ucuaucauggcucuuugga

SEQ ID NO: 2209458 - RNA, 19 nt, Artificial Sequence
  Description of Artificial Sequence: Synthetic oligonucleotide
  Sense strand starting at position 3304 of SEQ ID NO: 1883688
guucccaagucauuuagua

SEQ ID NO: 2209459 - RNA, 19 nt, Artificial Sequence
  Description of Artificial Sequence: Synthetic oligonucleotide
  Antisense strand to SEQ ID NO: 2209458
uacuaaaugacuugggaac

SEQ ID NO: 2209460 - RNA, 19 nt, Artificial Sequence
  Description of Artificial Sequence: Synthetic oligonucleotide
  Sense strand starting at position 588 of SEQ ID NO: 1883688
ggagaacaaucauuagcug

SEQ ID NO: 2209461 - RNA, 19 nt, Artificial Sequence
  Description of Artificial Sequence: Synthetic oligonucleotide
  Antisense strand to SEQ ID NO: 2209460
cagcuaaugauuguucucc

SEQ ID NO: 2209462 - RNA, 19 nt, Artificial Sequence
  Description of Artificial Sequence: Synthetic oligonucleotide
  Sense strand starting at position 589 of SEQ ID NO: 1883688
gagaacaaucauuagcugu

SEQ ID NO: 2209463 - RNA, 19 nt, Artificial Sequence
  Description of Artificial Sequence: Synthetic oligonucleotide
  Antisense strand to SEQ ID NO: 2209462
acagcuaaugauuguucuc

SEQ ID NO: 2209464 - RNA, 19 nt, Artificial Sequence
  Description of Artificial Sequence: Synthetic oligonucleotide
  Sense strand starting at position 3262 of SEQ ID NO: 1883688
cagaaauugggccauguca

SEQ ID NO: 2209465 - RNA, 19 nt, Artificial Sequence
  Description of Artificial Sequence: Synthetic oligonucleotide
  Antisense strand to SEQ ID NO: 2209464
ugacauggcccaauuucug

SEQ ID NO: 2209466 - RNA, 19 nt, Artificial Sequence
  Description of Artificial Sequence: Synthetic oligonucleotide
  Sense strand starting at position 2185 of SEQ ID NO: 1883688
gauugauuaaugggaggcu

SEQ ID NO: 2209467 - RNA, 19 nt, Artificial Sequence
  Description of Artificial Sequence: Synthetic oligonucleotide
  Antisense strand to SEQ ID NO: 2209466
agccucccauuaaucaauc

SEQ ID NO: 2209468 - RNA, 19 nt, Artificial Sequence
  Description of Artificial Sequence: Synthetic oligonucleotide
  Sense strand starting at position 2044 of SEQ ID NO: 1883688
agcguuuacgguccagcaa

SEQ ID NO: 2209469 - RNA, 19 nt, Artificial Sequence
  Description of Artificial Sequence: Synthetic oligonucleotide
  Antisense strand to SEQ ID NO: 2209468
uugcuggaccguaaacgcu

SEQ ID NO: 2209470 - RNA, 19 nt, Artificial Sequence
  Description of Artificial Sequence: Synthetic oligonucleotide
  Sense strand starting at position 803 of SEQ ID NO: 1883688
uaacauuacccauguggga

SEQ ID NO: 2209471 - RNA, 19 nt, Artificial Sequence
  Description of Artificial Sequence: Synthetic oligonucleotide
  Antisense strand to SEQ ID NO: 2209470
ucccacauggguaauguua

SEQ ID NO: 2209472 - RNA, 19 nt, Artificial Sequence
  Description of Artificial Sequence: Synthetic oligonucleotide
  Sense strand starting at position 2270 of SEQ ID NO: 1883688
gugggucuccaacaauauu

SEQ ID NO: 2209473 - RNA, 19 nt, Artificial Sequence
  Description of Artificial Sequence: Synthetic oligonucleotide
  Antisense strand to SEQ ID NO: 2209472
aauauuguuggagacccac

SEQ ID NO: 2209474 - RNA, 19 nt, Artificial Sequence
  Description of Artificial Sequence: Synthetic oligonucleotide
  Sense strand starting at position 2188 of SEQ ID NO: 1883688
ugauuaaugggaggcuuua

SEQ ID NO: 2209475 - RNA, 19 nt, Artificial Sequence
  Description of Artificial Sequence: Synthetic oligonucleotide
  Antisense strand to SEQ ID NO: 2209474
uaaagccucccauuaauca

SEQ ID NO: 2209476 - RNA, 19 nt, Artificial Sequence
  Description of Artificial Sequence: Synthetic oligonucleotide
  Sense strand starting at position 2037 of SEQ ID NO: 1883688
gaguuucagcguuuacggu

SEQ ID NO: 2209477 - RNA, 19 nt, Artificial Sequence
  Description of Artificial Sequence: Synthetic oligonucleotide
  Antisense strand to SEQ ID NO: 2209476
accguaaacgcugaaacuc

SEQ ID NO: 2209478 - RNA, 19 nt, Artificial Sequence
  Description of Artificial Sequence: Synthetic oligonucleotide
  Sense strand starting at position 3061 of SEQ ID NO: 1883688
uuucuaucagcucaggauu

SEQ ID NO: 2209479 - RNA, 19 nt, Artificial Sequence
  Description of Artificial Sequence: Synthetic oligonucleotide
  Antisense strand to SEQ ID NO: 2209478
aauccugagcugauagaaa

SEQ ID NO: 2209480 - RNA, 19 nt, Artificial Sequence
  Description of Artificial Sequence: Synthetic oligonucleotide
  Sense strand starting at position 1012 of SEQ ID NO: 1883688
gcgaguuucaguucgagcu

SEQ ID NO: 2209481 - RNA, 19 nt, Artificial Sequence
  Description of Artificial Sequence: Synthetic oligonucleotide
  Antisense strand to SEQ ID NO: 2209480
agcucgaacugaaacucgc

SEQ ID NO: 2209482 - RNA, 19 nt, Artificial Sequence
  Description of Artificial Sequence: Synthetic oligonucleotide
  Sense strand starting at position 311 of SEQ ID NO: 1883688
ggcauuuggcaguguacau

SEQ ID NO: 2209483 - RNA, 19 nt, Artificial Sequence
  Description of Artificial Sequence: Synthetic oligonucleotide
  Antisense strand to SEQ ID NO: 2209482
auguacacugccaaaugcc

SEQ ID NO: 2209484 - RNA, 19 nt, Artificial Sequence
  Description of Artificial Sequence: Synthetic oligonucleotide
  Sense strand starting at position 2522 of SEQ ID NO: 1883688
gcggguuuggaacaauacu

SEQ ID NO: 2209485 - RNA, 19 nt, Artificial Sequence
  Description of Artificial Sequence: Synthetic oligonucleotide
  Antisense strand to SEQ ID NO: 2209484
aguauuguuccaaacccgc

SEQ ID NO: 2209486 - RNA, 19 nt, Artificial Sequence
  Description of Artificial Sequence: Synthetic oligonucleotide
  Sense strand starting at position 2266 of SEQ ID NO: 1883688
cuaagugggucuccaacaa

SEQ ID NO: 2209487 - RNA, 19 nt, Artificial Sequence
  Description of Artificial Sequence: Synthetic oligonucleotide
  Antisense strand to SEQ ID NO: 2209486
uuguuggagacccacuuag

SEQ ID NO: 2209488 - RNA, 19 nt, Artificial Sequence
  Description of Artificial Sequence: Synthetic oligonucleotide
  Sense strand starting at position 2925 of SEQ ID NO: 1883688
gcugcauauuucuugccaa

SEQ ID NO: 2209489 - RNA, 19 nt, Artificial Sequence
  Description of Artificial Sequence: Synthetic oligonucleotide
  Antisense strand to SEQ ID NO: 2209488
uuggcaagaaauaugcagc

SEQ ID NO: 2209490 - RNA, 19 nt, Artificial Sequence
  Description of Artificial Sequence: Synthetic oligonucleotide
  Sense strand starting at position 3264 of SEQ ID NO: 1883688
gaaauugggccaugucacu

SEQ ID NO: 2209491 - RNA, 19 nt, Artificial Sequence
  Description of Artificial Sequence: Synthetic oligonucleotide
  Antisense strand to SEQ ID NO: 2209490
agugacauggcccaauuuc

SEQ ID NO: 2209492 - RNA, 19 nt, Artificial Sequence
  Description of Artificial Sequence: Synthetic oligonucleotide
  Sense strand starting at position 3277 of SEQ ID NO: 1883688
gucacuccuuagcucaaga

SEQ ID NO: 2209493 - RNA, 19 nt, Artificial Sequence
  Description of Artificial Sequence: Synthetic oligonucleotide
  Antisense strand to SEQ ID NO: 2209492
ucuugagcuaaggagugac

SEQ ID NO: 2209494 - RNA, 19 nt, Artificial Sequence
  Description of Artificial Sequence: Synthetic oligonucleotide
  Sense strand starting at position 2154 of SEQ ID NO: 1883688
gggcauuccuucucuccaa

SEQ ID NO: 2209495 - RNA, 19 nt, Artificial Sequence
  Description of Artificial Sequence: Synthetic oligonucleotide
  Antisense strand to SEQ ID NO: 2209494
uuggagagaaggaaugccc

SEQ ID NO: 2209496 - RNA, 19 nt, Artificial Sequence
  Description of Artificial Sequence: Synthetic oligonucleotide
  Sense strand starting at position 3043 of SEQ ID NO: 1883688
ccugucagacauugccaau

SEQ ID NO: 2209497 - RNA, 19 nt, Artificial Sequence
  Description of Artificial Sequence: Synthetic oligonucleotide
  Antisense strand to SEQ ID NO: 2209496
auuggcaaugucugacagg

SEQ ID NO: 2209498 - RNA, 19 nt, Artificial Sequence
  Description of Artificial Sequence: Synthetic oligonucleotide
  Sense strand starting at position 2957 of SEQ ID NO: 1883688
cugugucuuccucaucuca

SEQ ID NO: 2209499 - RNA, 19 nt, Artificial Sequence
  Description of Artificial Sequence: Synthetic oligonucleotide
  Antisense strand to SEQ ID NO: 2209498
ugagaugaggaagacacag

SEQ ID NO: 2209500 - RNA, 19 nt, Artificial Sequence
  Description of Artificial Sequence: Synthetic oligonucleotide
  Sense strand starting at position 73 of SEQ ID NO: 1883688
ccaaauagucugugggcau

SEQ ID NO: 2209501 - RNA, 19 nt, Artificial Sequence
  Description of Artificial Sequence: Synthetic oligonucleotide
  Antisense strand to SEQ ID NO: 2209500
augcccacagacuauuugg

SEQ ID NO: 2209502 - RNA, 19 nt, Artificial Sequence
  Description of Artificial Sequence: Synthetic oligonucleotide
  Sense strand starting at position 3046 of SEQ ID NO: 1883688
gucagacauugccaauuuc

SEQ ID NO: 2209503 - RNA, 19 nt, Artificial Sequence
  Description of Artificial Sequence: Synthetic oligonucleotide
  Antisense strand to SEQ ID NO: 2209502
gaaauuggcaaugucugac

SEQ ID NO: 2209504 - RNA, 19 nt, Artificial Sequence
  Description of Artificial Sequence: Synthetic oligonucleotide
  Sense strand starting at position 2242 of SEQ ID NO: 1883688
ugaggaagcuguuugcuuu

SEQ ID NO: 2209505 - RNA, 19 nt, Artificial Sequence
  Description of Artificial Sequence: Synthetic oligonucleotide
  Antisense strand to SEQ ID NO: 2209504
aaagcaaacagcuuccuca

SEQ ID NO: 2209506 - RNA, 19 nt, Artificial Sequence
  Description of Artificial Sequence: Synthetic oligonucleotide
  Sense strand starting at position 774 of SEQ ID NO: 1883688
uuucuugccgcggagaauu

SEQ ID NO: 2209507 - RNA, 19 nt, Artificial Sequence
  Description of Artificial Sequence: Synthetic oligonucleotide
  Antisense strand to SEQ ID NO: 2209506
aauucuccgcggcaagaaa

SEQ ID NO: 2209508 - RNA, 19 nt, Artificial Sequence
  Description of Artificial Sequence: Synthetic oligonucleotide
  Sense strand starting at position 2231 of SEQ ID NO: 1883688
ggaguuacuucugaggaag

SEQ ID NO: 2209509 - RNA, 19 nt, Artificial Sequence
  Description of Artificial Sequence: Synthetic oligonucleotide
  Antisense strand to SEQ ID NO: 2209508
cuuccucagaaguaacucc

SEQ ID NO: 2209510 - RNA, 19 nt, Artificial Sequence
  Description of Artificial Sequence: Synthetic oligonucleotide
  Sense strand starting at position 415 of SEQ ID NO: 1883688
cgugaugucuuagcacuga

SEQ ID NO: 2209511 - RNA, 19 nt, Artificial Sequence
  Description of Artificial Sequence: Synthetic oligonucleotide
  Antisense strand to SEQ ID NO: 2209510
ucagugcuaagacaucacg

SEQ ID NO: 2209512 - RNA, 19 nt, Artificial Sequence
  Description of Artificial Sequence: Synthetic oligonucleotide
  Sense strand starting at position 2478 of SEQ ID NO: 1883688
ggcugcacgucccuaauaa

SEQ ID NO: 2209513 - RNA, 19 nt, Artificial Sequence
  Description of Artificial Sequence: Synthetic oligonucleotide
  Antisense strand to SEQ ID NO: 2209512
uuauuagggacgugcagcc

SEQ ID NO: 2209514 - RNA, 19 nt, Artificial Sequence
  Description of Artificial Sequence: Synthetic oligonucleotide
  Sense strand starting at position 2959 of SEQ ID NO: 1883688
gugucuuccucaucucagu

SEQ ID NO: 2209515 - RNA, 19 nt, Artificial Sequence
  Description of Artificial Sequence: Synthetic oligonucleotide
  Antisense strand to SEQ ID NO: 2209514
acugagaugaggaagacac

SEQ ID NO: 2209516 - RNA, 19 nt, Artificial Sequence
  Description of Artificial Sequence: Synthetic oligonucleotide
  Sense strand starting at position 265 of SEQ ID NO: 1883688
aguauagaguaguaagaca

SEQ ID NO: 2209517 - RNA, 19 nt, Artificial Sequence
  Description of Artificial Sequence: Synthetic oligonucleotide
  Antisense strand to SEQ ID NO: 2209516
ugucuuacuacucuauacu

SEQ ID NO: 2209518 - RNA, 19 nt, Artificial Sequence
  Description of Artificial Sequence: Synthetic oligonucleotide
  Sense strand starting at position 3798 of SEQ ID NO: 1883688
gcuguucuuucugcucaaa

SEQ ID NO: 2209519 - RNA, 19 nt, Artificial Sequence
  Description of Artificial Sequence: Synthetic oligonucleotide
  Antisense strand to SEQ ID NO: 2209518
uuugagcagaaagaacagc

SEQ ID NO: 2209520 - RNA, 19 nt, Artificial Sequence
  Description of Artificial Sequence: Synthetic oligonucleotide
  Sense strand starting at position 2045 of SEQ ID NO: 1883688
gcguuuacgguccagcaau

SEQ ID NO: 2209521 - RNA, 19 nt, Artificial Sequence
  Description of Artificial Sequence: Synthetic oligonucleotide
  Antisense strand to SEQ ID NO: 2209520
auugcuggaccguaaacgc

SEQ ID NO: 2209522 - RNA, 19 nt, Artificial Sequence
  Description of Artificial Sequence: Synthetic oligonucleotide
  Sense strand starting at position 2230 of SEQ ID NO: 1883688
gggaguuacuucugaggaa

SEQ ID NO: 2209523 - RNA, 19 nt, Artificial Sequence
  Description of Artificial Sequence: Synthetic oligonucleotide
  Antisense strand to SEQ ID NO: 2209522
uuccucagaaguaacuccc

SEQ ID NO: 2209524 - RNA, 19 nt, Artificial Sequence
  Description of Artificial Sequence: Synthetic oligonucleotide
  Sense strand starting at position 477 of SEQ ID NO: 1883688
gagaacuagucccaugcaa

SEQ ID NO: 2209525 - RNA, 19 nt, Artificial Sequence
  Description of Artificial Sequence: Synthetic oligonucleotide
  Antisense strand to SEQ ID NO: 2209524
uugcaugggacuaguucuc

SEQ ID NO: 2209526 - RNA, 19 nt, Artificial Sequence
  Description of Artificial Sequence: Synthetic oligonucleotide
  Sense strand starting at position 432 of SEQ ID NO: 1883688
gacgucccaucacagaauu

SEQ ID NO: 2209527 - RNA, 19 nt, Artificial Sequence
  Description of Artificial Sequence: Synthetic oligonucleotide
  Antisense strand to SEQ ID NO: 2209526
aauucugugaugggacguc

SEQ ID NO: 2209528 - RNA, 19 nt, Artificial Sequence
  Description of Artificial Sequence: Synthetic oligonucleotide
  Sense strand starting at position 511 of SEQ ID NO: 1883688
agacaugucuccugaggac

SEQ ID NO: 2209529 - RNA, 19 nt, Artificial Sequence
  Description of Artificial Sequence: Synthetic oligonucleotide
  Antisense strand to SEQ ID NO: 2209528
guccucaggagacaugucu

SEQ ID NO: 2209530 - RNA, 19 nt, Artificial Sequence
  Description of Artificial Sequence: Synthetic oligonucleotide
  Sense strand starting at position 1070 of SEQ ID NO: 1883688
gggacuaccuggugaaagu

SEQ ID NO: 2209531 - RNA, 19 nt, Artificial Sequence
  Description of Artificial Sequence: Synthetic oligonucleotide
  Antisense strand to SEQ ID NO: 2209530
acuuucaccagguaguccc

SEQ ID NO: 2209532 - RNA, 19 nt, Artificial Sequence
  Description of Artificial Sequence: Synthetic oligonucleotide
  Sense strand starting at position 2994 of SEQ ID NO: 1883688
uccaguuguucaggagaga

SEQ ID NO: 2209533 - RNA, 19 nt, Artificial Sequence
  Description of Artificial Sequence: Synthetic oligonucleotide
  Antisense strand to SEQ ID NO: 2209532
ucucuccugaacaacugga

SEQ ID NO: 2209534 - RNA, 19 nt, Artificial Sequence
  Description of Artificial Sequence: Synthetic oligonucleotide
  Sense strand starting at position 2361 of SEQ ID NO: 1883689
gcacauauaguagauauua

SEQ ID NO: 2209535 - RNA, 19 nt, Artificial Sequence
  Description of Artificial Sequence: Synthetic oligonucleotide
  Antisense strand to SEQ ID NO: 2209534
uaauaucuacuauaugugc

SEQ ID NO: 2209536 - RNA, 19 nt, Artificial Sequence
  Description of Artificial Sequence: Synthetic oligonucleotide
  Sense strand starting at position 478 of SEQ ID NO: 1883689
cgauaauugcuacagaaau

SEQ ID NO: 2209537 - RNA, 19 nt, Artificial Sequence
  Description of Artificial Sequence: Synthetic oligonucleotide
  Antisense strand to SEQ ID NO: 2209536
auuucuguagcaauuaucg

SEQ ID NO: 2209538 - RNA, 19 nt, Artificial Sequence
  Description of Artificial Sequence: Synthetic oligonucleotide
  Sense strand starting at position 3363 of SEQ ID NO: 1883689
gacacaagaucugugauac

SEQ ID NO: 2209539 - RNA, 19 nt, Artificial Sequence
  Description of Artificial Sequence: Synthetic oligonucleotide
  Antisense strand to SEQ ID NO: 2209538
guaucacagaucuuguguc

SEQ ID NO: 2209540 - RNA, 19 nt, Artificial Sequence
  Description of Artificial Sequence: Synthetic oligonucleotide
  Sense strand starting at position 2179 of SEQ ID NO: 1883689
gggcaauggguugaacauu

SEQ ID NO: 2209541 - RNA, 19 nt, Artificial Sequence
  Description of Artificial Sequence: Synthetic oligonucleotide
  Antisense strand to SEQ ID NO: 2209540
aauguucaacccauugccc

SEQ ID NO: 2209542 - RNA, 19 nt, Artificial Sequence
  Description of Artificial Sequence: Synthetic oligonucleotide
  Sense strand starting at position 1323 of SEQ ID NO: 1883689
gugaacaaugaugguaaau

SEQ ID NO: 2209543 - RNA, 19 nt, Artificial Sequence
  Description of Artificial Sequence: Synthetic oligonucleotide
  Antisense strand to SEQ ID NO: 2209542
auuuaccaucauuguucac

SEQ ID NO: 2209544 - RNA, 19 nt, Artificial Sequence
  Description of Artificial Sequence: Synthetic oligonucleotide
  Sense strand starting at position 806 of SEQ ID NO: 1883689
aggaccuuguaauuaauua

SEQ ID NO: 2209545 - RNA, 19 nt, Artificial Sequence
  Description of Artificial Sequence: Synthetic oligonucleotide
  Antisense strand to SEQ ID NO: 2209544
uaauuaauuacaagguccu

SEQ ID NO: 2209546 - RNA, 19 nt, Artificial Sequence
  Description of Artificial Sequence: Synthetic oligonucleotide
  Sense strand starting at position 810 of SEQ ID NO: 1883689
ccuuguaauuaauuagaag

SEQ ID NO: 2209547 - RNA, 19 nt, Artificial Sequence
  Description of Artificial Sequence: Synthetic oligonucleotide
  Antisense strand to SEQ ID NO: 2209546
cuucuaauuaauuacaagg

SEQ ID NO: 2209548 - RNA, 19 nt, Artificial Sequence
  Description of Artificial Sequence: Synthetic oligonucleotide
  Sense strand starting at position 3364 of SEQ ID NO: 1883689
acacaagaucugugauacu

SEQ ID NO: 2209549 - RNA, 19 nt, Artificial Sequence
  Description of Artificial Sequence: Synthetic oligonucleotide
  Antisense strand to SEQ ID NO: 2209548
aguaucacagaucuugugu

SEQ ID NO: 2209550 - RNA, 19 nt, Artificial Sequence
  Description of Artificial Sequence: Synthetic oligonucleotide
  Sense strand starting at position 543 of SEQ ID NO: 1883689
gguggaguuaacuaaugua

SEQ ID NO: 2209551 - RNA, 19 nt, Artificial Sequence
  Description of Artificial Sequence: Synthetic oligonucleotide
  Antisense strand to SEQ ID NO: 2209550
uacauuaguuaacuccacc

SEQ ID NO: 2209552 - RNA, 19 nt, Artificial Sequence
  Description of Artificial Sequence: Synthetic oligonucleotide
  Sense strand starting at position 2419 of SEQ ID NO: 1883689
ggguuauguggacacacuu

SEQ ID NO: 2209553 - RNA, 19 nt, Artificial Sequence
  Description of Artificial Sequence: Synthetic oligonucleotide
  Antisense strand to SEQ ID NO: 2209552
aaguguguccacauaaccc

SEQ ID NO: 2209554 - RNA, 19 nt, Artificial Sequence
  Description of Artificial Sequence: Synthetic oligonucleotide
  Sense strand starting at position 3703 of SEQ ID NO: 1883689
uuccacaaccuguaaggua

SEQ ID NO: 2209555 - RNA, 19 nt, Artificial Sequence
  Description of Artificial Sequence: Synthetic oligonucleotide
  Antisense strand to SEQ ID NO: 2209554
uaccuuacagguuguggaa

SEQ ID NO: 2209556 - RNA, 19 nt, Artificial Sequence
  Description of Artificial Sequence: Synthetic oligonucleotide
  Sense strand starting at position 1431 of SEQ ID NO: 1883689
uggucaaauccuggauaua

SEQ ID NO: 2209557 - RNA, 19 nt, Artificial Sequence
  Description of Artificial Sequence: Synthetic oligonucleotide
  Antisense strand to SEQ ID NO: 2209556
uauauccaggauuugacca

SEQ ID NO: 2209558 - RNA, 19 nt, Artificial Sequence
  Description of Artificial Sequence: Synthetic oligonucleotide
  Sense strand starting at position 801 of SEQ ID NO: 1883689
cauggaggaccuuguaauu

SEQ ID NO: 2209559 - RNA, 19 nt, Artificial Sequence
  Description of Artificial Sequence: Synthetic oligonucleotide
  Antisense strand to SEQ ID NO: 2209558
aauuacaagguccuccaug

SEQ ID NO: 2209560 - RNA, 19 nt, Artificial Sequence
  Description of Artificial Sequence: Synthetic oligonucleotide
  Sense strand starting at position 98 of SEQ ID NO: 1883689
acugaaaggcuuugggauu

SEQ ID NO: 2209561 - RNA, 19 nt, Artificial Sequence
  Description of Artificial Sequence: Synthetic oligonucleotide
  Antisense strand to SEQ ID NO: 2209560
aaucccaaagccuuucagu

SEQ ID NO: 2209562 - RNA, 19 nt, Artificial Sequence
  Description of Artificial Sequence: Synthetic oligonucleotide
  Sense strand starting at position 2178 of SEQ ID NO: 1883689
agggcaauggguugaacau

SEQ ID NO: 2209563 - RNA, 19 nt, Artificial Sequence
  Description of Artificial Sequence: Synthetic oligonucleotide
  Antisense strand to SEQ ID NO: 2209562
auguucaacccauugcccu

SEQ ID NO: 2209564 - RNA, 19 nt, Artificial Sequence
  Description of Artificial Sequence: Synthetic oligonucleotide
  Sense strand starting at position 1235 of SEQ ID NO: 1883689
ggcuacuguguugaggaaa

SEQ ID NO: 2209565 - RNA, 19 nt, Artificial Sequence
  Description of Artificial Sequence: Synthetic oligonucleotide
  Antisense strand to SEQ ID NO: 2209564
uuuccucaacacaguagcc

SEQ ID NO: 2209566 - RNA, 19 nt, Artificial Sequence
  Description of Artificial Sequence: Synthetic oligonucleotide
  Sense strand starting at position 3846 of SEQ ID NO: 1883689
gguucuaauggcuauauau

SEQ ID NO: 2209567 - RNA, 19 nt, Artificial Sequence
  Description of Artificial Sequence: Synthetic oligonucleotide
  Antisense strand to SEQ ID NO: 2209566
auauauagccauuagaacc

SEQ ID NO: 2209568 - RNA, 19 nt, Artificial Sequence
  Description of Artificial Sequence: Synthetic oligonucleotide
  Sense strand starting at position 1197 of SEQ ID NO: 1883689
agagaagcgaucugaucua

SEQ ID NO: 2209569 - RNA, 19 nt, Artificial Sequence
  Description of Artificial Sequence: Synthetic oligonucleotide
  Antisense strand to SEQ ID NO: 2209568
uagaucagaucgcuucucu

SEQ ID NO: 2209570 - RNA, 19 nt, Artificial Sequence
  Description of Artificial Sequence: Synthetic oligonucleotide
  Sense strand starting at position 2628 of SEQ ID NO: 1883689
gagugaauauuugacauau

SEQ ID NO: 2209571 - RNA, 19 nt, Artificial Sequence
  Description of Artificial Sequence: Synthetic oligonucleotide
  Antisense strand to SEQ ID NO: 2209570
auaugucaaauauucacuc

SEQ ID NO: 2209572 - RNA, 19 nt, Artificial Sequence
  Description of Artificial Sequence: Synthetic oligonucleotide
  Sense strand starting at position 3464 of SEQ ID NO: 1883689
gaugauuuguguucugcuu

SEQ ID NO: 2209573 - RNA, 19 nt, Artificial Sequence
  Description of Artificial Sequence: Synthetic oligonucleotide
  Antisense strand to SEQ ID NO: 2209572
aagcagaacacaaaucauc

SEQ ID NO: 2209574 - RNA, 19 nt, Artificial Sequence
  Description of Artificial Sequence: Synthetic oligonucleotide
  Sense strand starting at position 534 of SEQ ID NO: 1883689
gagaauguggguggaguua

SEQ ID NO: 2209575 - RNA, 19 nt, Artificial Sequence
  Description of Artificial Sequence: Synthetic oligonucleotide
  Antisense strand to SEQ ID NO: 2209574
uaacuccacccacauucuc

SEQ ID NO: 2209576 - RNA, 19 nt, Artificial Sequence
  Description of Artificial Sequence: Synthetic oligonucleotide
  Sense strand starting at position 1284 of SEQ ID NO: 1883689
aucaaagagcccuguuaga

SEQ ID NO: 2209577 - RNA, 19 nt, Artificial Sequence
  Description of Artificial Sequence: Synthetic oligonucleotide
  Antisense strand to SEQ ID NO: 2209576
ucuaacagggcucuuugau

SEQ ID NO: 2209578 - RNA, 19 nt, Artificial Sequence
  Description of Artificial Sequence: Synthetic oligonucleotide
  Sense strand starting at position 533 of SEQ ID NO: 1883689
ggagaauguggguggaguu

SEQ ID NO: 2209579 - RNA, 19 nt, Artificial Sequence
  Description of Artificial Sequence: Synthetic oligonucleotide
  Antisense strand to SEQ ID NO: 2209578
aacuccacccacauucucc

SEQ ID NO: 2209580 - RNA, 19 nt, Artificial Sequence
  Description of Artificial Sequence: Synthetic oligonucleotide
  Sense strand starting at position 615 of SEQ ID NO: 1883689
guagcucaccaagagcaua

SEQ ID NO: 2209581 - RNA, 19 nt, Artificial Sequence
  Description of Artificial Sequence: Synthetic oligonucleotide
  Antisense strand to SEQ ID NO: 2209580
uaugcucuuggugagcuac

SEQ ID NO: 2209582 - RNA, 19 nt, Artificial Sequence
  Description of Artificial Sequence: Synthetic oligonucleotide
  Sense strand starting at position 2911 of SEQ ID NO: 1883689
guucuuguucuugaaauua

SEQ ID NO: 2209583 - RNA, 19 nt, Artificial Sequence
  Description of Artificial Sequence: Synthetic oligonucleotide
  Antisense strand to SEQ ID NO: 2209582
uaauuucaagaacaagaac

SEQ ID NO: 2209584 - RNA, 19 nt, Artificial Sequence
  Description of Artificial Sequence: Synthetic oligonucleotide
  Sense strand starting at position 1410 of SEQ ID NO: 1883689
agcaaugaggguggugaua

SEQ ID NO: 2209585 - RNA, 19 nt, Artificial Sequence
  Description of Artificial Sequence: Synthetic oligonucleotide
  Antisense strand to SEQ ID NO: 2209584
uaucaccacccucauugcu

SEQ ID NO: 2209586 - RNA, 19 nt, Artificial Sequence
  Description of Artificial Sequence: Synthetic oligonucleotide
  Sense strand starting at position 1422 of SEQ ID NO: 1883689
ggugauaaguggucaaauc

SEQ ID NO: 2209587 - RNA, 19 nt, Artificial Sequence
  Description of Artificial Sequence: Synthetic oligonucleotide
  Antisense strand to SEQ ID NO: 2209586
gauuugaccacuuaucacc

SEQ ID NO: 2209588 - RNA, 19 nt, Artificial Sequence
  Description of Artificial Sequence: Synthetic oligonucleotide
  Sense strand starting at position 1172 of SEQ ID NO: 1883689
gucacuagagaguguugaa

SEQ ID NO: 2209589 - RNA, 19 nt, Artificial Sequence
  Description of Artificial Sequence: Synthetic oligonucleotide
  Antisense strand to SEQ ID NO: 2209588
uucaacacucucuagugac

SEQ ID NO: 2209590 - RNA, 19 nt, Artificial Sequence
  Description of Artificial Sequence: Synthetic oligonucleotide
  Sense strand starting at position 2300 of SEQ ID NO: 1883689
acuaguagaccauguccua

SEQ ID NO: 2209591 - RNA, 19 nt, Artificial Sequence
  Description of Artificial Sequence: Synthetic oligonucleotide
  Antisense strand to SEQ ID NO: 2209590
uaggacauggucuacuagu

SEQ ID NO: 2209592 - RNA, 19 nt, Artificial Sequence
  Description of Artificial Sequence: Synthetic oligonucleotide
  Sense strand starting at position 1356 of SEQ ID NO: 1883689
ggauuugacuaugauggca

SEQ ID NO: 2209593 - RNA, 19 nt, Artificial Sequence
  Description of Artificial Sequence: Synthetic oligonucleotide
  Antisense strand to SEQ ID NO: 2209592
ugccaucauagucaaaucc

SEQ ID NO: 2209594 - RNA, 19 nt, Artificial Sequence
  Description of Artificial Sequence: Synthetic oligonucleotide
  Sense strand starting at position 1512 of SEQ ID NO: 1883689
uucugaguagccugauaaa

SEQ ID NO: 2209595 - RNA, 19 nt, Artificial Sequence
  Description of Artificial Sequence: Synthetic oligonucleotide
  Antisense strand to SEQ ID NO: 2209594
uuuaucaggcuacucagaa

SEQ ID NO: 2209596 - RNA, 19 nt, Artificial Sequence
  Description of Artificial Sequence: Synthetic oligonucleotide
  Sense strand starting at position 634 of SEQ ID NO: 1883689
ucuggaaagcaauguucca

SEQ ID NO: 2209597 - RNA, 19 nt, Artificial Sequence
  Description of Artificial Sequence: Synthetic oligonucleotide
  Antisense strand to SEQ ID NO: 2209596
uggaacauugcuuuccaga

SEQ ID NO: 2209598 - RNA, 19 nt, Artificial Sequence
  Description of Artificial Sequence: Synthetic oligonucleotide
  Sense strand starting at position 1892 of SEQ ID NO: 1883689
ucaagaugucgguaggguu

SEQ ID NO: 2209599 - RNA, 19 nt, Artificial Sequence
  Description of Artificial Sequence: Synthetic oligonucleotide
  Antisense strand to SEQ ID NO: 2209598
aacccuaccgacaucuuga

SEQ ID NO: 2209600 - RNA, 19 nt, Artificial Sequence
  Description of Artificial Sequence: Synthetic oligonucleotide
  Sense strand starting at position 112 of SEQ ID NO: 1883689
ggauuagacugccuagguu

SEQ ID NO: 2209601 - RNA, 19 nt, Artificial Sequence
  Description of Artificial Sequence: Synthetic oligonucleotide
  Antisense strand to SEQ ID NO: 2209600
aaccuaggcagucuaaucc

SEQ ID NO: 2209602 - RNA, 19 nt, Artificial Sequence
  Description of Artificial Sequence: Synthetic oligonucleotide
  Sense strand starting at position 641 of SEQ ID NO: 1883689
agcaauguuccagguagag

SEQ ID NO: 2209603 - RNA, 19 nt, Artificial Sequence
  Description of Artificial Sequence: Synthetic oligonucleotide
  Antisense strand to SEQ ID NO: 2209602
cucuaccuggaacauugcu

SEQ ID NO: 2209604 - RNA, 19 nt, Artificial Sequence
  Description of Artificial Sequence: Synthetic oligonucleotide
  Sense strand starting at position 17 of SEQ ID NO: 1883689
ucaguucugucaucuagaa

SEQ ID NO: 2209605 - RNA, 19 nt, Artificial Sequence
  Description of Artificial Sequence: Synthetic oligonucleotide
  Antisense strand to SEQ ID NO: 2209604
uucuagaugacagaacuga

SEQ ID NO: 2209606 - RNA, 19 nt, Artificial Sequence
  Description of Artificial Sequence: Synthetic oligonucleotide
  Sense strand starting at position 1997 of SEQ ID NO: 1883689
auauguaucuucuuguaag

SEQ ID NO: 2209607 - RNA, 19 nt, Artificial Sequence
  Description of Artificial Sequence: Synthetic oligonucleotide
  Antisense strand to SEQ ID NO: 2209606
cuuacaagaagauacauau

SEQ ID NO: 2209608 - RNA, 19 nt, Artificial Sequence
  Description of Artificial Sequence: Synthetic oligonucleotide
  Sense strand starting at position 1399 of SEQ ID NO: 1883689
aacuguguauuagcaauga

SEQ ID NO: 2209609 - RNA, 19 nt, Artificial Sequence
  Description of Artificial Sequence: Synthetic oligonucleotide
  Antisense strand to SEQ ID NO: 2209608
ucauugcuaauacacaguu

SEQ ID NO: 2209610 - RNA, 19 nt, Artificial Sequence
  Description of Artificial Sequence: Synthetic oligonucleotide
  Sense strand starting at position 2253 of SEQ ID NO: 1883689
uccucaugucauuaugcua

SEQ ID NO: 2209611 - RNA, 19 nt, Artificial Sequence
  Description of Artificial Sequence: Synthetic oligonucleotide
  Antisense strand to SEQ ID NO: 2209610
uagcauaaugacaugagga

SEQ ID NO: 2209612 - RNA, 19 nt, Artificial Sequence
  Description of Artificial Sequence: Synthetic oligonucleotide
  Sense strand starting at position 3712 of SEQ ID NO: 1883689
cuguaagguaagugaaagu

SEQ ID NO: 2209613 - RNA, 19 nt, Artificial Sequence
  Description of Artificial Sequence: Synthetic oligonucleotide
  Antisense strand to SEQ ID NO: 2209612
acuuucacuuaccuuacag

SEQ ID NO: 2209614 - RNA, 19 nt, Artificial Sequence
  Description of Artificial Sequence: Synthetic oligonucleotide
  Sense strand starting at position 505 of SEQ ID NO: 1883690
ggaggcuggacauaucagu

SEQ ID NO: 2209615 - RNA, 19 nt, Artificial Sequence
  Description of Artificial Sequence: Synthetic oligonucleotide
  Antisense strand to SEQ ID NO: 2209614
acugauauguccagccucc

SEQ ID NO: 2209616 - RNA, 19 nt, Artificial Sequence
  Description of Artificial Sequence: Synthetic oligonucleotide
  Sense strand starting at position 457 of SEQ ID NO: 1883690
guuauuuaggcugaguguu

SEQ ID NO: 2209617 - RNA, 19 nt, Artificial Sequence
  Description of Artificial Sequence: Synthetic oligonucleotide
  Antisense strand to SEQ ID NO: 2209616
aacacucagccuaaauaac

SEQ ID NO: 2209618 - RNA, 19 nt, Artificial Sequence
  Description of Artificial Sequence: Synthetic oligonucleotide
  Sense strand starting at position 442 of SEQ ID NO: 1883690
uacgaaauuugugugguua

SEQ ID NO: 2209619 - RNA, 19 nt, Artificial Sequence
  Description of Artificial Sequence: Synthetic oligonucleotide
  Antisense strand to SEQ ID NO: 2209618
uaaccacacaaauuucgua

SEQ ID NO: 2209620 - RNA, 19 nt, Artificial Sequence
  Description of Artificial Sequence: Synthetic oligonucleotide
  Sense strand starting at position 172 of SEQ ID NO: 1883690
accugauagucacugaaau

SEQ ID NO: 2209621 - RNA, 19 nt, Artificial Sequence
  Description of Artificial Sequence: Synthetic oligonucleotide
  Antisense strand to SEQ ID NO: 2209620
auuucagugacuaucaggu

SEQ ID NO: 2209622 - RNA, 19 nt, Artificial Sequence
  Description of Artificial Sequence: Synthetic oligonucleotide
  Sense strand starting at position 1111 of SEQ ID NO: 1883690
ggaacauugcugggacaau

SEQ ID NO: 2209623 - RNA, 19 nt, Artificial Sequence
  Description of Artificial Sequence: Synthetic oligonucleotide
  Antisense strand to SEQ ID NO: 2209622
auugucccagcaauguucc

SEQ ID NO: 2209624 - RNA, 19 nt, Artificial Sequence
  Description of Artificial Sequence: Synthetic oligonucleotide
  Sense strand starting at position 443 of SEQ ID NO: 1883690
acgaaauuugugugguuau

SEQ ID NO: 2209625 - RNA, 19 nt, Artificial Sequence
  Description of Artificial Sequence: Synthetic oligonucleotide
  Antisense strand to SEQ ID NO: 2209624
auaaccacacaaauuucgu

SEQ ID NO: 2209626 - RNA, 19 nt, Artificial Sequence
  Description of Artificial Sequence: Synthetic oligonucleotide
  Sense strand starting at position 169 of SEQ ID NO: 1883690
gauaccugauagucacuga

SEQ ID NO: 2209627 - RNA, 19 nt, Artificial Sequence
  Description of Artificial Sequence: Synthetic oligonucleotide
  Antisense strand to SEQ ID NO: 2209626
ucagugacuaucagguauc

SEQ ID NO: 2209628 - RNA, 19 nt, Artificial Sequence
  Description of Artificial Sequence: Synthetic oligonucleotide
  Sense strand starting at position 173 of SEQ ID NO: 1883690
ccugauagucacugaaaug

SEQ ID NO: 2209629 - RNA, 19 nt, Artificial Sequence
  Description of Artificial Sequence: Synthetic oligonucleotide
  Antisense strand to SEQ ID NO: 2209628
cauuucagugacuaucagg

SEQ ID NO: 2209630 - RNA, 19 nt, Artificial Sequence
  Description of Artificial Sequence: Synthetic oligonucleotide
  Sense strand starting at position 1083 of SEQ ID NO: 1883690
gggagaaguucccucucag

SEQ ID NO: 2209631 - RNA, 19 nt, Artificial Sequence
  Description of Artificial Sequence: Synthetic oligonucleotide
  Antisense strand to SEQ ID NO: 2209630
cugagagggaacuucuccc

SEQ ID NO: 2209632 - RNA, 19 nt, Artificial Sequence
  Description of Artificial Sequence: Synthetic oligonucleotide
  Sense strand starting at position 510 of SEQ ID NO: 1883690
cuggacauaucaguacuua

SEQ ID NO: 2209633 - RNA, 19 nt, Artificial Sequence
  Description of Artificial Sequence: Synthetic oligonucleotide
  Antisense strand to SEQ ID NO: 2209632
uaaguacugauauguccag

SEQ ID NO: 2209634 - RNA, 19 nt, Artificial Sequence
  Description of Artificial Sequence: Synthetic oligonucleotide
  Sense strand starting at position 659 of SEQ ID NO: 1883690
agcuguuuaagguagaaug

SEQ ID NO: 2209635 - RNA, 19 nt, Artificial Sequence
  Description of Artificial Sequence: Synthetic oligonucleotide
  Antisense strand to SEQ ID NO: 2209634
cauucuaccuuaaacagcu

SEQ ID NO: 2209636 - RNA, 19 nt, Artificial Sequence
  Description of Artificial Sequence: Synthetic oligonucleotide
  Sense strand starting at position 454 of SEQ ID NO: 1883690
gugguuauuuaggcugagu

SEQ ID NO: 2209637 - RNA, 19 nt, Artificial Sequence
  Description of Artificial Sequence: Synthetic oligonucleotide
  Antisense strand to SEQ ID NO: 2209636
acucagccuaaauaaccac

SEQ ID NO: 2209638 - RNA, 19 nt, Artificial Sequence
  Description of Artificial Sequence: Synthetic oligonucleotide
  Sense strand starting at position 456 of SEQ ID NO: 1883690
gguuauuuaggcugagugu

SEQ ID NO: 2209639 - RNA, 19 nt, Artificial Sequence
  Description of Artificial Sequence: Synthetic oligonucleotide
  Antisense strand to SEQ ID NO: 2209638
acacucagccuaaauaacc

SEQ ID NO: 2209640 - RNA, 19 nt, Artificial Sequence
  Description of Artificial Sequence: Synthetic oligonucleotide
  Sense strand starting at position 2333 of SEQ ID NO: 1883690
cgccauguuggcagagagu

SEQ ID NO: 2209641 - RNA, 19 nt, Artificial Sequence
  Description of Artificial Sequence: Synthetic oligonucleotide
  Antisense strand to SEQ ID NO: 2209640
acucucugccaacauggcg

SEQ ID NO: 2209642 - RNA, 19 nt, Artificial Sequence
  Description of Artificial Sequence: Synthetic oligonucleotide
  Sense strand starting at position 669 of SEQ ID NO: 1883690
gguagaaugcaagauugcu

SEQ ID NO: 2209643 - RNA, 19 nt, Artificial Sequence
  Description of Artificial Sequence: Synthetic oligonucleotide
  Antisense strand to SEQ ID NO: 2209642
agcaaucuugcauucuacc

SEQ ID NO: 2209644 - RNA, 19 nt, Artificial Sequence
  Description of Artificial Sequence: Synthetic oligonucleotide
  Sense strand starting at position 246 of SEQ ID NO: 1883690
uguccuuguccauaacaca

SEQ ID NO: 2209645 - RNA, 19 nt, Artificial Sequence
  Description of Artificial Sequence: Synthetic oligonucleotide
  Antisense strand to SEQ ID NO: 2209644
uguguuauggacaaggaca

SEQ ID NO: 2209646 - RNA, 19 nt, Artificial Sequence
  Description of Artificial Sequence: Synthetic oligonucleotide
  Sense strand starting at position 337 of SEQ ID NO: 1883690
uuagcuuugcuccaaagag

SEQ ID NO: 2209647 - RNA, 19 nt, Artificial Sequence
  Description of Artificial Sequence: Synthetic oligonucleotide
  Antisense strand to SEQ ID NO: 2209646
cucuuuggagcaaagcuaa

SEQ ID NO: 2209648 - RNA, 19 nt, Artificial Sequence
  Description of Artificial Sequence: Synthetic oligonucleotide
  Sense strand starting at position 654 of SEQ ID NO: 1883690
ccuggagcuguuuaaggua

SEQ ID NO: 2209649 - RNA, 19 nt, Artificial Sequence
  Description of Artificial Sequence: Synthetic oligonucleotide
  Antisense strand to SEQ ID NO: 2209648
uaccuuaaacagcuccagg

SEQ ID NO: 2209650 - RNA, 19 nt, Artificial Sequence
  Description of Artificial Sequence: Synthetic oligonucleotide
  Sense strand starting at position 3094 of SEQ ID NO: 1883690
aaugaagucguuuauguca

SEQ ID NO: 2209651 - RNA, 19 nt, Artificial Sequence
  Description of Artificial Sequence: Synthetic oligonucleotide
  Antisense strand to SEQ ID NO: 2209650
ugacauaaacgacuucauu

SEQ ID NO: 2209652 - RNA, 19 nt, Artificial Sequence
  Description of Artificial Sequence: Synthetic oligonucleotide
  Sense strand starting at position 432 of SEQ ID NO: 1883690
uaaugagugcuacgaaauu

SEQ ID NO: 2209653 - RNA, 19 nt, Artificial Sequence
  Description of Artificial Sequence: Synthetic oligonucleotide
  Antisense strand to SEQ ID NO: 2209652
aauuucguagcacucauua

SEQ ID NO: 2209654 - RNA, 19 nt, Artificial Sequence
  Description of Artificial Sequence: Synthetic oligonucleotide
  Sense strand starting at position 244 of SEQ ID NO: 1883690
uguguccuuguccauaaca

SEQ ID NO: 2209655 - RNA, 19 nt, Artificial Sequence
  Description of Artificial Sequence: Synthetic oligonucleotide
  Antisense strand to SEQ ID NO: 2209654
uguuauggacaaggacaca

SEQ ID NO: 2209656 - RNA, 19 nt, Artificial Sequence
  Description of Artificial Sequence: Synthetic oligonucleotide
  Sense strand starting at position 2714 of SEQ ID NO: 1883690
ccucgaacucgguaaccuu

SEQ ID NO: 2209657 - RNA, 19 nt, Artificial Sequence
  Description of Artificial Sequence: Synthetic oligonucleotide
  Antisense strand to SEQ ID NO: 2209656
aagguuaccgaguucgagg

SEQ ID NO: 2209658 - RNA, 19 nt, Artificial Sequence
  Description of Artificial Sequence: Synthetic oligonucleotide
  Sense strand starting at position 3258 of SEQ ID NO: 1883690
gcgcgguggcuucuguaau

SEQ ID NO: 2209659 - RNA, 19 nt, Artificial Sequence
  Description of Artificial Sequence: Synthetic oligonucleotide
  Antisense strand to SEQ ID NO: 2209658
auuacagaagccaccgcgc

SEQ ID NO: 2209660 - RNA, 19 nt, Artificial Sequence
  Description of Artificial Sequence: Synthetic oligonucleotide
  Sense strand starting at position 3702 of SEQ ID NO: 1883690
aaaugaguccaguguggug

SEQ ID NO: 2209661 - RNA, 19 nt, Artificial Sequence
  Description of Artificial Sequence: Synthetic oligonucleotide
  Antisense strand to SEQ ID NO: 2209660
caccacacuggacucauuu

SEQ ID NO: 2209662 - RNA, 19 nt, Artificial Sequence
  Description of Artificial Sequence: Synthetic oligonucleotide
  Sense strand starting at position 1275 of SEQ ID NO: 1883690
uccgcaugugguuaucaau

SEQ ID NO: 2209663 - RNA, 19 nt, Artificial Sequence
  Description of Artificial Sequence: Synthetic oligonucleotide
  Antisense strand to SEQ ID NO: 2209662
auugauaaccacaugcgga

SEQ ID NO: 2209664 - RNA, 19 nt, Artificial Sequence
  Description of Artificial Sequence: Synthetic oligonucleotide
  Sense strand starting at position 326 of SEQ ID NO: 1883690
gcaggagcccuuuagcuuu

SEQ ID NO: 2209665 - RNA, 19 nt, Artificial Sequence
  Description of Artificial Sequence: Synthetic oligonucleotide
  Antisense strand to SEQ ID NO: 2209664
aaagcuaaagggcuccugc

SEQ ID NO: 2209666 - RNA, 19 nt, Artificial Sequence
  Description of Artificial Sequence: Synthetic oligonucleotide
  Sense strand starting at position 3941 of SEQ ID NO: 1883690
uugcaauuauguguuauuc

SEQ ID NO: 2209667 - RNA, 19 nt, Artificial Sequence
  Description of Artificial Sequence: Synthetic oligonucleotide
  Antisense strand to SEQ ID NO: 2209666
gaauaacacauaauugcaa

SEQ ID NO: 2209668 - RNA, 19 nt, Artificial Sequence
  Description of Artificial Sequence: Synthetic oligonucleotide
  Sense strand starting at position 885 of SEQ ID NO: 1883690
cugaauauaucacacggaa

SEQ ID NO: 2209669 - RNA, 19 nt, Artificial Sequence
  Description of Artificial Sequence: Synthetic oligonucleotide
  Antisense strand to SEQ ID NO: 2209668
uuccgugugauauauucag

SEQ ID NO: 2209670 - RNA, 19 nt, Artificial Sequence
  Description of Artificial Sequence: Synthetic oligonucleotide
  Sense strand starting at position 352 of SEQ ID NO: 1883690
agagaagcaucuuagacca

SEQ ID NO: 2209671 - RNA, 19 nt, Artificial Sequence
  Description of Artificial Sequence: Synthetic oligonucleotide
  Antisense strand to SEQ ID NO: 2209670
uggucuaagaugcuucucu

SEQ ID NO: 2209672 - RNA, 19 nt, Artificial Sequence
  Description of Artificial Sequence: Synthetic oligonucleotide
  Sense strand starting at position 195 of SEQ ID NO: 1883690
ucaacaaugucccaaggga

SEQ ID NO: 2209673 - RNA, 19 nt, Artificial Sequence
  Description of Artificial Sequence: Synthetic oligonucleotide
  Antisense strand to SEQ ID NO: 2209672
ucccuugggacauuguuga

SEQ ID NO: 2209674 - RNA, 19 nt, Artificial Sequence
  Description of Artificial Sequence: Synthetic oligonucleotide
  Sense strand starting at position 935 of SEQ ID NO: 1883690
aaggaauucuucuggaaga

SEQ ID NO: 2209675 - RNA, 19 nt, Artificial Sequence
  Description of Artificial Sequence: Synthetic oligonucleotide
  Antisense strand to SEQ ID NO: 2209674
ucuuccagaagaauuccuu

SEQ ID NO: 2209676 - RNA, 19 nt, Artificial Sequence
  Description of Artificial Sequence: Synthetic oligonucleotide
  Sense strand starting at position 1112 of SEQ ID NO: 1883690
gaacauugcugggacaaua

SEQ ID NO: 2209677 - RNA, 19 nt, Artificial Sequence
  Description of Artificial Sequence: Synthetic oligonucleotide
  Antisense strand to SEQ ID NO: 2209676
uauugucccagcaauguuc

SEQ ID NO: 2209678 - RNA, 19 nt, Artificial Sequence
  Description of Artificial Sequence: Synthetic oligonucleotide
  Sense strand starting at position 650 of SEQ ID NO: 1883690
gccuccuggagcuguuuaa

SEQ ID NO: 2209679 - RNA, 19 nt, Artificial Sequence
  Description of Artificial Sequence: Synthetic oligonucleotide
  Antisense strand to SEQ ID NO: 2209678
uuaaacagcuccaggaggc

SEQ ID NO: 2209680 - RNA, 19 nt, Artificial Sequence
  Description of Artificial Sequence: Synthetic oligonucleotide
  Sense strand starting at position 2940 of SEQ ID NO: 1883690
guggcauuucugcgugucu

SEQ ID NO: 2209681 - RNA, 19 nt, Artificial Sequence
  Description of Artificial Sequence: Synthetic oligonucleotide
  Antisense strand to SEQ ID NO: 2209680
agacacgcagaaaugccac

SEQ ID NO: 2209682 - RNA, 19 nt, Artificial Sequence
  Description of Artificial Sequence: Synthetic oligonucleotide
  Sense strand starting at position 936 of SEQ ID NO: 1883690
aggaauucuucuggaagau

SEQ ID NO: 2209683 - RNA, 19 nt, Artificial Sequence
  Description of Artificial Sequence: Synthetic oligonucleotide
  Antisense strand to SEQ ID NO: 2209682
aucuuccagaagaauuccu

SEQ ID NO: 2209684 - RNA, 19 nt, Artificial Sequence
  Description of Artificial Sequence: Synthetic oligonucleotide
  Sense strand starting at position 1140 of SEQ ID NO: 1883690
ucguuaauacaguggugca

SEQ ID NO: 2209685 - RNA, 19 nt, Artificial Sequence
  Description of Artificial Sequence: Synthetic oligonucleotide
  Antisense strand to SEQ ID NO: 2209684
ugcaccacuguauuaacga

SEQ ID NO: 2209686 - RNA, 19 nt, Artificial Sequence
  Description of Artificial Sequence: Synthetic oligonucleotide
  Sense strand starting at position 916 of SEQ ID NO: 1883690
cacaaacugugaggacaau

SEQ ID NO: 2209687 - RNA, 19 nt, Artificial Sequence
  Description of Artificial Sequence: Synthetic oligonucleotide
  Antisense strand to SEQ ID NO: 2209686
auuguccucacaguuugug

SEQ ID NO: 2209688 - RNA, 19 nt, Artificial Sequence
  Description of Artificial Sequence: Synthetic oligonucleotide
  Sense strand starting at position 239 of SEQ ID NO: 1883690
caguuuguguccuugucca

SEQ ID NO: 2209689 - RNA, 19 nt, Artificial Sequence
  Description of Artificial Sequence: Synthetic oligonucleotide
  Antisense strand to SEQ ID NO: 2209688
uggacaaggacacaaacug

SEQ ID NO: 2209690 - RNA, 19 nt, Artificial Sequence
  Description of Artificial Sequence: Synthetic oligonucleotide
  Sense strand starting at position 1274 of SEQ ID NO: 1883690
guccgcaugugguuaucaa

SEQ ID NO: 2209691 - RNA, 19 nt, Artificial Sequence
  Description of Artificial Sequence: Synthetic oligonucleotide
  Antisense strand to SEQ ID NO: 2209690
uugauaaccacaugcggac

SEQ ID NO: 2209692 - RNA, 19 nt, Artificial Sequence
  Description of Artificial Sequence: Synthetic oligonucleotide
  Sense strand starting at position 2741 of SEQ ID NO: 1883690
gcuugagaugacugcgcuu

SEQ ID NO: 2209693 - RNA, 19 nt, Artificial Sequence
  Description of Artificial Sequence: Synthetic oligonucleotide
  Antisense strand to SEQ ID NO: 2209692
aagcgcagucaucucaagc

SEQ ID NO: 2209694 - RNA, 19 nt, Artificial Sequence
  Description of Artificial Sequence: Synthetic oligonucleotide
  Sense strand starting at position 2891 of SEQ ID NO: 1883691
uucuccacuguugaugaaa

SEQ ID NO: 2209695 - RNA, 19 nt, Artificial Sequence
  Description of Artificial Sequence: Synthetic oligonucleotide
  Antisense strand to SEQ ID NO: 2209694
uuucaucaacaguggagaa

SEQ ID NO: 2209696 - RNA, 19 nt, Artificial Sequence
  Description of Artificial Sequence: Synthetic oligonucleotide
  Sense strand starting at position 3734 of SEQ ID NO: 1883691
ucucacuuggucuaagaug

SEQ ID NO: 2209697 - RNA, 19 nt, Artificial Sequence
  Description of Artificial Sequence: Synthetic oligonucleotide
  Antisense strand to SEQ ID NO: 2209696
caucuuagaccaagugaga

SEQ ID NO: 2209698 - RNA, 19 nt, Artificial Sequence
  Description of Artificial Sequence: Synthetic oligonucleotide
  Sense strand starting at position 2900 of SEQ ID NO: 1883691
guugaugaaaugugacaga

SEQ ID NO: 2209699 - RNA, 19 nt, Artificial Sequence
  Description of Artificial Sequence: Synthetic oligonucleotide
  Antisense strand to SEQ ID NO: 2209698
ucugucacauuucaucaac

SEQ ID NO: 2209700 - RNA, 19 nt, Artificial Sequence
  Description of Artificial Sequence: Synthetic oligonucleotide
  Sense strand starting at position 3604 of SEQ ID NO: 1883691
ucccuuauagaguaaguca

SEQ ID NO: 2209701 - RNA, 19 nt, Artificial Sequence
  Description of Artificial Sequence: Synthetic oligonucleotide
  Antisense strand to SEQ ID NO: 2209700
ugacuuacucuauaaggga

SEQ ID NO: 2209702 - RNA, 19 nt, Artificial Sequence
  Description of Artificial Sequence: Synthetic oligonucleotide
  Sense strand starting at position 2894 of SEQ ID NO: 1883691
uccacuguugaugaaaugu

SEQ ID NO: 2209703 - RNA, 19 nt, Artificial Sequence
  Description of Artificial Sequence: Synthetic oligonucleotide
  Antisense strand to SEQ ID NO: 2209702
acauuucaucaacagugga

SEQ ID NO: 2209704 - RNA, 19 nt, Artificial Sequence
  Description of Artificial Sequence: Synthetic oligonucleotide
  Sense strand starting at position 3410 of SEQ ID NO: 1883691
guugauugggcagaagcaa

SEQ ID NO: 2209705 - RNA, 19 nt, Artificial Sequence
  Description of Artificial Sequence: Synthetic oligonucleotide
  Antisense strand to SEQ ID NO: 2209704
uugcuucugcccaaucaac

SEQ ID NO: 2209706 - RNA, 19 nt, Artificial Sequence
  Description of Artificial Sequence: Synthetic oligonucleotide
  Sense strand starting at position 3720 of SEQ ID NO: 1883691
uguggagaaucucuucuca

SEQ ID NO: 2209707 - RNA, 19 nt, Artificial Sequence
  Description of Artificial Sequence: Synthetic oligonucleotide
  Antisense strand to SEQ ID NO: 2209706
ugagaagagauucuccaca

SEQ ID NO: 2209708 - RNA, 19 nt, Artificial Sequence
  Description of Artificial Sequence: Synthetic oligonucleotide
  Sense strand starting at position 2966 of SEQ ID NO: 1883691
uaacgacaucuguaguauu

SEQ ID NO: 2209709 - RNA, 19 nt, Artificial Sequence
  Description of Artificial Sequence: Synthetic oligonucleotide
  Antisense strand to SEQ ID NO: 2209708
aauacuacagaugucguua

SEQ ID NO: 2209710 - RNA, 19 nt, Artificial Sequence
  Description of Artificial Sequence: Synthetic oligonucleotide
  Sense strand starting at position 3670 of SEQ ID NO: 1883691
gcacucauuagcguguguu

SEQ ID NO: 2209711 - RNA, 19 nt, Artificial Sequence
  Description of Artificial Sequence: Synthetic oligonucleotide
  Antisense strand to SEQ ID NO: 2209710
aacacacgcuaaugagugc

SEQ ID NO: 2209712 - RNA, 19 nt, Artificial Sequence
  Description of Artificial Sequence: Synthetic oligonucleotide
  Sense strand starting at position 3394 of SEQ ID NO: 1883691
gauaucuguguugaggguu

SEQ ID NO: 2209713 - RNA, 19 nt, Artificial Sequence
  Description of Artificial Sequence: Synthetic oligonucleotide
  Antisense strand to SEQ ID NO: 2209712
aacccucaacacagauauc

SEQ ID NO: 2209714 - RNA, 19 nt, Artificial Sequence
  Description of Artificial Sequence: Synthetic oligonucleotide
  Sense strand starting at position 3732 of SEQ ID NO: 1883691
cuucucacuuggucuaaga

SEQ ID NO: 2209715 - RNA, 19 nt, Artificial Sequence
  Description of Artificial Sequence: Synthetic oligonucleotide
  Antisense strand to SEQ ID NO: 2209714
ucuuagaccaagugagaag

SEQ ID NO: 2209716 - RNA, 19 nt, Artificial Sequence
  Description of Artificial Sequence: Synthetic oligonucleotide
  Sense strand starting at position 3579 of SEQ ID NO: 1883691
gguguaaguacugauaugu

SEQ ID NO: 2209717 - RNA, 19 nt, Artificial Sequence
  Description of Artificial Sequence: Synthetic oligonucleotide
  Antisense strand to SEQ ID NO: 2209716
acauaucaguacuuacacc

SEQ ID NO: 2209718 - RNA, 19 nt, Artificial Sequence
  Description of Artificial Sequence: Synthetic oligonucleotide
  Sense strand starting at position 2960 of SEQ ID NO: 1883691
cuguauuaacgacaucugu

SEQ ID NO: 2209719 - RNA, 19 nt, Artificial Sequence
  Description of Artificial Sequence: Synthetic oligonucleotide
  Antisense strand to SEQ ID NO: 2209718
acagaugucguuaauacag

SEQ ID NO: 2209720 - RNA, 19 nt, Artificial Sequence
  Description of Artificial Sequence: Synthetic oligonucleotide
  Sense strand starting at position 3390 of SEQ ID NO: 1883691
aaacgauaucuguguugag

SEQ ID NO: 2209721 - RNA, 19 nt, Artificial Sequence
  Description of Artificial Sequence: Synthetic oligonucleotide
  Antisense strand to SEQ ID NO: 2209720
cucaacacagauaucguuu

SEQ ID NO: 2209722 - RNA, 19 nt, Artificial Sequence
  Description of Artificial Sequence: Synthetic oligonucleotide
  Sense strand starting at position 2884 of SEQ ID NO: 1883691
ggagucuuucuccacuguu

SEQ ID NO: 2209723 - RNA, 19 nt, Artificial Sequence
  Description of Artificial Sequence: Synthetic oligonucleotide
  Antisense strand to SEQ ID NO: 2209722
aacaguggagaaagacucc

SEQ ID NO: 2209724 - RNA, 19 nt, Artificial Sequence
  Description of Artificial Sequence: Synthetic oligonucleotide
  Sense strand starting at position 3945 of SEQ ID NO: 1883691
aauguugauuuguaaugga

SEQ ID NO: 2209725 - RNA, 19 nt, Artificial Sequence
  Description of Artificial Sequence: Synthetic oligonucleotide
  Antisense strand to SEQ ID NO: 2209724
uccauuacaaaucaacauu

SEQ ID NO: 2209726 - RNA, 19 nt, Artificial Sequence
  Description of Artificial Sequence: Synthetic oligonucleotide
  Sense strand starting at position 3173 of SEQ ID NO: 1883691
ccuuauuguccucacaguu

SEQ ID NO: 2209727 - RNA, 19 nt, Artificial Sequence
  Description of Artificial Sequence: Synthetic oligonucleotide
  Antisense strand to SEQ ID NO: 2209726
aacugugaggacaauaagg

SEQ ID NO: 2209728 - RNA, 19 nt, Artificial Sequence
  Description of Artificial Sequence: Synthetic oligonucleotide
  Sense strand starting at position 2808 of SEQ ID NO: 1883691
gccgaagggcauugauaac

SEQ ID NO: 2209729 - RNA, 19 nt, Artificial Sequence
  Description of Artificial Sequence: Synthetic oligonucleotide
  Antisense strand to SEQ ID NO: 2209728
guuaucaaugcccuucggc

SEQ ID NO: 2209730 - RNA, 19 nt, Artificial Sequence
  Description of Artificial Sequence: Synthetic oligonucleotide
  Sense strand starting at position 987 of SEQ ID NO: 1883691
cuuguuagagugugacaua

SEQ ID NO: 2209731 - RNA, 19 nt, Artificial Sequence
  Description of Artificial Sequence: Synthetic oligonucleotide
  Antisense strand to SEQ ID NO: 2209730
uaugucacacucuaacaag

SEQ ID NO: 2209732 - RNA, 19 nt, Artificial Sequence
  Description of Artificial Sequence: Synthetic oligonucleotide
  Sense strand starting at position 2883 of SEQ ID NO: 1883691
aggagucuuucuccacugu

SEQ ID NO: 2209733 - RNA, 19 nt, Artificial Sequence
  Description of Artificial Sequence: Synthetic oligonucleotide
  Antisense strand to SEQ ID NO: 2209732
acaguggagaaagacuccu

SEQ ID NO: 2209734 - RNA, 19 nt, Artificial Sequence
  Description of Artificial Sequence: Synthetic oligonucleotide
  Sense strand starting at position 3397 of SEQ ID NO: 1883691
aucuguguugaggguugau

SEQ ID NO: 2209735 - RNA, 19 nt, Artificial Sequence
  Description of Artificial Sequence: Synthetic oligonucleotide
  Antisense strand to SEQ ID NO: 2209734
aucaacccucaacacagau

SEQ ID NO: 2209736 - RNA, 19 nt, Artificial Sequence
  Description of Artificial Sequence: Synthetic oligonucleotide
  Sense strand starting at position 2861 of SEQ ID NO: 1883691
gggcuacaucugugggagu

SEQ ID NO: 2209737 - RNA, 19 nt, Artificial Sequence
  Description of Artificial Sequence: Synthetic oligonucleotide
  Antisense strand to SEQ ID NO: 2209736
acucccacagauguagccc

SEQ ID NO: 2209738 - RNA, 19 nt, Artificial Sequence
  Description of Artificial Sequence: Synthetic oligonucleotide
  Sense strand starting at position 2903 of SEQ ID NO: 1883691
gaugaaaugugacagaaau

SEQ ID NO: 2209739 - RNA, 19 nt, Artificial Sequence
  Description of Artificial Sequence: Synthetic oligonucleotide
  Antisense strand to SEQ ID NO: 2209738
auuucugucacauuucauc

SEQ ID NO: 2209740 - RNA, 19 nt, Artificial Sequence
  Description of Artificial Sequence: Synthetic oligonucleotide
  Sense strand starting at position 46 of SEQ ID NO: 1883691
cugcuaaccacgugaggau

SEQ ID NO: 2209741 - RNA, 19 nt, Artificial Sequence
  Description of Artificial Sequence: Synthetic oligonucleotide
  Antisense strand to SEQ ID NO: 2209740
auccucacgugguuagcag

SEQ ID NO: 2209742 - RNA, 19 nt, Artificial Sequence
  Description of Artificial Sequence: Synthetic oligonucleotide
  Sense strand starting at position 15 of SEQ ID NO: 1883691
gcaccugcauccuugagau

SEQ ID NO: 2209743 - RNA, 19 nt, Artificial Sequence
  Description of Artificial Sequence: Synthetic oligonucleotide
  Antisense strand to SEQ ID NO: 2209742
aucucaaggaugcaggugc

SEQ ID NO: 2209744 - RNA, 19 nt, Artificial Sequence
  Description of Artificial Sequence: Synthetic oligonucleotide
  Sense strand starting at position 2881 of SEQ ID NO: 1883691
gcaggagucuuucuccacu

SEQ ID NO: 2209745 - RNA, 19 nt, Artificial Sequence
  Description of Artificial Sequence: Synthetic oligonucleotide
  Antisense strand to SEQ ID NO: 2209744
aguggagaaagacuccugc

SEQ ID NO: 2209746 - RNA, 19 nt, Artificial Sequence
  Description of Artificial Sequence: Synthetic oligonucleotide
  Sense strand starting at position 3742 of SEQ ID NO: 1883691
ggucuaagaugcuucucuu

SEQ ID NO: 2209747 - RNA, 19 nt, Artificial Sequence
  Description of Artificial Sequence: Synthetic oligonucleotide
  Antisense strand to SEQ ID NO: 2209746
aagagaagcaucuuagacc

SEQ ID NO: 2209748 - RNA, 19 nt, Artificial Sequence
  Description of Artificial Sequence: Synthetic oligonucleotide
  Sense strand starting at position 3749 of SEQ ID NO: 1883691
gaugcuucucuuuggagca

SEQ ID NO: 2209749 - RNA, 19 nt, Artificial Sequence
  Description of Artificial Sequence: Synthetic oligonucleotide
  Antisense strand to SEQ ID NO: 2209748
ugcuccaaagagaagcauc

SEQ ID NO: 2209750 - RNA, 19 nt, Artificial Sequence
  Description of Artificial Sequence: Synthetic oligonucleotide
  Sense strand starting at position 3172 of SEQ ID NO: 1883691
uccuuauuguccucacagu

SEQ ID NO: 2209751 - RNA, 19 nt, Artificial Sequence
  Description of Artificial Sequence: Synthetic oligonucleotide
  Antisense strand to SEQ ID NO: 2209750
acugugaggacaauaagga

SEQ ID NO: 2209752 - RNA, 19 nt, Artificial Sequence
  Description of Artificial Sequence: Synthetic oligonucleotide
  Sense strand starting at position 979 of SEQ ID NO: 1883691
cagggccucuuguuagagu

SEQ ID NO: 2209753 - RNA, 19 nt, Artificial Sequence
  Description of Artificial Sequence: Synthetic oligonucleotide
  Antisense strand to SEQ ID NO: 2209752
acucuaacaagaggcccug

SEQ ID NO: 2209754 - RNA, 19 nt, Artificial Sequence
  Description of Artificial Sequence: Synthetic oligonucleotide
  Sense strand starting at position 3948 of SEQ ID NO: 1883691
guugauuuguaauggauag

SEQ ID NO: 2209755 - RNA, 19 nt, Artificial Sequence
  Description of Artificial Sequence: Synthetic oligonucleotide
  Antisense strand to SEQ ID NO: 2209754
cuauccauuacaaaucaac

SEQ ID NO: 2209756 - RNA, 19 nt, Artificial Sequence
  Description of Artificial Sequence: Synthetic oligonucleotide
  Sense strand starting at position 2887 of SEQ ID NO: 1883691
gucuuucuccacuguugau

SEQ ID NO: 2209757 - RNA, 19 nt, Artificial Sequence
  Description of Artificial Sequence: Synthetic oligonucleotide
  Antisense strand to SEQ ID NO: 2209756
aucaacaguggagaaagac

SEQ ID NO: 2209758 - RNA, 19 nt, Artificial Sequence
  Description of Artificial Sequence: Synthetic oligonucleotide
  Sense strand starting at position 3566 of SEQ ID NO: 1883691
uuucuaggucucuggugua

SEQ ID NO: 2209759 - RNA, 19 nt, Artificial Sequence
  Description of Artificial Sequence: Synthetic oligonucleotide
  Antisense strand to SEQ ID NO: 2209758
uacaccagagaccuagaaa

SEQ ID NO: 2209760 - RNA, 19 nt, Artificial Sequence
  Description of Artificial Sequence: Synthetic oligonucleotide
  Sense strand starting at position 3656 of SEQ ID NO: 1883691
acacaaauuucguagcacu

SEQ ID NO: 2209761 - RNA, 19 nt, Artificial Sequence
  Description of Artificial Sequence: Synthetic oligonucleotide
  Antisense strand to SEQ ID NO: 2209760
agugcuacgaaauuugugu

SEQ ID NO: 2209762 - RNA, 19 nt, Artificial Sequence
  Description of Artificial Sequence: Synthetic oligonucleotide
  Sense strand starting at position 2934 of SEQ ID NO: 1883691
uucuuauccucgucucauc

SEQ ID NO: 2209763 - RNA, 19 nt, Artificial Sequence
  Description of Artificial Sequence: Synthetic oligonucleotide
  Antisense strand to SEQ ID NO: 2209762
gaugagacgaggauaagaa

SEQ ID NO: 2209764 - RNA, 19 nt, Artificial Sequence
  Description of Artificial Sequence: Synthetic oligonucleotide
  Sense strand starting at position 3938 of SEQ ID NO: 1883691
guaucauaauguugauuug

SEQ ID NO: 2209765 - RNA, 19 nt, Artificial Sequence
  Description of Artificial Sequence: Synthetic oligonucleotide
  Antisense strand to SEQ ID NO: 2209764
caaaucaacauuaugauac

SEQ ID NO: 2209766 - RNA, 19 nt, Artificial Sequence
  Description of Artificial Sequence: Synthetic oligonucleotide
  Sense strand starting at position 3676 of SEQ ID NO: 1883691
auuagcguguguuuggaaa

SEQ ID NO: 2209767 - RNA, 19 nt, Artificial Sequence
  Description of Artificial Sequence: Synthetic oligonucleotide
  Antisense strand to SEQ ID NO: 2209766
uuuccaaacacacgcuaau

SEQ ID NO: 2209768 - RNA, 19 nt, Artificial Sequence
  Description of Artificial Sequence: Synthetic oligonucleotide
  Sense strand starting at position 3203 of SEQ ID NO: 1883691
agacguuccgugugauaua

SEQ ID NO: 2209769 - RNA, 19 nt, Artificial Sequence
  Description of Artificial Sequence: Synthetic oligonucleotide
  Antisense strand to SEQ ID NO: 2209768
uauaucacacggaacgucu

SEQ ID NO: 2209770 - RNA, 19 nt, Artificial Sequence
  Description of Artificial Sequence: Synthetic oligonucleotide
  Sense strand starting at position 3201 of SEQ ID NO: 1883691
ugagacguuccgugugaua

SEQ ID NO: 2209771 - RNA, 19 nt, Artificial Sequence
  Description of Artificial Sequence: Synthetic oligonucleotide
  Antisense strand to SEQ ID NO: 2209770
uaucacacggaacgucuca

SEQ ID NO: 2209772 - RNA, 19 nt, Artificial Sequence
  Description of Artificial Sequence: Synthetic oligonucleotide
  Sense strand starting at position 3200 of SEQ ID NO: 1883691
uugagacguuccgugugau

SEQ ID NO: 2209773 - RNA, 19 nt, Artificial Sequence
  Description of Artificial Sequence: Synthetic oligonucleotide
  Antisense strand to SEQ ID NO: 2209772
aucacacggaacgucucaa

SEQ ID NO: 2209774 - RNA, 19 nt, Artificial Sequence
  Description of Artificial Sequence: Synthetic oligonucleotide
  Sense strand starting at position 2453 of SEQ ID NO: 1883692
ggcuaaauuauuugugggu

SEQ ID NO: 2209775 - RNA, 19 nt, Artificial Sequence
  Description of Artificial Sequence: Synthetic oligonucleotide
  Antisense strand to SEQ ID NO: 2209774
acccacaaauaauuuagcc

SEQ ID NO: 2209776 - RNA, 19 nt, Artificial Sequence
  Description of Artificial Sequence: Synthetic oligonucleotide
  Sense strand starting at position 246 of SEQ ID NO: 1883692
ucuguuuauuugcuugaga

SEQ ID NO: 2209777 - RNA, 19 nt, Artificial Sequence
  Description of Artificial Sequence: Synthetic oligonucleotide
  Antisense strand to SEQ ID NO: 2209776
ucucaagcaaauaaacaga

SEQ ID NO: 2209778 - RNA, 19 nt, Artificial Sequence
  Description of Artificial Sequence: Synthetic oligonucleotide
  Sense strand starting at position 247 of SEQ ID NO: 1883692
cuguuuauuugcuugagac

SEQ ID NO: 2209779 - RNA, 19 nt, Artificial Sequence
  Description of Artificial Sequence: Synthetic oligonucleotide
  Antisense strand to SEQ ID NO: 2209778
gucucaagcaaauaaacag

SEQ ID NO: 2209780 - RNA, 19 nt, Artificial Sequence
  Description of Artificial Sequence: Synthetic oligonucleotide
  Sense strand starting at position 166 of SEQ ID NO: 1883692
ucuacagagcuuggaaaga

SEQ ID NO: 2209781 - RNA, 19 nt, Artificial Sequence
  Description of Artificial Sequence: Synthetic oligonucleotide
  Antisense strand to SEQ ID NO: 2209780
ucuuuccaagcucuguaga

SEQ ID NO: 2209782 - RNA, 19 nt, Artificial Sequence
  Description of Artificial Sequence: Synthetic oligonucleotide
  Sense strand starting at position 2241 of SEQ ID NO: 1883692
augccaagucuccacagaa

SEQ ID NO: 2209783 - RNA, 19 nt, Artificial Sequence
  Description of Artificial Sequence: Synthetic oligonucleotide
  Antisense strand to SEQ ID NO: 2209782
uucuguggagacuuggcau

SEQ ID NO: 2209784 - RNA, 19 nt, Artificial Sequence
  Description of Artificial Sequence: Synthetic oligonucleotide
  Sense strand starting at position 661 of SEQ ID NO: 1883692
gauugaucugcccaucuag

SEQ ID NO: 2209785 - RNA, 19 nt, Artificial Sequence
  Description of Artificial Sequence: Synthetic oligonucleotide
  Antisense strand to SEQ ID NO: 2209784
cuagaugggcagaucaauc

SEQ ID NO: 2209786 - RNA, 19 nt, Artificial Sequence
  Description of Artificial Sequence: Synthetic oligonucleotide
  Sense strand starting at position 2749 of SEQ ID NO: 1883692
auugcagucaaguauggaa

SEQ ID NO: 2209787 - RNA, 19 nt, Artificial Sequence
  Description of Artificial Sequence: Synthetic oligonucleotide
  Antisense strand to SEQ ID NO: 2209786
uuccauacuugacugcaau

SEQ ID NO: 2209788 - RNA, 19 nt, Artificial Sequence
  Description of Artificial Sequence: Synthetic oligonucleotide
  Sense strand starting at position 3444 of SEQ ID NO: 1883692
uuaacauggucaucugaau

SEQ ID NO: 2209789 - RNA, 19 nt, Artificial Sequence
  Description of Artificial Sequence: Synthetic oligonucleotide
  Antisense strand to SEQ ID NO: 2209788
auucagaugaccauguuaa

SEQ ID NO: 2209790 - RNA, 19 nt, Artificial Sequence
  Description of Artificial Sequence: Synthetic oligonucleotide
  Sense strand starting at position 2652 of SEQ ID NO: 1883692
ccaguaaucccuggaacca

SEQ ID NO: 2209791 - RNA, 19 nt, Artificial Sequence
  Description of Artificial Sequence: Synthetic oligonucleotide
  Antisense strand to SEQ ID NO: 2209790
ugguuccagggauuacugg

SEQ ID NO: 2209792 - RNA, 19 nt, Artificial Sequence
  Description of Artificial Sequence: Synthetic oligonucleotide
  Sense strand starting at position 56 of SEQ ID NO: 1883692
ugagaagacguuuaugguu

SEQ ID NO: 2209793 - RNA, 19 nt, Artificial Sequence
  Description of Artificial Sequence: Synthetic oligonucleotide
  Antisense strand to SEQ ID NO: 2209792
aaccauaaacgucuucuca

SEQ ID NO: 2209794 - RNA, 19 nt, Artificial Sequence
  Description of Artificial Sequence: Synthetic oligonucleotide
  Sense strand starting at position 3935 of SEQ ID NO: 1883692
aguuacuuccacgagugaa

SEQ ID NO: 2209795 - RNA, 19 nt, Artificial Sequence
  Description of Artificial Sequence: Synthetic oligonucleotide
  Antisense strand to SEQ ID NO: 2209794
uucacucguggaaguaacu

SEQ ID NO: 2209796 - RNA, 19 nt, Artificial Sequence
  Description of Artificial Sequence: Synthetic oligonucleotide
  Sense strand starting at position 3386 of SEQ ID NO: 1883692
auaaauuguuagucugaac

SEQ ID NO: 2209797 - RNA, 19 nt, Artificial Sequence
  Description of Artificial Sequence: Synthetic oligonucleotide
  Antisense strand to SEQ ID NO: 2209796
guucagacuaacaauuuau

SEQ ID NO: 2209798 - RNA, 19 nt, Artificial Sequence
  Description of Artificial Sequence: Synthetic oligonucleotide
  Sense strand starting at position 19 of SEQ ID NO: 1883692
gucuuuaacuucucagaag

SEQ ID NO: 2209799 - RNA, 19 nt, Artificial Sequence
  Description of Artificial Sequence: Synthetic oligonucleotide
  Antisense strand to SEQ ID NO: 2209798
cuucugagaaguuaaagac

SEQ ID NO: 2209800 - RNA, 19 nt, Artificial Sequence
  Description of Artificial Sequence: Synthetic oligonucleotide
  Sense strand starting at position 646 of SEQ ID NO: 1883692
ugaggcacucauugggauu

SEQ ID NO: 2209801 - RNA, 19 nt, Artificial Sequence
  Description of Artificial Sequence: Synthetic oligonucleotide
  Antisense strand to SEQ ID NO: 2209800
aaucccaaugagugccuca

SEQ ID NO: 2209802 - RNA, 19 nt, Artificial Sequence
  Description of Artificial Sequence: Synthetic oligonucleotide
  Sense strand starting at position 557 of SEQ ID NO: 1883692
ggcucagaaugguuuauaa

SEQ ID NO: 2209803 - RNA, 19 nt, Artificial Sequence
  Description of Artificial Sequence: Synthetic oligonucleotide
  Antisense strand to SEQ ID NO: 2209802
uuauaaaccauucugagcc

SEQ ID NO: 2209804 - RNA, 19 nt, Artificial Sequence
  Description of Artificial Sequence: Synthetic oligonucleotide
  Sense strand starting at position 573 of SEQ ID NO: 1883692
uaauguggccuguaacaca

SEQ ID NO: 2209805 - RNA, 19 nt, Artificial Sequence
  Description of Artificial Sequence: Synthetic oligonucleotide
  Antisense strand to SEQ ID NO: 2209804
uguguuacaggccacauua

SEQ ID NO: 2209806 - RNA, 19 nt, Artificial Sequence
  Description of Artificial Sequence: Synthetic oligonucleotide
  Sense strand starting at position 2914 of SEQ ID NO: 1883692
auuguaguugucuacaauu

SEQ ID NO: 2209807 - RNA, 19 nt, Artificial Sequence
  Description of Artificial Sequence: Synthetic oligonucleotide
  Antisense strand to SEQ ID NO: 2209806
aauuguagacaacuacaau

SEQ ID NO: 2209808 - RNA, 19 nt, Artificial Sequence
  Description of Artificial Sequence: Synthetic oligonucleotide
  Sense strand starting at position 657 of SEQ ID NO: 1883692
uugggauugaucugcccau

SEQ ID NO: 2209809 - RNA, 19 nt, Artificial Sequence
  Description of Artificial Sequence: Synthetic oligonucleotide
  Antisense strand to SEQ ID NO: 2209808
augggcagaucaaucccaa

SEQ ID NO: 2209810 - RNA, 19 nt, Artificial Sequence
  Description of Artificial Sequence: Synthetic oligonucleotide
  Sense strand starting at position 2887 of SEQ ID NO: 1883692
agguuacagucucuuuaca

SEQ ID NO: 2209811 - RNA, 19 nt, Artificial Sequence
  Description of Artificial Sequence: Synthetic oligonucleotide
  Antisense strand to SEQ ID NO: 2209810
uguaaagagacuguaaccu

SEQ ID NO: 2209812 - RNA, 19 nt, Artificial Sequence
  Description of Artificial Sequence: Synthetic oligonucleotide
  Sense strand starting at position 2390 of SEQ ID NO: 1883692
auguguugccacgaggaau

SEQ ID NO: 2209813 - RNA, 19 nt, Artificial Sequence
  Description of Artificial Sequence: Synthetic oligonucleotide
  Antisense strand to SEQ ID NO: 2209812
auuccucguggcaacacau

SEQ ID NO: 2209814 - RNA, 19 nt, Artificial Sequence
  Description of Artificial Sequence: Synthetic oligonucleotide
  Sense strand starting at position 1472 of SEQ ID NO: 1883692
ccaguaaacugaguuguac

SEQ ID NO: 2209815 - RNA, 19 nt, Artificial Sequence
  Description of Artificial Sequence: Synthetic oligonucleotide
  Antisense strand to SEQ ID NO: 2209814
guacaacucaguuuacugg

SEQ ID NO: 2209816 - RNA, 19 nt, Artificial Sequence
  Description of Artificial Sequence: Synthetic oligonucleotide
  Sense strand starting at position 61 of SEQ ID NO: 1883692
agacguuuaugguuaaauu

SEQ ID NO: 2209817 - RNA, 19 nt, Artificial Sequence
  Description of Artificial Sequence: Synthetic oligonucleotide
  Antisense strand to SEQ ID NO: 2209816
aauuuaaccauaaacgucu

SEQ ID NO: 2209818 - RNA, 19 nt, Artificial Sequence
  Description of Artificial Sequence: Synthetic oligonucleotide
  Sense strand starting at position 2863 of SEQ ID NO: 1883692
gacugagacucgcuacuug

SEQ ID NO: 2209819 - RNA, 19 nt, Artificial Sequence
  Description of Artificial Sequence: Synthetic oligonucleotide
  Antisense strand to SEQ ID NO: 2209818
caaguagcgagucucaguc

SEQ ID NO: 2209820 - RNA, 19 nt, Artificial Sequence
  Description of Artificial Sequence: Synthetic oligonucleotide
  Sense strand starting at position 1634 of SEQ ID NO: 1883692
uuaaguagacacggucauu

SEQ ID NO: 2209821 - RNA, 19 nt, Artificial Sequence
  Description of Artificial Sequence: Synthetic oligonucleotide
  Antisense strand to SEQ ID NO: 2209820
aaugaccgugucuacuuaa

SEQ ID NO: 2209822 - RNA, 19 nt, Artificial Sequence
  Description of Artificial Sequence: Synthetic oligonucleotide
  Sense strand starting at position 1025 of SEQ ID NO: 1883692
ugauacagcauucggugaa

SEQ ID NO: 2209823 - RNA, 19 nt, Artificial Sequence
  Description of Artificial Sequence: Synthetic oligonucleotide
  Antisense strand to SEQ ID NO: 2209822
uucaccgaaugcuguauca

SEQ ID NO: 2209824 - RNA, 19 nt, Artificial Sequence
  Description of Artificial Sequence: Synthetic oligonucleotide
  Sense strand starting at position 2889 of SEQ ID NO: 1883692
guuacagucucuuuacaca

SEQ ID NO: 2209825 - RNA, 19 nt, Artificial Sequence
  Description of Artificial Sequence: Synthetic oligonucleotide
  Antisense strand to SEQ ID NO: 2209824
uguguaaagagacuguaac

SEQ ID NO: 2209826 - RNA, 19 nt, Artificial Sequence
  Description of Artificial Sequence: Synthetic oligonucleotide
  Sense strand starting at position 137 of SEQ ID NO: 1883692
uuacuugccgcauaaauac

SEQ ID NO: 2209827 - RNA, 19 nt, Artificial Sequence
  Description of Artificial Sequence: Synthetic oligonucleotide
  Antisense strand to SEQ ID NO: 2209826
guauuuaugcggcaaguaa

SEQ ID NO: 2209828 - RNA, 19 nt, Artificial Sequence
  Description of Artificial Sequence: Synthetic oligonucleotide
  Sense strand starting at position 676 of SEQ ID NO: 1883692
cuaguugguccacaguagu

SEQ ID NO: 2209829 - RNA, 19 nt, Artificial Sequence
  Description of Artificial Sequence: Synthetic oligonucleotide
  Antisense strand to SEQ ID NO: 2209828
acuacuguggaccaacuag

SEQ ID NO: 2209830 - RNA, 19 nt, Artificial Sequence
  Description of Artificial Sequence: Synthetic oligonucleotide
  Sense strand starting at position 571 of SEQ ID NO: 1883692
uauaauguggccuguaaca

SEQ ID NO: 2209831 - RNA, 19 nt, Artificial Sequence
  Description of Artificial Sequence: Synthetic oligonucleotide
  Antisense strand to SEQ ID NO: 2209830
uguuacaggccacauuaua

SEQ ID NO: 2209832 - RNA, 19 nt, Artificial Sequence
  Description of Artificial Sequence: Synthetic oligonucleotide
  Sense strand starting at position 3934 of SEQ ID NO: 1883692
caguuacuuccacgaguga

SEQ ID NO: 2209833 - RNA, 19 nt, Artificial Sequence
  Description of Artificial Sequence: Synthetic oligonucleotide
  Antisense strand to SEQ ID NO: 2209832
ucacucguggaaguaacug

SEQ ID NO: 2209834 - RNA, 19 nt, Artificial Sequence
  Description of Artificial Sequence: Synthetic oligonucleotide
  Sense strand starting at position 1566 of SEQ ID NO: 1883692
ggaauucacgucuaucgca

SEQ ID NO: 2209835 - RNA, 19 nt, Artificial Sequence
  Description of Artificial Sequence: Synthetic oligonucleotide
  Antisense strand to SEQ ID NO: 2209834
ugcgauagacgugaauucc

SEQ ID NO: 2209836 - RNA, 19 nt, Artificial Sequence
  Description of Artificial Sequence: Synthetic oligonucleotide
  Sense strand starting at position 988 of SEQ ID NO: 1883692
gguuucuuggugggagcaa

SEQ ID NO: 2209837 - RNA, 19 nt, Artificial Sequence
  Description of Artificial Sequence: Synthetic oligonucleotide
  Antisense strand to SEQ ID NO: 2209836
uugcucccaccaagaaacc

SEQ ID NO: 2209838 - RNA, 19 nt, Artificial Sequence
  Description of Artificial Sequence: Synthetic oligonucleotide
  Sense strand starting at position 2909 of SEQ ID NO: 1883692
uuacaauuguaguugucua

SEQ ID NO: 2209839 - RNA, 19 nt, Artificial Sequence
  Description of Artificial Sequence: Synthetic oligonucleotide
  Antisense strand to SEQ ID NO: 2209838
uagacaacuacaauuguaa

SEQ ID NO: 2209840 - RNA, 19 nt, Artificial Sequence
  Description of Artificial Sequence: Synthetic oligonucleotide
  Sense strand starting at position 3506 of SEQ ID NO: 1883692
ccaugcugcugauugauca

SEQ ID NO: 2209841 - RNA, 19 nt, Artificial Sequence
  Description of Artificial Sequence: Synthetic oligonucleotide
  Antisense strand to SEQ ID NO: 2209840
ugaucaaucagcagcaugg

SEQ ID NO: 2209842 - RNA, 19 nt, Artificial Sequence
  Description of Artificial Sequence: Synthetic oligonucleotide
  Sense strand starting at position 554 of SEQ ID NO: 1883692
ccgggcucagaaugguuua

SEQ ID NO: 2209843 - RNA, 19 nt, Artificial Sequence
  Description of Artificial Sequence: Synthetic oligonucleotide
  Antisense strand to SEQ ID NO: 2209842
uaaaccauucugagcccgg

SEQ ID NO: 2209844 - RNA, 19 nt, Artificial Sequence
  Description of Artificial Sequence: Synthetic oligonucleotide
  Sense strand starting at position 555 of SEQ ID NO: 1883692
cgggcucagaaugguuuau

SEQ ID NO: 2209845 - RNA, 19 nt, Artificial Sequence
  Description of Artificial Sequence: Synthetic oligonucleotide
  Antisense strand to SEQ ID NO: 2209844
auaaaccauucugagcccg

SEQ ID NO: 2209846 - RNA, 19 nt, Artificial Sequence
  Description of Artificial Sequence: Synthetic oligonucleotide
  Sense strand starting at position 569 of SEQ ID NO: 1883692
uuuauaauguggccuguaa

SEQ ID NO: 2209847 - RNA, 19 nt, Artificial Sequence
  Description of Artificial Sequence: Synthetic oligonucleotide
  Antisense strand to SEQ ID NO: 2209846
uuacaggccacauuauaaa

SEQ ID NO: 2209848 - RNA, 19 nt, Artificial Sequence
  Description of Artificial Sequence: Synthetic oligonucleotide
  Sense strand starting at position 940 of SEQ ID NO: 1883692
gcagccuucccugagucua

SEQ ID NO: 2209849 - RNA, 19 nt, Artificial Sequence
  Description of Artificial Sequence: Synthetic oligonucleotide
  Antisense strand to SEQ ID NO: 2209848
uagacucagggaaggcugc

SEQ ID NO: 2209850 - RNA, 19 nt, Artificial Sequence
  Description of Artificial Sequence: Synthetic oligonucleotide
  Sense strand starting at position 2456 of SEQ ID NO: 1883692
uaaauuauuuguggguaga

SEQ ID NO: 2209851 - RNA, 19 nt, Artificial Sequence
  Description of Artificial Sequence: Synthetic oligonucleotide
  Antisense strand to SEQ ID NO: 2209850
ucuacccacaaauaauuua

SEQ ID NO: 2209852 - RNA, 19 nt, Artificial Sequence
  Description of Artificial Sequence: Synthetic oligonucleotide
  Sense strand starting at position 114 of SEQ ID NO: 1883692
acaauauuauuugggcuau

SEQ ID NO: 2209853 - RNA, 19 nt, Artificial Sequence
  Description of Artificial Sequence: Synthetic oligonucleotide
  Antisense strand to SEQ ID NO: 2209852
auagcccaaauaauauugu

SEQ ID NO: 2209854 - RNA, 19 nt, Artificial Sequence
  Description of Artificial Sequence: Synthetic oligonucleotide
  Sense strand starting at position 44 of SEQ ID NO: 1883693
augagauugcaccauacuc

SEQ ID NO: 2209855 - RNA, 19 nt, Artificial Sequence
  Description of Artificial Sequence: Synthetic oligonucleotide
  Antisense strand to SEQ ID NO: 2209854
gaguauggugcaaucucau

SEQ ID NO: 2209856 - RNA, 19 nt, Artificial Sequence
  Description of Artificial Sequence: Synthetic oligonucleotide
  Sense strand starting at position 3619 of SEQ ID NO: 1883693
uggaaaugcgucgcuguga

SEQ ID NO: 2209857 - RNA, 19 nt, Artificial Sequence
  Description of Artificial Sequence: Synthetic oligonucleotide
  Antisense strand to SEQ ID NO: 2209856
ucacagcgacgcauuucca

SEQ ID NO: 2209858 - RNA, 19 nt, Artificial Sequence
  Description of Artificial Sequence: Synthetic oligonucleotide
  Sense strand starting at position 2851 of SEQ ID NO: 1883693
uagaaccuguccucuggaa

SEQ ID NO: 2209859 - RNA, 19 nt, Artificial Sequence
  Description of Artificial Sequence: Synthetic oligonucleotide
  Antisense strand to SEQ ID NO: 2209858
uuccagaggacagguucua

SEQ ID NO: 2209860 - RNA, 19 nt, Artificial Sequence
  Description of Artificial Sequence: Synthetic oligonucleotide
  Sense strand starting at position 1215 of SEQ ID NO: 1883693
agacaugccggucagacau

SEQ ID NO: 2209861 - RNA, 19 nt, Artificial Sequence
  Description of Artificial Sequence: Synthetic oligonucleotide
  Antisense strand to SEQ ID NO: 2209860
augucugaccggcaugucu

SEQ ID NO: 2209862 - RNA, 19 nt, Artificial Sequence
  Description of Artificial Sequence: Synthetic oligonucleotide
  Sense strand starting at position 1923 of SEQ ID NO: 1883693
ucaggugggucauugaaac

SEQ ID NO: 2209863 - RNA, 19 nt, Artificial Sequence
  Description of Artificial Sequence: Synthetic oligonucleotide
  Antisense strand to SEQ ID NO: 2209862
guuucaaugacccaccuga

SEQ ID NO: 2209864 - RNA, 19 nt, Artificial Sequence
  Description of Artificial Sequence: Synthetic oligonucleotide
  Sense strand starting at position 1399 of SEQ ID NO: 1883693
augugaucggcccgauuua

SEQ ID NO: 2209865 - RNA, 19 nt, Artificial Sequence
  Description of Artificial Sequence: Synthetic oligonucleotide
  Antisense strand to SEQ ID NO: 2209864
uaaaucgggccgaucacau

SEQ ID NO: 2209866 - RNA, 19 nt, Artificial Sequence
  Description of Artificial Sequence: Synthetic oligonucleotide
  Sense strand starting at position 3190 of SEQ ID NO: 1883693
ggaacaugucugggauguu

SEQ ID NO: 2209867 - RNA, 19 nt, Artificial Sequence
  Description of Artificial Sequence: Synthetic oligonucleotide
  Antisense strand to SEQ ID NO: 2209866
aacaucccagacauguucc

SEQ ID NO: 2209868 - RNA, 19 nt, Artificial Sequence
  Description of Artificial Sequence: Synthetic oligonucleotide
  Sense strand starting at position 3193 of SEQ ID NO: 1883693
acaugucugggauguuaca

SEQ ID NO: 2209869 - RNA, 19 nt, Artificial Sequence
  Description of Artificial Sequence: Synthetic oligonucleotide
  Antisense strand to SEQ ID NO: 2209868
uguaacaucccagacaugu

SEQ ID NO: 2209870 - RNA, 19 nt, Artificial Sequence
  Description of Artificial Sequence: Synthetic oligonucleotide
  Sense strand starting at position 3606 of SEQ ID NO: 1883693
caucauaaaugcguggaaa

SEQ ID NO: 2209871 - RNA, 19 nt, Artificial Sequence
  Description of Artificial Sequence: Synthetic oligonucleotide
  Antisense strand to SEQ ID NO: 2209870
uuuccacgcauuuaugaug

SEQ ID NO: 2209872 - RNA, 19 nt, Artificial Sequence
  Description of Artificial Sequence: Synthetic oligonucleotide
  Sense strand starting at position 3607 of SEQ ID NO: 1883693
aucauaaaugcguggaaau

SEQ ID NO: 2209873 - RNA, 19 nt, Artificial Sequence
  Description of Artificial Sequence: Synthetic oligonucleotide
  Antisense strand to SEQ ID NO: 2209872
auuuccacgcauuuaugau

SEQ ID NO: 2209874 - RNA, 19 nt, Artificial Sequence
  Description of Artificial Sequence: Synthetic oligonucleotide
  Sense strand starting at position 2837 of SEQ ID NO: 1883693
ccaggcucacgcuauagaa

SEQ ID NO: 2209875 - RNA, 19 nt, Artificial Sequence
  Description of Artificial Sequence: Synthetic oligonucleotide
  Antisense strand to SEQ ID NO: 2209874
uucuauagcgugagccugg

SEQ ID NO: 2209876 - RNA, 19 nt, Artificial Sequence
  Description of Artificial Sequence: Synthetic oligonucleotide
  Sense strand starting at position 3608 of SEQ ID NO: 1883693
ucauaaaugcguggaaaug

SEQ ID NO: 2209877 - RNA, 19 nt, Artificial Sequence
  Description of Artificial Sequence: Synthetic oligonucleotide
  Antisense strand to SEQ ID NO: 2209876
cauuuccacgcauuuauga

SEQ ID NO: 2209878 - RNA, 19 nt, Artificial Sequence
  Description of Artificial Sequence: Synthetic oligonucleotide
  Sense strand starting at position 2719 of SEQ ID NO: 1883693
acggauuuguuccaggaau

SEQ ID NO: 2209879 - RNA, 19 nt, Artificial Sequence
  Description of Artificial Sequence: Synthetic oligonucleotide
  Antisense strand to SEQ ID NO: 2209878
auuccuggaacaaauccgu

SEQ ID NO: 2209880 - RNA, 19 nt, Artificial Sequence
  Description of Artificial Sequence: Synthetic oligonucleotide
  Sense strand starting at position 3617 of SEQ ID NO: 1883693
cguggaaaugcgucgcugu

SEQ ID NO: 2209881 - RNA, 19 nt, Artificial Sequence
  Description of Artificial Sequence: Synthetic oligonucleotide
  Antisense strand to SEQ ID NO: 2209880
acagcgacgcauuuccacg

SEQ ID NO: 2209882 - RNA, 19 nt, Artificial Sequence
  Description of Artificial Sequence: Synthetic oligonucleotide
  Sense strand starting at position 2777 of SEQ ID NO: 1883693
ggaggucugcgcgaaagac

SEQ ID NO: 2209883 - RNA, 19 nt, Artificial Sequence
  Description of Artificial Sequence: Synthetic oligonucleotide
  Antisense strand to SEQ ID NO: 2209882
gucuuucgcgcagaccucc

SEQ ID NO: 2209884 - RNA, 19 nt, Artificial Sequence
  Description of Artificial Sequence: Synthetic oligonucleotide
  Sense strand starting at position 3133 of SEQ ID NO: 1883693
agcccuuuccugugaugag

SEQ ID NO: 2209885 - RNA, 19 nt, Artificial Sequence
  Description of Artificial Sequence: Synthetic oligonucleotide
  Antisense strand to SEQ ID NO: 2209884
cucaucacaggaaagggcu

SEQ ID NO: 2209886 - RNA, 19 nt, Artificial Sequence
  Description of Artificial Sequence: Synthetic oligonucleotide
  Sense strand starting at position 3605 of SEQ ID NO: 1883693
gcaucauaaaugcguggaa

SEQ ID NO: 2209887 - RNA, 19 nt, Artificial Sequence
  Description of Artificial Sequence: Synthetic oligonucleotide
  Antisense strand to SEQ ID NO: 2209886
uuccacgcauuuaugaugc

SEQ ID NO: 2209888 - RNA, 19 nt, Artificial Sequence
  Description of Artificial Sequence: Synthetic oligonucleotide
  Sense strand starting at position 1212 of SEQ ID NO: 1883693
ggcagacaugccggucaga

SEQ ID NO: 2209889 - RNA, 19 nt, Artificial Sequence
  Description of Artificial Sequence: Synthetic oligonucleotide
  Antisense strand to SEQ ID NO: 2209888
ucugaccggcaugucugcc

SEQ ID NO: 2209890 - RNA, 19 nt, Artificial Sequence
  Description of Artificial Sequence: Synthetic oligonucleotide
  Sense strand starting at position 2774 of SEQ ID NO: 1883693
aagggaggucugcgcgaaa

SEQ ID NO: 2209891 - RNA, 19 nt, Artificial Sequence
  Description of Artificial Sequence: Synthetic oligonucleotide
  Antisense strand to SEQ ID NO: 2209890
uuucgcgcagaccucccuu

SEQ ID NO: 2209892 - RNA, 19 nt, Artificial Sequence
  Description of Artificial Sequence: Synthetic oligonucleotide
  Sense strand starting at position 2186 of SEQ ID NO: 1883693
gucaguguugggcaaguuu

SEQ ID NO: 2209893 - RNA, 19 nt, Artificial Sequence
  Description of Artificial Sequence: Synthetic oligonucleotide
  Antisense strand to SEQ ID NO: 2209892
aaacuugcccaacacugac

SEQ ID NO: 2209894 - RNA, 19 nt, Artificial Sequence
  Description of Artificial Sequence: Synthetic oligonucleotide
  Sense strand starting at position 2776 of SEQ ID NO: 1883693
gggaggucugcgcgaaaga

SEQ ID NO: 2209895 - RNA, 19 nt, Artificial Sequence
  Description of Artificial Sequence: Synthetic oligonucleotide
  Antisense strand to SEQ ID NO: 2209894
ucuuucgcgcagaccuccc

SEQ ID NO: 2209896 - RNA, 19 nt, Artificial Sequence
  Description of Artificial Sequence: Synthetic oligonucleotide
  Sense strand starting at position 1081 of SEQ ID NO: 1883693
guuccuugaggucgucaga

SEQ ID NO: 2209897 - RNA, 19 nt, Artificial Sequence
  Description of Artificial Sequence: Synthetic oligonucleotide
  Antisense strand to SEQ ID NO: 2209896
ucugacgaccucaaggaac

SEQ ID NO: 2209898 - RNA, 19 nt, Artificial Sequence
  Description of Artificial Sequence: Synthetic oligonucleotide
  Sense strand starting at position 3191 of SEQ ID NO: 1883693
gaacaugucugggauguua

SEQ ID NO: 2209899 - RNA, 19 nt, Artificial Sequence
  Description of Artificial Sequence: Synthetic oligonucleotide
  Antisense strand to SEQ ID NO: 2209898
uaacaucccagacauguuc

SEQ ID NO: 2209900 - RNA, 19 nt, Artificial Sequence
  Description of Artificial Sequence: Synthetic oligonucleotide
  Sense strand starting at position 1570 of SEQ ID NO: 1883693
cgccuaaguccacgcagau

SEQ ID NO: 2209901 - RNA, 19 nt, Artificial Sequence
  Description of Artificial Sequence: Synthetic oligonucleotide
  Antisense strand to SEQ ID NO: 2209900
aucugcguggacuuaggcg

SEQ ID NO: 2209902 - RNA, 19 nt, Artificial Sequence
  Description of Artificial Sequence: Synthetic oligonucleotide
  Sense strand starting at position 3630 of SEQ ID NO: 1883693
cgcugugacugggaacaaa

SEQ ID NO: 2209903 - RNA, 19 nt, Artificial Sequence
  Description of Artificial Sequence: Synthetic oligonucleotide
  Antisense strand to SEQ ID NO: 2209902
uuuguucccagucacagcg

SEQ ID NO: 2209904 - RNA, 19 nt, Artificial Sequence
  Description of Artificial Sequence: Synthetic oligonucleotide
  Sense strand starting at position 939 of SEQ ID NO: 1883693
ggccucuccuuccaagaca

SEQ ID NO: 2209905 - RNA, 19 nt, Artificial Sequence
  Description of Artificial Sequence: Synthetic oligonucleotide
  Antisense strand to SEQ ID NO: 2209904
ugucuuggaaggagaggcc

SEQ ID NO: 2209906 - RNA, 19 nt, Artificial Sequence
  Description of Artificial Sequence: Synthetic oligonucleotide
  Sense strand starting at position 3189 of SEQ ID NO: 1883693
gggaacaugucugggaugu

SEQ ID NO: 2209907 - RNA, 19 nt, Artificial Sequence
  Description of Artificial Sequence: Synthetic oligonucleotide
  Antisense strand to SEQ ID NO: 2209906
acaucccagacauguuccc

SEQ ID NO: 2209908 - RNA, 19 nt, Artificial Sequence
  Description of Artificial Sequence: Synthetic oligonucleotide
  Sense strand starting at position 217 of SEQ ID NO: 1883693
ggaagccguuuccaaacuu

SEQ ID NO: 2209909 - RNA, 19 nt, Artificial Sequence
  Description of Artificial Sequence: Synthetic oligonucleotide
  Antisense strand to SEQ ID NO: 2209908
aaguuuggaaacggcuucc

SEQ ID NO: 2209910 - RNA, 19 nt, Artificial Sequence
  Description of Artificial Sequence: Synthetic oligonucleotide
  Sense strand starting at position 757 of SEQ ID NO: 1883693
ggccuuuccuccuaagcau

SEQ ID NO: 2209911 - RNA, 19 nt, Artificial Sequence
  Description of Artificial Sequence: Synthetic oligonucleotide
  Antisense strand to SEQ ID NO: 2209910
augcuuaggaggaaaggcc

SEQ ID NO: 2209912 - RNA, 19 nt, Artificial Sequence
  Description of Artificial Sequence: Synthetic oligonucleotide
  Sense strand starting at position 2195 of SEQ ID NO: 1883693
gggcaaguuucugguuggu

SEQ ID NO: 2209913 - RNA, 19 nt, Artificial Sequence
  Description of Artificial Sequence: Synthetic oligonucleotide
  Antisense strand to SEQ ID NO: 2209912
accaaccagaaacuugccc

SEQ ID NO: 2209914 - RNA, 19 nt, Artificial Sequence
  Description of Artificial Sequence: Synthetic oligonucleotide
  Sense strand starting at position 2184 of SEQ ID NO: 1883693
gggucaguguugggcaagu

SEQ ID NO: 2209915 - RNA, 19 nt, Artificial Sequence
  Description of Artificial Sequence: Synthetic oligonucleotide
  Antisense strand to SEQ ID NO: 2209914
acuugcccaacacugaccc

SEQ ID NO: 2209916 - RNA, 19 nt, Artificial Sequence
  Description of Artificial Sequence: Synthetic oligonucleotide
  Sense strand starting at position 2986 of SEQ ID NO: 1883694
gucuuauaagaguaaucau

SEQ ID NO: 2209917 - RNA, 19 nt, Artificial Sequence
  Description of Artificial Sequence: Synthetic oligonucleotide
  Antisense strand to SEQ ID NO: 2209916
augauuacucuuauaagac

SEQ ID NO: 2209918 - RNA, 19 nt, Artificial Sequence
  Description of Artificial Sequence: Synthetic oligonucleotide
  Sense strand starting at position 2461 of SEQ ID NO: 1883694
ggaguuuaccucuaaccug

SEQ ID NO: 2209919 - RNA, 19 nt, Artificial Sequence
  Description of Artificial Sequence: Synthetic oligonucleotide
  Antisense strand to SEQ ID NO: 2209918
cagguuagagguaaacucc

SEQ ID NO: 2209920 - RNA, 19 nt, Artificial Sequence
  Description of Artificial Sequence: Synthetic oligonucleotide
  Sense strand starting at position 3618 of SEQ ID NO: 1883694
ccacuagacgcauacauaa

SEQ ID NO: 2209921 - RNA, 19 nt, Artificial Sequence
  Description of Artificial Sequence: Synthetic oligonucleotide
  Antisense strand to SEQ ID NO: 2209920
uuauguaugcgucuagugg

SEQ ID NO: 2209922 - RNA, 19 nt, Artificial Sequence
  Description of Artificial Sequence: Synthetic oligonucleotide
  Sense strand starting at position 2061 of SEQ ID NO: 1883694
auaugaugaucuccaagua

SEQ ID NO: 2209923 - RNA, 19 nt, Artificial Sequence
  Description of Artificial Sequence: Synthetic oligonucleotide
  Antisense strand to SEQ ID NO: 2209922
uacuuggagaucaucauau

SEQ ID NO: 2209924 - RNA, 19 nt, Artificial Sequence
  Description of Artificial Sequence: Synthetic oligonucleotide
  Sense strand starting at position 1144 of SEQ ID NO: 1883694
auguguugaagaggacaca

SEQ ID NO: 2209925 - RNA, 19 nt, Artificial Sequence
  Description of Artificial Sequence: Synthetic oligonucleotide
  Antisense strand to SEQ ID NO: 2209924
uguguccucuucaacacau

SEQ ID NO: 2209926 - RNA, 19 nt, Artificial Sequence
  Description of Artificial Sequence: Synthetic oligonucleotide
  Sense strand starting at position 48 of SEQ ID NO: 1883694
gugauuauccaacaguauu

SEQ ID NO: 2209927 - RNA, 19 nt, Artificial Sequence
  Description of Artificial Sequence: Synthetic oligonucleotide
  Antisense strand to SEQ ID NO: 2209926
aauacuguuggauaaucac

SEQ ID NO: 2209928 - RNA, 19 nt, Artificial Sequence
  Description of Artificial Sequence: Synthetic oligonucleotide
  Sense strand starting at position 1124 of SEQ ID NO: 1883694
aauuaauguuuggugagaa

SEQ ID NO: 2209929 - RNA, 19 nt, Artificial Sequence
  Description of Artificial Sequence: Synthetic oligonucleotide
  Antisense strand to SEQ ID NO: 2209928
uucucaccaaacauuaauu

SEQ ID NO: 2209930 - RNA, 19 nt, Artificial Sequence
  Description of Artificial Sequence: Synthetic oligonucleotide
  Sense strand starting at position 3013 of SEQ ID NO: 1883694
cuaacuguagaggguuaaa

SEQ ID NO: 2209931 - RNA, 19 nt, Artificial Sequence
  Description of Artificial Sequence: Synthetic oligonucleotide
  Antisense strand to SEQ ID NO: 2209930
uuuaacccucuacaguuag

SEQ ID NO: 2209932 - RNA, 19 nt, Artificial Sequence
  Description of Artificial Sequence: Synthetic oligonucleotide
  Sense strand starting at position 2595 of SEQ ID NO: 1883694
ccagguuaagagugacaac

SEQ ID NO: 2209933 - RNA, 19 nt, Artificial Sequence
  Description of Artificial Sequence: Synthetic oligonucleotide
  Antisense strand to SEQ ID NO: 2209932
guugucacucuuaaccugg

SEQ ID NO: 2209934 - RNA, 19 nt, Artificial Sequence
  Description of Artificial Sequence: Synthetic oligonucleotide
  Sense strand starting at position 1491 of SEQ ID NO: 1883694
cagugagcucucuacagga

SEQ ID NO: 2209935 - RNA, 19 nt, Artificial Sequence
  Description of Artificial Sequence: Synthetic oligonucleotide
  Antisense strand to SEQ ID NO: 2209934
uccuguagagagcucacug

SEQ ID NO: 2209936 - RNA, 19 nt, Artificial Sequence
  Description of Artificial Sequence: Synthetic oligonucleotide
  Sense strand starting at position 3655 of SEQ ID NO: 1883694
ugaucauucuuucuggaau

SEQ ID NO: 2209937 - RNA, 19 nt, Artificial Sequence
  Description of Artificial Sequence: Synthetic oligonucleotide
  Antisense strand to SEQ ID NO: 2209936
auuccagaaagaaugauca

SEQ ID NO: 2209938 - RNA, 19 nt, Artificial Sequence
  Description of Artificial Sequence: Synthetic oligonucleotide
  Sense strand starting at position 3175 of SEQ ID NO: 1883694
cuuuauugaguauaugcaa

SEQ ID NO: 2209939 - RNA, 19 nt, Artificial Sequence
  Description of Artificial Sequence: Synthetic oligonucleotide
  Antisense strand to SEQ ID NO: 2209938
uugcauauacucaauaaag

SEQ ID NO: 2209940 - RNA, 19 nt, Artificial Sequence
  Description of Artificial Sequence: Synthetic oligonucleotide
  Sense strand starting at position 1136 of SEQ ID NO: 1883694
gugagaagauguguugaag

SEQ ID NO: 2209941 - RNA, 19 nt, Artificial Sequence
  Description of Artificial Sequence: Synthetic oligonucleotide
  Antisense strand to SEQ ID NO: 2209940
cuucaacacaucuucucac

SEQ ID NO: 2209942 - RNA, 19 nt, Artificial Sequence
  Description of Artificial Sequence: Synthetic oligonucleotide
  Sense strand starting at position 3230 of SEQ ID NO: 1883694
aguuaauuccaaggguuaa

SEQ ID NO: 2209943 - RNA, 19 nt, Artificial Sequence
  Description of Artificial Sequence: Synthetic oligonucleotide
  Antisense strand to SEQ ID NO: 2209942
uuaacccuuggaauuaacu

SEQ ID NO: 2209944 - RNA, 19 nt, Artificial Sequence
  Description of Artificial Sequence: Synthetic oligonucleotide
  Sense strand starting at position 3037 of SEQ ID NO: 1883694
aguuaauuagagcaacugu

SEQ ID NO: 2209945 - RNA, 19 nt, Artificial Sequence
  Description of Artificial Sequence: Synthetic oligonucleotide
  Antisense strand to SEQ ID NO: 2209944
acaguugcucuaauuaacu

SEQ ID NO: 2209946 - RNA, 19 nt, Artificial Sequence
  Description of Artificial Sequence: Synthetic oligonucleotide
  Sense strand starting at position 3415 of SEQ ID NO: 1883694
acugaagacuuguuaaggu

SEQ ID NO: 2209947 - RNA, 19 nt, Artificial Sequence
  Description of Artificial Sequence: Synthetic oligonucleotide
  Antisense strand to SEQ ID NO: 2209946
accuuaacaagucuucagu

SEQ ID NO: 2209948 - RNA, 19 nt, Artificial Sequence
  Description of Artificial Sequence: Synthetic oligonucleotide
  Sense strand starting at position 1913 of SEQ ID NO: 1883694
augugauggcaccaccauu

SEQ ID NO: 2209949 - RNA, 19 nt, Artificial Sequence
  Description of Artificial Sequence: Synthetic oligonucleotide
  Antisense strand to SEQ ID NO: 2209948
aaugguggugccaucacau

SEQ ID NO: 2209950 - RNA, 19 nt, Artificial Sequence
  Description of Artificial Sequence: Synthetic oligonucleotide
  Sense strand starting at position 3168 of SEQ ID NO: 1883694
acaucaucuuuauugagua

SEQ ID NO: 2209951 - RNA, 19 nt, Artificial Sequence
  Description of Artificial Sequence: Synthetic oligonucleotide
  Antisense strand to SEQ ID NO: 2209950
uacucaauaaagaugaugu

SEQ ID NO: 2209952 - RNA, 19 nt, Artificial Sequence
  Description of Artificial Sequence: Synthetic oligonucleotide
  Sense strand starting at position 864 of SEQ ID NO: 1883694
agauccagcuuucuugaaa

SEQ ID NO: 2209953 - RNA, 19 nt, Artificial Sequence
  Description of Artificial Sequence: Synthetic oligonucleotide
  Antisense strand to SEQ ID NO: 2209952
uuucaagaaagcuggaucu

SEQ ID NO: 2209954 - RNA, 19 nt, Artificial Sequence
  Description of Artificial Sequence: Synthetic oligonucleotide
  Sense strand starting at position 2058 of SEQ ID NO: 1883694
gccauaugaugaucuccaa

SEQ ID NO: 2209955 - RNA, 19 nt, Artificial Sequence
  Description of Artificial Sequence: Synthetic oligonucleotide
  Antisense strand to SEQ ID NO: 2209954
uuggagaucaucauauggc

SEQ ID NO: 2209956 - RNA, 19 nt, Artificial Sequence
  Description of Artificial Sequence: Synthetic oligonucleotide
  Sense strand starting at position 3231 of SEQ ID NO: 1883694
guuaauuccaaggguuaag

SEQ ID NO: 2209957 - RNA, 19 nt, Artificial Sequence
  Description of Artificial Sequence: Synthetic oligonucleotide
  Antisense strand to SEQ ID NO: 2209956
cuuaacccuuggaauuaac

SEQ ID NO: 2209958 - RNA, 19 nt, Artificial Sequence
  Description of Artificial Sequence: Synthetic oligonucleotide
  Sense strand starting at position 2458 of SEQ ID NO: 1883694
ccaggaguuuaccucuaac

SEQ ID NO: 2209959 - RNA, 19 nt, Artificial Sequence
  Description of Artificial Sequence: Synthetic oligonucleotide
  Antisense strand to SEQ ID NO: 2209958
guuagagguaaacuccugg

SEQ ID NO: 2209960 - RNA, 19 nt, Artificial Sequence
  Description of Artificial Sequence: Synthetic oligonucleotide
  Sense strand starting at position 617 of SEQ ID NO: 1883694
agguuucuaugacuuuaac

SEQ ID NO: 2209961 - RNA, 19 nt, Artificial Sequence
  Description of Artificial Sequence: Synthetic oligonucleotide
  Antisense strand to SEQ ID NO: 2209960
guuaaagucauagaaaccu

SEQ ID NO: 2209962 - RNA, 19 nt, Artificial Sequence
  Description of Artificial Sequence: Synthetic oligonucleotide
  Sense strand starting at position 3653 of SEQ ID NO: 1883694
ucugaucauucuuucugga

SEQ ID NO: 2209963 - RNA, 19 nt, Artificial Sequence
  Description of Artificial Sequence: Synthetic oligonucleotide
  Antisense strand to SEQ ID NO: 2209962
uccagaaagaaugaucaga

SEQ ID NO: 2209964 - RNA, 19 nt, Artificial Sequence
  Description of Artificial Sequence: Synthetic oligonucleotide
  Sense strand starting at position 3970 of SEQ ID NO: 1883694
acugcuagccuuuaugaaa

SEQ ID NO: 2209965 - RNA, 19 nt, Artificial Sequence
  Description of Artificial Sequence: Synthetic oligonucleotide
  Antisense strand to SEQ ID NO: 2209964
uuucauaaaggcuagcagu

SEQ ID NO: 2209966 - RNA, 19 nt, Artificial Sequence
  Description of Artificial Sequence: Synthetic oligonucleotide
  Sense strand starting at position 3857 of SEQ ID NO: 1883694
gcauguaggguaggaaaua

SEQ ID NO: 2209967 - RNA, 19 nt, Artificial Sequence
  Description of Artificial Sequence: Synthetic oligonucleotide
  Antisense strand to SEQ ID NO: 2209966
uauuuccuacccuacaugc

SEQ ID NO: 2209968 - RNA, 19 nt, Artificial Sequence
  Description of Artificial Sequence: Synthetic oligonucleotide
  Sense strand starting at position 3432 of SEQ ID NO: 1883694
guuagaucccuuuauucuu

SEQ ID NO: 2209969 - RNA, 19 nt, Artificial Sequence
  Description of Artificial Sequence: Synthetic oligonucleotide
  Antisense strand to SEQ ID NO: 2209968
aagaauaaagggaucuaac

SEQ ID NO: 2209970 - RNA, 19 nt, Artificial Sequence
  Description of Artificial Sequence: Synthetic oligonucleotide
  Sense strand starting at position 526 of SEQ ID NO: 1883694
guccaaacugcuugaagaa

SEQ ID NO: 2209971 - RNA, 19 nt, Artificial Sequence
  Description of Artificial Sequence: Synthetic oligonucleotide
  Antisense strand to SEQ ID NO: 2209970
uucuucaagcaguuuggac

SEQ ID NO: 2209972 - RNA, 19 nt, Artificial Sequence
  Description of Artificial Sequence: Synthetic oligonucleotide
  Sense strand starting at position 525 of SEQ ID NO: 1883694
gguccaaacugcuugaaga

SEQ ID NO: 2209973 - RNA, 19 nt, Artificial Sequence
  Description of Artificial Sequence: Synthetic oligonucleotide
  Antisense strand to SEQ ID NO: 2209972
ucuucaagcaguuuggacc

SEQ ID NO: 2209974 - RNA, 19 nt, Artificial Sequence
  Description of Artificial Sequence: Synthetic oligonucleotide
  Sense strand starting at position 3293 of SEQ ID NO: 1883694
gucuaucugacaugaaacg

SEQ ID NO: 2209975 - RNA, 19 nt, Artificial Sequence
  Description of Artificial Sequence: Synthetic oligonucleotide
  Antisense strand to SEQ ID NO: 2209974
cguuucaugucagauagac

SEQ ID NO: 2209976 - RNA, 19 nt, Artificial Sequence
  Description of Artificial Sequence: Synthetic oligonucleotide
  Sense strand starting at position 1678 of SEQ ID NO: 1883694
gagauaaugugguccuuac

SEQ ID NO: 2209977 - RNA, 19 nt, Artificial Sequence
  Description of Artificial Sequence: Synthetic oligonucleotide
  Antisense strand to SEQ ID NO: 2209976
guaaggaccacauuaucuc

SEQ ID NO: 2209978 - RNA, 19 nt, Artificial Sequence
  Description of Artificial Sequence: Synthetic oligonucleotide
  Sense strand starting at position 1308 of SEQ ID NO: 1883694
acagaauguucugccaaac

SEQ ID NO: 2209979 - RNA, 19 nt, Artificial Sequence
  Description of Artificial Sequence: Synthetic oligonucleotide
  Antisense strand to SEQ ID NO: 2209978
guuuggcagaacauucugu

SEQ ID NO: 2209980 - RNA, 19 nt, Artificial Sequence
  Description of Artificial Sequence: Synthetic oligonucleotide
  Sense strand starting at position 822 of SEQ ID NO: 1883694
uggagcuguccauagugau

SEQ ID NO: 2209981 - RNA, 19 nt, Artificial Sequence
  Description of Artificial Sequence: Synthetic oligonucleotide
  Antisense strand to SEQ ID NO: 2209980
aucacuauggacagcucca

SEQ ID NO: 2209982 - RNA, 19 nt, Artificial Sequence
  Description of Artificial Sequence: Synthetic oligonucleotide
  Sense strand starting at position 1902 of SEQ ID NO: 1883694
acccuuucucaaugugaug

SEQ ID NO: 2209983 - RNA, 19 nt, Artificial Sequence
  Description of Artificial Sequence: Synthetic oligonucleotide
  Antisense strand to SEQ ID NO: 2209982
caucacauugagaaagggu

SEQ ID NO: 2209984 - RNA, 19 nt, Artificial Sequence
  Description of Artificial Sequence: Synthetic oligonucleotide
  Sense strand starting at position 3772 of SEQ ID NO: 1883694
guuacuauccaaggcuaga

SEQ ID NO: 2209985 - RNA, 19 nt, Artificial Sequence
  Description of Artificial Sequence: Synthetic oligonucleotide
  Antisense strand to SEQ ID NO: 2209984
ucuagccuuggauaguaac

SEQ ID NO: 2209986 - RNA, 19 nt, Artificial Sequence
  Description of Artificial Sequence: Synthetic oligonucleotide
  Sense strand starting at position 1682 of SEQ ID NO: 1883694
uaaugugguccuuaccagu

SEQ ID NO: 2209987 - RNA, 19 nt, Artificial Sequence
  Description of Artificial Sequence: Synthetic oligonucleotide
  Antisense strand to SEQ ID NO: 2209986
acugguaaggaccacauua

SEQ ID NO: 2209988 - RNA, 19 nt, Artificial Sequence
  Description of Artificial Sequence: Synthetic oligonucleotide
  Sense strand starting at position 2292 of SEQ ID NO: 1883694
cuacuaguccaguagcauu

SEQ ID NO: 2209989 - RNA, 19 nt, Artificial Sequence
  Description of Artificial Sequence: Synthetic oligonucleotide
  Antisense strand to SEQ ID NO: 2209988
aaugcuacuggacuaguag

SEQ ID NO: 2209990 - RNA, 19 nt, Artificial Sequence
  Description of Artificial Sequence: Synthetic oligonucleotide
  Sense strand starting at position 3903 of SEQ ID NO: 1883694
aaauucucuggcugucaga

SEQ ID NO: 2209991 - RNA, 19 nt, Artificial Sequence
  Description of Artificial Sequence: Synthetic oligonucleotide
  Antisense strand to SEQ ID NO: 2209990
ucugacagccagagaauuu

SEQ ID NO: 2209992 - RNA, 19 nt, Artificial Sequence
  Description of Artificial Sequence: Synthetic oligonucleotide
  Sense strand starting at position 657 of SEQ ID NO: 1883694
uaguuuggucuccaaagcu

SEQ ID NO: 2209993 - RNA, 19 nt, Artificial Sequence
  Description of Artificial Sequence: Synthetic oligonucleotide
  Antisense strand to SEQ ID NO: 2209992
agcuuuggagaccaaacua

SEQ ID NO: 2209994 - RNA, 19 nt, Artificial Sequence
  Description of Artificial Sequence: Synthetic oligonucleotide
  Sense strand starting at position 2343 of SEQ ID NO: 1883694
gugagcucauauccuauca

SEQ ID NO: 2209995 - RNA, 19 nt, Artificial Sequence
  Description of Artificial Sequence: Synthetic oligonucleotide
  Antisense strand to SEQ ID NO: 2209994
ugauaggauaugagcucac

SEQ ID NO: 2209996 - RNA, 19 nt, Artificial Sequence
  Description of Artificial Sequence: Synthetic oligonucleotide
  Sense strand starting at position 3109 of SEQ ID NO: 1883695
gggucuucuccucaaggga

SEQ ID NO: 2209997 - RNA, 19 nt, Artificial Sequence
  Description of Artificial Sequence: Synthetic oligonucleotide
  Antisense strand to SEQ ID NO: 2209996
ucccuugaggagaagaccc

SEQ ID NO: 2209998 - RNA, 19 nt, Artificial Sequence
  Description of Artificial Sequence: Synthetic oligonucleotide
  Sense strand starting at position 1807 of SEQ ID NO: 1883695
gggcuaugccgccuaagua

SEQ ID NO: 2209999 - RNA, 19 nt, Artificial Sequence
  Description of Artificial Sequence: Synthetic oligonucleotide
  Antisense strand to SEQ ID NO: 2209998
uacuuaggcggcauagccc

SEQ ID NO: 2210000 - RNA, 19 nt, Artificial Sequence
  Description of Artificial Sequence: Synthetic oligonucleotide
  Sense strand starting at position 1199 of SEQ ID NO: 1883695
gaccaugucccaggagacu

SEQ ID NO: 2210001 - RNA, 19 nt, Artificial Sequence
  Description of Artificial Sequence: Synthetic oligonucleotide
  Antisense strand to SEQ ID NO: 2210000
agucuccugggacaugguc

SEQ ID NO: 2210002 - RNA, 19 nt, Artificial Sequence
  Description of Artificial Sequence: Synthetic oligonucleotide
  Sense strand starting at position 2264 of SEQ ID NO: 1883695
gcuguuuaccugucggguu

SEQ ID NO: 2210003 - RNA, 19 nt, Artificial Sequence
  Description of Artificial Sequence: Synthetic oligonucleotide
  Antisense strand to SEQ ID NO: 2210002
aacccgacagguaaacagc

SEQ ID NO: 2210004 - RNA, 19 nt, Artificial Sequence
  Description of Artificial Sequence: Synthetic oligonucleotide
  Sense strand starting at position 2103 of SEQ ID NO: 1883695
cccaguucucgggaaccca

SEQ ID NO: 2210005 - RNA, 19 nt, Artificial Sequence
  Description of Artificial Sequence: Synthetic oligonucleotide
  Antisense strand to SEQ ID NO: 2210004
uggguucccgagaacuggg

SEQ ID NO: 2210006 - RNA, 19 nt, Artificial Sequence
  Description of Artificial Sequence: Synthetic oligonucleotide
  Sense strand starting at position 797 of SEQ ID NO: 1883695
gcuccaaguguccacuaga

SEQ ID NO: 2210007 - RNA, 19 nt, Artificial Sequence
  Description of Artificial Sequence: Synthetic oligonucleotide
  Antisense strand to SEQ ID NO: 2210006
ucuaguggacacuuggagc

SEQ ID NO: 2210008 - RNA, 19 nt, Artificial Sequence
  Description of Artificial Sequence: Synthetic oligonucleotide
  Sense strand starting at position 3261 of SEQ ID NO: 1883695
ccaccuaucuggucuccua

SEQ ID NO: 2210009 - RNA, 19 nt, Artificial Sequence
  Description of Artificial Sequence: Synthetic oligonucleotide
  Antisense strand to SEQ ID NO: 2210008
uaggagaccagauaggugg

SEQ ID NO: 2210010 - RNA, 19 nt, Artificial Sequence
  Description of Artificial Sequence: Synthetic oligonucleotide
  Sense strand starting at position 3566 of SEQ ID NO: 1883695
aggcaccauucuguguaua

SEQ ID NO: 2210011 - RNA, 19 nt, Artificial Sequence
  Description of Artificial Sequence: Synthetic oligonucleotide
  Antisense strand to SEQ ID NO: 2210010
uauacacagaauggugccu

SEQ ID NO: 2210012 - RNA, 19 nt, Artificial Sequence
  Description of Artificial Sequence: Synthetic oligonucleotide
  Sense strand starting at position 3438 of SEQ ID NO: 1883695
ggaggacucugagacuuag

SEQ ID NO: 2210013 - RNA, 19 nt, Artificial Sequence
  Description of Artificial Sequence: Synthetic oligonucleotide
  Antisense strand to SEQ ID NO: 2210012
cuaagucucagaguccucc

SEQ ID NO: 2210014 - RNA, 19 nt, Artificial Sequence
  Description of Artificial Sequence: Synthetic oligonucleotide
  Sense strand starting at position 2812 of SEQ ID NO: 1883695
aggagcguugcuggaagau

SEQ ID NO: 2210015 - RNA, 19 nt, Artificial Sequence
  Description of Artificial Sequence: Synthetic oligonucleotide
  Antisense strand to SEQ ID NO: 2210014
aucuuccagcaacgcuccu

SEQ ID NO: 2210016 - RNA, 19 nt, Artificial Sequence
  Description of Artificial Sequence: Synthetic oligonucleotide
  Sense strand starting at position 3568 of SEQ ID NO: 1883695
gcaccauucuguguauaug

SEQ ID NO: 2210017 - RNA, 19 nt, Artificial Sequence
  Description of Artificial Sequence: Synthetic oligonucleotide
  Antisense strand to SEQ ID NO: 2210016
cauauacacagaauggugc

SEQ ID NO: 2210018 - RNA, 19 nt, Artificial Sequence
  Description of Artificial Sequence: Synthetic oligonucleotide
  Sense strand starting at position 3567 of SEQ ID NO: 1883695
ggcaccauucuguguauau

SEQ ID NO: 2210019 - RNA, 19 nt, Artificial Sequence
  Description of Artificial Sequence: Synthetic oligonucleotide
  Antisense strand to SEQ ID NO: 2210018
auauacacagaauggugcc

SEQ ID NO: 2210020 - RNA, 19 nt, Artificial Sequence
  Description of Artificial Sequence: Synthetic oligonucleotide
  Sense strand starting at position 2065 of SEQ ID NO: 1883695
ugccuucuuggcugauaug

SEQ ID NO: 2210021 - RNA, 19 nt, Artificial Sequence
  Description of Artificial Sequence: Synthetic oligonucleotide
  Antisense strand to SEQ ID NO: 2210020
cauaucagccaagaaggca

SEQ ID NO: 2210022 - RNA, 19 nt, Artificial Sequence
  Description of Artificial Sequence: Synthetic oligonucleotide
  Sense strand starting at position 2008 of SEQ ID NO: 1883695
uggcgucuuccagaaugcu

SEQ ID NO: 2210023 - RNA, 19 nt, Artificial Sequence
  Description of Artificial Sequence: Synthetic oligonucleotide
  Antisense strand to SEQ ID NO: 2210022
agcauucuggaagacgcca

SEQ ID NO: 2210024 - RNA, 19 nt, Artificial Sequence
  Description of Artificial Sequence: Synthetic oligonucleotide
  Sense strand starting at position 2064 of SEQ ID NO: 1883695
cugccuucuuggcugauau

SEQ ID NO: 2210025 - RNA, 19 nt, Artificial Sequence
  Description of Artificial Sequence: Synthetic oligonucleotide
  Antisense strand to SEQ ID NO: 2210024
auaucagccaagaaggcag

SEQ ID NO: 2210026 - RNA, 19 nt, Artificial Sequence
  Description of Artificial Sequence: Synthetic oligonucleotide
  Sense strand starting at position 2063 of SEQ ID NO: 1883695
ucugccuucuuggcugaua

SEQ ID NO: 2210027 - RNA, 19 nt, Artificial Sequence
  Description of Artificial Sequence: Synthetic oligonucleotide
  Antisense strand to SEQ ID NO: 2210026
uaucagccaagaaggcaga

SEQ ID NO: 2210028 - RNA, 19 nt, Artificial Sequence
  Description of Artificial Sequence: Synthetic oligonucleotide
  Sense strand starting at position 950 of SEQ ID NO: 1883695
gcaagagcucuuuguccug

SEQ ID NO: 2210029 - RNA, 19 nt, Artificial Sequence
  Description of Artificial Sequence: Synthetic oligonucleotide
  Antisense strand to SEQ ID NO: 2210028
caggacaaagagcucuugc

SEQ ID NO: 2210030 - RNA, 19 nt, Artificial Sequence
  Description of Artificial Sequence: Synthetic oligonucleotide
  Sense strand starting at position 2017 of SEQ ID NO: 1883695
ccagaaugcugcgcuggau

SEQ ID NO: 2210031 - RNA, 19 nt, Artificial Sequence
  Description of Artificial Sequence: Synthetic oligonucleotide
  Antisense strand to SEQ ID NO: 2210030
auccagcgcagcauucugg

SEQ ID NO: 2210032 - RNA, 19 nt, Artificial Sequence
  Description of Artificial Sequence: Synthetic oligonucleotide
  Sense strand starting at position 1007 of SEQ ID NO: 1883695
gguccaggcucuguguauu

SEQ ID NO: 2210033 - RNA, 19 nt, Artificial Sequence
  Description of Artificial Sequence: Synthetic oligonucleotide
  Antisense strand to SEQ ID NO: 2210032
aauacacagagccuggacc

SEQ ID NO: 2210034 - RNA, 19 nt, Artificial Sequence
  Description of Artificial Sequence: Synthetic oligonucleotide
  Sense strand starting at position 353 of SEQ ID NO: 1883695
aggcgaaggucagagauca

SEQ ID NO: 2210035 - RNA, 19 nt, Artificial Sequence
  Description of Artificial Sequence: Synthetic oligonucleotide
  Antisense strand to SEQ ID NO: 2210034
ugaucucugaccuucgccu

SEQ ID NO: 2210036 - RNA, 19 nt, Artificial Sequence
  Description of Artificial Sequence: Synthetic oligonucleotide
  Sense strand starting at position 3826 of SEQ ID NO: 1883695
caucuugggucccaggauu

SEQ ID NO: 2210037 - RNA, 19 nt, Artificial Sequence
  Description of Artificial Sequence: Synthetic oligonucleotide
  Antisense strand to SEQ ID NO: 2210036
aauccugggacccaagaug

SEQ ID NO: 2210038 - RNA, 19 nt, Artificial Sequence
  Description of Artificial Sequence: Synthetic oligonucleotide
  Sense strand starting at position 2004 of SEQ ID NO: 1883695
ggcguggcgucuuccagaa

SEQ ID NO: 2210039 - RNA, 19 nt, Artificial Sequence
  Description of Artificial Sequence: Synthetic oligonucleotide
  Antisense strand to SEQ ID NO: 2210038
uucuggaagacgccacgcc

SEQ ID NO: 2210040 - RNA, 19 nt, Artificial Sequence
  Description of Artificial Sequence: Synthetic oligonucleotide
  Sense strand starting at position 3722 of SEQ ID NO: 1883696
uguagaacaguuuaucuaa

SEQ ID NO: 2210041 - RNA, 19 nt, Artificial Sequence
  Description of Artificial Sequence: Synthetic oligonucleotide
  Antisense strand to SEQ ID NO: 2210040
uuagauaaacuguucuaca

SEQ ID NO: 2210042 - RNA, 19 nt, Artificial Sequence
  Description of Artificial Sequence: Synthetic oligonucleotide
  Sense strand starting at position 3960 of SEQ ID NO: 1883696
agacaucagugaguaagau

SEQ ID NO: 2210043 - RNA, 19 nt, Artificial Sequence
  Description of Artificial Sequence: Synthetic oligonucleotide
  Antisense strand to SEQ ID NO: 2210042
aucuuacucacugaugucu

SEQ ID NO: 2210044 - RNA, 19 nt, Artificial Sequence
  Description of Artificial Sequence: Synthetic oligonucleotide
  Sense strand starting at position 1728 of SEQ ID NO: 1883696
ugcauaucuguggaaacaa

SEQ ID NO: 2210045 - RNA, 19 nt, Artificial Sequence
  Description of Artificial Sequence: Synthetic oligonucleotide
  Antisense strand to SEQ ID NO: 2210044
uuguuuccacagauaugca

SEQ ID NO: 2210046 - RNA, 19 nt, Artificial Sequence
  Description of Artificial Sequence: Synthetic oligonucleotide
  Sense strand starting at position 332 of SEQ ID NO: 1883696
uagaauggcgaaugaauga

SEQ ID NO: 2210047 - RNA, 19 nt, Artificial Sequence
  Description of Artificial Sequence: Synthetic oligonucleotide
  Antisense strand to SEQ ID NO: 2210046
ucauucauucgccauucua

SEQ ID NO: 2210048 - RNA, 19 nt, Artificial Sequence
  Description of Artificial Sequence: Synthetic oligonucleotide
  Sense strand starting at position 1072 of SEQ ID NO: 1883696
acacuaggauucuccugau

SEQ ID NO: 2210049 - RNA, 19 nt, Artificial Sequence
  Description of Artificial Sequence: Synthetic oligonucleotide
  Antisense strand to SEQ ID NO: 2210048
aucaggagaauccuagugu

SEQ ID NO: 2210050 - RNA, 19 nt, Artificial Sequence
  Description of Artificial Sequence: Synthetic oligonucleotide
  Sense strand starting at position 1169 of SEQ ID NO: 1883696
augggaacuuugccacaaa

SEQ ID NO: 2210051 - RNA, 19 nt, Artificial Sequence
  Description of Artificial Sequence: Synthetic oligonucleotide
  Antisense strand to SEQ ID NO: 2210050
uuuguggcaaaguucccau

SEQ ID NO: 2210052 - RNA, 19 nt, Artificial Sequence
  Description of Artificial Sequence: Synthetic oligonucleotide
  Sense strand starting at position 1185 of SEQ ID NO: 1883696
aaaugagcccuuuggaaug

SEQ ID NO: 2210053 - RNA, 19 nt, Artificial Sequence
  Description of Artificial Sequence: Synthetic oligonucleotide
  Antisense strand to SEQ ID NO: 2210052
cauuccaaagggcucauuu

SEQ ID NO: 2210054 - RNA, 19 nt, Artificial Sequence
  Description of Artificial Sequence: Synthetic oligonucleotide
  Sense strand starting at position 1078 of SEQ ID NO: 1883696
ggauucuccugaucccuca

SEQ ID NO: 2210055 - RNA, 19 nt, Artificial Sequence
  Description of Artificial Sequence: Synthetic oligonucleotide
  Antisense strand to SEQ ID NO: 2210054
ugagggaucaggagaaucc

SEQ ID NO: 2210056 - RNA, 19 nt, Artificial Sequence
  Description of Artificial Sequence: Synthetic oligonucleotide
  Sense strand starting at position 1725 of SEQ ID NO: 1883696
ccaugcauaucuguggaaa

SEQ ID NO: 2210057 - RNA, 19 nt, Artificial Sequence
  Description of Artificial Sequence: Synthetic oligonucleotide
  Antisense strand to SEQ ID NO: 2210056
uuuccacagauaugcaugg

SEQ ID NO: 2210058 - RNA, 19 nt, Artificial Sequence
  Description of Artificial Sequence: Synthetic oligonucleotide
  Sense strand starting at position 1726 of SEQ ID NO: 1883696
caugcauaucuguggaaac

SEQ ID NO: 2210059 - RNA, 19 nt, Artificial Sequence
  Description of Artificial Sequence: Synthetic oligonucleotide
  Antisense strand to SEQ ID NO: 2210058
guuuccacagauaugcaug

SEQ ID NO: 2210060 - RNA, 19 nt, Artificial Sequence
  Description of Artificial Sequence: Synthetic oligonucleotide
  Sense strand starting at position 3853 of SEQ ID NO: 1883696
uaggaagccuguucugaua

SEQ ID NO: 2210061 - RNA, 19 nt, Artificial Sequence
  Description of Artificial Sequence: Synthetic oligonucleotide
  Antisense strand to SEQ ID NO: 2210060
uaucagaacaggcuuccua

SEQ ID NO: 2210062 - RNA, 19 nt, Artificial Sequence
  Description of Artificial Sequence: Synthetic oligonucleotide
  Sense strand starting at position 1402 of SEQ ID NO: 1883696
cgauguuuccuggaggcag

SEQ ID NO: 2210063 - RNA, 19 nt, Artificial Sequence
  Description of Artificial Sequence: Synthetic oligonucleotide
  Antisense strand to SEQ ID NO: 2210062
cugccuccaggaaacaucg

SEQ ID NO: 2210064 - RNA, 19 nt, Artificial Sequence
  Description of Artificial Sequence: Synthetic oligonucleotide
  Sense strand starting at position 1235 of SEQ ID NO: 1883696
cggaguguaguugggaaga

SEQ ID NO: 2210065 - RNA, 19 nt, Artificial Sequence
  Description of Artificial Sequence: Synthetic oligonucleotide
  Antisense strand to SEQ ID NO: 2210064
ucuucccaacuacacuccg

SEQ ID NO: 2210066 - RNA, 19 nt, Artificial Sequence
  Description of Artificial Sequence: Synthetic oligonucleotide
  Sense strand starting at position 3452 of SEQ ID NO: 1883696
gugugacagcccuagaguu

SEQ ID NO: 2210067 - RNA, 19 nt, Artificial Sequence
  Description of Artificial Sequence: Synthetic oligonucleotide
  Antisense strand to SEQ ID NO: 2210066
aacucuagggcugucacac

SEQ ID NO: 2210068 - RNA, 19 nt, Artificial Sequence
  Description of Artificial Sequence: Synthetic oligonucleotide
  Sense strand starting at position 1233 of SEQ ID NO: 1883696
cccggaguguaguugggaa

SEQ ID NO: 2210069 - RNA, 19 nt, Artificial Sequence
  Description of Artificial Sequence: Synthetic oligonucleotide
  Antisense strand to SEQ ID NO: 2210068
uucccaacuacacuccggg

SEQ ID NO: 2210070 - RNA, 19 nt, Artificial Sequence
  Description of Artificial Sequence: Synthetic oligonucleotide
  Sense strand starting at position 2364 of SEQ ID NO: 1883696
ugugcaauggcacgaucua

SEQ ID NO: 2210071 - RNA, 19 nt, Artificial Sequence
  Description of Artificial Sequence: Synthetic oligonucleotide
  Antisense strand to SEQ ID NO: 2210070
uagaucgugccauugcaca

SEQ ID NO: 2210072 - RNA, 19 nt, Artificial Sequence
  Description of Artificial Sequence: Synthetic oligonucleotide
  Sense strand starting at position 3783 of SEQ ID NO: 1883696
ggcaaagggucacacaaau

SEQ ID NO: 2210073 - RNA, 19 nt, Artificial Sequence
  Description of Artificial Sequence: Synthetic oligonucleotide
  Antisense strand to SEQ ID NO: 2210072
auuugugugacccuuugcc

SEQ ID NO: 2210074 - RNA, 19 nt, Artificial Sequence
  Description of Artificial Sequence: Synthetic oligonucleotide
  Sense strand starting at position 1716 of SEQ ID NO: 1883696
gcagcaaugccaugcauau

SEQ ID NO: 2210075 - RNA, 19 nt, Artificial Sequence
  Description of Artificial Sequence: Synthetic oligonucleotide
  Antisense strand to SEQ ID NO: 2210074
auaugcauggcauugcugc

SEQ ID NO: 2210076 - RNA, 19 nt, Artificial Sequence
  Description of Artificial Sequence: Synthetic oligonucleotide
  Sense strand starting at position 3557 of SEQ ID NO: 1883696
gguaauaccugggaaggca

SEQ ID NO: 2210077 - RNA, 19 nt, Artificial Sequence
  Description of Artificial Sequence: Synthetic oligonucleotide
  Antisense strand to SEQ ID NO: 2210076
ugccuucccagguauuacc

SEQ ID NO: 2210078 - RNA, 19 nt, Artificial Sequence
  Description of Artificial Sequence: Synthetic oligonucleotide
  Sense strand starting at position 1170 of SEQ ID NO: 1883696
ugggaacuuugccacaaau

SEQ ID NO: 2210079 - RNA, 19 nt, Artificial Sequence
  Description of Artificial Sequence: Synthetic oligonucleotide
  Antisense strand to SEQ ID NO: 2210078
auuuguggcaaaguuccca

SEQ ID NO: 2210080 - RNA, 19 nt, Artificial Sequence
  Description of Artificial Sequence: Synthetic oligonucleotide
  Sense strand starting at position 3371 of SEQ ID NO: 1883696
ggcccaaagcuguguguuu

SEQ ID NO: 2210081 - RNA, 19 nt, Artificial Sequence
  Description of Artificial Sequence: Synthetic oligonucleotide
  Antisense strand to SEQ ID NO: 2210080
aaacacacagcuuugggcc

SEQ ID NO: 2210082 - RNA, 19 nt, Artificial Sequence
  Description of Artificial Sequence: Synthetic oligonucleotide
  Sense strand starting at position 375 of SEQ ID NO: 1883696
augaguaacuuguaacccu

SEQ ID NO: 2210083 - RNA, 19 nt, Artificial Sequence
  Description of Artificial Sequence: Synthetic oligonucleotide
  Antisense strand to SEQ ID NO: 2210082
aggguuacaaguuacucau

SEQ ID NO: 2210084 - RNA, 19 nt, Artificial Sequence
  Description of Artificial Sequence: Synthetic oligonucleotide
  Sense strand starting at position 3899 of SEQ ID NO: 1883696
cggcauccauuccaacaaa

SEQ ID NO: 2210085 - RNA, 19 nt, Artificial Sequence
  Description of Artificial Sequence: Synthetic oligonucleotide
  Antisense strand to SEQ ID NO: 2210084
uuuguuggaauggaugccg

SEQ ID NO: 2210086 - RNA, 19 nt, Artificial Sequence
  Description of Artificial Sequence: Synthetic oligonucleotide
  Sense strand starting at position 1727 of SEQ ID NO: 1883696
augcauaucuguggaaaca

SEQ ID NO: 2210087 - RNA, 19 nt, Artificial Sequence
  Description of Artificial Sequence: Synthetic oligonucleotide
  Antisense strand to SEQ ID NO: 2210086
uguuuccacagauaugcau

SEQ ID NO: 2210088 - RNA, 19 nt, Artificial Sequence
  Description of Artificial Sequence: Synthetic oligonucleotide
  Sense strand starting at position 1031 of SEQ ID NO: 1883696
ugaacuuggugugauucga

SEQ ID NO: 2210089 - RNA, 19 nt, Artificial Sequence
  Description of Artificial Sequence: Synthetic oligonucleotide
  Antisense strand to SEQ ID NO: 2210088
ucgaaucacaccaaguuca

SEQ ID NO: 2210090 - RNA, 19 nt, Artificial Sequence
  Description of Artificial Sequence: Synthetic oligonucleotide
  Sense strand starting at position 3855 of SEQ ID NO: 1883696
ggaagccuguucugauaac

SEQ ID NO: 2210091 - RNA, 19 nt, Artificial Sequence
  Description of Artificial Sequence: Synthetic oligonucleotide
  Antisense strand to SEQ ID NO: 2210090
guuaucagaacaggcuucc

SEQ ID NO: 2210092 - RNA, 19 nt, Artificial Sequence
  Description of Artificial Sequence: Synthetic oligonucleotide
  Sense strand starting at position 1028 of SEQ ID NO: 1883696
gggugaacuuggugugauu

SEQ ID NO: 2210093 - RNA, 19 nt, Artificial Sequence
  Description of Artificial Sequence: Synthetic oligonucleotide
  Antisense strand to SEQ ID NO: 2210092
aaucacaccaaguucaccc

SEQ ID NO: 2210094 - RNA, 19 nt, Artificial Sequence
  Description of Artificial Sequence: Synthetic oligonucleotide
  Sense strand starting at position 2270 of SEQ ID NO: 1883696
ccuggcuaauccuguuuau

SEQ ID NO: 2210095 - RNA, 19 nt, Artificial Sequence
  Description of Artificial Sequence: Synthetic oligonucleotide
  Antisense strand to SEQ ID NO: 2210094
auaaacaggauuagccagg

SEQ ID NO: 2210096 - RNA, 19 nt, Artificial Sequence
  Description of Artificial Sequence: Synthetic oligonucleotide
  Sense strand starting at position 3382 of SEQ ID NO: 1883696
guguguuucuacugcagca

SEQ ID NO: 2210097 - RNA, 19 nt, Artificial Sequence
  Description of Artificial Sequence: Synthetic oligonucleotide
  Antisense strand to SEQ ID NO: 2210096
ugcugcaguagaaacacac

SEQ ID NO: 2210098 - RNA, 19 nt, Artificial Sequence
  Description of Artificial Sequence: Synthetic oligonucleotide
  Sense strand starting at position 1276 of SEQ ID NO: 1883697
cuguguucugaguauuucu

SEQ ID NO: 2210099 - RNA, 19 nt, Artificial Sequence
  Description of Artificial Sequence: Synthetic oligonucleotide
  Antisense strand to SEQ ID NO: 2210098
agaaauacucagaacacag

SEQ ID NO: 2210100 - RNA, 19 nt, Artificial Sequence
  Description of Artificial Sequence: Synthetic oligonucleotide
  Sense strand starting at position 3391 of SEQ ID NO: 1883697
auuauugucccucagauag

SEQ ID NO: 2210101 - RNA, 19 nt, Artificial Sequence
  Description of Artificial Sequence: Synthetic oligonucleotide
  Antisense strand to SEQ ID NO: 2210100
cuaucugagggacaauaau

SEQ ID NO: 2210102 - RNA, 19 nt, Artificial Sequence
  Description of Artificial Sequence: Synthetic oligonucleotide
  Sense strand starting at position 1009 of SEQ ID NO: 1883697
cucacauaagauugcagaa

SEQ ID NO: 2210103 - RNA, 19 nt, Artificial Sequence
  Description of Artificial Sequence: Synthetic oligonucleotide
  Antisense strand to SEQ ID NO: 2210102
uucugcaaucuuaugugag

SEQ ID NO: 2210104 - RNA, 19 nt, Artificial Sequence
  Description of Artificial Sequence: Synthetic oligonucleotide
  Sense strand starting at position 1034 of SEQ ID NO: 1883697
ugcuguggccggaaaguuu

SEQ ID NO: 2210105 - RNA, 19 nt, Artificial Sequence
  Description of Artificial Sequence: Synthetic oligonucleotide
  Antisense strand to SEQ ID NO: 2210104
aaacuuuccggccacagca

SEQ ID NO: 2210106 - RNA, 19 nt, Artificial Sequence
  Description of Artificial Sequence: Synthetic oligonucleotide
  Sense strand starting at position 73 of SEQ ID NO: 1883697
cggcuaagaggguaugaau

SEQ ID NO: 2210107 - RNA, 19 nt, Artificial Sequence
  Description of Artificial Sequence: Synthetic oligonucleotide
  Antisense strand to SEQ ID NO: 2210106
auucauacccucuuagccg

SEQ ID NO: 2210108 - RNA, 19 nt, Artificial Sequence
  Description of Artificial Sequence: Synthetic oligonucleotide
  Sense strand starting at position 1225 of SEQ ID NO: 1883697
cuacgagugccugcauguu

SEQ ID NO: 2210109 - RNA, 19 nt, Artificial Sequence
  Description of Artificial Sequence: Synthetic oligonucleotide
  Antisense strand to SEQ ID NO: 2210108
aacaugcaggcacucguag

SEQ ID NO: 2210110 - RNA, 19 nt, Artificial Sequence
  Description of Artificial Sequence: Synthetic oligonucleotide
  Sense strand starting at position 1660 of SEQ ID NO: 1883697
cuguuauuugaauguuugu

SEQ ID NO: 2210111 - RNA, 19 nt, Artificial Sequence
  Description of Artificial Sequence: Synthetic oligonucleotide
  Antisense strand to SEQ ID NO: 2210110
acaaacauucaaauaacag

SEQ ID NO: 2210112 - RNA, 19 nt, Artificial Sequence
  Description of Artificial Sequence: Synthetic oligonucleotide
  Sense strand starting at position 1425 of SEQ ID NO: 1883697
gugugaaugcuuguccgua

SEQ ID NO: 2210113 - RNA, 19 nt, Artificial Sequence
  Description of Artificial Sequence: Synthetic oligonucleotide
  Antisense strand to SEQ ID NO: 2210112
uacggacaagcauucacac

SEQ ID NO: 2210114 - RNA, 19 nt, Artificial Sequence
  Description of Artificial Sequence: Synthetic oligonucleotide
  Sense strand starting at position 491 of SEQ ID NO: 1883697
agcauuccugaacaauguu

SEQ ID NO: 2210115 - RNA, 19 nt, Artificial Sequence
  Description of Artificial Sequence: Synthetic oligonucleotide
  Antisense strand to SEQ ID NO: 2210114
aacauuguucaggaaugcu

SEQ ID NO: 2210116 - RNA, 19 nt, Artificial Sequence
  Description of Artificial Sequence: Synthetic oligonucleotide
  Sense strand starting at position 190 of SEQ ID NO: 1883697
uugucccuuccauaggauu

SEQ ID NO: 2210117 - RNA, 19 nt, Artificial Sequence
  Description of Artificial Sequence: Synthetic oligonucleotide
  Antisense strand to SEQ ID NO: 2210116
aauccuauggaagggacaa

SEQ ID NO: 2210118 - RNA, 19 nt, Artificial Sequence
  Description of Artificial Sequence: Synthetic oligonucleotide
  Sense strand starting at position 3774 of SEQ ID NO: 1883697
aggcuuguuccucacaaag

SEQ ID NO: 2210119 - RNA, 19 nt, Artificial Sequence
  Description of Artificial Sequence: Synthetic oligonucleotide
  Antisense strand to SEQ ID NO: 2210118
cuuugugaggaacaagccu

SEQ ID NO: 2210120 - RNA, 19 nt, Artificial Sequence
  Description of Artificial Sequence: Synthetic oligonucleotide
  Sense strand starting at position 2811 of SEQ ID NO: 1883697
ucugaaugauugucacuca

SEQ ID NO: 2210121 - RNA, 19 nt, Artificial Sequence
  Description of Artificial Sequence: Synthetic oligonucleotide
  Antisense strand to SEQ ID NO: 2210120
ugagugacaaucauucaga

SEQ ID NO: 2210122 - RNA, 19 nt, Artificial Sequence
  Description of Artificial Sequence: Synthetic oligonucleotide
  Sense strand starting at position 1861 of SEQ ID NO: 1883697
gaaugauugucugucaaac

SEQ ID NO: 2210123 - RNA, 19 nt, Artificial Sequence
  Description of Artificial Sequence: Synthetic oligonucleotide
  Antisense strand to SEQ ID NO: 2210122
guuugacagacaaucauuc

SEQ ID NO: 2210124 - RNA, 19 nt, Artificial Sequence
  Description of Artificial Sequence: Synthetic oligonucleotide
  Sense strand starting at position 1106 of SEQ ID NO: 1883697
ucaaguagguuucuagaac

SEQ ID NO: 2210125 - RNA, 19 nt, Artificial Sequence
  Description of Artificial Sequence: Synthetic oligonucleotide
  Antisense strand to SEQ ID NO: 2210124
guucuagaaaccuacuuga

SEQ ID NO: 2210126 - RNA, 19 nt, Artificial Sequence
  Description of Artificial Sequence: Synthetic oligonucleotide
  Sense strand starting at position 663 of SEQ ID NO: 1883697
cuaaauguccgucacauag

SEQ ID NO: 2210127 - RNA, 19 nt, Artificial Sequence
  Description of Artificial Sequence: Synthetic oligonucleotide
  Antisense strand to SEQ ID NO: 2210126
cuaugugacggacauuuag

SEQ ID NO: 2210128 - RNA, 19 nt, Artificial Sequence
  Description of Artificial Sequence: Synthetic oligonucleotide
  Sense strand starting at position 511 of SEQ ID NO: 1883697
caagaaucugaauguuugu

SEQ ID NO: 2210129 - RNA, 19 nt, Artificial Sequence
  Description of Artificial Sequence: Synthetic oligonucleotide
  Antisense strand to SEQ ID NO: 2210128
acaaacauucagauucuug

SEQ ID NO: 2210130 - RNA, 19 nt, Artificial Sequence
  Description of Artificial Sequence: Synthetic oligonucleotide
  Sense strand starting at position 42 of SEQ ID NO: 1883697
augugugucccucacaaag

SEQ ID NO: 2210131 - RNA, 19 nt, Artificial Sequence
  Description of Artificial Sequence: Synthetic oligonucleotide
  Antisense strand to SEQ ID NO: 2210130
cuuugugagggacacacau

SEQ ID NO: 2210132 - RNA, 19 nt, Artificial Sequence
  Description of Artificial Sequence: Synthetic oligonucleotide
  Sense strand starting at position 2814 of SEQ ID NO: 1883697
gaaugauugucacucaagc

SEQ ID NO: 2210133 - RNA, 19 nt, Artificial Sequence
  Description of Artificial Sequence: Synthetic oligonucleotide
  Antisense strand to SEQ ID NO: 2210132
gcuugagugacaaucauuc

SEQ ID NO: 2210134 - RNA, 19 nt, Artificial Sequence
  Description of Artificial Sequence: Synthetic oligonucleotide
  Sense strand starting at position 1719 of SEQ ID NO: 1883697
auguuugucccucacuuaa

SEQ ID NO: 2210135 - RNA, 19 nt, Artificial Sequence
  Description of Artificial Sequence: Synthetic oligonucleotide
  Antisense strand to SEQ ID NO: 2210134
uuaagugagggacaaacau

SEQ ID NO: 2210136 - RNA, 19 nt, Artificial Sequence
  Description of Artificial Sequence: Synthetic oligonucleotide
  Sense strand starting at position 1859 of SEQ ID NO: 1883697
cugaaugauugucugucaa

SEQ ID NO: 2210137 - RNA, 19 nt, Artificial Sequence
  Description of Artificial Sequence: Synthetic oligonucleotide
  Antisense strand to SEQ ID NO: 2210136
uugacagacaaucauucag

SEQ ID NO: 2210138 - RNA, 19 nt, Artificial Sequence
  Description of Artificial Sequence: Synthetic oligonucleotide
  Sense strand starting at position 2719 of SEQ ID NO: 1883697
gaaaguuuguuccucacag

SEQ ID NO: 2210139 - RNA, 19 nt, Artificial Sequence
  Description of Artificial Sequence: Synthetic oligonucleotide
  Antisense strand to SEQ ID NO: 2210138
cugugaggaacaaacuuuc

SEQ ID NO: 2210140 - RNA, 19 nt, Artificial Sequence
  Description of Artificial Sequence: Synthetic oligonucleotide
  Sense strand starting at position 3900 of SEQ ID NO: 1883697
cugauacgauugucugaau

SEQ ID NO: 2210141 - RNA, 19 nt, Artificial Sequence
  Description of Artificial Sequence: Synthetic oligonucleotide
  Antisense strand to SEQ ID NO: 2210140
auucagacaaucguaucag

SEQ ID NO: 2210142 - RNA, 19 nt, Artificial Sequence
  Description of Artificial Sequence: Synthetic oligonucleotide
  Sense strand starting at position 907 of SEQ ID NO: 1883697
uucucacucgcauaggauu

SEQ ID NO: 2210143 - RNA, 19 nt, Artificial Sequence
  Description of Artificial Sequence: Synthetic oligonucleotide
  Antisense strand to SEQ ID NO: 2210142
aauccuaugcgagugagaa

SEQ ID NO: 2210144 - RNA, 19 nt, Artificial Sequence
  Description of Artificial Sequence: Synthetic oligonucleotide
  Sense strand starting at position 2391 of SEQ ID NO: 1883697
auguuugucccuuacgaaa

SEQ ID NO: 2210145 - RNA, 19 nt, Artificial Sequence
  Description of Artificial Sequence: Synthetic oligonucleotide
  Antisense strand to SEQ ID NO: 2210144
uuucguaagggacaaacau

SEQ ID NO: 2210146 - RNA, 19 nt, Artificial Sequence
  Description of Artificial Sequence: Synthetic oligonucleotide
  Sense strand starting at position 3442 of SEQ ID NO: 1883697
auugccgucacauaggauu

SEQ ID NO: 2210147 - RNA, 19 nt, Artificial Sequence
  Description of Artificial Sequence: Synthetic oligonucleotide
  Antisense strand to SEQ ID NO: 2210146
aauccuaugugacggcaau

SEQ ID NO: 2210148 - RNA, 19 nt, Artificial Sequence
  Description of Artificial Sequence: Synthetic oligonucleotide
  Sense strand starting at position 2848 of SEQ ID NO: 1883697
ugcuacuaggucugaauga

SEQ ID NO: 2210149 - RNA, 19 nt, Artificial Sequence
  Description of Artificial Sequence: Synthetic oligonucleotide
  Antisense strand to SEQ ID NO: 2210148
ucauucagaccuaguagca

SEQ ID NO: 2210150 - RNA, 19 nt, Artificial Sequence
  Description of Artificial Sequence: Synthetic oligonucleotide
  Sense strand starting at position 2483 of SEQ ID NO: 1883697
cugaauguuuguccauaau

SEQ ID NO: 2210151 - RNA, 19 nt, Artificial Sequence
  Description of Artificial Sequence: Synthetic oligonucleotide
  Antisense strand to SEQ ID NO: 2210150
auuauggacaaacauucag

SEQ ID NO: 2210152 - RNA, 19 nt, Artificial Sequence
  Description of Artificial Sequence: Synthetic oligonucleotide
  Sense strand starting at position 1858 of SEQ ID NO: 1883697
ucugaaugauugucuguca

SEQ ID NO: 2210153 - RNA, 19 nt, Artificial Sequence
  Description of Artificial Sequence: Synthetic oligonucleotide
  Antisense strand to SEQ ID NO: 2210152
ugacagacaaucauucaga

SEQ ID NO: 2210154 - RNA, 19 nt, Artificial Sequence
  Description of Artificial Sequence: Synthetic oligonucleotide
  Sense strand starting at position 3898 of SEQ ID NO: 1883697
cccugauacgauugucuga

SEQ ID NO: 2210155 - RNA, 19 nt, Artificial Sequence
  Description of Artificial Sequence: Synthetic oligonucleotide
  Antisense strand to SEQ ID NO: 2210154
ucagacaaucguaucaggg

SEQ ID NO: 2210156 - RNA, 19 nt, Artificial Sequence
  Description of Artificial Sequence: Synthetic oligonucleotide
  Sense strand starting at position 3050 of SEQ ID NO: 1883697
ucugaauguuugcccauaa

SEQ ID NO: 2210157 - RNA, 19 nt, Artificial Sequence
  Description of Artificial Sequence: Synthetic oligonucleotide
  Antisense strand to SEQ ID NO: 2210156
uuaugggcaaacauucaga

SEQ ID NO: 2210158 - RNA, 19 nt, Artificial Sequence
  Description of Artificial Sequence: Synthetic oligonucleotide
  Sense strand starting at position 1126 of SEQ ID NO: 1883697
augcuacuauuguuugaau

SEQ ID NO: 2210159 - RNA, 19 nt, Artificial Sequence
  Description of Artificial Sequence: Synthetic oligonucleotide
  Antisense strand to SEQ ID NO: 2210158
auucaaacaauaguagcau

SEQ ID NO: 2210160 - RNA, 19 nt, Artificial Sequence
  Description of Artificial Sequence: Synthetic oligonucleotide
  Sense strand starting at position 3051 of SEQ ID NO: 1883697
cugaauguuugcccauaac

SEQ ID NO: 2210161 - RNA, 19 nt, Artificial Sequence
  Description of Artificial Sequence: Synthetic oligonucleotide
  Antisense strand to SEQ ID NO: 2210160
guuaugggcaaacauucag

SEQ ID NO: 2210162 - RNA, 19 nt, Artificial Sequence
  Description of Artificial Sequence: Synthetic oligonucleotide
  Sense strand starting at position 748 of SEQ ID NO: 1883697
cgaguuucugaaugacagu

SEQ ID NO: 2210163 - RNA, 19 nt, Artificial Sequence
  Description of Artificial Sequence: Synthetic oligonucleotide
  Antisense strand to SEQ ID NO: 2210162
acugucauucagaaacucg

SEQ ID NO: 2210164 - RNA, 19 nt, Artificial Sequence
  Description of Artificial Sequence: Synthetic oligonucleotide
  Sense strand starting at position 652 of SEQ ID NO: 1883697
gcagcuagggucuaaaugu

SEQ ID NO: 2210165 - RNA, 19 nt, Artificial Sequence
  Description of Artificial Sequence: Synthetic oligonucleotide
  Antisense strand to SEQ ID NO: 2210164
acauuuagacccuagcugc

SEQ ID NO: 2210166 - RNA, 19 nt, Artificial Sequence
  Description of Artificial Sequence: Synthetic oligonucleotide
  Sense strand starting at position 2435 of SEQ ID NO: 1883697
cugaauguuugucucuaau

SEQ ID NO: 2210167 - RNA, 19 nt, Artificial Sequence
  Description of Artificial Sequence: Synthetic oligonucleotide
  Antisense strand to SEQ ID NO: 2210166
auuagagacaaacauucag

SEQ ID NO: 2210168 - RNA, 19 nt, Artificial Sequence
  Description of Artificial Sequence: Synthetic oligonucleotide
  Sense strand starting at position 1721 of SEQ ID NO: 1883697
guuugucccucacuuaaga

SEQ ID NO: 2210169 - RNA, 19 nt, Artificial Sequence
  Description of Artificial Sequence: Synthetic oligonucleotide
  Antisense strand to SEQ ID NO: 2210168
ucuuaagugagggacaaac

SEQ ID NO: 2210170 - RNA, 19 nt, Artificial Sequence
  Description of Artificial Sequence: Synthetic oligonucleotide
  Sense strand starting at position 3098 of SEQ ID NO: 1883697
uuugaauguuugucacuca

SEQ ID NO: 2210171 - RNA, 19 nt, Artificial Sequence
  Description of Artificial Sequence: Synthetic oligonucleotide
  Antisense strand to SEQ ID NO: 2210170
ugagugacaaacauucaaa

SEQ ID NO: 2210172 - RNA, 19 nt, Artificial Sequence
  Description of Artificial Sequence: Synthetic oligonucleotide
  Sense strand starting at position 2716 of SEQ ID NO: 1883697
ucugaaaguuuguuccuca

SEQ ID NO: 2210173 - RNA, 19 nt, Artificial Sequence
  Description of Artificial Sequence: Synthetic oligonucleotide
  Antisense strand to SEQ ID NO: 2210172
ugaggaacaaacuuucaga

SEQ ID NO: 2210174 - RNA, 19 nt, Artificial Sequence
  Description of Artificial Sequence: Synthetic oligonucleotide
  Sense strand starting at position 86 of SEQ ID NO: 1883697
augaauguuugucccucau

SEQ ID NO: 2210175 - RNA, 19 nt, Artificial Sequence
  Description of Artificial Sequence: Synthetic oligonucleotide
  Antisense strand to SEQ ID NO: 2210174
augagggacaaacauucau

SEQ ID NO: 2210176 - RNA, 19 nt, Artificial Sequence
  Description of Artificial Sequence: Synthetic oligonucleotide
  Sense strand starting at position 3225 of SEQ ID NO: 1883697
gaacacuccugcucuggua

SEQ ID NO: 2210177 - RNA, 19 nt, Artificial Sequence
  Description of Artificial Sequence: Synthetic oligonucleotide
  Antisense strand to SEQ ID NO: 2210176
uaccagagcaggaguguuc

SEQ ID NO: 2210178 - RNA, 19 nt, Artificial Sequence
  Description of Artificial Sequence: Synthetic oligonucleotide
  Sense strand starting at position 3982 of SEQ ID NO: 1883698
aaauguuugggcuaauauu

SEQ ID NO: 2210179 - RNA, 19 nt, Artificial Sequence
  Description of Artificial Sequence: Synthetic oligonucleotide
  Antisense strand to SEQ ID NO: 2210178
aauauuagcccaaacauuu

SEQ ID NO: 2210180 - RNA, 19 nt, Artificial Sequence
  Description of Artificial Sequence: Synthetic oligonucleotide
  Sense strand starting at position 1122 of SEQ ID NO: 1883698
gcacguugugcaugggaca

SEQ ID NO: 2210181 - RNA, 19 nt, Artificial Sequence
  Description of Artificial Sequence: Synthetic oligonucleotide
  Antisense strand to SEQ ID NO: 2210180
ugucccaugcacaacgugc

SEQ ID NO: 2210182 - RNA, 19 nt, Artificial Sequence
  Description of Artificial Sequence: Synthetic oligonucleotide
  Sense strand starting at position 3982 of SEQ ID NO: 1883699
aaauguuugggcuaauauu

SEQ ID NO: 2210183 - RNA, 19 nt, Artificial Sequence
  Description of Artificial Sequence: Synthetic oligonucleotide
  Antisense strand to SEQ ID NO: 2210182
aauauuagcccaaacauuu

SEQ ID NO: 2210184 - RNA, 19 nt, Artificial Sequence
  Description of Artificial Sequence: Synthetic oligonucleotide
  Sense strand starting at position 1122 of SEQ ID NO: 1883699
gcacguugugcaugggaca

SEQ ID NO: 2210185 - RNA, 19 nt, Artificial Sequence
  Description of Artificial Sequence: Synthetic oligonucleotide
  Antisense strand to SEQ ID NO: 2210184
ugucccaugcacaacgugc

SEQ ID NO: 2210186 - RNA, 19 nt, Artificial Sequence
  Description of Artificial Sequence: Synthetic oligonucleotide
  Sense strand starting at position 3982 of SEQ ID NO: 1883700
aaauguuugggcuaauauu

SEQ ID NO: 2210187 - RNA, 19 nt, Artificial Sequence
  Description of Artificial Sequence: Synthetic oligonucleotide
  Antisense strand to SEQ ID NO: 2210186
aauauuagcccaaacauuu

SEQ ID NO: 2210188 - RNA, 19 nt, Artificial Sequence
  Description of Artificial Sequence: Synthetic oligonucleotide
  Sense strand starting at position 1122 of SEQ ID NO: 1883700
gcacguugugcaugggaca

SEQ ID NO: 2210189 - RNA, 19 nt, Artificial Sequence
  Description of Artificial Sequence: Synthetic oligonucleotide
  Antisense strand to SEQ ID NO: 2210188
ugucccaugcacaacgugc

SEQ ID NO: 2210190 - RNA, 19 nt, Artificial Sequence
  Description of Artificial Sequence: Synthetic oligonucleotide
  Sense strand starting at position 1001 of SEQ ID NO: 1883701
auggcuuuccuggagagac

SEQ ID NO: 2210191 - RNA, 19 nt, Artificial Sequence
  Description of Artificial Sequence: Synthetic oligonucleotide
  Antisense strand to SEQ ID NO: 2210190
gucucuccaggaaagccau

SEQ ID NO: 2210192 - RNA, 19 nt, Artificial Sequence
  Description of Artificial Sequence: Synthetic oligonucleotide
  Sense strand starting at position 1003 of SEQ ID NO: 1883701
ggcuuuccuggagagacau

SEQ ID NO: 2210193 - RNA, 19 nt, Artificial Sequence
  Description of Artificial Sequence: Synthetic oligonucleotide
  Antisense strand to SEQ ID NO: 2210192
augucucuccaggaaagcc

SEQ ID NO: 2210194 - RNA, 19 nt, Artificial Sequence
  Description of Artificial Sequence: Synthetic oligonucleotide
  Sense strand starting at position 3440 of SEQ ID NO: 1883701
auauuugcuugguuaaagu

SEQ ID NO: 2210195 - RNA, 19 nt, Artificial Sequence
  Description of Artificial Sequence: Synthetic oligonucleotide
  Antisense strand to SEQ ID NO: 2210194
acuuuaaccaagcaaauau

SEQ ID NO: 2210196 - RNA, 19 nt, Artificial Sequence
  Description of Artificial Sequence: Synthetic oligonucleotide
  Sense strand starting at position 2227 of SEQ ID NO: 1883701
agggcuaggcccuagaaau

SEQ ID NO: 2210197 - RNA, 19 nt, Artificial Sequence
  Description of Artificial Sequence: Synthetic oligonucleotide
  Antisense strand to SEQ ID NO: 2210196
auuucuagggccuagcccu

SEQ ID NO: 2210198 - RNA, 19 nt, Artificial Sequence
  Description of Artificial Sequence: Synthetic oligonucleotide
  Sense strand starting at position 2670 of SEQ ID NO: 1883701
caagcauuuccugguggua

SEQ ID NO: 2210199 - RNA, 19 nt, Artificial Sequence
  Description of Artificial Sequence: Synthetic oligonucleotide
  Antisense strand to SEQ ID NO: 2210198
uaccaccaggaaaugcuug

SEQ ID NO: 2210200 - RNA, 19 nt, Artificial Sequence
  Description of Artificial Sequence: Synthetic oligonucleotide
  Sense strand starting at position 3737 of SEQ ID NO: 1883701
aagccagguggucagaaau

SEQ ID NO: 2210201 - RNA, 19 nt, Artificial Sequence
  Description of Artificial Sequence: Synthetic oligonucleotide
  Antisense strand to SEQ ID NO: 2210200
auuucugaccaccuggcuu

SEQ ID NO: 2210202 - RNA, 19 nt, Artificial Sequence
  Description of Artificial Sequence: Synthetic oligonucleotide
  Sense strand starting at position 2157 of SEQ ID NO: 1883701
aguuaaggugguuaagauu

SEQ ID NO: 2210203 - RNA, 19 nt, Artificial Sequence
  Description of Artificial Sequence: Synthetic oligonucleotide
  Antisense strand to SEQ ID NO: 2210202
aaucuuaaccaccuuaacu

SEQ ID NO: 2210204 - RNA, 19 nt, Artificial Sequence
  Description of Artificial Sequence: Synthetic oligonucleotide
  Sense strand starting at position 973 of SEQ ID NO: 1883701
cacggucaugguuagaaag

SEQ ID NO: 2210205 - RNA, 19 nt, Artificial Sequence
  Description of Artificial Sequence: Synthetic oligonucleotide
  Antisense strand to SEQ ID NO: 2210204
cuuucuaaccaugaccgug

SEQ ID NO: 2210206 - RNA, 19 nt, Artificial Sequence
  Description of Artificial Sequence: Synthetic oligonucleotide
  Sense strand starting at position 1669 of SEQ ID NO: 1883701
cugcaaaucugacuuagag

SEQ ID NO: 2210207 - RNA, 19 nt, Artificial Sequence
  Description of Artificial Sequence: Synthetic oligonucleotide
  Antisense strand to SEQ ID NO: 2210206
cucuaagucagauuugcag

SEQ ID NO: 2210208 - RNA, 19 nt, Artificial Sequence
  Description of Artificial Sequence: Synthetic oligonucleotide
  Sense strand starting at position 1317 of SEQ ID NO: 1883701
aggcuauugacucagagcu

SEQ ID NO: 2210209 - RNA, 19 nt, Artificial Sequence
  Description of Artificial Sequence: Synthetic oligonucleotide
  Antisense strand to SEQ ID NO: 2210208
agcucugagucaauagccu

SEQ ID NO: 2210210 - RNA, 19 nt, Artificial Sequence
  Description of Artificial Sequence: Synthetic oligonucleotide
  Sense strand starting at position 819 of SEQ ID NO: 1883701
ggagaugaccuauggcuuu

SEQ ID NO: 2210211 - RNA, 19 nt, Artificial Sequence
  Description of Artificial Sequence: Synthetic oligonucleotide
  Antisense strand to SEQ ID NO: 2210210
aaagccauaggucaucucc

SEQ ID NO: 2210212 - RNA, 19 nt, Artificial Sequence
  Description of Artificial Sequence: Synthetic oligonucleotide
  Sense strand starting at position 1079 of SEQ ID NO: 1883701
gguuguuagacucaaaguu

SEQ ID NO: 2210213 - RNA, 19 nt, Artificial Sequence
  Description of Artificial Sequence: Synthetic oligonucleotide
  Antisense strand to SEQ ID NO: 2210212
aacuuugagucuaacaacc

SEQ ID NO: 2210214 - RNA, 19 nt, Artificial Sequence
  Description of Artificial Sequence: Synthetic oligonucleotide
  Sense strand starting at position 3823 of SEQ ID NO: 1883701
cuguuauggaguggaauca

SEQ ID NO: 2210215 - RNA, 19 nt, Artificial Sequence
  Description of Artificial Sequence: Synthetic oligonucleotide
  Antisense strand to SEQ ID NO: 2210214
ugauuccacuccauaacag

SEQ ID NO: 2210216 - RNA, 19 nt, Artificial Sequence
  Description of Artificial Sequence: Synthetic oligonucleotide
  Sense strand starting at position 1998 of SEQ ID NO: 1883701
gggcgugcuguauuguuau

SEQ ID NO: 2210217 - RNA, 19 nt, Artificial Sequence
  Description of Artificial Sequence: Synthetic oligonucleotide
  Antisense strand to SEQ ID NO: 2210216
auaacaauacagcacgccc

SEQ ID NO: 2210218 - RNA, 19 nt, Artificial Sequence
  Description of Artificial Sequence: Synthetic oligonucleotide
  Sense strand starting at position 2975 of SEQ ID NO: 1883701
gggucaugaacuuggcaga

SEQ ID NO: 2210219 - RNA, 19 nt, Artificial Sequence
  Description of Artificial Sequence: Synthetic oligonucleotide
  Antisense strand to SEQ ID NO: 2210218
ucugccaaguucaugaccc

SEQ ID NO: 2210220 - RNA, 19 nt, Artificial Sequence
  Description of Artificial Sequence: Synthetic oligonucleotide
  Sense strand starting at position 2994 of SEQ ID NO: 1883701
gaaggauggcugugacauc

SEQ ID NO: 2210221 - RNA, 19 nt, Artificial Sequence
  Description of Artificial Sequence: Synthetic oligonucleotide
  Antisense strand to SEQ ID NO: 2210220
gaugucacagccauccuuc

SEQ ID NO: 2210222 - RNA, 19 nt, Artificial Sequence
  Description of Artificial Sequence: Synthetic oligonucleotide
  Sense strand starting at position 2506 of SEQ ID NO: 1883701
gcaaaugugacucagcuga

SEQ ID NO: 2210223 - RNA, 19 nt, Artificial Sequence
  Description of Artificial Sequence: Synthetic oligonucleotide
  Antisense strand to SEQ ID NO: 2210222
ucagcugagucacauuugc

SEQ ID NO: 2210224 - RNA, 19 nt, Artificial Sequence
  Description of Artificial Sequence: Synthetic oligonucleotide
  Sense strand starting at position 2156 of SEQ ID NO: 1883701
caguuaaggugguuaagau

SEQ ID NO: 2210225 - RNA, 19 nt, Artificial Sequence
  Description of Artificial Sequence: Synthetic oligonucleotide
  Antisense strand to SEQ ID NO: 2210224
aucuuaaccaccuuaacug

SEQ ID NO: 2210226 - RNA, 19 nt, Artificial Sequence
  Description of Artificial Sequence: Synthetic oligonucleotide
  Sense strand starting at position 3127 of SEQ ID NO: 1883701
gaggauguuugguccuaca

SEQ ID NO: 2210227 - RNA, 19 nt, Artificial Sequence
  Description of Artificial Sequence: Synthetic oligonucleotide
  Antisense strand to SEQ ID NO: 2210226
uguaggaccaaacauccuc

SEQ ID NO: 2210228 - RNA, 19 nt, Artificial Sequence
  Description of Artificial Sequence: Synthetic oligonucleotide
  Sense strand starting at position 1932 of SEQ ID NO: 1883701
ccaaauacugcaugugaua

SEQ ID NO: 2210229 - RNA, 19 nt, Artificial Sequence
  Description of Artificial Sequence: Synthetic oligonucleotide
  Antisense strand to SEQ ID NO: 2210228
uaucacaugcaguauuugg

SEQ ID NO: 2210230 - RNA, 19 nt, Artificial Sequence
  Description of Artificial Sequence: Synthetic oligonucleotide
  Sense strand starting at position 1874 of SEQ ID NO: 1883701
gcccaucuacacuggaauu

SEQ ID NO: 2210231 - RNA, 19 nt, Artificial Sequence
  Description of Artificial Sequence: Synthetic oligonucleotide
  Antisense strand to SEQ ID NO: 2210230
aauuccaguguagaugggc

SEQ ID NO: 2210232 - RNA, 19 nt, Artificial Sequence
  Description of Artificial Sequence: Synthetic oligonucleotide
  Sense strand starting at position 2768 of SEQ ID NO: 1883701
uuguaacuccagugauuaa

SEQ ID NO: 2210233 - RNA, 19 nt, Artificial Sequence
  Description of Artificial Sequence: Synthetic oligonucleotide
  Antisense strand to SEQ ID NO: 2210232
uuaaucacuggaguuacaa

SEQ ID NO: 2210234 - RNA, 19 nt, Artificial Sequence
  Description of Artificial Sequence: Synthetic oligonucleotide
  Sense strand starting at position 3126 of SEQ ID NO: 1883701
ggaggauguuugguccuac

SEQ ID NO: 2210235 - RNA, 19 nt, Artificial Sequence
  Description of Artificial Sequence: Synthetic oligonucleotide
  Antisense strand to SEQ ID NO: 2210234
guaggaccaaacauccucc

SEQ ID NO: 2210236 - RNA, 19 nt, Artificial Sequence
  Description of Artificial Sequence: Synthetic oligonucleotide
  Sense strand starting at position 1034 of SEQ ID NO: 1883701
gaaagaguucugggccuug

SEQ ID NO: 2210237 - RNA, 19 nt, Artificial Sequence
  Description of Artificial Sequence: Synthetic oligonucleotide
  Antisense strand to SEQ ID NO: 2210236
caaggcccagaacucuuuc

SEQ ID NO: 2210238 - RNA, 19 nt, Artificial Sequence
  Description of Artificial Sequence: Synthetic oligonucleotide
  Sense strand starting at position 3687 of SEQ ID NO: 1883701
accugauuagcaugucaua

SEQ ID NO: 2210239 - RNA, 19 nt, Artificial Sequence
  Description of Artificial Sequence: Synthetic oligonucleotide
  Antisense strand to SEQ ID NO: 2210238
uaugacaugcuaaucaggu

SEQ ID NO: 2210240 - RNA, 19 nt, Artificial Sequence
  Description of Artificial Sequence: Synthetic oligonucleotide
  Sense strand starting at position 3482 of SEQ ID NO: 1883701
cugauugguuaagcuuaca

SEQ ID NO: 2210241 - RNA, 19 nt, Artificial Sequence
  Description of Artificial Sequence: Synthetic oligonucleotide
  Antisense strand to SEQ ID NO: 2210240
uguaagcuuaaccaaucag

SEQ ID NO: 2210242 - RNA, 19 nt, Artificial Sequence
  Description of Artificial Sequence: Synthetic oligonucleotide
  Sense strand starting at position 2617 of SEQ ID NO: 1883701
accuaaauuuguugagaaa

SEQ ID NO: 2210243 - RNA, 19 nt, Artificial Sequence
  Description of Artificial Sequence: Synthetic oligonucleotide
  Antisense strand to SEQ ID NO: 2210242
uuucucaacaaauuuaggu

SEQ ID NO: 2210244 - RNA, 19 nt, Artificial Sequence
  Description of Artificial Sequence: Synthetic oligonucleotide
  Sense strand starting at position 1963 of SEQ ID NO: 1883701
aaauuacgguguuuauaug

SEQ ID NO: 2210245 - RNA, 19 nt, Artificial Sequence
  Description of Artificial Sequence: Synthetic oligonucleotide
  Antisense strand to SEQ ID NO: 2210244
cauauaaacaccguaauuu

SEQ ID NO: 2210246 - RNA, 19 nt, Artificial Sequence
  Description of Artificial Sequence: Synthetic oligonucleotide
  Sense strand starting at position 1700 of SEQ ID NO: 1883701
cuggguggcuucuuggaga

SEQ ID NO: 2210247 - RNA, 19 nt, Artificial Sequence
  Description of Artificial Sequence: Synthetic oligonucleotide
  Antisense strand to SEQ ID NO: 2210246
ucuccaagaagccacccag

SEQ ID NO: 2210248 - RNA, 19 nt, Artificial Sequence
  Description of Artificial Sequence: Synthetic oligonucleotide
  Sense strand starting at position 3163 of SEQ ID NO: 1883701
gauuacuauuuaggaguaa

SEQ ID NO: 2210249 - RNA, 19 nt, Artificial Sequence
  Description of Artificial Sequence: Synthetic oligonucleotide
  Antisense strand to SEQ ID NO: 2210248
uuacuccuaaauaguaauc

SEQ ID NO: 2210250 - RNA, 19 nt, Artificial Sequence
  Description of Artificial Sequence: Synthetic oligonucleotide
  Sense strand starting at position 2701 of SEQ ID NO: 1883701
ccauucgaggucugaacuu

SEQ ID NO: 2210251 - RNA, 19 nt, Artificial Sequence
  Description of Artificial Sequence: Synthetic oligonucleotide
  Antisense strand to SEQ ID NO: 2210250
aaguucagaccucgaaugg

SEQ ID NO: 2210252 - RNA, 19 nt, Artificial Sequence
  Description of Artificial Sequence: Synthetic oligonucleotide
  Sense strand starting at position 3312 of SEQ ID NO: 1883701
augaguuuauuugaacagu

SEQ ID NO: 2210253 - RNA, 19 nt, Artificial Sequence
  Description of Artificial Sequence: Synthetic oligonucleotide
  Antisense strand to SEQ ID NO: 2210252
acuguucaaauaaacucau

SEQ ID NO: 2210254 - RNA, 19 nt, Artificial Sequence
  Description of Artificial Sequence: Synthetic oligonucleotide
  Sense strand starting at position 3822 of SEQ ID NO: 1883701
gcuguuauggaguggaauc

SEQ ID NO: 2210255 - RNA, 19 nt, Artificial Sequence
  Description of Artificial Sequence: Synthetic oligonucleotide
  Antisense strand to SEQ ID NO: 2210254
gauuccacuccauaacagc

SEQ ID NO: 2210256 - RNA, 19 nt, Artificial Sequence
  Description of Artificial Sequence: Synthetic oligonucleotide
  Sense strand starting at position 2034 of SEQ ID NO: 1883701
cuaccuguggcucaauguu

SEQ ID NO: 2210257 - RNA, 19 nt, Artificial Sequence
  Description of Artificial Sequence: Synthetic oligonucleotide
  Antisense strand to SEQ ID NO: 2210256
aacauugagccacagguag

SEQ ID NO: 2210258 - RNA, 19 nt, Artificial Sequence
  Description of Artificial Sequence: Synthetic oligonucleotide
  Sense strand starting at position 2762 of SEQ ID NO: 1883701
ccuuuauuguaacuccagu

SEQ ID NO: 2210259 - RNA, 19 nt, Artificial Sequence
  Description of Artificial Sequence: Synthetic oligonucleotide
  Antisense strand to SEQ ID NO: 2210258
acuggaguuacaauaaagg

SEQ ID NO: 2210260 - RNA, 19 nt, Artificial Sequence
  Description of Artificial Sequence: Synthetic oligonucleotide
  Sense strand starting at position 1508 of SEQ ID NO: 1883701
gggacauguuuggcuuucu

SEQ ID NO: 2210261 - RNA, 19 nt, Artificial Sequence
  Description of Artificial Sequence: Synthetic oligonucleotide
  Antisense strand to SEQ ID NO: 2210260
agaaagccaaacauguccc

SEQ ID NO: 2210262 - RNA, 19 nt, Artificial Sequence
  Description of Artificial Sequence: Synthetic oligonucleotide
  Sense strand starting at position 1562 of SEQ ID NO: 1883701
uagggaagcugucauuuau

SEQ ID NO: 2210263 - RNA, 19 nt, Artificial Sequence
  Description of Artificial Sequence: Synthetic oligonucleotide
  Antisense strand to SEQ ID NO: 2210262
auaaaugacagcuucccua

SEQ ID NO: 2210264 - RNA, 19 nt, Artificial Sequence
  Description of Artificial Sequence: Synthetic oligonucleotide
  Sense strand starting at position 3588 of SEQ ID NO: 1883701
auggccuccuguuuaugau

SEQ ID NO: 2210265 - RNA, 19 nt, Artificial Sequence
  Description of Artificial Sequence: Synthetic oligonucleotide
  Antisense strand to SEQ ID NO: 2210264
aucauaaacaggaggccau

SEQ ID NO: 2210266 - RNA, 19 nt, Artificial Sequence
  Description of Artificial Sequence: Synthetic oligonucleotide
  Sense strand starting at position 1617 of SEQ ID NO: 1883701
ggugauauuguguagcuuc

SEQ ID NO: 2210267 - RNA, 19 nt, Artificial Sequence
  Description of Artificial Sequence: Synthetic oligonucleotide
  Antisense strand to SEQ ID NO: 2210266
gaagcuacacaauaucacc

SEQ ID NO: 2210268 - RNA, 19 nt, Artificial Sequence
  Description of Artificial Sequence: Synthetic oligonucleotide
  Sense strand starting at position 1488 of SEQ ID NO: 1883701
caucccacgugauugguua

SEQ ID NO: 2210269 - RNA, 19 nt, Artificial Sequence
  Description of Artificial Sequence: Synthetic oligonucleotide
  Antisense strand to SEQ ID NO: 2210268
uaaccaaucacgugggaug

SEQ ID NO: 2210270 - RNA, 19 nt, Artificial Sequence
  Description of Artificial Sequence: Synthetic oligonucleotide
  Sense strand starting at position 3982 of SEQ ID NO: 1883702
aaauguuugggcuaauauu

SEQ ID NO: 2210271 - RNA, 19 nt, Artificial Sequence
  Description of Artificial Sequence: Synthetic oligonucleotide
  Antisense strand to SEQ ID NO: 2210270
aauauuagcccaaacauuu

SEQ ID NO: 2210272 - RNA, 19 nt, Artificial Sequence
  Description of Artificial Sequence: Synthetic oligonucleotide
  Sense strand starting at position 1122 of SEQ ID NO: 1883702
gcacguugugcaugggaca

SEQ ID NO: 2210273 - RNA, 19 nt, Artificial Sequence
  Description of Artificial Sequence: Synthetic oligonucleotide
  Antisense strand to SEQ ID NO: 2210272
ugucccaugcacaacgugc

SEQ ID NO: 2210274 - RNA, 19 nt, Artificial Sequence
  Description of Artificial Sequence: Synthetic oligonucleotide
  Sense strand starting at position 3837 of SEQ ID NO: 1883703
uuguuaaagccagacaaug

SEQ ID NO: 2210275 - RNA, 19 nt, Artificial Sequence
  Description of Artificial Sequence: Synthetic oligonucleotide
  Antisense strand to SEQ ID NO: 2210274
cauugucuggcuuuaacaa

SEQ ID NO: 2210276 - RNA, 19 nt, Artificial Sequence
  Description of Artificial Sequence: Synthetic oligonucleotide
  Sense strand starting at position 1487 of SEQ ID NO: 1883703
gugcauuacguccugcaga

SEQ ID NO: 2210277 - RNA, 19 nt, Artificial Sequence
  Description of Artificial Sequence: Synthetic oligonucleotide
  Antisense strand to SEQ ID NO: 2210276
ucugcaggacguaaugcac

SEQ ID NO: 2210278 - RNA, 19 nt, Artificial Sequence
  Description of Artificial Sequence: Synthetic oligonucleotide
  Sense strand starting at position 2639 of SEQ ID NO: 1883703
aggugaaauaggcauguua

SEQ ID NO: 2210279 - RNA, 19 nt, Artificial Sequence
  Description of Artificial Sequence: Synthetic oligonucleotide
  Antisense strand to SEQ ID NO: 2210278
uaacaugccuauuucaccu

SEQ ID NO: 2210280 - RNA, 19 nt, Artificial Sequence
  Description of Artificial Sequence: Synthetic oligonucleotide
  Sense strand starting at position 2852 of SEQ ID NO: 1883703
augugaauguacuuaaaga

SEQ ID NO: 2210281 - RNA, 19 nt, Artificial Sequence
  Description of Artificial Sequence: Synthetic oligonucleotide
  Antisense strand to SEQ ID NO: 2210280
ucuuuaaguacauucacau

SEQ ID NO: 2210282 - RNA, 19 nt, Artificial Sequence
  Description of Artificial Sequence: Synthetic oligonucleotide
  Sense strand starting at position 199 of SEQ ID NO: 1883703
ccaauaggccuccaaguaa

SEQ ID NO: 2210283 - RNA, 19 nt, Artificial Sequence
  Description of Artificial Sequence: Synthetic oligonucleotide
  Antisense strand to SEQ ID NO: 2210282
uuacuuggaggccuauugg

SEQ ID NO: 2210284 - RNA, 19 nt, Artificial Sequence
  Description of Artificial Sequence: Synthetic oligonucleotide
  Sense strand starting at position 398 of SEQ ID NO: 1883703
gagguauuaagagacucgu

SEQ ID NO: 2210285 - RNA, 19 nt, Artificial Sequence
  Description of Artificial Sequence: Synthetic oligonucleotide
  Antisense strand to SEQ ID NO: 2210284
acgagucucuuaauaccuc

SEQ ID NO: 2210286 - RNA, 19 nt, Artificial Sequence
  Description of Artificial Sequence: Synthetic oligonucleotide
  Sense strand starting at position 3823 of SEQ ID NO: 1883703
ucaggaguugaccauuguu

SEQ ID NO: 2210287 - RNA, 19 nt, Artificial Sequence
  Description of Artificial Sequence: Synthetic oligonucleotide
  Antisense strand to SEQ ID NO: 2210286
aacaauggucaacuccuga

SEQ ID NO: 2210288 - RNA, 19 nt, Artificial Sequence
  Description of Artificial Sequence: Synthetic oligonucleotide
  Sense strand starting at position 798 of SEQ ID NO: 1883703
aguuaaggagagugaaguu

SEQ ID NO: 2210289 - RNA, 19 nt, Artificial Sequence
  Description of Artificial Sequence: Synthetic oligonucleotide
  Antisense strand to SEQ ID NO: 2210288
aacuucacucuccuuaacu

SEQ ID NO: 2210290 - RNA, 19 nt, Artificial Sequence
  Description of Artificial Sequence: Synthetic oligonucleotide
  Sense strand starting at position 1860 of SEQ ID NO: 1883703
uuacuaugccacugagaag

SEQ ID NO: 2210291 - RNA, 19 nt, Artificial Sequence
  Description of Artificial Sequence: Synthetic oligonucleotide
  Antisense strand to SEQ ID NO: 2210290
cuucucaguggcauaguaa

SEQ ID NO: 2210292 - RNA, 19 nt, Artificial Sequence
  Description of Artificial Sequence: Synthetic oligonucleotide
  Sense strand starting at position 1209 of SEQ ID NO: 1883703
guccauccuccagagucaa

SEQ ID NO: 2210293 - RNA, 19 nt, Artificial Sequence
  Description of Artificial Sequence: Synthetic oligonucleotide
  Antisense strand to SEQ ID NO: 2210292
uugacucuggaggauggac

SEQ ID NO: 2210294 - RNA, 19 nt, Artificial Sequence
  Description of Artificial Sequence: Synthetic oligonucleotide
  Sense strand starting at position 2621 of SEQ ID NO: 1883703
ucuuaagggcauuauguua

SEQ ID NO: 2210295 - RNA, 19 nt, Artificial Sequence
  Description of Artificial Sequence: Synthetic oligonucleotide
  Antisense strand to SEQ ID NO: 2210294
uaacauaaugcccuuaaga

SEQ ID NO: 2210296 - RNA, 19 nt, Artificial Sequence
  Description of Artificial Sequence: Synthetic oligonucleotide
  Sense strand starting at position 1737 of SEQ ID NO: 1883703
aguagauauuucgaagaaa

SEQ ID NO: 2210297 - RNA, 19 nt, Artificial Sequence
  Description of Artificial Sequence: Synthetic oligonucleotide
  Antisense strand to SEQ ID NO: 2210296
uuucuucgaaauaucuacu

SEQ ID NO: 2210298 - RNA, 19 nt, Artificial Sequence
  Description of Artificial Sequence: Synthetic oligonucleotide
  Sense strand starting at position 444 of SEQ ID NO: 1883703
gagauaguauuugaacuca

SEQ ID NO: 2210299 - RNA, 19 nt, Artificial Sequence
  Description of Artificial Sequence: Synthetic oligonucleotide
  Antisense strand to SEQ ID NO: 2210298
ugaguucaaauacuaucuc

SEQ ID NO: 2210300 - RNA, 19 nt, Artificial Sequence
  Description of Artificial Sequence: Synthetic oligonucleotide
  Sense strand starting at position 3826 of SEQ ID NO: 1883703
ggaguugaccauuguuaaa

SEQ ID NO: 2210301 - RNA, 19 nt, Artificial Sequence
  Description of Artificial Sequence: Synthetic oligonucleotide
  Antisense strand to SEQ ID NO: 2210300
uuuaacaauggucaacucc

SEQ ID NO: 2210302 - RNA, 19 nt, Artificial Sequence
  Description of Artificial Sequence: Synthetic oligonucleotide
  Sense strand starting at position 3160 of SEQ ID NO: 1883703
cuggguauuaagcauagua

SEQ ID NO: 2210303 - RNA, 19 nt, Artificial Sequence
  Description of Artificial Sequence: Synthetic oligonucleotide
  Antisense strand to SEQ ID NO: 2210302
uacuaugcuuaauacccag

SEQ ID NO: 2210304 - RNA, 19 nt, Artificial Sequence
  Description of Artificial Sequence: Synthetic oligonucleotide
  Sense strand starting at position 296 of SEQ ID NO: 1883703
aaggacuguguuuauguau

SEQ ID NO: 2210305 - RNA, 19 nt, Artificial Sequence
  Description of Artificial Sequence: Synthetic oligonucleotide
  Antisense strand to SEQ ID NO: 2210304
auacauaaacacaguccuu

SEQ ID NO: 2210306 - RNA, 19 nt, Artificial Sequence
  Description of Artificial Sequence: Synthetic oligonucleotide
  Sense strand starting at position 1980 of SEQ ID NO: 1883703
cagaaauguugucuuuaga

SEQ ID NO: 2210307 - RNA, 19 nt, Artificial Sequence
  Description of Artificial Sequence: Synthetic oligonucleotide
  Antisense strand to SEQ ID NO: 2210306
ucuaaagacaacauuucug

SEQ ID NO: 2210308 - RNA, 19 nt, Artificial Sequence
  Description of Artificial Sequence: Synthetic oligonucleotide
  Sense strand starting at position 570 of SEQ ID NO: 1883703
aggugaucuuaccugaccu

SEQ ID NO: 2210309 - RNA, 19 nt, Artificial Sequence
  Description of Artificial Sequence: Synthetic oligonucleotide
  Antisense strand to SEQ ID NO: 2210308
aggucagguaagaucaccu

SEQ ID NO: 2210310 - RNA, 19 nt, Artificial Sequence
  Description of Artificial Sequence: Synthetic oligonucleotide
  Sense strand starting at position 877 of SEQ ID NO: 1883703
agggcacucugagucuaaa

SEQ ID NO: 2210311 - RNA, 19 nt, Artificial Sequence
  Description of Artificial Sequence: Synthetic oligonucleotide
  Antisense strand to SEQ ID NO: 2210310
uuuagacucagagugcccu

SEQ ID NO: 2210312 - RNA, 19 nt, Artificial Sequence
  Description of Artificial Sequence: Synthetic oligonucleotide
  Sense strand starting at position 2114 of SEQ ID NO: 1883703
uucugaggcucauuggaau

SEQ ID NO: 2210313 - RNA, 19 nt, Artificial Sequence
  Description of Artificial Sequence: Synthetic oligonucleotide
  Antisense strand to SEQ ID NO: 2210312
auuccaaugagccucagaa

SEQ ID NO: 2210314 - RNA, 19 nt, Artificial Sequence
  Description of Artificial Sequence: Synthetic oligonucleotide
  Sense strand starting at position 957 of SEQ ID NO: 1883703
augggagugcccugaggau

SEQ ID NO: 2210315 - RNA, 19 nt, Artificial Sequence
  Description of Artificial Sequence: Synthetic oligonucleotide
  Antisense strand to SEQ ID NO: 2210314
auccucagggcacucccau

SEQ ID NO: 2210316 - RNA, 19 nt, Artificial Sequence
  Description of Artificial Sequence: Synthetic oligonucleotide
  Sense strand starting at position 3962 of SEQ ID NO: 1883703
acaugcuggcaagauugua

SEQ ID NO: 2210317 - RNA, 19 nt, Artificial Sequence
  Description of Artificial Sequence: Synthetic oligonucleotide
  Antisense strand to SEQ ID NO: 2210316
uacaaucuugccagcaugu

SEQ ID NO: 2210318 - RNA, 19 nt, Artificial Sequence
  Description of Artificial Sequence: Synthetic oligonucleotide
  Sense strand starting at position 3900 of SEQ ID NO: 1883703
gcuugaagauucccauauu

SEQ ID NO: 2210319 - RNA, 19 nt, Artificial Sequence
  Description of Artificial Sequence: Synthetic oligonucleotide
  Antisense strand to SEQ ID NO: 2210318
aauaugggaaucuucaagc

SEQ ID NO: 2210320 - RNA, 19 nt, Artificial Sequence
  Description of Artificial Sequence: Synthetic oligonucleotide
  Sense strand starting at position 2458 of SEQ ID NO: 1883703
cguacauaacagcauuauu

SEQ ID NO: 2210321 - RNA, 19 nt, Artificial Sequence
  Description of Artificial Sequence: Synthetic oligonucleotide
  Antisense strand to SEQ ID NO: 2210320
aauaaugcuguuauguacg

SEQ ID NO: 2210322 - RNA, 19 nt, Artificial Sequence
  Description of Artificial Sequence: Synthetic oligonucleotide
  Sense strand starting at position 404 of SEQ ID NO: 1883703
uuaagagacucgucucaua

SEQ ID NO: 2210323 - RNA, 19 nt, Artificial Sequence
  Description of Artificial Sequence: Synthetic oligonucleotide
  Antisense strand to SEQ ID NO: 2210322
uaugagacgagucucuuaa

SEQ ID NO: 2210324 - RNA, 19 nt, Artificial Sequence
  Description of Artificial Sequence: Synthetic oligonucleotide
  Sense strand starting at position 880 of SEQ ID NO: 1883703
gcacucugagucuaaagca

SEQ ID NO: 2210325 - RNA, 19 nt, Artificial Sequence
  Description of Artificial Sequence: Synthetic oligonucleotide
  Antisense strand to SEQ ID NO: 2210324
ugcuuuagacucagagugc

SEQ ID NO: 2210326 - RNA, 19 nt, Artificial Sequence
  Description of Artificial Sequence: Synthetic oligonucleotide
  Sense strand starting at position 2761 of SEQ ID NO: 1883703
ggaggaauguggagugauu

SEQ ID NO: 2210327 - RNA, 19 nt, Artificial Sequence
  Description of Artificial Sequence: Synthetic oligonucleotide
  Antisense strand to SEQ ID NO: 2210326
aaucacuccacauuccucc

SEQ ID NO: 2210328 - RNA, 19 nt, Artificial Sequence
  Description of Artificial Sequence: Synthetic oligonucleotide
  Sense strand starting at position 3892 of SEQ ID NO: 1883703
uuguauacgcuugaagauu

SEQ ID NO: 2210329 - RNA, 19 nt, Artificial Sequence
  Description of Artificial Sequence: Synthetic oligonucleotide
  Antisense strand to SEQ ID NO: 2210328
aaucuucaagcguauacaa

SEQ ID NO: 2210330 - RNA, 19 nt, Artificial Sequence
  Description of Artificial Sequence: Synthetic oligonucleotide
  Sense strand starting at position 2641 of SEQ ID NO: 1883703
gugaaauaggcauguuaua

SEQ ID NO: 2210331 - RNA, 19 nt, Artificial Sequence
  Description of Artificial Sequence: Synthetic oligonucleotide
  Antisense strand to SEQ ID NO: 2210330
uauaacaugccuauuucac

SEQ ID NO: 2210332 - RNA, 19 nt, Artificial Sequence
  Description of Artificial Sequence: Synthetic oligonucleotide
  Sense strand starting at position 1501 of SEQ ID NO: 1883703
gcagauugucucugaaaug

SEQ ID NO: 2210333 - RNA, 19 nt, Artificial Sequence
  Description of Artificial Sequence: Synthetic oligonucleotide
  Antisense strand to SEQ ID NO: 2210332
cauuucagagacaaucugc

SEQ ID NO: 2210334 - RNA, 19 nt, Artificial Sequence
  Description of Artificial Sequence: Synthetic oligonucleotide
  Sense strand starting at position 280 of SEQ ID NO: 1883703
ugucaagcaucauucuaag

SEQ ID NO: 2210335 - RNA, 19 nt, Artificial Sequence
  Description of Artificial Sequence: Synthetic oligonucleotide
  Antisense strand to SEQ ID NO: 2210334
cuuagaaugaugcuugaca

SEQ ID NO: 2210336 - RNA, 19 nt, Artificial Sequence
  Description of Artificial Sequence: Synthetic oligonucleotide
  Sense strand starting at position 846 of SEQ ID NO: 1883703
cagcuugugaguggaaaca

SEQ ID NO: 2210337 - RNA, 19 nt, Artificial Sequence
  Description of Artificial Sequence: Synthetic oligonucleotide
  Antisense strand to SEQ ID NO: 2210336
uguuuccacucacaagcug

SEQ ID NO: 2210338 - RNA, 19 nt, Artificial Sequence
  Description of Artificial Sequence: Synthetic oligonucleotide
  Sense strand starting at position 1758 of SEQ ID NO: 1883703
auuuaagcaucaugaaaga

SEQ ID NO: 2210339 - RNA, 19 nt, Artificial Sequence
  Description of Artificial Sequence: Synthetic oligonucleotide
  Antisense strand to SEQ ID NO: 2210338
ucuuucaugaugcuuaaau

SEQ ID NO: 2210340 - RNA, 19 nt, Artificial Sequence
  Description of Artificial Sequence: Synthetic oligonucleotide
  Sense strand starting at position 1500 of SEQ ID NO: 1883703
ugcagauugucucugaaau

SEQ ID NO: 2210341 - RNA, 19 nt, Artificial Sequence
  Description of Artificial Sequence: Synthetic oligonucleotide
  Antisense strand to SEQ ID NO: 2210340
auuucagagacaaucugca

SEQ ID NO: 2210342 - RNA, 19 nt, Artificial Sequence
  Description of Artificial Sequence: Synthetic oligonucleotide
  Sense strand starting at position 278 of SEQ ID NO: 1883703
ugugucaagcaucauucua

SEQ ID NO: 2210343 - RNA, 19 nt, Artificial Sequence
  Description of Artificial Sequence: Synthetic oligonucleotide
  Antisense strand to SEQ ID NO: 2210342
uagaaugaugcuugacaca

SEQ ID NO: 2210344 - RNA, 19 nt, Artificial Sequence
  Description of Artificial Sequence: Synthetic oligonucleotide
  Sense strand starting at position 580 of SEQ ID NO: 1883703
accugaccuugugugauua

SEQ ID NO: 2210345 - RNA, 19 nt, Artificial Sequence
  Description of Artificial Sequence: Synthetic oligonucleotide
  Antisense strand to SEQ ID NO: 2210344
uaaucacacaaggucaggu

SEQ ID NO: 2210346 - RNA, 19 nt, Artificial Sequence
  Description of Artificial Sequence: Synthetic oligonucleotide
  Sense strand starting at position 3152 of SEQ ID NO: 1883703
uuugucaccuggguauuaa

SEQ ID NO: 2210347 - RNA, 19 nt, Artificial Sequence
  Description of Artificial Sequence: Synthetic oligonucleotide
  Antisense strand to SEQ ID NO: 2210346
uuaauacccaggugacaaa

SEQ ID NO: 2210348 - RNA, 19 nt, Artificial Sequence
  Description of Artificial Sequence: Synthetic oligonucleotide
  Sense strand starting at position 295 of SEQ ID NO: 1883703
uaaggacuguguuuaugua

SEQ ID NO: 2210349 - RNA, 19 nt, Artificial Sequence
  Description of Artificial Sequence: Synthetic oligonucleotide
  Antisense strand to SEQ ID NO: 2210348
uacauaaacacaguccuua

SEQ ID NO: 2210350 - RNA, 19 nt, Artificial Sequence
  Description of Artificial Sequence: Synthetic oligonucleotide
  Sense strand starting at position 581 of SEQ ID NO: 1883703
ccugaccuugugugauuaa

SEQ ID NO: 2210351 - RNA, 19 nt, Artificial Sequence
  Description of Artificial Sequence: Synthetic oligonucleotide
  Antisense strand to SEQ ID NO: 2210350
uuaaucacacaaggucagg

SEQ ID NO: 2210352 - RNA, 19 nt, Artificial Sequence
  Description of Artificial Sequence: Synthetic oligonucleotide
  Sense strand starting at position 292 of SEQ ID NO: 1883703
uucuaaggacuguguuuau

SEQ ID NO: 2210353 - RNA, 19 nt, Artificial Sequence
  Description of Artificial Sequence: Synthetic oligonucleotide
  Antisense strand to SEQ ID NO: 2210352
auaaacacaguccuuagaa

SEQ ID NO: 2210354 - RNA, 19 nt, Artificial Sequence
  Description of Artificial Sequence: Synthetic oligonucleotide
  Sense strand starting at position 2777 of SEQ ID NO: 1883704
uucuucuuaguugagaaca

SEQ ID NO: 2210355 - RNA, 19 nt, Artificial Sequence
  Description of Artificial Sequence: Synthetic oligonucleotide
  Antisense strand to SEQ ID NO: 2210354
uguucucaacuaagaagaa

SEQ ID NO: 2210356 - RNA, 19 nt, Artificial Sequence
  Description of Artificial Sequence: Synthetic oligonucleotide
  Sense strand starting at position 2175 of SEQ ID NO: 1883704
gacucaaaugaaugucuga

SEQ ID NO: 2210357 - RNA, 19 nt, Artificial Sequence
  Description of Artificial Sequence: Synthetic oligonucleotide
  Antisense strand to SEQ ID NO: 2210356
ucagacauucauuugaguc

SEQ ID NO: 2210358 - RNA, 19 nt, Artificial Sequence
  Description of Artificial Sequence: Synthetic oligonucleotide
  Sense strand starting at position 381 of SEQ ID NO: 1883704
agaaauucugaauguacug

SEQ ID NO: 2210359 - RNA, 19 nt, Artificial Sequence
  Description of Artificial Sequence: Synthetic oligonucleotide
  Antisense strand to SEQ ID NO: 2210358
caguacauucagaauuucu

SEQ ID NO: 2210360 - RNA, 19 nt, Artificial Sequence
  Description of Artificial Sequence: Synthetic oligonucleotide
  Sense strand starting at position 2632 of SEQ ID NO: 1883704
gaccuccaugauugaugau

SEQ ID NO: 2210361 - RNA, 19 nt, Artificial Sequence
  Description of Artificial Sequence: Synthetic oligonucleotide
  Antisense strand to SEQ ID NO: 2210360
aucaucaaucauggagguc

SEQ ID NO: 2210362 - RNA, 19 nt, Artificial Sequence
  Description of Artificial Sequence: Synthetic oligonucleotide
  Sense strand starting at position 414 of SEQ ID NO: 1883704
augugauauccagauaugu

SEQ ID NO: 2210363 - RNA, 19 nt, Artificial Sequence
  Description of Artificial Sequence: Synthetic oligonucleotide
  Antisense strand to SEQ ID NO: 2210362
acauaucuggauaucacau

SEQ ID NO: 2210364 - RNA, 19 nt, Artificial Sequence
  Description of Artificial Sequence: Synthetic oligonucleotide
  Sense strand starting at position 2266 of SEQ ID NO: 1883704
auuguuaacaaggguaaga

SEQ ID NO: 2210365 - RNA, 19 nt, Artificial Sequence
  Description of Artificial Sequence: Synthetic oligonucleotide
  Antisense strand to SEQ ID NO: 2210364
ucuuacccuuguuaacaau

SEQ ID NO: 2210366 - RNA, 19 nt, Artificial Sequence
  Description of Artificial Sequence: Synthetic oligonucleotide
  Sense strand starting at position 1640 of SEQ ID NO: 1883704
gcauaucuaggagacaugu

SEQ ID NO: 2210367 - RNA, 19 nt, Artificial Sequence
  Description of Artificial Sequence: Synthetic oligonucleotide
  Antisense strand to SEQ ID NO: 2210366
acaugucuccuagauaugc

SEQ ID NO: 2210368 - RNA, 19 nt, Artificial Sequence
  Description of Artificial Sequence: Synthetic oligonucleotide
  Sense strand starting at position 3011 of SEQ ID NO: 1883704
ugaaguuaaucucuaaaug

SEQ ID NO: 2210369 - RNA, 19 nt, Artificial Sequence
  Description of Artificial Sequence: Synthetic oligonucleotide
  Antisense strand to SEQ ID NO: 2210368
cauuuagagauuaacuuca

SEQ ID NO: 2210370 - RNA, 19 nt, Artificial Sequence
  Description of Artificial Sequence: Synthetic oligonucleotide
  Sense strand starting at position 288 of SEQ ID NO: 1883704
auggauugcagaugaugau

SEQ ID NO: 2210371 - RNA, 19 nt, Artificial Sequence
  Description of Artificial Sequence: Synthetic oligonucleotide
  Antisense strand to SEQ ID NO: 2210370
aucaucaucugcaauccau

SEQ ID NO: 2210372 - RNA, 19 nt, Artificial Sequence
  Description of Artificial Sequence: Synthetic oligonucleotide
  Sense strand starting at position 2501 of SEQ ID NO: 1883704
acuguugauaucuaggagu

SEQ ID NO: 2210373 - RNA, 19 nt, Artificial Sequence
  Description of Artificial Sequence: Synthetic oligonucleotide
  Antisense strand to SEQ ID NO: 2210372
acuccuagauaucaacagu

SEQ ID NO: 2210374 - RNA, 19 nt, Artificial Sequence
  Description of Artificial Sequence: Synthetic oligonucleotide
  Sense strand starting at position 2823 of SEQ ID NO: 1883704
auuuguucuggcugaaacg

SEQ ID NO: 2210375 - RNA, 19 nt, Artificial Sequence
  Description of Artificial Sequence: Synthetic oligonucleotide
  Antisense strand to SEQ ID NO: 2210374
cguuucagccagaacaaau

SEQ ID NO: 2210376 - RNA, 19 nt, Artificial Sequence
  Description of Artificial Sequence: Synthetic oligonucleotide
  Sense strand starting at position 1648 of SEQ ID NO: 1883704
aggagacauguagguacau

SEQ ID NO: 2210377 - RNA, 19 nt, Artificial Sequence
  Description of Artificial Sequence: Synthetic oligonucleotide
  Antisense strand to SEQ ID NO: 2210376
auguaccuacaugucuccu

SEQ ID NO: 2210378 - RNA, 19 nt, Artificial Sequence
  Description of Artificial Sequence: Synthetic oligonucleotide
  Sense strand starting at position 3208 of SEQ ID NO: 1883704
ugcauuagccagcuuuguu

SEQ ID NO: 2210379 - RNA, 19 nt, Artificial Sequence
  Description of Artificial Sequence: Synthetic oligonucleotide
  Antisense strand to SEQ ID NO: 2210378
aacaaagcuggcuaaugca

SEQ ID NO: 2210380 - RNA, 19 nt, Artificial Sequence
  Description of Artificial Sequence: Synthetic oligonucleotide
  Sense strand starting at position 3518 of SEQ ID NO: 1883704
agguuucuggaaugacaug

SEQ ID NO: 2210381 - RNA, 19 nt, Artificial Sequence
  Description of Artificial Sequence: Synthetic oligonucleotide
  Antisense strand to SEQ ID NO: 2210380
caugucauuccagaaaccu

SEQ ID NO: 2210382 - RNA, 19 nt, Artificial Sequence
  Description of Artificial Sequence: Synthetic oligonucleotide
  Sense strand starting at position 169 of SEQ ID NO: 1883704
acagcuauuuaucugugua

SEQ ID NO: 2210383 - RNA, 19 nt, Artificial Sequence
  Description of Artificial Sequence: Synthetic oligonucleotide
  Antisense strand to SEQ ID NO: 2210382
uacacagauaaauagcugu

SEQ ID NO: 2210384 - RNA, 19 nt, Artificial Sequence
  Description of Artificial Sequence: Synthetic oligonucleotide
  Sense strand starting at position 3727 of SEQ ID NO: 1883704
aggguuaaauuagcuaaga

SEQ ID NO: 2210385 - RNA, 19 nt, Artificial Sequence
  Description of Artificial Sequence: Synthetic oligonucleotide
  Antisense strand to SEQ ID NO: 2210384
ucuuagcuaauuuaacccu

SEQ ID NO: 2210386 - RNA, 19 nt, Artificial Sequence
  Description of Artificial Sequence: Synthetic oligonucleotide
  Sense strand starting at position 182 of SEQ ID NO: 1883704
uguguauguauggauaaag

SEQ ID NO: 2210387 - RNA, 19 nt, Artificial Sequence
  Description of Artificial Sequence: Synthetic oligonucleotide
  Antisense strand to SEQ ID NO: 2210386
cuuuauccauacauacaca

SEQ ID NO: 2210388 - RNA, 19 nt, Artificial Sequence
  Description of Artificial Sequence: Synthetic oligonucleotide
  Sense strand starting at position 173 of SEQ ID NO: 1883704
cuauuuaucuguguaugua

SEQ ID NO: 2210389 - RNA, 19 nt, Artificial Sequence
  Description of Artificial Sequence: Synthetic oligonucleotide
  Antisense strand to SEQ ID NO: 2210388
uacauacacagauaaauag

SEQ ID NO: 2210390 - RNA, 19 nt, Artificial Sequence
  Description of Artificial Sequence: Synthetic oligonucleotide
  Sense strand starting at position 171 of SEQ ID NO: 1883704
agcuauuuaucuguguaug

SEQ ID NO: 2210391 - RNA, 19 nt, Artificial Sequence
  Description of Artificial Sequence: Synthetic oligonucleotide
  Antisense strand to SEQ ID NO: 2210390
cauacacagauaaauagcu

SEQ ID NO: 2210392 - RNA, 19 nt, Artificial Sequence
  Description of Artificial Sequence: Synthetic oligonucleotide
  Sense strand starting at position 1140 of SEQ ID NO: 1883704
cuaguaaugguacaaagca

SEQ ID NO: 2210393 - RNA, 19 nt, Artificial Sequence
  Description of Artificial Sequence: Synthetic oligonucleotide
  Antisense strand to SEQ ID NO: 2210392
ugcuuuguaccauuacuag

SEQ ID NO: 2210394 - RNA, 19 nt, Artificial Sequence
  Description of Artificial Sequence: Synthetic oligonucleotide
  Sense strand starting at position 1619 of SEQ ID NO: 1883704
ccuguuucucaccagaaug

SEQ ID NO: 2210395 - RNA, 19 nt, Artificial Sequence
  Description of Artificial Sequence: Synthetic oligonucleotide
  Antisense strand to SEQ ID NO: 2210394
cauucuggugagaaacagg

SEQ ID NO: 2210396 - RNA, 19 nt, Artificial Sequence
  Description of Artificial Sequence: Synthetic oligonucleotide
  Sense strand starting at position 2629 of SEQ ID NO: 1883704
cucgaccuccaugauugau

SEQ ID NO: 2210397 - RNA, 19 nt, Artificial Sequence
  Description of Artificial Sequence: Synthetic oligonucleotide
  Antisense strand to SEQ ID NO: 2210396
aucaaucauggaggucgag

SEQ ID NO: 2210398 - RNA, 19 nt, Artificial Sequence
  Description of Artificial Sequence: Synthetic oligonucleotide
  Sense strand starting at position 937 of SEQ ID NO: 1883704
gaaggagugcuuggagaac

SEQ ID NO: 2210399 - RNA, 19 nt, Artificial Sequence
  Description of Artificial Sequence: Synthetic oligonucleotide
  Antisense strand to SEQ ID NO: 2210398
guucuccaagcacuccuuc

SEQ ID NO: 2210400 - RNA, 19 nt, Artificial Sequence
  Description of Artificial Sequence: Synthetic oligonucleotide
  Sense strand starting at position 1629 of SEQ ID NO: 1883704
accagaauggugcauaucu

SEQ ID NO: 2210401 - RNA, 19 nt, Artificial Sequence
  Description of Artificial Sequence: Synthetic oligonucleotide
  Antisense strand to SEQ ID NO: 2210400
agauaugcaccauucuggu

SEQ ID NO: 2210402 - RNA, 19 nt, Artificial Sequence
  Description of Artificial Sequence: Synthetic oligonucleotide
  Sense strand starting at position 3728 of SEQ ID NO: 1883704
ggguuaaauuagcuaagag

SEQ ID NO: 2210403 - RNA, 19 nt, Artificial Sequence
  Description of Artificial Sequence: Synthetic oligonucleotide
  Antisense strand to SEQ ID NO: 2210402
cucuuagcuaauuuaaccc

SEQ ID NO: 2210404 - RNA, 19 nt, Artificial Sequence
  Description of Artificial Sequence: Synthetic oligonucleotide
  Sense strand starting at position 2587 of SEQ ID NO: 1883704
cagguaggucuauagguga

SEQ ID NO: 2210405 - RNA, 19 nt, Artificial Sequence
  Description of Artificial Sequence: Synthetic oligonucleotide
  Antisense strand to SEQ ID NO: 2210404
ucaccuauagaccuaccug

SEQ ID NO: 2210406 - RNA, 19 nt, Artificial Sequence
  Description of Artificial Sequence: Synthetic oligonucleotide
  Sense strand starting at position 3729 of SEQ ID NO: 1883704
gguuaaauuagcuaagagu

SEQ ID NO: 2210407 - RNA, 19 nt, Artificial Sequence
  Description of Artificial Sequence: Synthetic oligonucleotide
  Antisense strand to SEQ ID NO: 2210406
acucuuagcuaauuuaacc

SEQ ID NO: 2210408 - RNA, 19 nt, Artificial Sequence
  Description of Artificial Sequence: Synthetic oligonucleotide
  Sense strand starting at position 3512 of SEQ ID NO: 1883704
aaagguagguuucuggaau

SEQ ID NO: 2210409 - RNA, 19 nt, Artificial Sequence
  Description of Artificial Sequence: Synthetic oligonucleotide
  Antisense strand to SEQ ID NO: 2210408
auuccagaaaccuaccuuu

SEQ ID NO: 2210410 - RNA, 19 nt, Artificial Sequence
  Description of Artificial Sequence: Synthetic oligonucleotide
  Sense strand starting at position 1649 of SEQ ID NO: 1883704
ggagacauguagguacauu

SEQ ID NO: 2210411 - RNA, 19 nt, Artificial Sequence
  Description of Artificial Sequence: Synthetic oligonucleotide
  Antisense strand to SEQ ID NO: 2210410
aauguaccuacaugucucc

SEQ ID NO: 2210412 - RNA, 19 nt, Artificial Sequence
  Description of Artificial Sequence: Synthetic oligonucleotide
  Sense strand starting at position 3236 of SEQ ID NO: 1883704
guguuaugacaguaaauug

SEQ ID NO: 2210413 - RNA, 19 nt, Artificial Sequence
  Description of Artificial Sequence: Synthetic oligonucleotide
  Antisense strand to SEQ ID NO: 2210412
caauuuacugucauaacac

SEQ ID NO: 2210414 - RNA, 19 nt, Artificial Sequence
  Description of Artificial Sequence: Synthetic oligonucleotide
  Sense strand starting at position 901 of SEQ ID NO: 1883704
gguuauugcagaugaggaa

SEQ ID NO: 2210415 - RNA, 19 nt, Artificial Sequence
  Description of Artificial Sequence: Synthetic oligonucleotide
  Antisense strand to SEQ ID NO: 2210414
uuccucaucugcaauaacc

SEQ ID NO: 2210416 - RNA, 19 nt, Artificial Sequence
  Description of Artificial Sequence: Synthetic oligonucleotide
  Sense strand starting at position 3803 of SEQ ID NO: 1883704
auuccuuaagcccaagagu

SEQ ID NO: 2210417 - RNA, 19 nt, Artificial Sequence
  Description of Artificial Sequence: Synthetic oligonucleotide
  Antisense strand to SEQ ID NO: 2210416
acucuugggcuuaaggaau

SEQ ID NO: 2210418 - RNA, 19 nt, Artificial Sequence
  Description of Artificial Sequence: Synthetic oligonucleotide
  Sense strand starting at position 3968 of SEQ ID NO: 1883704
guuagaacucaccaugcca

SEQ ID NO: 2210419 - RNA, 19 nt, Artificial Sequence
  Description of Artificial Sequence: Synthetic oligonucleotide
  Antisense strand to SEQ ID NO: 2210418
uggcauggugaguucuaac

SEQ ID NO: 2210420 - RNA, 19 nt, Artificial Sequence
  Description of Artificial Sequence: Synthetic oligonucleotide
  Sense strand starting at position 2631 of SEQ ID NO: 1883704
cgaccuccaugauugauga

SEQ ID NO: 2210421 - RNA, 19 nt, Artificial Sequence
  Description of Artificial Sequence: Synthetic oligonucleotide
  Antisense strand to SEQ ID NO: 2210420
ucaucaaucauggaggucg

SEQ ID NO: 2210422 - RNA, 19 nt, Artificial Sequence
  Description of Artificial Sequence: Synthetic oligonucleotide
  Sense strand starting at position 1070 of SEQ ID NO: 1883704
ugagguaaauuagcagauu

SEQ ID NO: 2210423 - RNA, 19 nt, Artificial Sequence
  Description of Artificial Sequence: Synthetic oligonucleotide
  Antisense strand to SEQ ID NO: 2210422
aaucugcuaauuuaccuca

SEQ ID NO: 2210424 - RNA, 19 nt, Artificial Sequence
  Description of Artificial Sequence: Synthetic oligonucleotide
  Sense strand starting at position 2481 of SEQ ID NO: 1883704
uguugucuacuacagaacu

SEQ ID NO: 2210425 - RNA, 19 nt, Artificial Sequence
  Description of Artificial Sequence: Synthetic oligonucleotide
  Antisense strand to SEQ ID NO: 2210424
aguucuguaguagacaaca

SEQ ID NO: 2210426 - RNA, 19 nt, Artificial Sequence
  Description of Artificial Sequence: Synthetic oligonucleotide
  Sense strand starting at position 2696 of SEQ ID NO: 1883704
agugauaguccacaagcua

SEQ ID NO: 2210427 - RNA, 19 nt, Artificial Sequence
  Description of Artificial Sequence: Synthetic oligonucleotide
  Antisense strand to SEQ ID NO: 2210426
uagcuuguggacuaucacu

SEQ ID NO: 2210428 - RNA, 19 nt, Artificial Sequence
  Description of Artificial Sequence: Synthetic oligonucleotide
  Sense strand starting at position 2108 of SEQ ID NO: 1883704
aaucaauuugugugcagca

SEQ ID NO: 2210429 - RNA, 19 nt, Artificial Sequence
  Description of Artificial Sequence: Synthetic oligonucleotide
  Antisense strand to SEQ ID NO: 2210428
ugcugcacacaaauugauu

SEQ ID NO: 2210430 - RNA, 19 nt, Artificial Sequence
  Description of Artificial Sequence: Synthetic oligonucleotide
  Sense strand starting at position 3279 of SEQ ID NO: 1883704
acuguaacuguguaauaug

SEQ ID NO: 2210431 - RNA, 19 nt, Artificial Sequence
  Description of Artificial Sequence: Synthetic oligonucleotide
  Antisense strand to SEQ ID NO: 2210430
cauauuacacaguuacagu

SEQ ID NO: 2210432 - RNA, 19 nt, Artificial Sequence
  Description of Artificial Sequence: Synthetic oligonucleotide
  Sense strand starting at position 1621 of SEQ ID NO: 1883704
uguuucucaccagaauggu

SEQ ID NO: 2210433 - RNA, 19 nt, Artificial Sequence
  Description of Artificial Sequence: Synthetic oligonucleotide
  Antisense strand to SEQ ID NO: 2210432
accauucuggugagaaaca

SEQ ID NO: 2210434 - RNA, 19 nt, Artificial Sequence
  Description of Artificial Sequence: Synthetic oligonucleotide
  Sense strand starting at position 2952 of SEQ ID NO: 1883705
agaccuugacucugauaua

SEQ ID NO: 2210435 - RNA, 19 nt, Artificial Sequence
  Description of Artificial Sequence: Synthetic oligonucleotide
  Antisense strand to SEQ ID NO: 2210434
uauaucagagucaaggucu

SEQ ID NO: 2210436 - RNA, 19 nt, Artificial Sequence
  Description of Artificial Sequence: Synthetic oligonucleotide
  Sense strand starting at position 3096 of SEQ ID NO: 1883705
cucacaguuguugaaauaa

SEQ ID NO: 2210437 - RNA, 19 nt, Artificial Sequence
  Description of Artificial Sequence: Synthetic oligonucleotide
  Antisense strand to SEQ ID NO: 2210436
uuauuucaacaacugugag

SEQ ID NO: 2210438 - RNA, 19 nt, Artificial Sequence
  Description of Artificial Sequence: Synthetic oligonucleotide
  Sense strand starting at position 329 of SEQ ID NO: 1883705
agcauagaugcagaaagua

SEQ ID NO: 2210439 - RNA, 19 nt, Artificial Sequence
  Description of Artificial Sequence: Synthetic oligonucleotide
  Antisense strand to SEQ ID NO: 2210438
uacuuucugcaucuaugcu

SEQ ID NO: 2210440 - RNA, 19 nt, Artificial Sequence
  Description of Artificial Sequence: Synthetic oligonucleotide
  Sense strand starting at position 47 of SEQ ID NO: 1883705
ccaugcuaggaaggauuaa

SEQ ID NO: 2210441 - RNA, 19 nt, Artificial Sequence
  Description of Artificial Sequence: Synthetic oligonucleotide
  Antisense strand to SEQ ID NO: 2210440
uuaauccuuccuagcaugg

SEQ ID NO: 2210442 - RNA, 19 nt, Artificial Sequence
  Description of Artificial Sequence: Synthetic oligonucleotide
  Sense strand starting at position 802 of SEQ ID NO: 1883705
uaguguguagauuacaaga

SEQ ID NO: 2210443 - RNA, 19 nt, Artificial Sequence
  Description of Artificial Sequence: Synthetic oligonucleotide
  Antisense strand to SEQ ID NO: 2210442
ucuuguaaucuacacacua

SEQ ID NO: 2210444 - RNA, 19 nt, Artificial Sequence
  Description of Artificial Sequence: Synthetic oligonucleotide
  Sense strand starting at position 2015 of SEQ ID NO: 1883705
cgcauugaacuauauauga

SEQ ID NO: 2210445 - RNA, 19 nt, Artificial Sequence
  Description of Artificial Sequence: Synthetic oligonucleotide
  Antisense strand to SEQ ID NO: 2210444
ucauauauaguucaaugcg

SEQ ID NO: 2210446 - RNA, 19 nt, Artificial Sequence
  Description of Artificial Sequence: Synthetic oligonucleotide
  Sense strand starting at position 2509 of SEQ ID NO: 1883705
cuuugaagccucuauauga

SEQ ID NO: 2210447 - RNA, 19 nt, Artificial Sequence
  Description of Artificial Sequence: Synthetic oligonucleotide
  Antisense strand to SEQ ID NO: 2210446
ucauauagaggcuucaaag

SEQ ID NO: 2210448 - RNA, 19 nt, Artificial Sequence
  Description of Artificial Sequence: Synthetic oligonucleotide
  Sense strand starting at position 3269 of SEQ ID NO: 1883705
uagauauaagaauguucga

SEQ ID NO: 2210449 - RNA, 19 nt, Artificial Sequence
  Description of Artificial Sequence: Synthetic oligonucleotide
  Antisense strand to SEQ ID NO: 2210448
ucgaacauucuuauaucua

SEQ ID NO: 2210450 - RNA, 19 nt, Artificial Sequence
  Description of Artificial Sequence: Synthetic oligonucleotide
  Sense strand starting at position 1035 of SEQ ID NO: 1883705
gaugcauuccuuuagauug

SEQ ID NO: 2210451 - RNA, 19 nt, Artificial Sequence
  Description of Artificial Sequence: Synthetic oligonucleotide
  Antisense strand to SEQ ID NO: 2210450
caaucuaaaggaaugcauc

SEQ ID NO: 2210452 - RNA, 19 nt, Artificial Sequence
  Description of Artificial Sequence: Synthetic oligonucleotide
  Sense strand starting at position 3418 of SEQ ID NO: 1883705
guguuaagugcauucacgu

SEQ ID NO: 2210453 - RNA, 19 nt, Artificial Sequence
  Description of Artificial Sequence: Synthetic oligonucleotide
  Antisense strand to SEQ ID NO: 2210452
acgugaaugcacuuaacac

SEQ ID NO: 2210454 - RNA, 19 nt, Artificial Sequence
  Description of Artificial Sequence: Synthetic oligonucleotide
  Sense strand starting at position 2849 of SEQ ID NO: 1883705
acugucauuugugacauuu

SEQ ID NO: 2210455 - RNA, 19 nt, Artificial Sequence
  Description of Artificial Sequence: Synthetic oligonucleotide
  Antisense strand to SEQ ID NO: 2210454
aaaugucacaaaugacagu

SEQ ID NO: 2210456 - RNA, 19 nt, Artificial Sequence
  Description of Artificial Sequence: Synthetic oligonucleotide
  Sense strand starting at position 2907 of SEQ ID NO: 1883705
aguugacacuucuuuaaag

SEQ ID NO: 2210457 - RNA, 19 nt, Artificial Sequence
  Description of Artificial Sequence: Synthetic oligonucleotide
  Antisense strand to SEQ ID NO: 2210456
cuuuaaagaagugucaacu

SEQ ID NO: 2210458 - RNA, 19 nt, Artificial Sequence
  Description of Artificial Sequence: Synthetic oligonucleotide
  Sense strand starting at position 2839 of SEQ ID NO: 1883705
auuauacaggacugucauu

SEQ ID NO: 2210459 - RNA, 19 nt, Artificial Sequence
  Description of Artificial Sequence: Synthetic oligonucleotide
  Antisense strand to SEQ ID NO: 2210458
aaugacaguccuguauaau

SEQ ID NO: 2210460 - RNA, 19 nt, Artificial Sequence
  Description of Artificial Sequence: Synthetic oligonucleotide
  Sense strand starting at position 2949 of SEQ ID NO: 1883705
gugagaccuugacucugau

SEQ ID NO: 2210461 - RNA, 19 nt, Artificial Sequence
  Description of Artificial Sequence: Synthetic oligonucleotide
  Antisense strand to SEQ ID NO: 2210460
aucagagucaaggucucac

SEQ ID NO: 2210462 - RNA, 19 nt, Artificial Sequence
  Description of Artificial Sequence: Synthetic oligonucleotide
  Sense strand starting at position 943 of SEQ ID NO: 1883705
acuccaguucccgguauuu

SEQ ID NO: 2210463 - RNA, 19 nt, Artificial Sequence
  Description of Artificial Sequence: Synthetic oligonucleotide
  Antisense strand to SEQ ID NO: 2210462
aaauaccgggaacuggagu

SEQ ID NO: 2210464 - RNA, 19 nt, Artificial Sequence
  Description of Artificial Sequence: Synthetic oligonucleotide
  Sense strand starting at position 91 of SEQ ID NO: 1883705
uugugguacgagggagaaa

SEQ ID NO: 2210465 - RNA, 19 nt, Artificial Sequence
  Description of Artificial Sequence: Synthetic oligonucleotide
  Antisense strand to SEQ ID NO: 2210464
uuucucccucguaccacaa

SEQ ID NO: 2210466 - RNA, 19 nt, Artificial Sequence
  Description of Artificial Sequence: Synthetic oligonucleotide
  Sense strand starting at position 2370 of SEQ ID NO: 1883705
uugauaaacuuggcucuaa

SEQ ID NO: 2210467 - RNA, 19 nt, Artificial Sequence
  Description of Artificial Sequence: Synthetic oligonucleotide
  Antisense strand to SEQ ID NO: 2210466
uuagagccaaguuuaucaa

SEQ ID NO: 2210468 - RNA, 19 nt, Artificial Sequence
  Description of Artificial Sequence: Synthetic oligonucleotide
  Sense strand starting at position 2371 of SEQ ID NO: 1883705
ugauaaacuuggcucuaac

SEQ ID NO: 2210469 - RNA, 19 nt, Artificial Sequence
  Description of Artificial Sequence: Synthetic oligonucleotide
  Antisense strand to SEQ ID NO: 2210468
guuagagccaaguuuauca

SEQ ID NO: 2210470 - RNA, 19 nt, Artificial Sequence
  Description of Artificial Sequence: Synthetic oligonucleotide
  Sense strand starting at position 1110 of SEQ ID NO: 1883705
gcaugagcaccucacacau

SEQ ID NO: 2210471 - RNA, 19 nt, Artificial Sequence
  Description of Artificial Sequence: Synthetic oligonucleotide
  Antisense strand to SEQ ID NO: 2210470
augugugaggugcucaugc

SEQ ID NO: 2210472 - RNA, 19 nt, Artificial Sequence
  Description of Artificial Sequence: Synthetic oligonucleotide
  Sense strand starting at position 3354 of SEQ ID NO: 1883705
ugugguaagguauauguaa

SEQ ID NO: 2210473 - RNA, 19 nt, Artificial Sequence
  Description of Artificial Sequence: Synthetic oligonucleotide
  Antisense strand to SEQ ID NO: 2210472
uuacauauaccuuaccaca

SEQ ID NO: 2210474 - RNA, 19 nt, Artificial Sequence
  Description of Artificial Sequence: Synthetic oligonucleotide
  Sense strand starting at position 2150 of SEQ ID NO: 1883705
augugaagcccucaccauu

SEQ ID NO: 2210475 - RNA, 19 nt, Artificial Sequence
  Description of Artificial Sequence: Synthetic oligonucleotide
  Antisense strand to SEQ ID NO: 2210474
aauggugagggcuucacau

SEQ ID NO: 2210476 - RNA, 19 nt, Artificial Sequence
  Description of Artificial Sequence: Synthetic oligonucleotide
  Sense strand starting at position 3356 of SEQ ID NO: 1883705
ugguaagguauauguaaca

SEQ ID NO: 2210477 - RNA, 19 nt, Artificial Sequence
  Description of Artificial Sequence: Synthetic oligonucleotide
  Antisense strand to SEQ ID NO: 2210476
uguuacauauaccuuacca

SEQ ID NO: 2210478 - RNA, 19 nt, Artificial Sequence
  Description of Artificial Sequence: Synthetic oligonucleotide
  Sense strand starting at position 561 of SEQ ID NO: 1883705
gcauuuguaaaguguagca

SEQ ID NO: 2210479 - RNA, 19 nt, Artificial Sequence
  Description of Artificial Sequence: Synthetic oligonucleotide
  Antisense strand to SEQ ID NO: 2210478
ugcuacacuuuacaaaugc

SEQ ID NO: 2210480 - RNA, 19 nt, Artificial Sequence
  Description of Artificial Sequence: Synthetic oligonucleotide
  Sense strand starting at position 2835 of SEQ ID NO: 1883705
ggucauuauacaggacugu

SEQ ID NO: 2210481 - RNA, 19 nt, Artificial Sequence
  Description of Artificial Sequence: Synthetic oligonucleotide
  Antisense strand to SEQ ID NO: 2210480
acaguccuguauaaugacc

SEQ ID NO: 2210482 - RNA, 19 nt, Artificial Sequence
  Description of Artificial Sequence: Synthetic oligonucleotide
  Sense strand starting at position 3150 of SEQ ID NO: 1883705
ggauguuuguacuuggaau

SEQ ID NO: 2210483 - RNA, 19 nt, Artificial Sequence
  Description of Artificial Sequence: Synthetic oligonucleotide
  Antisense strand to SEQ ID NO: 2210482
auuccaaguacaaacaucc

SEQ ID NO: 2210484 - RNA, 19 nt, Artificial Sequence
  Description of Artificial Sequence: Synthetic oligonucleotide
  Sense strand starting at position 209 of SEQ ID NO: 1883705
aguguuucuguugauaaug

SEQ ID NO: 2210485 - RNA, 19 nt, Artificial Sequence
  Description of Artificial Sequence: Synthetic oligonucleotide
  Antisense strand to SEQ ID NO: 2210484
cauuaucaacagaaacacu

SEQ ID NO: 2210486 - RNA, 19 nt, Artificial Sequence
  Description of Artificial Sequence: Synthetic oligonucleotide
  Sense strand starting at position 1467 of SEQ ID NO: 1883705
cuuuguguuccuuauaaua

SEQ ID NO: 2210487 - RNA, 19 nt, Artificial Sequence
  Description of Artificial Sequence: Synthetic oligonucleotide
  Antisense strand to SEQ ID NO: 2210486
uauuauaaggaacacaaag

SEQ ID NO: 2210488 - RNA, 19 nt, Artificial Sequence
  Description of Artificial Sequence: Synthetic oligonucleotide
  Sense strand starting at position 2210 of SEQ ID NO: 1883705
gccucuagucacugagaga

SEQ ID NO: 2210489 - RNA, 19 nt, Artificial Sequence
  Description of Artificial Sequence: Synthetic oligonucleotide
  Antisense strand to SEQ ID NO: 2210488
ucucucagugacuagaggc

SEQ ID NO: 2210490 - RNA, 19 nt, Artificial Sequence
  Description of Artificial Sequence: Synthetic oligonucleotide
  Sense strand starting at position 2908 of SEQ ID NO: 1883705
guugacacuucuuuaaagu

SEQ ID NO: 2210491 - RNA, 19 nt, Artificial Sequence
  Description of Artificial Sequence: Synthetic oligonucleotide
  Antisense strand to SEQ ID NO: 2210490
acuuuaaagaagugucaac

SEQ ID NO: 2210492 - RNA, 19 nt, Artificial Sequence
  Description of Artificial Sequence: Synthetic oligonucleotide
  Sense strand starting at position 3094 of SEQ ID NO: 1883705
uucucacaguuguugaaau

SEQ ID NO: 2210493 - RNA, 19 nt, Artificial Sequence
  Description of Artificial Sequence: Synthetic oligonucleotide
  Antisense strand to SEQ ID NO: 2210492
auuucaacaacugugagaa

SEQ ID NO: 2210494 - RNA, 19 nt, Artificial Sequence
  Description of Artificial Sequence: Synthetic oligonucleotide
  Sense strand starting at position 1684 of SEQ ID NO: 1883705
gaaagugcuuacccaguaa

SEQ ID NO: 2210495 - RNA, 19 nt, Artificial Sequence
  Description of Artificial Sequence: Synthetic oligonucleotide
  Antisense strand to SEQ ID NO: 2210494
uuacuggguaagcacuuuc

SEQ ID NO: 2210496 - RNA, 19 nt, Artificial Sequence
  Description of Artificial Sequence: Synthetic oligonucleotide
  Sense strand starting at position 218 of SEQ ID NO: 1883705
guugauaauguguaaguuu

SEQ ID NO: 2210497 - RNA, 19 nt, Artificial Sequence
  Description of Artificial Sequence: Synthetic oligonucleotide
  Antisense strand to SEQ ID NO: 2210496
aaacuuacacauuaucaac

SEQ ID NO: 2210498 - RNA, 19 nt, Artificial Sequence
  Description of Artificial Sequence: Synthetic oligonucleotide
  Sense strand starting at position 696 of SEQ ID NO: 1883705
ggcuuaaagggucaugcuu

SEQ ID NO: 2210499 - RNA, 19 nt, Artificial Sequence
  Description of Artificial Sequence: Synthetic oligonucleotide
  Antisense strand to SEQ ID NO: 2210498
aagcaugacccuuuaagcc

SEQ ID NO: 2210500 - RNA, 19 nt, Artificial Sequence
  Description of Artificial Sequence: Synthetic oligonucleotide
  Sense strand starting at position 2715 of SEQ ID NO: 1883705
ccuacugagcugugacaua

SEQ ID NO: 2210501 - RNA, 19 nt, Artificial Sequence
  Description of Artificial Sequence: Synthetic oligonucleotide
  Antisense strand to SEQ ID NO: 2210500
uaugucacagcucaguagg

SEQ ID NO: 2210502 - RNA, 19 nt, Artificial Sequence
  Description of Artificial Sequence: Synthetic oligonucleotide
  Sense strand starting at position 2369 of SEQ ID NO: 1883705
guugauaaacuuggcucua

SEQ ID NO: 2210503 - RNA, 19 nt, Artificial Sequence
  Description of Artificial Sequence: Synthetic oligonucleotide
  Antisense strand to SEQ ID NO: 2210502
uagagccaaguuuaucaac

SEQ ID NO: 2210504 - RNA, 19 nt, Artificial Sequence
  Description of Artificial Sequence: Synthetic oligonucleotide
  Sense strand starting at position 1090 of SEQ ID NO: 1883705
gaaucuagucacgaucgca

SEQ ID NO: 2210505 - RNA, 19 nt, Artificial Sequence
  Description of Artificial Sequence: Synthetic oligonucleotide
  Antisense strand to SEQ ID NO: 2210504
ugcgaucgugacuagauuc

SEQ ID NO: 2210506 - RNA, 19 nt, Artificial Sequence
  Description of Artificial Sequence: Synthetic oligonucleotide
  Sense strand starting at position 3067 of SEQ ID NO: 1883705
accaauaguucuguuuauu

SEQ ID NO: 2210507 - RNA, 19 nt, Artificial Sequence
  Description of Artificial Sequence: Synthetic oligonucleotide
  Antisense strand to SEQ ID NO: 2210506
aauaaacagaacuauuggu

SEQ ID NO: 2210508 - RNA, 19 nt, Artificial Sequence
  Description of Artificial Sequence: Synthetic oligonucleotide
  Sense strand starting at position 3011 of SEQ ID NO: 1883705
acuuucuugucucuuuaga

SEQ ID NO: 2210509 - RNA, 19 nt, Artificial Sequence
  Description of Artificial Sequence: Synthetic oligonucleotide
  Antisense strand to SEQ ID NO: 2210508
ucuaaagagacaagaaagu

SEQ ID NO: 2210510 - RNA, 19 nt, Artificial Sequence
  Description of Artificial Sequence: Synthetic oligonucleotide
  Sense strand starting at position 2284 of SEQ ID NO: 1883705
cucucuacuugugucagaa

SEQ ID NO: 2210511 - RNA, 19 nt, Artificial Sequence
  Description of Artificial Sequence: Synthetic oligonucleotide
  Antisense strand to SEQ ID NO: 2210510
uucugacacaaguagagag

SEQ ID NO: 2210512 - RNA, 19 nt, Artificial Sequence
  Description of Artificial Sequence: Synthetic oligonucleotide
  Sense strand starting at position 1301 of SEQ ID NO: 1883705
acaaguguuuggccacaca

SEQ ID NO: 2210513 - RNA, 19 nt, Artificial Sequence
  Description of Artificial Sequence: Synthetic oligonucleotide
  Antisense strand to SEQ ID NO: 2210512
uguguggccaaacacuugu

SEQ ID NO: 2210514 - RNA, 19 nt, Artificial Sequence
  Description of Artificial Sequence: Synthetic oligonucleotide
  Sense strand starting at position 839 of SEQ ID NO: 1883706
uuugauuucucuuucuggu

SEQ ID NO: 2210515 - RNA, 19 nt, Artificial Sequence
  Description of Artificial Sequence: Synthetic oligonucleotide
  Antisense strand to SEQ ID NO: 2210514
accagaaagagaaaucaaa

SEQ ID NO: 2210516 - RNA, 19 nt, Artificial Sequence
  Description of Artificial Sequence: Synthetic oligonucleotide
  Sense strand starting at position 3443 of SEQ ID NO: 1883706
gacucaaaugaaugucuga

SEQ ID NO: 2210517 - RNA, 19 nt, Artificial Sequence
  Description of Artificial Sequence: Synthetic oligonucleotide
  Antisense strand to SEQ ID NO: 2210516
ucagacauucauuugaguc

SEQ ID NO: 2210518 - RNA, 19 nt, Artificial Sequence
  Description of Artificial Sequence: Synthetic oligonucleotide
  Sense strand starting at position 1649 of SEQ ID NO: 1883706
agaaauucugaauguacug

SEQ ID NO: 2210519 - RNA, 19 nt, Artificial Sequence
  Description of Artificial Sequence: Synthetic oligonucleotide
  Antisense strand to SEQ ID NO: 2210518
caguacauucagaauuucu

SEQ ID NO: 2210520 - RNA, 19 nt, Artificial Sequence
  Description of Artificial Sequence: Synthetic oligonucleotide
  Sense strand starting at position 3900 of SEQ ID NO: 1883706
gaccuccaugauugaugau

SEQ ID NO: 2210521 - RNA, 19 nt, Artificial Sequence
  Description of Artificial Sequence: Synthetic oligonucleotide
  Antisense strand to SEQ ID NO: 2210520
aucaucaaucauggagguc

SEQ ID NO: 2210522 - RNA, 19 nt, Artificial Sequence
  Description of Artificial Sequence: Synthetic oligonucleotide
  Sense strand starting at position 1682 of SEQ ID NO: 1883706
augugauauccagauaugu

SEQ ID NO: 2210523 - RNA, 19 nt, Artificial Sequence
  Description of Artificial Sequence: Synthetic oligonucleotide
  Antisense strand to SEQ ID NO: 2210522
acauaucuggauaucacau

SEQ ID NO: 2210524 - RNA, 19 nt, Artificial Sequence
  Description of Artificial Sequence: Synthetic oligonucleotide
  Sense strand starting at position 3534 of SEQ ID NO: 1883706
auuguuaacaaggguaaga

SEQ ID NO: 2210525 - RNA, 19 nt, Artificial Sequence
  Description of Artificial Sequence: Synthetic oligonucleotide
  Antisense strand to SEQ ID NO: 2210524
ucuuacccuuguuaacaau

SEQ ID NO: 2210526 - RNA, 19 nt, Artificial Sequence
  Description of Artificial Sequence: Synthetic oligonucleotide
  Sense strand starting at position 2908 of SEQ ID NO: 1883706
gcauaucuaggagacaugu

SEQ ID NO: 2210527 - RNA, 19 nt, Artificial Sequence
  Description of Artificial Sequence: Synthetic oligonucleotide
  Antisense strand to SEQ ID NO: 2210526
acaugucuccuagauaugc

SEQ ID NO: 2210528 - RNA, 19 nt, Artificial Sequence
  Description of Artificial Sequence: Synthetic oligonucleotide
  Sense strand starting at position 1556 of SEQ ID NO: 1883706
auggauugcagaugaugau

SEQ ID NO: 2210529 - RNA, 19 nt, Artificial Sequence
  Description of Artificial Sequence: Synthetic oligonucleotide
  Antisense strand to SEQ ID NO: 2210528
aucaucaucugcaauccau

SEQ ID NO: 2210530 - RNA, 19 nt, Artificial Sequence
  Description of Artificial Sequence: Synthetic oligonucleotide
  Sense strand starting at position 3769 of SEQ ID NO: 1883706
acuguugauaucuaggagu

SEQ ID NO: 2210531 - RNA, 19 nt, Artificial Sequence
  Description of Artificial Sequence: Synthetic oligonucleotide
  Antisense strand to SEQ ID NO: 2210530
acuccuagauaucaacagu

SEQ ID NO: 2210532 - RNA, 19 nt, Artificial Sequence
  Description of Artificial Sequence: Synthetic oligonucleotide
  Sense strand starting at position 481 of SEQ ID NO: 1883706
uuauguagucuggagauac

SEQ ID NO: 2210533 - RNA, 19 nt, Artificial Sequence
  Description of Artificial Sequence: Synthetic oligonucleotide
  Antisense strand to SEQ ID NO: 2210532
guaucuccagacuacauaa

SEQ ID NO: 2210534 - RNA, 19 nt, Artificial Sequence
  Description of Artificial Sequence: Synthetic oligonucleotide
  Sense strand starting at position 2916 of SEQ ID NO: 1883706
aggagacauguagguacau

SEQ ID NO: 2210535 - RNA, 19 nt, Artificial Sequence
  Description of Artificial Sequence: Synthetic oligonucleotide
  Antisense strand to SEQ ID NO: 2210534
auguaccuacaugucuccu

SEQ ID NO: 2210536 - RNA, 19 nt, Artificial Sequence
  Description of Artificial Sequence: Synthetic oligonucleotide
  Sense strand starting at position 1437 of SEQ ID NO: 1883706
acagcuauuuaucugugua

SEQ ID NO: 2210537 - RNA, 19 nt, Artificial Sequence
  Description of Artificial Sequence: Synthetic oligonucleotide
  Antisense strand to SEQ ID NO: 2210536
uacacagauaaauagcugu

SEQ ID NO: 2210538 - RNA, 19 nt, Artificial Sequence
  Description of Artificial Sequence: Synthetic oligonucleotide
  Sense strand starting at position 1450 of SEQ ID NO: 1883706
uguguauguauggauaaag

SEQ ID NO: 2210539 - RNA, 19 nt, Artificial Sequence
  Description of Artificial Sequence: Synthetic oligonucleotide
  Antisense strand to SEQ ID NO: 2210538
cuuuauccauacauacaca

SEQ ID NO: 2210540 - RNA, 19 nt, Artificial Sequence
  Description of Artificial Sequence: Synthetic oligonucleotide
  Sense strand starting at position 836 of SEQ ID NO: 1883706
ggcuuugauuucucuuucu

SEQ ID NO: 2210541 - RNA, 19 nt, Artificial Sequence
  Description of Artificial Sequence: Synthetic oligonucleotide
  Antisense strand to SEQ ID NO: 2210540
agaaagagaaaucaaagcc

SEQ ID NO: 2210542 - RNA, 19 nt, Artificial Sequence
  Description of Artificial Sequence: Synthetic oligonucleotide
  Sense strand starting at position 1441 of SEQ ID NO: 1883706
cuauuuaucuguguaugua

SEQ ID NO: 2210543 - RNA, 19 nt, Artificial Sequence
  Description of Artificial Sequence: Synthetic oligonucleotide
  Antisense strand to SEQ ID NO: 2210542
uacauacacagauaaauag

SEQ ID NO: 2210544 - RNA, 19 nt, Artificial Sequence
  Description of Artificial Sequence: Synthetic oligonucleotide
  Sense strand starting at position 1007 of SEQ ID NO: 1883706
gacuuaaguguaugauaaa

SEQ ID NO: 2210545 - RNA, 19 nt, Artificial Sequence
  Description of Artificial Sequence: Synthetic oligonucleotide
  Antisense strand to SEQ ID NO: 2210544
uuuaucauacacuuaaguc

SEQ ID NO: 2210546 - RNA, 19 nt, Artificial Sequence
  Description of Artificial Sequence: Synthetic oligonucleotide
  Sense strand starting at position 1439 of SEQ ID NO: 1883706
agcuauuuaucuguguaug

SEQ ID NO: 2210547 - RNA, 19 nt, Artificial Sequence
  Description of Artificial Sequence: Synthetic oligonucleotide
  Antisense strand to SEQ ID NO: 2210546
cauacacagauaaauagcu

SEQ ID NO: 2210548 - RNA, 19 nt, Artificial Sequence
  Description of Artificial Sequence: Synthetic oligonucleotide
  Sense strand starting at position 2408 of SEQ ID NO: 1883706
cuaguaaugguacaaagca

SEQ ID NO: 2210549 - RNA, 19 nt, Artificial Sequence
  Description of Artificial Sequence: Synthetic oligonucleotide
  Antisense strand to SEQ ID NO: 2210548
ugcuuuguaccauuacuag

SEQ ID NO: 2210550 - RNA, 19 nt, Artificial Sequence
  Description of Artificial Sequence: Synthetic oligonucleotide
  Sense strand starting at position 886 of SEQ ID NO: 1883706
uuccuaauuugacaggaaa

SEQ ID NO: 2210551 - RNA, 19 nt, Artificial Sequence
  Description of Artificial Sequence: Synthetic oligonucleotide
  Antisense strand to SEQ ID NO: 2210550
uuuccugucaaauuaggaa

SEQ ID NO: 2210552 - RNA, 19 nt, Artificial Sequence
  Description of Artificial Sequence: Synthetic oligonucleotide
  Sense strand starting at position 2887 of SEQ ID NO: 1883706
ccuguuucucaccagaaug

SEQ ID NO: 2210553 - RNA, 19 nt, Artificial Sequence
  Description of Artificial Sequence: Synthetic oligonucleotide
  Antisense strand to SEQ ID NO: 2210552
cauucuggugagaaacagg

SEQ ID NO: 2210554 - RNA, 19 nt, Artificial Sequence
  Description of Artificial Sequence: Synthetic oligonucleotide
  Sense strand starting at position 3897 of SEQ ID NO: 1883706
cucgaccuccaugauugau

SEQ ID NO: 2210555 - RNA, 19 nt, Artificial Sequence
  Description of Artificial Sequence: Synthetic oligonucleotide
  Antisense strand to SEQ ID NO: 2210554
aucaaucauggaggucgag

SEQ ID NO: 2210556 - RNA, 19 nt, Artificial Sequence
  Description of Artificial Sequence: Synthetic oligonucleotide
  Sense strand starting at position 2205 of SEQ ID NO: 1883706
gaaggagugcuuggagaac

SEQ ID NO: 2210557 - RNA, 19 nt, Artificial Sequence
  Description of Artificial Sequence: Synthetic oligonucleotide
  Antisense strand to SEQ ID NO: 2210556
guucuccaagcacuccuuc

SEQ ID NO: 2210558 - RNA, 19 nt, Artificial Sequence
  Description of Artificial Sequence: Synthetic oligonucleotide
  Sense strand starting at position 1204 of SEQ ID NO: 1883706
augaaugagccucauaguu

SEQ ID NO: 2210559 - RNA, 19 nt, Artificial Sequence
  Description of Artificial Sequence: Synthetic oligonucleotide
  Antisense strand to SEQ ID NO: 2210558
aacuaugaggcucauucau

SEQ ID NO: 2210560 - RNA, 19 nt, Artificial Sequence
  Description of Artificial Sequence: Synthetic oligonucleotide
  Sense strand starting at position 2897 of SEQ ID NO: 1883706
accagaauggugcauaucu

SEQ ID NO: 2210561 - RNA, 19 nt, Artificial Sequence
  Description of Artificial Sequence: Synthetic oligonucleotide
  Antisense strand to SEQ ID NO: 2210560
agauaugcaccauucuggu

SEQ ID NO: 2210562 - RNA, 19 nt, Artificial Sequence
  Description of Artificial Sequence: Synthetic oligonucleotide
  Sense strand starting at position 3855 of SEQ ID NO: 1883706
cagguaggucuauagguga

SEQ ID NO: 2210563 - RNA, 19 nt, Artificial Sequence
  Description of Artificial Sequence: Synthetic oligonucleotide
  Antisense strand to SEQ ID NO: 2210562
ucaccuauagaccuaccug

SEQ ID NO: 2210564 - RNA, 19 nt, Artificial Sequence
  Description of Artificial Sequence: Synthetic oligonucleotide
  Sense strand starting at position 551 of SEQ ID NO: 1883706
gcgauuucagguggugaca

SEQ ID NO: 2210565 - RNA, 19 nt, Artificial Sequence
  Description of Artificial Sequence: Synthetic oligonucleotide
  Antisense strand to SEQ ID NO: 2210564
ugucaccaccugaaaucgc

SEQ ID NO: 2210566 - RNA, 19 nt, Artificial Sequence
  Description of Artificial Sequence: Synthetic oligonucleotide
  Sense strand starting at position 2917 of SEQ ID NO: 1883706
ggagacauguagguacauu

SEQ ID NO: 2210567 - RNA, 19 nt, Artificial Sequence
  Description of Artificial Sequence: Synthetic oligonucleotide
  Antisense strand to SEQ ID NO: 2210566
aauguaccuacaugucucc

SEQ ID NO: 2210568 - RNA, 19 nt, Artificial Sequence
  Description of Artificial Sequence: Synthetic oligonucleotide
  Sense strand starting at position 550 of SEQ ID NO: 1883706
ggcgauuucagguggugac

SEQ ID NO: 2210569 - RNA, 19 nt, Artificial Sequence
  Description of Artificial Sequence: Synthetic oligonucleotide
  Antisense strand to SEQ ID NO: 2210568
gucaccaccugaaaucgcc

SEQ ID NO: 2210570 - RNA, 19 nt, Artificial Sequence
  Description of Artificial Sequence: Synthetic oligonucleotide
  Sense strand starting at position 2169 of SEQ ID NO: 1883706
gguuauugcagaugaggaa

SEQ ID NO: 2210571 - RNA, 19 nt, Artificial Sequence
  Description of Artificial Sequence: Synthetic oligonucleotide
  Antisense strand to SEQ ID NO: 2210570
uuccucaucugcaauaacc

SEQ ID NO: 2210572 - RNA, 19 nt, Artificial Sequence
  Description of Artificial Sequence: Synthetic oligonucleotide
  Sense strand starting at position 897 of SEQ ID NO: 1883706
acaggaaagccuugucaaa

SEQ ID NO: 2210573 - RNA, 19 nt, Artificial Sequence
  Description of Artificial Sequence: Synthetic oligonucleotide
  Antisense strand to SEQ ID NO: 2210572
uuugacaaggcuuuccugu

SEQ ID NO: 2210574 - RNA, 19 nt, Artificial Sequence
  Description of Artificial Sequence: Synthetic oligonucleotide
  Sense strand starting at position 3899 of SEQ ID NO: 1883706
cgaccuccaugauugauga

SEQ ID NO: 2210575 - RNA, 19 nt, Artificial Sequence
  Description of Artificial Sequence: Synthetic oligonucleotide
  Antisense strand to SEQ ID NO: 2210574
ucaucaaucauggaggucg

SEQ ID NO: 2210576 - RNA, 19 nt, Artificial Sequence
  Description of Artificial Sequence: Synthetic oligonucleotide
  Sense strand starting at position 2338 of SEQ ID NO: 1883706
ugagguaaauuagcagauu

SEQ ID NO: 2210577 - RNA, 19 nt, Artificial Sequence
  Description of Artificial Sequence: Synthetic oligonucleotide
  Antisense strand to SEQ ID NO: 2210576
aaucugcuaauuuaccuca

SEQ ID NO: 2210578 - RNA, 19 nt, Artificial Sequence
  Description of Artificial Sequence: Synthetic oligonucleotide
  Sense strand starting at position 3749 of SEQ ID NO: 1883706
uguugucuacuacagaacu

SEQ ID NO: 2210579 - RNA, 19 nt, Artificial Sequence
  Description of Artificial Sequence: Synthetic oligonucleotide
  Antisense strand to SEQ ID NO: 2210578
aguucuguaguagacaaca

SEQ ID NO: 2210580 - RNA, 19 nt, Artificial Sequence
  Description of Artificial Sequence: Synthetic oligonucleotide
  Sense strand starting at position 3964 of SEQ ID NO: 1883706
agugauaguccacaagcua

SEQ ID NO: 2210581 - RNA, 19 nt, Artificial Sequence
  Description of Artificial Sequence: Synthetic oligonucleotide
  Antisense strand to SEQ ID NO: 2210580
uagcuuguggacuaucacu

SEQ ID NO: 2210582 - RNA, 19 nt, Artificial Sequence
  Description of Artificial Sequence: Synthetic oligonucleotide
  Sense strand starting at position 3376 of SEQ ID NO: 1883706
aaucaauuugugugcagca

SEQ ID NO: 2210583 - RNA, 19 nt, Artificial Sequence
  Description of Artificial Sequence: Synthetic oligonucleotide
  Antisense strand to SEQ ID NO: 2210582
ugcugcacacaaauugauu

SEQ ID NO: 2210584 - RNA, 19 nt, Artificial Sequence
  Description of Artificial Sequence: Synthetic oligonucleotide
  Sense strand starting at position 2889 of SEQ ID NO: 1883706
uguuucucaccagaauggu

SEQ ID NO: 2210585 - RNA, 19 nt, Artificial Sequence
  Description of Artificial Sequence: Synthetic oligonucleotide
  Antisense strand to SEQ ID NO: 2210584
accauucuggugagaaaca

SEQ ID NO: 2210586 - RNA, 19 nt, Artificial Sequence
  Description of Artificial Sequence: Synthetic oligonucleotide
  Sense strand starting at position 2627 of SEQ ID NO: 1883706
gggauaugugggcacuagu

SEQ ID NO: 2210587 - RNA, 19 nt, Artificial Sequence
  Description of Artificial Sequence: Synthetic oligonucleotide
  Antisense strand to SEQ ID NO: 2210586
acuagugcccacauauccc

SEQ ID NO: 2210588 - RNA, 19 nt, Artificial Sequence
  Description of Artificial Sequence: Synthetic oligonucleotide
  Sense strand starting at position 3099 of SEQ ID NO: 1883706
acucaugugacaugugaag

SEQ ID NO: 2210589 - RNA, 19 nt, Artificial Sequence
  Description of Artificial Sequence: Synthetic oligonucleotide
  Antisense strand to SEQ ID NO: 2210588
cuucacaugucacaugagu

SEQ ID NO: 2210590 - RNA, 19 nt, Artificial Sequence
  Description of Artificial Sequence: Synthetic oligonucleotide
  Sense strand starting at position 1329 of SEQ ID NO: 1883706
uguggaagucuaugauaua

SEQ ID NO: 2210591 - RNA, 19 nt, Artificial Sequence
  Description of Artificial Sequence: Synthetic oligonucleotide
  Antisense strand to SEQ ID NO: 2210590
uauaucauagacuuccaca

SEQ ID NO: 2210592 - RNA, 19 nt, Artificial Sequence
  Description of Artificial Sequence: Synthetic oligonucleotide
  Sense strand starting at position 3034 of SEQ ID NO: 1883706
cagugagcaguaggaauaa

SEQ ID NO: 2210593 - RNA, 19 nt, Artificial Sequence
  Description of Artificial Sequence: Synthetic oligonucleotide
  Antisense strand to SEQ ID NO: 2210592
uuauuccuacugcucacug

SEQ ID NO: 2210594 - RNA, 19 nt, Artificial Sequence
  Description of Artificial Sequence: Synthetic oligonucleotide
  Sense strand starting at position 1457 of SEQ ID NO: 1883707
gggugugagauugaaagug

SEQ ID NO: 2210595 - RNA, 19 nt, Artificial Sequence
  Description of Artificial Sequence: Synthetic oligonucleotide
  Antisense strand to SEQ ID NO: 2210594
cacuuucaaucucacaccc

SEQ ID NO: 2210596 - RNA, 19 nt, Artificial Sequence
  Description of Artificial Sequence: Synthetic oligonucleotide
  Sense strand starting at position 3506 of SEQ ID NO: 1883707
ugagguguggcagagaaca

SEQ ID NO: 2210597 - RNA, 19 nt, Artificial Sequence
  Description of Artificial Sequence: Synthetic oligonucleotide
  Antisense strand to SEQ ID NO: 2210596
uguucucugccacaccuca

SEQ ID NO: 2210598 - RNA, 19 nt, Artificial Sequence
  Description of Artificial Sequence: Synthetic oligonucleotide
  Sense strand starting at position 1208 of SEQ ID NO: 1883707
gaauauguggucugcauuu

SEQ ID NO: 2210599 - RNA, 19 nt, Artificial Sequence
  Description of Artificial Sequence: Synthetic oligonucleotide
  Antisense strand to SEQ ID NO: 2210598
aaaugcagaccacauauuc

SEQ ID NO: 2210600 - RNA, 19 nt, Artificial Sequence
  Description of Artificial Sequence: Synthetic oligonucleotide
  Sense strand starting at position 1019 of SEQ ID NO: 1883707
gaguuaagucgugugcgaa

SEQ ID NO: 2210601 - RNA, 19 nt, Artificial Sequence
  Description of Artificial Sequence: Synthetic oligonucleotide
  Antisense strand to SEQ ID NO: 2210600
uucgcacacgacuuaacuc

SEQ ID NO: 2210602 - RNA, 19 nt, Artificial Sequence
  Description of Artificial Sequence: Synthetic oligonucleotide
  Sense strand starting at position 3823 of SEQ ID NO: 1883707
ugagcuagacaucauguca

SEQ ID NO: 2210603 - RNA, 19 nt, Artificial Sequence
  Description of Artificial Sequence: Synthetic oligonucleotide
  Antisense strand to SEQ ID NO: 2210602
ugacaugaugucuagcuca

SEQ ID NO: 2210604 - RNA, 19 nt, Artificial Sequence
  Description of Artificial Sequence: Synthetic oligonucleotide
  Sense strand starting at position 1961 of SEQ ID NO: 1883707
agucuaaacacuggguaga

SEQ ID NO: 2210605 - RNA, 19 nt, Artificial Sequence
  Description of Artificial Sequence: Synthetic oligonucleotide
  Antisense strand to SEQ ID NO: 2210604
ucuacccaguguuuagacu

SEQ ID NO: 2210606 - RNA, 19 nt, Artificial Sequence
  Description of Artificial Sequence: Synthetic oligonucleotide
  Sense strand starting at position 1450 of SEQ ID NO: 1883707
gggacaugggugugagauu

SEQ ID NO: 2210607 - RNA, 19 nt, Artificial Sequence
  Description of Artificial Sequence: Synthetic oligonucleotide
  Antisense strand to SEQ ID NO: 2210606
aaucucacacccauguccc

SEQ ID NO: 2210608 - RNA, 19 nt, Artificial Sequence
  Description of Artificial Sequence: Synthetic oligonucleotide
  Sense strand starting at position 3794 of SEQ ID NO: 1883707
acugacagaugcuuauuga

SEQ ID NO: 2210609 - RNA, 19 nt, Artificial Sequence
  Description of Artificial Sequence: Synthetic oligonucleotide
  Antisense strand to SEQ ID NO: 2210608
ucaauaagcaucugucagu

SEQ ID NO: 2210610 - RNA, 19 nt, Artificial Sequence
  Description of Artificial Sequence: Synthetic oligonucleotide
  Sense strand starting at position 1176 of SEQ ID NO: 1883707
gugauuggaguauaagcau

SEQ ID NO: 2210611 - RNA, 19 nt, Artificial Sequence
  Description of Artificial Sequence: Synthetic oligonucleotide
  Antisense strand to SEQ ID NO: 2210610
augcuuauacuccaaucac

SEQ ID NO: 2210612 - RNA, 19 nt, Artificial Sequence
  Description of Artificial Sequence: Synthetic oligonucleotide
  Sense strand starting at position 1924 of SEQ ID NO: 1883707
ugcagacuacuguacaauu

SEQ ID NO: 2210613 - RNA, 19 nt, Artificial Sequence
  Description of Artificial Sequence: Synthetic oligonucleotide
  Antisense strand to SEQ ID NO: 2210612
aauuguacaguagucugca

SEQ ID NO: 2210614 - RNA, 19 nt, Artificial Sequence
  Description of Artificial Sequence: Synthetic oligonucleotide
  Sense strand starting at position 2831 of SEQ ID NO: 1883707
aguauaaguccacaggcau

SEQ ID NO: 2210615 - RNA, 19 nt, Artificial Sequence
  Description of Artificial Sequence: Synthetic oligonucleotide
  Antisense strand to SEQ ID NO: 2210614
augccuguggacuuauacu

SEQ ID NO: 2210616 - RNA, 19 nt, Artificial Sequence
  Description of Artificial Sequence: Synthetic oligonucleotide
  Sense strand starting at position 3180 of SEQ ID NO: 1883707
ggucucugcagucaggaaa

SEQ ID NO: 2210617 - RNA, 19 nt, Artificial Sequence
  Description of Artificial Sequence: Synthetic oligonucleotide
  Antisense strand to SEQ ID NO: 2210616
uuuccugacugcagagacc

SEQ ID NO: 2210618 - RNA, 19 nt, Artificial Sequence
  Description of Artificial Sequence: Synthetic oligonucleotide
  Sense strand starting at position 389 of SEQ ID NO: 1883707
cuccuuuaagaaugagucu

SEQ ID NO: 2210619 - RNA, 19 nt, Artificial Sequence
  Description of Artificial Sequence: Synthetic oligonucleotide
  Antisense strand to SEQ ID NO: 2210618
agacucauucuuaaaggag

SEQ ID NO: 2210620 - RNA, 19 nt, Artificial Sequence
  Description of Artificial Sequence: Synthetic oligonucleotide
  Sense strand starting at position 3818 of SEQ ID NO: 1883707
ugcuuugagcuagacauca

SEQ ID NO: 2210621 - RNA, 19 nt, Artificial Sequence
  Description of Artificial Sequence: Synthetic oligonucleotide
  Antisense strand to SEQ ID NO: 2210620
ugaugucuagcucaaagca

SEQ ID NO: 2210622 - RNA, 19 nt, Artificial Sequence
  Description of Artificial Sequence: Synthetic oligonucleotide
  Sense strand starting at position 246 of SEQ ID NO: 1883707
ccugcaguccaagggaaau

SEQ ID NO: 2210623 - RNA, 19 nt, Artificial Sequence
  Description of Artificial Sequence: Synthetic oligonucleotide
  Antisense strand to SEQ ID NO: 2210622
auuucccuuggacugcagg

SEQ ID NO: 2210624 - RNA, 19 nt, Artificial Sequence
  Description of Artificial Sequence: Synthetic oligonucleotide
  Sense strand starting at position 1170 of SEQ ID NO: 1883707
aggagugugauuggaguau

SEQ ID NO: 2210625 - RNA, 19 nt, Artificial Sequence
  Description of Artificial Sequence: Synthetic oligonucleotide
  Antisense strand to SEQ ID NO: 2210624
auacuccaaucacacuccu

SEQ ID NO: 2210626 - RNA, 19 nt, Artificial Sequence
  Description of Artificial Sequence: Synthetic oligonucleotide
  Sense strand starting at position 1365 of SEQ ID NO: 1883707
gucuuugggaugugaggau

SEQ ID NO: 2210627 - RNA, 19 nt, Artificial Sequence
  Description of Artificial Sequence: Synthetic oligonucleotide
  Antisense strand to SEQ ID NO: 2210626
auccucacaucccaaagac

SEQ ID NO: 2210628 - RNA, 19 nt, Artificial Sequence
  Description of Artificial Sequence: Synthetic oligonucleotide
  Sense strand starting at position 1350 of SEQ ID NO: 1883707
ugagaaucuguguaugucu

SEQ ID NO: 2210629 - RNA, 19 nt, Artificial Sequence
  Description of Artificial Sequence: Synthetic oligonucleotide
  Antisense strand to SEQ ID NO: 2210628
agacauacacagauucuca

SEQ ID NO: 2210630 - RNA, 19 nt, Artificial Sequence
  Description of Artificial Sequence: Synthetic oligonucleotide
  Sense strand starting at position 3797 of SEQ ID NO: 1883707
gacagaugcuuauugaguu

SEQ ID NO: 2210631 - RNA, 19 nt, Artificial Sequence
  Description of Artificial Sequence: Synthetic oligonucleotide
  Antisense strand to SEQ ID NO: 2210630
aacucaauaagcaucuguc

SEQ ID NO: 2210632 - RNA, 19 nt, Artificial Sequence
  Description of Artificial Sequence: Synthetic oligonucleotide
  Sense strand starting at position 1594 of SEQ ID NO: 1883707
gagaguggucuguacuucu

SEQ ID NO: 2210633 - RNA, 19 nt, Artificial Sequence
  Description of Artificial Sequence: Synthetic oligonucleotide
  Antisense strand to SEQ ID NO: 2210632
agaaguacagaccacucuc

SEQ ID NO: 2210634 - RNA, 19 nt, Artificial Sequence
  Description of Artificial Sequence: Synthetic oligonucleotide
  Sense strand starting at position 1174 of SEQ ID NO: 1883707
gugugauuggaguauaagc

SEQ ID NO: 2210635 - RNA, 19 nt, Artificial Sequence
  Description of Artificial Sequence: Synthetic oligonucleotide
  Antisense strand to SEQ ID NO: 2210634
gcuuauacuccaaucacac

SEQ ID NO: 2210636 - RNA, 19 nt, Artificial Sequence
  Description of Artificial Sequence: Synthetic oligonucleotide
  Sense strand starting at position 1168 of SEQ ID NO: 1883707
uuaggagugugauuggagu

SEQ ID NO: 2210637 - RNA, 19 nt, Artificial Sequence
  Description of Artificial Sequence: Synthetic oligonucleotide
  Antisense strand to SEQ ID NO: 2210636
acuccaaucacacuccuaa

SEQ ID NO: 2210638 - RNA, 19 nt, Artificial Sequence
  Description of Artificial Sequence: Synthetic oligonucleotide
  Sense strand starting at position 2996 of SEQ ID NO: 1883707
gcugauaggauauguacuu

SEQ ID NO: 2210639 - RNA, 19 nt, Artificial Sequence
  Description of Artificial Sequence: Synthetic oligonucleotide
  Antisense strand to SEQ ID NO: 2210638
aaguacauauccuaucagc

SEQ ID NO: 2210640 - RNA, 19 nt, Artificial Sequence
  Description of Artificial Sequence: Synthetic oligonucleotide
  Sense strand starting at position 3002 of SEQ ID NO: 1883707
aggauauguacuugggcuu

SEQ ID NO: 2210641 - RNA, 19 nt, Artificial Sequence
  Description of Artificial Sequence: Synthetic oligonucleotide
  Antisense strand to SEQ ID NO: 2210640
aagcccaaguacauauccu

SEQ ID NO: 2210642 - RNA, 19 nt, Artificial Sequence
  Description of Artificial Sequence: Synthetic oligonucleotide
  Sense strand starting at position 1529 of SEQ ID NO: 1883707
uguugaaugugaguggauu

SEQ ID NO: 2210643 - RNA, 19 nt, Artificial Sequence
  Description of Artificial Sequence: Synthetic oligonucleotide
  Antisense strand to SEQ ID NO: 2210642
aauccacucacauucaaca

SEQ ID NO: 2210644 - RNA, 19 nt, Artificial Sequence
  Description of Artificial Sequence: Synthetic oligonucleotide
  Sense strand starting at position 1530 of SEQ ID NO: 1883707
guugaaugugaguggauuc

SEQ ID NO: 2210645 - RNA, 19 nt, Artificial Sequence
  Description of Artificial Sequence: Synthetic oligonucleotide
  Antisense strand to SEQ ID NO: 2210644
gaauccacucacauucaac

SEQ ID NO: 2210646 - RNA, 19 nt, Artificial Sequence
  Description of Artificial Sequence: Synthetic oligonucleotide
  Sense strand starting at position 1592 of SEQ ID NO: 1883707
gggagaguggucuguacuu

SEQ ID NO: 2210647 - RNA, 19 nt, Artificial Sequence
  Description of Artificial Sequence: Synthetic oligonucleotide
  Antisense strand to SEQ ID NO: 2210646
aaguacagaccacucuccc

SEQ ID NO: 2210648 - RNA, 19 nt, Artificial Sequence
  Description of Artificial Sequence: Synthetic oligonucleotide
  Sense strand starting at position 1347 of SEQ ID NO: 1883707
guuugagaaucuguguaug

SEQ ID NO: 2210649 - RNA, 19 nt, Artificial Sequence
  Description of Artificial Sequence: Synthetic oligonucleotide
  Antisense strand to SEQ ID NO: 2210648
cauacacagauucucaaac

SEQ ID NO: 2210650 - RNA, 19 nt, Artificial Sequence
  Description of Artificial Sequence: Synthetic oligonucleotide
  Sense strand starting at position 618 of SEQ ID NO: 1883707
cccugucuccuccaaguuu

SEQ ID NO: 2210651 - RNA, 19 nt, Artificial Sequence
  Description of Artificial Sequence: Synthetic oligonucleotide
  Antisense strand to SEQ ID NO: 2210650
aaacuuggaggagacaggg

SEQ ID NO: 2210652 - RNA, 19 nt, Artificial Sequence
  Description of Artificial Sequence: Synthetic oligonucleotide
  Sense strand starting at position 862 of SEQ ID NO: 1883707
uguugagguuccuuacuca

SEQ ID NO: 2210653 - RNA, 19 nt, Artificial Sequence
  Description of Artificial Sequence: Synthetic oligonucleotide
  Antisense strand to SEQ ID NO: 2210652
ugaguaaggaaccucaaca

SEQ ID NO: 2210654 - RNA, 19 nt, Artificial Sequence
  Description of Artificial Sequence: Synthetic oligonucleotide
  Sense strand starting at position 1349 of SEQ ID NO: 1883707
uugagaaucuguguauguc

SEQ ID NO: 2210655 - RNA, 19 nt, Artificial Sequence
  Description of Artificial Sequence: Synthetic oligonucleotide
  Antisense strand to SEQ ID NO: 2210654
gacauacacagauucucaa

SEQ ID NO: 2210656 - RNA, 19 nt, Artificial Sequence
  Description of Artificial Sequence: Synthetic oligonucleotide
  Sense strand starting at position 1206 of SEQ ID NO: 1883707
uggaauauguggucugcau

SEQ ID NO: 2210657 - RNA, 19 nt, Artificial Sequence
  Description of Artificial Sequence: Synthetic oligonucleotide
  Antisense strand to SEQ ID NO: 2210656
augcagaccacauauucca

SEQ ID NO: 2210658 - RNA, 19 nt, Artificial Sequence
  Description of Artificial Sequence: Synthetic oligonucleotide
  Sense strand starting at position 1986 of SEQ ID NO: 1883707
ggagguguccucuggucca

SEQ ID NO: 2210659 - RNA, 19 nt, Artificial Sequence
  Description of Artificial Sequence: Synthetic oligonucleotide
  Antisense strand to SEQ ID NO: 2210658
uggaccagaggacaccucc

SEQ ID NO: 2210660 - RNA, 19 nt, Artificial Sequence
  Description of Artificial Sequence: Synthetic oligonucleotide
  Sense strand starting at position 1358 of SEQ ID NO: 1883707
uguguaugucuuugggaug

SEQ ID NO: 2210661 - RNA, 19 nt, Artificial Sequence
  Description of Artificial Sequence: Synthetic oligonucleotide
  Antisense strand to SEQ ID NO: 2210660
caucccaaagacauacaca

SEQ ID NO: 2210662 - RNA, 19 nt, Artificial Sequence
  Description of Artificial Sequence: Synthetic oligonucleotide
  Sense strand starting at position 1009 of SEQ ID NO: 1883707
guguacaucugaguuaagu

SEQ ID NO: 2210663 - RNA, 19 nt, Artificial Sequence
  Description of Artificial Sequence: Synthetic oligonucleotide
  Antisense strand to SEQ ID NO: 2210662
acuuaacucagauguacac

SEQ ID NO: 2210664 - RNA, 19 nt, Artificial Sequence
  Description of Artificial Sequence: Synthetic oligonucleotide
  Sense strand starting at position 1601 of SEQ ID NO: 1883707
gucuguacuucucuacuca

SEQ ID NO: 2210665 - RNA, 19 nt, Artificial Sequence
  Description of Artificial Sequence: Synthetic oligonucleotide
  Antisense strand to SEQ ID NO: 2210664
ugaguagagaaguacagac

SEQ ID NO: 2210666 - RNA, 19 nt, Artificial Sequence
  Description of Artificial Sequence: Synthetic oligonucleotide
  Sense strand starting at position 1537 of SEQ ID NO: 1883707
gugaguggauucuugcacu

SEQ ID NO: 2210667 - RNA, 19 nt, Artificial Sequence
  Description of Artificial Sequence: Synthetic oligonucleotide
  Antisense strand to SEQ ID NO: 2210666
agugcaagaauccacucac

SEQ ID NO: 2210668 - RNA, 19 nt, Artificial Sequence
  Description of Artificial Sequence: Synthetic oligonucleotide
  Sense strand starting at position 1389 of SEQ ID NO: 1883707
gaguguuccaguugugagg

SEQ ID NO: 2210669 - RNA, 19 nt, Artificial Sequence
  Description of Artificial Sequence: Synthetic oligonucleotide
  Antisense strand to SEQ ID NO: 2210668
ccucacaacuggaacacuc

SEQ ID NO: 2210670 - RNA, 19 nt, Artificial Sequence
  Description of Artificial Sequence: Synthetic oligonucleotide
  Sense strand starting at position 1357 of SEQ ID NO: 1883707
cuguguaugucuuugggau

SEQ ID NO: 2210671 - RNA, 19 nt, Artificial Sequence
  Description of Artificial Sequence: Synthetic oligonucleotide
  Antisense strand to SEQ ID NO: 2210670
aucccaaagacauacacag

SEQ ID NO: 2210672 - RNA, 19 nt, Artificial Sequence
  Description of Artificial Sequence: Synthetic oligonucleotide
  Sense strand starting at position 1197 of SEQ ID NO: 1883707
agguguguuuggaauaugu

SEQ ID NO: 2210673 - RNA, 19 nt, Artificial Sequence
  Description of Artificial Sequence: Synthetic oligonucleotide
  Antisense strand to SEQ ID NO: 2210672
acauauuccaaacacaccu

SEQ ID NO: 2210674 - RNA, 19 nt, Artificial Sequence
  Description of Artificial Sequence: Synthetic oligonucleotide
  Sense strand starting at position 2869 of SEQ ID NO: 1883708
ccaauagugccgucaagcu

SEQ ID NO: 2210675 - RNA, 19 nt, Artificial Sequence
  Description of Artificial Sequence: Synthetic oligonucleotide
  Antisense strand to SEQ ID NO: 2210674
agcuugacggcacuauugg

SEQ ID NO: 2210676 - RNA, 19 nt, Artificial Sequence
  Description of Artificial Sequence: Synthetic oligonucleotide
  Sense strand starting at position 794 of SEQ ID NO: 1883708
gaaauaagauguucuugau

SEQ ID NO: 2210677 - RNA, 19 nt, Artificial Sequence
  Description of Artificial Sequence: Synthetic oligonucleotide
  Antisense strand to SEQ ID NO: 2210676
aucaagaacaucuuauuuc

SEQ ID NO: 2210678 - RNA, 19 nt, Artificial Sequence
  Description of Artificial Sequence: Synthetic oligonucleotide
  Sense strand starting at position 3029 of SEQ ID NO: 1883708
gugguuaauuucuuggagu

SEQ ID NO: 2210679 - RNA, 19 nt, Artificial Sequence
  Description of Artificial Sequence: Synthetic oligonucleotide
  Antisense strand to SEQ ID NO: 2210678
acuccaagaaauuaaccac

SEQ ID NO: 2210680 - RNA, 19 nt, Artificial Sequence
  Description of Artificial Sequence: Synthetic oligonucleotide
  Sense strand starting at position 101 of SEQ ID NO: 1883708
guaucugaccaacaacagu

SEQ ID NO: 2210681 - RNA, 19 nt, Artificial Sequence
  Description of Artificial Sequence: Synthetic oligonucleotide
  Antisense strand to SEQ ID NO: 2210680
acuguuguuggucagauac

SEQ ID NO: 2210682 - RNA, 19 nt, Artificial Sequence
  Description of Artificial Sequence: Synthetic oligonucleotide
  Sense strand starting at position 1845 of SEQ ID NO: 1883708
ugguuaucccaaugcauuu

SEQ ID NO: 2210683 - RNA, 19 nt, Artificial Sequence
  Description of Artificial Sequence: Synthetic oligonucleotide
  Antisense strand to SEQ ID NO: 2210682
aaaugcauugggauaacca

SEQ ID NO: 2210684 - RNA, 19 nt, Artificial Sequence
  Description of Artificial Sequence: Synthetic oligonucleotide
  Sense strand starting at position 2898 of SEQ ID NO: 1883708
guaucuuuaggaugauaaa

SEQ ID NO: 2210685 - RNA, 19 nt, Artificial Sequence
  Description of Artificial Sequence: Synthetic oligonucleotide
  Antisense strand to SEQ ID NO: 2210684
uuuaucauccuaaagauac

SEQ ID NO: 2210686 - RNA, 19 nt, Artificial Sequence
  Description of Artificial Sequence: Synthetic oligonucleotide
  Sense strand starting at position 522 of SEQ ID NO: 1883708
cugugucaagucguuucau

SEQ ID NO: 2210687 - RNA, 19 nt, Artificial Sequence
  Description of Artificial Sequence: Synthetic oligonucleotide
  Antisense strand to SEQ ID NO: 2210686
augaaacgacuugacacag

SEQ ID NO: 2210688 - RNA, 19 nt, Artificial Sequence
  Description of Artificial Sequence: Synthetic oligonucleotide
  Sense strand starting at position 18 of SEQ ID NO: 1883708
augaaagguaguuagcaau

SEQ ID NO: 2210689 - RNA, 19 nt, Artificial Sequence
  Description of Artificial Sequence: Synthetic oligonucleotide
  Antisense strand to SEQ ID NO: 2210688
auugcuaacuaccuuucau

SEQ ID NO: 2210690 - RNA, 19 nt, Artificial Sequence
  Description of Artificial Sequence: Synthetic oligonucleotide
  Sense strand starting at position 1798 of SEQ ID NO: 1883708
ucucuuaugggacaguuau

SEQ ID NO: 2210691 - RNA, 19 nt, Artificial Sequence
  Description of Artificial Sequence: Synthetic oligonucleotide
  Antisense strand to SEQ ID NO: 2210690
auaacugucccauaagaga

SEQ ID NO: 2210692 - RNA, 19 nt, Artificial Sequence
  Description of Artificial Sequence: Synthetic oligonucleotide
  Sense strand starting at position 1888 of SEQ ID NO: 1883708
gaugccagugaugacaauu

SEQ ID NO: 2210693 - RNA, 19 nt, Artificial Sequence
  Description of Artificial Sequence: Synthetic oligonucleotide
  Antisense strand to SEQ ID NO: 2210692
aauugucaucacuggcauc

SEQ ID NO: 2210694 - RNA, 19 nt, Artificial Sequence
  Description of Artificial Sequence: Synthetic oligonucleotide
  Sense strand starting at position 44 of SEQ ID NO: 1883708
ggaagauauuggguuccau

SEQ ID NO: 2210695 - RNA, 19 nt, Artificial Sequence
  Description of Artificial Sequence: Synthetic oligonucleotide
  Antisense strand to SEQ ID NO: 2210694
auggaacccaauaucuucc

SEQ ID NO: 2210696 - RNA, 19 nt, Artificial Sequence
  Description of Artificial Sequence: Synthetic oligonucleotide
  Sense strand starting at position 1350 of SEQ ID NO: 1883708
agguguacuauuuguaucu

SEQ ID NO: 2210697 - RNA, 19 nt, Artificial Sequence
  Description of Artificial Sequence: Synthetic oligonucleotide
  Antisense strand to SEQ ID NO: 2210696
agauacaaauaguacaccu

SEQ ID NO: 2210698 - RNA, 19 nt, Artificial Sequence
  Description of Artificial Sequence: Synthetic oligonucleotide
  Sense strand starting at position 2397 of SEQ ID NO: 1883708
uguuguauuucuuccuaau

SEQ ID NO: 2210699 - RNA, 19 nt, Artificial Sequence
  Description of Artificial Sequence: Synthetic oligonucleotide
  Antisense strand to SEQ ID NO: 2210698
auuaggaagaaauacaaca

SEQ ID NO: 2210700 - RNA, 19 nt, Artificial Sequence
  Description of Artificial Sequence: Synthetic oligonucleotide
  Sense strand starting at position 3846 of SEQ ID NO: 1883708
ugacuaugucuacauaucu

SEQ ID NO: 2210701 - RNA, 19 nt, Artificial Sequence
  Description of Artificial Sequence: Synthetic oligonucleotide
  Antisense strand to SEQ ID NO: 2210700
agauauguagacauaguca

SEQ ID NO: 2210702 - RNA, 19 nt, Artificial Sequence
  Description of Artificial Sequence: Synthetic oligonucleotide
  Sense strand starting at position 2877 of SEQ ID NO: 1883708
gccgucaagcuguccuaua

SEQ ID NO: 2210703 - RNA, 19 nt, Artificial Sequence
  Description of Artificial Sequence: Synthetic oligonucleotide
  Antisense strand to SEQ ID NO: 2210702
uauaggacagcuugacggc

SEQ ID NO: 2210704 - RNA, 19 nt, Artificial Sequence
  Description of Artificial Sequence: Synthetic oligonucleotide
  Sense strand starting at position 3385 of SEQ ID NO: 1883708
gaggaaguaucauucuuua

SEQ ID NO: 2210705 - RNA, 19 nt, Artificial Sequence
  Description of Artificial Sequence: Synthetic oligonucleotide
  Antisense strand to SEQ ID NO: 2210704
uaaagaaugauacuuccuc

SEQ ID NO: 2210706 - RNA, 19 nt, Artificial Sequence
  Description of Artificial Sequence: Synthetic oligonucleotide
  Sense strand starting at position 1701 of SEQ ID NO: 1883708
aacuauuagucuuugagag

SEQ ID NO: 2210707 - RNA, 19 nt, Artificial Sequence
  Description of Artificial Sequence: Synthetic oligonucleotide
  Antisense strand to SEQ ID NO: 2210706
cucucaaagacuaauaguu

SEQ ID NO: 2210708 - RNA, 19 nt, Artificial Sequence
  Description of Artificial Sequence: Synthetic oligonucleotide
  Sense strand starting at position 228 of SEQ ID NO: 1883708
gaagucuuagaauggugga

SEQ ID NO: 2210709 - RNA, 19 nt, Artificial Sequence
  Description of Artificial Sequence: Synthetic oligonucleotide
  Antisense strand to SEQ ID NO: 2210708
uccaccauucuaagacuuc

SEQ ID NO: 2210710 - RNA, 19 nt, Artificial Sequence
  Description of Artificial Sequence: Synthetic oligonucleotide
  Sense strand starting at position 1971 of SEQ ID NO: 1883708
ccacgagucacaugaagaa

SEQ ID NO: 2210711 - RNA, 19 nt, Artificial Sequence
  Description of Artificial Sequence: Synthetic oligonucleotide
  Antisense strand to SEQ ID NO: 2210710
uucuucaugugacucgugg

SEQ ID NO: 2210712 - RNA, 19 nt, Artificial Sequence
  Description of Artificial Sequence: Synthetic oligonucleotide
  Sense strand starting at position 1351 of SEQ ID NO: 1883708
gguguacuauuuguaucuu

SEQ ID NO: 2210713 - RNA, 19 nt, Artificial Sequence
  Description of Artificial Sequence: Synthetic oligonucleotide
  Antisense strand to SEQ ID NO: 2210712
aagauacaaauaguacacc

SEQ ID NO: 2210714 - RNA, 19 nt, Artificial Sequence
  Description of Artificial Sequence: Synthetic oligonucleotide
  Sense strand starting at position 3280 of SEQ ID NO: 1883708
cagugaaaccuauguagag

SEQ ID NO: 2210715 - RNA, 19 nt, Artificial Sequence
  Description of Artificial Sequence: Synthetic oligonucleotide
  Antisense strand to SEQ ID NO: 2210714
cucuacauagguuucacug

SEQ ID NO: 2210716 - RNA, 19 nt, Artificial Sequence
  Description of Artificial Sequence: Synthetic oligonucleotide
  Sense strand starting at position 1810 of SEQ ID NO: 1883708
caguuaugggcccaaugau

SEQ ID NO: 2210717 - RNA, 19 nt, Artificial Sequence
  Description of Artificial Sequence: Synthetic oligonucleotide
  Antisense strand to SEQ ID NO: 2210716
aucauugggcccauaacug

SEQ ID NO: 2210718 - RNA, 19 nt, Artificial Sequence
  Description of Artificial Sequence: Synthetic oligonucleotide
  Sense strand starting at position 691 of SEQ ID NO: 1883708
ucaucaauuugguauuugu

SEQ ID NO: 2210719 - RNA, 19 nt, Artificial Sequence
  Description of Artificial Sequence: Synthetic oligonucleotide
  Antisense strand to SEQ ID NO: 2210718
acaaauaccaaauugauga

SEQ ID NO: 2210720 - RNA, 19 nt, Artificial Sequence
  Description of Artificial Sequence: Synthetic oligonucleotide
  Sense strand starting at position 872 of SEQ ID NO: 1883708
ggucccauaagguaguaau

SEQ ID NO: 2210721 - RNA, 19 nt, Artificial Sequence
  Description of Artificial Sequence: Synthetic oligonucleotide
  Antisense strand to SEQ ID NO: 2210720
auuacuaccuuaugggacc

SEQ ID NO: 2210722 - RNA, 19 nt, Artificial Sequence
  Description of Artificial Sequence: Synthetic oligonucleotide
  Sense strand starting at position 3581 of SEQ ID NO: 1883708
ggaauugaauucuuuccuu

SEQ ID NO: 2210723 - RNA, 19 nt, Artificial Sequence
  Description of Artificial Sequence: Synthetic oligonucleotide
  Antisense strand to SEQ ID NO: 2210722
aaggaaagaauucaauucc

SEQ ID NO: 2210724 - RNA, 19 nt, Artificial Sequence
  Description of Artificial Sequence: Synthetic oligonucleotide
  Sense strand starting at position 2604 of SEQ ID NO: 1883708
augagauaaugcuuccaug

SEQ ID NO: 2210725 - RNA, 19 nt, Artificial Sequence
  Description of Artificial Sequence: Synthetic oligonucleotide
  Antisense strand to SEQ ID NO: 2210724
cauggaagcauuaucucau

SEQ ID NO: 2210726 - RNA, 19 nt, Artificial Sequence
  Description of Artificial Sequence: Synthetic oligonucleotide
  Sense strand starting at position 3223 of SEQ ID NO: 1883708
gcagauggauuacccaauu

SEQ ID NO: 2210727 - RNA, 19 nt, Artificial Sequence
  Description of Artificial Sequence: Synthetic oligonucleotide
  Antisense strand to SEQ ID NO: 2210726
aauuggguaauccaucugc

SEQ ID NO: 2210728 - RNA, 19 nt, Artificial Sequence
  Description of Artificial Sequence: Synthetic oligonucleotide
  Sense strand starting at position 2329 of SEQ ID NO: 1883708
cuguucuauggguacauga

SEQ ID NO: 2210729 - RNA, 19 nt, Artificial Sequence
  Description of Artificial Sequence: Synthetic oligonucleotide
  Antisense strand to SEQ ID NO: 2210728
ucauguacccauagaacag

SEQ ID NO: 2210730 - RNA, 19 nt, Artificial Sequence
  Description of Artificial Sequence: Synthetic oligonucleotide
  Sense strand starting at position 2331 of SEQ ID NO: 1883708
guucuauggguacaugauc

SEQ ID NO: 2210731 - RNA, 19 nt, Artificial Sequence
  Description of Artificial Sequence: Synthetic oligonucleotide
  Antisense strand to SEQ ID NO: 2210730
gaucauguacccauagaac

SEQ ID NO: 2210732 - RNA, 19 nt, Artificial Sequence
  Description of Artificial Sequence: Synthetic oligonucleotide
  Sense strand starting at position 2063 of SEQ ID NO: 1883708
guccuauggguacaugauc

SEQ ID NO: 2210733 - RNA, 19 nt, Artificial Sequence
  Description of Artificial Sequence: Synthetic oligonucleotide
  Antisense strand to SEQ ID NO: 2210732
gaucauguacccauaggac

SEQ ID NO: 2210734 - RNA, 19 nt, Artificial Sequence
  Description of Artificial Sequence: Synthetic oligonucleotide
  Sense strand starting at position 2978 of SEQ ID NO: 1883708
agucauagggagugauacu

SEQ ID NO: 2210735 - RNA, 19 nt, Artificial Sequence
  Description of Artificial Sequence: Synthetic oligonucleotide
  Antisense strand to SEQ ID NO: 2210734
aguaucacucccuaugacu

SEQ ID NO: 2210736 - RNA, 19 nt, Artificial Sequence
  Description of Artificial Sequence: Synthetic oligonucleotide
  Sense strand starting at position 2516 of SEQ ID NO: 1883708
agaguuggugcucaaauag

SEQ ID NO: 2210737 - RNA, 19 nt, Artificial Sequence
  Description of Artificial Sequence: Synthetic oligonucleotide
  Antisense strand to SEQ ID NO: 2210736
cuauuugagcaccaacucu

SEQ ID NO: 2210738 - RNA, 19 nt, Artificial Sequence
  Description of Artificial Sequence: Synthetic oligonucleotide
  Sense strand starting at position 634 of SEQ ID NO: 1883708
acauguuuacuugacagca

SEQ ID NO: 2210739 - RNA, 19 nt, Artificial Sequence
  Description of Artificial Sequence: Synthetic oligonucleotide
  Antisense strand to SEQ ID NO: 2210738
ugcugucaaguaaacaugu

SEQ ID NO: 2210740 - RNA, 19 nt, Artificial Sequence
  Description of Artificial Sequence: Synthetic oligonucleotide
  Sense strand starting at position 260 of SEQ ID NO: 1883708
gggaccuacuuguuuacaa

SEQ ID NO: 2210741 - RNA, 19 nt, Artificial Sequence
  Description of Artificial Sequence: Synthetic oligonucleotide
  Antisense strand to SEQ ID NO: 2210740
uuguaaacaaguagguccc

SEQ ID NO: 2210742 - RNA, 19 nt, Artificial Sequence
  Description of Artificial Sequence: Synthetic oligonucleotide
  Sense strand starting at position 261 of SEQ ID NO: 1883708
ggaccuacuuguuuacaag

SEQ ID NO: 2210743 - RNA, 19 nt, Artificial Sequence
  Description of Artificial Sequence: Synthetic oligonucleotide
  Antisense strand to SEQ ID NO: 2210742
cuuguaaacaaguaggucc

SEQ ID NO: 2210744 - RNA, 19 nt, Artificial Sequence
  Description of Artificial Sequence: Synthetic oligonucleotide
  Sense strand starting at position 1343 of SEQ ID NO: 1883708
ccuauuaagguguacuauu

SEQ ID NO: 2210745 - RNA, 19 nt, Artificial Sequence
  Description of Artificial Sequence: Synthetic oligonucleotide
  Antisense strand to SEQ ID NO: 2210744
aauaguacaccuuaauagg

SEQ ID NO: 2210746 - RNA, 19 nt, Artificial Sequence
  Description of Artificial Sequence: Synthetic oligonucleotide
  Sense strand starting at position 731 of SEQ ID NO: 1883708
gacuguuugaggcaguaga

SEQ ID NO: 2210747 - RNA, 19 nt, Artificial Sequence
  Description of Artificial Sequence: Synthetic oligonucleotide
  Antisense strand to SEQ ID NO: 2210746
ucuacugccucaaacaguc

SEQ ID NO: 2210748 - RNA, 19 nt, Artificial Sequence
  Description of Artificial Sequence: Synthetic oligonucleotide
  Sense strand starting at position 3472 of SEQ ID NO: 1883708
uguacugaugcuuagaacu

SEQ ID NO: 2210749 - RNA, 19 nt, Artificial Sequence
  Description of Artificial Sequence: Synthetic oligonucleotide
  Antisense strand to SEQ ID NO: 2210748
aguucuaagcaucaguaca

SEQ ID NO: 2210750 - RNA, 19 nt, Artificial Sequence
  Description of Artificial Sequence: Synthetic oligonucleotide
  Sense strand starting at position 2531 of SEQ ID NO: 1883708
auaguugcugaauggaaua

SEQ ID NO: 2210751 - RNA, 19 nt, Artificial Sequence
  Description of Artificial Sequence: Synthetic oligonucleotide
  Antisense strand to SEQ ID NO: 2210750
uauuccauucagcaacuau

SEQ ID NO: 2210752 - RNA, 19 nt, Artificial Sequence
  Description of Artificial Sequence: Synthetic oligonucleotide
  Sense strand starting at position 3843 of SEQ ID NO: 1883708
cuaugacuaugucuacaua

SEQ ID NO: 2210753 - RNA, 19 nt, Artificial Sequence
  Description of Artificial Sequence: Synthetic oligonucleotide
  Antisense strand to SEQ ID NO: 2210752
uauguagacauagucauag

SEQ ID NO: 2210754 - RNA, 19 nt, Artificial Sequence
  Description of Artificial Sequence: Synthetic oligonucleotide
  Sense strand starting at position 2740 of SEQ ID NO: 1883709
uugugucggcggguaauga

SEQ ID NO: 2210755 - RNA, 19 nt, Artificial Sequence
  Description of Artificial Sequence: Synthetic oligonucleotide
  Antisense strand to SEQ ID NO: 2210754
ucauuacccgccgacacaa

SEQ ID NO: 2210756 - RNA, 19 nt, Artificial Sequence
  Description of Artificial Sequence: Synthetic oligonucleotide
  Sense strand starting at position 3198 of SEQ ID NO: 1883709
cugagaagaccaugcugaa

SEQ ID NO: 2210757 - RNA, 19 nt, Artificial Sequence
  Description of Artificial Sequence: Synthetic oligonucleotide
  Antisense strand to SEQ ID NO: 2210756
uucagcauggucuucucag

SEQ ID NO: 2210758 - RNA, 19 nt, Artificial Sequence
  Description of Artificial Sequence: Synthetic oligonucleotide
  Sense strand starting at position 3553 of SEQ ID NO: 1883709
cagucuauuggguaaauac

SEQ ID NO: 2210759 - RNA, 19 nt, Artificial Sequence
  Description of Artificial Sequence: Synthetic oligonucleotide
  Antisense strand to SEQ ID NO: 2210758
guauuuacccaauagacug

SEQ ID NO: 2210760 - RNA, 19 nt, Artificial Sequence
  Description of Artificial Sequence: Synthetic oligonucleotide
  Sense strand starting at position 3822 of SEQ ID NO: 1883709
gagucuccucccuaggaca

SEQ ID NO: 2210761 - RNA, 19 nt, Artificial Sequence
  Description of Artificial Sequence: Synthetic oligonucleotide
  Antisense strand to SEQ ID NO: 2210760
uguccuagggaggagacuc

SEQ ID NO: 2210762 - RNA, 19 nt, Artificial Sequence
  Description of Artificial Sequence: Synthetic oligonucleotide
  Sense strand starting at position 3785 of SEQ ID NO: 1883709
ccacgugcccggcugaauu

SEQ ID NO: 2210763 - RNA, 19 nt, Artificial Sequence
  Description of Artificial Sequence: Synthetic oligonucleotide
  Antisense strand to SEQ ID NO: 2210762
aauucagccgggcacgugg

SEQ ID NO: 2210764 - RNA, 19 nt, Artificial Sequence
  Description of Artificial Sequence: Synthetic oligonucleotide
  Sense strand starting at position 3957 of SEQ ID NO: 1883709
cacauagacuucuuggagu

SEQ ID NO: 2210765 - RNA, 19 nt, Artificial Sequence
  Description of Artificial Sequence: Synthetic oligonucleotide
  Antisense strand to SEQ ID NO: 2210764
acuccaagaagucuaugug

SEQ ID NO: 2210766 - RNA, 19 nt, Artificial Sequence
  Description of Artificial Sequence: Synthetic oligonucleotide
  Sense strand starting at position 1508 of SEQ ID NO: 1883709
uguuuagguagggaguauu

SEQ ID NO: 2210767 - RNA, 19 nt, Artificial Sequence
  Description of Artificial Sequence: Synthetic oligonucleotide
  Antisense strand to SEQ ID NO: 2210766
aauacucccuaccuaaaca

SEQ ID NO: 2210768 - RNA, 19 nt, Artificial Sequence
  Description of Artificial Sequence: Synthetic oligonucleotide
  Sense strand starting at position 1723 of SEQ ID NO: 1883709
acuggucacccgcagagaa

SEQ ID NO: 2210769 - RNA, 19 nt, Artificial Sequence
  Description of Artificial Sequence: Synthetic oligonucleotide
  Antisense strand to SEQ ID NO: 2210768
uucucugcgggugaccagu

SEQ ID NO: 2210770 - RNA, 19 nt, Artificial Sequence
  Description of Artificial Sequence: Synthetic oligonucleotide
  Sense strand starting at position 1653 of SEQ ID NO: 1883709
ggcuucguuccggccgaaa

SEQ ID NO: 2210771 - RNA, 19 nt, Artificial Sequence
  Description of Artificial Sequence: Synthetic oligonucleotide
  Antisense strand to SEQ ID NO: 2210770
uuucggccggaacgaagcc

SEQ ID NO: 2210772 - RNA, 19 nt, Artificial Sequence
  Description of Artificial Sequence: Synthetic oligonucleotide
  Sense strand starting at position 3797 of SEQ ID NO: 1883709
cugaauugugaauaucggu

SEQ ID NO: 2210773 - RNA, 19 nt, Artificial Sequence
  Description of Artificial Sequence: Synthetic oligonucleotide
  Antisense strand to SEQ ID NO: 2210772
accgauauucacaauucag

SEQ ID NO: 2210774 - RNA, 19 nt, Artificial Sequence
  Description of Artificial Sequence: Synthetic oligonucleotide
  Sense strand starting at position 3552 of SEQ ID NO: 1883709
ucagucuauuggguaaaua

SEQ ID NO: 2210775 - RNA, 19 nt, Artificial Sequence
  Description of Artificial Sequence: Synthetic oligonucleotide
  Antisense strand to SEQ ID NO: 2210774
uauuuacccaauagacuga

SEQ ID NO: 2210776 - RNA, 19 nt, Artificial Sequence
  Description of Artificial Sequence: Synthetic oligonucleotide
  Sense strand starting at position 3680 of SEQ ID NO: 1883709
cccagaguucuccaagcac

SEQ ID NO: 2210777 - RNA, 19 nt, Artificial Sequence
  Description of Artificial Sequence: Synthetic oligonucleotide
  Antisense strand to SEQ ID NO: 2210776
gugcuuggagaacucuggg

SEQ ID NO: 2210778 - RNA, 19 nt, Artificial Sequence
  Description of Artificial Sequence: Synthetic oligonucleotide
  Sense strand starting at position 1345 of SEQ ID NO: 1883709
uuccaaagccgaggagauu

SEQ ID NO: 2210779 - RNA, 19 nt, Artificial Sequence
  Description of Artificial Sequence: Synthetic oligonucleotide
  Antisense strand to SEQ ID NO: 2210778
aaucuccucggcuuuggaa

SEQ ID NO: 2210780 - RNA, 19 nt, Artificial Sequence
  Description of Artificial Sequence: Synthetic oligonucleotide
  Sense strand starting at position 1554 of SEQ ID NO: 1883709
acgaguuagcgggcgcauu

SEQ ID NO: 2210781 - RNA, 19 nt, Artificial Sequence
  Description of Artificial Sequence: Synthetic oligonucleotide
  Antisense strand to SEQ ID NO: 2210780
aaugcgcccgcuaacucgu

SEQ ID NO: 2210782 - RNA, 19 nt, Artificial Sequence
  Description of Artificial Sequence: Synthetic oligonucleotide
  Sense strand starting at position 1656 of SEQ ID NO: 1883709
uucguuccggccgaaauuu

SEQ ID NO: 2210783 - RNA, 19 nt, Artificial Sequence
  Description of Artificial Sequence: Synthetic oligonucleotide
  Antisense strand to SEQ ID NO: 2210782
aaauuucggccggaacgaa

SEQ ID NO: 2210784 - RNA, 19 nt, Artificial Sequence
  Description of Artificial Sequence: Synthetic oligonucleotide
  Sense strand starting at position 1506 of SEQ ID NO: 1883709
uuuguuuagguagggagua

SEQ ID NO: 2210785 - RNA, 19 nt, Artificial Sequence
  Description of Artificial Sequence: Synthetic oligonucleotide
  Antisense strand to SEQ ID NO: 2210784
uacucccuaccuaaacaaa

SEQ ID NO: 2210786 - RNA, 19 nt, Artificial Sequence
  Description of Artificial Sequence: Synthetic oligonucleotide
  Sense strand starting at position 3908 of SEQ ID NO: 1883709
uaaauaucugugggugguu

SEQ ID NO: 2210787 - RNA, 19 nt, Artificial Sequence
  Description of Artificial Sequence: Synthetic oligonucleotide
  Antisense strand to SEQ ID NO: 2210786
aaccacccacagauauuua

SEQ ID NO: 2210788 - RNA, 19 nt, Artificial Sequence
  Description of Artificial Sequence: Synthetic oligonucleotide
  Sense strand starting at position 1464 of SEQ ID NO: 1883709
ggguugguuuguuugggau

SEQ ID NO: 2210789 - RNA, 19 nt, Artificial Sequence
  Description of Artificial Sequence: Synthetic oligonucleotide
  Antisense strand to SEQ ID NO: 2210788
aucccaaacaaaccaaccc

SEQ ID NO: 2210790 - RNA, 19 nt, Artificial Sequence
  Description of Artificial Sequence: Synthetic oligonucleotide
  Sense strand starting at position 3805 of SEQ ID NO: 1883709
ugaauaucgguuugucuga

SEQ ID NO: 2210791 - RNA, 19 nt, Artificial Sequence
  Description of Artificial Sequence: Synthetic oligonucleotide
  Antisense strand to SEQ ID NO: 2210790
ucagacaaaccgauauuca

SEQ ID NO: 2210792 - RNA, 19 nt, Artificial Sequence
  Description of Artificial Sequence: Synthetic oligonucleotide
  Sense strand starting at position 3420 of SEQ ID NO: 1883709
ggaaucugugaaugcuugu

SEQ ID NO: 2210793 - RNA, 19 nt, Artificial Sequence
  Description of Artificial Sequence: Synthetic oligonucleotide
  Antisense strand to SEQ ID NO: 2210792
acaagcauucacagauucc

SEQ ID NO: 2210794 - RNA, 19 nt, Artificial Sequence
  Description of Artificial Sequence: Synthetic oligonucleotide
  Sense strand starting at position 3414 of SEQ ID NO: 1883709
gggcguggaaucugugaau

SEQ ID NO: 2210795 - RNA, 19 nt, Artificial Sequence
  Description of Artificial Sequence: Synthetic oligonucleotide
  Antisense strand to SEQ ID NO: 2210794
auucacagauuccacgccc

SEQ ID NO: 2210796 - RNA, 19 nt, Artificial Sequence
  Description of Artificial Sequence: Synthetic oligonucleotide
  Sense strand starting at position 3488 of SEQ ID NO: 1883709
ggcucuguccaaggucuaa

SEQ ID NO: 2210797 - RNA, 19 nt, Artificial Sequence
  Description of Artificial Sequence: Synthetic oligonucleotide
  Antisense strand to SEQ ID NO: 2210796
uuagaccuuggacagagcc

SEQ ID NO: 2210798 - RNA, 19 nt, Artificial Sequence
  Description of Artificial Sequence: Synthetic oligonucleotide
  Sense strand starting at position 3440 of SEQ ID NO: 1883709
uugucauugucucuuccau

SEQ ID NO: 2210799 - RNA, 19 nt, Artificial Sequence
  Description of Artificial Sequence: Synthetic oligonucleotide
  Antisense strand to SEQ ID NO: 2210798
auggaagagacaaugacaa

SEQ ID NO: 2210800 - RNA, 19 nt, Artificial Sequence
  Description of Artificial Sequence: Synthetic oligonucleotide
  Sense strand starting at position 2753 of SEQ ID NO: 1883709
uaaugaaucuccgcugucu

SEQ ID NO: 2210801 - RNA, 19 nt, Artificial Sequence
  Description of Artificial Sequence: Synthetic oligonucleotide
  Antisense strand to SEQ ID NO: 2210800
agacagcggagauucauua

SEQ ID NO: 2210802 - RNA, 19 nt, Artificial Sequence
  Description of Artificial Sequence: Synthetic oligonucleotide
  Sense strand starting at position 3423 of SEQ ID NO: 1883709
aucugugaaugcuugucuu

SEQ ID NO: 2210803 - RNA, 19 nt, Artificial Sequence
  Description of Artificial Sequence: Synthetic oligonucleotide
  Antisense strand to SEQ ID NO: 2210802
aagacaagcauucacagau

SEQ ID NO: 2210804 - RNA, 19 nt, Artificial Sequence
  Description of Artificial Sequence: Synthetic oligonucleotide
  Sense strand starting at position 3802 of SEQ ID NO: 1883709
uugugaauaucgguuuguc

SEQ ID NO: 2210805 - RNA, 19 nt, Artificial Sequence
  Description of Artificial Sequence: Synthetic oligonucleotide
  Antisense strand to SEQ ID NO: 2210804
gacaaaccgauauucacaa

SEQ ID NO: 2210806 - RNA, 19 nt, Artificial Sequence
  Description of Artificial Sequence: Synthetic oligonucleotide
  Sense strand starting at position 1529 of SEQ ID NO: 1883709
ggugauaaguuagaacaac

SEQ ID NO: 2210807 - RNA, 19 nt, Artificial Sequence
  Description of Artificial Sequence: Synthetic oligonucleotide
  Antisense strand to SEQ ID NO: 2210806
guuguucuaacuuaucacc

SEQ ID NO: 2210808 - RNA, 19 nt, Artificial Sequence
  Description of Artificial Sequence: Synthetic oligonucleotide
  Sense strand starting at position 3427 of SEQ ID NO: 1883709
gugaaugcuugucuuguca

SEQ ID NO: 2210809 - RNA, 19 nt, Artificial Sequence
  Description of Artificial Sequence: Synthetic oligonucleotide
  Antisense strand to SEQ ID NO: 2210808
ugacaagacaagcauucac

SEQ ID NO: 2210810 - RNA, 19 nt, Artificial Sequence
  Description of Artificial Sequence: Synthetic oligonucleotide
  Sense strand starting at position 2692 of SEQ ID NO: 1883709
ugcaauugguacuggauuu

SEQ ID NO: 2210811 - RNA, 19 nt, Artificial Sequence
  Description of Artificial Sequence: Synthetic oligonucleotide
  Antisense strand to SEQ ID NO: 2210810
aaauccaguaccaauugca

SEQ ID NO: 2210812 - RNA, 19 nt, Artificial Sequence
  Description of Artificial Sequence: Synthetic oligonucleotide
  Sense strand starting at position 1467 of SEQ ID NO: 1883709
uugguuuguuugggauuua

SEQ ID NO: 2210813 - RNA, 19 nt, Artificial Sequence
  Description of Artificial Sequence: Synthetic oligonucleotide
  Antisense strand to SEQ ID NO: 2210812
uaaaucccaaacaaaccaa

SEQ ID NO: 2210814 - RNA, 19 nt, Artificial Sequence
  Description of Artificial Sequence: Synthetic oligonucleotide
  Sense strand starting at position 3426 of SEQ ID NO: 1883709
ugugaaugcuugucuuguc

SEQ ID NO: 2210815 - RNA, 19 nt, Artificial Sequence
  Description of Artificial Sequence: Synthetic oligonucleotide
  Antisense strand to SEQ ID NO: 2210814
gacaagacaagcauucaca

SEQ ID NO: 2210816 - RNA, 19 nt, Artificial Sequence
  Description of Artificial Sequence: Synthetic oligonucleotide
  Sense strand starting at position 3431 of SEQ ID NO: 1883709
augcuugucuugucauugu

SEQ ID NO: 2210817 - RNA, 19 nt, Artificial Sequence
  Description of Artificial Sequence: Synthetic oligonucleotide
  Antisense strand to SEQ ID NO: 2210816
acaaugacaagacaagcau

SEQ ID NO: 2210818 - RNA, 19 nt, Artificial Sequence
  Description of Artificial Sequence: Synthetic oligonucleotide
  Sense strand starting at position 2738 of SEQ ID NO: 1883709
cauugugucggcggguaau

SEQ ID NO: 2210819 - RNA, 19 nt, Artificial Sequence
  Description of Artificial Sequence: Synthetic oligonucleotide
  Antisense strand to SEQ ID NO: 2210818
auuacccgccgacacaaug

SEQ ID NO: 2210820 - RNA, 19 nt, Artificial Sequence
  Description of Artificial Sequence: Synthetic oligonucleotide
  Sense strand starting at position 2737 of SEQ ID NO: 1883709
ucauugugucggcggguaa

SEQ ID NO: 2210821 - RNA, 19 nt, Artificial Sequence
  Description of Artificial Sequence: Synthetic oligonucleotide
  Antisense strand to SEQ ID NO: 2210820
uuacccgccgacacaauga

SEQ ID NO: 2210822 - RNA, 19 nt, Artificial Sequence
  Description of Artificial Sequence: Synthetic oligonucleotide
  Sense strand starting at position 1655 of SEQ ID NO: 1883709
cuucguuccggccgaaauu

SEQ ID NO: 2210823 - RNA, 19 nt, Artificial Sequence
  Description of Artificial Sequence: Synthetic oligonucleotide
  Antisense strand to SEQ ID NO: 2210822
aauuucggccggaacgaag

SEQ ID NO: 2210824 - RNA, 19 nt, Artificial Sequence
  Description of Artificial Sequence: Synthetic oligonucleotide
  Sense strand starting at position 2736 of SEQ ID NO: 1883709
gucauugugucggcgggua

SEQ ID NO: 2210825 - RNA, 19 nt, Artificial Sequence
  Description of Artificial Sequence: Synthetic oligonucleotide
  Antisense strand to SEQ ID NO: 2210824
uacccgccgacacaaugac

SEQ ID NO: 2210826 - RNA, 19 nt, Artificial Sequence
  Description of Artificial Sequence: Synthetic oligonucleotide
  Sense strand starting at position 3551 of SEQ ID NO: 1883709
cucagucuauuggguaaau

SEQ ID NO: 2210827 - RNA, 19 nt, Artificial Sequence
  Description of Artificial Sequence: Synthetic oligonucleotide
  Antisense strand to SEQ ID NO: 2210826
auuuacccaauagacugag

SEQ ID NO: 2210828 - RNA, 19 nt, Artificial Sequence
  Description of Artificial Sequence: Synthetic oligonucleotide
  Sense strand starting at position 3549 of SEQ ID NO: 1883709
uucucagucuauuggguaa

SEQ ID NO: 2210829 - RNA, 19 nt, Artificial Sequence
  Description of Artificial Sequence: Synthetic oligonucleotide
  Antisense strand to SEQ ID NO: 2210828
uuacccaauagacugagaa

SEQ ID NO: 2210830 - RNA, 19 nt, Artificial Sequence
  Description of Artificial Sequence: Synthetic oligonucleotide
  Sense strand starting at position 3417 of SEQ ID NO: 1883709
cguggaaucugugaaugcu

SEQ ID NO: 2210831 - RNA, 19 nt, Artificial Sequence
  Description of Artificial Sequence: Synthetic oligonucleotide
  Antisense strand to SEQ ID NO: 2210830
agcauucacagauuccacg

SEQ ID NO: 2210832 - RNA, 19 nt, Artificial Sequence
  Description of Artificial Sequence: Synthetic oligonucleotide
  Sense strand starting at position 1288 of SEQ ID NO: 1883709
cccgcuaucuccgaagauu

SEQ ID NO: 2210833 - RNA, 19 nt, Artificial Sequence
  Description of Artificial Sequence: Synthetic oligonucleotide
  Antisense strand to SEQ ID NO: 2210832
aaucuucggagauagcggg

SEQ ID NO: 2210834 - RNA, 19 nt, Artificial Sequence
  Description of Artificial Sequence: Synthetic oligonucleotide
  Sense strand starting at position 324 of SEQ ID NO: 1883710
agaagcuggcuauguauuu

SEQ ID NO: 2210835 - RNA, 19 nt, Artificial Sequence
  Description of Artificial Sequence: Synthetic oligonucleotide
  Antisense strand to SEQ ID NO: 2210834
aaauacauagccagcuucu

SEQ ID NO: 2210836 - RNA, 19 nt, Artificial Sequence
  Description of Artificial Sequence: Synthetic oligonucleotide
  Sense strand starting at position 2553 of SEQ ID NO: 1883710
cggcuuuggaaauagaauu

SEQ ID NO: 2210837 - RNA, 19 nt, Artificial Sequence
  Description of Artificial Sequence: Synthetic oligonucleotide
  Antisense strand to SEQ ID NO: 2210836
aauucuauuuccaaagccg

SEQ ID NO: 2210838 - RNA, 19 nt, Artificial Sequence
  Description of Artificial Sequence: Synthetic oligonucleotide
  Sense strand starting at position 2233 of SEQ ID NO: 1883710
caaauuucggccggaacga

SEQ ID NO: 2210839 - RNA, 19 nt, Artificial Sequence
  Description of Artificial Sequence: Synthetic oligonucleotide
  Antisense strand to SEQ ID NO: 2210838
ucguuccggccgaaauuug

SEQ ID NO: 2210840 - RNA, 19 nt, Artificial Sequence
  Description of Artificial Sequence: Synthetic oligonucleotide
  Sense strand starting at position 399 of SEQ ID NO: 1883710
gcauuagaccuuggacaga

SEQ ID NO: 2210841 - RNA, 19 nt, Artificial Sequence
  Description of Artificial Sequence: Synthetic oligonucleotide
  Antisense strand to SEQ ID NO: 2210840
ucuguccaaggucuaaugc

SEQ ID NO: 2210842 - RNA, 19 nt, Artificial Sequence
  Description of Artificial Sequence: Synthetic oligonucleotide
  Sense strand starting at position 625 of SEQ ID NO: 1883710
ggguguggucuccagggau

SEQ ID NO: 2210843 - RNA, 19 nt, Artificial Sequence
  Description of Artificial Sequence: Synthetic oligonucleotide
  Antisense strand to SEQ ID NO: 2210842
aucccuggagaccacaccc

SEQ ID NO: 2210844 - RNA, 19 nt, Artificial Sequence
  Description of Artificial Sequence: Synthetic oligonucleotide
  Sense strand starting at position 40 of SEQ ID NO: 1883710
ggcacaaagauccguagga

SEQ ID NO: 2210845 - RNA, 19 nt, Artificial Sequence
  Description of Artificial Sequence: Synthetic oligonucleotide
  Antisense strand to SEQ ID NO: 2210844
uccuacggaucuuugugcc

SEQ ID NO: 2210846 - RNA, 19 nt, Artificial Sequence
  Description of Artificial Sequence: Synthetic oligonucleotide
  Sense strand starting at position 322 of SEQ ID NO: 1883710
ugagaagcuggcuauguau

SEQ ID NO: 2210847 - RNA, 19 nt, Artificial Sequence
  Description of Artificial Sequence: Synthetic oligonucleotide
  Antisense strand to SEQ ID NO: 2210846
auacauagccagcuucuca

SEQ ID NO: 2210848 - RNA, 19 nt, Artificial Sequence
  Description of Artificial Sequence: Synthetic oligonucleotide
  Sense strand starting at position 282 of SEQ ID NO: 1883710
gugugagguucauugggaa

SEQ ID NO: 2210849 - RNA, 19 nt, Artificial Sequence
  Description of Artificial Sequence: Synthetic oligonucleotide
  Antisense strand to SEQ ID NO: 2210848
uucccaaugaaccucacac

SEQ ID NO: 2210850 - RNA, 19 nt, Artificial Sequence
  Description of Artificial Sequence: Synthetic oligonucleotide
  Sense strand starting at position 2344 of SEQ ID NO: 1883710
cgcuaacucguuucgcagu

SEQ ID NO: 2210851 - RNA, 19 nt, Artificial Sequence
  Description of Artificial Sequence: Synthetic oligonucleotide
  Antisense strand to SEQ ID NO: 2210850
acugcgaaacgaguuagcg

SEQ ID NO: 2210852 - RNA, 19 nt, Artificial Sequence
  Description of Artificial Sequence: Synthetic oligonucleotide
  Sense strand starting at position 1079 of SEQ ID NO: 1883710
cacgcuaugucuuuaagag

SEQ ID NO: 2210853 - RNA, 19 nt, Artificial Sequence
  Description of Artificial Sequence: Synthetic oligonucleotide
  Antisense strand to SEQ ID NO: 2210852
cucuuaaagacauagcgug

SEQ ID NO: 2210854 - RNA, 19 nt, Artificial Sequence
  Description of Artificial Sequence: Synthetic oligonucleotide
  Sense strand starting at position 1080 of SEQ ID NO: 1883710
acgcuaugucuuuaagagc

SEQ ID NO: 2210855 - RNA, 19 nt, Artificial Sequence
  Description of Artificial Sequence: Synthetic oligonucleotide
  Antisense strand to SEQ ID NO: 2210854
gcucuuaaagacauagcgu

SEQ ID NO: 2210856 - RNA, 19 nt, Artificial Sequence
  Description of Artificial Sequence: Synthetic oligonucleotide
  Sense strand starting at position 2547 of SEQ ID NO: 1883710
ucuccucggcuuuggaaau

SEQ ID NO: 2210857 - RNA, 19 nt, Artificial Sequence
  Description of Artificial Sequence: Synthetic oligonucleotide
  Antisense strand to SEQ ID NO: 2210856
auuuccaaagccgaggaga

SEQ ID NO: 2210858 - RNA, 19 nt, Artificial Sequence
  Description of Artificial Sequence: Synthetic oligonucleotide
  Sense strand starting at position 321 of SEQ ID NO: 1883710
gugagaagcuggcuaugua

SEQ ID NO: 2210859 - RNA, 19 nt, Artificial Sequence
  Description of Artificial Sequence: Synthetic oligonucleotide
  Antisense strand to SEQ ID NO: 2210858
uacauagccagcuucucac

SEQ ID NO: 2210860 - RNA, 19 nt, Artificial Sequence
  Description of Artificial Sequence: Synthetic oligonucleotide
  Sense strand starting at position 1087 of SEQ ID NO: 1883710
gucuuuaagagcugccuga

SEQ ID NO: 2210861 - RNA, 19 nt, Artificial Sequence
  Description of Artificial Sequence: Synthetic oligonucleotide
  Antisense strand to SEQ ID NO: 2210860
ucaggcagcucuuaaagac

SEQ ID NO: 2210862 - RNA, 19 nt, Artificial Sequence
  Description of Artificial Sequence: Synthetic oligonucleotide
  Sense strand starting at position 132 of SEQ ID NO: 1883710
cccagagauugugaggaca

SEQ ID NO: 2210863 - RNA, 19 nt, Artificial Sequence
  Description of Artificial Sequence: Synthetic oligonucleotide
  Antisense strand to SEQ ID NO: 2210862
uguccucacaaucucuggg

SEQ ID NO: 2210864 - RNA, 19 nt, Artificial Sequence
  Description of Artificial Sequence: Synthetic oligonucleotide
  Sense strand starting at position 2541 of SEQ ID NO: 1883710
cggcaaucuccucggcuuu

SEQ ID NO: 2210865 - RNA, 19 nt, Artificial Sequence
  Description of Artificial Sequence: Synthetic oligonucleotide
  Antisense strand to SEQ ID NO: 2210864
aaagccgaggagauugccg

SEQ ID NO: 2210866 - RNA, 19 nt, Artificial Sequence
  Description of Artificial Sequence: Synthetic oligonucleotide
  Sense strand starting at position 2351 of SEQ ID NO: 1883710
ucguuucgcaguuguucua

SEQ ID NO: 2210867 - RNA, 19 nt, Artificial Sequence
  Description of Artificial Sequence: Synthetic oligonucleotide
  Antisense strand to SEQ ID NO: 2210866
uagaacaacugcgaaacga

SEQ ID NO: 2210868 - RNA, 19 nt, Artificial Sequence
  Description of Artificial Sequence: Synthetic oligonucleotide
  Sense strand starting at position 2342 of SEQ ID NO: 1883710
cccgcuaacucguuucgca

SEQ ID NO: 2210869 - RNA, 19 nt, Artificial Sequence
  Description of Artificial Sequence: Synthetic oligonucleotide
  Antisense strand to SEQ ID NO: 2210868
ugcgaaacgaguuagcggg

SEQ ID NO: 2210870 - RNA, 19 nt, Artificial Sequence
  Description of Artificial Sequence: Synthetic oligonucleotide
  Sense strand starting at position 571 of SEQ ID NO: 1883710
gaaucaagcucugguccuu

SEQ ID NO: 2210871 - RNA, 19 nt, Artificial Sequence
  Description of Artificial Sequence: Synthetic oligonucleotide
  Antisense strand to SEQ ID NO: 2210870
aaggaccagagcuugauuc

SEQ ID NO: 2210872 - RNA, 19 nt, Artificial Sequence
  Description of Artificial Sequence: Synthetic oligonucleotide
  Sense strand starting at position 2548 of SEQ ID NO: 1883710
cuccucggcuuuggaaaua

SEQ ID NO: 2210873 - RNA, 19 nt, Artificial Sequence
  Description of Artificial Sequence: Synthetic oligonucleotide
  Antisense strand to SEQ ID NO: 2210872
uauuuccaaagccgaggag

SEQ ID NO: 2210874 - RNA, 19 nt, Artificial Sequence
  Description of Artificial Sequence: Synthetic oligonucleotide
  Sense strand starting at position 2963 of SEQ ID NO: 1883711
ucaauaggauguucuaaga

SEQ ID NO: 2210875 - RNA, 19 nt, Artificial Sequence
  Description of Artificial Sequence: Synthetic oligonucleotide
  Antisense strand to SEQ ID NO: 2210874
ucuuagaacauccuauuga

SEQ ID NO: 2210876 - RNA, 19 nt, Artificial Sequence
  Description of Artificial Sequence: Synthetic oligonucleotide
  Sense strand starting at position 3322 of SEQ ID NO: 1883711
ggagcagauuugguuuguu

SEQ ID NO: 2210877 - RNA, 19 nt, Artificial Sequence
  Description of Artificial Sequence: Synthetic oligonucleotide
  Antisense strand to SEQ ID NO: 2210876
aacaaaccaaaucugcucc

SEQ ID NO: 2210878 - RNA, 19 nt, Artificial Sequence
  Description of Artificial Sequence: Synthetic oligonucleotide
  Sense strand starting at position 3371 of SEQ ID NO: 1883711
ugggaacaaugucuagacu

SEQ ID NO: 2210879 - RNA, 19 nt, Artificial Sequence
  Description of Artificial Sequence: Synthetic oligonucleotide
  Antisense strand to SEQ ID NO: 2210878
agucuagacauuguuccca

SEQ ID NO: 2210880 - RNA, 19 nt, Artificial Sequence
  Description of Artificial Sequence: Synthetic oligonucleotide
  Sense strand starting at position 3042 of SEQ ID NO: 1883711
uccuuagguccucaagaug

SEQ ID NO: 2210881 - RNA, 19 nt, Artificial Sequence
  Description of Artificial Sequence: Synthetic oligonucleotide
  Antisense strand to SEQ ID NO: 2210880
caucuugaggaccuaagga

SEQ ID NO: 2210882 - RNA, 19 nt, Artificial Sequence
  Description of Artificial Sequence: Synthetic oligonucleotide
  Sense strand starting at position 697 of SEQ ID NO: 1883711
acacauugguacuugacaa

SEQ ID NO: 2210883 - RNA, 19 nt, Artificial Sequence
  Description of Artificial Sequence: Synthetic oligonucleotide
  Antisense strand to SEQ ID NO: 2210882
uugucaaguaccaaugugu

SEQ ID NO: 2210884 - RNA, 19 nt, Artificial Sequence
  Description of Artificial Sequence: Synthetic oligonucleotide
  Sense strand starting at position 3483 of SEQ ID NO: 1883711
ggauuugugcaauguaccu

SEQ ID NO: 2210885 - RNA, 19 nt, Artificial Sequence
  Description of Artificial Sequence: Synthetic oligonucleotide
  Antisense strand to SEQ ID NO: 2210884
agguacauugcacaaaucc

SEQ ID NO: 2210886 - RNA, 19 nt, Artificial Sequence
  Description of Artificial Sequence: Synthetic oligonucleotide
  Sense strand starting at position 3385 of SEQ ID NO: 1883711
agacuuuccgaggagucac

SEQ ID NO: 2210887 - RNA, 19 nt, Artificial Sequence
  Description of Artificial Sequence: Synthetic oligonucleotide
  Antisense strand to SEQ ID NO: 2210886
gugacuccucggaaagucu

SEQ ID NO: 2210888 - RNA, 19 nt, Artificial Sequence
  Description of Artificial Sequence: Synthetic oligonucleotide
  Sense strand starting at position 3417 of SEQ ID NO: 1883711
augguuaguuaaccaagaa

SEQ ID NO: 2210889 - RNA, 19 nt, Artificial Sequence
  Description of Artificial Sequence: Synthetic oligonucleotide
  Antisense strand to SEQ ID NO: 2210888
uucuugguuaacuaaccau

SEQ ID NO: 2210890 - RNA, 19 nt, Artificial Sequence
  Description of Artificial Sequence: Synthetic oligonucleotide
  Sense strand starting at position 2688 of SEQ ID NO: 1883711
uuagaagcccuccaguaaa

SEQ ID NO: 2210891 - RNA, 19 nt, Artificial Sequence
  Description of Artificial Sequence: Synthetic oligonucleotide
  Antisense strand to SEQ ID NO: 2210890
uuuacuggagggcuucuaa

SEQ ID NO: 2210892 - RNA, 19 nt, Artificial Sequence
  Description of Artificial Sequence: Synthetic oligonucleotide
  Sense strand starting at position 2480 of SEQ ID NO: 1883711
ccagauauuucugaauaga

SEQ ID NO: 2210893 - RNA, 19 nt, Artificial Sequence
  Description of Artificial Sequence: Synthetic oligonucleotide
  Antisense strand to SEQ ID NO: 2210892
ucuauucagaaauaucugg

SEQ ID NO: 2210894 - RNA, 19 nt, Artificial Sequence
  Description of Artificial Sequence: Synthetic oligonucleotide
  Sense strand starting at position 2840 of SEQ ID NO: 1883711
aggcuaaaggucuauacuu

SEQ ID NO: 2210895 - RNA, 19 nt, Artificial Sequence
  Description of Artificial Sequence: Synthetic oligonucleotide
  Antisense strand to SEQ ID NO: 2210894
aaguauagaccuuuagccu

SEQ ID NO: 2210896 - RNA, 19 nt, Artificial Sequence
  Description of Artificial Sequence: Synthetic oligonucleotide
  Sense strand starting at position 3480 of SEQ ID NO: 1883711
ggcggauuugugcaaugua

SEQ ID NO: 2210897 - RNA, 19 nt, Artificial Sequence
  Description of Artificial Sequence: Synthetic oligonucleotide
  Antisense strand to SEQ ID NO: 2210896
uacauugcacaaauccgcc

SEQ ID NO: 2210898 - RNA, 19 nt, Artificial Sequence
  Description of Artificial Sequence: Synthetic oligonucleotide
  Sense strand starting at position 1316 of SEQ ID NO: 1883711
ccaugccuuguugaaauaa

SEQ ID NO: 2210899 - RNA, 19 nt, Artificial Sequence
  Description of Artificial Sequence: Synthetic oligonucleotide
  Antisense strand to SEQ ID NO: 2210898
uuauuucaacaaggcaugg

SEQ ID NO: 2210900 - RNA, 19 nt, Artificial Sequence
  Description of Artificial Sequence: Synthetic oligonucleotide
  Sense strand starting at position 2553 of SEQ ID NO: 1883711
ccaugaaaugcucacugua

SEQ ID NO: 2210901 - RNA, 19 nt, Artificial Sequence
  Description of Artificial Sequence: Synthetic oligonucleotide
  Antisense strand to SEQ ID NO: 2210900
uacagugagcauuucaugg

SEQ ID NO: 2210902 - RNA, 19 nt, Artificial Sequence
  Description of Artificial Sequence: Synthetic oligonucleotide
  Sense strand starting at position 1129 of SEQ ID NO: 1883711
ugcaauuaacaaggguuaa

SEQ ID NO: 2210903 - RNA, 19 nt, Artificial Sequence
  Description of Artificial Sequence: Synthetic oligonucleotide
  Antisense strand to SEQ ID NO: 2210902
uuaacccuuguuaauugca

SEQ ID NO: 2210904 - RNA, 19 nt, Artificial Sequence
  Description of Artificial Sequence: Synthetic oligonucleotide
  Sense strand starting at position 3809 of SEQ ID NO: 1883711
ggcagaacugccuaaaccu

SEQ ID NO: 2210905 - RNA, 19 nt, Artificial Sequence
  Description of Artificial Sequence: Synthetic oligonucleotide
  Antisense strand to SEQ ID NO: 2210904
agguuuaggcaguucugcc

SEQ ID NO: 2210906 - RNA, 19 nt, Artificial Sequence
  Description of Artificial Sequence: Synthetic oligonucleotide
  Sense strand starting at position 726 of SEQ ID NO: 1883711
acugacugucaaggucaaa

SEQ ID NO: 2210907 - RNA, 19 nt, Artificial Sequence
  Description of Artificial Sequence: Synthetic oligonucleotide
  Antisense strand to SEQ ID NO: 2210906
uuugaccuugacagucagu

SEQ ID NO: 2210908 - RNA, 19 nt, Artificial Sequence
  Description of Artificial Sequence: Synthetic oligonucleotide
  Sense strand starting at position 2555 of SEQ ID NO: 1883711
augaaaugcucacuguaaa

SEQ ID NO: 2210909 - RNA, 19 nt, Artificial Sequence
  Description of Artificial Sequence: Synthetic oligonucleotide
  Antisense strand to SEQ ID NO: 2210908
uuuacagugagcauuucau

SEQ ID NO: 2210910 - RNA, 19 nt, Artificial Sequence
  Description of Artificial Sequence: Synthetic oligonucleotide
  Sense strand starting at position 1998 of SEQ ID NO: 1883711
gcacaaucagcugggaaga

SEQ ID NO: 2210911 - RNA, 19 nt, Artificial Sequence
  Description of Artificial Sequence: Synthetic oligonucleotide
  Antisense strand to SEQ ID NO: 2210910
ucuucccagcugauugugc

SEQ ID NO: 2210912 - RNA, 19 nt, Artificial Sequence
  Description of Artificial Sequence: Synthetic oligonucleotide
  Sense strand starting at position 3041 of SEQ ID NO: 1883711
auccuuagguccucaagau

SEQ ID NO: 2210913 - RNA, 19 nt, Artificial Sequence
  Description of Artificial Sequence: Synthetic oligonucleotide
  Antisense strand to SEQ ID NO: 2210912
aucuugaggaccuaaggau

SEQ ID NO: 2210914 - RNA, 19 nt, Artificial Sequence
  Description of Artificial Sequence: Synthetic oligonucleotide
  Sense strand starting at position 2020 of SEQ ID NO: 1883711
guuagccuuccagauacca

SEQ ID NO: 2210915 - RNA, 19 nt, Artificial Sequence
  Description of Artificial Sequence: Synthetic oligonucleotide
  Antisense strand to SEQ ID NO: 2210914
ugguaucuggaaggcuaac

SEQ ID NO: 2210916 - RNA, 19 nt, Artificial Sequence
  Description of Artificial Sequence: Synthetic oligonucleotide
  Sense strand starting at position 2058 of SEQ ID NO: 1883711
ugagucagucuccagggua

SEQ ID NO: 2210917 - RNA, 19 nt, Artificial Sequence
  Description of Artificial Sequence: Synthetic oligonucleotide
  Antisense strand to SEQ ID NO: 2210916
uacccuggagacugacuca

SEQ ID NO: 2210918 - RNA, 19 nt, Artificial Sequence
  Description of Artificial Sequence: Synthetic oligonucleotide
  Sense strand starting at position 365 of SEQ ID NO: 1883711
acagcucugcaaggagaua

SEQ ID NO: 2210919 - RNA, 19 nt, Artificial Sequence
  Description of Artificial Sequence: Synthetic oligonucleotide
  Antisense strand to SEQ ID NO: 2210918
uaucuccuugcagagcugu

SEQ ID NO: 2210920 - RNA, 19 nt, Artificial Sequence
  Description of Artificial Sequence: Synthetic oligonucleotide
  Sense strand starting at position 3361 of SEQ ID NO: 1883711
uucugucuucugggaacaa

SEQ ID NO: 2210921 - RNA, 19 nt, Artificial Sequence
  Description of Artificial Sequence: Synthetic oligonucleotide
  Antisense strand to SEQ ID NO: 2210920
uuguucccagaagacagaa

SEQ ID NO: 2210922 - RNA, 19 nt, Artificial Sequence
  Description of Artificial Sequence: Synthetic oligonucleotide
  Sense strand starting at position 3384 of SEQ ID NO: 1883711
uagacuuuccgaggaguca

SEQ ID NO: 2210923 - RNA, 19 nt, Artificial Sequence
  Description of Artificial Sequence: Synthetic oligonucleotide
  Antisense strand to SEQ ID NO: 2210922
ugacuccucggaaagucua

SEQ ID NO: 2210924 - RNA, 19 nt, Artificial Sequence
  Description of Artificial Sequence: Synthetic oligonucleotide
  Sense strand starting at position 2910 of SEQ ID NO: 1883711
guuugucgagugaguucuu

SEQ ID NO: 2210925 - RNA, 19 nt, Artificial Sequence
  Description of Artificial Sequence: Synthetic oligonucleotide
  Antisense strand to SEQ ID NO: 2210924
aagaacucacucgacaaac

SEQ ID NO: 2210926 - RNA, 19 nt, Artificial Sequence
  Description of Artificial Sequence: Synthetic oligonucleotide
  Sense strand starting at position 3287 of SEQ ID NO: 1883711
aggugauuauucuuagcaa

SEQ ID NO: 2210927 - RNA, 19 nt, Artificial Sequence
  Description of Artificial Sequence: Synthetic oligonucleotide
  Antisense strand to SEQ ID NO: 2210926
uugcuaagaauaaucaccu

SEQ ID NO: 2210928 - RNA, 19 nt, Artificial Sequence
  Description of Artificial Sequence: Synthetic oligonucleotide
  Sense strand starting at position 887 of SEQ ID NO: 1883711
uuagcuugcaaauggagau

SEQ ID NO: 2210929 - RNA, 19 nt, Artificial Sequence
  Description of Artificial Sequence: Synthetic oligonucleotide
  Antisense strand to SEQ ID NO: 2210928
aucuccauuugcaagcuaa

SEQ ID NO: 2210930 - RNA, 19 nt, Artificial Sequence
  Description of Artificial Sequence: Synthetic oligonucleotide
  Sense strand starting at position 3479 of SEQ ID NO: 1883711
gggcggauuugugcaaugu

SEQ ID NO: 2210931 - RNA, 19 nt, Artificial Sequence
  Description of Artificial Sequence: Synthetic oligonucleotide
  Antisense strand to SEQ ID NO: 2210930
acauugcacaaauccgccc

SEQ ID NO: 2210932 - RNA, 19 nt, Artificial Sequence
  Description of Artificial Sequence: Synthetic oligonucleotide
  Sense strand starting at position 3468 of SEQ ID NO: 1883711
ggguuaaaucagggcggau

SEQ ID NO: 2210933 - RNA, 19 nt, Artificial Sequence
  Description of Artificial Sequence: Synthetic oligonucleotide
  Antisense strand to SEQ ID NO: 2210932
auccgcccugauuuaaccc

SEQ ID NO: 2210934 - RNA, 19 nt, Artificial Sequence
  Description of Artificial Sequence: Synthetic oligonucleotide
  Sense strand starting at position 3380 of SEQ ID NO: 1883711
ugucuagacuuuccgagga

SEQ ID NO: 2210935 - RNA, 19 nt, Artificial Sequence
  Description of Artificial Sequence: Synthetic oligonucleotide
  Antisense strand to SEQ ID NO: 2210934
uccucggaaagucuagaca

SEQ ID NO: 2210936 - RNA, 19 nt, Artificial Sequence
  Description of Artificial Sequence: Synthetic oligonucleotide
  Sense strand starting at position 3409 of SEQ ID NO: 1883711
uaaauagcaugguuaguua

SEQ ID NO: 2210937 - RNA, 19 nt, Artificial Sequence
  Description of Artificial Sequence: Synthetic oligonucleotide
  Antisense strand to SEQ ID NO: 2210936
uaacuaaccaugcuauuua

SEQ ID NO: 2210938 - RNA, 19 nt, Artificial Sequence
  Description of Artificial Sequence: Synthetic oligonucleotide
  Sense strand starting at position 2971 of SEQ ID NO: 1883711
auguucuaagauugcacau

SEQ ID NO: 2210939 - RNA, 19 nt, Artificial Sequence
  Description of Artificial Sequence: Synthetic oligonucleotide
  Antisense strand to SEQ ID NO: 2210938
augugcaaucuuagaacau

SEQ ID NO: 2210940 - RNA, 19 nt, Artificial Sequence
  Description of Artificial Sequence: Synthetic oligonucleotide
  Sense strand starting at position 3407 of SEQ ID NO: 1883711
uauaaauagcaugguuagu

SEQ ID NO: 2210941 - RNA, 19 nt, Artificial Sequence
  Description of Artificial Sequence: Synthetic oligonucleotide
  Antisense strand to SEQ ID NO: 2210940
acuaaccaugcuauuuaua

SEQ ID NO: 2210942 - RNA, 19 nt, Artificial Sequence
  Description of Artificial Sequence: Synthetic oligonucleotide
  Sense strand starting at position 2479 of SEQ ID NO: 1883711
cccagauauuucugaauag

SEQ ID NO: 2210943 - RNA, 19 nt, Artificial Sequence
  Description of Artificial Sequence: Synthetic oligonucleotide
  Antisense strand to SEQ ID NO: 2210942
cuauucagaaauaucuggg

SEQ ID NO: 2210944 - RNA, 19 nt, Artificial Sequence
  Description of Artificial Sequence: Synthetic oligonucleotide
  Sense strand starting at position 1890 of SEQ ID NO: 1883711
ccuucuuaccugugacaug

SEQ ID NO: 2210945 - RNA, 19 nt, Artificial Sequence
  Description of Artificial Sequence: Synthetic oligonucleotide
  Antisense strand to SEQ ID NO: 2210944
caugucacagguaagaagg

SEQ ID NO: 2210946 - RNA, 19 nt, Artificial Sequence
  Description of Artificial Sequence: Synthetic oligonucleotide
  Sense strand starting at position 978 of SEQ ID NO: 1883711
gguccuuugaugggcugaa

SEQ ID NO: 2210947 - RNA, 19 nt, Artificial Sequence
  Description of Artificial Sequence: Synthetic oligonucleotide
  Antisense strand to SEQ ID NO: 2210946
uucagcccaucaaaggacc

SEQ ID NO: 2210948 - RNA, 19 nt, Artificial Sequence
  Description of Artificial Sequence: Synthetic oligonucleotide
  Sense strand starting at position 2109 of SEQ ID NO: 1883711
gugccaauucuuugggaua

SEQ ID NO: 2210949 - RNA, 19 nt, Artificial Sequence
  Description of Artificial Sequence: Synthetic oligonucleotide
  Antisense strand to SEQ ID NO: 2210948
uaucccaaagaauuggcac

SEQ ID NO: 2210950 - RNA, 19 nt, Artificial Sequence
  Description of Artificial Sequence: Synthetic oligonucleotide
  Sense strand starting at position 1845 of SEQ ID NO: 1883711
ggagcuuucucacccauuc

SEQ ID NO: 2210951 - RNA, 19 nt, Artificial Sequence
  Description of Artificial Sequence: Synthetic oligonucleotide
  Antisense strand to SEQ ID NO: 2210950
gaaugggugagaaagcucc

SEQ ID NO: 2210952 - RNA, 19 nt, Artificial Sequence
  Description of Artificial Sequence: Synthetic oligonucleotide
  Sense strand starting at position 3014 of SEQ ID NO: 1883711
gcuggcucauucccaaaga

SEQ ID NO: 2210953 - RNA, 19 nt, Artificial Sequence
  Description of Artificial Sequence: Synthetic oligonucleotide
  Antisense strand to SEQ ID NO: 2210952
ucuuugggaaugagccagc

SEQ ID NO: 2210954 - RNA, 19 nt, Artificial Sequence
  Description of Artificial Sequence: Synthetic oligonucleotide
  Sense strand starting at position 2856 of SEQ ID NO: 1883712
ggaagaauaugaucaugcu

SEQ ID NO: 2210955 - RNA, 19 nt, Artificial Sequence
  Description of Artificial Sequence: Synthetic oligonucleotide
  Antisense strand to SEQ ID NO: 2210954
agcaugaucauauucuucc

SEQ ID NO: 2210956 - RNA, 19 nt, Artificial Sequence
  Description of Artificial Sequence: Synthetic oligonucleotide
  Sense strand starting at position 558 of SEQ ID NO: 1883712
cccagucaccgggaggaau

SEQ ID NO: 2210957 - RNA, 19 nt, Artificial Sequence
  Description of Artificial Sequence: Synthetic oligonucleotide
  Antisense strand to SEQ ID NO: 2210956
auuccucccggugacuggg

SEQ ID NO: 2210958 - RNA, 19 nt, Artificial Sequence
  Description of Artificial Sequence: Synthetic oligonucleotide
  Sense strand starting at position 3219 of SEQ ID NO: 1883712
uguguacuaccgcuagguu

SEQ ID NO: 2210959 - RNA, 19 nt, Artificial Sequence
  Description of Artificial Sequence: Synthetic oligonucleotide
  Antisense strand to SEQ ID NO: 2210958
aaccuagcgguaguacaca

SEQ ID NO: 2210960 - RNA, 19 nt, Artificial Sequence
  Description of Artificial Sequence: Synthetic oligonucleotide
  Sense strand starting at position 2073 of SEQ ID NO: 1883712
acgccuguuaugcuagcaa

SEQ ID NO: 2210961 - RNA, 19 nt, Artificial Sequence
  Description of Artificial Sequence: Synthetic oligonucleotide
  Antisense strand to SEQ ID NO: 2210960
uugcuagcauaacaggcgu

SEQ ID NO: 2210962 - RNA, 19 nt, Artificial Sequence
  Description of Artificial Sequence: Synthetic oligonucleotide
  Sense strand starting at position 2251 of SEQ ID NO: 1883712
gcagcuguccuugcuauua

SEQ ID NO: 2210963 - RNA, 19 nt, Artificial Sequence
  Description of Artificial Sequence: Synthetic oligonucleotide
  Antisense strand to SEQ ID NO: 2210962
uaauagcaaggacagcugc

SEQ ID NO: 2210964 - RNA, 19 nt, Artificial Sequence
  Description of Artificial Sequence: Synthetic oligonucleotide
  Sense strand starting at position 1516 of SEQ ID NO: 1883712
uagcauucccagcaggaga

SEQ ID NO: 2210965 - RNA, 19 nt, Artificial Sequence
  Description of Artificial Sequence: Synthetic oligonucleotide
  Antisense strand to SEQ ID NO: 2210964
ucuccugcugggaaugcua

SEQ ID NO: 2210966 - RNA, 19 nt, Artificial Sequence
  Description of Artificial Sequence: Synthetic oligonucleotide
  Sense strand starting at position 3238 of SEQ ID NO: 1883712
gcuuuaauaguguagaaac

SEQ ID NO: 2210967 - RNA, 19 nt, Artificial Sequence
  Description of Artificial Sequence: Synthetic oligonucleotide
  Antisense strand to SEQ ID NO: 2210966
guuucuacacuauuaaagc

SEQ ID NO: 2210968 - RNA, 19 nt, Artificial Sequence
  Description of Artificial Sequence: Synthetic oligonucleotide
  Sense strand starting at position 2862 of SEQ ID NO: 1883712
auaugaucaugcuucugaa

SEQ ID NO: 2210969 - RNA, 19 nt, Artificial Sequence
  Description of Artificial Sequence: Synthetic oligonucleotide
  Antisense strand to SEQ ID NO: 2210968
uucagaagcaugaucauau

SEQ ID NO: 2210970 - RNA, 19 nt, Artificial Sequence
  Description of Artificial Sequence: Synthetic oligonucleotide
  Sense strand starting at position 1455 of SEQ ID NO: 1883712
ucagacagauguccgauua

SEQ ID NO: 2210971 - RNA, 19 nt, Artificial Sequence
  Description of Artificial Sequence: Synthetic oligonucleotide
  Antisense strand to SEQ ID NO: 2210970
uaaucggacaucugucuga

SEQ ID NO: 2210972 - RNA, 19 nt, Artificial Sequence
  Description of Artificial Sequence: Synthetic oligonucleotide
  Sense strand starting at position 3295 of SEQ ID NO: 1883712
agguuaauuccaggcacaa

SEQ ID NO: 2210973 - RNA, 19 nt, Artificial Sequence
  Description of Artificial Sequence: Synthetic oligonucleotide
  Antisense strand to SEQ ID NO: 2210972
uugugccuggaauuaaccu

SEQ ID NO: 2210974 - RNA, 19 nt, Artificial Sequence
  Description of Artificial Sequence: Synthetic oligonucleotide
  Sense strand starting at position 1765 of SEQ ID NO: 1883712
caucgcugggcauaaauaa

SEQ ID NO: 2210975 - RNA, 19 nt, Artificial Sequence
  Description of Artificial Sequence: Synthetic oligonucleotide
  Antisense strand to SEQ ID NO: 2210974
uuauuuaugcccagcgaug

SEQ ID NO: 2210976 - RNA, 19 nt, Artificial Sequence
  Description of Artificial Sequence: Synthetic oligonucleotide
  Sense strand starting at position 3362 of SEQ ID NO: 1883712
gggagaaauuccgcuccaa

SEQ ID NO: 2210977 - RNA, 19 nt, Artificial Sequence
  Description of Artificial Sequence: Synthetic oligonucleotide
  Antisense strand to SEQ ID NO: 2210976
uuggagcggaauuucuccc

SEQ ID NO: 2210978 - RNA, 19 nt, Artificial Sequence
  Description of Artificial Sequence: Synthetic oligonucleotide
  Sense strand starting at position 2125 of SEQ ID NO: 1883712
uggcauccuagagguauaa

SEQ ID NO: 2210979 - RNA, 19 nt, Artificial Sequence
  Description of Artificial Sequence: Synthetic oligonucleotide
  Antisense strand to SEQ ID NO: 2210978
uuauaccucuaggaugcca

SEQ ID NO: 2210980 - RNA, 19 nt, Artificial Sequence
  Description of Artificial Sequence: Synthetic oligonucleotide
  Sense strand starting at position 2123 of SEQ ID NO: 1883712
guuggcauccuagagguau

SEQ ID NO: 2210981 - RNA, 19 nt, Artificial Sequence
  Description of Artificial Sequence: Synthetic oligonucleotide
  Antisense strand to SEQ ID NO: 2210980
auaccucuaggaugccaac

SEQ ID NO: 2210982 - RNA, 19 nt, Artificial Sequence
  Description of Artificial Sequence: Synthetic oligonucleotide
  Sense strand starting at position 2841 of SEQ ID NO: 1883712
guuccugacucuucuggaa

SEQ ID NO: 2210983 - RNA, 19 nt, Artificial Sequence
  Description of Artificial Sequence: Synthetic oligonucleotide
  Antisense strand to SEQ ID NO: 2210982
uuccagaagagucaggaac

SEQ ID NO: 2210984 - RNA, 19 nt, Artificial Sequence
  Description of Artificial Sequence: Synthetic oligonucleotide
  Sense strand starting at position 1750 of SEQ ID NO: 1883712
ccuuguuagagaggucauc

SEQ ID NO: 2210985 - RNA, 19 nt, Artificial Sequence
  Description of Artificial Sequence: Synthetic oligonucleotide
  Antisense strand to SEQ ID NO: 2210984
gaugaccucucuaacaagg

SEQ ID NO: 2210986 - RNA, 19 nt, Artificial Sequence
  Description of Artificial Sequence: Synthetic oligonucleotide
  Sense strand starting at position 746 of SEQ ID NO: 1883712
aggcuuugcguacacaaua

SEQ ID NO: 2210987 - RNA, 19 nt, Artificial Sequence
  Description of Artificial Sequence: Synthetic oligonucleotide
  Antisense strand to SEQ ID NO: 2210986
uauuguguacgcaaagccu

SEQ ID NO: 2210988 - RNA, 19 nt, Artificial Sequence
  Description of Artificial Sequence: Synthetic oligonucleotide
  Sense strand starting at position 1763 of SEQ ID NO: 1883712
gucaucgcugggcauaaau

SEQ ID NO: 2210989 - RNA, 19 nt, Artificial Sequence
  Description of Artificial Sequence: Synthetic oligonucleotide
  Antisense strand to SEQ ID NO: 2210988
auuuaugcccagcgaugac

SEQ ID NO: 2210990 - RNA, 19 nt, Artificial Sequence
  Description of Artificial Sequence: Synthetic oligonucleotide
  Sense strand starting at position 2137 of SEQ ID NO: 1883712
gguauaauuucuugaauca

SEQ ID NO: 2210991 - RNA, 19 nt, Artificial Sequence
  Description of Artificial Sequence: Synthetic oligonucleotide
  Antisense strand to SEQ ID NO: 2210990
ugauucaagaaauuauacc

SEQ ID NO: 2210992 - RNA, 19 nt, Artificial Sequence
  Description of Artificial Sequence: Synthetic oligonucleotide
  Sense strand starting at position 744 of SEQ ID NO: 1883712
ucaggcuuugcguacacaa

SEQ ID NO: 2210993 - RNA, 19 nt, Artificial Sequence
  Description of Artificial Sequence: Synthetic oligonucleotide
  Antisense strand to SEQ ID NO: 2210992
uuguguacgcaaagccuga

SEQ ID NO: 2210994 - RNA, 19 nt, Artificial Sequence
  Description of Artificial Sequence: Synthetic oligonucleotide
  Sense strand starting at position 626 of SEQ ID NO: 1883712
ggacuuuaaucacaggaca

SEQ ID NO: 2210995 - RNA, 19 nt, Artificial Sequence
  Description of Artificial Sequence: Synthetic oligonucleotide
  Antisense strand to SEQ ID NO: 2210994
uguccugugauuaaagucc

SEQ ID NO: 2210996 - RNA, 19 nt, Artificial Sequence
  Description of Artificial Sequence: Synthetic oligonucleotide
  Sense strand starting at position 3169 of SEQ ID NO: 1883712
aaugaugauuguuagagaa

SEQ ID NO: 2210997 - RNA, 19 nt, Artificial Sequence
  Description of Artificial Sequence: Synthetic oligonucleotide
  Antisense strand to SEQ ID NO: 2210996
uucucuaacaaucaucauu

SEQ ID NO: 2210998 - RNA, 19 nt, Artificial Sequence
  Description of Artificial Sequence: Synthetic oligonucleotide
  Sense strand starting at position 1762 of SEQ ID NO: 1883712
ggucaucgcugggcauaaa

SEQ ID NO: 2210999 - RNA, 19 nt, Artificial Sequence
  Description of Artificial Sequence: Synthetic oligonucleotide
  Antisense strand to SEQ ID NO: 2210998
uuuaugcccagcgaugacc

SEQ ID NO: 2211000 - RNA, 19 nt, Artificial Sequence
  Description of Artificial Sequence: Synthetic oligonucleotide
  Sense strand starting at position 1761 of SEQ ID NO: 1883712
aggucaucgcugggcauaa

SEQ ID NO: 2211001 - RNA, 19 nt, Artificial Sequence
  Description of Artificial Sequence: Synthetic oligonucleotide
  Antisense strand to SEQ ID NO: 2211000
uuaugcccagcgaugaccu

SEQ ID NO: 2211002 - RNA, 19 nt, Artificial Sequence
  Description of Artificial Sequence: Synthetic oligonucleotide
  Sense strand starting at position 2651 of SEQ ID NO: 1883712
acacguacgccacgaaaua

SEQ ID NO: 2211003 - RNA, 19 nt, Artificial Sequence
  Description of Artificial Sequence: Synthetic oligonucleotide
  Antisense strand to SEQ ID NO: 2211002
uauuucguggcguacgugu

SEQ ID NO: 2211004 - RNA, 19 nt, Artificial Sequence
  Description of Artificial Sequence: Synthetic oligonucleotide
  Sense strand starting at position 1760 of SEQ ID NO: 1883712
gaggucaucgcugggcaua

SEQ ID NO: 2211005 - RNA, 19 nt, Artificial Sequence
  Description of Artificial Sequence: Synthetic oligonucleotide
  Antisense strand to SEQ ID NO: 2211004
uaugcccagcgaugaccuc

SEQ ID NO: 2211006 - RNA, 19 nt, Artificial Sequence
  Description of Artificial Sequence: Synthetic oligonucleotide
  Sense strand starting at position 1759 of SEQ ID NO: 1883712
agaggucaucgcugggcau

SEQ ID NO: 2211007 - RNA, 19 nt, Artificial Sequence
  Description of Artificial Sequence: Synthetic oligonucleotide
  Antisense strand to SEQ ID NO: 2211006
augcccagcgaugaccucu

SEQ ID NO: 2211008 - RNA, 19 nt, Artificial Sequence
  Description of Artificial Sequence: Synthetic oligonucleotide
  Sense strand starting at position 1474 of SEQ ID NO: 1883712
gugcauguuucuguggaca

SEQ ID NO: 2211009 - RNA, 19 nt, Artificial Sequence
  Description of Artificial Sequence: Synthetic oligonucleotide
  Antisense strand to SEQ ID NO: 2211008
uguccacagaaacaugcac

SEQ ID NO: 2211010 - RNA, 19 nt, Artificial Sequence
  Description of Artificial Sequence: Synthetic oligonucleotide
  Sense strand starting at position 1465 of SEQ ID NO: 1883712
guccgauuagugcauguuu

SEQ ID NO: 2211011 - RNA, 19 nt, Artificial Sequence
  Description of Artificial Sequence: Synthetic oligonucleotide
  Antisense strand to SEQ ID NO: 2211010
aaacaugcacuaaucggac

SEQ ID NO: 2211012 - RNA, 19 nt, Artificial Sequence
  Description of Artificial Sequence: Synthetic oligonucleotide
  Sense strand starting at position 2095 of SEQ ID NO: 1883712
gguggaguuucuguuuguu

SEQ ID NO: 2211013 - RNA, 19 nt, Artificial Sequence
  Description of Artificial Sequence: Synthetic oligonucleotide
  Antisense strand to SEQ ID NO: 2211012
aacaaacagaaacuccacc

SEQ ID NO: 2211014 - RNA, 19 nt, Artificial Sequence
  Description of Artificial Sequence: Synthetic oligonucleotide
  Sense strand starting at position 2497 of SEQ ID NO: 1883712
aagggagacuugugaccaa

SEQ ID NO: 2211015 - RNA, 19 nt, Artificial Sequence
  Description of Artificial Sequence: Synthetic oligonucleotide
  Antisense strand to SEQ ID NO: 2211014
uuggucacaagucucccuu

SEQ ID NO: 2211016 - RNA, 19 nt, Artificial Sequence
  Description of Artificial Sequence: Synthetic oligonucleotide
  Sense strand starting at position 3227 of SEQ ID NO: 1883712
accgcuagguugcuuuaau

SEQ ID NO: 2211017 - RNA, 19 nt, Artificial Sequence
  Description of Artificial Sequence: Synthetic oligonucleotide
  Antisense strand to SEQ ID NO: 2211016
auuaaagcaaccuagcggu

SEQ ID NO: 2211018 - RNA, 19 nt, Artificial Sequence
  Description of Artificial Sequence: Synthetic oligonucleotide
  Sense strand starting at position 3228 of SEQ ID NO: 1883712
ccgcuagguugcuuuaaua

SEQ ID NO: 2211019 - RNA, 19 nt, Artificial Sequence
  Description of Artificial Sequence: Synthetic oligonucleotide
  Antisense strand to SEQ ID NO: 2211018
uauuaaagcaaccuagcgg

SEQ ID NO: 2211020 - RNA, 19 nt, Artificial Sequence
  Description of Artificial Sequence: Synthetic oligonucleotide
  Sense strand starting at position 800 of SEQ ID NO: 1883712
ucuaacuguucucagaaag

SEQ ID NO: 2211021 - RNA, 19 nt, Artificial Sequence
  Description of Artificial Sequence: Synthetic oligonucleotide
  Antisense strand to SEQ ID NO: 2211020
cuuucugagaacaguuaga

SEQ ID NO: 2211022 - RNA, 19 nt, Artificial Sequence
  Description of Artificial Sequence: Synthetic oligonucleotide
  Sense strand starting at position 3162 of SEQ ID NO: 1883712
cagaaauaaugaugauugu

SEQ ID NO: 2211023 - RNA, 19 nt, Artificial Sequence
  Description of Artificial Sequence: Synthetic oligonucleotide
  Antisense strand to SEQ ID NO: 2211022
acaaucaucauuauuucug

SEQ ID NO: 2211024 - RNA, 19 nt, Artificial Sequence
  Description of Artificial Sequence: Synthetic oligonucleotide
  Sense strand starting at position 2098 of SEQ ID NO: 1883712
ggaguuucuguuuguuguu

SEQ ID NO: 2211025 - RNA, 19 nt, Artificial Sequence
  Description of Artificial Sequence: Synthetic oligonucleotide
  Antisense strand to SEQ ID NO: 2211024
aacaacaaacagaaacucc

SEQ ID NO: 2211026 - RNA, 19 nt, Artificial Sequence
  Description of Artificial Sequence: Synthetic oligonucleotide
  Sense strand starting at position 1467 of SEQ ID NO: 1883712
ccgauuagugcauguuucu

SEQ ID NO: 2211027 - RNA, 19 nt, Artificial Sequence
  Description of Artificial Sequence: Synthetic oligonucleotide
  Antisense strand to SEQ ID NO: 2211026
agaaacaugcacuaaucgg

SEQ ID NO: 2211028 - RNA, 19 nt, Artificial Sequence
  Description of Artificial Sequence: Synthetic oligonucleotide
  Sense strand starting at position 2844 of SEQ ID NO: 1883712
ccugacucuucuggaagaa

SEQ ID NO: 2211029 - RNA, 19 nt, Artificial Sequence
  Description of Artificial Sequence: Synthetic oligonucleotide
  Antisense strand to SEQ ID NO: 2211028
uucuuccagaagagucagg

SEQ ID NO: 2211030 - RNA, 19 nt, Artificial Sequence
  Description of Artificial Sequence: Synthetic oligonucleotide
  Sense strand starting at position 1383 of SEQ ID NO: 1883712
cgacuuaggugaugcauuu

SEQ ID NO: 2211031 - RNA, 19 nt, Artificial Sequence
  Description of Artificial Sequence: Synthetic oligonucleotide
  Antisense strand to SEQ ID NO: 2211030
aaaugcaucaccuaagucg

SEQ ID NO: 2211032 - RNA, 19 nt, Artificial Sequence
  Description of Artificial Sequence: Synthetic oligonucleotide
  Sense strand starting at position 2843 of SEQ ID NO: 1883712
uccugacucuucuggaaga

SEQ ID NO: 2211033 - RNA, 19 nt, Artificial Sequence
  Description of Artificial Sequence: Synthetic oligonucleotide
  Antisense strand to SEQ ID NO: 2211032
ucuuccagaagagucagga

SEQ ID NO: 2211034 - RNA, 19 nt, Artificial Sequence
  Description of Artificial Sequence: Synthetic oligonucleotide
  Sense strand starting at position 3669 of SEQ ID NO: 1883713
ggaagaauaugaucaugcu

SEQ ID NO: 2211035 - RNA, 19 nt, Artificial Sequence
  Description of Artificial Sequence: Synthetic oligonucleotide
  Antisense strand to SEQ ID NO: 2211034
agcaugaucauauucuucc

SEQ ID NO: 2211036 - RNA, 19 nt, Artificial Sequence
  Description of Artificial Sequence: Synthetic oligonucleotide
  Sense strand starting at position 1371 of SEQ ID NO: 1883713
cccagucaccgggaggaau

SEQ ID NO: 2211037 - RNA, 19 nt, Artificial Sequence
  Description of Artificial Sequence: Synthetic oligonucleotide
  Antisense strand to SEQ ID NO: 2211036
auuccucccggugacuggg

SEQ ID NO: 2211038 - RNA, 19 nt, Artificial Sequence
  Description of Artificial Sequence: Synthetic oligonucleotide
  Sense strand starting at position 2886 of SEQ ID NO: 1883713
acgccuguuaugcuagcaa

SEQ ID NO: 2211039 - RNA, 19 nt, Artificial Sequence
  Description of Artificial Sequence: Synthetic oligonucleotide
  Antisense strand to SEQ ID NO: 2211038
uugcuagcauaacaggcgu

SEQ ID NO: 2211040 - RNA, 19 nt, Artificial Sequence
  Description of Artificial Sequence: Synthetic oligonucleotide
  Sense strand starting at position 3064 of SEQ ID NO: 1883713
gcagcuguccuugcuauua

SEQ ID NO: 2211041 - RNA, 19 nt, Artificial Sequence
  Description of Artificial Sequence: Synthetic oligonucleotide
  Antisense strand to SEQ ID NO: 2211040
uaauagcaaggacagcugc

SEQ ID NO: 2211042 - RNA, 19 nt, Artificial Sequence
  Description of Artificial Sequence: Synthetic oligonucleotide
  Sense strand starting at position 2329 of SEQ ID NO: 1883713
uagcauucccagcaggaga

SEQ ID NO: 2211043 - RNA, 19 nt, Artificial Sequence
  Description of Artificial Sequence: Synthetic oligonucleotide
  Antisense strand to SEQ ID NO: 2211042
ucuccugcugggaaugcua

SEQ ID NO: 2211044 - RNA, 19 nt, Artificial Sequence
  Description of Artificial Sequence: Synthetic oligonucleotide
  Sense strand starting at position 3675 of SEQ ID NO: 1883713
auaugaucaugcuucugaa

SEQ ID NO: 2211045 - RNA, 19 nt, Artificial Sequence
  Description of Artificial Sequence: Synthetic oligonucleotide
  Antisense strand to SEQ ID NO: 2211044
uucagaagcaugaucauau

SEQ ID NO: 2211046 - RNA, 19 nt, Artificial Sequence
  Description of Artificial Sequence: Synthetic oligonucleotide
  Sense strand starting at position 2268 of SEQ ID NO: 1883713
ucagacagauguccgauua

SEQ ID NO: 2211047 - RNA, 19 nt, Artificial Sequence
  Description of Artificial Sequence: Synthetic oligonucleotide
  Antisense strand to SEQ ID NO: 2211046
uaaucggacaucugucuga

SEQ ID NO: 2211048 - RNA, 19 nt, Artificial Sequence
  Description of Artificial Sequence: Synthetic oligonucleotide
  Sense strand starting at position 2578 of SEQ ID NO: 1883713
caucgcugggcauaaauaa

SEQ ID NO: 2211049 - RNA, 19 nt, Artificial Sequence
  Description of Artificial Sequence: Synthetic oligonucleotide
  Antisense strand to SEQ ID NO: 2211048
uuauuuaugcccagcgaug

SEQ ID NO: 2211050 - RNA, 19 nt, Artificial Sequence
  Description of Artificial Sequence: Synthetic oligonucleotide
  Sense strand starting at position 2938 of SEQ ID NO: 1883713
uggcauccuagagguauaa

SEQ ID NO: 2211051 - RNA, 19 nt, Artificial Sequence
  Description of Artificial Sequence: Synthetic oligonucleotide
  Antisense strand to SEQ ID NO: 2211050
uuauaccucuaggaugcca

SEQ ID NO: 2211052 - RNA, 19 nt, Artificial Sequence
  Description of Artificial Sequence: Synthetic oligonucleotide
  Sense strand starting at position 2936 of SEQ ID NO: 1883713
guuggcauccuagagguau

SEQ ID NO: 2211053 - RNA, 19 nt, Artificial Sequence
  Description of Artificial Sequence: Synthetic oligonucleotide
  Antisense strand to SEQ ID NO: 2211052
auaccucuaggaugccaac

SEQ ID NO: 2211054 - RNA, 19 nt, Artificial Sequence
  Description of Artificial Sequence: Synthetic oligonucleotide
  Sense strand starting at position 3654 of SEQ ID NO: 1883713
guuccugacucuucuggaa

SEQ ID NO: 2211055 - RNA, 19 nt, Artificial Sequence
  Description of Artificial Sequence: Synthetic oligonucleotide
  Antisense strand to SEQ ID NO: 2211054
uuccagaagagucaggaac

SEQ ID NO: 2211056 - RNA, 19 nt, Artificial Sequence
  Description of Artificial Sequence: Synthetic oligonucleotide
  Sense strand starting at position 2563 of SEQ ID NO: 1883713
ccuuguuagagaggucauc

SEQ ID NO: 2211057 - RNA, 19 nt, Artificial Sequence
  Description of Artificial Sequence: Synthetic oligonucleotide
  Antisense strand to SEQ ID NO: 2211056
gaugaccucucuaacaagg

SEQ ID NO: 2211058 - RNA, 19 nt, Artificial Sequence
  Description of Artificial Sequence: Synthetic oligonucleotide
  Sense strand starting at position 330 of SEQ ID NO: 1883713
ucccacgaugccugaauau

SEQ ID NO: 2211059 - RNA, 19 nt, Artificial Sequence
  Description of Artificial Sequence: Synthetic oligonucleotide
  Antisense strand to SEQ ID NO: 2211058
auauucaggcaucguggga

SEQ ID NO: 2211060 - RNA, 19 nt, Artificial Sequence
  Description of Artificial Sequence: Synthetic oligonucleotide
  Sense strand starting at position 1559 of SEQ ID NO: 1883713
aggcuuugcguacacaaua

SEQ ID NO: 2211061 - RNA, 19 nt, Artificial Sequence
  Description of Artificial Sequence: Synthetic oligonucleotide
  Antisense strand to SEQ ID NO: 2211060
uauuguguacgcaaagccu

SEQ ID NO: 2211062 - RNA, 19 nt, Artificial Sequence
  Description of Artificial Sequence: Synthetic oligonucleotide
  Sense strand starting at position 2576 of SEQ ID NO: 1883713
gucaucgcugggcauaaau

SEQ ID NO: 2211063 - RNA, 19 nt, Artificial Sequence
  Description of Artificial Sequence: Synthetic oligonucleotide
  Antisense strand to SEQ ID NO: 2211062
auuuaugcccagcgaugac

SEQ ID NO: 2211064 - RNA, 19 nt, Artificial Sequence
  Description of Artificial Sequence: Synthetic oligonucleotide
  Sense strand starting at position 2950 of SEQ ID NO: 1883713
gguauaauuucuugaauca

SEQ ID NO: 2211065 - RNA, 19 nt, Artificial Sequence
  Description of Artificial Sequence: Synthetic oligonucleotide
  Antisense strand to SEQ ID NO: 2211064
ugauucaagaaauuauacc

SEQ ID NO: 2211066 - RNA, 19 nt, Artificial Sequence
  Description of Artificial Sequence: Synthetic oligonucleotide
  Sense strand starting at position 1557 of SEQ ID NO: 1883713
ucaggcuuugcguacacaa

SEQ ID NO: 2211067 - RNA, 19 nt, Artificial Sequence
  Description of Artificial Sequence: Synthetic oligonucleotide
  Antisense strand to SEQ ID NO: 2211066
uuguguacgcaaagccuga

SEQ ID NO: 2211068 - RNA, 19 nt, Artificial Sequence
  Description of Artificial Sequence: Synthetic oligonucleotide
  Sense strand starting at position 1439 of SEQ ID NO: 1883713
ggacuuuaaucacaggaca

SEQ ID NO: 2211069 - RNA, 19 nt, Artificial Sequence
  Description of Artificial Sequence: Synthetic oligonucleotide
  Antisense strand to SEQ ID NO: 2211068
uguccugugauuaaagucc

SEQ ID NO: 2211070 - RNA, 19 nt, Artificial Sequence
  Description of Artificial Sequence: Synthetic oligonucleotide
  Sense strand starting at position 3982 of SEQ ID NO: 1883713
aaugaugauuguuagagaa

SEQ ID NO: 2211071 - RNA, 19 nt, Artificial Sequence
  Description of Artificial Sequence: Synthetic oligonucleotide
  Antisense strand to SEQ ID NO: 2211070
uucucuaacaaucaucauu

SEQ ID NO: 2211072 - RNA, 19 nt, Artificial Sequence
  Description of Artificial Sequence: Synthetic oligonucleotide
  Sense strand starting at position 2575 of SEQ ID NO: 1883713
ggucaucgcugggcauaaa

SEQ ID NO: 2211073 - RNA, 19 nt, Artificial Sequence
  Description of Artificial Sequence: Synthetic oligonucleotide
  Antisense strand to SEQ ID NO: 2211072
uuuaugcccagcgaugacc

SEQ ID NO: 2211074 - RNA, 19 nt, Artificial Sequence
  Description of Artificial Sequence: Synthetic oligonucleotide
  Sense strand starting at position 2574 of SEQ ID NO: 1883713
aggucaucgcugggcauaa

SEQ ID NO: 2211075 - RNA, 19 nt, Artificial Sequence
  Description of Artificial Sequence: Synthetic oligonucleotide
  Antisense strand to SEQ ID NO: 2211074
uuaugcccagcgaugaccu

SEQ ID NO: 2211076 - RNA, 19 nt, Artificial Sequence
  Description of Artificial Sequence: Synthetic oligonucleotide
  Sense strand starting at position 3464 of SEQ ID NO: 1883713
acacguacgccacgaaaua

SEQ ID NO: 2211077 - RNA, 19 nt, Artificial Sequence
  Description of Artificial Sequence: Synthetic oligonucleotide
  Antisense strand to SEQ ID NO: 2211076
uauuucguggcguacgugu

SEQ ID NO: 2211078 - RNA, 19 nt, Artificial Sequence
  Description of Artificial Sequence: Synthetic oligonucleotide
  Sense strand starting at position 2573 of SEQ ID NO: 1883713
gaggucaucgcugggcaua

SEQ ID NO: 2211079 - RNA, 19 nt, Artificial Sequence
  Description of Artificial Sequence: Synthetic oligonucleotide
  Antisense strand to SEQ ID NO: 2211078
uaugcccagcgaugaccuc

SEQ ID NO: 2211080 - RNA, 19 nt, Artificial Sequence
  Description of Artificial Sequence: Synthetic oligonucleotide
  Sense strand starting at position 2572 of SEQ ID NO: 1883713
agaggucaucgcugggcau

SEQ ID NO: 2211081 - RNA, 19 nt, Artificial Sequence
  Description of Artificial Sequence: Synthetic oligonucleotide
  Antisense strand to SEQ ID NO: 2211080
augcccagcgaugaccucu

SEQ ID NO: 2211082 - RNA, 19 nt, Artificial Sequence
  Description of Artificial Sequence: Synthetic oligonucleotide
  Sense strand starting at position 2287 of SEQ ID NO: 1883713
gugcauguuucuguggaca

SEQ ID NO: 2211083 - RNA, 19 nt, Artificial Sequence
  Description of Artificial Sequence: Synthetic oligonucleotide
  Antisense strand to SEQ ID NO: 2211082
uguccacagaaacaugcac

SEQ ID NO: 2211084 - RNA, 19 nt, Artificial Sequence
  Description of Artificial Sequence: Synthetic oligonucleotide
  Sense strand starting at position 2278 of SEQ ID NO: 1883713
guccgauuagugcauguuu

SEQ ID NO: 2211085 - RNA, 19 nt, Artificial Sequence
  Description of Artificial Sequence: Synthetic oligonucleotide
  Antisense strand to SEQ ID NO: 2211084
aaacaugcacuaaucggac

SEQ ID NO: 2211086 - RNA, 19 nt, Artificial Sequence
  Description of Artificial Sequence: Synthetic oligonucleotide
  Sense strand starting at position 2908 of SEQ ID NO: 1883713
gguggaguuucuguuuguu

SEQ ID NO: 2211087 - RNA, 19 nt, Artificial Sequence
  Description of Artificial Sequence: Synthetic oligonucleotide
  Antisense strand to SEQ ID NO: 2211086
aacaaacagaaacuccacc

SEQ ID NO: 2211088 - RNA, 19 nt, Artificial Sequence
  Description of Artificial Sequence: Synthetic oligonucleotide
  Sense strand starting at position 475 of SEQ ID NO: 1883713
acaccagaauguggagaau

SEQ ID NO: 2211089 - RNA, 19 nt, Artificial Sequence
  Description of Artificial Sequence: Synthetic oligonucleotide
  Antisense strand to SEQ ID NO: 2211088
auucuccacauucuggugu

SEQ ID NO: 2211090 - RNA, 19 nt, Artificial Sequence
  Description of Artificial Sequence: Synthetic oligonucleotide
  Sense strand starting at position 271 of SEQ ID NO: 1883713
ugcccagcuucugucuaua

SEQ ID NO: 2211091 - RNA, 19 nt, Artificial Sequence
  Description of Artificial Sequence: Synthetic oligonucleotide
  Antisense strand to SEQ ID NO: 2211090
uauagacagaagcugggca

SEQ ID NO: 2211092 - RNA, 19 nt, Artificial Sequence
  Description of Artificial Sequence: Synthetic oligonucleotide
  Sense strand starting at position 3310 of SEQ ID NO: 1883713
aagggagacuugugaccaa

SEQ ID NO: 2211093 - RNA, 19 nt, Artificial Sequence
  Description of Artificial Sequence: Synthetic oligonucleotide
  Antisense strand to SEQ ID NO: 2211092
uuggucacaagucucccuu

SEQ ID NO: 2211094 - RNA, 19 nt, Artificial Sequence
  Description of Artificial Sequence: Synthetic oligonucleotide
  Sense strand starting at position 1613 of SEQ ID NO: 1883713
ucuaacuguucucagaaag

SEQ ID NO: 2211095 - RNA, 19 nt, Artificial Sequence
  Description of Artificial Sequence: Synthetic oligonucleotide
  Antisense strand to SEQ ID NO: 2211094
cuuucugagaacaguuaga

SEQ ID NO: 2211096 - RNA, 19 nt, Artificial Sequence
  Description of Artificial Sequence: Synthetic oligonucleotide
  Sense strand starting at position 3975 of SEQ ID NO: 1883713
cagaaauaaugaugauugu

SEQ ID NO: 2211097 - RNA, 19 nt, Artificial Sequence
  Description of Artificial Sequence: Synthetic oligonucleotide
  Antisense strand to SEQ ID NO: 2211096
acaaucaucauuauuucug

SEQ ID NO: 2211098 - RNA, 19 nt, Artificial Sequence
  Description of Artificial Sequence: Synthetic oligonucleotide
  Sense strand starting at position 2911 of SEQ ID NO: 1883713
ggaguuucuguuuguuguu

SEQ ID NO: 2211099 - RNA, 19 nt, Artificial Sequence
  Description of Artificial Sequence: Synthetic oligonucleotide
  Antisense strand to SEQ ID NO: 2211098
aacaacaaacagaaacucc

SEQ ID NO: 2211100 - RNA, 19 nt, Artificial Sequence
  Description of Artificial Sequence: Synthetic oligonucleotide
  Sense strand starting at position 410 of SEQ ID NO: 1883713
ucaggcuucuaagagaacu

SEQ ID NO: 2211101 - RNA, 19 nt, Artificial Sequence
  Description of Artificial Sequence: Synthetic oligonucleotide
  Antisense strand to SEQ ID NO: 2211100
aguucucuuagaagccuga

SEQ ID NO: 2211102 - RNA, 19 nt, Artificial Sequence
  Description of Artificial Sequence: Synthetic oligonucleotide
  Sense strand starting at position 2280 of SEQ ID NO: 1883713
ccgauuagugcauguuucu

SEQ ID NO: 2211103 - RNA, 19 nt, Artificial Sequence
  Description of Artificial Sequence: Synthetic oligonucleotide
  Antisense strand to SEQ ID NO: 2211102
agaaacaugcacuaaucgg

SEQ ID NO: 2211104 - RNA, 19 nt, Artificial Sequence
  Description of Artificial Sequence: Synthetic oligonucleotide
  Sense strand starting at position 55 of SEQ ID NO: 1883713
agcuucuaaugagauccau

SEQ ID NO: 2211105 - RNA, 19 nt, Artificial Sequence
  Description of Artificial Sequence: Synthetic oligonucleotide
  Antisense strand to SEQ ID NO: 2211104
auggaucucauuagaagcu

SEQ ID NO: 2211106 - RNA, 19 nt, Artificial Sequence
  Description of Artificial Sequence: Synthetic oligonucleotide
  Sense strand starting at position 291 of SEQ ID NO: 1883713
ccuaaaccuuguggagaaa

SEQ ID NO: 2211107 - RNA, 19 nt, Artificial Sequence
  Description of Artificial Sequence: Synthetic oligonucleotide
  Antisense strand to SEQ ID NO: 2211106
uuucuccacaagguuuagg

SEQ ID NO: 2211108 - RNA, 19 nt, Artificial Sequence
  Description of Artificial Sequence: Synthetic oligonucleotide
  Sense strand starting at position 3657 of SEQ ID NO: 1883713
ccugacucuucuggaagaa

SEQ ID NO: 2211109 - RNA, 19 nt, Artificial Sequence
  Description of Artificial Sequence: Synthetic oligonucleotide
  Antisense strand to SEQ ID NO: 2211108
uucuuccagaagagucagg

SEQ ID NO: 2211110 - RNA, 19 nt, Artificial Sequence
  Description of Artificial Sequence: Synthetic oligonucleotide
  Sense strand starting at position 2196 of SEQ ID NO: 1883713
cgacuuaggugaugcauuu

SEQ ID NO: 2211111 - RNA, 19 nt, Artificial Sequence
  Description of Artificial Sequence: Synthetic oligonucleotide
  Antisense strand to SEQ ID NO: 2211110
aaaugcaucaccuaagucg

SEQ ID NO: 2211112 - RNA, 19 nt, Artificial Sequence
  Description of Artificial Sequence: Synthetic oligonucleotide
  Sense strand starting at position 290 of SEQ ID NO: 1883713
cccuaaaccuuguggagaa

SEQ ID NO: 2211113 - RNA, 19 nt, Artificial Sequence
  Description of Artificial Sequence: Synthetic oligonucleotide
  Antisense strand to SEQ ID NO: 2211112
uucuccacaagguuuaggg

SEQ ID NO: 2211114 - RNA, 19 nt, Artificial Sequence
  Description of Artificial Sequence: Synthetic oligonucleotide
  Sense strand starting at position 3093 of SEQ ID NO: 1883714
ggaagaauaugaucaugcu

SEQ ID NO: 2211115 - RNA, 19 nt, Artificial Sequence
  Description of Artificial Sequence: Synthetic oligonucleotide
  Antisense strand to SEQ ID NO: 2211114
agcaugaucauauucuucc

SEQ ID NO: 2211116 - RNA, 19 nt, Artificial Sequence
  Description of Artificial Sequence: Synthetic oligonucleotide
  Sense strand starting at position 795 of SEQ ID NO: 1883714
cccagucaccgggaggaau

SEQ ID NO: 2211117 - RNA, 19 nt, Artificial Sequence
  Description of Artificial Sequence: Synthetic oligonucleotide
  Antisense strand to SEQ ID NO: 2211116
auuccucccggugacuggg

SEQ ID NO: 2211118 - RNA, 19 nt, Artificial Sequence
  Description of Artificial Sequence: Synthetic oligonucleotide
  Sense strand starting at position 3456 of SEQ ID NO: 1883714
uguguacuaccgcuagguu

SEQ ID NO: 2211119 - RNA, 19 nt, Artificial Sequence
  Description of Artificial Sequence: Synthetic oligonucleotide
  Antisense strand to SEQ ID NO: 2211118
aaccuagcgguaguacaca

SEQ ID NO: 2211120 - RNA, 19 nt, Artificial Sequence
  Description of Artificial Sequence: Synthetic oligonucleotide
  Sense strand starting at position 2310 of SEQ ID NO: 1883714
acgccuguuaugcuagcaa

SEQ ID NO: 2211121 - RNA, 19 nt, Artificial Sequence
  Description of Artificial Sequence: Synthetic oligonucleotide
  Antisense strand to SEQ ID NO: 2211120
uugcuagcauaacaggcgu

SEQ ID NO: 2211122 - RNA, 19 nt, Artificial Sequence
  Description of Artificial Sequence: Synthetic oligonucleotide
  Sense strand starting at position 2488 of SEQ ID NO: 1883714
gcagcuguccuugcuauua

SEQ ID NO: 2211123 - RNA, 19 nt, Artificial Sequence
  Description of Artificial Sequence: Synthetic oligonucleotide
  Antisense strand to SEQ ID NO: 2211122
uaauagcaaggacagcugc

SEQ ID NO: 2211124 - RNA, 19 nt, Artificial Sequence
  Description of Artificial Sequence: Synthetic oligonucleotide
  Sense strand starting at position 1753 of SEQ ID NO: 1883714
uagcauucccagcaggaga

SEQ ID NO: 2211125 - RNA, 19 nt, Artificial Sequence
  Description of Artificial Sequence: Synthetic oligonucleotide
  Antisense strand to SEQ ID NO: 2211124
ucuccugcugggaaugcua

SEQ ID NO: 2211126 - RNA, 19 nt, Artificial Sequence
  Description of Artificial Sequence: Synthetic oligonucleotide
  Sense strand starting at position 3475 of SEQ ID NO: 1883714
gcuuuaauaguguagaaac

SEQ ID NO: 2211127 - RNA, 19 nt, Artificial Sequence
  Description of Artificial Sequence: Synthetic oligonucleotide
  Antisense strand to SEQ ID NO: 2211126
guuucuacacuauuaaagc

SEQ ID NO: 2211128 - RNA, 19 nt, Artificial Sequence
  Description of Artificial Sequence: Synthetic oligonucleotide
  Sense strand starting at position 3099 of SEQ ID NO: 1883714
auaugaucaugcuucugaa

SEQ ID NO: 2211129 - RNA, 19 nt, Artificial Sequence
  Description of Artificial Sequence: Synthetic oligonucleotide
  Antisense strand to SEQ ID NO: 2211128
uucagaagcaugaucauau

SEQ ID NO: 2211130 - RNA, 19 nt, Artificial Sequence
  Description of Artificial Sequence: Synthetic oligonucleotide
  Sense strand starting at position 1692 of SEQ ID NO: 1883714
ucagacagauguccgauua

SEQ ID NO: 2211131 - RNA, 19 nt, Artificial Sequence
  Description of Artificial Sequence: Synthetic oligonucleotide
  Antisense strand to SEQ ID NO: 2211130
uaaucggacaucugucuga

SEQ ID NO: 2211132 - RNA, 19 nt, Artificial Sequence
  Description of Artificial Sequence: Synthetic oligonucleotide
  Sense strand starting at position 3532 of SEQ ID NO: 1883714
agguuaauuccaggcacaa

SEQ ID NO: 2211133 - RNA, 19 nt, Artificial Sequence
  Description of Artificial Sequence: Synthetic oligonucleotide
  Antisense strand to SEQ ID NO: 2211132
uugugccuggaauuaaccu

SEQ ID NO: 2211134 - RNA, 19 nt, Artificial Sequence
  Description of Artificial Sequence: Synthetic oligonucleotide
  Sense strand starting at position 2002 of SEQ ID NO: 1883714
caucgcugggcauaaauaa

SEQ ID NO: 2211135 - RNA, 19 nt, Artificial Sequence
  Description of Artificial Sequence: Synthetic oligonucleotide
  Antisense strand to SEQ ID NO: 2211134
uuauuuaugcccagcgaug

SEQ ID NO: 2211136 - RNA, 19 nt, Artificial Sequence
  Description of Artificial Sequence: Synthetic oligonucleotide
  Sense strand starting at position 3599 of SEQ ID NO: 1883714
gggagaaauuccgcuccaa

SEQ ID NO: 2211137 - RNA, 19 nt, Artificial Sequence
  Description of Artificial Sequence: Synthetic oligonucleotide
  Antisense strand to SEQ ID NO: 2211136
uuggagcggaauuucuccc

SEQ ID NO: 2211138 - RNA, 19 nt, Artificial Sequence
  Description of Artificial Sequence: Synthetic oligonucleotide
  Sense strand starting at position 2362 of SEQ ID NO: 1883714
uggcauccuagagguauaa

SEQ ID NO: 2211139 - RNA, 19 nt, Artificial Sequence
  Description of Artificial Sequence: Synthetic oligonucleotide
  Antisense strand to SEQ ID NO: 2211138
uuauaccucuaggaugcca

SEQ ID NO: 2211140 - RNA, 19 nt, Artificial Sequence
  Description of Artificial Sequence: Synthetic oligonucleotide
  Sense strand starting at position 2360 of SEQ ID NO: 1883714
guuggcauccuagagguau

SEQ ID NO: 2211141 - RNA, 19 nt, Artificial Sequence
  Description of Artificial Sequence: Synthetic oligonucleotide
  Antisense strand to SEQ ID NO: 2211140
auaccucuaggaugccaac

SEQ ID NO: 2211142 - RNA, 19 nt, Artificial Sequence
  Description of Artificial Sequence: Synthetic oligonucleotide
  Sense strand starting at position 3078 of SEQ ID NO: 1883714
guuccugacucuucuggaa

SEQ ID NO: 2211143 - RNA, 19 nt, Artificial Sequence
  Description of Artificial Sequence: Synthetic oligonucleotide
  Antisense strand to SEQ ID NO: 2211142
uuccagaagagucaggaac

SEQ ID NO: 2211144 - RNA, 19 nt, Artificial Sequence
  Description of Artificial Sequence: Synthetic oligonucleotide
  Sense strand starting at position 1987 of SEQ ID NO: 1883714
ccuuguuagagaggucauc

SEQ ID NO: 2211145 - RNA, 19 nt, Artificial Sequence
  Description of Artificial Sequence: Synthetic oligonucleotide
  Antisense strand to SEQ ID NO: 2211144
gaugaccucucuaacaagg

SEQ ID NO: 2211146 - RNA, 19 nt, Artificial Sequence
  Description of Artificial Sequence: Synthetic oligonucleotide
  Sense strand starting at position 983 of SEQ ID NO: 1883714
aggcuuugcguacacaaua

SEQ ID NO: 2211147 - RNA, 19 nt, Artificial Sequence
  Description of Artificial Sequence: Synthetic oligonucleotide
  Antisense strand to SEQ ID NO: 2211146
uauuguguacgcaaagccu

SEQ ID NO: 2211148 - RNA, 19 nt, Artificial Sequence
  Description of Artificial Sequence: Synthetic oligonucleotide
  Sense strand starting at position 2000 of SEQ ID NO: 1883714
gucaucgcugggcauaaau

SEQ ID NO: 2211149 - RNA, 19 nt, Artificial Sequence
  Description of Artificial Sequence: Synthetic oligonucleotide
  Antisense strand to SEQ ID NO: 2211148
auuuaugcccagcgaugac

SEQ ID NO: 2211150 - RNA, 19 nt, Artificial Sequence
  Description of Artificial Sequence: Synthetic oligonucleotide
  Sense strand starting at position 2374 of SEQ ID NO: 1883714
gguauaauuucuugaauca

SEQ ID NO: 2211151 - RNA, 19 nt, Artificial Sequence
  Description of Artificial Sequence: Synthetic oligonucleotide
  Antisense strand to SEQ ID NO: 2211150
ugauucaagaaauuauacc

SEQ ID NO: 2211152 - RNA, 19 nt, Artificial Sequence
  Description of Artificial Sequence: Synthetic oligonucleotide
  Sense strand starting at position 981 of SEQ ID NO: 1883714
ucaggcuuugcguacacaa

SEQ ID NO: 2211153 - RNA, 19 nt, Artificial Sequence
  Description of Artificial Sequence: Synthetic oligonucleotide
  Antisense strand to SEQ ID NO: 2211152
uuguguacgcaaagccuga

SEQ ID NO: 2211154 - RNA, 19 nt, Artificial Sequence
  Description of Artificial Sequence: Synthetic oligonucleotide
  Sense strand starting at position 863 of SEQ ID NO: 1883714
ggacuuuaaucacaggaca

SEQ ID NO: 2211155 - RNA, 19 nt, Artificial Sequence
  Description of Artificial Sequence: Synthetic oligonucleotide
  Antisense strand to SEQ ID NO: 2211154
uguccugugauuaaagucc

SEQ ID NO: 2211156 - RNA, 19 nt, Artificial Sequence
  Description of Artificial Sequence: Synthetic oligonucleotide
  Sense strand starting at position 3406 of SEQ ID NO: 1883714
aaugaugauuguuagagaa

SEQ ID NO: 2211157 - RNA, 19 nt, Artificial Sequence
  Description of Artificial Sequence: Synthetic oligonucleotide
  Antisense strand to SEQ ID NO: 2211156
uucucuaacaaucaucauu

SEQ ID NO: 2211158 - RNA, 19 nt, Artificial Sequence
  Description of Artificial Sequence: Synthetic oligonucleotide
  Sense strand starting at position 1999 of SEQ ID NO: 1883714
ggucaucgcugggcauaaa

SEQ ID NO: 2211159 - RNA, 19 nt, Artificial Sequence
  Description of Artificial Sequence: Synthetic oligonucleotide
  Antisense strand to SEQ ID NO: 2211158
uuuaugcccagcgaugacc

SEQ ID NO: 2211160 - RNA, 19 nt, Artificial Sequence
  Description of Artificial Sequence: Synthetic oligonucleotide
  Sense strand starting at position 1998 of SEQ ID NO: 1883714
aggucaucgcugggcauaa

SEQ ID NO: 2211161 - RNA, 19 nt, Artificial Sequence
  Description of Artificial Sequence: Synthetic oligonucleotide
  Antisense strand to SEQ ID NO: 2211160
uuaugcccagcgaugaccu

SEQ ID NO: 2211162 - RNA, 19 nt, Artificial Sequence
  Description of Artificial Sequence: Synthetic oligonucleotide
  Sense strand starting at position 2888 of SEQ ID NO: 1883714
acacguacgccacgaaaua

SEQ ID NO: 2211163 - RNA, 19 nt, Artificial Sequence
  Description of Artificial Sequence: Synthetic oligonucleotide
  Antisense strand to SEQ ID NO: 2211162
uauuucguggcguacgugu

SEQ ID NO: 2211164 - RNA, 19 nt, Artificial Sequence
  Description of Artificial Sequence: Synthetic oligonucleotide
  Sense strand starting at position 1997 of SEQ ID NO: 1883714
gaggucaucgcugggcaua

SEQ ID NO: 2211165 - RNA, 19 nt, Artificial Sequence
  Description of Artificial Sequence: Synthetic oligonucleotide
  Antisense strand to SEQ ID NO: 2211164
uaugcccagcgaugaccuc

SEQ ID NO: 2211166 - RNA, 19 nt, Artificial Sequence
  Description of Artificial Sequence: Synthetic oligonucleotide
  Sense strand starting at position 1996 of SEQ ID NO: 1883714
agaggucaucgcugggcau

SEQ ID NO: 2211167 - RNA, 19 nt, Artificial Sequence
  Description of Artificial Sequence: Synthetic oligonucleotide
  Antisense strand to SEQ ID NO: 2211166
augcccagcgaugaccucu

SEQ ID NO: 2211168 - RNA, 19 nt, Artificial Sequence
  Description of Artificial Sequence: Synthetic oligonucleotide
  Sense strand starting at position 1711 of SEQ ID NO: 1883714
gugcauguuucuguggaca

SEQ ID NO: 2211169 - RNA, 19 nt, Artificial Sequence
  Description of Artificial Sequence: Synthetic oligonucleotide
  Antisense strand to SEQ ID NO: 2211168
uguccacagaaacaugcac

SEQ ID NO: 2211170 - RNA, 19 nt, Artificial Sequence
  Description of Artificial Sequence: Synthetic oligonucleotide
  Sense strand starting at position 1702 of SEQ ID NO: 1883714
guccgauuagugcauguuu

SEQ ID NO: 2211171 - RNA, 19 nt, Artificial Sequence
  Description of Artificial Sequence: Synthetic oligonucleotide
  Antisense strand to SEQ ID NO: 2211170
aaacaugcacuaaucggac

SEQ ID NO: 2211172 - RNA, 19 nt, Artificial Sequence
  Description of Artificial Sequence: Synthetic oligonucleotide
  Sense strand starting at position 2332 of SEQ ID NO: 1883714
gguggaguuucuguuuguu

SEQ ID NO: 2211173 - RNA, 19 nt, Artificial Sequence
  Description of Artificial Sequence: Synthetic oligonucleotide
  Antisense strand to SEQ ID NO: 2211172
aacaaacagaaacuccacc

SEQ ID NO: 2211174 - RNA, 19 nt, Artificial Sequence
  Description of Artificial Sequence: Synthetic oligonucleotide
  Sense strand starting at position 2734 of SEQ ID NO: 1883714
aagggagacuugugaccaa

SEQ ID NO: 2211175 - RNA, 19 nt, Artificial Sequence
  Description of Artificial Sequence: Synthetic oligonucleotide
  Antisense strand to SEQ ID NO: 2211174
uuggucacaagucucccuu

SEQ ID NO: 2211176 - RNA, 19 nt, Artificial Sequence
  Description of Artificial Sequence: Synthetic oligonucleotide
  Sense strand starting at position 3464 of SEQ ID NO: 1883714
accgcuagguugcuuuaau

SEQ ID NO: 2211177 - RNA, 19 nt, Artificial Sequence
  Description of Artificial Sequence: Synthetic oligonucleotide
  Antisense strand to SEQ ID NO: 2211176
auuaaagcaaccuagcggu

SEQ ID NO: 2211178 - RNA, 19 nt, Artificial Sequence
  Description of Artificial Sequence: Synthetic oligonucleotide
  Sense strand starting at position 3465 of SEQ ID NO: 1883714
ccgcuagguugcuuuaaua

SEQ ID NO: 2211179 - RNA, 19 nt, Artificial Sequence
  Description of Artificial Sequence: Synthetic oligonucleotide
  Antisense strand to SEQ ID NO: 2211178
uauuaaagcaaccuagcgg

SEQ ID NO: 2211180 - RNA, 19 nt, Artificial Sequence
  Description of Artificial Sequence: Synthetic oligonucleotide
  Sense strand starting at position 1037 of SEQ ID NO: 1883714
ucuaacuguucucagaaag

SEQ ID NO: 2211181 - RNA, 19 nt, Artificial Sequence
  Description of Artificial Sequence: Synthetic oligonucleotide
  Antisense strand to SEQ ID NO: 2211180
cuuucugagaacaguuaga

SEQ ID NO: 2211182 - RNA, 19 nt, Artificial Sequence
  Description of Artificial Sequence: Synthetic oligonucleotide
  Sense strand starting at position 3399 of SEQ ID NO: 1883714
cagaaauaaugaugauugu

SEQ ID NO: 2211183 - RNA, 19 nt, Artificial Sequence
  Description of Artificial Sequence: Synthetic oligonucleotide
  Antisense strand to SEQ ID NO: 2211182
acaaucaucauuauuucug

SEQ ID NO: 2211184 - RNA, 19 nt, Artificial Sequence
  Description of Artificial Sequence: Synthetic oligonucleotide
  Sense strand starting at position 2335 of SEQ ID NO: 1883714
ggaguuucuguuuguuguu

SEQ ID NO: 2211185 - RNA, 19 nt, Artificial Sequence
  Description of Artificial Sequence: Synthetic oligonucleotide
  Antisense strand to SEQ ID NO: 2211184
aacaacaaacagaaacucc

SEQ ID NO: 2211186 - RNA, 19 nt, Artificial Sequence
  Description of Artificial Sequence: Synthetic oligonucleotide
  Sense strand starting at position 1704 of SEQ ID NO: 1883714
ccgauuagugcauguuucu

SEQ ID NO: 2211187 - RNA, 19 nt, Artificial Sequence
  Description of Artificial Sequence: Synthetic oligonucleotide
  Antisense strand to SEQ ID NO: 2211186
agaaacaugcacuaaucgg

SEQ ID NO: 2211188 - RNA, 19 nt, Artificial Sequence
  Description of Artificial Sequence: Synthetic oligonucleotide
  Sense strand starting at position 3081 of SEQ ID NO: 1883714
ccugacucuucuggaagaa

SEQ ID NO: 2211189 - RNA, 19 nt, Artificial Sequence
  Description of Artificial Sequence: Synthetic oligonucleotide
  Antisense strand to SEQ ID NO: 2211188
uucuuccagaagagucagg

SEQ ID NO: 2211190 - RNA, 19 nt, Artificial Sequence
  Description of Artificial Sequence: Synthetic oligonucleotide
  Sense strand starting at position 1620 of SEQ ID NO: 1883714
cgacuuaggugaugcauuu

SEQ ID NO: 2211191 - RNA, 19 nt, Artificial Sequence
  Description of Artificial Sequence: Synthetic oligonucleotide
  Antisense strand to SEQ ID NO: 2211190
aaaugcaucaccuaagucg

SEQ ID NO: 2211192 - RNA, 19 nt, Artificial Sequence
  Description of Artificial Sequence: Synthetic oligonucleotide
  Sense strand starting at position 3080 of SEQ ID NO: 1883714
uccugacucuucuggaaga

SEQ ID NO: 2211193 - RNA, 19 nt, Artificial Sequence
  Description of Artificial Sequence: Synthetic oligonucleotide
  Antisense strand to SEQ ID NO: 2211192
ucuuccagaagagucagga

SEQ ID NO: 2211194 - RNA, 19 nt, Artificial Sequence
  Description of Artificial Sequence: Synthetic oligonucleotide
  Sense strand starting at position 895 of SEQ ID NO: 1883715
uccuaacuucgugaaauaa

SEQ ID NO: 2211195 - RNA, 19 nt, Artificial Sequence
  Description of Artificial Sequence: Synthetic oligonucleotide
  Antisense strand to SEQ ID NO: 2211194
uuauuucacgaaguuagga

SEQ ID NO: 2211196 - RNA, 19 nt, Artificial Sequence
  Description of Artificial Sequence: Synthetic oligonucleotide
  Sense strand starting at position 1239 of SEQ ID NO: 1883715
ccgagaacucaucaggcca

SEQ ID NO: 2211197 - RNA, 19 nt, Artificial Sequence
  Description of Artificial Sequence: Synthetic oligonucleotide
  Antisense strand to SEQ ID NO: 2211196
uggccugaugaguucucgg

SEQ ID NO: 2211198 - RNA, 19 nt, Artificial Sequence
  Description of Artificial Sequence: Synthetic oligonucleotide
  Sense strand starting at position 740 of SEQ ID NO: 1883715
gaaguuguacuagagcuaa

SEQ ID NO: 2211199 - RNA, 19 nt, Artificial Sequence
  Description of Artificial Sequence: Synthetic oligonucleotide
  Antisense strand to SEQ ID NO: 2211198
uuagcucuaguacaacuuc

SEQ ID NO: 2211200 - RNA, 19 nt, Artificial Sequence
  Description of Artificial Sequence: Synthetic oligonucleotide
  Sense strand starting at position 3594 of SEQ ID NO: 1883715
ccucucuuccugcaagaag

SEQ ID NO: 2211201 - RNA, 19 nt, Artificial Sequence
  Description of Artificial Sequence: Synthetic oligonucleotide
  Antisense strand to SEQ ID NO: 2211200
cuucuugcaggaagagagg

SEQ ID NO: 2211202 - RNA, 19 nt, Artificial Sequence
  Description of Artificial Sequence: Synthetic oligonucleotide
  Sense strand starting at position 1008 of SEQ ID NO: 1883715
cuggaaauuucugaacuac

SEQ ID NO: 2211203 - RNA, 19 nt, Artificial Sequence
  Description of Artificial Sequence: Synthetic oligonucleotide
  Antisense strand to SEQ ID NO: 2211202
guaguucagaaauuuccag

SEQ ID NO: 2211204 - RNA, 19 nt, Artificial Sequence
  Description of Artificial Sequence: Synthetic oligonucleotide
  Sense strand starting at position 203 of SEQ ID NO: 1883715
ggguccaucugaguuaaga

SEQ ID NO: 2211205 - RNA, 19 nt, Artificial Sequence
  Description of Artificial Sequence: Synthetic oligonucleotide
  Antisense strand to SEQ ID NO: 2211204
ucuuaacucagauggaccc

SEQ ID NO: 2211206 - RNA, 19 nt, Artificial Sequence
  Description of Artificial Sequence: Synthetic oligonucleotide
  Sense strand starting at position 510 of SEQ ID NO: 1883715
gaaaccagcugucucagaa

SEQ ID NO: 2211207 - RNA, 19 nt, Artificial Sequence
  Description of Artificial Sequence: Synthetic oligonucleotide
  Antisense strand to SEQ ID NO: 2211206
uucugagacagcugguuuc

SEQ ID NO: 2211208 - RNA, 19 nt, Artificial Sequence
  Description of Artificial Sequence: Synthetic oligonucleotide
  Sense strand starting at position 997 of SEQ ID NO: 1883715
agccacauucccuggaaau

SEQ ID NO: 2211209 - RNA, 19 nt, Artificial Sequence
  Description of Artificial Sequence: Synthetic oligonucleotide
  Antisense strand to SEQ ID NO: 2211208
auuuccagggaauguggcu

SEQ ID NO: 2211210 - RNA, 19 nt, Artificial Sequence
  Description of Artificial Sequence: Synthetic oligonucleotide
  Sense strand starting at position 3979 of SEQ ID NO: 1883715
uuuggugaccuugauguca

SEQ ID NO: 2211211 - RNA, 19 nt, Artificial Sequence
  Description of Artificial Sequence: Synthetic oligonucleotide
  Antisense strand to SEQ ID NO: 2211210
ugacaucaaggucaccaaa

SEQ ID NO: 2211212 - RNA, 19 nt, Artificial Sequence
  Description of Artificial Sequence: Synthetic oligonucleotide
  Sense strand starting at position 656 of SEQ ID NO: 1883715
gcucuauggcuguuucguu

SEQ ID NO: 2211213 - RNA, 19 nt, Artificial Sequence
  Description of Artificial Sequence: Synthetic oligonucleotide
  Antisense strand to SEQ ID NO: 2211212
aacgaaacagccauagagc

SEQ ID NO: 2211214 - RNA, 19 nt, Artificial Sequence
  Description of Artificial Sequence: Synthetic oligonucleotide
  Sense strand starting at position 858 of SEQ ID NO: 1883715
agcgaaauuuaacacuaaa

SEQ ID NO: 2211215 - RNA, 19 nt, Artificial Sequence
  Description of Artificial Sequence: Synthetic oligonucleotide
  Antisense strand to SEQ ID NO: 2211214
uuuaguguuaaauuucgcu

SEQ ID NO: 2211216 - RNA, 19 nt, Artificial Sequence
  Description of Artificial Sequence: Synthetic oligonucleotide
  Sense strand starting at position 998 of SEQ ID NO: 1883715
gccacauucccuggaaauu

SEQ ID NO: 2211217 - RNA, 19 nt, Artificial Sequence
  Description of Artificial Sequence: Synthetic oligonucleotide
  Antisense strand to SEQ ID NO: 2211216
aauuuccagggaauguggc

SEQ ID NO: 2211218 - RNA, 19 nt, Artificial Sequence
  Description of Artificial Sequence: Synthetic oligonucleotide
  Sense strand starting at position 668 of SEQ ID NO: 1883715
uuucguuggcaacaaacau

SEQ ID NO: 2211219 - RNA, 19 nt, Artificial Sequence
  Description of Artificial Sequence: Synthetic oligonucleotide
  Antisense strand to SEQ ID NO: 2211218
auguuuguugccaacgaaa

SEQ ID NO: 2211220 - RNA, 19 nt, Artificial Sequence
  Description of Artificial Sequence: Synthetic oligonucleotide
  Sense strand starting at position 2960 of SEQ ID NO: 1883715
acucuuguguacucaggaa

SEQ ID NO: 2211221 - RNA, 19 nt, Artificial Sequence
  Description of Artificial Sequence: Synthetic oligonucleotide
  Antisense strand to SEQ ID NO: 2211220
uuccugaguacacaagagu

SEQ ID NO: 2211222 - RNA, 19 nt, Artificial Sequence
  Description of Artificial Sequence: Synthetic oligonucleotide
  Sense strand starting at position 493 of SEQ ID NO: 1883715
gcaagaucaugggcucuga

SEQ ID NO: 2211223 - RNA, 19 nt, Artificial Sequence
  Description of Artificial Sequence: Synthetic oligonucleotide
  Antisense strand to SEQ ID NO: 2211222
ucagagcccaugaucuugc

SEQ ID NO: 2211224 - RNA, 19 nt, Artificial Sequence
  Description of Artificial Sequence: Synthetic oligonucleotide
  Sense strand starting at position 523 of SEQ ID NO: 1883715
ucagaagccuugucuauaa

SEQ ID NO: 2211225 - RNA, 19 nt, Artificial Sequence
  Description of Artificial Sequence: Synthetic oligonucleotide
  Antisense strand to SEQ ID NO: 2211224
uuauagacaaggcuucuga

SEQ ID NO: 2211226 - RNA, 19 nt, Artificial Sequence
  Description of Artificial Sequence: Synthetic oligonucleotide
  Sense strand starting at position 307 of SEQ ID NO: 1883715
uuaccuuugguucgacaaa

SEQ ID NO: 2211227 - RNA, 19 nt, Artificial Sequence
  Description of Artificial Sequence: Synthetic oligonucleotide
  Antisense strand to SEQ ID NO: 2211226
uuugucgaaccaaagguaa

SEQ ID NO: 2211228 - RNA, 19 nt, Artificial Sequence
  Description of Artificial Sequence: Synthetic oligonucleotide
  Sense strand starting at position 1007 of SEQ ID NO: 1883715
ccuggaaauuucugaacua

SEQ ID NO: 2211229 - RNA, 19 nt, Artificial Sequence
  Description of Artificial Sequence: Synthetic oligonucleotide
  Antisense strand to SEQ ID NO: 2211228
uaguucagaaauuuccagg

SEQ ID NO: 2211230 - RNA, 19 nt, Artificial Sequence
  Description of Artificial Sequence: Synthetic oligonucleotide
  Sense strand starting at position 893 of SEQ ID NO: 1883715
cuuccuaacuucgugaaau

SEQ ID NO: 2211231 - RNA, 19 nt, Artificial Sequence
  Description of Artificial Sequence: Synthetic oligonucleotide
  Antisense strand to SEQ ID NO: 2211230
auuucacgaaguuaggaag

SEQ ID NO: 2211232 - RNA, 19 nt, Artificial Sequence
  Description of Artificial Sequence: Synthetic oligonucleotide
  Sense strand starting at position 3975 of SEQ ID NO: 1883715
uggcuuuggugaccuugau

SEQ ID NO: 2211233 - RNA, 19 nt, Artificial Sequence
  Description of Artificial Sequence: Synthetic oligonucleotide
  Antisense strand to SEQ ID NO: 2211232
aucaaggucaccaaagcca

SEQ ID NO: 2211234 - RNA, 19 nt, Artificial Sequence
  Description of Artificial Sequence: Synthetic oligonucleotide
  Sense strand starting at position 570 of SEQ ID NO: 1883715
agaugaugguuugagacaa

SEQ ID NO: 2211235 - RNA, 19 nt, Artificial Sequence
  Description of Artificial Sequence: Synthetic oligonucleotide
  Antisense strand to SEQ ID NO: 2211234
uugucucaaaccaucaucu

SEQ ID NO: 2211236 - RNA, 19 nt, Artificial Sequence
  Description of Artificial Sequence: Synthetic oligonucleotide
  Sense strand starting at position 892 of SEQ ID NO: 1883715
gcuuccuaacuucgugaaa

SEQ ID NO: 2211237 - RNA, 19 nt, Artificial Sequence
  Description of Artificial Sequence: Synthetic oligonucleotide
  Antisense strand to SEQ ID NO: 2211236
uuucacgaaguuaggaagc

SEQ ID NO: 2211238 - RNA, 19 nt, Artificial Sequence
  Description of Artificial Sequence: Synthetic oligonucleotide
  Sense strand starting at position 958 of SEQ ID NO: 1883715
auaacugccuaagaaugaa

SEQ ID NO: 2211239 - RNA, 19 nt, Artificial Sequence
  Description of Artificial Sequence: Synthetic oligonucleotide
  Antisense strand to SEQ ID NO: 2211238
uucauucuuaggcaguuau

SEQ ID NO: 2211240 - RNA, 19 nt, Artificial Sequence
  Description of Artificial Sequence: Synthetic oligonucleotide
  Sense strand starting at position 2919 of SEQ ID NO: 1883715
ccgagucaguaaucgcaaa

SEQ ID NO: 2211241 - RNA, 19 nt, Artificial Sequence
  Description of Artificial Sequence: Synthetic oligonucleotide
  Antisense strand to SEQ ID NO: 2211240
uuugcgauuacugacucgg

SEQ ID NO: 2211242 - RNA, 19 nt, Artificial Sequence
  Description of Artificial Sequence: Synthetic oligonucleotide
  Sense strand starting at position 277 of SEQ ID NO: 1883715
agugucaucuucucguaag

SEQ ID NO: 2211243 - RNA, 19 nt, Artificial Sequence
  Description of Artificial Sequence: Synthetic oligonucleotide
  Antisense strand to SEQ ID NO: 2211242
cuuacgagaagaugacacu

SEQ ID NO: 2211244 - RNA, 19 nt, Artificial Sequence
  Description of Artificial Sequence: Synthetic oligonucleotide
  Sense strand starting at position 3449 of SEQ ID NO: 1883715
accugaaugugacauugga

SEQ ID NO: 2211245 - RNA, 19 nt, Artificial Sequence
  Description of Artificial Sequence: Synthetic oligonucleotide
  Antisense strand to SEQ ID NO: 2211244
uccaaugucacauucaggu

SEQ ID NO: 2211246 - RNA, 19 nt, Artificial Sequence
  Description of Artificial Sequence: Synthetic oligonucleotide
  Sense strand starting at position 728 of SEQ ID NO: 1883715
gaagguuuaugggaaguug

SEQ ID NO: 2211247 - RNA, 19 nt, Artificial Sequence
  Description of Artificial Sequence: Synthetic oligonucleotide
  Antisense strand to SEQ ID NO: 2211246
caacuucccauaaaccuuc

SEQ ID NO: 2211248 - RNA, 19 nt, Artificial Sequence
  Description of Artificial Sequence: Synthetic oligonucleotide
  Sense strand starting at position 664 of SEQ ID NO: 1883715
gcuguuucguuggcaacaa

SEQ ID NO: 2211249 - RNA, 19 nt, Artificial Sequence
  Description of Artificial Sequence: Synthetic oligonucleotide
  Antisense strand to SEQ ID NO: 2211248
uuguugccaacgaaacagc

SEQ ID NO: 2211250 - RNA, 19 nt, Artificial Sequence
  Description of Artificial Sequence: Synthetic oligonucleotide
  Sense strand starting at position 661 of SEQ ID NO: 1883715
auggcuguuucguuggcaa

SEQ ID NO: 2211251 - RNA, 19 nt, Artificial Sequence
  Description of Artificial Sequence: Synthetic oligonucleotide
  Antisense strand to SEQ ID NO: 2211250
uugccaacgaaacagccau

SEQ ID NO: 2211252 - RNA, 19 nt, Artificial Sequence
  Description of Artificial Sequence: Synthetic oligonucleotide
  Sense strand starting at position 201 of SEQ ID NO: 1883715
auggguccaucugaguuaa

SEQ ID NO: 2211253 - RNA, 19 nt, Artificial Sequence
  Description of Artificial Sequence: Synthetic oligonucleotide
  Antisense strand to SEQ ID NO: 2211252
uuaacucagauggacccau

SEQ ID NO: 2211254 - RNA, 19 nt, Artificial Sequence
  Description of Artificial Sequence: Synthetic oligonucleotide
  Sense strand starting at position 308 of SEQ ID NO: 1883715
uaccuuugguucgacaaau

SEQ ID NO: 2211255 - RNA, 19 nt, Artificial Sequence
  Description of Artificial Sequence: Synthetic oligonucleotide
  Antisense strand to SEQ ID NO: 2211254
auuugucgaaccaaaggua

SEQ ID NO: 2211256 - RNA, 19 nt, Artificial Sequence
  Description of Artificial Sequence: Synthetic oligonucleotide
  Sense strand starting at position 1423 of SEQ ID NO: 1883715
gggcgucccuuggagagau

SEQ ID NO: 2211257 - RNA, 19 nt, Artificial Sequence
  Description of Artificial Sequence: Synthetic oligonucleotide
  Antisense strand to SEQ ID NO: 2211256
aucucuccaagggacgccc

SEQ ID NO: 2211258 - RNA, 19 nt, Artificial Sequence
  Description of Artificial Sequence: Synthetic oligonucleotide
  Sense strand starting at position 280 of SEQ ID NO: 1883715
gucaucuucucguaagaac

SEQ ID NO: 2211259 - RNA, 19 nt, Artificial Sequence
  Description of Artificial Sequence: Synthetic oligonucleotide
  Antisense strand to SEQ ID NO: 2211258
guucuuacgagaagaugac

SEQ ID NO: 2211260 - RNA, 19 nt, Artificial Sequence
  Description of Artificial Sequence: Synthetic oligonucleotide
  Sense strand starting at position 3981 of SEQ ID NO: 1883715
uggugaccuugaugucaca

SEQ ID NO: 2211261 - RNA, 19 nt, Artificial Sequence
  Description of Artificial Sequence: Synthetic oligonucleotide
  Antisense strand to SEQ ID NO: 2211260
ugugacaucaaggucacca

SEQ ID NO: 2211262 - RNA, 19 nt, Artificial Sequence
  Description of Artificial Sequence: Synthetic oligonucleotide
  Sense strand starting at position 894 of SEQ ID NO: 1883715
uuccuaacuucgugaaaua

SEQ ID NO: 2211263 - RNA, 19 nt, Artificial Sequence
  Description of Artificial Sequence: Synthetic oligonucleotide
  Antisense strand to SEQ ID NO: 2211262
uauuucacgaaguuaggaa

SEQ ID NO: 2211264 - RNA, 19 nt, Artificial Sequence
  Description of Artificial Sequence: Synthetic oligonucleotide
  Sense strand starting at position 665 of SEQ ID NO: 1883715
cuguuucguuggcaacaaa

SEQ ID NO: 2211265 - RNA, 19 nt, Artificial Sequence
  Description of Artificial Sequence: Synthetic oligonucleotide
  Antisense strand to SEQ ID NO: 2211264
uuuguugccaacgaaacag

SEQ ID NO: 2211266 - RNA, 19 nt, Artificial Sequence
  Description of Artificial Sequence: Synthetic oligonucleotide
  Sense strand starting at position 3140 of SEQ ID NO: 1883715
ucucuugacucacgcuauu

SEQ ID NO: 2211267 - RNA, 19 nt, Artificial Sequence
  Description of Artificial Sequence: Synthetic oligonucleotide
  Antisense strand to SEQ ID NO: 2211266
aauagcgugagucaagaga

SEQ ID NO: 2211268 - RNA, 19 nt, Artificial Sequence
  Description of Artificial Sequence: Synthetic oligonucleotide
  Sense strand starting at position 278 of SEQ ID NO: 1883715
gugucaucuucucguaaga

SEQ ID NO: 2211269 - RNA, 19 nt, Artificial Sequence
  Description of Artificial Sequence: Synthetic oligonucleotide
  Antisense strand to SEQ ID NO: 2211268
ucuuacgagaagaugacac

SEQ ID NO: 2211270 - RNA, 19 nt, Artificial Sequence
  Description of Artificial Sequence: Synthetic oligonucleotide
  Sense strand starting at position 2888 of SEQ ID NO: 1883715
uccgcugagucgugccaga

SEQ ID NO: 2211271 - RNA, 19 nt, Artificial Sequence
  Description of Artificial Sequence: Synthetic oligonucleotide
  Antisense strand to SEQ ID NO: 2211270
ucuggcacgacucagcgga

SEQ ID NO: 2211272 - RNA, 19 nt, Artificial Sequence
  Description of Artificial Sequence: Synthetic oligonucleotide
  Sense strand starting at position 175 of SEQ ID NO: 1883716
cguguuuaaguagcuuauu

SEQ ID NO: 2211273 - RNA, 19 nt, Artificial Sequence
  Description of Artificial Sequence: Synthetic oligonucleotide
  Antisense strand to SEQ ID NO: 2211272
aauaagcuacuuaaacacg

SEQ ID NO: 2211274 - RNA, 19 nt, Artificial Sequence
  Description of Artificial Sequence: Synthetic oligonucleotide
  Sense strand starting at position 1331 of SEQ ID NO: 1883716
uuuauuuaugcccagcgau

SEQ ID NO: 2211275 - RNA, 19 nt, Artificial Sequence
  Description of Artificial Sequence: Synthetic oligonucleotide
  Antisense strand to SEQ ID NO: 2211274
aucgcugggcauaaauaaa

SEQ ID NO: 2211276 - RNA, 19 nt, Artificial Sequence
  Description of Artificial Sequence: Synthetic oligonucleotide
  Sense strand starting at position 167 of SEQ ID NO: 1883716
cuguguaacguguuuaagu

SEQ ID NO: 2211277 - RNA, 19 nt, Artificial Sequence
  Description of Artificial Sequence: Synthetic oligonucleotide
  Antisense strand to SEQ ID NO: 2211276
acuuaaacacguuacacag

SEQ ID NO: 2211278 - RNA, 19 nt, Artificial Sequence
  Description of Artificial Sequence: Synthetic oligonucleotide
  Sense strand starting at position 792 of SEQ ID NO: 1883716
uagaaucugccuggagaga

SEQ ID NO: 2211279 - RNA, 19 nt, Artificial Sequence
  Description of Artificial Sequence: Synthetic oligonucleotide
  Antisense strand to SEQ ID NO: 2211278
ucucuccaggcagauucua

SEQ ID NO: 2211280 - RNA, 19 nt, Artificial Sequence
  Description of Artificial Sequence: Synthetic oligonucleotide
  Sense strand starting at position 2289 of SEQ ID NO: 1883716
agcugagacuuucugagaa

SEQ ID NO: 2211281 - RNA, 19 nt, Artificial Sequence
  Description of Artificial Sequence: Synthetic oligonucleotide
  Antisense strand to SEQ ID NO: 2211280
uucucagaaagucucagcu

SEQ ID NO: 2211282 - RNA, 19 nt, Artificial Sequence
  Description of Artificial Sequence: Synthetic oligonucleotide
  Sense strand starting at position 236 of SEQ ID NO: 1883716
ucagaagcaugaucauauu

SEQ ID NO: 2211283 - RNA, 19 nt, Artificial Sequence
  Description of Artificial Sequence: Synthetic oligonucleotide
  Antisense strand to SEQ ID NO: 2211282
aauaugaucaugcuucuga

SEQ ID NO: 2211284 - RNA, 19 nt, Artificial Sequence
  Description of Artificial Sequence: Synthetic oligonucleotide
  Sense strand starting at position 791 of SEQ ID NO: 1883716
cuagaaucugccuggagag

SEQ ID NO: 2211285 - RNA, 19 nt, Artificial Sequence
  Description of Artificial Sequence: Synthetic oligonucleotide
  Antisense strand to SEQ ID NO: 2211284
cucuccaggcagauucuag

SEQ ID NO: 2211286 - RNA, 19 nt, Artificial Sequence
  Description of Artificial Sequence: Synthetic oligonucleotide
  Sense strand starting at position 3916 of SEQ ID NO: 1883716
cccagugacugauuccaga

SEQ ID NO: 2211287 - RNA, 19 nt, Artificial Sequence
  Description of Artificial Sequence: Synthetic oligonucleotide
  Antisense strand to SEQ ID NO: 2211286
ucuggaaucagucacuggg

SEQ ID NO: 2211288 - RNA, 19 nt, Artificial Sequence
  Description of Artificial Sequence: Synthetic oligonucleotide
  Sense strand starting at position 159 of SEQ ID NO: 1883716
aaccauuucuguguaacgu

SEQ ID NO: 2211289 - RNA, 19 nt, Artificial Sequence
  Description of Artificial Sequence: Synthetic oligonucleotide
  Antisense strand to SEQ ID NO: 2211288
acguuacacagaaaugguu

SEQ ID NO: 2211290 - RNA, 19 nt, Artificial Sequence
  Description of Artificial Sequence: Synthetic oligonucleotide
  Sense strand starting at position 1330 of SEQ ID NO: 1883716
cuuuauuuaugcccagcga

SEQ ID NO: 2211291 - RNA, 19 nt, Artificial Sequence
  Description of Artificial Sequence: Synthetic oligonucleotide
  Antisense strand to SEQ ID NO: 2211290
ucgcugggcauaaauaaag

SEQ ID NO: 2211292 - RNA, 19 nt, Artificial Sequence
  Description of Artificial Sequence: Synthetic oligonucleotide
  Sense strand starting at position 1646 of SEQ ID NO: 1883716
cggacaucugucugaaagg

SEQ ID NO: 2211293 - RNA, 19 nt, Artificial Sequence
  Description of Artificial Sequence: Synthetic oligonucleotide
  Antisense strand to SEQ ID NO: 2211292
ccuuucagacagauguccg

SEQ ID NO: 2211294 - RNA, 19 nt, Artificial Sequence
  Description of Artificial Sequence: Synthetic oligonucleotide
  Sense strand starting at position 176 of SEQ ID NO: 1883716
guguuuaaguagcuuauuu

SEQ ID NO: 2211295 - RNA, 19 nt, Artificial Sequence
  Description of Artificial Sequence: Synthetic oligonucleotide
  Antisense strand to SEQ ID NO: 2211294
aaauaagcuacuuaaacac

SEQ ID NO: 2211296 - RNA, 19 nt, Artificial Sequence
  Description of Artificial Sequence: Synthetic oligonucleotide
  Sense strand starting at position 592 of SEQ ID NO: 1883716
gagucaucuuggucacaag

SEQ ID NO: 2211297 - RNA, 19 nt, Artificial Sequence
  Description of Artificial Sequence: Synthetic oligonucleotide
  Antisense strand to SEQ ID NO: 2211296
cuugugaccaagaugacuc

SEQ ID NO: 2211298 - RNA, 19 nt, Artificial Sequence
  Description of Artificial Sequence: Synthetic oligonucleotide
  Sense strand starting at position 591 of SEQ ID NO: 1883716
ggagucaucuuggucacaa

SEQ ID NO: 2211299 - RNA, 19 nt, Artificial Sequence
  Description of Artificial Sequence: Synthetic oligonucleotide
  Antisense strand to SEQ ID NO: 2211298
uugugaccaagaugacucc

SEQ ID NO: 2211300 - RNA, 19 nt, Artificial Sequence
  Description of Artificial Sequence: Synthetic oligonucleotide
  Sense strand starting at position 1645 of SEQ ID NO: 1883716
ucggacaucugucugaaag

SEQ ID NO: 2211301 - RNA, 19 nt, Artificial Sequence
  Description of Artificial Sequence: Synthetic oligonucleotide
  Antisense strand to SEQ ID NO: 2211300
cuuucagacagauguccga

SEQ ID NO: 2211302 - RNA, 19 nt, Artificial Sequence
  Description of Artificial Sequence: Synthetic oligonucleotide
  Sense strand starting at position 593 of SEQ ID NO: 1883716
agucaucuuggucacaagu

SEQ ID NO: 2211303 - RNA, 19 nt, Artificial Sequence
  Description of Artificial Sequence: Synthetic oligonucleotide
  Antisense strand to SEQ ID NO: 2211302
acuugugaccaagaugacu

SEQ ID NO: 2211304 - RNA, 19 nt, Artificial Sequence
  Description of Artificial Sequence: Synthetic oligonucleotide
  Sense strand starting at position 590 of SEQ ID NO: 1883716
aggagucaucuuggucaca

SEQ ID NO: 2211305 - RNA, 19 nt, Artificial Sequence
  Description of Artificial Sequence: Synthetic oligonucleotide
  Antisense strand to SEQ ID NO: 2211304
ugugaccaagaugacuccu

SEQ ID NO: 2211306 - RNA, 19 nt, Artificial Sequence
  Description of Artificial Sequence: Synthetic oligonucleotide
  Sense strand starting at position 3885 of SEQ ID NO: 1883716
ggccuuggucuccagaacu

SEQ ID NO: 2211307 - RNA, 19 nt, Artificial Sequence
  Description of Artificial Sequence: Synthetic oligonucleotide
  Antisense strand to SEQ ID NO: 2211306
aguucuggagaccaaggcc

SEQ ID NO: 2211308 - RNA, 19 nt, Artificial Sequence
  Description of Artificial Sequence: Synthetic oligonucleotide
  Sense strand starting at position 2478 of SEQ ID NO: 1883716
ugauuaaaguccucucuug

SEQ ID NO: 2211309 - RNA, 19 nt, Artificial Sequence
  Description of Artificial Sequence: Synthetic oligonucleotide
  Antisense strand to SEQ ID NO: 2211308
caagagaggacuuuaauca

SEQ ID NO: 2211310 - RNA, 19 nt, Artificial Sequence
  Description of Artificial Sequence: Synthetic oligonucleotide
  Sense strand starting at position 452 of SEQ ID NO: 1883716
guggcguacguguuaaagu

SEQ ID NO: 2211311 - RNA, 19 nt, Artificial Sequence
  Description of Artificial Sequence: Synthetic oligonucleotide
  Antisense strand to SEQ ID NO: 2211310
acuuuaacacguacgccac

SEQ ID NO: 2211312 - RNA, 19 nt, Artificial Sequence
  Description of Artificial Sequence: Synthetic oligonucleotide
  Sense strand starting at position 3929 of SEQ ID NO: 1883716
uccagaacguucuuaggau

SEQ ID NO: 2211313 - RNA, 19 nt, Artificial Sequence
  Description of Artificial Sequence: Synthetic oligonucleotide
  Antisense strand to SEQ ID NO: 2211312
auccuaagaacguucugga

SEQ ID NO: 2211314 - RNA, 19 nt, Artificial Sequence
  Description of Artificial Sequence: Synthetic oligonucleotide
  Sense strand starting at position 790 of SEQ ID NO: 1883716
gcuagaaucugccuggaga

SEQ ID NO: 2211315 - RNA, 19 nt, Artificial Sequence
  Description of Artificial Sequence: Synthetic oligonucleotide
  Antisense strand to SEQ ID NO: 2211314
ucuccaggcagauucuagc

SEQ ID NO: 2211316 - RNA, 19 nt, Artificial Sequence
  Description of Artificial Sequence: Synthetic oligonucleotide
  Sense strand starting at position 2553 of SEQ ID NO: 1883716
cuggguaaucaauguuacu

SEQ ID NO: 2211317 - RNA, 19 nt, Artificial Sequence
  Description of Artificial Sequence: Synthetic oligonucleotide
  Antisense strand to SEQ ID NO: 2211316
aguaacauugauuacccag

SEQ ID NO: 2211318 - RNA, 19 nt, Artificial Sequence
  Description of Artificial Sequence: Synthetic oligonucleotide
  Sense strand starting at position 1638 of SEQ ID NO: 1883716
gcacuaaucggacaucugu

SEQ ID NO: 2211319 - RNA, 19 nt, Artificial Sequence
  Description of Artificial Sequence: Synthetic oligonucleotide
  Antisense strand to SEQ ID NO: 2211318
acagauguccgauuagugc

SEQ ID NO: 2211320 - RNA, 19 nt, Artificial Sequence
  Description of Artificial Sequence: Synthetic oligonucleotide
  Sense strand starting at position 2575 of SEQ ID NO: 1883716
guuuccuuugcaggaaaga

SEQ ID NO: 2211321 - RNA, 19 nt, Artificial Sequence
  Description of Artificial Sequence: Synthetic oligonucleotide
  Antisense strand to SEQ ID NO: 2211320
ucuuuccugcaaaggaaac

SEQ ID NO: 2211322 - RNA, 19 nt, Artificial Sequence
  Description of Artificial Sequence: Synthetic oligonucleotide
  Sense strand starting at position 2549 of SEQ ID NO: 1883716
gugacuggguaaucaaugu

SEQ ID NO: 2211323 - RNA, 19 nt, Artificial Sequence
  Description of Artificial Sequence: Synthetic oligonucleotide
  Antisense strand to SEQ ID NO: 2211322
acauugauuacccagucac

SEQ ID NO: 2211324 - RNA, 19 nt, Artificial Sequence
  Description of Artificial Sequence: Synthetic oligonucleotide
  Sense strand starting at position 3566 of SEQ ID NO: 1883716
uggagagccugggcauauu

SEQ ID NO: 2211325 - RNA, 19 nt, Artificial Sequence
  Description of Artificial Sequence: Synthetic oligonucleotide
  Antisense strand to SEQ ID NO: 2211324
aauaugcccaggcucucca

SEQ ID NO: 2211326 - RNA, 19 nt, Artificial Sequence
  Description of Artificial Sequence: Synthetic oligonucleotide
  Sense strand starting at position 402 of SEQ ID NO: 1883716
ucauaauaguaaucagugu

SEQ ID NO: 2211327 - RNA, 19 nt, Artificial Sequence
  Description of Artificial Sequence: Synthetic oligonucleotide
  Antisense strand to SEQ ID NO: 2211326
acacugauuacuauuauga

SEQ ID NO: 2211328 - RNA, 19 nt, Artificial Sequence
  Description of Artificial Sequence: Synthetic oligonucleotide
  Sense strand starting at position 1614 of SEQ ID NO: 1883716
ccuuaagucuguccacaga

SEQ ID NO: 2211329 - RNA, 19 nt, Artificial Sequence
  Description of Artificial Sequence: Synthetic oligonucleotide
  Antisense strand to SEQ ID NO: 2211328
ucuguggacagacuuaagg

SEQ ID NO: 2211330 - RNA, 19 nt, Artificial Sequence
  Description of Artificial Sequence: Synthetic oligonucleotide
  Sense strand starting at position 3594 of SEQ ID NO: 1883716
ugggagucuggugguauga

SEQ ID NO: 2211331 - RNA, 19 nt, Artificial Sequence
  Description of Artificial Sequence: Synthetic oligonucleotide
  Antisense strand to SEQ ID NO: 2211330
ucauaccaccagacuccca

SEQ ID NO: 2211332 - RNA, 19 nt, Artificial Sequence
  Description of Artificial Sequence: Synthetic oligonucleotide
  Sense strand starting at position 454 of SEQ ID NO: 1883716
ggcguacguguuaaagugu

SEQ ID NO: 2211333 - RNA, 19 nt, Artificial Sequence
  Description of Artificial Sequence: Synthetic oligonucleotide
  Antisense strand to SEQ ID NO: 2211332
acacuuuaacacguacgcc

SEQ ID NO: 2211334 - RNA, 19 nt, Artificial Sequence
  Description of Artificial Sequence: Synthetic oligonucleotide
  Sense strand starting at position 2536 of SEQ ID NO: 1883716
agaauuccucccggugacu

SEQ ID NO: 2211335 - RNA, 19 nt, Artificial Sequence
  Description of Artificial Sequence: Synthetic oligonucleotide
  Antisense strand to SEQ ID NO: 2211334
agucaccgggaggaauucu

SEQ ID NO: 2211336 - RNA, 19 nt, Artificial Sequence
  Description of Artificial Sequence: Synthetic oligonucleotide
  Sense strand starting at position 1993 of SEQ ID NO: 1883716
agucgagcccuugagcaaa

SEQ ID NO: 2211337 - RNA, 19 nt, Artificial Sequence
  Description of Artificial Sequence: Synthetic oligonucleotide
  Antisense strand to SEQ ID NO: 2211336
uuugcucaagggcucgacu

SEQ ID NO: 2211338 - RNA, 19 nt, Artificial Sequence
  Description of Artificial Sequence: Synthetic oligonucleotide
  Sense strand starting at position 1305 of SEQ ID NO: 1883716
ggaagaugcucaccgguca

SEQ ID NO: 2211339 - RNA, 19 nt, Artificial Sequence
  Description of Artificial Sequence: Synthetic oligonucleotide
  Antisense strand to SEQ ID NO: 2211338
ugaccggugagcaucuucc

SEQ ID NO: 2211340 - RNA, 19 nt, Artificial Sequence
  Description of Artificial Sequence: Synthetic oligonucleotide
  Sense strand starting at position 3494 of SEQ ID NO: 1883716
aguguuaguucucuuagaa

SEQ ID NO: 2211341 - RNA, 19 nt, Artificial Sequence
  Description of Artificial Sequence: Synthetic oligonucleotide
  Antisense strand to SEQ ID NO: 2211340
uucuaagagaacuaacacu

SEQ ID NO: 2211342 - RNA, 19 nt, Artificial Sequence
  Description of Artificial Sequence: Synthetic oligonucleotide
  Sense strand starting at position 1267 of SEQ ID NO: 1883716
guagcucuucuuuggaaac

SEQ ID NO: 2211343 - RNA, 19 nt, Artificial Sequence
  Description of Artificial Sequence: Synthetic oligonucleotide
  Antisense strand to SEQ ID NO: 2211342
guuuccaaagaagagcuac

SEQ ID NO: 2211344 - RNA, 19 nt, Artificial Sequence
  Description of Artificial Sequence: Synthetic oligonucleotide
  Sense strand starting at position 1589 of SEQ ID NO: 1883716
ugggaaugcuagccaugua

SEQ ID NO: 2211345 - RNA, 19 nt, Artificial Sequence
  Description of Artificial Sequence: Synthetic oligonucleotide
  Antisense strand to SEQ ID NO: 2211344
uacauggcuagcauuccca

SEQ ID NO: 2211346 - RNA, 19 nt, Artificial Sequence
  Description of Artificial Sequence: Synthetic oligonucleotide
  Sense strand starting at position 462 of SEQ ID NO: 1883716
uguuaaagugugugaaacu

SEQ ID NO: 2211347 - RNA, 19 nt, Artificial Sequence
  Description of Artificial Sequence: Synthetic oligonucleotide
  Antisense strand to SEQ ID NO: 2211346
aguuucacacacuuuaaca

SEQ ID NO: 2211348 - RNA, 19 nt, Artificial Sequence
  Description of Artificial Sequence: Synthetic oligonucleotide
  Sense strand starting at position 2469 of SEQ ID NO: 1883716
cuuguccugugauuaaagu

SEQ ID NO: 2211349 - RNA, 19 nt, Artificial Sequence
  Description of Artificial Sequence: Synthetic oligonucleotide
  Antisense strand to SEQ ID NO: 2211348
acuuuaaucacaggacaag

SEQ ID NO: 2211350 - RNA, 19 nt, Artificial Sequence
  Description of Artificial Sequence: Synthetic oligonucleotide
  Sense strand starting at position 1604 of SEQ ID NO: 1883716
uguacugaguccuuaaguc

SEQ ID NO: 2211351 - RNA, 19 nt, Artificial Sequence
  Description of Artificial Sequence: Synthetic oligonucleotide
  Antisense strand to SEQ ID NO: 2211350
gacuuaaggacucaguaca

SEQ ID NO: 2211352 - RNA, 19 nt, Artificial Sequence
  Description of Artificial Sequence: Synthetic oligonucleotide
  Sense strand starting at position 536 of SEQ ID NO: 1883717
agugacugcuacuuuauuu

SEQ ID NO: 2211353 - RNA, 19 nt, Artificial Sequence
  Description of Artificial Sequence: Synthetic oligonucleotide
  Antisense strand to SEQ ID NO: 2211352
aaauaaaguagcagucacu

SEQ ID NO: 2211354 - RNA, 19 nt, Artificial Sequence
  Description of Artificial Sequence: Synthetic oligonucleotide
  Sense strand starting at position 819 of SEQ ID NO: 1883717
acuugagauccuugacaau

SEQ ID NO: 2211355 - RNA, 19 nt, Artificial Sequence
  Description of Artificial Sequence: Synthetic oligonucleotide
  Antisense strand to SEQ ID NO: 2211354
auugucaaggaucucaagu

SEQ ID NO: 2211356 - RNA, 19 nt, Artificial Sequence
  Description of Artificial Sequence: Synthetic oligonucleotide
  Sense strand starting at position 3546 of SEQ ID NO: 1883717
auugacuuccuaggauaca

SEQ ID NO: 2211357 - RNA, 19 nt, Artificial Sequence
  Description of Artificial Sequence: Synthetic oligonucleotide
  Antisense strand to SEQ ID NO: 2211356
uguauccuaggaagucaau

SEQ ID NO: 2211358 - RNA, 19 nt, Artificial Sequence
  Description of Artificial Sequence: Synthetic oligonucleotide
  Sense strand starting at position 458 of SEQ ID NO: 1883717
gcaugaaaugaagguauaa

SEQ ID NO: 2211359 - RNA, 19 nt, Artificial Sequence
  Description of Artificial Sequence: Synthetic oligonucleotide
  Antisense strand to SEQ ID NO: 2211358
uuauaccuucauuucaugc

SEQ ID NO: 2211360 - RNA, 19 nt, Artificial Sequence
  Description of Artificial Sequence: Synthetic oligonucleotide
  Sense strand starting at position 449 of SEQ ID NO: 1883717
cuccaagaggcaugaaaug

SEQ ID NO: 2211361 - RNA, 19 nt, Artificial Sequence
  Description of Artificial Sequence: Synthetic oligonucleotide
  Antisense strand to SEQ ID NO: 2211360
cauuucaugccucuuggag

SEQ ID NO: 2211362 - RNA, 19 nt, Artificial Sequence
  Description of Artificial Sequence: Synthetic oligonucleotide
  Sense strand starting at position 1471 of SEQ ID NO: 1883717
agugguuaucccuaacaag

SEQ ID NO: 2211363 - RNA, 19 nt, Artificial Sequence
  Description of Artificial Sequence: Synthetic oligonucleotide
  Antisense strand to SEQ ID NO: 2211362
cuuguuagggauaaccacu

SEQ ID NO: 2211364 - RNA, 19 nt, Artificial Sequence
  Description of Artificial Sequence: Synthetic oligonucleotide
  Sense strand starting at position 2960 of SEQ ID NO: 1883717
guaugauugauacaggcua

SEQ ID NO: 2211365 - RNA, 19 nt, Artificial Sequence
  Description of Artificial Sequence: Synthetic oligonucleotide
  Antisense strand to SEQ ID NO: 2211364
uagccuguaucaaucauac

SEQ ID NO: 2211366 - RNA, 19 nt, Artificial Sequence
  Description of Artificial Sequence: Synthetic oligonucleotide
  Sense strand starting at position 3543 of SEQ ID NO: 1883717
cuaauugacuuccuaggau

SEQ ID NO: 2211367 - RNA, 19 nt, Artificial Sequence
  Description of Artificial Sequence: Synthetic oligonucleotide
  Antisense strand to SEQ ID NO: 2211366
auccuaggaagucaauuag

SEQ ID NO: 2211368 - RNA, 19 nt, Artificial Sequence
  Description of Artificial Sequence: Synthetic oligonucleotide
  Sense strand starting at position 60 of SEQ ID NO: 1883717
uggauaugucuguaacuga

SEQ ID NO: 2211369 - RNA, 19 nt, Artificial Sequence
  Description of Artificial Sequence: Synthetic oligonucleotide
  Antisense strand to SEQ ID NO: 2211368
ucaguuacagacauaucca

SEQ ID NO: 2211370 - RNA, 19 nt, Artificial Sequence
  Description of Artificial Sequence: Synthetic oligonucleotide
  Sense strand starting at position 3254 of SEQ ID NO: 1883717
uggaguguaagguaaccua

SEQ ID NO: 2211371 - RNA, 19 nt, Artificial Sequence
  Description of Artificial Sequence: Synthetic oligonucleotide
  Antisense strand to SEQ ID NO: 2211370
uagguuaccuuacacucca

SEQ ID NO: 2211372 - RNA, 19 nt, Artificial Sequence
  Description of Artificial Sequence: Synthetic oligonucleotide
  Sense strand starting at position 2364 of SEQ ID NO: 1883717
agugacucucaguacaauu

SEQ ID NO: 2211373 - RNA, 19 nt, Artificial Sequence
  Description of Artificial Sequence: Synthetic oligonucleotide
  Antisense strand to SEQ ID NO: 2211372
aauuguacugagagucacu

SEQ ID NO: 2211374 - RNA, 19 nt, Artificial Sequence
  Description of Artificial Sequence: Synthetic oligonucleotide
  Sense strand starting at position 1450 of SEQ ID NO: 1883717
ugugucacacucuaaggau

SEQ ID NO: 2211375 - RNA, 19 nt, Artificial Sequence
  Description of Artificial Sequence: Synthetic oligonucleotide
  Antisense strand to SEQ ID NO: 2211374
auccuuagagugugacaca

SEQ ID NO: 2211376 - RNA, 19 nt, Artificial Sequence
  Description of Artificial Sequence: Synthetic oligonucleotide
  Sense strand starting at position 1268 of SEQ ID NO: 1883717
cugugacugcuuuaaagag

SEQ ID NO: 2211377 - RNA, 19 nt, Artificial Sequence
  Description of Artificial Sequence: Synthetic oligonucleotide
  Antisense strand to SEQ ID NO: 2211376
cucuuuaaagcagucacag

SEQ ID NO: 2211378 - RNA, 19 nt, Artificial Sequence
  Description of Artificial Sequence: Synthetic oligonucleotide
  Sense strand starting at position 1918 of SEQ ID NO: 1883717
ugcugucagacaggaaaga

SEQ ID NO: 2211379 - RNA, 19 nt, Artificial Sequence
  Description of Artificial Sequence: Synthetic oligonucleotide
  Antisense strand to SEQ ID NO: 2211378
ucuuuccugucugacagca

SEQ ID NO: 2211380 - RNA, 19 nt, Artificial Sequence
  Description of Artificial Sequence: Synthetic oligonucleotide
  Sense strand starting at position 2954 of SEQ ID NO: 1883717
ucaucaguaugauugauac

SEQ ID NO: 2211381 - RNA, 19 nt, Artificial Sequence
  Description of Artificial Sequence: Synthetic oligonucleotide
  Antisense strand to SEQ ID NO: 2211380
guaucaaucauacugauga

SEQ ID NO: 2211382 - RNA, 19 nt, Artificial Sequence
  Description of Artificial Sequence: Synthetic oligonucleotide
  Sense strand starting at position 1157 of SEQ ID NO: 1883717
uuaagaacgcaccaguaau

SEQ ID NO: 2211383 - RNA, 19 nt, Artificial Sequence
  Description of Artificial Sequence: Synthetic oligonucleotide
  Antisense strand to SEQ ID NO: 2211382
auuacuggugcguucuuaa

SEQ ID NO: 2211384 - RNA, 19 nt, Artificial Sequence
  Description of Artificial Sequence: Synthetic oligonucleotide
  Sense strand starting at position 3624 of SEQ ID NO: 1883717
aguacagagcauugaauca

SEQ ID NO: 2211385 - RNA, 19 nt, Artificial Sequence
  Description of Artificial Sequence: Synthetic oligonucleotide
  Antisense strand to SEQ ID NO: 2211384
ugauucaaugcucuguacu

SEQ ID NO: 2211386 - RNA, 19 nt, Artificial Sequence
  Description of Artificial Sequence: Synthetic oligonucleotide
  Sense strand starting at position 1630 of SEQ ID NO: 1883717
uagauagcauggucacaga

SEQ ID NO: 2211387 - RNA, 19 nt, Artificial Sequence
  Description of Artificial Sequence: Synthetic oligonucleotide
  Antisense strand to SEQ ID NO: 2211386
ucugugaccaugcuaucua

SEQ ID NO: 2211388 - RNA, 19 nt, Artificial Sequence
  Description of Artificial Sequence: Synthetic oligonucleotide
  Sense strand starting at position 2126 of SEQ ID NO: 1883717
cauagucuuccuuagagug

SEQ ID NO: 2211389 - RNA, 19 nt, Artificial Sequence
  Description of Artificial Sequence: Synthetic oligonucleotide
  Antisense strand to SEQ ID NO: 2211388
cacucuaaggaagacuaug

SEQ ID NO: 2211390 - RNA, 19 nt, Artificial Sequence
  Description of Artificial Sequence: Synthetic oligonucleotide
  Sense strand starting at position 3298 of SEQ ID NO: 1883717
gugcuaccaagguauagau

SEQ ID NO: 2211391 - RNA, 19 nt, Artificial Sequence
  Description of Artificial Sequence: Synthetic oligonucleotide
  Antisense strand to SEQ ID NO: 2211390
aucuauaccuugguagcac

SEQ ID NO: 2211392 - RNA, 19 nt, Artificial Sequence
  Description of Artificial Sequence: Synthetic oligonucleotide
  Sense strand starting at position 327 of SEQ ID NO: 1883717
guacaaugaugucuuuaaa

SEQ ID NO: 2211393 - RNA, 19 nt, Artificial Sequence
  Description of Artificial Sequence: Synthetic oligonucleotide
  Antisense strand to SEQ ID NO: 2211392
uuuaaagacaucauuguac

SEQ ID NO: 2211394 - RNA, 19 nt, Artificial Sequence
  Description of Artificial Sequence: Synthetic oligonucleotide
  Sense strand starting at position 247 of SEQ ID NO: 1883717
uggauaaggcacugugaau

SEQ ID NO: 2211395 - RNA, 19 nt, Artificial Sequence
  Description of Artificial Sequence: Synthetic oligonucleotide
  Antisense strand to SEQ ID NO: 2211394
auucacagugccuuaucca

SEQ ID NO: 2211396 - RNA, 19 nt, Artificial Sequence
  Description of Artificial Sequence: Synthetic oligonucleotide
  Sense strand starting at position 1916 of SEQ ID NO: 1883717
gcugcugucagacaggaaa

SEQ ID NO: 2211397 - RNA, 19 nt, Artificial Sequence
  Description of Artificial Sequence: Synthetic oligonucleotide
  Antisense strand to SEQ ID NO: 2211396
uuuccugucugacagcagc

SEQ ID NO: 2211398 - RNA, 19 nt, Artificial Sequence
  Description of Artificial Sequence: Synthetic oligonucleotide
  Sense strand starting at position 3539 of SEQ ID NO: 1883717
gguacuaauugacuuccua

SEQ ID NO: 2211399 - RNA, 19 nt, Artificial Sequence
  Description of Artificial Sequence: Synthetic oligonucleotide
  Antisense strand to SEQ ID NO: 2211398
uaggaagucaauuaguacc

SEQ ID NO: 2211400 - RNA, 19 nt, Artificial Sequence
  Description of Artificial Sequence: Synthetic oligonucleotide
  Sense strand starting at position 2101 of SEQ ID NO: 1883717
gcgcacuuauuucugauca

SEQ ID NO: 2211401 - RNA, 19 nt, Artificial Sequence
  Description of Artificial Sequence: Synthetic oligonucleotide
  Antisense strand to SEQ ID NO: 2211400
ugaucagaaauaagugcgc

SEQ ID NO: 2211402 - RNA, 19 nt, Artificial Sequence
  Description of Artificial Sequence: Synthetic oligonucleotide
  Sense strand starting at position 968 of SEQ ID NO: 1883717
gugaaauaaauguguugag

SEQ ID NO: 2211403 - RNA, 19 nt, Artificial Sequence
  Description of Artificial Sequence: Synthetic oligonucleotide
  Antisense strand to SEQ ID NO: 2211402
cucaacacauuuauuucac

SEQ ID NO: 2211404 - RNA, 19 nt, Artificial Sequence
  Description of Artificial Sequence: Synthetic oligonucleotide
  Sense strand starting at position 3358 of SEQ ID NO: 1883717
uugccuuugccagaaacaa

SEQ ID NO: 2211405 - RNA, 19 nt, Artificial Sequence
  Description of Artificial Sequence: Synthetic oligonucleotide
  Antisense strand to SEQ ID NO: 2211404
uuguuucuggcaaaggcaa

SEQ ID NO: 2211406 - RNA, 19 nt, Artificial Sequence
  Description of Artificial Sequence: Synthetic oligonucleotide
  Sense strand starting at position 3257 of SEQ ID NO: 1883717
aguguaagguaaccuauaa

SEQ ID NO: 2211407 - RNA, 19 nt, Artificial Sequence
  Description of Artificial Sequence: Synthetic oligonucleotide
  Antisense strand to SEQ ID NO: 2211406
uuauagguuaccuuacacu

SEQ ID NO: 2211408 - RNA, 19 nt, Artificial Sequence
  Description of Artificial Sequence: Synthetic oligonucleotide
  Sense strand starting at position 1610 of SEQ ID NO: 1883717
acugaagugcuggaguauu

SEQ ID NO: 2211409 - RNA, 19 nt, Artificial Sequence
  Description of Artificial Sequence: Synthetic oligonucleotide
  Antisense strand to SEQ ID NO: 2211408
aauacuccagcacuucagu

SEQ ID NO: 2211410 - RNA, 19 nt, Artificial Sequence
  Description of Artificial Sequence: Synthetic oligonucleotide
  Sense strand starting at position 3886 of SEQ ID NO: 1883717
aggcauggucuugaguaca

SEQ ID NO: 2211411 - RNA, 19 nt, Artificial Sequence
  Description of Artificial Sequence: Synthetic oligonucleotide
  Antisense strand to SEQ ID NO: 2211410
uguacucaagaccaugccu

SEQ ID NO: 2211412 - RNA, 19 nt, Artificial Sequence
  Description of Artificial Sequence: Synthetic oligonucleotide
  Sense strand starting at position 2537 of SEQ ID NO: 1883717
cucugucauccaggauaca

SEQ ID NO: 2211413 - RNA, 19 nt, Artificial Sequence
  Description of Artificial Sequence: Synthetic oligonucleotide
  Antisense strand to SEQ ID NO: 2211412
uguauccuggaugacagag

SEQ ID NO: 2211414 - RNA, 19 nt, Artificial Sequence
  Description of Artificial Sequence: Synthetic oligonucleotide
  Sense strand starting at position 1731 of SEQ ID NO: 1883717
agguguguccaaggaauag

SEQ ID NO: 2211415 - RNA, 19 nt, Artificial Sequence
  Description of Artificial Sequence: Synthetic oligonucleotide
  Antisense strand to SEQ ID NO: 2211414
cuauuccuuggacacaccu

SEQ ID NO: 2211416 - RNA, 19 nt, Artificial Sequence
  Description of Artificial Sequence: Synthetic oligonucleotide
  Sense strand starting at position 969 of SEQ ID NO: 1883717
ugaaauaaauguguugagu

SEQ ID NO: 2211417 - RNA, 19 nt, Artificial Sequence
  Description of Artificial Sequence: Synthetic oligonucleotide
  Antisense strand to SEQ ID NO: 2211416
acucaacacauuuauuuca

SEQ ID NO: 2211418 - RNA, 19 nt, Artificial Sequence
  Description of Artificial Sequence: Synthetic oligonucleotide
  Sense strand starting at position 2221 of SEQ ID NO: 1883717
gaaccucgagaauguuuau

SEQ ID NO: 2211419 - RNA, 19 nt, Artificial Sequence
  Description of Artificial Sequence: Synthetic oligonucleotide
  Antisense strand to SEQ ID NO: 2211418
auaaacauucucgagguuc

SEQ ID NO: 2211420 - RNA, 19 nt, Artificial Sequence
  Description of Artificial Sequence: Synthetic oligonucleotide
  Sense strand starting at position 2224 of SEQ ID NO: 1883717
ccucgagaauguuuaugga

SEQ ID NO: 2211421 - RNA, 19 nt, Artificial Sequence
  Description of Artificial Sequence: Synthetic oligonucleotide
  Antisense strand to SEQ ID NO: 2211420
uccauaaacauucucgagg

SEQ ID NO: 2211422 - RNA, 19 nt, Artificial Sequence
  Description of Artificial Sequence: Synthetic oligonucleotide
  Sense strand starting at position 173 of SEQ ID NO: 1883717
auaaaccaguucuuguaau

SEQ ID NO: 2211423 - RNA, 19 nt, Artificial Sequence
  Description of Artificial Sequence: Synthetic oligonucleotide
  Antisense strand to SEQ ID NO: 2211422
auuacaagaacugguuuau

SEQ ID NO: 2211424 - RNA, 19 nt, Artificial Sequence
  Description of Artificial Sequence: Synthetic oligonucleotide
  Sense strand starting at position 3504 of SEQ ID NO: 1883717
acaucuuguccugaggcua

SEQ ID NO: 2211425 - RNA, 19 nt, Artificial Sequence
  Description of Artificial Sequence: Synthetic oligonucleotide
  Antisense strand to SEQ ID NO: 2211424
uagccucaggacaagaugu

SEQ ID NO: 2211426 - RNA, 19 nt, Artificial Sequence
  Description of Artificial Sequence: Synthetic oligonucleotide
  Sense strand starting at position 1834 of SEQ ID NO: 1883717
aggccaugucauggaaauc

SEQ ID NO: 2211427 - RNA, 19 nt, Artificial Sequence
  Description of Artificial Sequence: Synthetic oligonucleotide
  Antisense strand to SEQ ID NO: 2211426
gauuuccaugacauggccu

SEQ ID NO: 2211428 - RNA, 19 nt, Artificial Sequence
  Description of Artificial Sequence: Synthetic oligonucleotide
  Sense strand starting at position 530 of SEQ ID NO: 1883717
gagaauagugacugcuacu

SEQ ID NO: 2211429 - RNA, 19 nt, Artificial Sequence
  Description of Artificial Sequence: Synthetic oligonucleotide
  Antisense strand to SEQ ID NO: 2211428
aguagcagucacuauucuc

SEQ ID NO: 2211430 - RNA, 19 nt, Artificial Sequence
  Description of Artificial Sequence: Synthetic oligonucleotide
  Sense strand starting at position 3468 of SEQ ID NO: 1883717
ggaacuuaugaguguucua

SEQ ID NO: 2211431 - RNA, 19 nt, Artificial Sequence
  Description of Artificial Sequence: Synthetic oligonucleotide
  Antisense strand to SEQ ID NO: 2211430
uagaacacucauaaguucc

SEQ ID NO: 2211432 - RNA, 19 nt, Artificial Sequence
  Description of Artificial Sequence: Synthetic oligonucleotide
  Sense strand starting at position 19 of SEQ ID NO: 1883718
guuuguuucccucuugcau

SEQ ID NO: 2211433 - RNA, 19 nt, Artificial Sequence
  Description of Artificial Sequence: Synthetic oligonucleotide
  Antisense strand to SEQ ID NO: 2211432
augcaagagggaaacaaac

SEQ ID NO: 2211434 - RNA, 19 nt, Artificial Sequence
  Description of Artificial Sequence: Synthetic oligonucleotide
  Sense strand starting at position 2133 of SEQ ID NO: 1883718
ugaggagauucucucaauu

SEQ ID NO: 2211435 - RNA, 19 nt, Artificial Sequence
  Description of Artificial Sequence: Synthetic oligonucleotide
  Antisense strand to SEQ ID NO: 2211434
aauugagagaaucuccuca

SEQ ID NO: 2211436 - RNA, 19 nt, Artificial Sequence
  Description of Artificial Sequence: Synthetic oligonucleotide
  Sense strand starting at position 1430 of SEQ ID NO: 1883718
uaugauuauuuggcuugca

SEQ ID NO: 2211437 - RNA, 19 nt, Artificial Sequence
  Description of Artificial Sequence: Synthetic oligonucleotide
  Antisense strand to SEQ ID NO: 2211436
ugcaagccaaauaaucaua

SEQ ID NO: 2211438 - RNA, 19 nt, Artificial Sequence
  Description of Artificial Sequence: Synthetic oligonucleotide
  Sense strand starting at position 3612 of SEQ ID NO: 1883718
cguagccuuccuuaaauuu

SEQ ID NO: 2211439 - RNA, 19 nt, Artificial Sequence
  Description of Artificial Sequence: Synthetic oligonucleotide
  Antisense strand to SEQ ID NO: 2211438
aaauuuaaggaaggcuacg

SEQ ID NO: 2211440 - RNA, 19 nt, Artificial Sequence
  Description of Artificial Sequence: Synthetic oligonucleotide
  Sense strand starting at position 3063 of SEQ ID NO: 1883718
gugucaaaucaugacauac

SEQ ID NO: 2211441 - RNA, 19 nt, Artificial Sequence
  Description of Artificial Sequence: Synthetic oligonucleotide
  Antisense strand to SEQ ID NO: 2211440
guaugucaugauuugacac

SEQ ID NO: 2211442 - RNA, 19 nt, Artificial Sequence
  Description of Artificial Sequence: Synthetic oligonucleotide
  Sense strand starting at position 3633 of SEQ ID NO: 1883718
ccacuugagauacgauaga

SEQ ID NO: 2211443 - RNA, 19 nt, Artificial Sequence
  Description of Artificial Sequence: Synthetic oligonucleotide
  Antisense strand to SEQ ID NO: 2211442
ucuaucguaucucaagugg

SEQ ID NO: 2211444 - RNA, 19 nt, Artificial Sequence
  Description of Artificial Sequence: Synthetic oligonucleotide
  Sense strand starting at position 1380 of SEQ ID NO: 1883718
aaauguccuggucaugaua

SEQ ID NO: 2211445 - RNA, 19 nt, Artificial Sequence
  Description of Artificial Sequence: Synthetic oligonucleotide
  Antisense strand to SEQ ID NO: 2211444
uaucaugaccaggacauuu

SEQ ID NO: 2211446 - RNA, 19 nt, Artificial Sequence
  Description of Artificial Sequence: Synthetic oligonucleotide
  Sense strand starting at position 1640 of SEQ ID NO: 1883718
gucagaggauuaguugaaa

SEQ ID NO: 2211447 - RNA, 19 nt, Artificial Sequence
  Description of Artificial Sequence: Synthetic oligonucleotide
  Antisense strand to SEQ ID NO: 2211446
uuucaacuaauccucugac

SEQ ID NO: 2211448 - RNA, 19 nt, Artificial Sequence
  Description of Artificial Sequence: Synthetic oligonucleotide
  Sense strand starting at position 1536 of SEQ ID NO: 1883718
ucugauuaggugggacaua

SEQ ID NO: 2211449 - RNA, 19 nt, Artificial Sequence
  Description of Artificial Sequence: Synthetic oligonucleotide
  Antisense strand to SEQ ID NO: 2211448
uaugucccaccuaaucaga

SEQ ID NO: 2211450 - RNA, 19 nt, Artificial Sequence
  Description of Artificial Sequence: Synthetic oligonucleotide
  Sense strand starting at position 3822 of SEQ ID NO: 1883718
uugauuacucaguacaagu

SEQ ID NO: 2211451 - RNA, 19 nt, Artificial Sequence
  Description of Artificial Sequence: Synthetic oligonucleotide
  Antisense strand to SEQ ID NO: 2211450
acuuguacugaguaaucaa

SEQ ID NO: 2211452 - RNA, 19 nt, Artificial Sequence
  Description of Artificial Sequence: Synthetic oligonucleotide
  Sense strand starting at position 1529 of SEQ ID NO: 1883718
uagauauucugauuaggug

SEQ ID NO: 2211453 - RNA, 19 nt, Artificial Sequence
  Description of Artificial Sequence: Synthetic oligonucleotide
  Antisense strand to SEQ ID NO: 2211452
caccuaaucagaauaucua

SEQ ID NO: 2211454 - RNA, 19 nt, Artificial Sequence
  Description of Artificial Sequence: Synthetic oligonucleotide
  Sense strand starting at position 3717 of SEQ ID NO: 1883718
caaguuccuggucauugaa

SEQ ID NO: 2211455 - RNA, 19 nt, Artificial Sequence
  Description of Artificial Sequence: Synthetic oligonucleotide
  Antisense strand to SEQ ID NO: 2211454
uucaaugaccaggaacuug

SEQ ID NO: 2211456 - RNA, 19 nt, Artificial Sequence
  Description of Artificial Sequence: Synthetic oligonucleotide
  Sense strand starting at position 3821 of SEQ ID NO: 1883718
cuugauuacucaguacaag

SEQ ID NO: 2211457 - RNA, 19 nt, Artificial Sequence
  Description of Artificial Sequence: Synthetic oligonucleotide
  Antisense strand to SEQ ID NO: 2211456
cuuguacugaguaaucaag

SEQ ID NO: 2211458 - RNA, 19 nt, Artificial Sequence
  Description of Artificial Sequence: Synthetic oligonucleotide
  Sense strand starting at position 340 of SEQ ID NO: 1883718
cuagacugguaauccuaau

SEQ ID NO: 2211459 - RNA, 19 nt, Artificial Sequence
  Description of Artificial Sequence: Synthetic oligonucleotide
  Antisense strand to SEQ ID NO: 2211458
auuaggauuaccagucuag

SEQ ID NO: 2211460 - RNA, 19 nt, Artificial Sequence
  Description of Artificial Sequence: Synthetic oligonucleotide
  Sense strand starting at position 1383 of SEQ ID NO: 1883718
uguccuggucaugauagau

SEQ ID NO: 2211461 - RNA, 19 nt, Artificial Sequence
  Description of Artificial Sequence: Synthetic oligonucleotide
  Antisense strand to SEQ ID NO: 2211460
aucuaucaugaccaggaca

SEQ ID NO: 2211462 - RNA, 19 nt, Artificial Sequence
  Description of Artificial Sequence: Synthetic oligonucleotide
  Sense strand starting at position 1535 of SEQ ID NO: 1883718
uucugauuaggugggacau

SEQ ID NO: 2211463 - RNA, 19 nt, Artificial Sequence
  Description of Artificial Sequence: Synthetic oligonucleotide
  Antisense strand to SEQ ID NO: 2211462
augucccaccuaaucagaa

SEQ ID NO: 2211464 - RNA, 19 nt, Artificial Sequence
  Description of Artificial Sequence: Synthetic oligonucleotide
  Sense strand starting at position 2491 of SEQ ID NO: 1883718
cuacauuaucauugugaga

SEQ ID NO: 2211465 - RNA, 19 nt, Artificial Sequence
  Description of Artificial Sequence: Synthetic oligonucleotide
  Antisense strand to SEQ ID NO: 2211464
ucucacaaugauaauguag

SEQ ID NO: 2211466 - RNA, 19 nt, Artificial Sequence
  Description of Artificial Sequence: Synthetic oligonucleotide
  Sense strand starting at position 3436 of SEQ ID NO: 1883718
ccauauguucuagagcaca

SEQ ID NO: 2211467 - RNA, 19 nt, Artificial Sequence
  Description of Artificial Sequence: Synthetic oligonucleotide
  Antisense strand to SEQ ID NO: 2211466
ugugcucuagaacauaugg

SEQ ID NO: 2211468 - RNA, 19 nt, Artificial Sequence
  Description of Artificial Sequence: Synthetic oligonucleotide
  Sense strand starting at position 3814 of SEQ ID NO: 1883718
ggagucacuugauuacuca

SEQ ID NO: 2211469 - RNA, 19 nt, Artificial Sequence
  Description of Artificial Sequence: Synthetic oligonucleotide
  Antisense strand to SEQ ID NO: 2211468
ugaguaaucaagugacucc

SEQ ID NO: 2211470 - RNA, 19 nt, Artificial Sequence
  Description of Artificial Sequence: Synthetic oligonucleotide
  Sense strand starting at position 1890 of SEQ ID NO: 1883718
uggacuuccuccuuagaug

SEQ ID NO: 2211471 - RNA, 19 nt, Artificial Sequence
  Description of Artificial Sequence: Synthetic oligonucleotide
  Antisense strand to SEQ ID NO: 2211470
caucuaaggaggaagucca

SEQ ID NO: 2211472 - RNA, 19 nt, Artificial Sequence
  Description of Artificial Sequence: Synthetic oligonucleotide
  Sense strand starting at position 2135 of SEQ ID NO: 1883718
aggagauucucucaauuug

SEQ ID NO: 2211473 - RNA, 19 nt, Artificial Sequence
  Description of Artificial Sequence: Synthetic oligonucleotide
  Antisense strand to SEQ ID NO: 2211472
caaauugagagaaucuccu

SEQ ID NO: 2211474 - RNA, 19 nt, Artificial Sequence
  Description of Artificial Sequence: Synthetic oligonucleotide
  Sense strand starting at position 2033 of SEQ ID NO: 1883718
acucaugcuggccaaauau

SEQ ID NO: 2211475 - RNA, 19 nt, Artificial Sequence
  Description of Artificial Sequence: Synthetic oligonucleotide
  Antisense strand to SEQ ID NO: 2211474
auauuuggccagcaugagu

SEQ ID NO: 2211476 - RNA, 19 nt, Artificial Sequence
  Description of Artificial Sequence: Synthetic oligonucleotide
  Sense strand starting at position 2841 of SEQ ID NO: 1883718
cccagcaaggcuuaacauu

SEQ ID NO: 2211477 - RNA, 19 nt, Artificial Sequence
  Description of Artificial Sequence: Synthetic oligonucleotide
  Antisense strand to SEQ ID NO: 2211476
aauguuaagccuugcuggg

SEQ ID NO: 2211478 - RNA, 19 nt, Artificial Sequence
  Description of Artificial Sequence: Synthetic oligonucleotide
  Sense strand starting at position 3802 of SEQ ID NO: 1883718
ccuaucaucccaggaguca

SEQ ID NO: 2211479 - RNA, 19 nt, Artificial Sequence
  Description of Artificial Sequence: Synthetic oligonucleotide
  Antisense strand to SEQ ID NO: 2211478
ugacuccugggaugauagg

SEQ ID NO: 2211480 - RNA, 19 nt, Artificial Sequence
  Description of Artificial Sequence: Synthetic oligonucleotide
  Sense strand starting at position 1377 of SEQ ID NO: 1883718
aacaaauguccuggucaug

SEQ ID NO: 2211481 - RNA, 19 nt, Artificial Sequence
  Description of Artificial Sequence: Synthetic oligonucleotide
  Antisense strand to SEQ ID NO: 2211480
caugaccaggacauuuguu

SEQ ID NO: 2211482 - RNA, 19 nt, Artificial Sequence
  Description of Artificial Sequence: Synthetic oligonucleotide
  Sense strand starting at position 644 of SEQ ID NO: 1883718
cugauuuauucugaaacug

SEQ ID NO: 2211483 - RNA, 19 nt, Artificial Sequence
  Description of Artificial Sequence: Synthetic oligonucleotide
  Antisense strand to SEQ ID NO: 2211482
caguuucagaauaaaucag

SEQ ID NO: 2211484 - RNA, 19 nt, Artificial Sequence
  Description of Artificial Sequence: Synthetic oligonucleotide
  Sense strand starting at position 2349 of SEQ ID NO: 1883718
agguuuaucuuauucuaca

SEQ ID NO: 2211485 - RNA, 19 nt, Artificial Sequence
  Description of Artificial Sequence: Synthetic oligonucleotide
  Antisense strand to SEQ ID NO: 2211484
uguagaauaagauaaaccu

SEQ ID NO: 2211486 - RNA, 19 nt, Artificial Sequence
  Description of Artificial Sequence: Synthetic oligonucleotide
  Sense strand starting at position 940 of SEQ ID NO: 1883718
guguaaagaugagugauuc

SEQ ID NO: 2211487 - RNA, 19 nt, Artificial Sequence
  Description of Artificial Sequence: Synthetic oligonucleotide
  Antisense strand to SEQ ID NO: 2211486
gaaucacucaucuuuacac

SEQ ID NO: 2211488 - RNA, 19 nt, Artificial Sequence
  Description of Artificial Sequence: Synthetic oligonucleotide
  Sense strand starting at position 2072 of SEQ ID NO: 1883718
guagaugguagcuauuacu

SEQ ID NO: 2211489 - RNA, 19 nt, Artificial Sequence
  Description of Artificial Sequence: Synthetic oligonucleotide
  Antisense strand to SEQ ID NO: 2211488
aguaauagcuaccaucuac

SEQ ID NO: 2211490 - RNA, 19 nt, Artificial Sequence
  Description of Artificial Sequence: Synthetic oligonucleotide
  Sense strand starting at position 1561 of SEQ ID NO: 1883718
uugaaaguugucuauuggu

SEQ ID NO: 2211491 - RNA, 19 nt, Artificial Sequence
  Description of Artificial Sequence: Synthetic oligonucleotide
  Antisense strand to SEQ ID NO: 2211490
accaauagacaacuuucaa

SEQ ID NO: 2211492 - RNA, 19 nt, Artificial Sequence
  Description of Artificial Sequence: Synthetic oligonucleotide
  Sense strand starting at position 3053 of SEQ ID NO: 1883718
cagguaaauugugucaaau

SEQ ID NO: 2211493 - RNA, 19 nt, Artificial Sequence
  Description of Artificial Sequence: Synthetic oligonucleotide
  Antisense strand to SEQ ID NO: 2211492
auuugacacaauuuaccug

SEQ ID NO: 2211494 - RNA, 19 nt, Artificial Sequence
  Description of Artificial Sequence: Synthetic oligonucleotide
  Sense strand starting at position 3716 of SEQ ID NO: 1883718
acaaguuccuggucauuga

SEQ ID NO: 2211495 - RNA, 19 nt, Artificial Sequence
  Description of Artificial Sequence: Synthetic oligonucleotide
  Antisense strand to SEQ ID NO: 2211494
ucaaugaccaggaacuugu

SEQ ID NO: 2211496 - RNA, 19 nt, Artificial Sequence
  Description of Artificial Sequence: Synthetic oligonucleotide
  Sense strand starting at position 1268 of SEQ ID NO: 1883718
gugggcaguccuggagaaa

SEQ ID NO: 2211497 - RNA, 19 nt, Artificial Sequence
  Description of Artificial Sequence: Synthetic oligonucleotide
  Antisense strand to SEQ ID NO: 2211496
uuucuccaggacugcccac

SEQ ID NO: 2211498 - RNA, 19 nt, Artificial Sequence
  Description of Artificial Sequence: Synthetic oligonucleotide
  Sense strand starting at position 1032 of SEQ ID NO: 1883718
agcacuuacuuggcauaaa

SEQ ID NO: 2211499 - RNA, 19 nt, Artificial Sequence
  Description of Artificial Sequence: Synthetic oligonucleotide
  Antisense strand to SEQ ID NO: 2211498
uuuaugccaaguaagugcu

SEQ ID NO: 2211500 - RNA, 19 nt, Artificial Sequence
  Description of Artificial Sequence: Synthetic oligonucleotide
  Sense strand starting at position 539 of SEQ ID NO: 1883718
ccaugacuuucucuacagu

SEQ ID NO: 2211501 - RNA, 19 nt, Artificial Sequence
  Description of Artificial Sequence: Synthetic oligonucleotide
  Antisense strand to SEQ ID NO: 2211500
acuguagagaaagucaugg

SEQ ID NO: 2211502 - RNA, 19 nt, Artificial Sequence
  Description of Artificial Sequence: Synthetic oligonucleotide
  Sense strand starting at position 2765 of SEQ ID NO: 1883718
guguucucagagugaauaa

SEQ ID NO: 2211503 - RNA, 19 nt, Artificial Sequence
  Description of Artificial Sequence: Synthetic oligonucleotide
  Antisense strand to SEQ ID NO: 2211502
uuauucacucugagaacac

SEQ ID NO: 2211504 - RNA, 19 nt, Artificial Sequence
  Description of Artificial Sequence: Synthetic oligonucleotide
  Sense strand starting at position 3730 of SEQ ID NO: 1883718
auugaaugggagcgucuaa

SEQ ID NO: 2211505 - RNA, 19 nt, Artificial Sequence
  Description of Artificial Sequence: Synthetic oligonucleotide
  Antisense strand to SEQ ID NO: 2211504
uuagacgcucccauucaau

SEQ ID NO: 2211506 - RNA, 19 nt, Artificial Sequence
  Description of Artificial Sequence: Synthetic oligonucleotide
  Sense strand starting at position 3791 of SEQ ID NO: 1883718
guuugauaguaccuaucau

SEQ ID NO: 2211507 - RNA, 19 nt, Artificial Sequence
  Description of Artificial Sequence: Synthetic oligonucleotide
  Antisense strand to SEQ ID NO: 2211506
augauagguacuaucaaac

SEQ ID NO: 2211508 - RNA, 19 nt, Artificial Sequence
  Description of Artificial Sequence: Synthetic oligonucleotide
  Sense strand starting at position 3817 of SEQ ID NO: 1883718
gucacuugauuacucagua

SEQ ID NO: 2211509 - RNA, 19 nt, Artificial Sequence
  Description of Artificial Sequence: Synthetic oligonucleotide
  Antisense strand to SEQ ID NO: 2211508
uacugaguaaucaagugac

SEQ ID NO: 2211510 - RNA, 19 nt, Artificial Sequence
  Description of Artificial Sequence: Synthetic oligonucleotide
  Sense strand starting at position 3644 of SEQ ID NO: 1883718
acgauagagucucugucaa

SEQ ID NO: 2211511 - RNA, 19 nt, Artificial Sequence
  Description of Artificial Sequence: Synthetic oligonucleotide
  Antisense strand to SEQ ID NO: 2211510
uugacagagacucuaucgu

SEQ ID NO: 2211512 - RNA, 19 nt, Artificial Sequence
  Description of Artificial Sequence: Synthetic oligonucleotide
  Sense strand starting at position 1715 of SEQ ID NO: 1883719
auagcauucggagaaaucu

SEQ ID NO: 2211513 - RNA, 19 nt, Artificial Sequence
  Description of Artificial Sequence: Synthetic oligonucleotide
  Antisense strand to SEQ ID NO: 2211512
agauuucuccgaaugcuau

SEQ ID NO: 2211514 - RNA, 19 nt, Artificial Sequence
  Description of Artificial Sequence: Synthetic oligonucleotide
  Sense strand starting at position 1459 of SEQ ID NO: 1883719
auuaacaucgcauaauuga

SEQ ID NO: 2211515 - RNA, 19 nt, Artificial Sequence
  Description of Artificial Sequence: Synthetic oligonucleotide
  Antisense strand to SEQ ID NO: 2211514
ucaauuaugcgauguuaau

SEQ ID NO: 2211516 - RNA, 19 nt, Artificial Sequence
  Description of Artificial Sequence: Synthetic oligonucleotide
  Sense strand starting at position 3039 of SEQ ID NO: 1883719
gucccaacgauccggauuu

SEQ ID NO: 2211517 - RNA, 19 nt, Artificial Sequence
  Description of Artificial Sequence: Synthetic oligonucleotide
  Antisense strand to SEQ ID NO: 2211516
aaauccggaucguugggac

SEQ ID NO: 2211518 - RNA, 19 nt, Artificial Sequence
  Description of Artificial Sequence: Synthetic oligonucleotide
  Sense strand starting at position 2410 of SEQ ID NO: 1883719
aagugugucacgguugcua

SEQ ID NO: 2211519 - RNA, 19 nt, Artificial Sequence
  Description of Artificial Sequence: Synthetic oligonucleotide
  Antisense strand to SEQ ID NO: 2211518
uagcaaccgugacacacuu

SEQ ID NO: 2211520 - RNA, 19 nt, Artificial Sequence
  Description of Artificial Sequence: Synthetic oligonucleotide
  Sense strand starting at position 467 of SEQ ID NO: 1883719
aucuuauuucuacguucua

SEQ ID NO: 2211521 - RNA, 19 nt, Artificial Sequence
  Description of Artificial Sequence: Synthetic oligonucleotide
  Antisense strand to SEQ ID NO: 2211520
uagaacguagaaauaagau

SEQ ID NO: 2211522 - RNA, 19 nt, Artificial Sequence
  Description of Artificial Sequence: Synthetic oligonucleotide
  Sense strand starting at position 840 of SEQ ID NO: 1883719
aacagacuuccaugaugug

SEQ ID NO: 2211523 - RNA, 19 nt, Artificial Sequence
  Description of Artificial Sequence: Synthetic oligonucleotide
  Antisense strand to SEQ ID NO: 2211522
cacaucauggaagucuguu

SEQ ID NO: 2211524 - RNA, 19 nt, Artificial Sequence
  Description of Artificial Sequence: Synthetic oligonucleotide
  Sense strand starting at position 468 of SEQ ID NO: 1883719
ucuuauuucuacguucuau

SEQ ID NO: 2211525 - RNA, 19 nt, Artificial Sequence
  Description of Artificial Sequence: Synthetic oligonucleotide
  Antisense strand to SEQ ID NO: 2211524
auagaacguagaaauaaga

SEQ ID NO: 2211526 - RNA, 19 nt, Artificial Sequence
  Description of Artificial Sequence: Synthetic oligonucleotide
  Sense strand starting at position 489 of SEQ ID NO: 1883719
uguugauuauucucaaaga

SEQ ID NO: 2211527 - RNA, 19 nt, Artificial Sequence
  Description of Artificial Sequence: Synthetic oligonucleotide
  Antisense strand to SEQ ID NO: 2211526
ucuuugagaauaaucaaca

SEQ ID NO: 2211528 - RNA, 19 nt, Artificial Sequence
  Description of Artificial Sequence: Synthetic oligonucleotide
  Sense strand starting at position 1486 of SEQ ID NO: 1883719
agcauauuacacgaguaua

SEQ ID NO: 2211529 - RNA, 19 nt, Artificial Sequence
  Description of Artificial Sequence: Synthetic oligonucleotide
  Antisense strand to SEQ ID NO: 2211528
uauacucguguaauaugcu

SEQ ID NO: 2211530 - RNA, 19 nt, Artificial Sequence
  Description of Artificial Sequence: Synthetic oligonucleotide
  Sense strand starting at position 917 of SEQ ID NO: 1883719
cuaggaaauuaaguuugua

SEQ ID NO: 2211531 - RNA, 19 nt, Artificial Sequence
  Description of Artificial Sequence: Synthetic oligonucleotide
  Antisense strand to SEQ ID NO: 2211530
uacaaacuuaauuuccuag

SEQ ID NO: 2211532 - RNA, 19 nt, Artificial Sequence
  Description of Artificial Sequence: Synthetic oligonucleotide
  Sense strand starting at position 149 of SEQ ID NO: 1883719
ggaugaaugaggugcaauc

SEQ ID NO: 2211533 - RNA, 19 nt, Artificial Sequence
  Description of Artificial Sequence: Synthetic oligonucleotide
  Antisense strand to SEQ ID NO: 2211532
gauugcaccucauucaucc

SEQ ID NO: 2211534 - RNA, 19 nt, Artificial Sequence
  Description of Artificial Sequence: Synthetic oligonucleotide
  Sense strand starting at position 1489 of SEQ ID NO: 1883719
auauuacacgaguauaguu

SEQ ID NO: 2211535 - RNA, 19 nt, Artificial Sequence
  Description of Artificial Sequence: Synthetic oligonucleotide
  Antisense strand to SEQ ID NO: 2211534
aacuauacucguguaauau

SEQ ID NO: 2211536 - RNA, 19 nt, Artificial Sequence
  Description of Artificial Sequence: Synthetic oligonucleotide
  Sense strand starting at position 1102 of SEQ ID NO: 1883719
ggaaauuacuauccuguuu

SEQ ID NO: 2211537 - RNA, 19 nt, Artificial Sequence
  Description of Artificial Sequence: Synthetic oligonucleotide
  Antisense strand to SEQ ID NO: 2211536
aaacaggauaguaauuucc

SEQ ID NO: 2211538 - RNA, 19 nt, Artificial Sequence
  Description of Artificial Sequence: Synthetic oligonucleotide
  Sense strand starting at position 464 of SEQ ID NO: 1883719
guuaucuuauuucuacguu

SEQ ID NO: 2211539 - RNA, 19 nt, Artificial Sequence
  Description of Artificial Sequence: Synthetic oligonucleotide
  Antisense strand to SEQ ID NO: 2211538
aacguagaaauaagauaac

SEQ ID NO: 2211540 - RNA, 19 nt, Artificial Sequence
  Description of Artificial Sequence: Synthetic oligonucleotide
  Sense strand starting at position 875 of SEQ ID NO: 1883719
cuguuaugcccuuagaaac

SEQ ID NO: 2211541 - RNA, 19 nt, Artificial Sequence
  Description of Artificial Sequence: Synthetic oligonucleotide
  Antisense strand to SEQ ID NO: 2211540
guuucuaagggcauaacag

SEQ ID NO: 2211542 - RNA, 19 nt, Artificial Sequence
  Description of Artificial Sequence: Synthetic oligonucleotide
  Sense strand starting at position 676 of SEQ ID NO: 1883719
ugaggauucuaccuguauu

SEQ ID NO: 2211543 - RNA, 19 nt, Artificial Sequence
  Description of Artificial Sequence: Synthetic oligonucleotide
  Antisense strand to SEQ ID NO: 2211542
aauacagguagaauccuca

SEQ ID NO: 2211544 - RNA, 19 nt, Artificial Sequence
  Description of Artificial Sequence: Synthetic oligonucleotide
  Sense strand starting at position 118 of SEQ ID NO: 1883719
uaagauaucugucugugag

SEQ ID NO: 2211545 - RNA, 19 nt, Artificial Sequence
  Description of Artificial Sequence: Synthetic oligonucleotide
  Antisense strand to SEQ ID NO: 2211544
cucacagacagauaucuua

SEQ ID NO: 2211546 - RNA, 19 nt, Artificial Sequence
  Description of Artificial Sequence: Synthetic oligonucleotide
  Sense strand starting at position 624 of SEQ ID NO: 1883719
ccaucaggguuucuuuaua

SEQ ID NO: 2211547 - RNA, 19 nt, Artificial Sequence
  Description of Artificial Sequence: Synthetic oligonucleotide
  Antisense strand to SEQ ID NO: 2211546
uauaaagaaacccugaugg

SEQ ID NO: 2211548 - RNA, 19 nt, Artificial Sequence
  Description of Artificial Sequence: Synthetic oligonucleotide
  Sense strand starting at position 1455 of SEQ ID NO: 1883719
cuugauuaacaucgcauaa

SEQ ID NO: 2211549 - RNA, 19 nt, Artificial Sequence
  Description of Artificial Sequence: Synthetic oligonucleotide
  Antisense strand to SEQ ID NO: 2211548
uuaugcgauguuaaucaag

SEQ ID NO: 2211550 - RNA, 19 nt, Artificial Sequence
  Description of Artificial Sequence: Synthetic oligonucleotide
  Sense strand starting at position 1812 of SEQ ID NO: 1883719
gguaguaucccagaacgca

SEQ ID NO: 2211551 - RNA, 19 nt, Artificial Sequence
  Description of Artificial Sequence: Synthetic oligonucleotide
  Antisense strand to SEQ ID NO: 2211550
ugcguucugggauacuacc

SEQ ID NO: 2211552 - RNA, 19 nt, Artificial Sequence
  Description of Artificial Sequence: Synthetic oligonucleotide
  Sense strand starting at position 1494 of SEQ ID NO: 1883719
acacgaguauaguuuauua

SEQ ID NO: 2211553 - RNA, 19 nt, Artificial Sequence
  Description of Artificial Sequence: Synthetic oligonucleotide
  Antisense strand to SEQ ID NO: 2211552
uaauaaacuauacucgugu

SEQ ID NO: 2211554 - RNA, 19 nt, Artificial Sequence
  Description of Artificial Sequence: Synthetic oligonucleotide
  Sense strand starting at position 1801 of SEQ ID NO: 1883719
cccuaaaucuugguaguau

SEQ ID NO: 2211555 - RNA, 19 nt, Artificial Sequence
  Description of Artificial Sequence: Synthetic oligonucleotide
  Antisense strand to SEQ ID NO: 2211554
auacuaccaagauuuaggg

SEQ ID NO: 2211556 - RNA, 19 nt, Artificial Sequence
  Description of Artificial Sequence: Synthetic oligonucleotide
  Sense strand starting at position 1398 of SEQ ID NO: 1883719
uuaguaagauuauuacggu

SEQ ID NO: 2211557 - RNA, 19 nt, Artificial Sequence
  Description of Artificial Sequence: Synthetic oligonucleotide
  Antisense strand to SEQ ID NO: 2211556
accguaauaaucuuacuaa

SEQ ID NO: 2211558 - RNA, 19 nt, Artificial Sequence
  Description of Artificial Sequence: Synthetic oligonucleotide
  Sense strand starting at position 331 of SEQ ID NO: 1883719
agucauagcuuacuaccau

SEQ ID NO: 2211559 - RNA, 19 nt, Artificial Sequence
  Description of Artificial Sequence: Synthetic oligonucleotide
  Antisense strand to SEQ ID NO: 2211558
augguaguaagcuaugacu

SEQ ID NO: 2211560 - RNA, 19 nt, Artificial Sequence
  Description of Artificial Sequence: Synthetic oligonucleotide
  Sense strand starting at position 427 of SEQ ID NO: 1883719
uugaaaugcugcuuuaaca

SEQ ID NO: 2211561 - RNA, 19 nt, Artificial Sequence
  Description of Artificial Sequence: Synthetic oligonucleotide
  Antisense strand to SEQ ID NO: 2211560
uguuaaagcagcauuucaa

SEQ ID NO: 2211562 - RNA, 19 nt, Artificial Sequence
  Description of Artificial Sequence: Synthetic oligonucleotide
  Sense strand starting at position 396 of SEQ ID NO: 1883719
uuguaauucuuaccaguua

SEQ ID NO: 2211563 - RNA, 19 nt, Artificial Sequence
  Description of Artificial Sequence: Synthetic oligonucleotide
  Antisense strand to SEQ ID NO: 2211562
uaacugguaagaauuacaa

SEQ ID NO: 2211564 - RNA, 19 nt, Artificial Sequence
  Description of Artificial Sequence: Synthetic oligonucleotide
  Sense strand starting at position 119 of SEQ ID NO: 1883719
aagauaucugucugugagu

SEQ ID NO: 2211565 - RNA, 19 nt, Artificial Sequence
  Description of Artificial Sequence: Synthetic oligonucleotide
  Antisense strand to SEQ ID NO: 2211564
acucacagacagauaucuu

SEQ ID NO: 2211566 - RNA, 19 nt, Artificial Sequence
  Description of Artificial Sequence: Synthetic oligonucleotide
  Sense strand starting at position 1894 of SEQ ID NO: 1883719
ugaagugucccgcauacag

SEQ ID NO: 2211567 - RNA, 19 nt, Artificial Sequence
  Description of Artificial Sequence: Synthetic oligonucleotide
  Antisense strand to SEQ ID NO: 2211566
cuguaugcgggacacuuca

SEQ ID NO: 2211568 - RNA, 19 nt, Artificial Sequence
  Description of Artificial Sequence: Synthetic oligonucleotide
  Sense strand starting at position 797 of SEQ ID NO: 1883719
uuguaaggcugcccagaaa

SEQ ID NO: 2211569 - RNA, 19 nt, Artificial Sequence
  Description of Artificial Sequence: Synthetic oligonucleotide
  Antisense strand to SEQ ID NO: 2211568
uuucugggcagccuuacaa

SEQ ID NO: 2211570 - RNA, 19 nt, Artificial Sequence
  Description of Artificial Sequence: Synthetic oligonucleotide
  Sense strand starting at position 3920 of SEQ ID NO: 1883719
gaaugcuuucuguagccua

SEQ ID NO: 2211571 - RNA, 19 nt, Artificial Sequence
  Description of Artificial Sequence: Synthetic oligonucleotide
  Antisense strand to SEQ ID NO: 2211570
uaggcuacagaaagcauuc

SEQ ID NO: 2211572 - RNA, 19 nt, Artificial Sequence
  Description of Artificial Sequence: Synthetic oligonucleotide
  Sense strand starting at position 115 of SEQ ID NO: 1883719
guauaagauaucugucugu

SEQ ID NO: 2211573 - RNA, 19 nt, Artificial Sequence
  Description of Artificial Sequence: Synthetic oligonucleotide
  Antisense strand to SEQ ID NO: 2211572
acagacagauaucuuauac

SEQ ID NO: 2211574 - RNA, 19 nt, Artificial Sequence
  Description of Artificial Sequence: Synthetic oligonucleotide
  Sense strand starting at position 120 of SEQ ID NO: 1883719
agauaucugucugugaguc

SEQ ID NO: 2211575 - RNA, 19 nt, Artificial Sequence
  Description of Artificial Sequence: Synthetic oligonucleotide
  Antisense strand to SEQ ID NO: 2211574
gacucacagacagauaucu

SEQ ID NO: 2211576 - RNA, 19 nt, Artificial Sequence
  Description of Artificial Sequence: Synthetic oligonucleotide
  Sense strand starting at position 121 of SEQ ID NO: 1883719
gauaucugucugugaguca

SEQ ID NO: 2211577 - RNA, 19 nt, Artificial Sequence
  Description of Artificial Sequence: Synthetic oligonucleotide
  Antisense strand to SEQ ID NO: 2211576
ugacucacagacagauauc

SEQ ID NO: 2211578 - RNA, 19 nt, Artificial Sequence
  Description of Artificial Sequence: Synthetic oligonucleotide
  Sense strand starting at position 3192 of SEQ ID NO: 1883719
gcgagguugcccgagggaa

SEQ ID NO: 2211579 - RNA, 19 nt, Artificial Sequence
  Description of Artificial Sequence: Synthetic oligonucleotide
  Antisense strand to SEQ ID NO: 2211578
uucccucgggcaaccucgc

SEQ ID NO: 2211580 - RNA, 19 nt, Artificial Sequence
  Description of Artificial Sequence: Synthetic oligonucleotide
  Sense strand starting at position 1056 of SEQ ID NO: 1883719
gccuuagugcuauauuauu

SEQ ID NO: 2211581 - RNA, 19 nt, Artificial Sequence
  Description of Artificial Sequence: Synthetic oligonucleotide
  Antisense strand to SEQ ID NO: 2211580
aauaauauagcacuaaggc

SEQ ID NO: 2211582 - RNA, 19 nt, Artificial Sequence
  Description of Artificial Sequence: Synthetic oligonucleotide
  Sense strand starting at position 305 of SEQ ID NO: 1883719
guuguuagauugccuuaag

SEQ ID NO: 2211583 - RNA, 19 nt, Artificial Sequence
  Description of Artificial Sequence: Synthetic oligonucleotide
  Antisense strand to SEQ ID NO: 2211582
cuuaaggcaaucuaacaac

SEQ ID NO: 2211584 - RNA, 19 nt, Artificial Sequence
  Description of Artificial Sequence: Synthetic oligonucleotide
  Sense strand starting at position 1896 of SEQ ID NO: 1883719
aagugucccgcauacagua

SEQ ID NO: 2211585 - RNA, 19 nt, Artificial Sequence
  Description of Artificial Sequence: Synthetic oligonucleotide
  Antisense strand to SEQ ID NO: 2211584
uacuguaugcgggacacuu

SEQ ID NO: 2211586 - RNA, 19 nt, Artificial Sequence
  Description of Artificial Sequence: Synthetic oligonucleotide
  Sense strand starting at position 248 of SEQ ID NO: 1883719
gugguuaaguaccaauuua

SEQ ID NO: 2211587 - RNA, 19 nt, Artificial Sequence
  Description of Artificial Sequence: Synthetic oligonucleotide
  Antisense strand to SEQ ID NO: 2211586
uaaauugguacuuaaccac

SEQ ID NO: 2211588 - RNA, 19 nt, Artificial Sequence
  Description of Artificial Sequence: Synthetic oligonucleotide
  Sense strand starting at position 2130 of SEQ ID NO: 1883719
aguucuuaaucggccuuaa

SEQ ID NO: 2211589 - RNA, 19 nt, Artificial Sequence
  Description of Artificial Sequence: Synthetic oligonucleotide
  Antisense strand to SEQ ID NO: 2211588
uuaaggccgauuaagaacu

SEQ ID NO: 2211590 - RNA, 19 nt, Artificial Sequence
  Description of Artificial Sequence: Synthetic oligonucleotide
  Sense strand starting at position 1839 of SEQ ID NO: 1883719
gucgcuaccuaguuaagaa

SEQ ID NO: 2211591 - RNA, 19 nt, Artificial Sequence
  Description of Artificial Sequence: Synthetic oligonucleotide
  Antisense strand to SEQ ID NO: 2211590
uucuuaacuagguagcgac

SEQ ID NO: 2211592 - RNA, 19 nt, Artificial Sequence
  Description of Artificial Sequence: Synthetic oligonucleotide
  Sense strand starting at position 1257 of SEQ ID NO: 1883720
gggugugagauugaaagug

SEQ ID NO: 2211593 - RNA, 19 nt, Artificial Sequence
  Description of Artificial Sequence: Synthetic oligonucleotide
  Antisense strand to SEQ ID NO: 2211592
cacuuucaaucucacaccc

SEQ ID NO: 2211594 - RNA, 19 nt, Artificial Sequence
  Description of Artificial Sequence: Synthetic oligonucleotide
  Sense strand starting at position 3306 of SEQ ID NO: 1883720
ugagguguggcagagaaca

SEQ ID NO: 2211595 - RNA, 19 nt, Artificial Sequence
  Description of Artificial Sequence: Synthetic oligonucleotide
  Antisense strand to SEQ ID NO: 2211594
uguucucugccacaccuca

SEQ ID NO: 2211596 - RNA, 19 nt, Artificial Sequence
  Description of Artificial Sequence: Synthetic oligonucleotide
  Sense strand starting at position 1008 of SEQ ID NO: 1883720
gaauauguggucugcauuu

SEQ ID NO: 2211597 - RNA, 19 nt, Artificial Sequence
  Description of Artificial Sequence: Synthetic oligonucleotide
  Antisense strand to SEQ ID NO: 2211596
aaaugcagaccacauauuc

SEQ ID NO: 2211598 - RNA, 19 nt, Artificial Sequence
  Description of Artificial Sequence: Synthetic oligonucleotide
  Sense strand starting at position 3965 of SEQ ID NO: 1883720
cugcuacucggagaugaga

SEQ ID NO: 2211599 - RNA, 19 nt, Artificial Sequence
  Description of Artificial Sequence: Synthetic oligonucleotide
  Antisense strand to SEQ ID NO: 2211598
ucucaucuccgaguagcag

SEQ ID NO: 2211600 - RNA, 19 nt, Artificial Sequence
  Description of Artificial Sequence: Synthetic oligonucleotide
  Sense strand starting at position 819 of SEQ ID NO: 1883720
gaguuaagucgugugcgaa

SEQ ID NO: 2211601 - RNA, 19 nt, Artificial Sequence
  Description of Artificial Sequence: Synthetic oligonucleotide
  Antisense strand to SEQ ID NO: 2211600
uucgcacacgacuuaacuc

SEQ ID NO: 2211602 - RNA, 19 nt, Artificial Sequence
  Description of Artificial Sequence: Synthetic oligonucleotide
  Sense strand starting at position 3623 of SEQ ID NO: 1883720
ugagcuagacaucauguca

SEQ ID NO: 2211603 - RNA, 19 nt, Artificial Sequence
  Description of Artificial Sequence: Synthetic oligonucleotide
  Antisense strand to SEQ ID NO: 2211602
ugacaugaugucuagcuca

SEQ ID NO: 2211604 - RNA, 19 nt, Artificial Sequence
  Description of Artificial Sequence: Synthetic oligonucleotide
  Sense strand starting at position 1761 of SEQ ID NO: 1883720
agucuaaacacuggguaga

SEQ ID NO: 2211605 - RNA, 19 nt, Artificial Sequence
  Description of Artificial Sequence: Synthetic oligonucleotide
  Antisense strand to SEQ ID NO: 2211604
ucuacccaguguuuagacu

SEQ ID NO: 2211606 - RNA, 19 nt, Artificial Sequence
  Description of Artificial Sequence: Synthetic oligonucleotide
  Sense strand starting at position 1250 of SEQ ID NO: 1883720
gggacaugggugugagauu

SEQ ID NO: 2211607 - RNA, 19 nt, Artificial Sequence
  Description of Artificial Sequence: Synthetic oligonucleotide
  Antisense strand to SEQ ID NO: 2211606
aaucucacacccauguccc

SEQ ID NO: 2211608 - RNA, 19 nt, Artificial Sequence
  Description of Artificial Sequence: Synthetic oligonucleotide
  Sense strand starting at position 3594 of SEQ ID NO: 1883720
acugacagaugcuuauuga

SEQ ID NO: 2211609 - RNA, 19 nt, Artificial Sequence
  Description of Artificial Sequence: Synthetic oligonucleotide
  Antisense strand to SEQ ID NO: 2211608
ucaauaagcaucugucagu

SEQ ID NO: 2211610 - RNA, 19 nt, Artificial Sequence
  Description of Artificial Sequence: Synthetic oligonucleotide
  Sense strand starting at position 976 of SEQ ID NO: 1883720
gugauuggaguauaagcau

SEQ ID NO: 2211611 - RNA, 19 nt, Artificial Sequence
  Description of Artificial Sequence: Synthetic oligonucleotide
  Antisense strand to SEQ ID NO: 2211610
augcuuauacuccaaucac

SEQ ID NO: 2211612 - RNA, 19 nt, Artificial Sequence
  Description of Artificial Sequence: Synthetic oligonucleotide
  Sense strand starting at position 1724 of SEQ ID NO: 1883720
ugcagacuacuguacaauu

SEQ ID NO: 2211613 - RNA, 19 nt, Artificial Sequence
  Description of Artificial Sequence: Synthetic oligonucleotide
  Antisense strand to SEQ ID NO: 2211612
aauuguacaguagucugca

SEQ ID NO: 2211614 - RNA, 19 nt, Artificial Sequence
  Description of Artificial Sequence: Synthetic oligonucleotide
  Sense strand starting at position 2631 of SEQ ID NO: 1883720
aguauaaguccacaggcau

SEQ ID NO: 2211615 - RNA, 19 nt, Artificial Sequence
  Description of Artificial Sequence: Synthetic oligonucleotide
  Antisense strand to SEQ ID NO: 2211614
augccuguggacuuauacu

SEQ ID NO: 2211616 - RNA, 19 nt, Artificial Sequence
  Description of Artificial Sequence: Synthetic oligonucleotide
  Sense strand starting at position 2980 of SEQ ID NO: 1883720
ggucucugcagucaggaaa

SEQ ID NO: 2211617 - RNA, 19 nt, Artificial Sequence
  Description of Artificial Sequence: Synthetic oligonucleotide
  Antisense strand to SEQ ID NO: 2211616
uuuccugacugcagagacc

SEQ ID NO: 2211618 - RNA, 19 nt, Artificial Sequence
  Description of Artificial Sequence: Synthetic oligonucleotide
  Sense strand starting at position 189 of SEQ ID NO: 1883720
cuccuuuaagaaugagucu

SEQ ID NO: 2211619 - RNA, 19 nt, Artificial Sequence
  Description of Artificial Sequence: Synthetic oligonucleotide
  Antisense strand to SEQ ID NO: 2211618
agacucauucuuaaaggag

SEQ ID NO: 2211620 - RNA, 19 nt, Artificial Sequence
  Description of Artificial Sequence: Synthetic oligonucleotide
  Sense strand starting at position 3618 of SEQ ID NO: 1883720
ugcuuugagcuagacauca

SEQ ID NO: 2211621 - RNA, 19 nt, Artificial Sequence
  Description of Artificial Sequence: Synthetic oligonucleotide
  Antisense strand to SEQ ID NO: 2211620
ugaugucuagcucaaagca

SEQ ID NO: 2211622 - RNA, 19 nt, Artificial Sequence
  Description of Artificial Sequence: Synthetic oligonucleotide
  Sense strand starting at position 46 of SEQ ID NO: 1883720
ccugcaguccaagggaaau

SEQ ID NO: 2211623 - RNA, 19 nt, Artificial Sequence
  Description of Artificial Sequence: Synthetic oligonucleotide
  Antisense strand to SEQ ID NO: 2211622
auuucccuuggacugcagg

SEQ ID NO: 2211624 - RNA, 19 nt, Artificial Sequence
  Description of Artificial Sequence: Synthetic oligonucleotide
  Sense strand starting at position 970 of SEQ ID NO: 1883720
aggagugugauuggaguau

SEQ ID NO: 2211625 - RNA, 19 nt, Artificial Sequence
  Description of Artificial Sequence: Synthetic oligonucleotide
  Antisense strand to SEQ ID NO: 2211624
auacuccaaucacacuccu

SEQ ID NO: 2211626 - RNA, 19 nt, Artificial Sequence
  Description of Artificial Sequence: Synthetic oligonucleotide
  Sense strand starting at position 1165 of SEQ ID NO: 1883720
gucuuugggaugugaggau

SEQ ID NO: 2211627 - RNA, 19 nt, Artificial Sequence
  Description of Artificial Sequence: Synthetic oligonucleotide
  Antisense strand to SEQ ID NO: 2211626
auccucacaucccaaagac

SEQ ID NO: 2211628 - RNA, 19 nt, Artificial Sequence
  Description of Artificial Sequence: Synthetic oligonucleotide
  Sense strand starting at position 1150 of SEQ ID NO: 1883720
ugagaaucuguguaugucu

SEQ ID NO: 2211629 - RNA, 19 nt, Artificial Sequence
  Description of Artificial Sequence: Synthetic oligonucleotide
  Antisense strand to SEQ ID NO: 2211628
agacauacacagauucuca

SEQ ID NO: 2211630 - RNA, 19 nt, Artificial Sequence
  Description of Artificial Sequence: Synthetic oligonucleotide
  Sense strand starting at position 3597 of SEQ ID NO: 1883720
gacagaugcuuauugaguu

SEQ ID NO: 2211631 - RNA, 19 nt, Artificial Sequence
  Description of Artificial Sequence: Synthetic oligonucleotide
  Antisense strand to SEQ ID NO: 2211630
aacucaauaagcaucuguc

SEQ ID NO: 2211632 - RNA, 19 nt, Artificial Sequence
  Description of Artificial Sequence: Synthetic oligonucleotide
  Sense strand starting at position 1394 of SEQ ID NO: 1883720
gagaguggucuguacuucu

SEQ ID NO: 2211633 - RNA, 19 nt, Artificial Sequence
  Description of Artificial Sequence: Synthetic oligonucleotide
  Antisense strand to SEQ ID NO: 2211632
agaaguacagaccacucuc

SEQ ID NO: 2211634 - RNA, 19 nt, Artificial Sequence
  Description of Artificial Sequence: Synthetic oligonucleotide
  Sense strand starting at position 974 of SEQ ID NO: 1883720
gugugauuggaguauaagc

SEQ ID NO: 2211635 - RNA, 19 nt, Artificial Sequence
  Description of Artificial Sequence: Synthetic oligonucleotide
  Antisense strand to SEQ ID NO: 2211634
gcuuauacuccaaucacac

SEQ ID NO: 2211636 - RNA, 19 nt, Artificial Sequence
  Description of Artificial Sequence: Synthetic oligonucleotide
  Sense strand starting at position 968 of SEQ ID NO: 1883720
uuaggagugugauuggagu

SEQ ID NO: 2211637 - RNA, 19 nt, Artificial Sequence
  Description of Artificial Sequence: Synthetic oligonucleotide
  Antisense strand to SEQ ID NO: 2211636
acuccaaucacacuccuaa

SEQ ID NO: 2211638 - RNA, 19 nt, Artificial Sequence
  Description of Artificial Sequence: Synthetic oligonucleotide
  Sense strand starting at position 2796 of SEQ ID NO: 1883720
gcugauaggauauguacuu

SEQ ID NO: 2211639 - RNA, 19 nt, Artificial Sequence
  Description of Artificial Sequence: Synthetic oligonucleotide
  Antisense strand to SEQ ID NO: 2211638
aaguacauauccuaucagc

SEQ ID NO: 2211640 - RNA, 19 nt, Artificial Sequence
  Description of Artificial Sequence: Synthetic oligonucleotide
  Sense strand starting at position 2802 of SEQ ID NO: 1883720
aggauauguacuugggcuu

SEQ ID NO: 2211641 - RNA, 19 nt, Artificial Sequence
  Description of Artificial Sequence: Synthetic oligonucleotide
  Antisense strand to SEQ ID NO: 2211640
aagcccaaguacauauccu

SEQ ID NO: 2211642 - RNA, 19 nt, Artificial Sequence
  Description of Artificial Sequence: Synthetic oligonucleotide
  Sense strand starting at position 1329 of SEQ ID NO: 1883720
uguugaaugugaguggauu

SEQ ID NO: 2211643 - RNA, 19 nt, Artificial Sequence
  Description of Artificial Sequence: Synthetic oligonucleotide
  Antisense strand to SEQ ID NO: 2211642
aauccacucacauucaaca

SEQ ID NO: 2211644 - RNA, 19 nt, Artificial Sequence
  Description of Artificial Sequence: Synthetic oligonucleotide
  Sense strand starting at position 3797 of SEQ ID NO: 1883720
uuccauagucacugguaua

SEQ ID NO: 2211645 - RNA, 19 nt, Artificial Sequence
  Description of Artificial Sequence: Synthetic oligonucleotide
  Antisense strand to SEQ ID NO: 2211644
uauaccagugacuauggaa

SEQ ID NO: 2211646 - RNA, 19 nt, Artificial Sequence
  Description of Artificial Sequence: Synthetic oligonucleotide
  Sense strand starting at position 1330 of SEQ ID NO: 1883720
guugaaugugaguggauuc

SEQ ID NO: 2211647 - RNA, 19 nt, Artificial Sequence
  Description of Artificial Sequence: Synthetic oligonucleotide
  Antisense strand to SEQ ID NO: 2211646
gaauccacucacauucaac

SEQ ID NO: 2211648 - RNA, 19 nt, Artificial Sequence
  Description of Artificial Sequence: Synthetic oligonucleotide
  Sense strand starting at position 1392 of SEQ ID NO: 1883720
gggagaguggucuguacuu

SEQ ID NO: 2211649 - RNA, 19 nt, Artificial Sequence
  Description of Artificial Sequence: Synthetic oligonucleotide
  Antisense strand to SEQ ID NO: 2211648
aaguacagaccacucuccc

SEQ ID NO: 2211650 - RNA, 19 nt, Artificial Sequence
  Description of Artificial Sequence: Synthetic oligonucleotide
  Sense strand starting at position 1147 of SEQ ID NO: 1883720
guuugagaaucuguguaug

SEQ ID NO: 2211651 - RNA, 19 nt, Artificial Sequence
  Description of Artificial Sequence: Synthetic oligonucleotide
  Antisense strand to SEQ ID NO: 2211650
cauacacagauucucaaac

SEQ ID NO: 2211652 - RNA, 19 nt, Artificial Sequence
  Description of Artificial Sequence: Synthetic oligonucleotide
  Sense strand starting at position 3796 of SEQ ID NO: 1883720
cuuccauagucacugguau

SEQ ID NO: 2211653 - RNA, 19 nt, Artificial Sequence
  Description of Artificial Sequence: Synthetic oligonucleotide
  Antisense strand to SEQ ID NO: 2211652
auaccagugacuauggaag

SEQ ID NO: 2211654 - RNA, 19 nt, Artificial Sequence
  Description of Artificial Sequence: Synthetic oligonucleotide
  Sense strand starting at position 418 of SEQ ID NO: 1883720
cccugucuccuccaaguuu

SEQ ID NO: 2211655 - RNA, 19 nt, Artificial Sequence
  Description of Artificial Sequence: Synthetic oligonucleotide
  Antisense strand to SEQ ID NO: 2211654
aaacuuggaggagacaggg

SEQ ID NO: 2211656 - RNA, 19 nt, Artificial Sequence
  Description of Artificial Sequence: Synthetic oligonucleotide
  Sense strand starting at position 662 of SEQ ID NO: 1883720
uguugagguuccuuacuca

SEQ ID NO: 2211657 - RNA, 19 nt, Artificial Sequence
  Description of Artificial Sequence: Synthetic oligonucleotide
  Antisense strand to SEQ ID NO: 2211656
ugaguaaggaaccucaaca

SEQ ID NO: 2211658 - RNA, 19 nt, Artificial Sequence
  Description of Artificial Sequence: Synthetic oligonucleotide
  Sense strand starting at position 1149 of SEQ ID NO: 1883720
uugagaaucuguguauguc

SEQ ID NO: 2211659 - RNA, 19 nt, Artificial Sequence
  Description of Artificial Sequence: Synthetic oligonucleotide
  Antisense strand to SEQ ID NO: 2211658
gacauacacagauucucaa

SEQ ID NO: 2211660 - RNA, 19 nt, Artificial Sequence
  Description of Artificial Sequence: Synthetic oligonucleotide
  Sense strand starting at position 1006 of SEQ ID NO: 1883720
uggaauauguggucugcau

SEQ ID NO: 2211661 - RNA, 19 nt, Artificial Sequence
  Description of Artificial Sequence: Synthetic oligonucleotide
  Antisense strand to SEQ ID NO: 2211660
augcagaccacauauucca

SEQ ID NO: 2211662 - RNA, 19 nt, Artificial Sequence
  Description of Artificial Sequence: Synthetic oligonucleotide
  Sense strand starting at position 1158 of SEQ ID NO: 1883720
uguguaugucuuugggaug

SEQ ID NO: 2211663 - RNA, 19 nt, Artificial Sequence
  Description of Artificial Sequence: Synthetic oligonucleotide
  Antisense strand to SEQ ID NO: 2211662
caucccaaagacauacaca

SEQ ID NO: 2211664 - RNA, 19 nt, Artificial Sequence
  Description of Artificial Sequence: Synthetic oligonucleotide
  Sense strand starting at position 1786 of SEQ ID NO: 1883720
ggagguguccucuggucca

SEQ ID NO: 2211665 - RNA, 19 nt, Artificial Sequence
  Description of Artificial Sequence: Synthetic oligonucleotide
  Antisense strand to SEQ ID NO: 2211664
uggaccagaggacaccucc

SEQ ID NO: 2211666 - RNA, 19 nt, Artificial Sequence
  Description of Artificial Sequence: Synthetic oligonucleotide
  Sense strand starting at position 809 of SEQ ID NO: 1883720
guguacaucugaguuaagu

SEQ ID NO: 2211667 - RNA, 19 nt, Artificial Sequence
  Description of Artificial Sequence: Synthetic oligonucleotide
  Antisense strand to SEQ ID NO: 2211666
acuuaacucagauguacac

SEQ ID NO: 2211668 - RNA, 19 nt, Artificial Sequence
  Description of Artificial Sequence: Synthetic oligonucleotide
  Sense strand starting at position 1401 of SEQ ID NO: 1883720
gucuguacuucucuacuca

SEQ ID NO: 2211669 - RNA, 19 nt, Artificial Sequence
  Description of Artificial Sequence: Synthetic oligonucleotide
  Antisense strand to SEQ ID NO: 2211668
ugaguagagaaguacagac

SEQ ID NO: 2211670 - RNA, 19 nt, Artificial Sequence
  Description of Artificial Sequence: Synthetic oligonucleotide
  Sense strand starting at position 1337 of SEQ ID NO: 1883720
gugaguggauucuugcacu

SEQ ID NO: 2211671 - RNA, 19 nt, Artificial Sequence
  Description of Artificial Sequence: Synthetic oligonucleotide
  Antisense strand to SEQ ID NO: 2211670
agugcaagaauccacucac

SEQ ID NO: 2211672 - RNA, 19 nt, Artificial Sequence
  Description of Artificial Sequence: Synthetic oligonucleotide
  Sense strand starting at position 3099 of SEQ ID NO: 1883721
uguauuucucucugaaugu

SEQ ID NO: 2211673 - RNA, 19 nt, Artificial Sequence
  Description of Artificial Sequence: Synthetic oligonucleotide
  Antisense strand to SEQ ID NO: 2211672
acauucagagagaaauaca

SEQ ID NO: 2211674 - RNA, 19 nt, Artificial Sequence
  Description of Artificial Sequence: Synthetic oligonucleotide
  Sense strand starting at position 2869 of SEQ ID NO: 1883721
guaguauacaagcagagau

SEQ ID NO: 2211675 - RNA, 19 nt, Artificial Sequence
  Description of Artificial Sequence: Synthetic oligonucleotide
  Antisense strand to SEQ ID NO: 2211674
aucucugcuuguauacuac

SEQ ID NO: 2211676 - RNA, 19 nt, Artificial Sequence
  Description of Artificial Sequence: Synthetic oligonucleotide
  Sense strand starting at position 3527 of SEQ ID NO: 1883721
guaaacgacagcuaggaau

SEQ ID NO: 2211677 - RNA, 19 nt, Artificial Sequence
  Description of Artificial Sequence: Synthetic oligonucleotide
  Antisense strand to SEQ ID NO: 2211676
auuccuagcugucguuuac

SEQ ID NO: 2211678 - RNA, 19 nt, Artificial Sequence
  Description of Artificial Sequence: Synthetic oligonucleotide
  Sense strand starting at position 3305 of SEQ ID NO: 1883721
guacucauuuccuuagcca

SEQ ID NO: 2211679 - RNA, 19 nt, Artificial Sequence
  Description of Artificial Sequence: Synthetic oligonucleotide
  Antisense strand to SEQ ID NO: 2211678
uggcuaaggaaaugaguac

SEQ ID NO: 2211680 - RNA, 19 nt, Artificial Sequence
  Description of Artificial Sequence: Synthetic oligonucleotide
  Sense strand starting at position 3968 of SEQ ID NO: 1883721
ugugaaucccacuaggcaa

SEQ ID NO: 2211681 - RNA, 19 nt, Artificial Sequence
  Description of Artificial Sequence: Synthetic oligonucleotide
  Antisense strand to SEQ ID NO: 2211680
uugccuagugggauucaca

SEQ ID NO: 2211682 - RNA, 19 nt, Artificial Sequence
  Description of Artificial Sequence: Synthetic oligonucleotide
  Sense strand starting at position 598 of SEQ ID NO: 1883721
aguucuuugggugacuuaa

SEQ ID NO: 2211683 - RNA, 19 nt, Artificial Sequence
  Description of Artificial Sequence: Synthetic oligonucleotide
  Antisense strand to SEQ ID NO: 2211682
uuaagucacccaaagaacu

SEQ ID NO: 2211684 - RNA, 19 nt, Artificial Sequence
  Description of Artificial Sequence: Synthetic oligonucleotide
  Sense strand starting at position 1430 of SEQ ID NO: 1883721
caaacaucgcuguaugaaa

SEQ ID NO: 2211685 - RNA, 19 nt, Artificial Sequence
  Description of Artificial Sequence: Synthetic oligonucleotide
  Antisense strand to SEQ ID NO: 2211684
uuucauacagcgauguuug

SEQ ID NO: 2211686 - RNA, 19 nt, Artificial Sequence
  Description of Artificial Sequence: Synthetic oligonucleotide
  Sense strand starting at position 893 of SEQ ID NO: 1883721
guuaauaaacuccagcgaa

SEQ ID NO: 2211687 - RNA, 19 nt, Artificial Sequence
  Description of Artificial Sequence: Synthetic oligonucleotide
  Antisense strand to SEQ ID NO: 2211686
uucgcuggaguuuauuaac

SEQ ID NO: 2211688 - RNA, 19 nt, Artificial Sequence
  Description of Artificial Sequence: Synthetic oligonucleotide
  Sense strand starting at position 2916 of SEQ ID NO: 1883721
ggguuugaauuccuuaaac

SEQ ID NO: 2211689 - RNA, 19 nt, Artificial Sequence
  Description of Artificial Sequence: Synthetic oligonucleotide
  Antisense strand to SEQ ID NO: 2211688
guuuaaggaauucaaaccc

SEQ ID NO: 2211690 - RNA, 19 nt, Artificial Sequence
  Description of Artificial Sequence: Synthetic oligonucleotide
  Sense strand starting at position 2461 of SEQ ID NO: 1883721
gccagagcucgcccuugua

SEQ ID NO: 2211691 - RNA, 19 nt, Artificial Sequence
  Description of Artificial Sequence: Synthetic oligonucleotide
  Antisense strand to SEQ ID NO: 2211690
uacaagggcgagcucuggc

SEQ ID NO: 2211692 - RNA, 19 nt, Artificial Sequence
  Description of Artificial Sequence: Synthetic oligonucleotide
  Sense strand starting at position 2953 of SEQ ID NO: 1883721
ugcccaucucuggaaguaa

SEQ ID NO: 2211693 - RNA, 19 nt, Artificial Sequence
  Description of Artificial Sequence: Synthetic oligonucleotide
  Antisense strand to SEQ ID NO: 2211692
uuacuuccagagaugggca

SEQ ID NO: 2211694 - RNA, 19 nt, Artificial Sequence
  Description of Artificial Sequence: Synthetic oligonucleotide
  Sense strand starting at position 3005 of SEQ ID NO: 1883721
cgaugaccuagccagaagu

SEQ ID NO: 2211695 - RNA, 19 nt, Artificial Sequence
  Description of Artificial Sequence: Synthetic oligonucleotide
  Antisense strand to SEQ ID NO: 2211694
acuucuggcuaggucaucg

SEQ ID NO: 2211696 - RNA, 19 nt, Artificial Sequence
  Description of Artificial Sequence: Synthetic oligonucleotide
  Sense strand starting at position 3888 of SEQ ID NO: 1883721
aguauaguaucauugaacu

SEQ ID NO: 2211697 - RNA, 19 nt, Artificial Sequence
  Description of Artificial Sequence: Synthetic oligonucleotide
  Antisense strand to SEQ ID NO: 2211696
aguucaaugauacuauacu

SEQ ID NO: 2211698 - RNA, 19 nt, Artificial Sequence
  Description of Artificial Sequence: Synthetic oligonucleotide
  Sense strand starting at position 3981 of SEQ ID NO: 1883721
aggcaagacuuuguccaaa

SEQ ID NO: 2211699 - RNA, 19 nt, Artificial Sequence
  Description of Artificial Sequence: Synthetic oligonucleotide
  Antisense strand to SEQ ID NO: 2211698
uuuggacaaagucuugccu

SEQ ID NO: 2211700 - RNA, 19 nt, Artificial Sequence
  Description of Artificial Sequence: Synthetic oligonucleotide
  Sense strand starting at position 2584 of SEQ ID NO: 1883721
cgugguauaacuggcauuu

SEQ ID NO: 2211701 - RNA, 19 nt, Artificial Sequence
  Description of Artificial Sequence: Synthetic oligonucleotide
  Antisense strand to SEQ ID NO: 2211700
aaaugccaguuauaccacg

SEQ ID NO: 2211702 - RNA, 19 nt, Artificial Sequence
  Description of Artificial Sequence: Synthetic oligonucleotide
  Sense strand starting at position 3615 of SEQ ID NO: 1883721
auaugacugccuugaccaa

SEQ ID NO: 2211703 - RNA, 19 nt, Artificial Sequence
  Description of Artificial Sequence: Synthetic oligonucleotide
  Antisense strand to SEQ ID NO: 2211702
uuggucaaggcagucauau

SEQ ID NO: 2211704 - RNA, 19 nt, Artificial Sequence
  Description of Artificial Sequence: Synthetic oligonucleotide
  Sense strand starting at position 600 of SEQ ID NO: 1883721
uucuuugggugacuuaaau

SEQ ID NO: 2211705 - RNA, 19 nt, Artificial Sequence
  Description of Artificial Sequence: Synthetic oligonucleotide
  Antisense strand to SEQ ID NO: 2211704
auuuaagucacccaaagaa

SEQ ID NO: 2211706 - RNA, 19 nt, Artificial Sequence
  Description of Artificial Sequence: Synthetic oligonucleotide
  Sense strand starting at position 1369 of SEQ ID NO: 1883721
agggaaagcuuaguuaagu

SEQ ID NO: 2211707 - RNA, 19 nt, Artificial Sequence
  Description of Artificial Sequence: Synthetic oligonucleotide
  Antisense strand to SEQ ID NO: 2211706
acuuaacuaagcuuucccu

SEQ ID NO: 2211708 - RNA, 19 nt, Artificial Sequence
  Description of Artificial Sequence: Synthetic oligonucleotide
  Sense strand starting at position 2818 of SEQ ID NO: 1883721
gggccaucguuaguuauuu

SEQ ID NO: 2211709 - RNA, 19 nt, Artificial Sequence
  Description of Artificial Sequence: Synthetic oligonucleotide
  Antisense strand to SEQ ID NO: 2211708
aaauaacuaacgauggccc

SEQ ID NO: 2211710 - RNA, 19 nt, Artificial Sequence
  Description of Artificial Sequence: Synthetic oligonucleotide
  Sense strand starting at position 3928 of SEQ ID NO: 1883721
guaauucugugaguaacaa

SEQ ID NO: 2211711 - RNA, 19 nt, Artificial Sequence
  Description of Artificial Sequence: Synthetic oligonucleotide
  Antisense strand to SEQ ID NO: 2211710
uuguuacucacagaauuac

SEQ ID NO: 2211712 - RNA, 19 nt, Artificial Sequence
  Description of Artificial Sequence: Synthetic oligonucleotide
  Sense strand starting at position 3980 of SEQ ID NO: 1883721
uaggcaagacuuuguccaa

SEQ ID NO: 2211713 - RNA, 19 nt, Artificial Sequence
  Description of Artificial Sequence: Synthetic oligonucleotide
  Antisense strand to SEQ ID NO: 2211712
uuggacaaagucuugccua

SEQ ID NO: 2211714 - RNA, 19 nt, Artificial Sequence
  Description of Artificial Sequence: Synthetic oligonucleotide
  Sense strand starting at position 591 of SEQ ID NO: 1883721
gaacuauaguucuuugggu

SEQ ID NO: 2211715 - RNA, 19 nt, Artificial Sequence
  Description of Artificial Sequence: Synthetic oligonucleotide
  Antisense strand to SEQ ID NO: 2211714
acccaaagaacuauaguuc

SEQ ID NO: 2211716 - RNA, 19 nt, Artificial Sequence
  Description of Artificial Sequence: Synthetic oligonucleotide
  Sense strand starting at position 1370 of SEQ ID NO: 1883721
gggaaagcuuaguuaaguu

SEQ ID NO: 2211717 - RNA, 19 nt, Artificial Sequence
  Description of Artificial Sequence: Synthetic oligonucleotide
  Antisense strand to SEQ ID NO: 2211716
aacuuaacuaagcuuuccc

SEQ ID NO: 2211718 - RNA, 19 nt, Artificial Sequence
  Description of Artificial Sequence: Synthetic oligonucleotide
  Sense strand starting at position 1184 of SEQ ID NO: 1883721
gaacauuuccgcuguguuu

SEQ ID NO: 2211719 - RNA, 19 nt, Artificial Sequence
  Description of Artificial Sequence: Synthetic oligonucleotide
  Antisense strand to SEQ ID NO: 2211718
aaacacagcggaaauguuc

SEQ ID NO: 2211720 - RNA, 19 nt, Artificial Sequence
  Description of Artificial Sequence: Synthetic oligonucleotide
  Sense strand starting at position 593 of SEQ ID NO: 1883721
acuauaguucuuuggguga

SEQ ID NO: 2211721 - RNA, 19 nt, Artificial Sequence
  Description of Artificial Sequence: Synthetic oligonucleotide
  Antisense strand to SEQ ID NO: 2211720
ucacccaaagaacuauagu

SEQ ID NO: 2211722 - RNA, 19 nt, Artificial Sequence
  Description of Artificial Sequence: Synthetic oligonucleotide
  Sense strand starting at position 3503 of SEQ ID NO: 1883721
guguuuaaugguuaauagu

SEQ ID NO: 2211723 - RNA, 19 nt, Artificial Sequence
  Description of Artificial Sequence: Synthetic oligonucleotide
  Antisense strand to SEQ ID NO: 2211722
acuauuaaccauuaaacac

SEQ ID NO: 2211724 - RNA, 19 nt, Artificial Sequence
  Description of Artificial Sequence: Synthetic oligonucleotide
  Sense strand starting at position 548 of SEQ ID NO: 1883721
ucaggaagcucugucucaa

SEQ ID NO: 2211725 - RNA, 19 nt, Artificial Sequence
  Description of Artificial Sequence: Synthetic oligonucleotide
  Antisense strand to SEQ ID NO: 2211724
uugagacagagcuuccuga

SEQ ID NO: 2211726 - RNA, 19 nt, Artificial Sequence
  Description of Artificial Sequence: Synthetic oligonucleotide
  Sense strand starting at position 3236 of SEQ ID NO: 1883721
auauaacucuacguaguca

SEQ ID NO: 2211727 - RNA, 19 nt, Artificial Sequence
  Description of Artificial Sequence: Synthetic oligonucleotide
  Antisense strand to SEQ ID NO: 2211726
ugacuacguagaguuauau

SEQ ID NO: 2211728 - RNA, 19 nt, Artificial Sequence
  Description of Artificial Sequence: Synthetic oligonucleotide
  Sense strand starting at position 596 of SEQ ID NO: 1883721
auaguucuuugggugacuu

SEQ ID NO: 2211729 - RNA, 19 nt, Artificial Sequence
  Description of Artificial Sequence: Synthetic oligonucleotide
  Antisense strand to SEQ ID NO: 2211728
aagucacccaaagaacuau

SEQ ID NO: 2211730 - RNA, 19 nt, Artificial Sequence
  Description of Artificial Sequence: Synthetic oligonucleotide
  Sense strand starting at position 1182 of SEQ ID NO: 1883721
gugaacauuuccgcugugu

SEQ ID NO: 2211731 - RNA, 19 nt, Artificial Sequence
  Description of Artificial Sequence: Synthetic oligonucleotide
  Antisense strand to SEQ ID NO: 2211730
acacagcggaaauguucac

SEQ ID NO: 2211732 - RNA, 19 nt, Artificial Sequence
  Description of Artificial Sequence: Synthetic oligonucleotide
  Sense strand starting at position 597 of SEQ ID NO: 1883721
uaguucuuugggugacuua

SEQ ID NO: 2211733 - RNA, 19 nt, Artificial Sequence
  Description of Artificial Sequence: Synthetic oligonucleotide
  Antisense strand to SEQ ID NO: 2211732
uaagucacccaaagaacua

SEQ ID NO: 2211734 - RNA, 19 nt, Artificial Sequence
  Description of Artificial Sequence: Synthetic oligonucleotide
  Sense strand starting at position 3371 of SEQ ID NO: 1883721
gcaugaagauuugagucca

SEQ ID NO: 2211735 - RNA, 19 nt, Artificial Sequence
  Description of Artificial Sequence: Synthetic oligonucleotide
  Antisense strand to SEQ ID NO: 2211734
uggacucaaaucuucaugc

SEQ ID NO: 2211736 - RNA, 19 nt, Artificial Sequence
  Description of Artificial Sequence: Synthetic oligonucleotide
  Sense strand starting at position 3983 of SEQ ID NO: 1883721
gcaagacuuuguccaaagu

SEQ ID NO: 2211737 - RNA, 19 nt, Artificial Sequence
  Description of Artificial Sequence: Synthetic oligonucleotide
  Antisense strand to SEQ ID NO: 2211736
acuuuggacaaagucuugc

SEQ ID NO: 2211738 - RNA, 19 nt, Artificial Sequence
  Description of Artificial Sequence: Synthetic oligonucleotide
  Sense strand starting at position 232 of SEQ ID NO: 1883721
gguuaaacacuuugucucu

SEQ ID NO: 2211739 - RNA, 19 nt, Artificial Sequence
  Description of Artificial Sequence: Synthetic oligonucleotide
  Antisense strand to SEQ ID NO: 2211738
agagacaaaguguuuaacc

SEQ ID NO: 2211740 - RNA, 19 nt, Artificial Sequence
  Description of Artificial Sequence: Synthetic oligonucleotide
  Sense strand starting at position 3423 of SEQ ID NO: 1883721
cugcauacgauaugguuaa

SEQ ID NO: 2211741 - RNA, 19 nt, Artificial Sequence
  Description of Artificial Sequence: Synthetic oligonucleotide
  Antisense strand to SEQ ID NO: 2211740
uuaaccauaucguaugcag

SEQ ID NO: 2211742 - RNA, 19 nt, Artificial Sequence
  Description of Artificial Sequence: Synthetic oligonucleotide
  Sense strand starting at position 1323 of SEQ ID NO: 1883721
cuacuagccauggguguaa

SEQ ID NO: 2211743 - RNA, 19 nt, Artificial Sequence
  Description of Artificial Sequence: Synthetic oligonucleotide
  Antisense strand to SEQ ID NO: 2211742
uuacacccauggcuaguag

SEQ ID NO: 2211744 - RNA, 19 nt, Artificial Sequence
  Description of Artificial Sequence: Synthetic oligonucleotide
  Sense strand starting at position 2806 of SEQ ID NO: 1883721
ugugaaaugcaugggccau

SEQ ID NO: 2211745 - RNA, 19 nt, Artificial Sequence
  Description of Artificial Sequence: Synthetic oligonucleotide
  Antisense strand to SEQ ID NO: 2211744
auggcccaugcauuucaca

SEQ ID NO: 2211746 - RNA, 19 nt, Artificial Sequence
  Description of Artificial Sequence: Synthetic oligonucleotide
  Sense strand starting at position 1139 of SEQ ID NO: 1883721
gccuaagguuuccuuaacu

SEQ ID NO: 2211747 - RNA, 19 nt, Artificial Sequence
  Description of Artificial Sequence: Synthetic oligonucleotide
  Antisense strand to SEQ ID NO: 2211746
aguuaaggaaaccuuaggc

SEQ ID NO: 2211748 - RNA, 19 nt, Artificial Sequence
  Description of Artificial Sequence: Synthetic oligonucleotide
  Sense strand starting at position 2816 of SEQ ID NO: 1883721
augggccaucguuaguuau

SEQ ID NO: 2211749 - RNA, 19 nt, Artificial Sequence
  Description of Artificial Sequence: Synthetic oligonucleotide
  Antisense strand to SEQ ID NO: 2211748
auaacuaacgauggcccau

SEQ ID NO: 2211750 - RNA, 19 nt, Artificial Sequence
  Description of Artificial Sequence: Synthetic oligonucleotide
  Sense strand starting at position 238 of SEQ ID NO: 1883721
acacuuugucucuguuaua

SEQ ID NO: 2211751 - RNA, 19 nt, Artificial Sequence
  Description of Artificial Sequence: Synthetic oligonucleotide
  Antisense strand to SEQ ID NO: 2211750
uauaacagagacaaagugu

SEQ ID NO: 2211752 - RNA, 19 nt, Artificial Sequence
  Description of Artificial Sequence: Synthetic oligonucleotide
  Sense strand starting at position 3930 of SEQ ID NO: 1883722
gguauuggugaagaucuua

SEQ ID NO: 2211753 - RNA, 19 nt, Artificial Sequence
  Description of Artificial Sequence: Synthetic oligonucleotide
  Antisense strand to SEQ ID NO: 2211752
uaagaucuucaccaauacc

SEQ ID NO: 2211754 - RNA, 19 nt, Artificial Sequence
  Description of Artificial Sequence: Synthetic oligonucleotide
  Sense strand starting at position 3468 of SEQ ID NO: 1883722
cuugaaguucuuuaugaac

SEQ ID NO: 2211755 - RNA, 19 nt, Artificial Sequence
  Description of Artificial Sequence: Synthetic oligonucleotide
  Antisense strand to SEQ ID NO: 2211754
guucauaaagaacuucaag

SEQ ID NO: 2211756 - RNA, 19 nt, Artificial Sequence
  Description of Artificial Sequence: Synthetic oligonucleotide
  Sense strand starting at position 3477 of SEQ ID NO: 1883722
cuuuaugaacaagguagau

SEQ ID NO: 2211757 - RNA, 19 nt, Artificial Sequence
  Description of Artificial Sequence: Synthetic oligonucleotide
  Antisense strand to SEQ ID NO: 2211756
aucuaccuuguucauaaag

SEQ ID NO: 2211758 - RNA, 19 nt, Artificial Sequence
  Description of Artificial Sequence: Synthetic oligonucleotide
  Sense strand starting at position 2438 of SEQ ID NO: 1883722
cugcacuuugaggacauua

SEQ ID NO: 2211759 - RNA, 19 nt, Artificial Sequence
  Description of Artificial Sequence: Synthetic oligonucleotide
  Antisense strand to SEQ ID NO: 2211758
uaauguccucaaagugcag

SEQ ID NO: 2211760 - RNA, 19 nt, Artificial Sequence
  Description of Artificial Sequence: Synthetic oligonucleotide
  Sense strand starting at position 3474 of SEQ ID NO: 1883722
guucuuuaugaacaaggua

SEQ ID NO: 2211761 - RNA, 19 nt, Artificial Sequence
  Description of Artificial Sequence: Synthetic oligonucleotide
  Antisense strand to SEQ ID NO: 2211760
uaccuuguucauaaagaac

SEQ ID NO: 2211762 - RNA, 19 nt, Artificial Sequence
  Description of Artificial Sequence: Synthetic oligonucleotide
  Sense strand starting at position 251 of SEQ ID NO: 1883722
guaugucucaaguagaaag

SEQ ID NO: 2211763 - RNA, 19 nt, Artificial Sequence
  Description of Artificial Sequence: Synthetic oligonucleotide
  Antisense strand to SEQ ID NO: 2211762
cuuucuacuugagacauac

SEQ ID NO: 2211764 - RNA, 19 nt, Artificial Sequence
  Description of Artificial Sequence: Synthetic oligonucleotide
  Sense strand starting at position 2034 of SEQ ID NO: 1883722
aagggugugauguauacau

SEQ ID NO: 2211765 - RNA, 19 nt, Artificial Sequence
  Description of Artificial Sequence: Synthetic oligonucleotide
  Antisense strand to SEQ ID NO: 2211764
auguauacaucacacccuu

SEQ ID NO: 2211766 - RNA, 19 nt, Artificial Sequence
  Description of Artificial Sequence: Synthetic oligonucleotide
  Sense strand starting at position 3798 of SEQ ID NO: 1883722
gcuguuacacuggauaaua

SEQ ID NO: 2211767 - RNA, 19 nt, Artificial Sequence
  Description of Artificial Sequence: Synthetic oligonucleotide
  Antisense strand to SEQ ID NO: 2211766
uauuauccaguguaacagc

SEQ ID NO: 2211768 - RNA, 19 nt, Artificial Sequence
  Description of Artificial Sequence: Synthetic oligonucleotide
  Sense strand starting at position 3520 of SEQ ID NO: 1883722
gccacacugacuggagaau

SEQ ID NO: 2211769 - RNA, 19 nt, Artificial Sequence
  Description of Artificial Sequence: Synthetic oligonucleotide
  Antisense strand to SEQ ID NO: 2211768
auucuccagucaguguggc

SEQ ID NO: 2211770 - RNA, 19 nt, Artificial Sequence
  Description of Artificial Sequence: Synthetic oligonucleotide
  Sense strand starting at position 1722 of SEQ ID NO: 1883722
acuaaaugaucauugcuga

SEQ ID NO: 2211771 - RNA, 19 nt, Artificial Sequence
  Description of Artificial Sequence: Synthetic oligonucleotide
  Antisense strand to SEQ ID NO: 2211770
ucagcaaugaucauuuagu

SEQ ID NO: 2211772 - RNA, 19 nt, Artificial Sequence
  Description of Artificial Sequence: Synthetic oligonucleotide
  Sense strand starting at position 2029 of SEQ ID NO: 1883722
ggaagaagggugugaugua

SEQ ID NO: 2211773 - RNA, 19 nt, Artificial Sequence
  Description of Artificial Sequence: Synthetic oligonucleotide
  Antisense strand to SEQ ID NO: 2211772
uacaucacacccuucuucc

SEQ ID NO: 2211774 - RNA, 19 nt, Artificial Sequence
  Description of Artificial Sequence: Synthetic oligonucleotide
  Sense strand starting at position 3339 of SEQ ID NO: 1883722
gauggucugcuguaagaaa

SEQ ID NO: 2211775 - RNA, 19 nt, Artificial Sequence
  Description of Artificial Sequence: Synthetic oligonucleotide
  Antisense strand to SEQ ID NO: 2211774
uuucuuacagcagaccauc

SEQ ID NO: 2211776 - RNA, 19 nt, Artificial Sequence
  Description of Artificial Sequence: Synthetic oligonucleotide
  Sense strand starting at position 3723 of SEQ ID NO: 1883722
gauagucaauggucauaua

SEQ ID NO: 2211777 - RNA, 19 nt, Artificial Sequence
  Description of Artificial Sequence: Synthetic oligonucleotide
  Antisense strand to SEQ ID NO: 2211776
uauaugaccauugacuauc

SEQ ID NO: 2211778 - RNA, 19 nt, Artificial Sequence
  Description of Artificial Sequence: Synthetic oligonucleotide
  Sense strand starting at position 1988 of SEQ ID NO: 1883722
gugcaauaucuccaccaga

SEQ ID NO: 2211779 - RNA, 19 nt, Artificial Sequence
  Description of Artificial Sequence: Synthetic oligonucleotide
  Antisense strand to SEQ ID NO: 2211778
ucugguggagauauugcac

SEQ ID NO: 2211780 - RNA, 19 nt, Artificial Sequence
  Description of Artificial Sequence: Synthetic oligonucleotide
  Sense strand starting at position 1233 of SEQ ID NO: 1883722
cuugacaaugccuagugau

SEQ ID NO: 2211781 - RNA, 19 nt, Artificial Sequence
  Description of Artificial Sequence: Synthetic oligonucleotide
  Antisense strand to SEQ ID NO: 2211780
aucacuaggcauugucaag

SEQ ID NO: 2211782 - RNA, 19 nt, Artificial Sequence
  Description of Artificial Sequence: Synthetic oligonucleotide
  Sense strand starting at position 3720 of SEQ ID NO: 1883722
gaugauagucaauggucau

SEQ ID NO: 2211783 - RNA, 19 nt, Artificial Sequence
  Description of Artificial Sequence: Synthetic oligonucleotide
  Antisense strand to SEQ ID NO: 2211782
augaccauugacuaucauc

SEQ ID NO: 2211784 - RNA, 19 nt, Artificial Sequence
  Description of Artificial Sequence: Synthetic oligonucleotide
  Sense strand starting at position 3866 of SEQ ID NO: 1883722
ggacacuauacagguguua

SEQ ID NO: 2211785 - RNA, 19 nt, Artificial Sequence
  Description of Artificial Sequence: Synthetic oligonucleotide
  Antisense strand to SEQ ID NO: 2211784
uaacaccuguauagugucc

SEQ ID NO: 2211786 - RNA, 19 nt, Artificial Sequence
  Description of Artificial Sequence: Synthetic oligonucleotide
  Sense strand starting at position 3217 of SEQ ID NO: 1883722
ugaaccuaggugugacuaa

SEQ ID NO: 2211787 - RNA, 19 nt, Artificial Sequence
  Description of Artificial Sequence: Synthetic oligonucleotide
  Antisense strand to SEQ ID NO: 2211786
uuagucacaccuagguuca

SEQ ID NO: 2211788 - RNA, 19 nt, Artificial Sequence
  Description of Artificial Sequence: Synthetic oligonucleotide
  Sense strand starting at position 969 of SEQ ID NO: 1883722
auuaaucugcccuggaaac

SEQ ID NO: 2211789 - RNA, 19 nt, Artificial Sequence
  Description of Artificial Sequence: Synthetic oligonucleotide
  Antisense strand to SEQ ID NO: 2211788
guuuccagggcagauuaau

SEQ ID NO: 2211790 - RNA, 19 nt, Artificial Sequence
  Description of Artificial Sequence: Synthetic oligonucleotide
  Sense strand starting at position 967 of SEQ ID NO: 1883722
ugauuaaucugcccuggaa

SEQ ID NO: 2211791 - RNA, 19 nt, Artificial Sequence
  Description of Artificial Sequence: Synthetic oligonucleotide
  Antisense strand to SEQ ID NO: 2211790
uuccagggcagauuaauca

SEQ ID NO: 2211792 - RNA, 19 nt, Artificial Sequence
  Description of Artificial Sequence: Synthetic oligonucleotide
  Sense strand starting at position 85 of SEQ ID NO: 1883722
gaguaagaauuaccugucu

SEQ ID NO: 2211793 - RNA, 19 nt, Artificial Sequence
  Description of Artificial Sequence: Synthetic oligonucleotide
  Antisense strand to SEQ ID NO: 2211792
agacagguaauucuuacuc

SEQ ID NO: 2211794 - RNA, 19 nt, Artificial Sequence
  Description of Artificial Sequence: Synthetic oligonucleotide
  Sense strand starting at position 1482 of SEQ ID NO: 1883722
cuuuacugucuugauuauu

SEQ ID NO: 2211795 - RNA, 19 nt, Artificial Sequence
  Description of Artificial Sequence: Synthetic oligonucleotide
  Antisense strand to SEQ ID NO: 2211794
aauaaucaagacaguaaag

SEQ ID NO: 2211796 - RNA, 19 nt, Artificial Sequence
  Description of Artificial Sequence: Synthetic oligonucleotide
  Sense strand starting at position 198 of SEQ ID NO: 1883722
uuucuaaaggacugucauu

SEQ ID NO: 2211797 - RNA, 19 nt, Artificial Sequence
  Description of Artificial Sequence: Synthetic oligonucleotide
  Antisense strand to SEQ ID NO: 2211796
aaugacaguccuuuagaaa

SEQ ID NO: 2211798 - RNA, 19 nt, Artificial Sequence
  Description of Artificial Sequence: Synthetic oligonucleotide
  Sense strand starting at position 2036 of SEQ ID NO: 1883722
gggugugauguauacauuc

SEQ ID NO: 2211799 - RNA, 19 nt, Artificial Sequence
  Description of Artificial Sequence: Synthetic oligonucleotide
  Antisense strand to SEQ ID NO: 2211798
gaauguauacaucacaccc

SEQ ID NO: 2211800 - RNA, 19 nt, Artificial Sequence
  Description of Artificial Sequence: Synthetic oligonucleotide
  Sense strand starting at position 46 of SEQ ID NO: 1883722
ucuauaaacucaguguaca

SEQ ID NO: 2211801 - RNA, 19 nt, Artificial Sequence
  Description of Artificial Sequence: Synthetic oligonucleotide
  Antisense strand to SEQ ID NO: 2211800
uguacacugaguuuauaga

SEQ ID NO: 2211802 - RNA, 19 nt, Artificial Sequence
  Description of Artificial Sequence: Synthetic oligonucleotide
  Sense strand starting at position 2866 of SEQ ID NO: 1883722
gguaccaaagguuguuaaa

SEQ ID NO: 2211803 - RNA, 19 nt, Artificial Sequence
  Description of Artificial Sequence: Synthetic oligonucleotide
  Antisense strand to SEQ ID NO: 2211802
uuuaacaaccuuugguacc

SEQ ID NO: 2211804 - RNA, 19 nt, Artificial Sequence
  Description of Artificial Sequence: Synthetic oligonucleotide
  Sense strand starting at position 47 of SEQ ID NO: 1883722
cuauaaacucaguguacac

SEQ ID NO: 2211805 - RNA, 19 nt, Artificial Sequence
  Description of Artificial Sequence: Synthetic oligonucleotide
  Antisense strand to SEQ ID NO: 2211804
guguacacugaguuuauag

SEQ ID NO: 2211806 - RNA, 19 nt, Artificial Sequence
  Description of Artificial Sequence: Synthetic oligonucleotide
  Sense strand starting at position 776 of SEQ ID NO: 1883722
gggagcauucuguaucuuc

SEQ ID NO: 2211807 - RNA, 19 nt, Artificial Sequence
  Description of Artificial Sequence: Synthetic oligonucleotide
  Antisense strand to SEQ ID NO: 2211806
gaagauacagaaugcuccc

SEQ ID NO: 2211808 - RNA, 19 nt, Artificial Sequence
  Description of Artificial Sequence: Synthetic oligonucleotide
  Sense strand starting at position 1883 of SEQ ID NO: 1883722
cuguaaucccagcaagcaa

SEQ ID NO: 2211809 - RNA, 19 nt, Artificial Sequence
  Description of Artificial Sequence: Synthetic oligonucleotide
  Antisense strand to SEQ ID NO: 2211808
uugcuugcugggauuacag

SEQ ID NO: 2211810 - RNA, 19 nt, Artificial Sequence
  Description of Artificial Sequence: Synthetic oligonucleotide
  Sense strand starting at position 2793 of SEQ ID NO: 1883722
uucuuuagucuguaccaua

SEQ ID NO: 2211811 - RNA, 19 nt, Artificial Sequence
  Description of Artificial Sequence: Synthetic oligonucleotide
  Antisense strand to SEQ ID NO: 2211810
uaugguacagacuaaagaa

SEQ ID NO: 2211812 - RNA, 19 nt, Artificial Sequence
  Description of Artificial Sequence: Synthetic oligonucleotide
  Sense strand starting at position 1979 of SEQ ID NO: 1883722
cuuaguaaugugcaauauc

SEQ ID NO: 2211813 - RNA, 19 nt, Artificial Sequence
  Description of Artificial Sequence: Synthetic oligonucleotide
  Antisense strand to SEQ ID NO: 2211812
gauauugcacauuacuaag

SEQ ID NO: 2211814 - RNA, 19 nt, Artificial Sequence
  Description of Artificial Sequence: Synthetic oligonucleotide
  Sense strand starting at position 3911 of SEQ ID NO: 1883722
cagccaaucgcggaaacaa

SEQ ID NO: 2211815 - RNA, 19 nt, Artificial Sequence
  Description of Artificial Sequence: Synthetic oligonucleotide
  Antisense strand to SEQ ID NO: 2211814
uuguuuccgcgauuggcug

SEQ ID NO: 2211816 - RNA, 19 nt, Artificial Sequence
  Description of Artificial Sequence: Synthetic oligonucleotide
  Sense strand starting at position 1255 of SEQ ID NO: 1883722
ggaugcuuacucuaaugcu

SEQ ID NO: 2211817 - RNA, 19 nt, Artificial Sequence
  Description of Artificial Sequence: Synthetic oligonucleotide
  Antisense strand to SEQ ID NO: 2211816
agcauuagaguaagcaucc

SEQ ID NO: 2211818 - RNA, 19 nt, Artificial Sequence
  Description of Artificial Sequence: Synthetic oligonucleotide
  Sense strand starting at position 1467 of SEQ ID NO: 1883722
guagguuaagcauaccuuu

SEQ ID NO: 2211819 - RNA, 19 nt, Artificial Sequence
  Description of Artificial Sequence: Synthetic oligonucleotide
  Antisense strand to SEQ ID NO: 2211818
aaagguaugcuuaaccuac

SEQ ID NO: 2211820 - RNA, 19 nt, Artificial Sequence
  Description of Artificial Sequence: Synthetic oligonucleotide
  Sense strand starting at position 3041 of SEQ ID NO: 1883722
cucauaucgcuguagauga

SEQ ID NO: 2211821 - RNA, 19 nt, Artificial Sequence
  Description of Artificial Sequence: Synthetic oligonucleotide
  Antisense strand to SEQ ID NO: 2211820
ucaucuacagcgauaugag

SEQ ID NO: 2211822 - RNA, 19 nt, Artificial Sequence
  Description of Artificial Sequence: Synthetic oligonucleotide
  Sense strand starting at position 3335 of SEQ ID NO: 1883722
agaggauggucugcuguaa

SEQ ID NO: 2211823 - RNA, 19 nt, Artificial Sequence
  Description of Artificial Sequence: Synthetic oligonucleotide
  Antisense strand to SEQ ID NO: 2211822
uuacagcagaccauccucu

SEQ ID NO: 2211824 - RNA, 19 nt, Artificial Sequence
  Description of Artificial Sequence: Synthetic oligonucleotide
  Sense strand starting at position 3765 of SEQ ID NO: 1883722
ugguacuuccuucgaaaca

SEQ ID NO: 2211825 - RNA, 19 nt, Artificial Sequence
  Description of Artificial Sequence: Synthetic oligonucleotide
  Antisense strand to SEQ ID NO: 2211824
uguuucgaaggaaguacca

SEQ ID NO: 2211826 - RNA, 19 nt, Artificial Sequence
  Description of Artificial Sequence: Synthetic oligonucleotide
  Sense strand starting at position 1023 of SEQ ID NO: 1883722
acauuagauuuccagcaug

SEQ ID NO: 2211827 - RNA, 19 nt, Artificial Sequence
  Description of Artificial Sequence: Synthetic oligonucleotide
  Antisense strand to SEQ ID NO: 2211826
caugcuggaaaucuaaugu

SEQ ID NO: 2211828 - RNA, 19 nt, Artificial Sequence
  Description of Artificial Sequence: Synthetic oligonucleotide
  Sense strand starting at position 235 of SEQ ID NO: 1883722
gccucacugcaauauggua

SEQ ID NO: 2211829 - RNA, 19 nt, Artificial Sequence
  Description of Artificial Sequence: Synthetic oligonucleotide
  Antisense strand to SEQ ID NO: 2211828
uaccauauugcagugaggc

SEQ ID NO: 2211830 - RNA, 19 nt, Artificial Sequence
  Description of Artificial Sequence: Synthetic oligonucleotide
  Sense strand starting at position 1253 of SEQ ID NO: 1883722
guggaugcuuacucuaaug

SEQ ID NO: 2211831 - RNA, 19 nt, Artificial Sequence
  Description of Artificial Sequence: Synthetic oligonucleotide
  Antisense strand to SEQ ID NO: 2211830
cauuagaguaagcauccac

SEQ ID NO: 2211832 - RNA, 19 nt, Artificial Sequence
  Description of Artificial Sequence: Synthetic oligonucleotide
  Sense strand starting at position 115 of SEQ ID NO: 1883723
uauugauuguugguucuua

SEQ ID NO: 2211833 - RNA, 19 nt, Artificial Sequence
  Description of Artificial Sequence: Synthetic oligonucleotide
  Antisense strand to SEQ ID NO: 2211832
uaagaaccaacaaucaaua

SEQ ID NO: 2211834 - RNA, 19 nt, Artificial Sequence
  Description of Artificial Sequence: Synthetic oligonucleotide
  Sense strand starting at position 116 of SEQ ID NO: 1883723
auugauuguugguucuuau

SEQ ID NO: 2211835 - RNA, 19 nt, Artificial Sequence
  Description of Artificial Sequence: Synthetic oligonucleotide
  Antisense strand to SEQ ID NO: 2211834
auaagaaccaacaaucaau

SEQ ID NO: 2211836 - RNA, 19 nt, Artificial Sequence
  Description of Artificial Sequence: Synthetic oligonucleotide
  Sense strand starting at position 3658 of SEQ ID NO: 1883723
gccacuaaauacgcuuuaa

SEQ ID NO: 2211837 - RNA, 19 nt, Artificial Sequence
  Description of Artificial Sequence: Synthetic oligonucleotide
  Antisense strand to SEQ ID NO: 2211836
uuaaagcguauuuaguggc

SEQ ID NO: 2211838 - RNA, 19 nt, Artificial Sequence
  Description of Artificial Sequence: Synthetic oligonucleotide
  Sense strand starting at position 126 of SEQ ID NO: 1883723
gguucuuauuuauagagca

SEQ ID NO: 2211839 - RNA, 19 nt, Artificial Sequence
  Description of Artificial Sequence: Synthetic oligonucleotide
  Antisense strand to SEQ ID NO: 2211838
ugcucuauaaauaagaacc

SEQ ID NO: 2211840 - RNA, 19 nt, Artificial Sequence
  Description of Artificial Sequence: Synthetic oligonucleotide
  Sense strand starting at position 3259 of SEQ ID NO: 1883723
ggacucuccugggauagag

SEQ ID NO: 2211841 - RNA, 19 nt, Artificial Sequence
  Description of Artificial Sequence: Synthetic oligonucleotide
  Antisense strand to SEQ ID NO: 2211840
cucuaucccaggagagucc

SEQ ID NO: 2211842 - RNA, 19 nt, Artificial Sequence
  Description of Artificial Sequence: Synthetic oligonucleotide
  Sense strand starting at position 110 of SEQ ID NO: 1883723
gcggguauugauuguuggu

SEQ ID NO: 2211843 - RNA, 19 nt, Artificial Sequence
  Description of Artificial Sequence: Synthetic oligonucleotide
  Antisense strand to SEQ ID NO: 2211842
accaacaaucaauacccgc

SEQ ID NO: 2211844 - RNA, 19 nt, Artificial Sequence
  Description of Artificial Sequence: Synthetic oligonucleotide
  Sense strand starting at position 3256 of SEQ ID NO: 1883723
ccaggacucuccugggaua

SEQ ID NO: 2211845 - RNA, 19 nt, Artificial Sequence
  Description of Artificial Sequence: Synthetic oligonucleotide
  Antisense strand to SEQ ID NO: 2211844
uaucccaggagaguccugg

SEQ ID NO: 2211846 - RNA, 19 nt, Artificial Sequence
  Description of Artificial Sequence: Synthetic oligonucleotide
  Sense strand starting at position 3503 of SEQ ID NO: 1883723
cugcuuugaugagacccau

SEQ ID NO: 2211847 - RNA, 19 nt, Artificial Sequence
  Description of Artificial Sequence: Synthetic oligonucleotide
  Antisense strand to SEQ ID NO: 2211846
augggucucaucaaagcag

SEQ ID NO: 2211848 - RNA, 19 nt, Artificial Sequence
  Description of Artificial Sequence: Synthetic oligonucleotide
  Sense strand starting at position 3498 of SEQ ID NO: 1883723
gcacucugcuuugaugaga

SEQ ID NO: 2211849 - RNA, 19 nt, Artificial Sequence
  Description of Artificial Sequence: Synthetic oligonucleotide
  Antisense strand to SEQ ID NO: 2211848
ucucaucaaagcagagugc

SEQ ID NO: 2211850 - RNA, 19 nt, Artificial Sequence
  Description of Artificial Sequence: Synthetic oligonucleotide
  Sense strand starting at position 1582 of SEQ ID NO: 1883724
caguuuagcccgccaagua

SEQ ID NO: 2211851 - RNA, 19 nt, Artificial Sequence
  Description of Artificial Sequence: Synthetic oligonucleotide
  Antisense strand to SEQ ID NO: 2211850
uacuuggcgggcuaaacug

SEQ ID NO: 2211852 - RNA, 19 nt, Artificial Sequence
  Description of Artificial Sequence: Synthetic oligonucleotide
  Sense strand starting at position 924 of SEQ ID NO: 1883724
gugugagugccucugaguu

SEQ ID NO: 2211853 - RNA, 19 nt, Artificial Sequence
  Description of Artificial Sequence: Synthetic oligonucleotide
  Antisense strand to SEQ ID NO: 2211852
aacucagaggcacucacac

SEQ ID NO: 2211854 - RNA, 19 nt, Artificial Sequence
  Description of Artificial Sequence: Synthetic oligonucleotide
  Sense strand starting at position 42 of SEQ ID NO: 1883724
uggugucaucaauaaacca

SEQ ID NO: 2211855 - RNA, 19 nt, Artificial Sequence
  Description of Artificial Sequence: Synthetic oligonucleotide
  Antisense strand to SEQ ID NO: 2211854
ugguuuauugaugacacca

SEQ ID NO: 2211856 - RNA, 19 nt, Artificial Sequence
  Description of Artificial Sequence: Synthetic oligonucleotide
  Sense strand starting at position 1305 of SEQ ID NO: 1883724
cgagucagaaccugcauuu

SEQ ID NO: 2211857 - RNA, 19 nt, Artificial Sequence
  Description of Artificial Sequence: Synthetic oligonucleotide
  Antisense strand to SEQ ID NO: 2211856
aaaugcagguucugacucg

SEQ ID NO: 2211858 - RNA, 19 nt, Artificial Sequence
  Description of Artificial Sequence: Synthetic oligonucleotide
  Sense strand starting at position 2551 of SEQ ID NO: 1883724
agucaaauguaaccugaaa

SEQ ID NO: 2211859 - RNA, 19 nt, Artificial Sequence
  Description of Artificial Sequence: Synthetic oligonucleotide
  Antisense strand to SEQ ID NO: 2211858
uuucagguuacauuugacu

SEQ ID NO: 2211860 - RNA, 19 nt, Artificial Sequence
  Description of Artificial Sequence: Synthetic oligonucleotide
  Sense strand starting at position 261 of SEQ ID NO: 1883724
aucucaaaguaguuaagaa

SEQ ID NO: 2211861 - RNA, 19 nt, Artificial Sequence
  Description of Artificial Sequence: Synthetic oligonucleotide
  Antisense strand to SEQ ID NO: 2211860
uucuuaacuacuuugagau

SEQ ID NO: 2211862 - RNA, 19 nt, Artificial Sequence
  Description of Artificial Sequence: Synthetic oligonucleotide
  Sense strand starting at position 1171 of SEQ ID NO: 1883724
ugggauuguuaucugaaga

SEQ ID NO: 2211863 - RNA, 19 nt, Artificial Sequence
  Description of Artificial Sequence: Synthetic oligonucleotide
  Antisense strand to SEQ ID NO: 2211862
ucuucagauaacaauccca

SEQ ID NO: 2211864 - RNA, 19 nt, Artificial Sequence
  Description of Artificial Sequence: Synthetic oligonucleotide
  Sense strand starting at position 1170 of SEQ ID NO: 1883724
augggauuguuaucugaag

SEQ ID NO: 2211865 - RNA, 19 nt, Artificial Sequence
  Description of Artificial Sequence: Synthetic oligonucleotide
  Antisense strand to SEQ ID NO: 2211864
cuucagauaacaaucccau

SEQ ID NO: 2211866 - RNA, 19 nt, Artificial Sequence
  Description of Artificial Sequence: Synthetic oligonucleotide
  Sense strand starting at position 210 of SEQ ID NO: 1883724
ggaaauucuaucuaguggu

SEQ ID NO: 2211867 - RNA, 19 nt, Artificial Sequence
  Description of Artificial Sequence: Synthetic oligonucleotide
  Antisense strand to SEQ ID NO: 2211866
accacuagauagaauuucc

SEQ ID NO: 2211868 - RNA, 19 nt, Artificial Sequence
  Description of Artificial Sequence: Synthetic oligonucleotide
  Sense strand starting at position 1172 of SEQ ID NO: 1883724
gggauuguuaucugaagac

SEQ ID NO: 2211869 - RNA, 19 nt, Artificial Sequence
  Description of Artificial Sequence: Synthetic oligonucleotide
  Antisense strand to SEQ ID NO: 2211868
gucuucagauaacaauccc

SEQ ID NO: 2211870 - RNA, 19 nt, Artificial Sequence
  Description of Artificial Sequence: Synthetic oligonucleotide
  Sense strand starting at position 305 of SEQ ID NO: 1883724
gaaaucaguucucuugaag

SEQ ID NO: 2211871 - RNA, 19 nt, Artificial Sequence
  Description of Artificial Sequence: Synthetic oligonucleotide
  Antisense strand to SEQ ID NO: 2211870
cuucaagagaacugauuuc

SEQ ID NO: 2211872 - RNA, 19 nt, Artificial Sequence
  Description of Artificial Sequence: Synthetic oligonucleotide
  Sense strand starting at position 2734 of SEQ ID NO: 1883724
aguaaauuacgguacauca

SEQ ID NO: 2211873 - RNA, 19 nt, Artificial Sequence
  Description of Artificial Sequence: Synthetic oligonucleotide
  Antisense strand to SEQ ID NO: 2211872
ugauguaccguaauuuacu

SEQ ID NO: 2211874 - RNA, 19 nt, Artificial Sequence
  Description of Artificial Sequence: Synthetic oligonucleotide
  Sense strand starting at position 308 of SEQ ID NO: 1883724
aucaguucucuugaaguaa

SEQ ID NO: 2211875 - RNA, 19 nt, Artificial Sequence
  Description of Artificial Sequence: Synthetic oligonucleotide
  Antisense strand to SEQ ID NO: 2211874
uuacuucaagagaacugau

SEQ ID NO: 2211876 - RNA, 19 nt, Artificial Sequence
  Description of Artificial Sequence: Synthetic oligonucleotide
  Sense strand starting at position 660 of SEQ ID NO: 1883724
uuuccaagucaguaucaga

SEQ ID NO: 2211877 - RNA, 19 nt, Artificial Sequence
  Description of Artificial Sequence: Synthetic oligonucleotide
  Antisense strand to SEQ ID NO: 2211876
ucugauacugacuuggaaa

SEQ ID NO: 2211878 - RNA, 19 nt, Artificial Sequence
  Description of Artificial Sequence: Synthetic oligonucleotide
  Sense strand starting at position 461 of SEQ ID NO: 1883724
ggaugagcccuauaccuuu

SEQ ID NO: 2211879 - RNA, 19 nt, Artificial Sequence
  Description of Artificial Sequence: Synthetic oligonucleotide
  Antisense strand to SEQ ID NO: 2211878
aaagguauagggcucaucc

SEQ ID NO: 2211880 - RNA, 19 nt, Artificial Sequence
  Description of Artificial Sequence: Synthetic oligonucleotide
  Sense strand starting at position 3714 of SEQ ID NO: 1883724
aaauguuuccgguaaugaa

SEQ ID NO: 2211881 - RNA, 19 nt, Artificial Sequence
  Description of Artificial Sequence: Synthetic oligonucleotide
  Antisense strand to SEQ ID NO: 2211880
uucauuaccggaaacauuu

SEQ ID NO: 2211882 - RNA, 19 nt, Artificial Sequence
  Description of Artificial Sequence: Synthetic oligonucleotide
  Sense strand starting at position 2443 of SEQ ID NO: 1883724
ucaagucauguggauccua

SEQ ID NO: 2211883 - RNA, 19 nt, Artificial Sequence
  Description of Artificial Sequence: Synthetic oligonucleotide
  Antisense strand to SEQ ID NO: 2211882
uaggauccacaugacuuga

SEQ ID NO: 2211884 - RNA, 19 nt, Artificial Sequence
  Description of Artificial Sequence: Synthetic oligonucleotide
  Sense strand starting at position 1161 of SEQ ID NO: 1883724
cugaaacuuaugggauugu

SEQ ID NO: 2211885 - RNA, 19 nt, Artificial Sequence
  Description of Artificial Sequence: Synthetic oligonucleotide
  Antisense strand to SEQ ID NO: 2211884
acaaucccauaaguuucag

SEQ ID NO: 2211886 - RNA, 19 nt, Artificial Sequence
  Description of Artificial Sequence: Synthetic oligonucleotide
  Sense strand starting at position 481 of SEQ ID NO: 1883724
ugguuuagucccuaaugag

SEQ ID NO: 2211887 - RNA, 19 nt, Artificial Sequence
  Description of Artificial Sequence: Synthetic oligonucleotide
  Antisense strand to SEQ ID NO: 2211886
cucauuagggacuaaacca

SEQ ID NO: 2211888 - RNA, 19 nt, Artificial Sequence
  Description of Artificial Sequence: Synthetic oligonucleotide
  Sense strand starting at position 2451 of SEQ ID NO: 1883724
uguggauccuaccuauaag

SEQ ID NO: 2211889 - RNA, 19 nt, Artificial Sequence
  Description of Artificial Sequence: Synthetic oligonucleotide
  Antisense strand to SEQ ID NO: 2211888
cuuauagguaggauccaca

SEQ ID NO: 2211890 - RNA, 19 nt, Artificial Sequence
  Description of Artificial Sequence: Synthetic oligonucleotide
  Sense strand starting at position 329 of SEQ ID NO: 1883724
ucaucuucucuuugaggaa

SEQ ID NO: 2211891 - RNA, 19 nt, Artificial Sequence
  Description of Artificial Sequence: Synthetic oligonucleotide
  Antisense strand to SEQ ID NO: 2211890
uuccucaaagagaagauga

SEQ ID NO: 2211892 - RNA, 19 nt, Artificial Sequence
  Description of Artificial Sequence: Synthetic oligonucleotide
  Sense strand starting at position 1101 of SEQ ID NO: 1883724
auaaguguuugugcauuua

SEQ ID NO: 2211893 - RNA, 19 nt, Artificial Sequence
  Description of Artificial Sequence: Synthetic oligonucleotide
  Antisense strand to SEQ ID NO: 2211892
uaaaugcacaaacacuuau

SEQ ID NO: 2211894 - RNA, 19 nt, Artificial Sequence
  Description of Artificial Sequence: Synthetic oligonucleotide
  Sense strand starting at position 1165 of SEQ ID NO: 1883724
aacuuaugggauuguuauc

SEQ ID NO: 2211895 - RNA, 19 nt, Artificial Sequence
  Description of Artificial Sequence: Synthetic oligonucleotide
  Antisense strand to SEQ ID NO: 2211894
gauaacaaucccauaaguu

SEQ ID NO: 2211896 - RNA, 19 nt, Artificial Sequence
  Description of Artificial Sequence: Synthetic oligonucleotide
  Sense strand starting at position 2374 of SEQ ID NO: 1883724
auuacuuaggcaugacauu

SEQ ID NO: 2211897 - RNA, 19 nt, Artificial Sequence
  Description of Artificial Sequence: Synthetic oligonucleotide
  Antisense strand to SEQ ID NO: 2211896
aaugucaugccuaaguaau

SEQ ID NO: 2211898 - RNA, 19 nt, Artificial Sequence
  Description of Artificial Sequence: Synthetic oligonucleotide
  Sense strand starting at position 567 of SEQ ID NO: 1883724
ugacuuaaguaucuaguga

SEQ ID NO: 2211899 - RNA, 19 nt, Artificial Sequence
  Description of Artificial Sequence: Synthetic oligonucleotide
  Antisense strand to SEQ ID NO: 2211898
ucacuagauacuuaaguca

SEQ ID NO: 2211900 - RNA, 19 nt, Artificial Sequence
  Description of Artificial Sequence: Synthetic oligonucleotide
  Sense strand starting at position 823 of SEQ ID NO: 1883724
aucauagucuaaucaaguu

SEQ ID NO: 2211901 - RNA, 19 nt, Artificial Sequence
  Description of Artificial Sequence: Synthetic oligonucleotide
  Antisense strand to SEQ ID NO: 2211900
aacuugauuagacuaugau

SEQ ID NO: 2211902 - RNA, 19 nt, Artificial Sequence
  Description of Artificial Sequence: Synthetic oligonucleotide
  Sense strand starting at position 2807 of SEQ ID NO: 1883724
acguauugccuauacauaa

SEQ ID NO: 2211903 - RNA, 19 nt, Artificial Sequence
  Description of Artificial Sequence: Synthetic oligonucleotide
  Antisense strand to SEQ ID NO: 2211902
uuauguauaggcaauacgu

SEQ ID NO: 2211904 - RNA, 19 nt, Artificial Sequence
  Description of Artificial Sequence: Synthetic oligonucleotide
  Sense strand starting at position 1885 of SEQ ID NO: 1883724
guauaacagcauugacuau

SEQ ID NO: 2211905 - RNA, 19 nt, Artificial Sequence
  Description of Artificial Sequence: Synthetic oligonucleotide
  Antisense strand to SEQ ID NO: 2211904
auagucaaugcuguuauac

SEQ ID NO: 2211906 - RNA, 19 nt, Artificial Sequence
  Description of Artificial Sequence: Synthetic oligonucleotide
  Sense strand starting at position 3629 of SEQ ID NO: 1883724
cauaaauggcuacgugaaa

SEQ ID NO: 2211907 - RNA, 19 nt, Artificial Sequence
  Description of Artificial Sequence: Synthetic oligonucleotide
  Antisense strand to SEQ ID NO: 2211906
uuucacguagccauuuaug

SEQ ID NO: 2211908 - RNA, 19 nt, Artificial Sequence
  Description of Artificial Sequence: Synthetic oligonucleotide
  Sense strand starting at position 1263 of SEQ ID NO: 1883724
gcuuauuagagaugcagac

SEQ ID NO: 2211909 - RNA, 19 nt, Artificial Sequence
  Description of Artificial Sequence: Synthetic oligonucleotide
  Antisense strand to SEQ ID NO: 2211908
gucugcaucucuaauaagc

SEQ ID NO: 2211910 - RNA, 19 nt, Artificial Sequence
  Description of Artificial Sequence: Synthetic oligonucleotide
  Sense strand starting at position 2078 of SEQ ID NO: 1883724
ccuuguugugcagagggau

SEQ ID NO: 2211911 - RNA, 19 nt, Artificial Sequence
  Description of Artificial Sequence: Synthetic oligonucleotide
  Antisense strand to SEQ ID NO: 2211910
aucccucugcacaacaagg

SEQ ID NO: 2211912 - RNA, 19 nt, Artificial Sequence
  Description of Artificial Sequence: Synthetic oligonucleotide
  Sense strand starting at position 3503 of SEQ ID NO: 1883724
caguauuuaucugacugga

SEQ ID NO: 2211913 - RNA, 19 nt, Artificial Sequence
  Description of Artificial Sequence: Synthetic oligonucleotide
  Antisense strand to SEQ ID NO: 2211912
uccagucagauaaauacug

SEQ ID NO: 2211914 - RNA, 19 nt, Artificial Sequence
  Description of Artificial Sequence: Synthetic oligonucleotide
  Sense strand starting at position 2805 of SEQ ID NO: 1883724
auacguauugccuauacau

SEQ ID NO: 2211915 - RNA, 19 nt, Artificial Sequence
  Description of Artificial Sequence: Synthetic oligonucleotide
  Antisense strand to SEQ ID NO: 2211914
auguauaggcaauacguau

SEQ ID NO: 2211916 - RNA, 19 nt, Artificial Sequence
  Description of Artificial Sequence: Synthetic oligonucleotide
  Sense strand starting at position 870 of SEQ ID NO: 1883724
gucugugacaaguaguauc

SEQ ID NO: 2211917 - RNA, 19 nt, Artificial Sequence
  Description of Artificial Sequence: Synthetic oligonucleotide
  Antisense strand to SEQ ID NO: 2211916
gauacuacuugucacagac

SEQ ID NO: 2211918 - RNA, 19 nt, Artificial Sequence
  Description of Artificial Sequence: Synthetic oligonucleotide
  Sense strand starting at position 480 of SEQ ID NO: 1883724
cugguuuagucccuaauga

SEQ ID NO: 2211919 - RNA, 19 nt, Artificial Sequence
  Description of Artificial Sequence: Synthetic oligonucleotide
  Antisense strand to SEQ ID NO: 2211918
ucauuagggacuaaaccag

SEQ ID NO: 2211920 - RNA, 19 nt, Artificial Sequence
  Description of Artificial Sequence: Synthetic oligonucleotide
  Sense strand starting at position 1980 of SEQ ID NO: 1883724
auugcuauggcccaucgaa

SEQ ID NO: 2211921 - RNA, 19 nt, Artificial Sequence
  Description of Artificial Sequence: Synthetic oligonucleotide
  Antisense strand to SEQ ID NO: 2211920
uucgaugggccauagcaau

SEQ ID NO: 2211922 - RNA, 19 nt, Artificial Sequence
  Description of Artificial Sequence: Synthetic oligonucleotide
  Sense strand starting at position 2769 of SEQ ID NO: 1883724
gcagccauugaagguaaua

SEQ ID NO: 2211923 - RNA, 19 nt, Artificial Sequence
  Description of Artificial Sequence: Synthetic oligonucleotide
  Antisense strand to SEQ ID NO: 2211922
uauuaccuucaauggcugc

SEQ ID NO: 2211924 - RNA, 19 nt, Artificial Sequence
  Description of Artificial Sequence: Synthetic oligonucleotide
  Sense strand starting at position 1109 of SEQ ID NO: 1883724
uugugcauuuacugauuua

SEQ ID NO: 2211925 - RNA, 19 nt, Artificial Sequence
  Description of Artificial Sequence: Synthetic oligonucleotide
  Antisense strand to SEQ ID NO: 2211924
uaaaucaguaaaugcacaa

SEQ ID NO: 2211926 - RNA, 19 nt, Artificial Sequence
  Description of Artificial Sequence: Synthetic oligonucleotide
  Sense strand starting at position 2674 of SEQ ID NO: 1883724
ccgaauaauuguuucucca

SEQ ID NO: 2211927 - RNA, 19 nt, Artificial Sequence
  Description of Artificial Sequence: Synthetic oligonucleotide
  Antisense strand to SEQ ID NO: 2211926
uggagaaacaauuauucgg

SEQ ID NO: 2211928 - RNA, 19 nt, Artificial Sequence
  Description of Artificial Sequence: Synthetic oligonucleotide
  Sense strand starting at position 2678 of SEQ ID NO: 1883724
auaauuguuucuccaggca

SEQ ID NO: 2211929 - RNA, 19 nt, Artificial Sequence
  Description of Artificial Sequence: Synthetic oligonucleotide
  Antisense strand to SEQ ID NO: 2211928
ugccuggagaaacaauuau

SEQ ID NO: 2211930 - RNA, 19 nt, Artificial Sequence
  Description of Artificial Sequence: Synthetic oligonucleotide
  Sense strand starting at position 3058 of SEQ ID NO: 1883725
uguacuuuagauggagaug

SEQ ID NO: 2211931 - RNA, 19 nt, Artificial Sequence
  Description of Artificial Sequence: Synthetic oligonucleotide
  Antisense strand to SEQ ID NO: 2211930
caucuccaucuaaaguaca

SEQ ID NO: 2211932 - RNA, 19 nt, Artificial Sequence
  Description of Artificial Sequence: Synthetic oligonucleotide
  Sense strand starting at position 3057 of SEQ ID NO: 1883725
guguacuuuagauggagau

SEQ ID NO: 2211933 - RNA, 19 nt, Artificial Sequence
  Description of Artificial Sequence: Synthetic oligonucleotide
  Antisense strand to SEQ ID NO: 2211932
aucuccaucuaaaguacac

SEQ ID NO: 2211934 - RNA, 19 nt, Artificial Sequence
  Description of Artificial Sequence: Synthetic oligonucleotide
  Sense strand starting at position 2811 of SEQ ID NO: 1883725
augcuuuagaguuacaggu

SEQ ID NO: 2211935 - RNA, 19 nt, Artificial Sequence
  Description of Artificial Sequence: Synthetic oligonucleotide
  Antisense strand to SEQ ID NO: 2211934
accuguaacucuaaagcau

SEQ ID NO: 2211936 - RNA, 19 nt, Artificial Sequence
  Description of Artificial Sequence: Synthetic oligonucleotide
  Sense strand starting at position 3616 of SEQ ID NO: 1883725
gugcuuuacauggaguuga

SEQ ID NO: 2211937 - RNA, 19 nt, Artificial Sequence
  Description of Artificial Sequence: Synthetic oligonucleotide
  Antisense strand to SEQ ID NO: 2211936
ucaacuccauguaaagcac

SEQ ID NO: 2211938 - RNA, 19 nt, Artificial Sequence
  Description of Artificial Sequence: Synthetic oligonucleotide
  Sense strand starting at position 2666 of SEQ ID NO: 1883725
cccgcacuucugcaggaaa

SEQ ID NO: 2211939 - RNA, 19 nt, Artificial Sequence
  Description of Artificial Sequence: Synthetic oligonucleotide
  Antisense strand to SEQ ID NO: 2211938
uuuccugcagaagugcggg

SEQ ID NO: 2211940 - RNA, 19 nt, Artificial Sequence
  Description of Artificial Sequence: Synthetic oligonucleotide
  Sense strand starting at position 3743 of SEQ ID NO: 1883725
guguacuuuagauggaguu

SEQ ID NO: 2211941 - RNA, 19 nt, Artificial Sequence
  Description of Artificial Sequence: Synthetic oligonucleotide
  Antisense strand to SEQ ID NO: 2211940
aacuccaucuaaaguacac

SEQ ID NO: 2211942 - RNA, 19 nt, Artificial Sequence
  Description of Artificial Sequence: Synthetic oligonucleotide
  Sense strand starting at position 2780 of SEQ ID NO: 1883725
aaguuagaggugugcacau

SEQ ID NO: 2211943 - RNA, 19 nt, Artificial Sequence
  Description of Artificial Sequence: Synthetic oligonucleotide
  Antisense strand to SEQ ID NO: 2211942
augugcacaccucuaacuu

SEQ ID NO: 2211944 - RNA, 19 nt, Artificial Sequence
  Description of Artificial Sequence: Synthetic oligonucleotide
  Sense strand starting at position 2978 of SEQ ID NO: 1883725
ugugcuuuagauggaguua

SEQ ID NO: 2211945 - RNA, 19 nt, Artificial Sequence
  Description of Artificial Sequence: Synthetic oligonucleotide
  Antisense strand to SEQ ID NO: 2211944
uaacuccaucuaaagcaca

SEQ ID NO: 2211946 - RNA, 19 nt, Artificial Sequence
  Description of Artificial Sequence: Synthetic oligonucleotide
  Sense strand starting at position 3051 of SEQ ID NO: 1883725
cauuguguguacuuuagau

SEQ ID NO: 2211947 - RNA, 19 nt, Artificial Sequence
  Description of Artificial Sequence: Synthetic oligonucleotide
  Antisense strand to SEQ ID NO: 2211946
aucuaaaguacacacaaug

SEQ ID NO: 2211948 - RNA, 19 nt, Artificial Sequence
  Description of Artificial Sequence: Synthetic oligonucleotide
  Sense strand starting at position 2805 of SEQ ID NO: 1883725
uucugcaugcuuuagaguu

SEQ ID NO: 2211949 - RNA, 19 nt, Artificial Sequence
  Description of Artificial Sequence: Synthetic oligonucleotide
  Antisense strand to SEQ ID NO: 2211948
aacucuaaagcaugcagaa

SEQ ID NO: 2211950 - RNA, 19 nt, Artificial Sequence
  Description of Artificial Sequence: Synthetic oligonucleotide
  Sense strand starting at position 3048 of SEQ ID NO: 1883725
uagcauuguguguacuuua

SEQ ID NO: 2211951 - RNA, 19 nt, Artificial Sequence
  Description of Artificial Sequence: Synthetic oligonucleotide
  Antisense strand to SEQ ID NO: 2211950
uaaaguacacacaaugcua

SEQ ID NO: 2211952 - RNA, 19 nt, Artificial Sequence
  Description of Artificial Sequence: Synthetic oligonucleotide
  Sense strand starting at position 3014 of SEQ ID NO: 1883725
cauuaugugugcuuuagau

SEQ ID NO: 2211953 - RNA, 19 nt, Artificial Sequence
  Description of Artificial Sequence: Synthetic oligonucleotide
  Antisense strand to SEQ ID NO: 2211952
aucuaaagcacacauaaug

SEQ ID NO: 2211954 - RNA, 19 nt, Artificial Sequence
  Description of Artificial Sequence: Synthetic oligonucleotide
  Sense strand starting at position 3020 of SEQ ID NO: 1883725
gugugcuuuagauggaggu

SEQ ID NO: 2211955 - RNA, 19 nt, Artificial Sequence
  Description of Artificial Sequence: Synthetic oligonucleotide
  Antisense strand to SEQ ID NO: 2211954
accuccaucuaaagcacac

SEQ ID NO: 2211956 - RNA, 19 nt, Artificial Sequence
  Description of Artificial Sequence: Synthetic oligonucleotide
  Sense strand starting at position 3143 of SEQ ID NO: 1883725
gugugcuuuaaauggaguu

SEQ ID NO: 2211957 - RNA, 19 nt, Artificial Sequence
  Description of Artificial Sequence: Synthetic oligonucleotide
  Antisense strand to SEQ ID NO: 2211956
aacuccauuuaaagcacac

SEQ ID NO: 2211958 - RNA, 19 nt, Artificial Sequence
  Description of Artificial Sequence: Synthetic oligonucleotide
  Sense strand starting at position 2400 of SEQ ID NO: 1883725
agaaguguuccugguguuu

SEQ ID NO: 2211959 - RNA, 19 nt, Artificial Sequence
  Description of Artificial Sequence: Synthetic oligonucleotide
  Antisense strand to SEQ ID NO: 2211958
aaacaccaggaacacuucu

SEQ ID NO: 2211960 - RNA, 19 nt, Artificial Sequence
  Description of Artificial Sequence: Synthetic oligonucleotide
  Sense strand starting at position 2848 of SEQ ID NO: 1883725
gugugcuuuggauggaguu

SEQ ID NO: 2211961 - RNA, 19 nt, Artificial Sequence
  Description of Artificial Sequence: Synthetic oligonucleotide
  Antisense strand to SEQ ID NO: 2211960
aacuccauccaaagcacac

SEQ ID NO: 2211962 - RNA, 19 nt, Artificial Sequence
  Description of Artificial Sequence: Synthetic oligonucleotide
  Sense strand starting at position 3221 of SEQ ID NO: 1883725
cauggugugugcuuuagau

SEQ ID NO: 2211963 - RNA, 19 nt, Artificial Sequence
  Description of Artificial Sequence: Synthetic oligonucleotide
  Antisense strand to SEQ ID NO: 2211962
aucuaaagcacacaccaug

SEQ ID NO: 2211964 - RNA, 19 nt, Artificial Sequence
  Description of Artificial Sequence: Synthetic oligonucleotide
  Sense strand starting at position 3957 of SEQ ID NO: 1883725
gugugcuuuagaugaagcu

SEQ ID NO: 2211965 - RNA, 19 nt, Artificial Sequence
  Description of Artificial Sequence: Synthetic oligonucleotide
  Antisense strand to SEQ ID NO: 2211964
agcuucaucuaaagcacac

SEQ ID NO: 2211966 - RNA, 19 nt, Artificial Sequence
  Description of Artificial Sequence: Synthetic oligonucleotide
  Sense strand starting at position 3485 of SEQ ID NO: 1883725
gugugcuuuacauggaguu

SEQ ID NO: 2211967 - RNA, 19 nt, Artificial Sequence
  Description of Artificial Sequence: Synthetic oligonucleotide
  Antisense strand to SEQ ID NO: 2211966
aacuccauguaaagcacac

SEQ ID NO: 2211968 - RNA, 19 nt, Artificial Sequence
  Description of Artificial Sequence: Synthetic oligonucleotide
  Sense strand starting at position 2398 of SEQ ID NO: 1883725
gcagaaguguuccuggugu

SEQ ID NO: 2211969 - RNA, 19 nt, Artificial Sequence
  Description of Artificial Sequence: Synthetic oligonucleotide
  Antisense strand to SEQ ID NO: 2211968
acaccaggaacacuucugc

SEQ ID NO: 2211970 - RNA, 19 nt, Artificial Sequence
  Description of Artificial Sequence: Synthetic oligonucleotide
  Sense strand starting at position 3011 of SEQ ID NO: 1883725
uagcauuaugugugcuuua

SEQ ID NO: 2211971 - RNA, 19 nt, Artificial Sequence
  Description of Artificial Sequence: Synthetic oligonucleotide
  Antisense strand to SEQ ID NO: 2211970
uaaagcacacauaaugcua

SEQ ID NO: 2211972 - RNA, 19 nt, Artificial Sequence
  Description of Artificial Sequence: Synthetic oligonucleotide
  Sense strand starting at position 1733 of SEQ ID NO: 1883725
caggaagcaugguaucaca

SEQ ID NO: 2211973 - RNA, 19 nt, Artificial Sequence
  Description of Artificial Sequence: Synthetic oligonucleotide
  Antisense strand to SEQ ID NO: 2211972
ugugauaccaugcuuccug

SEQ ID NO: 2211974 - RNA, 19 nt, Artificial Sequence
  Description of Artificial Sequence: Synthetic oligonucleotide
  Sense strand starting at position 2800 of SEQ ID NO: 1883725
caacguucugcaugcuuua

SEQ ID NO: 2211975 - RNA, 19 nt, Artificial Sequence
  Description of Artificial Sequence: Synthetic oligonucleotide
  Antisense strand to SEQ ID NO: 2211974
uaaagcaugcagaacguug

SEQ ID NO: 2211976 - RNA, 19 nt, Artificial Sequence
  Description of Artificial Sequence: Synthetic oligonucleotide
  Sense strand starting at position 2774 of SEQ ID NO: 1883725
ugaauaaaguuagaggugu

SEQ ID NO: 2211977 - RNA, 19 nt, Artificial Sequence
  Description of Artificial Sequence: Synthetic oligonucleotide
  Antisense strand to SEQ ID NO: 2211976
acaccucuaacuuuauuca

SEQ ID NO: 2211978 - RNA, 19 nt, Artificial Sequence
  Description of Artificial Sequence: Synthetic oligonucleotide
  Sense strand starting at position 3046 of SEQ ID NO: 1883725
gguagcauuguguguacuu

SEQ ID NO: 2211979 - RNA, 19 nt, Artificial Sequence
  Description of Artificial Sequence: Synthetic oligonucleotide
  Antisense strand to SEQ ID NO: 2211978
aaguacacacaaugcuacc

SEQ ID NO: 2211980 - RNA, 19 nt, Artificial Sequence
  Description of Artificial Sequence: Synthetic oligonucleotide
  Sense strand starting at position 3047 of SEQ ID NO: 1883725
guagcauuguguguacuuu

SEQ ID NO: 2211981 - RNA, 19 nt, Artificial Sequence
  Description of Artificial Sequence: Synthetic oligonucleotide
  Antisense strand to SEQ ID NO: 2211980
aaaguacacacaaugcuac

SEQ ID NO: 2211982 - RNA, 19 nt, Artificial Sequence
  Description of Artificial Sequence: Synthetic oligonucleotide
  Sense strand starting at position 2928 of SEQ ID NO: 1883725
caucgugugugcuuuagau

SEQ ID NO: 2211983 - RNA, 19 nt, Artificial Sequence
  Description of Artificial Sequence: Synthetic oligonucleotide
  Antisense strand to SEQ ID NO: 2211982
aucuaaagcacacacgaug

SEQ ID NO: 2211984 - RNA, 19 nt, Artificial Sequence
  Description of Artificial Sequence: Synthetic oligonucleotide
  Sense strand starting at position 2366 of SEQ ID NO: 1883725
acagguucuuaaugggaca

SEQ ID NO: 2211985 - RNA, 19 nt, Artificial Sequence
  Description of Artificial Sequence: Synthetic oligonucleotide
  Antisense strand to SEQ ID NO: 2211984
ugucccauuaagaaccugu

SEQ ID NO: 2211986 - RNA, 19 nt, Artificial Sequence
  Description of Artificial Sequence: Synthetic oligonucleotide
  Sense strand starting at position 3218 of SEQ ID NO: 1883725
uagcauggugugugcuuua

SEQ ID NO: 2211987 - RNA, 19 nt, Artificial Sequence
  Description of Artificial Sequence: Synthetic oligonucleotide
  Antisense strand to SEQ ID NO: 2211986
uaaagcacacaccaugcua

SEQ ID NO: 2211988 - RNA, 19 nt, Artificial Sequence
  Description of Artificial Sequence: Synthetic oligonucleotide
  Sense strand starting at position 3009 of SEQ ID NO: 1883725
gguagcauuaugugugcuu

SEQ ID NO: 2211989 - RNA, 19 nt, Artificial Sequence
  Description of Artificial Sequence: Synthetic oligonucleotide
  Antisense strand to SEQ ID NO: 2211988
aagcacacauaaugcuacc

SEQ ID NO: 2211990 - RNA, 19 nt, Artificial Sequence
  Description of Artificial Sequence: Synthetic oligonucleotide
  Sense strand starting at position 3010 of SEQ ID NO: 1883725
guagcauuaugugugcuuu

SEQ ID NO: 2211991 - RNA, 19 nt, Artificial Sequence
  Description of Artificial Sequence: Synthetic oligonucleotide
  Antisense strand to SEQ ID NO: 2211990
aaagcacacauaaugcuac

SEQ ID NO: 2211992 - RNA, 19 nt, Artificial Sequence
  Description of Artificial Sequence: Synthetic oligonucleotide
  Sense strand starting at position 2740 of SEQ ID NO: 1883725
acuuaaacguccugaagag

SEQ ID NO: 2211993 - RNA, 19 nt, Artificial Sequence
  Description of Artificial Sequence: Synthetic oligonucleotide
  Antisense strand to SEQ ID NO: 2211992
cucuucaggacguuuaagu

SEQ ID NO: 2211994 - RNA, 19 nt, Artificial Sequence
  Description of Artificial Sequence: Synthetic oligonucleotide
  Sense strand starting at position 2402 of SEQ ID NO: 1883725
aaguguuccugguguuucu

SEQ ID NO: 2211995 - RNA, 19 nt, Artificial Sequence
  Description of Artificial Sequence: Synthetic oligonucleotide
  Antisense strand to SEQ ID NO: 2211994
agaaacaccaggaacacuu

SEQ ID NO: 2211996 - RNA, 19 nt, Artificial Sequence
  Description of Artificial Sequence: Synthetic oligonucleotide
  Sense strand starting at position 3430 of SEQ ID NO: 1883726
uguacuuuagauggagaug

SEQ ID NO: 2211997 - RNA, 19 nt, Artificial Sequence
  Description of Artificial Sequence: Synthetic oligonucleotide
  Antisense strand to SEQ ID NO: 2211996
caucuccaucuaaaguaca

SEQ ID NO: 2211998 - RNA, 19 nt, Artificial Sequence
  Description of Artificial Sequence: Synthetic oligonucleotide
  Sense strand starting at position 70 of SEQ ID NO: 1883726
agaugucuuggugacgaaa

SEQ ID NO: 2211999 - RNA, 19 nt, Artificial Sequence
  Description of Artificial Sequence: Synthetic oligonucleotide
  Antisense strand to SEQ ID NO: 2211998
uuucgucaccaagacaucu

SEQ ID NO: 2212000 - RNA, 19 nt, Artificial Sequence
  Description of Artificial Sequence: Synthetic oligonucleotide
  Sense strand starting at position 3429 of SEQ ID NO: 1883726
guguacuuuagauggagau

SEQ ID NO: 2212001 - RNA, 19 nt, Artificial Sequence
  Description of Artificial Sequence: Synthetic oligonucleotide
  Antisense strand to SEQ ID NO: 2212000
aucuccaucuaaaguacac

SEQ ID NO: 2212002 - RNA, 19 nt, Artificial Sequence
  Description of Artificial Sequence: Synthetic oligonucleotide
  Sense strand starting at position 3183 of SEQ ID NO: 1883726
augcuuuagaguuacaggu

SEQ ID NO: 2212003 - RNA, 19 nt, Artificial Sequence
  Description of Artificial Sequence: Synthetic oligonucleotide
  Antisense strand to SEQ ID NO: 2212002
accuguaacucuaaagcau

SEQ ID NO: 2212004 - RNA, 19 nt, Artificial Sequence
  Description of Artificial Sequence: Synthetic oligonucleotide
  Sense strand starting at position 3038 of SEQ ID NO: 1883726
cccgcacuucugcaggaaa

SEQ ID NO: 2212005 - RNA, 19 nt, Artificial Sequence
  Description of Artificial Sequence: Synthetic oligonucleotide
  Antisense strand to SEQ ID NO: 2212004
uuuccugcagaagugcggg

SEQ ID NO: 2212006 - RNA, 19 nt, Artificial Sequence
  Description of Artificial Sequence: Synthetic oligonucleotide
  Sense strand starting at position 3152 of SEQ ID NO: 1883726
aaguuagaggugugcacau

SEQ ID NO: 2212007 - RNA, 19 nt, Artificial Sequence
  Description of Artificial Sequence: Synthetic oligonucleotide
  Antisense strand to SEQ ID NO: 2212006
augugcacaccucuaacuu

SEQ ID NO: 2212008 - RNA, 19 nt, Artificial Sequence
  Description of Artificial Sequence: Synthetic oligonucleotide
  Sense strand starting at position 3177 of SEQ ID NO: 1883726
uucugcaugcuuuagaguu

SEQ ID NO: 2212009 - RNA, 19 nt, Artificial Sequence
  Description of Artificial Sequence: Synthetic oligonucleotide
  Antisense strand to SEQ ID NO: 2212008
aacucuaaagcaugcagaa

SEQ ID NO: 2212010 - RNA, 19 nt, Artificial Sequence
  Description of Artificial Sequence: Synthetic oligonucleotide
  Sense strand starting at position 68 of SEQ ID NO: 1883726
gcagaugucuuggugacga

SEQ ID NO: 2212011 - RNA, 19 nt, Artificial Sequence
  Description of Artificial Sequence: Synthetic oligonucleotide
  Antisense strand to SEQ ID NO: 2212010
ucgucaccaagacaucugc

SEQ ID NO: 2212012 - RNA, 19 nt, Artificial Sequence
  Description of Artificial Sequence: Synthetic oligonucleotide
  Sense strand starting at position 3386 of SEQ ID NO: 1883726
cauuaugugugcuuuagau

SEQ ID NO: 2212013 - RNA, 19 nt, Artificial Sequence
  Description of Artificial Sequence: Synthetic oligonucleotide
  Antisense strand to SEQ ID NO: 2212012
aucuaaagcacacauaaug

SEQ ID NO: 2212014 - RNA, 19 nt, Artificial Sequence
  Description of Artificial Sequence: Synthetic oligonucleotide
  Sense strand starting at position 3392 of SEQ ID NO: 1883726
gugugcuuuagauggaggu

SEQ ID NO: 2212015 - RNA, 19 nt, Artificial Sequence
  Description of Artificial Sequence: Synthetic oligonucleotide
  Antisense strand to SEQ ID NO: 2212014
accuccaucuaaagcacac

SEQ ID NO: 2212016 - RNA, 19 nt, Artificial Sequence
  Description of Artificial Sequence: Synthetic oligonucleotide
  Sense strand starting at position 3515 of SEQ ID NO: 1883726
gugugcuuuaaauggaguu

SEQ ID NO: 2212017 - RNA, 19 nt, Artificial Sequence
  Description of Artificial Sequence: Synthetic oligonucleotide
  Antisense strand to SEQ ID NO: 2212016
aacuccauuuaaagcacac

SEQ ID NO: 2212018 - RNA, 19 nt, Artificial Sequence
  Description of Artificial Sequence: Synthetic oligonucleotide
  Sense strand starting at position 2772 of SEQ ID NO: 1883726
agaaguguuccugguguuu

SEQ ID NO: 2212019 - RNA, 19 nt, Artificial Sequence
  Description of Artificial Sequence: Synthetic oligonucleotide
  Antisense strand to SEQ ID NO: 2212018
aaacaccaggaacacuucu

SEQ ID NO: 2212020 - RNA, 19 nt, Artificial Sequence
  Description of Artificial Sequence: Synthetic oligonucleotide
  Sense strand starting at position 3220 of SEQ ID NO: 1883726
gugugcuuuggauggaguu

SEQ ID NO: 2212021 - RNA, 19 nt, Artificial Sequence
  Description of Artificial Sequence: Synthetic oligonucleotide
  Antisense strand to SEQ ID NO: 2212020
aacuccauccaaagcacac

SEQ ID NO: 2212022 - RNA, 19 nt, Artificial Sequence
  Description of Artificial Sequence: Synthetic oligonucleotide
  Sense strand starting at position 3593 of SEQ ID NO: 1883726
cauggugugugcuuuagau

SEQ ID NO: 2212023 - RNA, 19 nt, Artificial Sequence
  Description of Artificial Sequence: Synthetic oligonucleotide
  Antisense strand to SEQ ID NO: 2212022
aucuaaagcacacaccaug

SEQ ID NO: 2212024 - RNA, 19 nt, Artificial Sequence
  Description of Artificial Sequence: Synthetic oligonucleotide
  Sense strand starting at position 180 of SEQ ID NO: 1883726
uagugaguguccucaggcu

SEQ ID NO: 2212025 - RNA, 19 nt, Artificial Sequence
  Description of Artificial Sequence: Synthetic oligonucleotide
  Antisense strand to SEQ ID NO: 2212024
agccugaggacacucacua

SEQ ID NO: 2212026 - RNA, 19 nt, Artificial Sequence
  Description of Artificial Sequence: Synthetic oligonucleotide
  Sense strand starting at position 2770 of SEQ ID NO: 1883726
gcagaaguguuccuggugu

SEQ ID NO: 2212027 - RNA, 19 nt, Artificial Sequence
  Description of Artificial Sequence: Synthetic oligonucleotide
  Antisense strand to SEQ ID NO: 2212026
acaccaggaacacuucugc

SEQ ID NO: 2212028 - RNA, 19 nt, Artificial Sequence
  Description of Artificial Sequence: Synthetic oligonucleotide
  Sense strand starting at position 3383 of SEQ ID NO: 1883726
uagcauuaugugugcuuua

SEQ ID NO: 2212029 - RNA, 19 nt, Artificial Sequence
  Description of Artificial Sequence: Synthetic oligonucleotide
  Antisense strand to SEQ ID NO: 2212028
uaaagcacacauaaugcua

SEQ ID NO: 2212030 - RNA, 19 nt, Artificial Sequence
  Description of Artificial Sequence: Synthetic oligonucleotide
  Sense strand starting at position 2105 of SEQ ID NO: 1883726
caggaagcaugguaucaca

SEQ ID NO: 2212031 - RNA, 19 nt, Artificial Sequence
  Description of Artificial Sequence: Synthetic oligonucleotide
  Antisense strand to SEQ ID NO: 2212030
ugugauaccaugcuuccug

SEQ ID NO: 2212032 - RNA, 19 nt, Artificial Sequence
  Description of Artificial Sequence: Synthetic oligonucleotide
  Sense strand starting at position 3172 of SEQ ID NO: 1883726
caacguucugcaugcuuua

SEQ ID NO: 2212033 - RNA, 19 nt, Artificial Sequence
  Description of Artificial Sequence: Synthetic oligonucleotide
  Antisense strand to SEQ ID NO: 2212032
uaaagcaugcagaacguug

SEQ ID NO: 2212034 - RNA, 19 nt, Artificial Sequence
  Description of Artificial Sequence: Synthetic oligonucleotide
  Sense strand starting at position 3146 of SEQ ID NO: 1883726
ugaauaaaguuagaggugu

SEQ ID NO: 2212035 - RNA, 19 nt, Artificial Sequence
  Description of Artificial Sequence: Synthetic oligonucleotide
  Antisense strand to SEQ ID NO: 2212034
acaccucuaacuuuauuca

SEQ ID NO: 2212036 - RNA, 19 nt, Artificial Sequence
  Description of Artificial Sequence: Synthetic oligonucleotide
  Sense strand starting at position 3300 of SEQ ID NO: 1883726
caucgugugugcuuuagau

SEQ ID NO: 2212037 - RNA, 19 nt, Artificial Sequence
  Description of Artificial Sequence: Synthetic oligonucleotide
  Antisense strand to SEQ ID NO: 2212036
aucuaaagcacacacgaug

SEQ ID NO: 2212038 - RNA, 19 nt, Artificial Sequence
  Description of Artificial Sequence: Synthetic oligonucleotide
  Sense strand starting at position 2738 of SEQ ID NO: 1883726
acagguucuuaaugggaca

SEQ ID NO: 2212039 - RNA, 19 nt, Artificial Sequence
  Description of Artificial Sequence: Synthetic oligonucleotide
  Antisense strand to SEQ ID NO: 2212038
ugucccauuaagaaccugu

SEQ ID NO: 2212040 - RNA, 19 nt, Artificial Sequence
  Description of Artificial Sequence: Synthetic oligonucleotide
  Sense strand starting at position 3590 of SEQ ID NO: 1883726
uagcauggugugugcuuua

SEQ ID NO: 2212041 - RNA, 19 nt, Artificial Sequence
  Description of Artificial Sequence: Synthetic oligonucleotide
  Antisense strand to SEQ ID NO: 2212040
uaaagcacacaccaugcua

SEQ ID NO: 2212042 - RNA, 19 nt, Artificial Sequence
  Description of Artificial Sequence: Synthetic oligonucleotide
  Sense strand starting at position 3381 of SEQ ID NO: 1883726
gguagcauuaugugugcuu

SEQ ID NO: 2212043 - RNA, 19 nt, Artificial Sequence
  Description of Artificial Sequence: Synthetic oligonucleotide
  Antisense strand to SEQ ID NO: 2212042
aagcacacauaaugcuacc

SEQ ID NO: 2212044 - RNA, 19 nt, Artificial Sequence
  Description of Artificial Sequence: Synthetic oligonucleotide
  Sense strand starting at position 3382 of SEQ ID NO: 1883726
guagcauuaugugugcuuu

SEQ ID NO: 2212045 - RNA, 19 nt, Artificial Sequence
  Description of Artificial Sequence: Synthetic oligonucleotide
  Antisense strand to SEQ ID NO: 2212044
aaagcacacauaaugcuac

SEQ ID NO: 2212046 - RNA, 19 nt, Artificial Sequence
  Description of Artificial Sequence: Synthetic oligonucleotide
  Sense strand starting at position 3112 of SEQ ID NO: 1883726
acuuaaacguccugaagag

SEQ ID NO: 2212047 - RNA, 19 nt, Artificial Sequence
  Description of Artificial Sequence: Synthetic oligonucleotide
  Antisense strand to SEQ ID NO: 2212046
cucuucaggacguuuaagu

SEQ ID NO: 2212048 - RNA, 19 nt, Artificial Sequence
  Description of Artificial Sequence: Synthetic oligonucleotide
  Sense strand starting at position 2774 of SEQ ID NO: 1883726
aaguguuccugguguuucu

SEQ ID NO: 2212049 - RNA, 19 nt, Artificial Sequence
  Description of Artificial Sequence: Synthetic oligonucleotide
  Antisense strand to SEQ ID NO: 2212048
agaaacaccaggaacacuu

SEQ ID NO: 2212050 - RNA, 19 nt, Artificial Sequence
  Description of Artificial Sequence: Synthetic oligonucleotide
  Sense strand starting at position 973 of SEQ ID NO: 1883727
agaugucuuggugacgaaa

SEQ ID NO: 2212051 - RNA, 19 nt, Artificial Sequence
  Description of Artificial Sequence: Synthetic oligonucleotide
  Antisense strand to SEQ ID NO: 2212050
uuucgucaccaagacaucu

SEQ ID NO: 2212052 - RNA, 19 nt, Artificial Sequence
  Description of Artificial Sequence: Synthetic oligonucleotide
  Sense strand starting at position 1 of SEQ ID NO: 1883727
auuuguguuuaugugaagu

SEQ ID NO: 2212053 - RNA, 19 nt, Artificial Sequence
  Description of Artificial Sequence: Synthetic oligonucleotide
  Antisense strand to SEQ ID NO: 2212052
acuucacauaaacacaaau

SEQ ID NO: 2212054 - RNA, 19 nt, Artificial Sequence
  Description of Artificial Sequence: Synthetic oligonucleotide
  Sense strand starting at position 661 of SEQ ID NO: 1883727
gggauuugcugagaagagg

SEQ ID NO: 2212055 - RNA, 19 nt, Artificial Sequence
  Description of Artificial Sequence: Synthetic oligonucleotide
  Antisense strand to SEQ ID NO: 2212054
ccucuucucagcaaauccc

SEQ ID NO: 2212056 - RNA, 19 nt, Artificial Sequence
  Description of Artificial Sequence: Synthetic oligonucleotide
  Sense strand starting at position 303 of SEQ ID NO: 1883727
guuugugcugugucuguau

SEQ ID NO: 2212057 - RNA, 19 nt, Artificial Sequence
  Description of Artificial Sequence: Synthetic oligonucleotide
  Antisense strand to SEQ ID NO: 2212056
auacagacacagcacaaac

SEQ ID NO: 2212058 - RNA, 19 nt, Artificial Sequence
  Description of Artificial Sequence: Synthetic oligonucleotide
  Sense strand starting at position 600 of SEQ ID NO: 1883727
ggugcagacccaugagagu

SEQ ID NO: 2212059 - RNA, 19 nt, Artificial Sequence
  Description of Artificial Sequence: Synthetic oligonucleotide
  Antisense strand to SEQ ID NO: 2212058
acucucaugggucugcacc

SEQ ID NO: 2212060 - RNA, 19 nt, Artificial Sequence
  Description of Artificial Sequence: Synthetic oligonucleotide
  Sense strand starting at position 3941 of SEQ ID NO: 1883727
cccgcacuucugcaggaaa

SEQ ID NO: 2212061 - RNA, 19 nt, Artificial Sequence
  Description of Artificial Sequence: Synthetic oligonucleotide
  Antisense strand to SEQ ID NO: 2212060
uuuccugcagaagugcggg

SEQ ID NO: 2212062 - RNA, 19 nt, Artificial Sequence
  Description of Artificial Sequence: Synthetic oligonucleotide
  Sense strand starting at position 694 of SEQ ID NO: 1883727
acgagagaauuccaggaga

SEQ ID NO: 2212063 - RNA, 19 nt, Artificial Sequence
  Description of Artificial Sequence: Synthetic oligonucleotide
  Antisense strand to SEQ ID NO: 2212062
ucuccuggaauucucucgu

SEQ ID NO: 2212064 - RNA, 19 nt, Artificial Sequence
  Description of Artificial Sequence: Synthetic oligonucleotide
  Sense strand starting at position 971 of SEQ ID NO: 1883727
gcagaugucuuggugacga

SEQ ID NO: 2212065 - RNA, 19 nt, Artificial Sequence
  Description of Artificial Sequence: Synthetic oligonucleotide
  Antisense strand to SEQ ID NO: 2212064
ucgucaccaagacaucugc

SEQ ID NO: 2212066 - RNA, 19 nt, Artificial Sequence
  Description of Artificial Sequence: Synthetic oligonucleotide
  Sense strand starting at position 3675 of SEQ ID NO: 1883727
agaaguguuccugguguuu

SEQ ID NO: 2212067 - RNA, 19 nt, Artificial Sequence
  Description of Artificial Sequence: Synthetic oligonucleotide
  Antisense strand to SEQ ID NO: 2212066
aaacaccaggaacacuucu

SEQ ID NO: 2212068 - RNA, 19 nt, Artificial Sequence
  Description of Artificial Sequence: Synthetic oligonucleotide
  Sense strand starting at position 1083 of SEQ ID NO: 1883727
uagugaguguccucaggcu

SEQ ID NO: 2212069 - RNA, 19 nt, Artificial Sequence
  Description of Artificial Sequence: Synthetic oligonucleotide
  Antisense strand to SEQ ID NO: 2212068
agccugaggacacucacua

SEQ ID NO: 2212070 - RNA, 19 nt, Artificial Sequence
  Description of Artificial Sequence: Synthetic oligonucleotide
  Sense strand starting at position 7 of SEQ ID NO: 1883727
guuuaugugaaguguaugu

SEQ ID NO: 2212071 - RNA, 19 nt, Artificial Sequence
  Description of Artificial Sequence: Synthetic oligonucleotide
  Antisense strand to SEQ ID NO: 2212070
acauacacuucacauaaac

SEQ ID NO: 2212072 - RNA, 19 nt, Artificial Sequence
  Description of Artificial Sequence: Synthetic oligonucleotide
  Sense strand starting at position 167 of SEQ ID NO: 1883727
ggaggugguguuugugcau

SEQ ID NO: 2212073 - RNA, 19 nt, Artificial Sequence
  Description of Artificial Sequence: Synthetic oligonucleotide
  Antisense strand to SEQ ID NO: 2212072
augcacaaacaccaccucc

SEQ ID NO: 2212074 - RNA, 19 nt, Artificial Sequence
  Description of Artificial Sequence: Synthetic oligonucleotide
  Sense strand starting at position 3673 of SEQ ID NO: 1883727
gcagaaguguuccuggugu

SEQ ID NO: 2212075 - RNA, 19 nt, Artificial Sequence
  Description of Artificial Sequence: Synthetic oligonucleotide
  Antisense strand to SEQ ID NO: 2212074
acaccaggaacacuucugc

SEQ ID NO: 2212076 - RNA, 19 nt, Artificial Sequence
  Description of Artificial Sequence: Synthetic oligonucleotide
  Sense strand starting at position 11 of SEQ ID NO: 1883727
augugaaguguaugugugu

SEQ ID NO: 2212077 - RNA, 19 nt, Artificial Sequence
  Description of Artificial Sequence: Synthetic oligonucleotide
  Antisense strand to SEQ ID NO: 2212076
acacacauacacuucacau

SEQ ID NO: 2212078 - RNA, 19 nt, Artificial Sequence
  Description of Artificial Sequence: Synthetic oligonucleotide
  Sense strand starting at position 2336 of SEQ ID NO: 1883727
caggaagcaugguaucaca

SEQ ID NO: 2212079 - RNA, 19 nt, Artificial Sequence
  Description of Artificial Sequence: Synthetic oligonucleotide
  Antisense strand to SEQ ID NO: 2212078
ugugauaccaugcuuccug

SEQ ID NO: 2212080 - RNA, 19 nt, Artificial Sequence
  Description of Artificial Sequence: Synthetic oligonucleotide
  Sense strand starting at position 12 of SEQ ID NO: 1883727
ugugaaguguauguguguu

SEQ ID NO: 2212081 - RNA, 19 nt, Artificial Sequence
  Description of Artificial Sequence: Synthetic oligonucleotide
  Antisense strand to SEQ ID NO: 2212080
aacacacauacacuucaca

SEQ ID NO: 2212082 - RNA, 19 nt, Artificial Sequence
  Description of Artificial Sequence: Synthetic oligonucleotide
  Sense strand starting at position 84 of SEQ ID NO: 1883727
gggagcugugccuguguau

SEQ ID NO: 2212083 - RNA, 19 nt, Artificial Sequence
  Description of Artificial Sequence: Synthetic oligonucleotide
  Antisense strand to SEQ ID NO: 2212082
auacacaggcacagcuccc

SEQ ID NO: 2212084 - RNA, 19 nt, Artificial Sequence
  Description of Artificial Sequence: Synthetic oligonucleotide
  Sense strand starting at position 3641 of SEQ ID NO: 1883727
acagguucuuaaugggaca

SEQ ID NO: 2212085 - RNA, 19 nt, Artificial Sequence
  Description of Artificial Sequence: Synthetic oligonucleotide
  Antisense strand to SEQ ID NO: 2212084
ugucccauuaagaaccugu

SEQ ID NO: 2212086 - RNA, 19 nt, Artificial Sequence
  Description of Artificial Sequence: Synthetic oligonucleotide
  Sense strand starting at position 306 of SEQ ID NO: 1883727
ugugcugugucuguauagu

SEQ ID NO: 2212087 - RNA, 19 nt, Artificial Sequence
  Description of Artificial Sequence: Synthetic oligonucleotide
  Antisense strand to SEQ ID NO: 2212086
acuauacagacacagcaca

SEQ ID NO: 2212088 - RNA, 19 nt, Artificial Sequence
  Description of Artificial Sequence: Synthetic oligonucleotide
  Sense strand starting at position 262 of SEQ ID NO: 1883727
gugugugcugcauguguau

SEQ ID NO: 2212089 - RNA, 19 nt, Artificial Sequence
  Description of Artificial Sequence: Synthetic oligonucleotide
  Antisense strand to SEQ ID NO: 2212088
auacacaugcagcacacac

SEQ ID NO: 2212090 - RNA, 19 nt, Artificial Sequence
  Description of Artificial Sequence: Synthetic oligonucleotide
  Sense strand starting at position 3 of SEQ ID NO: 1883727
uuguguuuaugugaagugu

SEQ ID NO: 2212091 - RNA, 19 nt, Artificial Sequence
  Description of Artificial Sequence: Synthetic oligonucleotide
  Antisense strand to SEQ ID NO: 2212090
acacuucacauaaacacaa

SEQ ID NO: 2212092 - RNA, 19 nt, Artificial Sequence
  Description of Artificial Sequence: Synthetic oligonucleotide
  Sense strand starting at position 3677 of SEQ ID NO: 1883727
aaguguuccugguguuucu

SEQ ID NO: 2212093 - RNA, 19 nt, Artificial Sequence
  Description of Artificial Sequence: Synthetic oligonucleotide
  Antisense strand to SEQ ID NO: 2212092
agaaacaccaggaacacuu

SEQ ID NO: 2212094 - RNA, 19 nt, Artificial Sequence
  Description of Artificial Sequence: Synthetic oligonucleotide
  Sense strand starting at position 209 of SEQ ID NO: 1883727
gcguguguaugguauaugu

SEQ ID NO: 2212095 - RNA, 19 nt, Artificial Sequence
  Description of Artificial Sequence: Synthetic oligonucleotide
  Antisense strand to SEQ ID NO: 2212094
acauauaccauacacacgc

SEQ ID NO: 2212096 - RNA, 19 nt, Artificial Sequence
  Description of Artificial Sequence: Synthetic oligonucleotide
  Sense strand starting at position 207 of SEQ ID NO: 1883727
uggcguguguaugguauau

SEQ ID NO: 2212097 - RNA, 19 nt, Artificial Sequence
  Description of Artificial Sequence: Synthetic oligonucleotide
  Antisense strand to SEQ ID NO: 2212096
auauaccauacacacgcca

SEQ ID NO: 2212098 - RNA, 19 nt, Artificial Sequence
  Description of Artificial Sequence: Synthetic oligonucleotide
  Sense strand starting at position 660 of SEQ ID NO: 1883728
agaugucuuggugacgaaa

SEQ ID NO: 2212099 - RNA, 19 nt, Artificial Sequence
  Description of Artificial Sequence: Synthetic oligonucleotide
  Antisense strand to SEQ ID NO: 2212098
uuucgucaccaagacaucu

SEQ ID NO: 2212100 - RNA, 19 nt, Artificial Sequence
  Description of Artificial Sequence: Synthetic oligonucleotide
  Sense strand starting at position 348 of SEQ ID NO: 1883728
gggauuugcugagaagagg

SEQ ID NO: 2212101 - RNA, 19 nt, Artificial Sequence
  Description of Artificial Sequence: Synthetic oligonucleotide
  Antisense strand to SEQ ID NO: 2212100
ccucuucucagcaaauccc

SEQ ID NO: 2212102 - RNA, 19 nt, Artificial Sequence
  Description of Artificial Sequence: Synthetic oligonucleotide
  Sense strand starting at position 3773 of SEQ ID NO: 1883728
augcuuuagaguuacaggu

SEQ ID NO: 2212103 - RNA, 19 nt, Artificial Sequence
  Description of Artificial Sequence: Synthetic oligonucleotide
  Antisense strand to SEQ ID NO: 2212102
accuguaacucuaaagcau

SEQ ID NO: 2212104 - RNA, 19 nt, Artificial Sequence
  Description of Artificial Sequence: Synthetic oligonucleotide
  Sense strand starting at position 287 of SEQ ID NO: 1883728
ggugcagacccaugagagu

SEQ ID NO: 2212105 - RNA, 19 nt, Artificial Sequence
  Description of Artificial Sequence: Synthetic oligonucleotide
  Antisense strand to SEQ ID NO: 2212104
acucucaugggucugcacc

SEQ ID NO: 2212106 - RNA, 19 nt, Artificial Sequence
  Description of Artificial Sequence: Synthetic oligonucleotide
  Sense strand starting at position 3628 of SEQ ID NO: 1883728
cccgcacuucugcaggaaa

SEQ ID NO: 2212107 - RNA, 19 nt, Artificial Sequence
  Description of Artificial Sequence: Synthetic oligonucleotide
  Antisense strand to SEQ ID NO: 2212106
uuuccugcagaagugcggg

SEQ ID NO: 2212108 - RNA, 19 nt, Artificial Sequence
  Description of Artificial Sequence: Synthetic oligonucleotide
  Sense strand starting at position 3742 of SEQ ID NO: 1883728
aaguuagaggugugcacau

SEQ ID NO: 2212109 - RNA, 19 nt, Artificial Sequence
  Description of Artificial Sequence: Synthetic oligonucleotide
  Antisense strand to SEQ ID NO: 2212108
augugcacaccucuaacuu

SEQ ID NO: 2212110 - RNA, 19 nt, Artificial Sequence
  Description of Artificial Sequence: Synthetic oligonucleotide
  Sense strand starting at position 381 of SEQ ID NO: 1883728
acgagagaauuccaggaga

SEQ ID NO: 2212111 - RNA, 19 nt, Artificial Sequence
  Description of Artificial Sequence: Synthetic oligonucleotide
  Antisense strand to SEQ ID NO: 2212110
ucuccuggaauucucucgu

SEQ ID NO: 2212112 - RNA, 19 nt, Artificial Sequence
  Description of Artificial Sequence: Synthetic oligonucleotide
  Sense strand starting at position 3767 of SEQ ID NO: 1883728
uucugcaugcuuuagaguu

SEQ ID NO: 2212113 - RNA, 19 nt, Artificial Sequence
  Description of Artificial Sequence: Synthetic oligonucleotide
  Antisense strand to SEQ ID NO: 2212112
aacucuaaagcaugcagaa

SEQ ID NO: 2212114 - RNA, 19 nt, Artificial Sequence
  Description of Artificial Sequence: Synthetic oligonucleotide
  Sense strand starting at position 658 of SEQ ID NO: 1883728
gcagaugucuuggugacga

SEQ ID NO: 2212115 - RNA, 19 nt, Artificial Sequence
  Description of Artificial Sequence: Synthetic oligonucleotide
  Antisense strand to SEQ ID NO: 2212114
ucgucaccaagacaucugc

SEQ ID NO: 2212116 - RNA, 19 nt, Artificial Sequence
  Description of Artificial Sequence: Synthetic oligonucleotide
  Sense strand starting at position 3976 of SEQ ID NO: 1883728
cauuaugugugcuuuagau

SEQ ID NO: 2212117 - RNA, 19 nt, Artificial Sequence
  Description of Artificial Sequence: Synthetic oligonucleotide
  Antisense strand to SEQ ID NO: 2212116
aucuaaagcacacauaaug

SEQ ID NO: 2212118 - RNA, 19 nt, Artificial Sequence
  Description of Artificial Sequence: Synthetic oligonucleotide
  Sense strand starting at position 3982 of SEQ ID NO: 1883728
gugugcuuuagauggaggu

SEQ ID NO: 2212119 - RNA, 19 nt, Artificial Sequence
  Description of Artificial Sequence: Synthetic oligonucleotide
  Antisense strand to SEQ ID NO: 2212118
accuccaucuaaagcacac

SEQ ID NO: 2212120 - RNA, 19 nt, Artificial Sequence
  Description of Artificial Sequence: Synthetic oligonucleotide
  Sense strand starting at position 3362 of SEQ ID NO: 1883728
agaaguguuccugguguuu

SEQ ID NO: 2212121 - RNA, 19 nt, Artificial Sequence
  Description of Artificial Sequence: Synthetic oligonucleotide
  Antisense strand to SEQ ID NO: 2212120
aaacaccaggaacacuucu

SEQ ID NO: 2212122 - RNA, 19 nt, Artificial Sequence
  Description of Artificial Sequence: Synthetic oligonucleotide
  Sense strand starting at position 3810 of SEQ ID NO: 1883728
gugugcuuuggauggaguu

SEQ ID NO: 2212123 - RNA, 19 nt, Artificial Sequence
  Description of Artificial Sequence: Synthetic oligonucleotide
  Antisense strand to SEQ ID NO: 2212122
aacuccauccaaagcacac

SEQ ID NO: 2212124 - RNA, 19 nt, Artificial Sequence
  Description of Artificial Sequence: Synthetic oligonucleotide
  Sense strand starting at position 770 of SEQ ID NO: 1883728
uagugaguguccucaggcu

SEQ ID NO: 2212125 - RNA, 19 nt, Artificial Sequence
  Description of Artificial Sequence: Synthetic oligonucleotide
  Antisense strand to SEQ ID NO: 2212124
agccugaggacacucacua

SEQ ID NO: 2212126 - RNA, 19 nt, Artificial Sequence
  Description of Artificial Sequence: Synthetic oligonucleotide
  Sense strand starting at position 3360 of SEQ ID NO: 1883728
gcagaaguguuccuggugu

SEQ ID NO: 2212127 - RNA, 19 nt, Artificial Sequence
  Description of Artificial Sequence: Synthetic oligonucleotide
  Antisense strand to SEQ ID NO: 2212126
acaccaggaacacuucugc

SEQ ID NO: 2212128 - RNA, 19 nt, Artificial Sequence
  Description of Artificial Sequence: Synthetic oligonucleotide
  Sense strand starting at position 3973 of SEQ ID NO: 1883728
uagcauuaugugugcuuua

SEQ ID NO: 2212129 - RNA, 19 nt, Artificial Sequence
  Description of Artificial Sequence: Synthetic oligonucleotide
  Antisense strand to SEQ ID NO: 2212128
uaaagcacacauaaugcua

SEQ ID NO: 2212130 - RNA, 19 nt, Artificial Sequence
  Description of Artificial Sequence: Synthetic oligonucleotide
  Sense strand starting at position 2023 of SEQ ID NO: 1883728
caggaagcaugguaucaca

SEQ ID NO: 2212131 - RNA, 19 nt, Artificial Sequence
  Description of Artificial Sequence: Synthetic oligonucleotide
  Antisense strand to SEQ ID NO: 2212130
ugugauaccaugcuuccug

SEQ ID NO: 2212132 - RNA, 19 nt, Artificial Sequence
  Description of Artificial Sequence: Synthetic oligonucleotide
  Sense strand starting at position 3762 of SEQ ID NO: 1883728
caacguucugcaugcuuua

SEQ ID NO: 2212133 - RNA, 19 nt, Artificial Sequence
  Description of Artificial Sequence: Synthetic oligonucleotide
  Antisense strand to SEQ ID NO: 2212132
uaaagcaugcagaacguug

SEQ ID NO: 2212134 - RNA, 19 nt, Artificial Sequence
  Description of Artificial Sequence: Synthetic oligonucleotide
  Sense strand starting at position 3736 of SEQ ID NO: 1883728
ugaauaaaguuagaggugu

SEQ ID NO: 2212135 - RNA, 19 nt, Artificial Sequence
  Description of Artificial Sequence: Synthetic oligonucleotide
  Antisense strand to SEQ ID NO: 2212134
acaccucuaacuuuauuca

SEQ ID NO: 2212136 - RNA, 19 nt, Artificial Sequence
  Description of Artificial Sequence: Synthetic oligonucleotide
  Sense strand starting at position 3328 of SEQ ID NO: 1883728
acagguucuuaaugggaca

SEQ ID NO: 2212137 - RNA, 19 nt, Artificial Sequence
  Description of Artificial Sequence: Synthetic oligonucleotide
  Antisense strand to SEQ ID NO: 2212136
ugucccauuaagaaccugu

SEQ ID NO: 2212138 - RNA, 19 nt, Artificial Sequence
  Description of Artificial Sequence: Synthetic oligonucleotide
  Sense strand starting at position 3971 of SEQ ID NO: 1883728
gguagcauuaugugugcuu

SEQ ID NO: 2212139 - RNA, 19 nt, Artificial Sequence
  Description of Artificial Sequence: Synthetic oligonucleotide
  Antisense strand to SEQ ID NO: 2212138
aagcacacauaaugcuacc

SEQ ID NO: 2212140 - RNA, 19 nt, Artificial Sequence
  Description of Artificial Sequence: Synthetic oligonucleotide
  Sense strand starting at position 3972 of SEQ ID NO: 1883728
guagcauuaugugugcuuu

SEQ ID NO: 2212141 - RNA, 19 nt, Artificial Sequence
  Description of Artificial Sequence: Synthetic oligonucleotide
  Antisense strand to SEQ ID NO: 2212140
aaagcacacauaaugcuac

SEQ ID NO: 2212142 - RNA, 19 nt, Artificial Sequence
  Description of Artificial Sequence: Synthetic oligonucleotide
  Sense strand starting at position 3702 of SEQ ID NO: 1883728
acuuaaacguccugaagag

SEQ ID NO: 2212143 - RNA, 19 nt, Artificial Sequence
  Description of Artificial Sequence: Synthetic oligonucleotide
  Antisense strand to SEQ ID NO: 2212142
cucuucaggacguuuaagu

SEQ ID NO: 2212144 - RNA, 19 nt, Artificial Sequence
  Description of Artificial Sequence: Synthetic oligonucleotide
  Sense strand starting at position 3364 of SEQ ID NO: 1883728
aaguguuccugguguuucu

SEQ ID NO: 2212145 - RNA, 19 nt, Artificial Sequence
  Description of Artificial Sequence: Synthetic oligonucleotide
  Antisense strand to SEQ ID NO: 2212144
agaaacaccaggaacacuu

SEQ ID NO: 2212146 - RNA, 19 nt, Artificial Sequence
  Description of Artificial Sequence: Synthetic oligonucleotide
  Sense strand starting at position 3346 of SEQ ID NO: 1883729
uguacuuuagauggagaug

SEQ ID NO: 2212147 - RNA, 19 nt, Artificial Sequence
  Description of Artificial Sequence: Synthetic oligonucleotide
  Antisense strand to SEQ ID NO: 2212146
caucuccaucuaaaguaca

SEQ ID NO: 2212148 - RNA, 19 nt, Artificial Sequence
  Description of Artificial Sequence: Synthetic oligonucleotide
  Sense strand starting at position 3345 of SEQ ID NO: 1883729
guguacuuuagauggagau

SEQ ID NO: 2212149 - RNA, 19 nt, Artificial Sequence
  Description of Artificial Sequence: Synthetic oligonucleotide
  Antisense strand to SEQ ID NO: 2212148
aucuccaucuaaaguacac

SEQ ID NO: 2212150 - RNA, 19 nt, Artificial Sequence
  Description of Artificial Sequence: Synthetic oligonucleotide
  Sense strand starting at position 3099 of SEQ ID NO: 1883729
augcuuuagaguuacaggu

SEQ ID NO: 2212151 - RNA, 19 nt, Artificial Sequence
  Description of Artificial Sequence: Synthetic oligonucleotide
  Antisense strand to SEQ ID NO: 2212150
accuguaacucuaaagcau

SEQ ID NO: 2212152 - RNA, 19 nt, Artificial Sequence
  Description of Artificial Sequence: Synthetic oligonucleotide
  Sense strand starting at position 3904 of SEQ ID NO: 1883729
gugcuuuacauggaguuga

SEQ ID NO: 2212153 - RNA, 19 nt, Artificial Sequence
  Description of Artificial Sequence: Synthetic oligonucleotide
  Antisense strand to SEQ ID NO: 2212152
ucaacuccauguaaagcac

SEQ ID NO: 2212154 - RNA, 19 nt, Artificial Sequence
  Description of Artificial Sequence: Synthetic oligonucleotide
  Sense strand starting at position 2954 of SEQ ID NO: 1883729
cccgcacuucugcaggaaa

SEQ ID NO: 2212155 - RNA, 19 nt, Artificial Sequence
  Description of Artificial Sequence: Synthetic oligonucleotide
  Antisense strand to SEQ ID NO: 2212154
uuuccugcagaagugcggg

SEQ ID NO: 2212156 - RNA, 19 nt, Artificial Sequence
  Description of Artificial Sequence: Synthetic oligonucleotide
  Sense strand starting at position 3068 of SEQ ID NO: 1883729
aaguuagaggugugcacau

SEQ ID NO: 2212157 - RNA, 19 nt, Artificial Sequence
  Description of Artificial Sequence: Synthetic oligonucleotide
  Antisense strand to SEQ ID NO: 2212156
augugcacaccucuaacuu

SEQ ID NO: 2212158 - RNA, 19 nt, Artificial Sequence
  Description of Artificial Sequence: Synthetic oligonucleotide
  Sense strand starting at position 3093 of SEQ ID NO: 1883729
uucugcaugcuuuagaguu

SEQ ID NO: 2212159 - RNA, 19 nt, Artificial Sequence
  Description of Artificial Sequence: Synthetic oligonucleotide
  Antisense strand to SEQ ID NO: 2212158
aacucuaaagcaugcagaa

SEQ ID NO: 2212160 - RNA, 19 nt, Artificial Sequence
  Description of Artificial Sequence: Synthetic oligonucleotide
  Sense strand starting at position 3302 of SEQ ID NO: 1883729
cauuaugugugcuuuagau

SEQ ID NO: 2212161 - RNA, 19 nt, Artificial Sequence
  Description of Artificial Sequence: Synthetic oligonucleotide
  Antisense strand to SEQ ID NO: 2212160
aucuaaagcacacauaaug

SEQ ID NO: 2212162 - RNA, 19 nt, Artificial Sequence
  Description of Artificial Sequence: Synthetic oligonucleotide
  Sense strand starting at position 3308 of SEQ ID NO: 1883729
gugugcuuuagauggaggu

SEQ ID NO: 2212163 - RNA, 19 nt, Artificial Sequence
  Description of Artificial Sequence: Synthetic oligonucleotide
  Antisense strand to SEQ ID NO: 2212162
accuccaucuaaagcacac

SEQ ID NO: 2212164 - RNA, 19 nt, Artificial Sequence
  Description of Artificial Sequence: Synthetic oligonucleotide
  Sense strand starting at position 3431 of SEQ ID NO: 1883729
gugugcuuuaaauggaguu

SEQ ID NO: 2212165 - RNA, 19 nt, Artificial Sequence
  Description of Artificial Sequence: Synthetic oligonucleotide
  Antisense strand to SEQ ID NO: 2212164
aacuccauuuaaagcacac

SEQ ID NO: 2212166 - RNA, 19 nt, Artificial Sequence
  Description of Artificial Sequence: Synthetic oligonucleotide
  Sense strand starting at position 2688 of SEQ ID NO: 1883729
agaaguguuccugguguuu

SEQ ID NO: 2212167 - RNA, 19 nt, Artificial Sequence
  Description of Artificial Sequence: Synthetic oligonucleotide
  Antisense strand to SEQ ID NO: 2212166
aaacaccaggaacacuucu

SEQ ID NO: 2212168 - RNA, 19 nt, Artificial Sequence
  Description of Artificial Sequence: Synthetic oligonucleotide
  Sense strand starting at position 3136 of SEQ ID NO: 1883729
gugugcuuuggauggaguu

SEQ ID NO: 2212169 - RNA, 19 nt, Artificial Sequence
  Description of Artificial Sequence: Synthetic oligonucleotide
  Antisense strand to SEQ ID NO: 2212168
aacuccauccaaagcacac

SEQ ID NO: 2212170 - RNA, 19 nt, Artificial Sequence
  Description of Artificial Sequence: Synthetic oligonucleotide
  Sense strand starting at position 3509 of SEQ ID NO: 1883729
cauggugugugcuuuagau

SEQ ID NO: 2212171 - RNA, 19 nt, Artificial Sequence
  Description of Artificial Sequence: Synthetic oligonucleotide
  Antisense strand to SEQ ID NO: 2212170
aucuaaagcacacaccaug

SEQ ID NO: 2212172 - RNA, 19 nt, Artificial Sequence
  Description of Artificial Sequence: Synthetic oligonucleotide
  Sense strand starting at position 96 of SEQ ID NO: 1883729
uagugaguguccucaggcu

SEQ ID NO: 2212173 - RNA, 19 nt, Artificial Sequence
  Description of Artificial Sequence: Synthetic oligonucleotide
  Antisense strand to SEQ ID NO: 2212172
agccugaggacacucacua

SEQ ID NO: 2212174 - RNA, 19 nt, Artificial Sequence
  Description of Artificial Sequence: Synthetic oligonucleotide
  Sense strand starting at position 3773 of SEQ ID NO: 1883729
gugugcuuuacauggaguu

SEQ ID NO: 2212175 - RNA, 19 nt, Artificial Sequence
  Description of Artificial Sequence: Synthetic oligonucleotide
  Antisense strand to SEQ ID NO: 2212174
aacuccauguaaagcacac

SEQ ID NO: 2212176 - RNA, 19 nt, Artificial Sequence
  Description of Artificial Sequence: Synthetic oligonucleotide
  Sense strand starting at position 2686 of SEQ ID NO: 1883729
gcagaaguguuccuggugu

SEQ ID NO: 2212177 - RNA, 19 nt, Artificial Sequence
  Description of Artificial Sequence: Synthetic oligonucleotide
  Antisense strand to SEQ ID NO: 2212176
acaccaggaacacuucugc

SEQ ID NO: 2212178 - RNA, 19 nt, Artificial Sequence
  Description of Artificial Sequence: Synthetic oligonucleotide
  Sense strand starting at position 3299 of SEQ ID NO: 1883729
uagcauuaugugugcuuua

SEQ ID NO: 2212179 - RNA, 19 nt, Artificial Sequence
  Description of Artificial Sequence: Synthetic oligonucleotide
  Antisense strand to SEQ ID NO: 2212178
uaaagcacacauaaugcua

SEQ ID NO: 2212180 - RNA, 19 nt, Artificial Sequence
  Description of Artificial Sequence: Synthetic oligonucleotide
  Sense strand starting at position 2021 of SEQ ID NO: 1883729
caggaagcaugguaucaca

SEQ ID NO: 2212181 - RNA, 19 nt, Artificial Sequence
  Description of Artificial Sequence: Synthetic oligonucleotide
  Antisense strand to SEQ ID NO: 2212180
ugugauaccaugcuuccug

SEQ ID NO: 2212182 - RNA, 19 nt, Artificial Sequence
  Description of Artificial Sequence: Synthetic oligonucleotide
  Sense strand starting at position 3088 of SEQ ID NO: 1883729
caacguucugcaugcuuua

SEQ ID NO: 2212183 - RNA, 19 nt, Artificial Sequence
  Description of Artificial Sequence: Synthetic oligonucleotide
  Antisense strand to SEQ ID NO: 2212182
uaaagcaugcagaacguug

SEQ ID NO: 2212184 - RNA, 19 nt, Artificial Sequence
  Description of Artificial Sequence: Synthetic oligonucleotide
  Sense strand starting at position 3062 of SEQ ID NO: 1883729
ugaauaaaguuagaggugu

SEQ ID NO: 2212185 - RNA, 19 nt, Artificial Sequence
  Description of Artificial Sequence: Synthetic oligonucleotide
  Antisense strand to SEQ ID NO: 2212184
acaccucuaacuuuauuca

SEQ ID NO: 2212186 - RNA, 19 nt, Artificial Sequence
  Description of Artificial Sequence: Synthetic oligonucleotide
  Sense strand starting at position 3216 of SEQ ID NO: 1883729
caucgugugugcuuuagau

SEQ ID NO: 2212187 - RNA, 19 nt, Artificial Sequence
  Description of Artificial Sequence: Synthetic oligonucleotide
  Antisense strand to SEQ ID NO: 2212186
aucuaaagcacacacgaug

SEQ ID NO: 2212188 - RNA, 19 nt, Artificial Sequence
  Description of Artificial Sequence: Synthetic oligonucleotide
  Sense strand starting at position 2654 of SEQ ID NO: 1883729
acagguucuuaaugggaca

SEQ ID NO: 2212189 - RNA, 19 nt, Artificial Sequence
  Description of Artificial Sequence: Synthetic oligonucleotide
  Antisense strand to SEQ ID NO: 2212188
ugucccauuaagaaccugu

SEQ ID NO: 2212190 - RNA, 19 nt, Artificial Sequence
  Description of Artificial Sequence: Synthetic oligonucleotide
  Sense strand starting at position 3506 of SEQ ID NO: 1883729
uagcauggugugugcuuua

SEQ ID NO: 2212191 - RNA, 19 nt, Artificial Sequence
  Description of Artificial Sequence: Synthetic oligonucleotide
  Antisense strand to SEQ ID NO: 2212190
uaaagcacacaccaugcua

SEQ ID NO: 2212192 - RNA, 19 nt, Artificial Sequence
  Description of Artificial Sequence: Synthetic oligonucleotide
  Sense strand starting at position 3297 of SEQ ID NO: 1883729
gguagcauuaugugugcuu

SEQ ID NO: 2212193 - RNA, 19 nt, Artificial Sequence
  Description of Artificial Sequence: Synthetic oligonucleotide
  Antisense strand to SEQ ID NO: 2212192
aagcacacauaaugcuacc

SEQ ID NO: 2212194 - RNA, 19 nt, Artificial Sequence
  Description of Artificial Sequence: Synthetic oligonucleotide
  Sense strand starting at position 3298 of SEQ ID NO: 1883729
guagcauuaugugugcuuu

SEQ ID NO: 2212195 - RNA, 19 nt, Artificial Sequence
  Description of Artificial Sequence: Synthetic oligonucleotide
  Antisense strand to SEQ ID NO: 2212194
aaagcacacauaaugcuac

SEQ ID NO: 2212196 - RNA, 19 nt, Artificial Sequence
  Description of Artificial Sequence: Synthetic oligonucleotide
  Sense strand starting at position 3028 of SEQ ID NO: 1883729
acuuaaacguccugaagag

SEQ ID NO: 2212197 - RNA, 19 nt, Artificial Sequence
  Description of Artificial Sequence: Synthetic oligonucleotide
  Antisense strand to SEQ ID NO: 2212196
cucuucaggacguuuaagu

SEQ ID NO: 2212198 - RNA, 19 nt, Artificial Sequence
  Description of Artificial Sequence: Synthetic oligonucleotide
  Sense strand starting at position 2690 of SEQ ID NO: 1883729
aaguguuccugguguuucu

SEQ ID NO: 2212199 - RNA, 19 nt, Artificial Sequence
  Description of Artificial Sequence: Synthetic oligonucleotide
  Antisense strand to SEQ ID NO: 2212198
agaaacaccaggaacacuu

SEQ ID NO: 2212200 - RNA, 19 nt, Artificial Sequence
  Description of Artificial Sequence: Synthetic oligonucleotide
  Sense strand starting at position 3061 of SEQ ID NO: 1883730
uguacuuuagauggagaug

SEQ ID NO: 2212201 - RNA, 19 nt, Artificial Sequence
  Description of Artificial Sequence: Synthetic oligonucleotide
  Antisense strand to SEQ ID NO: 2212200
caucuccaucuaaaguaca

SEQ ID NO: 2212202 - RNA, 19 nt, Artificial Sequence
  Description of Artificial Sequence: Synthetic oligonucleotide
  Sense strand starting at position 3060 of SEQ ID NO: 1883730
guguacuuuagauggagau

SEQ ID NO: 2212203 - RNA, 19 nt, Artificial Sequence
  Description of Artificial Sequence: Synthetic oligonucleotide
  Antisense strand to SEQ ID NO: 2212202
aucuccaucuaaaguacac

SEQ ID NO: 2212204 - RNA, 19 nt, Artificial Sequence
  Description of Artificial Sequence: Synthetic oligonucleotide
  Sense strand starting at position 2814 of SEQ ID NO: 1883730
augcuuuagaguuacaggu

SEQ ID NO: 2212205 - RNA, 19 nt, Artificial Sequence
  Description of Artificial Sequence: Synthetic oligonucleotide
  Antisense strand to SEQ ID NO: 2212204
accuguaacucuaaagcau

SEQ ID NO: 2212206 - RNA, 19 nt, Artificial Sequence
  Description of Artificial Sequence: Synthetic oligonucleotide
  Sense strand starting at position 3619 of SEQ ID NO: 1883730
gugcuuuacauggaguuga

SEQ ID NO: 2212207 - RNA, 19 nt, Artificial Sequence
  Description of Artificial Sequence: Synthetic oligonucleotide
  Antisense strand to SEQ ID NO: 2212206
ucaacuccauguaaagcac

SEQ ID NO: 2212208 - RNA, 19 nt, Artificial Sequence
  Description of Artificial Sequence: Synthetic oligonucleotide
  Sense strand starting at position 2669 of SEQ ID NO: 1883730
cccgcacuucugcaggaaa

SEQ ID NO: 2212209 - RNA, 19 nt, Artificial Sequence
  Description of Artificial Sequence: Synthetic oligonucleotide
  Antisense strand to SEQ ID NO: 2212208
uuuccugcagaagugcggg

SEQ ID NO: 2212210 - RNA, 19 nt, Artificial Sequence
  Description of Artificial Sequence: Synthetic oligonucleotide
  Sense strand starting at position 3746 of SEQ ID NO: 1883730
guguacuuuagauggaguu

SEQ ID NO: 2212211 - RNA, 19 nt, Artificial Sequence
  Description of Artificial Sequence: Synthetic oligonucleotide
  Antisense strand to SEQ ID NO: 2212210
aacuccaucuaaaguacac

SEQ ID NO: 2212212 - RNA, 19 nt, Artificial Sequence
  Description of Artificial Sequence: Synthetic oligonucleotide
  Sense strand starting at position 2783 of SEQ ID NO: 1883730
aaguuagaggugugcacau

SEQ ID NO: 2212213 - RNA, 19 nt, Artificial Sequence
  Description of Artificial Sequence: Synthetic oligonucleotide
  Antisense strand to SEQ ID NO: 2212212
augugcacaccucuaacuu

SEQ ID NO: 2212214 - RNA, 19 nt, Artificial Sequence
  Description of Artificial Sequence: Synthetic oligonucleotide
  Sense strand starting at position 2981 of SEQ ID NO: 1883730
ugugcuuuagauggaguua

SEQ ID NO: 2212215 - RNA, 19 nt, Artificial Sequence
  Description of Artificial Sequence: Synthetic oligonucleotide
  Antisense strand to SEQ ID NO: 2212214
uaacuccaucuaaagcaca

SEQ ID NO: 2212216 - RNA, 19 nt, Artificial Sequence
  Description of Artificial Sequence: Synthetic oligonucleotide
  Sense strand starting at position 3054 of SEQ ID NO: 1883730
cauuguguguacuuuagau

SEQ ID NO: 2212217 - RNA, 19 nt, Artificial Sequence
  Description of Artificial Sequence: Synthetic oligonucleotide
  Antisense strand to SEQ ID NO: 2212216
aucuaaaguacacacaaug

SEQ ID NO: 2212218 - RNA, 19 nt, Artificial Sequence
  Description of Artificial Sequence: Synthetic oligonucleotide
  Sense strand starting at position 2808 of SEQ ID NO: 1883730
uucugcaugcuuuagaguu

SEQ ID NO: 2212219 - RNA, 19 nt, Artificial Sequence
  Description of Artificial Sequence: Synthetic oligonucleotide
  Antisense strand to SEQ ID NO: 2212218
aacucuaaagcaugcagaa

SEQ ID NO: 2212220 - RNA, 19 nt, Artificial Sequence
  Description of Artificial Sequence: Synthetic oligonucleotide
  Sense strand starting at position 3051 of SEQ ID NO: 1883730
uagcauuguguguacuuua

SEQ ID NO: 2212221 - RNA, 19 nt, Artificial Sequence
  Description of Artificial Sequence: Synthetic oligonucleotide
  Antisense strand to SEQ ID NO: 2212220
uaaaguacacacaaugcua

SEQ ID NO: 2212222 - RNA, 19 nt, Artificial Sequence
  Description of Artificial Sequence: Synthetic oligonucleotide
  Sense strand starting at position 3017 of SEQ ID NO: 1883730
cauuaugugugcuuuagau

SEQ ID NO: 2212223 - RNA, 19 nt, Artificial Sequence
  Description of Artificial Sequence: Synthetic oligonucleotide
  Antisense strand to SEQ ID NO: 2212222
aucuaaagcacacauaaug

SEQ ID NO: 2212224 - RNA, 19 nt, Artificial Sequence
  Description of Artificial Sequence: Synthetic oligonucleotide
  Sense strand starting at position 3023 of SEQ ID NO: 1883730
gugugcuuuagauggaggu

SEQ ID NO: 2212225 - RNA, 19 nt, Artificial Sequence
  Description of Artificial Sequence: Synthetic oligonucleotide
  Antisense strand to SEQ ID NO: 2212224
accuccaucuaaagcacac

SEQ ID NO: 2212226 - RNA, 19 nt, Artificial Sequence
  Description of Artificial Sequence: Synthetic oligonucleotide
  Sense strand starting at position 3146 of SEQ ID NO: 1883730
gugugcuuuaaauggaguu

SEQ ID NO: 2212227 - RNA, 19 nt, Artificial Sequence
  Description of Artificial Sequence: Synthetic oligonucleotide
  Antisense strand to SEQ ID NO: 2212226
aacuccauuuaaagcacac

SEQ ID NO: 2212228 - RNA, 19 nt, Artificial Sequence
  Description of Artificial Sequence: Synthetic oligonucleotide
  Sense strand starting at position 2403 of SEQ ID NO: 1883730
agaaguguuccugguguuu

SEQ ID NO: 2212229 - RNA, 19 nt, Artificial Sequence
  Description of Artificial Sequence: Synthetic oligonucleotide
  Antisense strand to SEQ ID NO: 2212228
aaacaccaggaacacuucu

SEQ ID NO: 2212230 - RNA, 19 nt, Artificial Sequence
  Description of Artificial Sequence: Synthetic oligonucleotide
  Sense strand starting at position 2851 of SEQ ID NO: 1883730
gugugcuuuggauggaguu

SEQ ID NO: 2212231 - RNA, 19 nt, Artificial Sequence
  Description of Artificial Sequence: Synthetic oligonucleotide
  Antisense strand to SEQ ID NO: 2212230
aacuccauccaaagcacac

SEQ ID NO: 2212232 - RNA, 19 nt, Artificial Sequence
  Description of Artificial Sequence: Synthetic oligonucleotide
  Sense strand starting at position 3224 of SEQ ID NO: 1883730
cauggugugugcuuuagau

SEQ ID NO: 2212233 - RNA, 19 nt, Artificial Sequence
  Description of Artificial Sequence: Synthetic oligonucleotide
  Antisense strand to SEQ ID NO: 2212232
aucuaaagcacacaccaug

SEQ ID NO: 2212234 - RNA, 19 nt, Artificial Sequence
  Description of Artificial Sequence: Synthetic oligonucleotide
  Sense strand starting at position 3960 of SEQ ID NO: 1883730
gugugcuuuagaugaagcu

SEQ ID NO: 2212235 - RNA, 19 nt, Artificial Sequence
  Description of Artificial Sequence: Synthetic oligonucleotide
  Antisense strand to SEQ ID NO: 2212234
agcuucaucuaaagcacac

SEQ ID NO: 2212236 - RNA, 19 nt, Artificial Sequence
  Description of Artificial Sequence: Synthetic oligonucleotide
  Sense strand starting at position 3488 of SEQ ID NO: 1883730
gugugcuuuacauggaguu

SEQ ID NO: 2212237 - RNA, 19 nt, Artificial Sequence
  Description of Artificial Sequence: Synthetic oligonucleotide
  Antisense strand to SEQ ID NO: 2212236
aacuccauguaaagcacac

SEQ ID NO: 2212238 - RNA, 19 nt, Artificial Sequence
  Description of Artificial Sequence: Synthetic oligonucleotide
  Sense strand starting at position 2401 of SEQ ID NO: 1883730
gcagaaguguuccuggugu

SEQ ID NO: 2212239 - RNA, 19 nt, Artificial Sequence
  Description of Artificial Sequence: Synthetic oligonucleotide
  Antisense strand to SEQ ID NO: 2212238
acaccaggaacacuucugc

SEQ ID NO: 2212240 - RNA, 19 nt, Artificial Sequence
  Description of Artificial Sequence: Synthetic oligonucleotide
  Sense strand starting at position 3014 of SEQ ID NO: 1883730
uagcauuaugugugcuuua

SEQ ID NO: 2212241 - RNA, 19 nt, Artificial Sequence
  Description of Artificial Sequence: Synthetic oligonucleotide
  Antisense strand to SEQ ID NO: 2212240
uaaagcacacauaaugcua

SEQ ID NO: 2212242 - RNA, 19 nt, Artificial Sequence
  Description of Artificial Sequence: Synthetic oligonucleotide
  Sense strand starting at position 1736 of SEQ ID NO: 1883730
caggaagcaugguaucaca

SEQ ID NO: 2212243 - RNA, 19 nt, Artificial Sequence
  Description of Artificial Sequence: Synthetic oligonucleotide
  Antisense strand to SEQ ID NO: 2212242
ugugauaccaugcuuccug

SEQ ID NO: 2212244 - RNA, 19 nt, Artificial Sequence
  Description of Artificial Sequence: Synthetic oligonucleotide
  Sense strand starting at position 2803 of SEQ ID NO: 1883730
caacguucugcaugcuuua

SEQ ID NO: 2212245 - RNA, 19 nt, Artificial Sequence
  Description of Artificial Sequence: Synthetic oligonucleotide
  Antisense strand to SEQ ID NO: 2212244
uaaagcaugcagaacguug

SEQ ID NO: 2212246 - RNA, 19 nt, Artificial Sequence
  Description of Artificial Sequence: Synthetic oligonucleotide
  Sense strand starting at position 2777 of SEQ ID NO: 1883730
ugaauaaaguuagaggugu

SEQ ID NO: 2212247 - RNA, 19 nt, Artificial Sequence
  Description of Artificial Sequence: Synthetic oligonucleotide
  Antisense strand to SEQ ID NO: 2212246
acaccucuaacuuuauuca

SEQ ID NO: 2212248 - RNA, 19 nt, Artificial Sequence
  Description of Artificial Sequence: Synthetic oligonucleotide
  Sense strand starting at position 3049 of SEQ ID NO: 1883730
gguagcauuguguguacuu

SEQ ID NO: 2212249 - RNA, 19 nt, Artificial Sequence
  Description of Artificial Sequence: Synthetic oligonucleotide
  Antisense strand to SEQ ID NO: 2212248
aaguacacacaaugcuacc

SEQ ID NO: 2212250 - RNA, 19 nt, Artificial Sequence
  Description of Artificial Sequence: Synthetic oligonucleotide
  Sense strand starting at position 3050 of SEQ ID NO: 1883730
guagcauuguguguacuuu

SEQ ID NO: 2212251 - RNA, 19 nt, Artificial Sequence
  Description of Artificial Sequence: Synthetic oligonucleotide
  Antisense strand to SEQ ID NO: 2212250
aaaguacacacaaugcuac

SEQ ID NO: 2212252 - RNA, 19 nt, Artificial Sequence
  Description of Artificial Sequence: Synthetic oligonucleotide
  Sense strand starting at position 2931 of SEQ ID NO: 1883730
caucgugugugcuuuagau

SEQ ID NO: 2212253 - RNA, 19 nt, Artificial Sequence
  Description of Artificial Sequence: Synthetic oligonucleotide
  Antisense strand to SEQ ID NO: 2212252
aucuaaagcacacacgaug

SEQ ID NO: 2212254 - RNA, 19 nt, Artificial Sequence
  Description of Artificial Sequence: Synthetic oligonucleotide
  Sense strand starting at position 2369 of SEQ ID NO: 1883730
acagguucuuaaugggaca

SEQ ID NO: 2212255 - RNA, 19 nt, Artificial Sequence
  Description of Artificial Sequence: Synthetic oligonucleotide
  Antisense strand to SEQ ID NO: 2212254
ugucccauuaagaaccugu

SEQ ID NO: 2212256 - RNA, 19 nt, Artificial Sequence
  Description of Artificial Sequence: Synthetic oligonucleotide
  Sense strand starting at position 3221 of SEQ ID NO: 1883730
uagcauggugugugcuuua

SEQ ID NO: 2212257 - RNA, 19 nt, Artificial Sequence
  Description of Artificial Sequence: Synthetic oligonucleotide
  Antisense strand to SEQ ID NO: 2212256
uaaagcacacaccaugcua

SEQ ID NO: 2212258 - RNA, 19 nt, Artificial Sequence
  Description of Artificial Sequence: Synthetic oligonucleotide
  Sense strand starting at position 3012 of SEQ ID NO: 1883730
gguagcauuaugugugcuu

SEQ ID NO: 2212259 - RNA, 19 nt, Artificial Sequence
  Description of Artificial Sequence: Synthetic oligonucleotide
  Antisense strand to SEQ ID NO: 2212258
aagcacacauaaugcuacc

SEQ ID NO: 2212260 - RNA, 19 nt, Artificial Sequence
  Description of Artificial Sequence: Synthetic oligonucleotide
  Sense strand starting at position 3013 of SEQ ID NO: 1883730
guagcauuaugugugcuuu

SEQ ID NO: 2212261 - RNA, 19 nt, Artificial Sequence
  Description of Artificial Sequence: Synthetic oligonucleotide
  Antisense strand to SEQ ID NO: 2212260
aaagcacacauaaugcuac

SEQ ID NO: 2212262 - RNA, 19 nt, Artificial Sequence
  Description of Artificial Sequence: Synthetic oligonucleotide
  Sense strand starting at position 2743 of SEQ ID NO: 1883730
acuuaaacguccugaagag

SEQ ID NO: 2212263 - RNA, 19 nt, Artificial Sequence
  Description of Artificial Sequence: Synthetic oligonucleotide
  Antisense strand to SEQ ID NO: 2212262
cucuucaggacguuuaagu

SEQ ID NO: 2212264 - RNA, 19 nt, Artificial Sequence
  Description of Artificial Sequence: Synthetic oligonucleotide
  Sense strand starting at position 2405 of SEQ ID NO: 1883730
aaguguuccugguguuucu

SEQ ID NO: 2212265 - RNA, 19 nt, Artificial Sequence
  Description of Artificial Sequence: Synthetic oligonucleotide
  Antisense strand to SEQ ID NO: 2212264
agaaacaccaggaacacuu

SEQ ID NO: 2212266 - RNA, 19 nt, Artificial Sequence
  Description of Artificial Sequence: Synthetic oligonucleotide
  Sense strand starting at position 2895 of SEQ ID NO: 1883731
uguacuuuagauggagaug

SEQ ID NO: 2212267 - RNA, 19 nt, Artificial Sequence
  Description of Artificial Sequence: Synthetic oligonucleotide
  Antisense strand to SEQ ID NO: 2212266
caucuccaucuaaaguaca

SEQ ID NO: 2212268 - RNA, 19 nt, Artificial Sequence
  Description of Artificial Sequence: Synthetic oligonucleotide
  Sense strand starting at position 2894 of SEQ ID NO: 1883731
guguacuuuagauggagau

SEQ ID NO: 2212269 - RNA, 19 nt, Artificial Sequence
  Description of Artificial Sequence: Synthetic oligonucleotide
  Antisense strand to SEQ ID NO: 2212268
aucuccaucuaaaguacac

SEQ ID NO: 2212270 - RNA, 19 nt, Artificial Sequence
  Description of Artificial Sequence: Synthetic oligonucleotide
  Sense strand starting at position 2648 of SEQ ID NO: 1883731
augcuuuagaguuacaggu

SEQ ID NO: 2212271 - RNA, 19 nt, Artificial Sequence
  Description of Artificial Sequence: Synthetic oligonucleotide
  Antisense strand to SEQ ID NO: 2212270
accuguaacucuaaagcau

SEQ ID NO: 2212272 - RNA, 19 nt, Artificial Sequence
  Description of Artificial Sequence: Synthetic oligonucleotide
  Sense strand starting at position 3453 of SEQ ID NO: 1883731
gugcuuuacauggaguuga

SEQ ID NO: 2212273 - RNA, 19 nt, Artificial Sequence
  Description of Artificial Sequence: Synthetic oligonucleotide
  Antisense strand to SEQ ID NO: 2212272
ucaacuccauguaaagcac

SEQ ID NO: 2212274 - RNA, 19 nt, Artificial Sequence
  Description of Artificial Sequence: Synthetic oligonucleotide
  Sense strand starting at position 2503 of SEQ ID NO: 1883731
cccgcacuucugcaggaaa

SEQ ID NO: 2212275 - RNA, 19 nt, Artificial Sequence
  Description of Artificial Sequence: Synthetic oligonucleotide
  Antisense strand to SEQ ID NO: 2212274
uuuccugcagaagugcggg

SEQ ID NO: 2212276 - RNA, 19 nt, Artificial Sequence
  Description of Artificial Sequence: Synthetic oligonucleotide
  Sense strand starting at position 3580 of SEQ ID NO: 1883731
guguacuuuagauggaguu

SEQ ID NO: 2212277 - RNA, 19 nt, Artificial Sequence
  Description of Artificial Sequence: Synthetic oligonucleotide
  Antisense strand to SEQ ID NO: 2212276
aacuccaucuaaaguacac

SEQ ID NO: 2212278 - RNA, 19 nt, Artificial Sequence
  Description of Artificial Sequence: Synthetic oligonucleotide
  Sense strand starting at position 2617 of SEQ ID NO: 1883731
aaguuagaggugugcacau

SEQ ID NO: 2212279 - RNA, 19 nt, Artificial Sequence
  Description of Artificial Sequence: Synthetic oligonucleotide
  Antisense strand to SEQ ID NO: 2212278
augugcacaccucuaacuu

SEQ ID NO: 2212280 - RNA, 19 nt, Artificial Sequence
  Description of Artificial Sequence: Synthetic oligonucleotide
  Sense strand starting at position 2815 of SEQ ID NO: 1883731
ugugcuuuagauggaguua

SEQ ID NO: 2212281 - RNA, 19 nt, Artificial Sequence
  Description of Artificial Sequence: Synthetic oligonucleotide
  Antisense strand to SEQ ID NO: 2212280
uaacuccaucuaaagcaca

SEQ ID NO: 2212282 - RNA, 19 nt, Artificial Sequence
  Description of Artificial Sequence: Synthetic oligonucleotide
  Sense strand starting at position 2888 of SEQ ID NO: 1883731
cauuguguguacuuuagau

SEQ ID NO: 2212283 - RNA, 19 nt, Artificial Sequence
  Description of Artificial Sequence: Synthetic oligonucleotide
  Antisense strand to SEQ ID NO: 2212282
aucuaaaguacacacaaug

SEQ ID NO: 2212284 - RNA, 19 nt, Artificial Sequence
  Description of Artificial Sequence: Synthetic oligonucleotide
  Sense strand starting at position 2642 of SEQ ID NO: 1883731
uucugcaugcuuuagaguu

SEQ ID NO: 2212285 - RNA, 19 nt, Artificial Sequence
  Description of Artificial Sequence: Synthetic oligonucleotide
  Antisense strand to SEQ ID NO: 2212284
aacucuaaagcaugcagaa

SEQ ID NO: 2212286 - RNA, 19 nt, Artificial Sequence
  Description of Artificial Sequence: Synthetic oligonucleotide
  Sense strand starting at position 2885 of SEQ ID NO: 1883731
uagcauuguguguacuuua

SEQ ID NO: 2212287 - RNA, 19 nt, Artificial Sequence
  Description of Artificial Sequence: Synthetic oligonucleotide
  Antisense strand to SEQ ID NO: 2212286
uaaaguacacacaaugcua

SEQ ID NO: 2212288 - RNA, 19 nt, Artificial Sequence
  Description of Artificial Sequence: Synthetic oligonucleotide
  Sense strand starting at position 2851 of SEQ ID NO: 1883731
cauuaugugugcuuuagau

SEQ ID NO: 2212289 - RNA, 19 nt, Artificial Sequence
  Description of Artificial Sequence: Synthetic oligonucleotide
  Antisense strand to SEQ ID NO: 2212288
aucuaaagcacacauaaug

SEQ ID NO: 2212290 - RNA, 19 nt, Artificial Sequence
  Description of Artificial Sequence: Synthetic oligonucleotide
  Sense strand starting at position 2857 of SEQ ID NO: 1883731
gugugcuuuagauggaggu

SEQ ID NO: 2212291 - RNA, 19 nt, Artificial Sequence
  Description of Artificial Sequence: Synthetic oligonucleotide
  Antisense strand to SEQ ID NO: 2212290
accuccaucuaaagcacac

SEQ ID NO: 2212292 - RNA, 19 nt, Artificial Sequence
  Description of Artificial Sequence: Synthetic oligonucleotide
  Sense strand starting at position 2980 of SEQ ID NO: 1883731
gugugcuuuaaauggaguu

SEQ ID NO: 2212293 - RNA, 19 nt, Artificial Sequence
  Description of Artificial Sequence: Synthetic oligonucleotide
  Antisense strand to SEQ ID NO: 2212292
aacuccauuuaaagcacac

SEQ ID NO: 2212294 - RNA, 19 nt, Artificial Sequence
  Description of Artificial Sequence: Synthetic oligonucleotide
  Sense strand starting at position 3494 of SEQ ID NO: 1883731
gugugcuuuagaugaaguu

SEQ ID NO: 2212295 - RNA, 19 nt, Artificial Sequence
  Description of Artificial Sequence: Synthetic oligonucleotide
  Antisense strand to SEQ ID NO: 2212294
aacuucaucuaaagcacac

SEQ ID NO: 2212296 - RNA, 19 nt, Artificial Sequence
  Description of Artificial Sequence: Synthetic oligonucleotide
  Sense strand starting at position 2237 of SEQ ID NO: 1883731
agaaguguuccugguguuu

SEQ ID NO: 2212297 - RNA, 19 nt, Artificial Sequence
  Description of Artificial Sequence: Synthetic oligonucleotide
  Antisense strand to SEQ ID NO: 2212296
aaacaccaggaacacuucu

SEQ ID NO: 2212298 - RNA, 19 nt, Artificial Sequence
  Description of Artificial Sequence: Synthetic oligonucleotide
  Sense strand starting at position 2728 of SEQ ID NO: 1883731
gugugcuuuagauggaguu

SEQ ID NO: 2212299 - RNA, 19 nt, Artificial Sequence
  Description of Artificial Sequence: Synthetic oligonucleotide
  Antisense strand to SEQ ID NO: 2212298
aacuccaucuaaagcacac

SEQ ID NO: 2212300 - RNA, 19 nt, Artificial Sequence
  Description of Artificial Sequence: Synthetic oligonucleotide
  Sense strand starting at position 2685 of SEQ ID NO: 1883731
gugugcuuuggauggaguu

SEQ ID NO: 2212301 - RNA, 19 nt, Artificial Sequence
  Description of Artificial Sequence: Synthetic oligonucleotide
  Antisense strand to SEQ ID NO: 2212300
aacuccauccaaagcacac

SEQ ID NO: 2212302 - RNA, 19 nt, Artificial Sequence
  Description of Artificial Sequence: Synthetic oligonucleotide
  Sense strand starting at position 3058 of SEQ ID NO: 1883731
cauggugugugcuuuagau

SEQ ID NO: 2212303 - RNA, 19 nt, Artificial Sequence
  Description of Artificial Sequence: Synthetic oligonucleotide
  Antisense strand to SEQ ID NO: 2212302
aucuaaagcacacaccaug

SEQ ID NO: 2212304 - RNA, 19 nt, Artificial Sequence
  Description of Artificial Sequence: Synthetic oligonucleotide
  Sense strand starting at position 3794 of SEQ ID NO: 1883731
gugugcuuuagaugaagcu

SEQ ID NO: 2212305 - RNA, 19 nt, Artificial Sequence
  Description of Artificial Sequence: Synthetic oligonucleotide
  Antisense strand to SEQ ID NO: 2212304
agcuucaucuaaagcacac

SEQ ID NO: 2212306 - RNA, 19 nt, Artificial Sequence
  Description of Artificial Sequence: Synthetic oligonucleotide
  Sense strand starting at position 3322 of SEQ ID NO: 1883731
gugugcuuuacauggaguu

SEQ ID NO: 2212307 - RNA, 19 nt, Artificial Sequence
  Description of Artificial Sequence: Synthetic oligonucleotide
  Antisense strand to SEQ ID NO: 2212306
aacuccauguaaagcacac

SEQ ID NO: 2212308 - RNA, 19 nt, Artificial Sequence
  Description of Artificial Sequence: Synthetic oligonucleotide
  Sense strand starting at position 2235 of SEQ ID NO: 1883731
gcagaaguguuccuggugu

SEQ ID NO: 2212309 - RNA, 19 nt, Artificial Sequence
  Description of Artificial Sequence: Synthetic oligonucleotide
  Antisense strand to SEQ ID NO: 2212308
acaccaggaacacuucugc

SEQ ID NO: 2212310 - RNA, 19 nt, Artificial Sequence
  Description of Artificial Sequence: Synthetic oligonucleotide
  Sense strand starting at position 2848 of SEQ ID NO: 1883731
uagcauuaugugugcuuua

SEQ ID NO: 2212311 - RNA, 19 nt, Artificial Sequence
  Description of Artificial Sequence: Synthetic oligonucleotide
  Antisense strand to SEQ ID NO: 2212310
uaaagcacacauaaugcua

SEQ ID NO: 2212312 - RNA, 19 nt, Artificial Sequence
  Description of Artificial Sequence: Synthetic oligonucleotide
  Sense strand starting at position 1570 of SEQ ID NO: 1883731
caggaagcaugguaucaca

SEQ ID NO: 2212313 - RNA, 19 nt, Artificial Sequence
  Description of Artificial Sequence: Synthetic oligonucleotide
  Antisense strand to SEQ ID NO: 2212312
ugugauaccaugcuuccug

SEQ ID NO: 2212314 - RNA, 19 nt, Artificial Sequence
  Description of Artificial Sequence: Synthetic oligonucleotide
  Sense strand starting at position 3966 of SEQ ID NO: 1883731
gugugcuuuagguggaguu

SEQ ID NO: 2212315 - RNA, 19 nt, Artificial Sequence
  Description of Artificial Sequence: Synthetic oligonucleotide
  Antisense strand to SEQ ID NO: 2212314
aacuccaccuaaagcacac

SEQ ID NO: 2212316 - RNA, 19 nt, Artificial Sequence
  Description of Artificial Sequence: Synthetic oligonucleotide
  Sense strand starting at position 2637 of SEQ ID NO: 1883731
caacguucugcaugcuuua

SEQ ID NO: 2212317 - RNA, 19 nt, Artificial Sequence
  Description of Artificial Sequence: Synthetic oligonucleotide
  Antisense strand to SEQ ID NO: 2212316
uaaagcaugcagaacguug

SEQ ID NO: 2212318 - RNA, 19 nt, Artificial Sequence
  Description of Artificial Sequence: Synthetic oligonucleotide
  Sense strand starting at position 2611 of SEQ ID NO: 1883731
ugaauaaaguuagaggugu

SEQ ID NO: 2212319 - RNA, 19 nt, Artificial Sequence
  Description of Artificial Sequence: Synthetic oligonucleotide
  Antisense strand to SEQ ID NO: 2212318
acaccucuaacuuuauuca

SEQ ID NO: 2212320 - RNA, 19 nt, Artificial Sequence
  Description of Artificial Sequence: Synthetic oligonucleotide
  Sense strand starting at position 2883 of SEQ ID NO: 1883731
gguagcauuguguguacuu

SEQ ID NO: 2212321 - RNA, 19 nt, Artificial Sequence
  Description of Artificial Sequence: Synthetic oligonucleotide
  Antisense strand to SEQ ID NO: 2212320
aaguacacacaaugcuacc

SEQ ID NO: 2212322 - RNA, 19 nt, Artificial Sequence
  Description of Artificial Sequence: Synthetic oligonucleotide
  Sense strand starting at position 2884 of SEQ ID NO: 1883731
guagcauuguguguacuuu

SEQ ID NO: 2212323 - RNA, 19 nt, Artificial Sequence
  Description of Artificial Sequence: Synthetic oligonucleotide
  Antisense strand to SEQ ID NO: 2212322
aaaguacacacaaugcuac

SEQ ID NO: 2212324 - RNA, 19 nt, Artificial Sequence
  Description of Artificial Sequence: Synthetic oligonucleotide
  Sense strand starting at position 2765 of SEQ ID NO: 1883731
caucgugugugcuuuagau

SEQ ID NO: 2212325 - RNA, 19 nt, Artificial Sequence
  Description of Artificial Sequence: Synthetic oligonucleotide
  Antisense strand to SEQ ID NO: 2212324
aucuaaagcacacacgaug

SEQ ID NO: 2212326 - RNA, 19 nt, Artificial Sequence
  Description of Artificial Sequence: Synthetic oligonucleotide
  Sense strand starting at position 2203 of SEQ ID NO: 1883731
acagguucuuaaugggaca

SEQ ID NO: 2212327 - RNA, 19 nt, Artificial Sequence
  Description of Artificial Sequence: Synthetic oligonucleotide
  Antisense strand to SEQ ID NO: 2212326
ugucccauuaagaaccugu

SEQ ID NO: 2212328 - RNA, 19 nt, Artificial Sequence
  Description of Artificial Sequence: Synthetic oligonucleotide
  Sense strand starting at position 2846 of SEQ ID NO: 1883731
gguagcauuaugugugcuu

SEQ ID NO: 2212329 - RNA, 19 nt, Artificial Sequence
  Description of Artificial Sequence: Synthetic oligonucleotide
  Antisense strand to SEQ ID NO: 2212328
aagcacacauaaugcuacc

SEQ ID NO: 2212330 - RNA, 19 nt, Artificial Sequence
  Description of Artificial Sequence: Synthetic oligonucleotide
  Sense strand starting at position 3055 of SEQ ID NO: 1883731
uagcauggugugugcuuua

SEQ ID NO: 2212331 - RNA, 19 nt, Artificial Sequence
  Description of Artificial Sequence: Synthetic oligonucleotide
  Antisense strand to SEQ ID NO: 2212330
uaaagcacacaccaugcua

SEQ ID NO: 2212332 - RNA, 19 nt, Artificial Sequence
  Description of Artificial Sequence: Synthetic oligonucleotide
  Sense strand starting at position 2847 of SEQ ID NO: 1883731
guagcauuaugugugcuuu

SEQ ID NO: 2212333 - RNA, 19 nt, Artificial Sequence
  Description of Artificial Sequence: Synthetic oligonucleotide
  Antisense strand to SEQ ID NO: 2212332
aaagcacacauaaugcuac

SEQ ID NO: 2212334 - RNA, 19 nt, Artificial Sequence
  Description of Artificial Sequence: Synthetic oligonucleotide
  Sense strand starting at position 2577 of SEQ ID NO: 1883731
acuuaaacguccugaagag

SEQ ID NO: 2212335 - RNA, 19 nt, Artificial Sequence
  Description of Artificial Sequence: Synthetic oligonucleotide
  Antisense strand to SEQ ID NO: 2212334
cucuucaggacguuuaagu

SEQ ID NO: 2212336 - RNA, 19 nt, Artificial Sequence
  Description of Artificial Sequence: Synthetic oligonucleotide
  Sense strand starting at position 2762 of SEQ ID NO: 1883731
uagcaucgugugugcuuua

SEQ ID NO: 2212337 - RNA, 19 nt, Artificial Sequence
  Description of Artificial Sequence: Synthetic oligonucleotide
  Antisense strand to SEQ ID NO: 2212336
uaaagcacacacgaugcua

SEQ ID NO: 2212338 - RNA, 19 nt, Artificial Sequence
  Description of Artificial Sequence: Synthetic oligonucleotide
  Sense strand starting at position 2760 of SEQ ID NO: 1883731
gguagcaucgugugugcuu

SEQ ID NO: 2212339 - RNA, 19 nt, Artificial Sequence
  Description of Artificial Sequence: Synthetic oligonucleotide
  Antisense strand to SEQ ID NO: 2212338
aagcacacacgaugcuacc

SEQ ID NO: 2212340 - RNA, 19 nt, Artificial Sequence
  Description of Artificial Sequence: Synthetic oligonucleotide
  Sense strand starting at position 3492 of SEQ ID NO: 1883731
gugugugcuuuagaugaag

SEQ ID NO: 2212341 - RNA, 19 nt, Artificial Sequence
  Description of Artificial Sequence: Synthetic oligonucleotide
  Antisense strand to SEQ ID NO: 2212340
cuucaucuaaagcacacac

SEQ ID NO: 2212342 - RNA, 19 nt, Artificial Sequence
  Description of Artificial Sequence: Synthetic oligonucleotide
  Sense strand starting at position 2761 of SEQ ID NO: 1883731
guagcaucgugugugcuuu

SEQ ID NO: 2212343 - RNA, 19 nt, Artificial Sequence
  Description of Artificial Sequence: Synthetic oligonucleotide
  Antisense strand to SEQ ID NO: 2212342
aaagcacacacgaugcuac

SEQ ID NO: 2212344 - RNA, 19 nt, Artificial Sequence
  Description of Artificial Sequence: Synthetic oligonucleotide
  Sense strand starting at position 2239 of SEQ ID NO: 1883731
aaguguuccugguguuucu

SEQ ID NO: 2212345 - RNA, 19 nt, Artificial Sequence
  Description of Artificial Sequence: Synthetic oligonucleotide
  Antisense strand to SEQ ID NO: 2212344
agaaacaccaggaacacuu

SEQ ID NO: 2212346 - RNA, 19 nt, Artificial Sequence
  Description of Artificial Sequence: Synthetic oligonucleotide
  Sense strand starting at position 957 of SEQ ID NO: 1883732
ggaacaaacuacuuauggu

SEQ ID NO: 2212347 - RNA, 19 nt, Artificial Sequence
  Description of Artificial Sequence: Synthetic oligonucleotide
  Antisense strand to SEQ ID NO: 2212346
accauaaguaguuuguucc

SEQ ID NO: 2212348 - RNA, 19 nt, Artificial Sequence
  Description of Artificial Sequence: Synthetic oligonucleotide
  Sense strand starting at position 337 of SEQ ID NO: 1883732
ggcuuugauuuacuucuuu

SEQ ID NO: 2212349 - RNA, 19 nt, Artificial Sequence
  Description of Artificial Sequence: Synthetic oligonucleotide
  Antisense strand to SEQ ID NO: 2212348
aaagaaguaaaucaaagcc

SEQ ID NO: 2212350 - RNA, 19 nt, Artificial Sequence
  Description of Artificial Sequence: Synthetic oligonucleotide
  Sense strand starting at position 448 of SEQ ID NO: 1883732
auaucucuggauuagucua

SEQ ID NO: 2212351 - RNA, 19 nt, Artificial Sequence
  Description of Artificial Sequence: Synthetic oligonucleotide
  Antisense strand to SEQ ID NO: 2212350
uagacuaauccagagauau

SEQ ID NO: 2212352 - RNA, 19 nt, Artificial Sequence
  Description of Artificial Sequence: Synthetic oligonucleotide
  Sense strand starting at position 1885 of SEQ ID NO: 1883732
gagaaacuucugugaucaa

SEQ ID NO: 2212353 - RNA, 19 nt, Artificial Sequence
  Description of Artificial Sequence: Synthetic oligonucleotide
  Antisense strand to SEQ ID NO: 2212352
uugaucacagaaguuucuc

SEQ ID NO: 2212354 - RNA, 19 nt, Artificial Sequence
  Description of Artificial Sequence: Synthetic oligonucleotide
  Sense strand starting at position 964 of SEQ ID NO: 1883732
acuacuuaugguggaacaa

SEQ ID NO: 2212355 - RNA, 19 nt, Artificial Sequence
  Description of Artificial Sequence: Synthetic oligonucleotide
  Antisense strand to SEQ ID NO: 2212354
uuguuccaccauaaguagu

SEQ ID NO: 2212356 - RNA, 19 nt, Artificial Sequence
  Description of Artificial Sequence: Synthetic oligonucleotide
  Sense strand starting at position 1884 of SEQ ID NO: 1883732
ggagaaacuucugugauca

SEQ ID NO: 2212357 - RNA, 19 nt, Artificial Sequence
  Description of Artificial Sequence: Synthetic oligonucleotide
  Antisense strand to SEQ ID NO: 2212356
ugaucacagaaguuucucc

SEQ ID NO: 2212358 - RNA, 19 nt, Artificial Sequence
  Description of Artificial Sequence: Synthetic oligonucleotide
  Sense strand starting at position 23 of SEQ ID NO: 1883732
agaggaauugcccaguuua

SEQ ID NO: 2212359 - RNA, 19 nt, Artificial Sequence
  Description of Artificial Sequence: Synthetic oligonucleotide
  Antisense strand to SEQ ID NO: 2212358
uaaacugggcaauuccucu

SEQ ID NO: 2212360 - RNA, 19 nt, Artificial Sequence
  Description of Artificial Sequence: Synthetic oligonucleotide
  Sense strand starting at position 1789 of SEQ ID NO: 1883732
agacuaauguucucaacag

SEQ ID NO: 2212361 - RNA, 19 nt, Artificial Sequence
  Description of Artificial Sequence: Synthetic oligonucleotide
  Antisense strand to SEQ ID NO: 2212360
cuguugagaacauuagucu

SEQ ID NO: 2212362 - RNA, 19 nt, Artificial Sequence
  Description of Artificial Sequence: Synthetic oligonucleotide
  Sense strand starting at position 2633 of SEQ ID NO: 1883732
ggaaauucccagggcugaa

SEQ ID NO: 2212363 - RNA, 19 nt, Artificial Sequence
  Description of Artificial Sequence: Synthetic oligonucleotide
  Antisense strand to SEQ ID NO: 2212362
uucagcccugggaauuucc

SEQ ID NO: 2212364 - RNA, 19 nt, Artificial Sequence
  Description of Artificial Sequence: Synthetic oligonucleotide
  Sense strand starting at position 2632 of SEQ ID NO: 1883732
aggaaauucccagggcuga

SEQ ID NO: 2212365 - RNA, 19 nt, Artificial Sequence
  Description of Artificial Sequence: Synthetic oligonucleotide
  Antisense strand to SEQ ID NO: 2212364
ucagcccugggaauuuccu

SEQ ID NO: 2212366 - RNA, 19 nt, Artificial Sequence
  Description of Artificial Sequence: Synthetic oligonucleotide
  Sense strand starting at position 3562 of SEQ ID NO: 1883732
gugaccaaaugaucaagua

SEQ ID NO: 2212367 - RNA, 19 nt, Artificial Sequence
  Description of Artificial Sequence: Synthetic oligonucleotide
  Antisense strand to SEQ ID NO: 2212366
uacuugaucauuuggucac

SEQ ID NO: 2212368 - RNA, 19 nt, Artificial Sequence
  Description of Artificial Sequence: Synthetic oligonucleotide
  Sense strand starting at position 594 of SEQ ID NO: 1883732
gaauaaaguuuaucaggua

SEQ ID NO: 2212369 - RNA, 19 nt, Artificial Sequence
  Description of Artificial Sequence: Synthetic oligonucleotide
  Antisense strand to SEQ ID NO: 2212368
uaccugauaaacuuuauuc

SEQ ID NO: 2212370 - RNA, 19 nt, Artificial Sequence
  Description of Artificial Sequence: Synthetic oligonucleotide
  Sense strand starting at position 3786 of SEQ ID NO: 1883732
aggauauagcuauagcuau

SEQ ID NO: 2212371 - RNA, 19 nt, Artificial Sequence
  Description of Artificial Sequence: Synthetic oligonucleotide
  Antisense strand to SEQ ID NO: 2212370
auagcuauagcuauauccu

SEQ ID NO: 2212372 - RNA, 19 nt, Artificial Sequence
  Description of Artificial Sequence: Synthetic oligonucleotide
  Sense strand starting at position 3852 of SEQ ID NO: 1883732
gacuucuuuguggaaagug

SEQ ID NO: 2212373 - RNA, 19 nt, Artificial Sequence
  Description of Artificial Sequence: Synthetic oligonucleotide
  Antisense strand to SEQ ID NO: 2212372
cacuuuccacaaagaaguc

SEQ ID NO: 2212374 - RNA, 19 nt, Artificial Sequence
  Description of Artificial Sequence: Synthetic oligonucleotide
  Sense strand starting at position 3645 of SEQ ID NO: 1883732
gugagcuugccugccuuua

SEQ ID NO: 2212375 - RNA, 19 nt, Artificial Sequence
  Description of Artificial Sequence: Synthetic oligonucleotide
  Antisense strand to SEQ ID NO: 2212374
uaaaggcaggcaagcucac

SEQ ID NO: 2212376 - RNA, 19 nt, Artificial Sequence
  Description of Artificial Sequence: Synthetic oligonucleotide
  Sense strand starting at position 453 of SEQ ID NO: 1883732
ucuggauuagucuacuuau

SEQ ID NO: 2212377 - RNA, 19 nt, Artificial Sequence
  Description of Artificial Sequence: Synthetic oligonucleotide
  Antisense strand to SEQ ID NO: 2212376
auaaguagacuaauccaga

SEQ ID NO: 2212378 - RNA, 19 nt, Artificial Sequence
  Description of Artificial Sequence: Synthetic oligonucleotide
  Sense strand starting at position 405 of SEQ ID NO: 1883732
guuaaacuucugggaucaa

SEQ ID NO: 2212379 - RNA, 19 nt, Artificial Sequence
  Description of Artificial Sequence: Synthetic oligonucleotide
  Antisense strand to SEQ ID NO: 2212378
uugaucccagaaguuuaac

SEQ ID NO: 2212380 - RNA, 19 nt, Artificial Sequence
  Description of Artificial Sequence: Synthetic oligonucleotide
  Sense strand starting at position 3515 of SEQ ID NO: 1883732
uuaacagauuaucuguuga

SEQ ID NO: 2212381 - RNA, 19 nt, Artificial Sequence
  Description of Artificial Sequence: Synthetic oligonucleotide
  Antisense strand to SEQ ID NO: 2212380
ucaacagauaaucuguuaa

SEQ ID NO: 2212382 - RNA, 19 nt, Artificial Sequence
  Description of Artificial Sequence: Synthetic oligonucleotide
  Sense strand starting at position 1443 of SEQ ID NO: 1883732
cuguguuaccuacaaauua

SEQ ID NO: 2212383 - RNA, 19 nt, Artificial Sequence
  Description of Artificial Sequence: Synthetic oligonucleotide
  Antisense strand to SEQ ID NO: 2212382
uaauuuguagguaacacag

SEQ ID NO: 2212384 - RNA, 19 nt, Artificial Sequence
  Description of Artificial Sequence: Synthetic oligonucleotide
  Sense strand starting at position 2690 of SEQ ID NO: 1883732
gagugcagugaaugagaaa

SEQ ID NO: 2212385 - RNA, 19 nt, Artificial Sequence
  Description of Artificial Sequence: Synthetic oligonucleotide
  Antisense strand to SEQ ID NO: 2212384
uuucucauucacugcacuc

SEQ ID NO: 2212386 - RNA, 19 nt, Artificial Sequence
  Description of Artificial Sequence: Synthetic oligonucleotide
  Sense strand starting at position 3823 of SEQ ID NO: 1883732
gguaucuauccuugauaaa

SEQ ID NO: 2212387 - RNA, 19 nt, Artificial Sequence
  Description of Artificial Sequence: Synthetic oligonucleotide
  Antisense strand to SEQ ID NO: 2212386
uuuaucaaggauagauacc

SEQ ID NO: 2212388 - RNA, 19 nt, Artificial Sequence
  Description of Artificial Sequence: Synthetic oligonucleotide
  Sense strand starting at position 759 of SEQ ID NO: 1883732
ggccuagaccucugaggag

SEQ ID NO: 2212389 - RNA, 19 nt, Artificial Sequence
  Description of Artificial Sequence: Synthetic oligonucleotide
  Antisense strand to SEQ ID NO: 2212388
cuccucagaggucuaggcc

SEQ ID NO: 2212390 - RNA, 19 nt, Artificial Sequence
  Description of Artificial Sequence: Synthetic oligonucleotide
  Sense strand starting at position 581 of SEQ ID NO: 1883732
ucuuguuaaguaggaauaa

SEQ ID NO: 2212391 - RNA, 19 nt, Artificial Sequence
  Description of Artificial Sequence: Synthetic oligonucleotide
  Antisense strand to SEQ ID NO: 2212390
uuauuccuacuuaacaaga

SEQ ID NO: 2212392 - RNA, 19 nt, Artificial Sequence
  Description of Artificial Sequence: Synthetic oligonucleotide
  Sense strand starting at position 2177 of SEQ ID NO: 1883732
caaugagcuccuuagaguc

SEQ ID NO: 2212393 - RNA, 19 nt, Artificial Sequence
  Description of Artificial Sequence: Synthetic oligonucleotide
  Antisense strand to SEQ ID NO: 2212392
gacucuaaggagcucauug

SEQ ID NO: 2212394 - RNA, 19 nt, Artificial Sequence
  Description of Artificial Sequence: Synthetic oligonucleotide
  Sense strand starting at position 537 of SEQ ID NO: 1883732
gcaucaggucccuacaaug

SEQ ID NO: 2212395 - RNA, 19 nt, Artificial Sequence
  Description of Artificial Sequence: Synthetic oligonucleotide
  Antisense strand to SEQ ID NO: 2212394
cauuguagggaccugaugc

SEQ ID NO: 2212396 - RNA, 19 nt, Artificial Sequence
  Description of Artificial Sequence: Synthetic oligonucleotide
  Sense strand starting at position 3822 of SEQ ID NO: 1883732
ugguaucuauccuugauaa

SEQ ID NO: 2212397 - RNA, 19 nt, Artificial Sequence
  Description of Artificial Sequence: Synthetic oligonucleotide
  Antisense strand to SEQ ID NO: 2212396
uuaucaaggauagauacca

SEQ ID NO: 2212398 - RNA, 19 nt, Artificial Sequence
  Description of Artificial Sequence: Synthetic oligonucleotide
  Sense strand starting at position 579 of SEQ ID NO: 1883732
ugucuuguuaaguaggaau

SEQ ID NO: 2212399 - RNA, 19 nt, Artificial Sequence
  Description of Artificial Sequence: Synthetic oligonucleotide
  Antisense strand to SEQ ID NO: 2212398
auuccuacuuaacaagaca

SEQ ID NO: 2212400 - RNA, 19 nt, Artificial Sequence
  Description of Artificial Sequence: Synthetic oligonucleotide
  Sense strand starting at position 2683 of SEQ ID NO: 1883732
gauuccugagugcagugaa

SEQ ID NO: 2212401 - RNA, 19 nt, Artificial Sequence
  Description of Artificial Sequence: Synthetic oligonucleotide
  Antisense strand to SEQ ID NO: 2212400
uucacugcacucaggaauc

SEQ ID NO: 2212402 - RNA, 19 nt, Artificial Sequence
  Description of Artificial Sequence: Synthetic oligonucleotide
  Sense strand starting at position 647 of SEQ ID NO: 1883732
ggaaguaacaagugcugga

SEQ ID NO: 2212403 - RNA, 19 nt, Artificial Sequence
  Description of Artificial Sequence: Synthetic oligonucleotide
  Antisense strand to SEQ ID NO: 2212402
uccagcacuuguuacuucc

SEQ ID NO: 2212404 - RNA, 19 nt, Artificial Sequence
  Description of Artificial Sequence: Synthetic oligonucleotide
  Sense strand starting at position 3849 of SEQ ID NO: 1883732
ucugacuucuuuguggaaa

SEQ ID NO: 2212405 - RNA, 19 nt, Artificial Sequence
  Description of Artificial Sequence: Synthetic oligonucleotide
  Antisense strand to SEQ ID NO: 2212404
uuuccacaaagaagucaga

SEQ ID NO: 2212406 - RNA, 19 nt, Artificial Sequence
  Description of Artificial Sequence: Synthetic oligonucleotide
  Sense strand starting at position 3689 of SEQ ID NO: 1883732
ucugacaaccugugguaaa

SEQ ID NO: 2212407 - RNA, 19 nt, Artificial Sequence
  Description of Artificial Sequence: Synthetic oligonucleotide
  Antisense strand to SEQ ID NO: 2212406
uuuaccacagguugucaga

SEQ ID NO: 2212408 - RNA, 19 nt, Artificial Sequence
  Description of Artificial Sequence: Synthetic oligonucleotide
  Sense strand starting at position 1709 of SEQ ID NO: 1883732
gucuauuugcccugucaug

SEQ ID NO: 2212409 - RNA, 19 nt, Artificial Sequence
  Description of Artificial Sequence: Synthetic oligonucleotide
  Antisense strand to SEQ ID NO: 2212408
caugacagggcaaauagac

SEQ ID NO: 2212410 - RNA, 19 nt, Artificial Sequence
  Description of Artificial Sequence: Synthetic oligonucleotide
  Sense strand starting at position 3816 of SEQ ID NO: 1883732
gaaguaugguaucuauccu

SEQ ID NO: 2212411 - RNA, 19 nt, Artificial Sequence
  Description of Artificial Sequence: Synthetic oligonucleotide
  Antisense strand to SEQ ID NO: 2212410
aggauagauaccauacuuc

SEQ ID NO: 2212412 - RNA, 19 nt, Artificial Sequence
  Description of Artificial Sequence: Synthetic oligonucleotide
  Sense strand starting at position 1600 of SEQ ID NO: 1883732
uauguauucuagucuggga

SEQ ID NO: 2212413 - RNA, 19 nt, Artificial Sequence
  Description of Artificial Sequence: Synthetic oligonucleotide
  Antisense strand to SEQ ID NO: 2212412
ucccagacuagaauacaua

SEQ ID NO: 2212414 - RNA, 19 nt, Artificial Sequence
  Description of Artificial Sequence: Synthetic oligonucleotide
  Sense strand starting at position 3848 of SEQ ID NO: 1883732
cucugacuucuuuguggaa

SEQ ID NO: 2212415 - RNA, 19 nt, Artificial Sequence
  Description of Artificial Sequence: Synthetic oligonucleotide
  Antisense strand to SEQ ID NO: 2212414
uuccacaaagaagucagag

SEQ ID NO: 2212416 - RNA, 19 nt, Artificial Sequence
  Description of Artificial Sequence: Synthetic oligonucleotide
  Sense strand starting at position 2183 of SEQ ID NO: 1883732
gcuccuuagagucagagca

SEQ ID NO: 2212417 - RNA, 19 nt, Artificial Sequence
  Description of Artificial Sequence: Synthetic oligonucleotide
  Antisense strand to SEQ ID NO: 2212416
ugcucugacucuaaggagc

SEQ ID NO: 2212418 - RNA, 19 nt, Artificial Sequence
  Description of Artificial Sequence: Synthetic oligonucleotide
  Sense strand starting at position 3857 of SEQ ID NO: 1883732
cuuuguggaaaguguaaua

SEQ ID NO: 2212419 - RNA, 19 nt, Artificial Sequence
  Description of Artificial Sequence: Synthetic oligonucleotide
  Antisense strand to SEQ ID NO: 2212418
uauuacacuuuccacaaag

SEQ ID NO: 2212420 - RNA, 19 nt, Artificial Sequence
  Description of Artificial Sequence: Synthetic oligonucleotide
  Sense strand starting at position 501 of SEQ ID NO: 1883732
cuggaaguuacuugagucu

SEQ ID NO: 2212421 - RNA, 19 nt, Artificial Sequence
  Description of Artificial Sequence: Synthetic oligonucleotide
  Antisense strand to SEQ ID NO: 2212420
agacucaaguaacuuccag

SEQ ID NO: 2212422 - RNA, 19 nt, Artificial Sequence
  Description of Artificial Sequence: Synthetic oligonucleotide
  Sense strand starting at position 578 of SEQ ID NO: 1883732
cugucuuguuaaguaggaa

SEQ ID NO: 2212423 - RNA, 19 nt, Artificial Sequence
  Description of Artificial Sequence: Synthetic oligonucleotide
  Antisense strand to SEQ ID NO: 2212422
uuccuacuuaacaagacag

SEQ ID NO: 2212424 - RNA, 19 nt, Artificial Sequence
  Description of Artificial Sequence: Synthetic oligonucleotide
  Sense strand starting at position 2003 of SEQ ID NO: 1883732
agaagagaauccgaagaca

SEQ ID NO: 2212425 - RNA, 19 nt, Artificial Sequence
  Description of Artificial Sequence: Synthetic oligonucleotide
  Antisense strand to SEQ ID NO: 2212424
ugucuucggauucucuucu

SEQ ID NO: 2212426 - RNA, 19 nt, Artificial Sequence
  Description of Artificial Sequence: Synthetic oligonucleotide
  Sense strand starting at position 2437 of SEQ ID NO: 1883733
uugcuauucuaauuuguag

SEQ ID NO: 2212427 - RNA, 19 nt, Artificial Sequence
  Description of Artificial Sequence: Synthetic oligonucleotide
  Antisense strand to SEQ ID NO: 2212426
cuacaaauuagaauagcaa

SEQ ID NO: 2212428 - RNA, 19 nt, Artificial Sequence
  Description of Artificial Sequence: Synthetic oligonucleotide
  Sense strand starting at position 2917 of SEQ ID NO: 1883733
aguguaauuuguuccacca

SEQ ID NO: 2212429 - RNA, 19 nt, Artificial Sequence
  Description of Artificial Sequence: Synthetic oligonucleotide
  Antisense strand to SEQ ID NO: 2212428
ugguggaacaaauuacacu

SEQ ID NO: 2212430 - RNA, 19 nt, Artificial Sequence
  Description of Artificial Sequence: Synthetic oligonucleotide
  Sense strand starting at position 446 of SEQ ID NO: 1883733
guggaaacuguagggaaau

SEQ ID NO: 2212431 - RNA, 19 nt, Artificial Sequence
  Description of Artificial Sequence: Synthetic oligonucleotide
  Antisense strand to SEQ ID NO: 2212430
auuucccuacaguuuccac

SEQ ID NO: 2212432 - RNA, 19 nt, Artificial Sequence
  Description of Artificial Sequence: Synthetic oligonucleotide
  Sense strand starting at position 3619 of SEQ ID NO: 1883733
agguuugcugaauauuaaa

SEQ ID NO: 2212433 - RNA, 19 nt, Artificial Sequence
  Description of Artificial Sequence: Synthetic oligonucleotide
  Antisense strand to SEQ ID NO: 2212432
uuuaauauucagcaaaccu

SEQ ID NO: 2212434 - RNA, 19 nt, Artificial Sequence
  Description of Artificial Sequence: Synthetic oligonucleotide
  Sense strand starting at position 3861 of SEQ ID NO: 1883733
aggauuaaacugggcaauu

SEQ ID NO: 2212435 - RNA, 19 nt, Artificial Sequence
  Description of Artificial Sequence: Synthetic oligonucleotide
  Antisense strand to SEQ ID NO: 2212434
aauugcccaguuuaauccu

SEQ ID NO: 2212436 - RNA, 19 nt, Artificial Sequence
  Description of Artificial Sequence: Synthetic oligonucleotide
  Sense strand starting at position 3862 of SEQ ID NO: 1883733
ggauuaaacugggcaauuc

SEQ ID NO: 2212437 - RNA, 19 nt, Artificial Sequence
  Description of Artificial Sequence: Synthetic oligonucleotide
  Antisense strand to SEQ ID NO: 2212436
gaauugcccaguuuaaucc

SEQ ID NO: 2212438 - RNA, 19 nt, Artificial Sequence
  Description of Artificial Sequence: Synthetic oligonucleotide
  Sense strand starting at position 2245 of SEQ ID NO: 1883733
ugggcucuccaagagucaa

SEQ ID NO: 2212439 - RNA, 19 nt, Artificial Sequence
  Description of Artificial Sequence: Synthetic oligonucleotide
  Antisense strand to SEQ ID NO: 2212438
uugacucuuggagagccca

SEQ ID NO: 2212440 - RNA, 19 nt, Artificial Sequence
  Description of Artificial Sequence: Synthetic oligonucleotide
  Sense strand starting at position 401 of SEQ ID NO: 1883733
aaagccuggguuugagaaa

SEQ ID NO: 2212441 - RNA, 19 nt, Artificial Sequence
  Description of Artificial Sequence: Synthetic oligonucleotide
  Antisense strand to SEQ ID NO: 2212440
uuucucaaacccaggcuuu

SEQ ID NO: 2212442 - RNA, 19 nt, Artificial Sequence
  Description of Artificial Sequence: Synthetic oligonucleotide
  Sense strand starting at position 3783 of SEQ ID NO: 1883733
caaggagauuguucuacuu

SEQ ID NO: 2212443 - RNA, 19 nt, Artificial Sequence
  Description of Artificial Sequence: Synthetic oligonucleotide
  Antisense strand to SEQ ID NO: 2212442
aaguagaacaaucuccuug

SEQ ID NO: 2212444 - RNA, 19 nt, Artificial Sequence
  Description of Artificial Sequence: Synthetic oligonucleotide
  Sense strand starting at position 434 of SEQ ID NO: 1883733
aaaguuguuugaguggaaa

SEQ ID NO: 2212445 - RNA, 19 nt, Artificial Sequence
  Description of Artificial Sequence: Synthetic oligonucleotide
  Antisense strand to SEQ ID NO: 2212444
uuuccacucaaacaacuuu

SEQ ID NO: 2212446 - RNA, 19 nt, Artificial Sequence
  Description of Artificial Sequence: Synthetic oligonucleotide
  Sense strand starting at position 2864 of SEQ ID NO: 1883733
augacugaagccuggagua

SEQ ID NO: 2212447 - RNA, 19 nt, Artificial Sequence
  Description of Artificial Sequence: Synthetic oligonucleotide
  Antisense strand to SEQ ID NO: 2212446
uacuccaggcuucagucau

SEQ ID NO: 2212448 - RNA, 19 nt, Artificial Sequence
  Description of Artificial Sequence: Synthetic oligonucleotide
  Sense strand starting at position 3732 of SEQ ID NO: 1883733
ggaucaaagcuguggaauu

SEQ ID NO: 2212449 - RNA, 19 nt, Artificial Sequence
  Description of Artificial Sequence: Synthetic oligonucleotide
  Antisense strand to SEQ ID NO: 2212448
aauuccacagcuuugaucc

SEQ ID NO: 2212450 - RNA, 19 nt, Artificial Sequence
  Description of Artificial Sequence: Synthetic oligonucleotide
  Sense strand starting at position 3256 of SEQ ID NO: 1883733
cuuccaugauacuuagagu

SEQ ID NO: 2212451 - RNA, 19 nt, Artificial Sequence
  Description of Artificial Sequence: Synthetic oligonucleotide
  Antisense strand to SEQ ID NO: 2212450
acucuaaguaucauggaag

SEQ ID NO: 2212452 - RNA, 19 nt, Artificial Sequence
  Description of Artificial Sequence: Synthetic oligonucleotide
  Sense strand starting at position 2010 of SEQ ID NO: 1883733
acagaaguuucuccuuaug

SEQ ID NO: 2212453 - RNA, 19 nt, Artificial Sequence
  Description of Artificial Sequence: Synthetic oligonucleotide
  Antisense strand to SEQ ID NO: 2212452
cauaaggagaaacuucugu

SEQ ID NO: 2212454 - RNA, 19 nt, Artificial Sequence
  Description of Artificial Sequence: Synthetic oligonucleotide
  Sense strand starting at position 337 of SEQ ID NO: 1883733
uuuggucacuaauuccaga

SEQ ID NO: 2212455 - RNA, 19 nt, Artificial Sequence
  Description of Artificial Sequence: Synthetic oligonucleotide
  Antisense strand to SEQ ID NO: 2212454
ucuggaauuagugaccaaa

SEQ ID NO: 2212456 - RNA, 19 nt, Artificial Sequence
  Description of Artificial Sequence: Synthetic oligonucleotide
  Sense strand starting at position 3408 of SEQ ID NO: 1883733
uuccuauguguagaaguga

SEQ ID NO: 2212457 - RNA, 19 nt, Artificial Sequence
  Description of Artificial Sequence: Synthetic oligonucleotide
  Antisense strand to SEQ ID NO: 2212456
ucacuucuacacauaggaa

SEQ ID NO: 2212458 - RNA, 19 nt, Artificial Sequence
  Description of Artificial Sequence: Synthetic oligonucleotide
  Sense strand starting at position 2144 of SEQ ID NO: 1883733
ugggaauucuugcuggaug

SEQ ID NO: 2212459 - RNA, 19 nt, Artificial Sequence
  Description of Artificial Sequence: Synthetic oligonucleotide
  Antisense strand to SEQ ID NO: 2212458
cauccagcaagaauuccca

SEQ ID NO: 2212460 - RNA, 19 nt, Artificial Sequence
  Description of Artificial Sequence: Synthetic oligonucleotide
  Sense strand starting at position 397 of SEQ ID NO: 1883733
gaugaaagccuggguuuga

SEQ ID NO: 2212461 - RNA, 19 nt, Artificial Sequence
  Description of Artificial Sequence: Synthetic oligonucleotide
  Antisense strand to SEQ ID NO: 2212460
ucaaacccaggcuuucauc

SEQ ID NO: 2212462 - RNA, 19 nt, Artificial Sequence
  Description of Artificial Sequence: Synthetic oligonucleotide
  Sense strand starting at position 3708 of SEQ ID NO: 1883733
guugaagcgguccaggaaa

SEQ ID NO: 2212463 - RNA, 19 nt, Artificial Sequence
  Description of Artificial Sequence: Synthetic oligonucleotide
  Antisense strand to SEQ ID NO: 2212462
uuuccuggaccgcuucaac

SEQ ID NO: 2212464 - RNA, 19 nt, Artificial Sequence
  Description of Artificial Sequence: Synthetic oligonucleotide
  Sense strand starting at position 1825 of SEQ ID NO: 1883733
ucuuguuaucuagauaugu

SEQ ID NO: 2212465 - RNA, 19 nt, Artificial Sequence
  Description of Artificial Sequence: Synthetic oligonucleotide
  Antisense strand to SEQ ID NO: 2212464
acauaucuagauaacaaga

SEQ ID NO: 2212466 - RNA, 19 nt, Artificial Sequence
  Description of Artificial Sequence: Synthetic oligonucleotide
  Sense strand starting at position 110 of SEQ ID NO: 1883733
uagcuauauccuuaggguu

SEQ ID NO: 2212467 - RNA, 19 nt, Artificial Sequence
  Description of Artificial Sequence: Synthetic oligonucleotide
  Antisense strand to SEQ ID NO: 2212466
aacccuaaggauauagcua

SEQ ID NO: 2212468 - RNA, 19 nt, Artificial Sequence
  Description of Artificial Sequence: Synthetic oligonucleotide
  Sense strand starting at position 3634 of SEQ ID NO: 1883733
uaaauucuggcauggugaa

SEQ ID NO: 2212469 - RNA, 19 nt, Artificial Sequence
  Description of Artificial Sequence: Synthetic oligonucleotide
  Antisense strand to SEQ ID NO: 2212468
uucaccaugccagaauuua

SEQ ID NO: 2212470 - RNA, 19 nt, Artificial Sequence
  Description of Artificial Sequence: Synthetic oligonucleotide
  Sense strand starting at position 2708 of SEQ ID NO: 1883733
aaaguuugucgacaaguau

SEQ ID NO: 2212471 - RNA, 19 nt, Artificial Sequence
  Description of Artificial Sequence: Synthetic oligonucleotide
  Antisense strand to SEQ ID NO: 2212470
auacuugucgacaaacuuu

SEQ ID NO: 2212472 - RNA, 19 nt, Artificial Sequence
  Description of Artificial Sequence: Synthetic oligonucleotide
  Sense strand starting at position 1830 of SEQ ID NO: 1883733
uuaucuagauauguuucca

SEQ ID NO: 2212473 - RNA, 19 nt, Artificial Sequence
  Description of Artificial Sequence: Synthetic oligonucleotide
  Antisense strand to SEQ ID NO: 2212472
uggaaacauaucuagauaa

SEQ ID NO: 2212474 - RNA, 19 nt, Artificial Sequence
  Description of Artificial Sequence: Synthetic oligonucleotide
  Sense strand starting at position 3614 of SEQ ID NO: 1883733
ugaugagguuugcugaaua

SEQ ID NO: 2212475 - RNA, 19 nt, Artificial Sequence
  Description of Artificial Sequence: Synthetic oligonucleotide
  Antisense strand to SEQ ID NO: 2212474
uauucagcaaaccucauca

SEQ ID NO: 2212476 - RNA, 19 nt, Artificial Sequence
  Description of Artificial Sequence: Synthetic oligonucleotide
  Sense strand starting at position 2704 of SEQ ID NO: 1883733
aaccaaaguuugucgacaa

SEQ ID NO: 2212477 - RNA, 19 nt, Artificial Sequence
  Description of Artificial Sequence: Synthetic oligonucleotide
  Antisense strand to SEQ ID NO: 2212476
uugucgacaaacuuugguu

SEQ ID NO: 2212478 - RNA, 19 nt, Artificial Sequence
  Description of Artificial Sequence: Synthetic oligonucleotide
  Sense strand starting at position 2098 of SEQ ID NO: 1883733
ugcuguugagaacauuagu

SEQ ID NO: 2212479 - RNA, 19 nt, Artificial Sequence
  Description of Artificial Sequence: Synthetic oligonucleotide
  Antisense strand to SEQ ID NO: 2212478
acuaauguucucaacagca

SEQ ID NO: 2212480 - RNA, 19 nt, Artificial Sequence
  Description of Artificial Sequence: Synthetic oligonucleotide
  Sense strand starting at position 2104 of SEQ ID NO: 1883733
ugagaacauuagucuguuu

SEQ ID NO: 2212481 - RNA, 19 nt, Artificial Sequence
  Description of Artificial Sequence: Synthetic oligonucleotide
  Antisense strand to SEQ ID NO: 2212480
aaacagacuaauguucuca

SEQ ID NO: 2212482 - RNA, 19 nt, Artificial Sequence
  Description of Artificial Sequence: Synthetic oligonucleotide
  Sense strand starting at position 2103 of SEQ ID NO: 1883733
uugagaacauuagucuguu

SEQ ID NO: 2212483 - RNA, 19 nt, Artificial Sequence
  Description of Artificial Sequence: Synthetic oligonucleotide
  Antisense strand to SEQ ID NO: 2212482
aacagacuaauguucucaa

SEQ ID NO: 2212484 - RNA, 19 nt, Artificial Sequence
  Description of Artificial Sequence: Synthetic oligonucleotide
  Sense strand starting at position 1151 of SEQ ID NO: 1883733
uccuuuggugcucauaaau

SEQ ID NO: 2212485 - RNA, 19 nt, Artificial Sequence
  Description of Artificial Sequence: Synthetic oligonucleotide
  Antisense strand to SEQ ID NO: 2212484
auuuaugagcaccaaagga

SEQ ID NO: 2212486 - RNA, 19 nt, Artificial Sequence
  Description of Artificial Sequence: Synthetic oligonucleotide
  Sense strand starting at position 2907 of SEQ ID NO: 1883733
ucauucugagaguguaauu

SEQ ID NO: 2212487 - RNA, 19 nt, Artificial Sequence
  Description of Artificial Sequence: Synthetic oligonucleotide
  Antisense strand to SEQ ID NO: 2212486
aauuacacucucagaauga

SEQ ID NO: 2212488 - RNA, 19 nt, Artificial Sequence
  Description of Artificial Sequence: Synthetic oligonucleotide
  Sense strand starting at position 1114 of SEQ ID NO: 1883733
uuaacuucucucugggagu

SEQ ID NO: 2212489 - RNA, 19 nt, Artificial Sequence
  Description of Artificial Sequence: Synthetic oligonucleotide
  Antisense strand to SEQ ID NO: 2212488
acucccagagagaaguuaa

SEQ ID NO: 2212490 - RNA, 19 nt, Artificial Sequence
  Description of Artificial Sequence: Synthetic oligonucleotide
  Sense strand starting at position 1116 of SEQ ID NO: 1883733
aacuucucucugggaguuu

SEQ ID NO: 2212491 - RNA, 19 nt, Artificial Sequence
  Description of Artificial Sequence: Synthetic oligonucleotide
  Antisense strand to SEQ ID NO: 2212490
aaacucccagagagaaguu

SEQ ID NO: 2212492 - RNA, 19 nt, Artificial Sequence
  Description of Artificial Sequence: Synthetic oligonucleotide
  Sense strand starting at position 3527 of SEQ ID NO: 1883733
cauuauguggcuugaacag

SEQ ID NO: 2212493 - RNA, 19 nt, Artificial Sequence
  Description of Artificial Sequence: Synthetic oligonucleotide
  Antisense strand to SEQ ID NO: 2212492
cuguucaagccacauaaug

SEQ ID NO: 2212494 - RNA, 19 nt, Artificial Sequence
  Description of Artificial Sequence: Synthetic oligonucleotide
  Sense strand starting at position 10 of SEQ ID NO: 1883733
ggagccauaugcucccaaa

SEQ ID NO: 2212495 - RNA, 19 nt, Artificial Sequence
  Description of Artificial Sequence: Synthetic oligonucleotide
  Antisense strand to SEQ ID NO: 2212494
uuugggagcauauggcucc

SEQ ID NO: 2212496 - RNA, 19 nt, Artificial Sequence
  Description of Artificial Sequence: Synthetic oligonucleotide
  Sense strand starting at position 3250 of SEQ ID NO: 1883733
uuguuacuuccaugauacu

SEQ ID NO: 2212497 - RNA, 19 nt, Artificial Sequence
  Description of Artificial Sequence: Synthetic oligonucleotide
  Antisense strand to SEQ ID NO: 2212496
aguaucauggaaguaacaa

SEQ ID NO: 2212498 - RNA, 19 nt, Artificial Sequence
  Description of Artificial Sequence: Synthetic oligonucleotide
  Sense strand starting at position 109 of SEQ ID NO: 1883733
auagcuauauccuuagggu

SEQ ID NO: 2212499 - RNA, 19 nt, Artificial Sequence
  Description of Artificial Sequence: Synthetic oligonucleotide
  Antisense strand to SEQ ID NO: 2212498
acccuaaggauauagcuau

SEQ ID NO: 2212500 - RNA, 19 nt, Artificial Sequence
  Description of Artificial Sequence: Synthetic oligonucleotide
  Sense strand starting at position 3525 of SEQ ID NO: 1883733
uacauuauguggcuugaac

SEQ ID NO: 2212501 - RNA, 19 nt, Artificial Sequence
  Description of Artificial Sequence: Synthetic oligonucleotide
  Antisense strand to SEQ ID NO: 2212500
guucaagccacauaaugua

SEQ ID NO: 2212502 - RNA, 19 nt, Artificial Sequence
  Description of Artificial Sequence: Synthetic oligonucleotide
  Sense strand starting at position 436 of SEQ ID NO: 1883733
aguuguuugaguggaaacu

SEQ ID NO: 2212503 - RNA, 19 nt, Artificial Sequence
  Description of Artificial Sequence: Synthetic oligonucleotide
  Antisense strand to SEQ ID NO: 2212502
aguuuccacucaaacaacu

SEQ ID NO: 2212504 - RNA, 19 nt, Artificial Sequence
  Description of Artificial Sequence: Synthetic oligonucleotide
  Sense strand starting at position 3695 of SEQ ID NO: 1883733
uggacaguucaguguugaa

SEQ ID NO: 2212505 - RNA, 19 nt, Artificial Sequence
  Description of Artificial Sequence: Synthetic oligonucleotide
  Antisense strand to SEQ ID NO: 2212504
uucaacacugaacugucca

SEQ ID NO: 2212506 - RNA, 19 nt, Artificial Sequence
  Description of Artificial Sequence: Synthetic oligonucleotide
  Sense strand starting at position 1649 of SEQ ID NO: 1883734
ucaccuggaguuuaagagu

SEQ ID NO: 2212507 - RNA, 19 nt, Artificial Sequence
  Description of Artificial Sequence: Synthetic oligonucleotide
  Antisense strand to SEQ ID NO: 2212506
acucuuaaacuccagguga

SEQ ID NO: 2212508 - RNA, 19 nt, Artificial Sequence
  Description of Artificial Sequence: Synthetic oligonucleotide
  Sense strand starting at position 1655 of SEQ ID NO: 1883734
ggaguuuaagagugaauua

SEQ ID NO: 2212509 - RNA, 19 nt, Artificial Sequence
  Description of Artificial Sequence: Synthetic oligonucleotide
  Antisense strand to SEQ ID NO: 2212508
uaauucacucuuaaacucc

SEQ ID NO: 2212510 - RNA, 19 nt, Artificial Sequence
  Description of Artificial Sequence: Synthetic oligonucleotide
  Sense strand starting at position 145 of SEQ ID NO: 1883734
aauggucagugauuaaaua

SEQ ID NO: 2212511 - RNA, 19 nt, Artificial Sequence
  Description of Artificial Sequence: Synthetic oligonucleotide
  Antisense strand to SEQ ID NO: 2212510
uauuuaaucacugaccauu

SEQ ID NO: 2212512 - RNA, 19 nt, Artificial Sequence
  Description of Artificial Sequence: Synthetic oligonucleotide
  Sense strand starting at position 1342 of SEQ ID NO: 1883734
gcaguagaaguauaucuaa

SEQ ID NO: 2212513 - RNA, 19 nt, Artificial Sequence
  Description of Artificial Sequence: Synthetic oligonucleotide
  Antisense strand to SEQ ID NO: 2212512
uuagauauacuucuacugc

SEQ ID NO: 2212514 - RNA, 19 nt, Artificial Sequence
  Description of Artificial Sequence: Synthetic oligonucleotide
  Sense strand starting at position 141 of SEQ ID NO: 1883734
aaugaauggucagugauua

SEQ ID NO: 2212515 - RNA, 19 nt, Artificial Sequence
  Description of Artificial Sequence: Synthetic oligonucleotide
  Antisense strand to SEQ ID NO: 2212514
uaaucacugaccauucauu

SEQ ID NO: 2212516 - RNA, 19 nt, Artificial Sequence
  Description of Artificial Sequence: Synthetic oligonucleotide
  Sense strand starting at position 142 of SEQ ID NO: 1883734
augaauggucagugauuaa

SEQ ID NO: 2212517 - RNA, 19 nt, Artificial Sequence
  Description of Artificial Sequence: Synthetic oligonucleotide
  Antisense strand to SEQ ID NO: 2212516
uuaaucacugaccauucau

SEQ ID NO: 2212518 - RNA, 19 nt, Artificial Sequence
  Description of Artificial Sequence: Synthetic oligonucleotide
  Sense strand starting at position 171 of SEQ ID NO: 1883734
agacuucuagugcauuaau

SEQ ID NO: 2212519 - RNA, 19 nt, Artificial Sequence
  Description of Artificial Sequence: Synthetic oligonucleotide
  Antisense strand to SEQ ID NO: 2212518
auuaaugcacuagaagucu

SEQ ID NO: 2212520 - RNA, 19 nt, Artificial Sequence
  Description of Artificial Sequence: Synthetic oligonucleotide
  Sense strand starting at position 1345 of SEQ ID NO: 1883734
guagaaguauaucuaauuc

SEQ ID NO: 2212521 - RNA, 19 nt, Artificial Sequence
  Description of Artificial Sequence: Synthetic oligonucleotide
  Antisense strand to SEQ ID NO: 2212520
gaauuagauauacuucuac

SEQ ID NO: 2212522 - RNA, 19 nt, Artificial Sequence
  Description of Artificial Sequence: Synthetic oligonucleotide
  Sense strand starting at position 772 of SEQ ID NO: 1883734
gggcaucaugccgaggaca

SEQ ID NO: 2212523 - RNA, 19 nt, Artificial Sequence
  Description of Artificial Sequence: Synthetic oligonucleotide
  Antisense strand to SEQ ID NO: 2212522
uguccucggcaugaugccc

SEQ ID NO: 2212524 - RNA, 19 nt, Artificial Sequence
  Description of Artificial Sequence: Synthetic oligonucleotide
  Sense strand starting at position 1149 of SEQ ID NO: 1883734
aggaccuuucuuugaagca

SEQ ID NO: 2212525 - RNA, 19 nt, Artificial Sequence
  Description of Artificial Sequence: Synthetic oligonucleotide
  Antisense strand to SEQ ID NO: 2212524
ugcuucaaagaaagguccu

SEQ ID NO: 2212526 - RNA, 19 nt, Artificial Sequence
  Description of Artificial Sequence: Synthetic oligonucleotide
  Sense strand starting at position 138 of SEQ ID NO: 1883734
agcaaugaauggucaguga

SEQ ID NO: 2212527 - RNA, 19 nt, Artificial Sequence
  Description of Artificial Sequence: Synthetic oligonucleotide
  Antisense strand to SEQ ID NO: 2212526
ucacugaccauucauugcu

SEQ ID NO: 2212528 - RNA, 19 nt, Artificial Sequence
  Description of Artificial Sequence: Synthetic oligonucleotide
  Sense strand starting at position 136 of SEQ ID NO: 1883734
ggagcaaugaauggucagu

SEQ ID NO: 2212529 - RNA, 19 nt, Artificial Sequence
  Description of Artificial Sequence: Synthetic oligonucleotide
  Antisense strand to SEQ ID NO: 2212528
acugaccauucauugcucc

SEQ ID NO: 2212530 - RNA, 19 nt, Artificial Sequence
  Description of Artificial Sequence: Synthetic oligonucleotide
  Sense strand starting at position 926 of SEQ ID NO: 1883734
gucagcugagcgaguaguu

SEQ ID NO: 2212531 - RNA, 19 nt, Artificial Sequence
  Description of Artificial Sequence: Synthetic oligonucleotide
  Antisense strand to SEQ ID NO: 2212530
aacuacucgcucagcugac

SEQ ID NO: 2212532 - RNA, 19 nt, Artificial Sequence
  Description of Artificial Sequence: Synthetic oligonucleotide
  Sense strand starting at position 938 of SEQ ID NO: 1883734
aguaguuaguggucaaagg

SEQ ID NO: 2212533 - RNA, 19 nt, Artificial Sequence
  Description of Artificial Sequence: Synthetic oligonucleotide
  Antisense strand to SEQ ID NO: 2212532
ccuuugaccacuaacuacu

SEQ ID NO: 2212534 - RNA, 19 nt, Artificial Sequence
  Description of Artificial Sequence: Synthetic oligonucleotide
  Sense strand starting at position 104 of SEQ ID NO: 1883734
guccuagaauuauuguucu

SEQ ID NO: 2212535 - RNA, 19 nt, Artificial Sequence
  Description of Artificial Sequence: Synthetic oligonucleotide
  Antisense strand to SEQ ID NO: 2212534
agaacaauaauucuaggac

SEQ ID NO: 2212536 - RNA, 19 nt, Artificial Sequence
  Description of Artificial Sequence: Synthetic oligonucleotide
  Sense strand starting at position 1228 of SEQ ID NO: 1883734
uguuuaaguccauguccaa

SEQ ID NO: 2212537 - RNA, 19 nt, Artificial Sequence
  Description of Artificial Sequence: Synthetic oligonucleotide
  Antisense strand to SEQ ID NO: 2212536
uuggacauggacuuaaaca

SEQ ID NO: 2212538 - RNA, 19 nt, Artificial Sequence
  Description of Artificial Sequence: Synthetic oligonucleotide
  Sense strand starting at position 1617 of SEQ ID NO: 1883734
ccuugccauguuuggaauu

SEQ ID NO: 2212539 - RNA, 19 nt, Artificial Sequence
  Description of Artificial Sequence: Synthetic oligonucleotide
  Antisense strand to SEQ ID NO: 2212538
aauuccaaacauggcaagg

SEQ ID NO: 2212540 - RNA, 19 nt, Artificial Sequence
  Description of Artificial Sequence: Synthetic oligonucleotide
  Sense strand starting at position 470 of SEQ ID NO: 1883734
gcuacauggaguugcaauu

SEQ ID NO: 2212541 - RNA, 19 nt, Artificial Sequence
  Description of Artificial Sequence: Synthetic oligonucleotide
  Antisense strand to SEQ ID NO: 2212540
aauugcaacuccauguagc

SEQ ID NO: 2212542 - RNA, 19 nt, Artificial Sequence
  Description of Artificial Sequence: Synthetic oligonucleotide
  Sense strand starting at position 707 of SEQ ID NO: 1883734
ggccucaggucugcagaau

SEQ ID NO: 2212543 - RNA, 19 nt, Artificial Sequence
  Description of Artificial Sequence: Synthetic oligonucleotide
  Antisense strand to SEQ ID NO: 2212542
auucugcagaccugaggcc

SEQ ID NO: 2212544 - RNA, 19 nt, Artificial Sequence
  Description of Artificial Sequence: Synthetic oligonucleotide
  Sense strand starting at position 936 of SEQ ID NO: 1883734
cgaguaguuaguggucaaa

SEQ ID NO: 2212545 - RNA, 19 nt, Artificial Sequence
  Description of Artificial Sequence: Synthetic oligonucleotide
  Antisense strand to SEQ ID NO: 2212544
uuugaccacuaacuacucg

SEQ ID NO: 2212546 - RNA, 19 nt, Artificial Sequence
  Description of Artificial Sequence: Synthetic oligonucleotide
  Sense strand starting at position 3929 of SEQ ID NO: 1883734
cuggcuuuccuuugggcaa

SEQ ID NO: 2212547 - RNA, 19 nt, Artificial Sequence
  Description of Artificial Sequence: Synthetic oligonucleotide
  Antisense strand to SEQ ID NO: 2212546
uugcccaaaggaaagccag

SEQ ID NO: 2212548 - RNA, 19 nt, Artificial Sequence
  Description of Artificial Sequence: Synthetic oligonucleotide
  Sense strand starting at position 916 of SEQ ID NO: 1883734
gcagucuucggucagcuga

SEQ ID NO: 2212549 - RNA, 19 nt, Artificial Sequence
  Description of Artificial Sequence: Synthetic oligonucleotide
  Antisense strand to SEQ ID NO: 2212548
ucagcugaccgaagacugc

SEQ ID NO: 2212550 - RNA, 19 nt, Artificial Sequence
  Description of Artificial Sequence: Synthetic oligonucleotide
  Sense strand starting at position 125 of SEQ ID NO: 1883734
agucaagacugggagcaau

SEQ ID NO: 2212551 - RNA, 19 nt, Artificial Sequence
  Description of Artificial Sequence: Synthetic oligonucleotide
  Antisense strand to SEQ ID NO: 2212550
auugcucccagucuugacu

SEQ ID NO: 2212552 - RNA, 19 nt, Artificial Sequence
  Description of Artificial Sequence: Synthetic oligonucleotide
  Sense strand starting at position 1652 of SEQ ID NO: 1883734
ccuggaguuuaagagugaa

SEQ ID NO: 2212553 - RNA, 19 nt, Artificial Sequence
  Description of Artificial Sequence: Synthetic oligonucleotide
  Antisense strand to SEQ ID NO: 2212552
uucacucuuaaacuccagg

SEQ ID NO: 2212554 - RNA, 19 nt, Artificial Sequence
  Description of Artificial Sequence: Synthetic oligonucleotide
  Sense strand starting at position 314 of SEQ ID NO: 1883734
ccucuuauuuccuggaguc

SEQ ID NO: 2212555 - RNA, 19 nt, Artificial Sequence
  Description of Artificial Sequence: Synthetic oligonucleotide
  Antisense strand to SEQ ID NO: 2212554
gacuccaggaaauaagagg

SEQ ID NO: 2212556 - RNA, 19 nt, Artificial Sequence
  Description of Artificial Sequence: Synthetic oligonucleotide
  Sense strand starting at position 3965 of SEQ ID NO: 1883734
ugcagugguucaucgcaga

SEQ ID NO: 2212557 - RNA, 19 nt, Artificial Sequence
  Description of Artificial Sequence: Synthetic oligonucleotide
  Antisense strand to SEQ ID NO: 2212556
ucugcgaugaaccacugca

SEQ ID NO: 2212558 - RNA, 19 nt, Artificial Sequence
  Description of Artificial Sequence: Synthetic oligonucleotide
  Sense strand starting at position 540 of SEQ ID NO: 1883734
cuuguaauaugcguccuuu

SEQ ID NO: 2212559 - RNA, 19 nt, Artificial Sequence
  Description of Artificial Sequence: Synthetic oligonucleotide
  Antisense strand to SEQ ID NO: 2212558
aaaggacgcauauuacaag

SEQ ID NO: 2212560 - RNA, 19 nt, Artificial Sequence
  Description of Artificial Sequence: Synthetic oligonucleotide
  Sense strand starting at position 166 of SEQ ID NO: 1883734
aucagagacuucuagugca

SEQ ID NO: 2212561 - RNA, 19 nt, Artificial Sequence
  Description of Artificial Sequence: Synthetic oligonucleotide
  Antisense strand to SEQ ID NO: 2212560
ugcacuagaagucucugau

SEQ ID NO: 2212562 - RNA, 19 nt, Artificial Sequence
  Description of Artificial Sequence: Synthetic oligonucleotide
  Sense strand starting at position 1407 of SEQ ID NO: 1883734
cgcggucucugcaagguaa

SEQ ID NO: 2212563 - RNA, 19 nt, Artificial Sequence
  Description of Artificial Sequence: Synthetic oligonucleotide
  Antisense strand to SEQ ID NO: 2212562
uuaccuugcagagaccgcg

SEQ ID NO: 2212564 - RNA, 19 nt, Artificial Sequence
  Description of Artificial Sequence: Synthetic oligonucleotide
  Sense strand starting at position 532 of SEQ ID NO: 1883734
gggcaagccuuguaauaug

SEQ ID NO: 2212565 - RNA, 19 nt, Artificial Sequence
  Description of Artificial Sequence: Synthetic oligonucleotide
  Antisense strand to SEQ ID NO: 2212564
cauauuacaaggcuugccc

SEQ ID NO: 2212566 - RNA, 19 nt, Artificial Sequence
  Description of Artificial Sequence: Synthetic oligonucleotide
  Sense strand starting at position 169 of SEQ ID NO: 1883734
agagacuucuagugcauua

SEQ ID NO: 2212567 - RNA, 19 nt, Artificial Sequence
  Description of Artificial Sequence: Synthetic oligonucleotide
  Antisense strand to SEQ ID NO: 2212566
uaaugcacuagaagucucu

SEQ ID NO: 2212568 - RNA, 19 nt, Artificial Sequence
  Description of Artificial Sequence: Synthetic oligonucleotide
  Sense strand starting at position 3968 of SEQ ID NO: 1883734
agugguucaucgcagagga

SEQ ID NO: 2212569 - RNA, 19 nt, Artificial Sequence
  Description of Artificial Sequence: Synthetic oligonucleotide
  Antisense strand to SEQ ID NO: 2212568
uccucugcgaugaaccacu

SEQ ID NO: 2212570 - RNA, 19 nt, Artificial Sequence
  Description of Artificial Sequence: Synthetic oligonucleotide
  Sense strand starting at position 390 of SEQ ID NO: 1883734
uguugcuuguaacgaggaa

SEQ ID NO: 2212571 - RNA, 19 nt, Artificial Sequence
  Description of Artificial Sequence: Synthetic oligonucleotide
  Antisense strand to SEQ ID NO: 2212570
uuccucguuacaagcaaca

SEQ ID NO: 2212572 - RNA, 19 nt, Artificial Sequence
  Description of Artificial Sequence: Synthetic oligonucleotide
  Sense strand starting at position 935 of SEQ ID NO: 1883734
gcgaguaguuaguggucaa

SEQ ID NO: 2212573 - RNA, 19 nt, Artificial Sequence
  Description of Artificial Sequence: Synthetic oligonucleotide
  Antisense strand to SEQ ID NO: 2212572
uugaccacuaacuacucgc

SEQ ID NO: 2212574 - RNA, 19 nt, Artificial Sequence
  Description of Artificial Sequence: Synthetic oligonucleotide
  Sense strand starting at position 2574 of SEQ ID NO: 1883735
ucaucagggccucaaauua

SEQ ID NO: 2212575 - RNA, 19 nt, Artificial Sequence
  Description of Artificial Sequence: Synthetic oligonucleotide
  Antisense strand to SEQ ID NO: 2212574
uaauuugaggcccugauga

SEQ ID NO: 2212576 - RNA, 19 nt, Artificial Sequence
  Description of Artificial Sequence: Synthetic oligonucleotide
  Sense strand starting at position 1266 of SEQ ID NO: 1883735
gcuguauugcuggccuaau

SEQ ID NO: 2212577 - RNA, 19 nt, Artificial Sequence
  Description of Artificial Sequence: Synthetic oligonucleotide
  Antisense strand to SEQ ID NO: 2212576
auuaggccagcaauacagc

SEQ ID NO: 2212578 - RNA, 19 nt, Artificial Sequence
  Description of Artificial Sequence: Synthetic oligonucleotide
  Sense strand starting at position 3805 of SEQ ID NO: 1883735
cuuagaacucuccagaguc

SEQ ID NO: 2212579 - RNA, 19 nt, Artificial Sequence
  Description of Artificial Sequence: Synthetic oligonucleotide
  Antisense strand to SEQ ID NO: 2212578
gacucuggagaguucuaag

SEQ ID NO: 2212580 - RNA, 19 nt, Artificial Sequence
  Description of Artificial Sequence: Synthetic oligonucleotide
  Sense strand starting at position 1277 of SEQ ID NO: 1883735
ggccuaauucuguaaagaa

SEQ ID NO: 2212581 - RNA, 19 nt, Artificial Sequence
  Description of Artificial Sequence: Synthetic oligonucleotide
  Antisense strand to SEQ ID NO: 2212580
uucuuuacagaauuaggcc

SEQ ID NO: 2212582 - RNA, 19 nt, Artificial Sequence
  Description of Artificial Sequence: Synthetic oligonucleotide
  Sense strand starting at position 2242 of SEQ ID NO: 1883735
auaggaacuuugguugaau

SEQ ID NO: 2212583 - RNA, 19 nt, Artificial Sequence
  Description of Artificial Sequence: Synthetic oligonucleotide
  Antisense strand to SEQ ID NO: 2212582
auucaaccaaaguuccuau

SEQ ID NO: 2212584 - RNA, 19 nt, Artificial Sequence
  Description of Artificial Sequence: Synthetic oligonucleotide
  Sense strand starting at position 26 of SEQ ID NO: 1883735
gagugagugaauuaguuga

SEQ ID NO: 2212585 - RNA, 19 nt, Artificial Sequence
  Description of Artificial Sequence: Synthetic oligonucleotide
  Antisense strand to SEQ ID NO: 2212584
ucaacuaauucacucacuc

SEQ ID NO: 2212586 - RNA, 19 nt, Artificial Sequence
  Description of Artificial Sequence: Synthetic oligonucleotide
  Sense strand starting at position 1546 of SEQ ID NO: 1883735
aagcacugaccaugggaau

SEQ ID NO: 2212587 - RNA, 19 nt, Artificial Sequence
  Description of Artificial Sequence: Synthetic oligonucleotide
  Antisense strand to SEQ ID NO: 2212586
auucccauggucagugcuu

SEQ ID NO: 2212588 - RNA, 19 nt, Artificial Sequence
  Description of Artificial Sequence: Synthetic oligonucleotide
  Sense strand starting at position 2949 of SEQ ID NO: 1883735
aagaaauguuuguuaggga

SEQ ID NO: 2212589 - RNA, 19 nt, Artificial Sequence
  Description of Artificial Sequence: Synthetic oligonucleotide
  Antisense strand to SEQ ID NO: 2212588
ucccuaacaaacauuucuu

SEQ ID NO: 2212590 - RNA, 19 nt, Artificial Sequence
  Description of Artificial Sequence: Synthetic oligonucleotide
  Sense strand starting at position 2380 of SEQ ID NO: 1883735
uggaaugguguuuaucaca

SEQ ID NO: 2212591 - RNA, 19 nt, Artificial Sequence
  Description of Artificial Sequence: Synthetic oligonucleotide
  Antisense strand to SEQ ID NO: 2212590
ugugauaaacaccauucca

SEQ ID NO: 2212592 - RNA, 19 nt, Artificial Sequence
  Description of Artificial Sequence: Synthetic oligonucleotide
  Sense strand starting at position 2150 of SEQ ID NO: 1883735
gcaucaugaggacgggaaa

SEQ ID NO: 2212593 - RNA, 19 nt, Artificial Sequence
  Description of Artificial Sequence: Synthetic oligonucleotide
  Antisense strand to SEQ ID NO: 2212592
uuucccguccucaugaugc

SEQ ID NO: 2212594 - RNA, 19 nt, Artificial Sequence
  Description of Artificial Sequence: Synthetic oligonucleotide
  Sense strand starting at position 290 of SEQ ID NO: 1883735
gugccaguuauggaaagga

SEQ ID NO: 2212595 - RNA, 19 nt, Artificial Sequence
  Description of Artificial Sequence: Synthetic oligonucleotide
  Antisense strand to SEQ ID NO: 2212594
uccuuuccauaacuggcac

SEQ ID NO: 2212596 - RNA, 19 nt, Artificial Sequence
  Description of Artificial Sequence: Synthetic oligonucleotide
  Sense strand starting at position 1351 of SEQ ID NO: 1883735
uaaugcuaugacuagugau

SEQ ID NO: 2212597 - RNA, 19 nt, Artificial Sequence
  Description of Artificial Sequence: Synthetic oligonucleotide
  Antisense strand to SEQ ID NO: 2212596
aucacuagucauagcauua

SEQ ID NO: 2212598 - RNA, 19 nt, Artificial Sequence
  Description of Artificial Sequence: Synthetic oligonucleotide
  Sense strand starting at position 2243 of SEQ ID NO: 1883735
uaggaacuuugguugaauc

SEQ ID NO: 2212599 - RNA, 19 nt, Artificial Sequence
  Description of Artificial Sequence: Synthetic oligonucleotide
  Antisense strand to SEQ ID NO: 2212598
gauucaaccaaaguuccua

SEQ ID NO: 2212600 - RNA, 19 nt, Artificial Sequence
  Description of Artificial Sequence: Synthetic oligonucleotide
  Sense strand starting at position 1547 of SEQ ID NO: 1883735
agcacugaccaugggaauu

SEQ ID NO: 2212601 - RNA, 19 nt, Artificial Sequence
  Description of Artificial Sequence: Synthetic oligonucleotide
  Antisense strand to SEQ ID NO: 2212600
aauucccauggucagugcu

SEQ ID NO: 2212602 - RNA, 19 nt, Artificial Sequence
  Description of Artificial Sequence: Synthetic oligonucleotide
  Sense strand starting at position 2040 of SEQ ID NO: 1883735
cccuaagaagccugagaug

SEQ ID NO: 2212603 - RNA, 19 nt, Artificial Sequence
  Description of Artificial Sequence: Synthetic oligonucleotide
  Antisense strand to SEQ ID NO: 2212602
caucucaggcuucuuaggg

SEQ ID NO: 2212604 - RNA, 19 nt, Artificial Sequence
  Description of Artificial Sequence: Synthetic oligonucleotide
  Sense strand starting at position 2114 of SEQ ID NO: 1883735
agcagaccuguaggagaau

SEQ ID NO: 2212605 - RNA, 19 nt, Artificial Sequence
  Description of Artificial Sequence: Synthetic oligonucleotide
  Antisense strand to SEQ ID NO: 2212604
auucuccuacaggucugcu

SEQ ID NO: 2212606 - RNA, 19 nt, Artificial Sequence
  Description of Artificial Sequence: Synthetic oligonucleotide
  Sense strand starting at position 683 of SEQ ID NO: 1883735
agaaaugagucauuauagc

SEQ ID NO: 2212607 - RNA, 19 nt, Artificial Sequence
  Description of Artificial Sequence: Synthetic oligonucleotide
  Antisense strand to SEQ ID NO: 2212606
gcuauaaugacucauuucu

SEQ ID NO: 2212608 - RNA, 19 nt, Artificial Sequence
  Description of Artificial Sequence: Synthetic oligonucleotide
  Sense strand starting at position 1540 of SEQ ID NO: 1883735
ugauuaaagcacugaccau

SEQ ID NO: 2212609 - RNA, 19 nt, Artificial Sequence
  Description of Artificial Sequence: Synthetic oligonucleotide
  Antisense strand to SEQ ID NO: 2212608
auggucagugcuuuaauca

SEQ ID NO: 2212610 - RNA, 19 nt, Artificial Sequence
  Description of Artificial Sequence: Synthetic oligonucleotide
  Sense strand starting at position 2351 of SEQ ID NO: 1883735
ggccucauuugccuuuaua

SEQ ID NO: 2212611 - RNA, 19 nt, Artificial Sequence
  Description of Artificial Sequence: Synthetic oligonucleotide
  Antisense strand to SEQ ID NO: 2212610
uauaaaggcaaaugaggcc

SEQ ID NO: 2212612 - RNA, 19 nt, Artificial Sequence
  Description of Artificial Sequence: Synthetic oligonucleotide
  Sense strand starting at position 447 of SEQ ID NO: 1883735
auagacaaggccugucaaa

SEQ ID NO: 2212613 - RNA, 19 nt, Artificial Sequence
  Description of Artificial Sequence: Synthetic oligonucleotide
  Antisense strand to SEQ ID NO: 2212612
uuugacaggccuugucuau

SEQ ID NO: 2212614 - RNA, 19 nt, Artificial Sequence
  Description of Artificial Sequence: Synthetic oligonucleotide
  Sense strand starting at position 3019 of SEQ ID NO: 1883735
uccugaaugccaugaagac

SEQ ID NO: 2212615 - RNA, 19 nt, Artificial Sequence
  Description of Artificial Sequence: Synthetic oligonucleotide
  Antisense strand to SEQ ID NO: 2212614
gucuucauggcauucagga

SEQ ID NO: 2212616 - RNA, 19 nt, Artificial Sequence
  Description of Artificial Sequence: Synthetic oligonucleotide
  Sense strand starting at position 2947 of SEQ ID NO: 1883735
ucaagaaauguuuguuagg

SEQ ID NO: 2212617 - RNA, 19 nt, Artificial Sequence
  Description of Artificial Sequence: Synthetic oligonucleotide
  Antisense strand to SEQ ID NO: 2212616
ccuaacaaacauuucuuga

SEQ ID NO: 2212618 - RNA, 19 nt, Artificial Sequence
  Description of Artificial Sequence: Synthetic oligonucleotide
  Sense strand starting at position 1130 of SEQ ID NO: 1883735
uuacgaggagauuguaauc

SEQ ID NO: 2212619 - RNA, 19 nt, Artificial Sequence
  Description of Artificial Sequence: Synthetic oligonucleotide
  Antisense strand to SEQ ID NO: 2212618
gauuacaaucuccucguaa

SEQ ID NO: 2212620 - RNA, 19 nt, Artificial Sequence
  Description of Artificial Sequence: Synthetic oligonucleotide
  Sense strand starting at position 2521 of SEQ ID NO: 1883735
ggaaacugcaucugaguga

SEQ ID NO: 2212621 - RNA, 19 nt, Artificial Sequence
  Description of Artificial Sequence: Synthetic oligonucleotide
  Antisense strand to SEQ ID NO: 2212620
ucacucagaugcaguuucc

SEQ ID NO: 2212622 - RNA, 19 nt, Artificial Sequence
  Description of Artificial Sequence: Synthetic oligonucleotide
  Sense strand starting at position 1071 of SEQ ID NO: 1883735
gcaacuguaugauuaugaa

SEQ ID NO: 2212623 - RNA, 19 nt, Artificial Sequence
  Description of Artificial Sequence: Synthetic oligonucleotide
  Antisense strand to SEQ ID NO: 2212622
uucauaaucauacaguugc

SEQ ID NO: 2212624 - RNA, 19 nt, Artificial Sequence
  Description of Artificial Sequence: Synthetic oligonucleotide
  Sense strand starting at position 1087 of SEQ ID NO: 1883735
gaaauaguaugucucacug

SEQ ID NO: 2212625 - RNA, 19 nt, Artificial Sequence
  Description of Artificial Sequence: Synthetic oligonucleotide
  Antisense strand to SEQ ID NO: 2212624
cagugagacauacuauuuc

SEQ ID NO: 2212626 - RNA, 19 nt, Artificial Sequence
  Description of Artificial Sequence: Synthetic oligonucleotide
  Sense strand starting at position 1197 of SEQ ID NO: 1883735
guugaaucacugcauuauu

SEQ ID NO: 2212627 - RNA, 19 nt, Artificial Sequence
  Description of Artificial Sequence: Synthetic oligonucleotide
  Antisense strand to SEQ ID NO: 2212626
aauaaugcagugauucaac

SEQ ID NO: 2212628 - RNA, 19 nt, Artificial Sequence
  Description of Artificial Sequence: Synthetic oligonucleotide
  Sense strand starting at position 1157 of SEQ ID NO: 1883735
aaaugcuagcacuagugau

SEQ ID NO: 2212629 - RNA, 19 nt, Artificial Sequence
  Description of Artificial Sequence: Synthetic oligonucleotide
  Antisense strand to SEQ ID NO: 2212628
aucacuagugcuagcauuu

SEQ ID NO: 2212630 - RNA, 19 nt, Artificial Sequence
  Description of Artificial Sequence: Synthetic oligonucleotide
  Sense strand starting at position 190 of SEQ ID NO: 1883735
ggaauaauuucccaacagu

SEQ ID NO: 2212631 - RNA, 19 nt, Artificial Sequence
  Description of Artificial Sequence: Synthetic oligonucleotide
  Antisense strand to SEQ ID NO: 2212630
acuguugggaaauuauucc

SEQ ID NO: 2212632 - RNA, 19 nt, Artificial Sequence
  Description of Artificial Sequence: Synthetic oligonucleotide
  Sense strand starting at position 2254 of SEQ ID NO: 1883735
guugaaucccuguauuauu

SEQ ID NO: 2212633 - RNA, 19 nt, Artificial Sequence
  Description of Artificial Sequence: Synthetic oligonucleotide
  Antisense strand to SEQ ID NO: 2212632
aauaauacagggauucaac

SEQ ID NO: 2212634 - RNA, 19 nt, Artificial Sequence
  Description of Artificial Sequence: Synthetic oligonucleotide
  Sense strand starting at position 1258 of SEQ ID NO: 1883735
gacagaaagcuguauugcu

SEQ ID NO: 2212635 - RNA, 19 nt, Artificial Sequence
  Description of Artificial Sequence: Synthetic oligonucleotide
  Antisense strand to SEQ ID NO: 2212634
agcaauacagcuuucuguc

SEQ ID NO: 2212636 - RNA, 19 nt, Artificial Sequence
  Description of Artificial Sequence: Synthetic oligonucleotide
  Sense strand starting at position 1590 of SEQ ID NO: 1883735
agccauggugcuuaagaua

SEQ ID NO: 2212637 - RNA, 19 nt, Artificial Sequence
  Description of Artificial Sequence: Synthetic oligonucleotide
  Antisense strand to SEQ ID NO: 2212636
uaucuuaagcaccauggcu

SEQ ID NO: 2212638 - RNA, 19 nt, Artificial Sequence
  Description of Artificial Sequence: Synthetic oligonucleotide
  Sense strand starting at position 1098 of SEQ ID NO: 1883735
ucucacugauuguuauaua

SEQ ID NO: 2212639 - RNA, 19 nt, Artificial Sequence
  Description of Artificial Sequence: Synthetic oligonucleotide
  Antisense strand to SEQ ID NO: 2212638
uauauaacaaucagugaga

SEQ ID NO: 2212640 - RNA, 19 nt, Artificial Sequence
  Description of Artificial Sequence: Synthetic oligonucleotide
  Sense strand starting at position 1140 of SEQ ID NO: 1883735
auuguaaucacgugggaaa

SEQ ID NO: 2212641 - RNA, 19 nt, Artificial Sequence
  Description of Artificial Sequence: Synthetic oligonucleotide
  Antisense strand to SEQ ID NO: 2212640
uuucccacgugauuacaau

SEQ ID NO: 2212642 - RNA, 19 nt, Artificial Sequence
  Description of Artificial Sequence: Synthetic oligonucleotide
  Sense strand starting at position 28 of SEQ ID NO: 1883735
gugagugaauuaguugaca

SEQ ID NO: 2212643 - RNA, 19 nt, Artificial Sequence
  Description of Artificial Sequence: Synthetic oligonucleotide
  Antisense strand to SEQ ID NO: 2212642
ugucaacuaauucacucac

SEQ ID NO: 2212644 - RNA, 19 nt, Artificial Sequence
  Description of Artificial Sequence: Synthetic oligonucleotide
  Sense strand starting at position 1135 of SEQ ID NO: 1883735
aggagauuguaaucacgug

SEQ ID NO: 2212645 - RNA, 19 nt, Artificial Sequence
  Description of Artificial Sequence: Synthetic oligonucleotide
  Antisense strand to SEQ ID NO: 2212644
cacgugauuacaaucuccu

SEQ ID NO: 2212646 - RNA, 19 nt, Artificial Sequence
  Description of Artificial Sequence: Synthetic oligonucleotide
  Sense strand starting at position 1276 of SEQ ID NO: 1883735
uggccuaauucuguaaaga

SEQ ID NO: 2212647 - RNA, 19 nt, Artificial Sequence
  Description of Artificial Sequence: Synthetic oligonucleotide
  Antisense strand to SEQ ID NO: 2212646
ucuuuacagaauuaggcca

SEQ ID NO: 2212648 - RNA, 19 nt, Artificial Sequence
  Description of Artificial Sequence: Synthetic oligonucleotide
  Sense strand starting at position 20 of SEQ ID NO: 1883735
ugugaugagugagugaauu

SEQ ID NO: 2212649 - RNA, 19 nt, Artificial Sequence
  Description of Artificial Sequence: Synthetic oligonucleotide
  Antisense strand to SEQ ID NO: 2212648
aauucacucacucaucaca

SEQ ID NO: 2212650 - RNA, 19 nt, Artificial Sequence
  Description of Artificial Sequence: Synthetic oligonucleotide
  Sense strand starting at position 571 of SEQ ID NO: 1883735
gcuauuuauuaggaaacau

SEQ ID NO: 2212651 - RNA, 19 nt, Artificial Sequence
  Description of Artificial Sequence: Synthetic oligonucleotide
  Antisense strand to SEQ ID NO: 2212650
auguuuccuaauaaauagc

SEQ ID NO: 2212652 - RNA, 19 nt, Artificial Sequence
  Description of Artificial Sequence: Synthetic oligonucleotide
  Sense strand starting at position 2509 of SEQ ID NO: 1883735
gggcgagguccaggaaacu

SEQ ID NO: 2212653 - RNA, 19 nt, Artificial Sequence
  Description of Artificial Sequence: Synthetic oligonucleotide
  Antisense strand to SEQ ID NO: 2212652
aguuuccuggaccucgccc

SEQ ID NO: 2212654 - RNA, 19 nt, Artificial Sequence
  Description of Artificial Sequence: Synthetic oligonucleotide
  Sense strand starting at position 810 of SEQ ID NO: 1883736
uccuaacuucgugaaauaa

SEQ ID NO: 2212655 - RNA, 19 nt, Artificial Sequence
  Description of Artificial Sequence: Synthetic oligonucleotide
  Antisense strand to SEQ ID NO: 2212654
uuauuucacgaaguuagga

SEQ ID NO: 2212656 - RNA, 19 nt, Artificial Sequence
  Description of Artificial Sequence: Synthetic oligonucleotide
  Sense strand starting at position 1154 of SEQ ID NO: 1883736
ccgagaacucaucaggcca

SEQ ID NO: 2212657 - RNA, 19 nt, Artificial Sequence
  Description of Artificial Sequence: Synthetic oligonucleotide
  Antisense strand to SEQ ID NO: 2212656
uggccugaugaguucucgg

SEQ ID NO: 2212658 - RNA, 19 nt, Artificial Sequence
  Description of Artificial Sequence: Synthetic oligonucleotide
  Sense strand starting at position 655 of SEQ ID NO: 1883736
gaaguuguacuagagcuaa

SEQ ID NO: 2212659 - RNA, 19 nt, Artificial Sequence
  Description of Artificial Sequence: Synthetic oligonucleotide
  Antisense strand to SEQ ID NO: 2212658
uuagcucuaguacaacuuc

SEQ ID NO: 2212660 - RNA, 19 nt, Artificial Sequence
  Description of Artificial Sequence: Synthetic oligonucleotide
  Sense strand starting at position 3509 of SEQ ID NO: 1883736
ccucucuuccugcaagaag

SEQ ID NO: 2212661 - RNA, 19 nt, Artificial Sequence
  Description of Artificial Sequence: Synthetic oligonucleotide
  Antisense strand to SEQ ID NO: 2212660
cuucuugcaggaagagagg

SEQ ID NO: 2212662 - RNA, 19 nt, Artificial Sequence
  Description of Artificial Sequence: Synthetic oligonucleotide
  Sense strand starting at position 923 of SEQ ID NO: 1883736
cuggaaauuucugaacuac

SEQ ID NO: 2212663 - RNA, 19 nt, Artificial Sequence
  Description of Artificial Sequence: Synthetic oligonucleotide
  Antisense strand to SEQ ID NO: 2212662
guaguucagaaauuuccag

SEQ ID NO: 2212664 - RNA, 19 nt, Artificial Sequence
  Description of Artificial Sequence: Synthetic oligonucleotide
  Sense strand starting at position 118 of SEQ ID NO: 1883736
ggguccaucugaguuaaga

SEQ ID NO: 2212665 - RNA, 19 nt, Artificial Sequence
  Description of Artificial Sequence: Synthetic oligonucleotide
  Antisense strand to SEQ ID NO: 2212664
ucuuaacucagauggaccc

SEQ ID NO: 2212666 - RNA, 19 nt, Artificial Sequence
  Description of Artificial Sequence: Synthetic oligonucleotide
  Sense strand starting at position 3979 of SEQ ID NO: 1883736
gagcccucuccugagagua

SEQ ID NO: 2212667 - RNA, 19 nt, Artificial Sequence
  Description of Artificial Sequence: Synthetic oligonucleotide
  Antisense strand to SEQ ID NO: 2212666
uacucucaggagagggcuc

SEQ ID NO: 2212668 - RNA, 19 nt, Artificial Sequence
  Description of Artificial Sequence: Synthetic oligonucleotide
  Sense strand starting at position 425 of SEQ ID NO: 1883736
gaaaccagcugucucagaa

SEQ ID NO: 2212669 - RNA, 19 nt, Artificial Sequence
  Description of Artificial Sequence: Synthetic oligonucleotide
  Antisense strand to SEQ ID NO: 2212668
uucugagacagcugguuuc

SEQ ID NO: 2212670 - RNA, 19 nt, Artificial Sequence
  Description of Artificial Sequence: Synthetic oligonucleotide
  Sense strand starting at position 912 of SEQ ID NO: 1883736
agccacauucccuggaaau

SEQ ID NO: 2212671 - RNA, 19 nt, Artificial Sequence
  Description of Artificial Sequence: Synthetic oligonucleotide
  Antisense strand to SEQ ID NO: 2212670
auuuccagggaauguggcu

SEQ ID NO: 2212672 - RNA, 19 nt, Artificial Sequence
  Description of Artificial Sequence: Synthetic oligonucleotide
  Sense strand starting at position 3894 of SEQ ID NO: 1883736
uuuggugaccuugauguca

SEQ ID NO: 2212673 - RNA, 19 nt, Artificial Sequence
  Description of Artificial Sequence: Synthetic oligonucleotide
  Antisense strand to SEQ ID NO: 2212672
ugacaucaaggucaccaaa

SEQ ID NO: 2212674 - RNA, 19 nt, Artificial Sequence
  Description of Artificial Sequence: Synthetic oligonucleotide
  Sense strand starting at position 571 of SEQ ID NO: 1883736
gcucuauggcuguuucguu

SEQ ID NO: 2212675 - RNA, 19 nt, Artificial Sequence
  Description of Artificial Sequence: Synthetic oligonucleotide
  Antisense strand to SEQ ID NO: 2212674
aacgaaacagccauagagc

SEQ ID NO: 2212676 - RNA, 19 nt, Artificial Sequence
  Description of Artificial Sequence: Synthetic oligonucleotide
  Sense strand starting at position 773 of SEQ ID NO: 1883736
agcgaaauuuaacacuaaa

SEQ ID NO: 2212677 - RNA, 19 nt, Artificial Sequence
  Description of Artificial Sequence: Synthetic oligonucleotide
  Antisense strand to SEQ ID NO: 2212676
uuuaguguuaaauuucgcu

SEQ ID NO: 2212678 - RNA, 19 nt, Artificial Sequence
  Description of Artificial Sequence: Synthetic oligonucleotide
  Sense strand starting at position 913 of SEQ ID NO: 1883736
gccacauucccuggaaauu

SEQ ID NO: 2212679 - RNA, 19 nt, Artificial Sequence
  Description of Artificial Sequence: Synthetic oligonucleotide
  Antisense strand to SEQ ID NO: 2212678
aauuuccagggaauguggc

SEQ ID NO: 2212680 - RNA, 19 nt, Artificial Sequence
  Description of Artificial Sequence: Synthetic oligonucleotide
  Sense strand starting at position 583 of SEQ ID NO: 1883736
uuucguuggcaacaaacau

SEQ ID NO: 2212681 - RNA, 19 nt, Artificial Sequence
  Description of Artificial Sequence: Synthetic oligonucleotide
  Antisense strand to SEQ ID NO: 2212680
auguuuguugccaacgaaa

SEQ ID NO: 2212682 - RNA, 19 nt, Artificial Sequence
  Description of Artificial Sequence: Synthetic oligonucleotide
  Sense strand starting at position 2875 of SEQ ID NO: 1883736
acucuuguguacucaggaa

SEQ ID NO: 2212683 - RNA, 19 nt, Artificial Sequence
  Description of Artificial Sequence: Synthetic oligonucleotide
  Antisense strand to SEQ ID NO: 2212682
uuccugaguacacaagagu

SEQ ID NO: 2212684 - RNA, 19 nt, Artificial Sequence
  Description of Artificial Sequence: Synthetic oligonucleotide
  Sense strand starting at position 408 of SEQ ID NO: 1883736
gcaagaucaugggcucuga

SEQ ID NO: 2212685 - RNA, 19 nt, Artificial Sequence
  Description of Artificial Sequence: Synthetic oligonucleotide
  Antisense strand to SEQ ID NO: 2212684
ucagagcccaugaucuugc

SEQ ID NO: 2212686 - RNA, 19 nt, Artificial Sequence
  Description of Artificial Sequence: Synthetic oligonucleotide
  Sense strand starting at position 438 of SEQ ID NO: 1883736
ucagaagccuugucuauaa

SEQ ID NO: 2212687 - RNA, 19 nt, Artificial Sequence
  Description of Artificial Sequence: Synthetic oligonucleotide
  Antisense strand to SEQ ID NO: 2212686
uuauagacaaggcuucuga

SEQ ID NO: 2212688 - RNA, 19 nt, Artificial Sequence
  Description of Artificial Sequence: Synthetic oligonucleotide
  Sense strand starting at position 222 of SEQ ID NO: 1883736
uuaccuuugguucgacaaa

SEQ ID NO: 2212689 - RNA, 19 nt, Artificial Sequence
  Description of Artificial Sequence: Synthetic oligonucleotide
  Antisense strand to SEQ ID NO: 2212688
uuugucgaaccaaagguaa

SEQ ID NO: 2212690 - RNA, 19 nt, Artificial Sequence
  Description of Artificial Sequence: Synthetic oligonucleotide
  Sense strand starting at position 922 of SEQ ID NO: 1883736
ccuggaaauuucugaacua

SEQ ID NO: 2212691 - RNA, 19 nt, Artificial Sequence
  Description of Artificial Sequence: Synthetic oligonucleotide
  Antisense strand to SEQ ID NO: 2212690
uaguucagaaauuuccagg

SEQ ID NO: 2212692 - RNA, 19 nt, Artificial Sequence
  Description of Artificial Sequence: Synthetic oligonucleotide
  Sense strand starting at position 808 of SEQ ID NO: 1883736
cuuccuaacuucgugaaau

SEQ ID NO: 2212693 - RNA, 19 nt, Artificial Sequence
  Description of Artificial Sequence: Synthetic oligonucleotide
  Antisense strand to SEQ ID NO: 2212692
auuucacgaaguuaggaag

SEQ ID NO: 2212694 - RNA, 19 nt, Artificial Sequence
  Description of Artificial Sequence: Synthetic oligonucleotide
  Sense strand starting at position 3890 of SEQ ID NO: 1883736
uggcuuuggugaccuugau

SEQ ID NO: 2212695 - RNA, 19 nt, Artificial Sequence
  Description of Artificial Sequence: Synthetic oligonucleotide
  Antisense strand to SEQ ID NO: 2212694
aucaaggucaccaaagcca

SEQ ID NO: 2212696 - RNA, 19 nt, Artificial Sequence
  Description of Artificial Sequence: Synthetic oligonucleotide
  Sense strand starting at position 485 of SEQ ID NO: 1883736
agaugaugguuugagacaa

SEQ ID NO: 2212697 - RNA, 19 nt, Artificial Sequence
  Description of Artificial Sequence: Synthetic oligonucleotide
  Antisense strand to SEQ ID NO: 2212696
uugucucaaaccaucaucu

SEQ ID NO: 2212698 - RNA, 19 nt, Artificial Sequence
  Description of Artificial Sequence: Synthetic oligonucleotide
  Sense strand starting at position 807 of SEQ ID NO: 1883736
gcuuccuaacuucgugaaa

SEQ ID NO: 2212699 - RNA, 19 nt, Artificial Sequence
  Description of Artificial Sequence: Synthetic oligonucleotide
  Antisense strand to SEQ ID NO: 2212698
uuucacgaaguuaggaagc

SEQ ID NO: 2212700 - RNA, 19 nt, Artificial Sequence
  Description of Artificial Sequence: Synthetic oligonucleotide
  Sense strand starting at position 873 of SEQ ID NO: 1883736
auaacugccuaagaaugaa

SEQ ID NO: 2212701 - RNA, 19 nt, Artificial Sequence
  Description of Artificial Sequence: Synthetic oligonucleotide
  Antisense strand to SEQ ID NO: 2212700
uucauucuuaggcaguuau

SEQ ID NO: 2212702 - RNA, 19 nt, Artificial Sequence
  Description of Artificial Sequence: Synthetic oligonucleotide
  Sense strand starting at position 2834 of SEQ ID NO: 1883736
ccgagucaguaaucgcaaa

SEQ ID NO: 2212703 - RNA, 19 nt, Artificial Sequence
  Description of Artificial Sequence: Synthetic oligonucleotide
  Antisense strand to SEQ ID NO: 2212702
uuugcgauuacugacucgg

SEQ ID NO: 2212704 - RNA, 19 nt, Artificial Sequence
  Description of Artificial Sequence: Synthetic oligonucleotide
  Sense strand starting at position 192 of SEQ ID NO: 1883736
agugucaucuucucguaag

SEQ ID NO: 2212705 - RNA, 19 nt, Artificial Sequence
  Description of Artificial Sequence: Synthetic oligonucleotide
  Antisense strand to SEQ ID NO: 2212704
cuuacgagaagaugacacu

SEQ ID NO: 2212706 - RNA, 19 nt, Artificial Sequence
  Description of Artificial Sequence: Synthetic oligonucleotide
  Sense strand starting at position 3364 of SEQ ID NO: 1883736
accugaaugugacauugga

SEQ ID NO: 2212707 - RNA, 19 nt, Artificial Sequence
  Description of Artificial Sequence: Synthetic oligonucleotide
  Antisense strand to SEQ ID NO: 2212706
uccaaugucacauucaggu

SEQ ID NO: 2212708 - RNA, 19 nt, Artificial Sequence
  Description of Artificial Sequence: Synthetic oligonucleotide
  Sense strand starting at position 3899 of SEQ ID NO: 1883736
ugaccuugaugucacaaga

SEQ ID NO: 2212709 - RNA, 19 nt, Artificial Sequence
  Description of Artificial Sequence: Synthetic oligonucleotide
  Antisense strand to SEQ ID NO: 2212708
ucuugugacaucaagguca

SEQ ID NO: 2212710 - RNA, 19 nt, Artificial Sequence
  Description of Artificial Sequence: Synthetic oligonucleotide
  Sense strand starting at position 643 of SEQ ID NO: 1883736
gaagguuuaugggaaguug

SEQ ID NO: 2212711 - RNA, 19 nt, Artificial Sequence
  Description of Artificial Sequence: Synthetic oligonucleotide
  Antisense strand to SEQ ID NO: 2212710
caacuucccauaaaccuuc

SEQ ID NO: 2212712 - RNA, 19 nt, Artificial Sequence
  Description of Artificial Sequence: Synthetic oligonucleotide
  Sense strand starting at position 579 of SEQ ID NO: 1883736
gcuguuucguuggcaacaa

SEQ ID NO: 2212713 - RNA, 19 nt, Artificial Sequence
  Description of Artificial Sequence: Synthetic oligonucleotide
  Antisense strand to SEQ ID NO: 2212712
uuguugccaacgaaacagc

SEQ ID NO: 2212714 - RNA, 19 nt, Artificial Sequence
  Description of Artificial Sequence: Synthetic oligonucleotide
  Sense strand starting at position 576 of SEQ ID NO: 1883736
auggcuguuucguuggcaa

SEQ ID NO: 2212715 - RNA, 19 nt, Artificial Sequence
  Description of Artificial Sequence: Synthetic oligonucleotide
  Antisense strand to SEQ ID NO: 2212714
uugccaacgaaacagccau

SEQ ID NO: 2212716 - RNA, 19 nt, Artificial Sequence
  Description of Artificial Sequence: Synthetic oligonucleotide
  Sense strand starting at position 116 of SEQ ID NO: 1883736
auggguccaucugaguuaa

SEQ ID NO: 2212717 - RNA, 19 nt, Artificial Sequence
  Description of Artificial Sequence: Synthetic oligonucleotide
  Antisense strand to SEQ ID NO: 2212716
uuaacucagauggacccau

SEQ ID NO: 2212718 - RNA, 19 nt, Artificial Sequence
  Description of Artificial Sequence: Synthetic oligonucleotide
  Sense strand starting at position 223 of SEQ ID NO: 1883736
uaccuuugguucgacaaau

SEQ ID NO: 2212719 - RNA, 19 nt, Artificial Sequence
  Description of Artificial Sequence: Synthetic oligonucleotide
  Antisense strand to SEQ ID NO: 2212718
auuugucgaaccaaaggua

SEQ ID NO: 2212720 - RNA, 19 nt, Artificial Sequence
  Description of Artificial Sequence: Synthetic oligonucleotide
  Sense strand starting at position 1338 of SEQ ID NO: 1883736
gggcgucccuuggagagau

SEQ ID NO: 2212721 - RNA, 19 nt, Artificial Sequence
  Description of Artificial Sequence: Synthetic oligonucleotide
  Antisense strand to SEQ ID NO: 2212720
aucucuccaagggacgccc

SEQ ID NO: 2212722 - RNA, 19 nt, Artificial Sequence
  Description of Artificial Sequence: Synthetic oligonucleotide
  Sense strand starting at position 195 of SEQ ID NO: 1883736
gucaucuucucguaagaac

SEQ ID NO: 2212723 - RNA, 19 nt, Artificial Sequence
  Description of Artificial Sequence: Synthetic oligonucleotide
  Antisense strand to SEQ ID NO: 2212722
guucuuacgagaagaugac

SEQ ID NO: 2212724 - RNA, 19 nt, Artificial Sequence
  Description of Artificial Sequence: Synthetic oligonucleotide
  Sense strand starting at position 3896 of SEQ ID NO: 1883736
uggugaccuugaugucaca

SEQ ID NO: 2212725 - RNA, 19 nt, Artificial Sequence
  Description of Artificial Sequence: Synthetic oligonucleotide
  Antisense strand to SEQ ID NO: 2212724
ugugacaucaaggucacca

SEQ ID NO: 2212726 - RNA, 19 nt, Artificial Sequence
  Description of Artificial Sequence: Synthetic oligonucleotide
  Sense strand starting at position 809 of SEQ ID NO: 1883736
uuccuaacuucgugaaaua

SEQ ID NO: 2212727 - RNA, 19 nt, Artificial Sequence
  Description of Artificial Sequence: Synthetic oligonucleotide
  Antisense strand to SEQ ID NO: 2212726
uauuucacgaaguuaggaa

SEQ ID NO: 2212728 - RNA, 19 nt, Artificial Sequence
  Description of Artificial Sequence: Synthetic oligonucleotide
  Sense strand starting at position 3978 of SEQ ID NO: 1883736
ggagcccucuccugagagu

SEQ ID NO: 2212729 - RNA, 19 nt, Artificial Sequence
  Description of Artificial Sequence: Synthetic oligonucleotide
  Antisense strand to SEQ ID NO: 2212728
acucucaggagagggcucc

SEQ ID NO: 2212730 - RNA, 19 nt, Artificial Sequence
  Description of Artificial Sequence: Synthetic oligonucleotide
  Sense strand starting at position 580 of SEQ ID NO: 1883736
cuguuucguuggcaacaaa

SEQ ID NO: 2212731 - RNA, 19 nt, Artificial Sequence
  Description of Artificial Sequence: Synthetic oligonucleotide
  Antisense strand to SEQ ID NO: 2212730
uuuguugccaacgaaacag

SEQ ID NO: 2212732 - RNA, 19 nt, Artificial Sequence
  Description of Artificial Sequence: Synthetic oligonucleotide
  Sense strand starting at position 3055 of SEQ ID NO: 1883736
ucucuugacucacgcuauu

SEQ ID NO: 2212733 - RNA, 19 nt, Artificial Sequence
  Description of Artificial Sequence: Synthetic oligonucleotide
  Antisense strand to SEQ ID NO: 2212732
aauagcgugagucaagaga

SEQ ID NO: 2212734 - RNA, 19 nt, Artificial Sequence
  Description of Artificial Sequence: Synthetic oligonucleotide
  Sense strand starting at position 2949 of SEQ ID NO: 1883737
cagcuaaugcuggaggaga

SEQ ID NO: 2212735 - RNA, 19 nt, Artificial Sequence
  Description of Artificial Sequence: Synthetic oligonucleotide
  Antisense strand to SEQ ID NO: 2212734
ucuccuccagcauuagcug

SEQ ID NO: 2212736 - RNA, 19 nt, Artificial Sequence
  Description of Artificial Sequence: Synthetic oligonucleotide
  Sense strand starting at position 3722 of SEQ ID NO: 1883737
caaggaauaucugcaugag

SEQ ID NO: 2212737 - RNA, 19 nt, Artificial Sequence
  Description of Artificial Sequence: Synthetic oligonucleotide
  Antisense strand to SEQ ID NO: 2212736
cucaugcagauauuccuug

SEQ ID NO: 2212738 - RNA, 19 nt, Artificial Sequence
  Description of Artificial Sequence: Synthetic oligonucleotide
  Sense strand starting at position 1284 of SEQ ID NO: 1883737
uuugguuuaaugggaagag

SEQ ID NO: 2212739 - RNA, 19 nt, Artificial Sequence
  Description of Artificial Sequence: Synthetic oligonucleotide
  Antisense strand to SEQ ID NO: 2212738
cucuucccauuaaaccaaa

SEQ ID NO: 2212740 - RNA, 19 nt, Artificial Sequence
  Description of Artificial Sequence: Synthetic oligonucleotide
  Sense strand starting at position 1790 of SEQ ID NO: 1883737
gaugucuauguugguauuu

SEQ ID NO: 2212741 - RNA, 19 nt, Artificial Sequence
  Description of Artificial Sequence: Synthetic oligonucleotide
  Antisense strand to SEQ ID NO: 2212740
aaauaccaacauagacauc

SEQ ID NO: 2212742 - RNA, 19 nt, Artificial Sequence
  Description of Artificial Sequence: Synthetic oligonucleotide
  Sense strand starting at position 3506 of SEQ ID NO: 1883737
cguuauaauuucuuuguag

SEQ ID NO: 2212743 - RNA, 19 nt, Artificial Sequence
  Description of Artificial Sequence: Synthetic oligonucleotide
  Antisense strand to SEQ ID NO: 2212742
cuacaaagaaauuauaacg

SEQ ID NO: 2212744 - RNA, 19 nt, Artificial Sequence
  Description of Artificial Sequence: Synthetic oligonucleotide
  Sense strand starting at position 264 of SEQ ID NO: 1883737
uugauucugagugagugau

SEQ ID NO: 2212745 - RNA, 19 nt, Artificial Sequence
  Description of Artificial Sequence: Synthetic oligonucleotide
  Antisense strand to SEQ ID NO: 2212744
aucacucacucagaaucaa

SEQ ID NO: 2212746 - RNA, 19 nt, Artificial Sequence
  Description of Artificial Sequence: Synthetic oligonucleotide
  Sense strand starting at position 188 of SEQ ID NO: 1883737
ggcauuauggaccaucuuu

SEQ ID NO: 2212747 - RNA, 19 nt, Artificial Sequence
  Description of Artificial Sequence: Synthetic oligonucleotide
  Antisense strand to SEQ ID NO: 2212746
aaagaugguccauaaugcc

SEQ ID NO: 2212748 - RNA, 19 nt, Artificial Sequence
  Description of Artificial Sequence: Synthetic oligonucleotide
  Sense strand starting at position 1631 of SEQ ID NO: 1883737
auagaaguuguacauaguu

SEQ ID NO: 2212749 - RNA, 19 nt, Artificial Sequence
  Description of Artificial Sequence: Synthetic oligonucleotide
  Antisense strand to SEQ ID NO: 2212748
aacuauguacaacuucuau

SEQ ID NO: 2212750 - RNA, 19 nt, Artificial Sequence
  Description of Artificial Sequence: Synthetic oligonucleotide
  Sense strand starting at position 1760 of SEQ ID NO: 1883737
agagauugcugagcaagag

SEQ ID NO: 2212751 - RNA, 19 nt, Artificial Sequence
  Description of Artificial Sequence: Synthetic oligonucleotide
  Antisense strand to SEQ ID NO: 2212750
cucuugcucagcaaucucu

SEQ ID NO: 2212752 - RNA, 19 nt, Artificial Sequence
  Description of Artificial Sequence: Synthetic oligonucleotide
  Sense strand starting at position 609 of SEQ ID NO: 1883737
agaaauugcacuggguaga

SEQ ID NO: 2212753 - RNA, 19 nt, Artificial Sequence
  Description of Artificial Sequence: Synthetic oligonucleotide
  Antisense strand to SEQ ID NO: 2212752
ucuacccagugcaauuucu

SEQ ID NO: 2212754 - RNA, 19 nt, Artificial Sequence
  Description of Artificial Sequence: Synthetic oligonucleotide
  Sense strand starting at position 268 of SEQ ID NO: 1883737
uucugagugagugaucauu

SEQ ID NO: 2212755 - RNA, 19 nt, Artificial Sequence
  Description of Artificial Sequence: Synthetic oligonucleotide
  Antisense strand to SEQ ID NO: 2212754
aaugaucacucacucagaa

SEQ ID NO: 2212756 - RNA, 19 nt, Artificial Sequence
  Description of Artificial Sequence: Synthetic oligonucleotide
  Sense strand starting at position 608 of SEQ ID NO: 1883737
gagaaauugcacuggguag

SEQ ID NO: 2212757 - RNA, 19 nt, Artificial Sequence
  Description of Artificial Sequence: Synthetic oligonucleotide
  Antisense strand to SEQ ID NO: 2212756
cuacccagugcaauuucuc

SEQ ID NO: 2212758 - RNA, 19 nt, Artificial Sequence
  Description of Artificial Sequence: Synthetic oligonucleotide
  Sense strand starting at position 3713 of SEQ ID NO: 1883737
aggcuccuccaaggaauau

SEQ ID NO: 2212759 - RNA, 19 nt, Artificial Sequence
  Description of Artificial Sequence: Synthetic oligonucleotide
  Antisense strand to SEQ ID NO: 2212758
auauuccuuggaggagccu

SEQ ID NO: 2212760 - RNA, 19 nt, Artificial Sequence
  Description of Artificial Sequence: Synthetic oligonucleotide
  Sense strand starting at position 2645 of SEQ ID NO: 1883737
gaguguguaauaggagaug

SEQ ID NO: 2212761 - RNA, 19 nt, Artificial Sequence
  Description of Artificial Sequence: Synthetic oligonucleotide
  Antisense strand to SEQ ID NO: 2212760
caucuccuauuacacacuc

SEQ ID NO: 2212762 - RNA, 19 nt, Artificial Sequence
  Description of Artificial Sequence: Synthetic oligonucleotide
  Sense strand starting at position 980 of SEQ ID NO: 1883737
augaaugugcaucagugau

SEQ ID NO: 2212763 - RNA, 19 nt, Artificial Sequence
  Description of Artificial Sequence: Synthetic oligonucleotide
  Antisense strand to SEQ ID NO: 2212762
aucacugaugcacauucau

SEQ ID NO: 2212764 - RNA, 19 nt, Artificial Sequence
  Description of Artificial Sequence: Synthetic oligonucleotide
  Sense strand starting at position 266 of SEQ ID NO: 1883737
gauucugagugagugauca

SEQ ID NO: 2212765 - RNA, 19 nt, Artificial Sequence
  Description of Artificial Sequence: Synthetic oligonucleotide
  Antisense strand to SEQ ID NO: 2212764
ugaucacucacucagaauc

SEQ ID NO: 2212766 - RNA, 19 nt, Artificial Sequence
  Description of Artificial Sequence: Synthetic oligonucleotide
  Sense strand starting at position 610 of SEQ ID NO: 1883737
gaaauugcacuggguagau

SEQ ID NO: 2212767 - RNA, 19 nt, Artificial Sequence
  Description of Artificial Sequence: Synthetic oligonucleotide
  Antisense strand to SEQ ID NO: 2212766
aucuacccagugcaauuuc

SEQ ID NO: 2212768 - RNA, 19 nt, Artificial Sequence
  Description of Artificial Sequence: Synthetic oligonucleotide
  Sense strand starting at position 795 of SEQ ID NO: 1883737
acagcaucucuacauugua

SEQ ID NO: 2212769 - RNA, 19 nt, Artificial Sequence
  Description of Artificial Sequence: Synthetic oligonucleotide
  Antisense strand to SEQ ID NO: 2212768
uacaauguagagaugcugu

SEQ ID NO: 2212770 - RNA, 19 nt, Artificial Sequence
  Description of Artificial Sequence: Synthetic oligonucleotide
  Sense strand starting at position 692 of SEQ ID NO: 1883737
ccacuacucuuggugaaac

SEQ ID NO: 2212771 - RNA, 19 nt, Artificial Sequence
  Description of Artificial Sequence: Synthetic oligonucleotide
  Antisense strand to SEQ ID NO: 2212770
guuucaccaagaguagugg

SEQ ID NO: 2212772 - RNA, 19 nt, Artificial Sequence
  Description of Artificial Sequence: Synthetic oligonucleotide
  Sense strand starting at position 2951 of SEQ ID NO: 1883737
gcuaaugcuggaggagaau

SEQ ID NO: 2212773 - RNA, 19 nt, Artificial Sequence
  Description of Artificial Sequence: Synthetic oligonucleotide
  Antisense strand to SEQ ID NO: 2212772
auucuccuccagcauuagc

SEQ ID NO: 2212774 - RNA, 19 nt, Artificial Sequence
  Description of Artificial Sequence: Synthetic oligonucleotide
  Sense strand starting at position 691 of SEQ ID NO: 1883737
cccacuacucuuggugaaa

SEQ ID NO: 2212775 - RNA, 19 nt, Artificial Sequence
  Description of Artificial Sequence: Synthetic oligonucleotide
  Antisense strand to SEQ ID NO: 2212774
uuucaccaagaguaguggg

SEQ ID NO: 2212776 - RNA, 19 nt, Artificial Sequence
  Description of Artificial Sequence: Synthetic oligonucleotide
  Sense strand starting at position 3459 of SEQ ID NO: 1883737
ggccuaagccuggauauuc

SEQ ID NO: 2212777 - RNA, 19 nt, Artificial Sequence
  Description of Artificial Sequence: Synthetic oligonucleotide
  Antisense strand to SEQ ID NO: 2212776
gaauauccaggcuuaggcc

SEQ ID NO: 2212778 - RNA, 19 nt, Artificial Sequence
  Description of Artificial Sequence: Synthetic oligonucleotide
  Sense strand starting at position 1362 of SEQ ID NO: 1883737
gaaacucacgccuauguau

SEQ ID NO: 2212779 - RNA, 19 nt, Artificial Sequence
  Description of Artificial Sequence: Synthetic oligonucleotide
  Antisense strand to SEQ ID NO: 2212778
auacauaggcgugaguuuc

SEQ ID NO: 2212780 - RNA, 19 nt, Artificial Sequence
  Description of Artificial Sequence: Synthetic oligonucleotide
  Sense strand starting at position 1715 of SEQ ID NO: 1883737
ugaaguuaaugguuguaua

SEQ ID NO: 2212781 - RNA, 19 nt, Artificial Sequence
  Description of Artificial Sequence: Synthetic oligonucleotide
  Antisense strand to SEQ ID NO: 2212780
uauacaaccauuaacuuca

SEQ ID NO: 2212782 - RNA, 19 nt, Artificial Sequence
  Description of Artificial Sequence: Synthetic oligonucleotide
  Sense strand starting at position 1787 of SEQ ID NO: 1883737
aaagaugucuauguuggua

SEQ ID NO: 2212783 - RNA, 19 nt, Artificial Sequence
  Description of Artificial Sequence: Synthetic oligonucleotide
  Antisense strand to SEQ ID NO: 2212782
uaccaacauagacaucuuu

SEQ ID NO: 2212784 - RNA, 19 nt, Artificial Sequence
  Description of Artificial Sequence: Synthetic oligonucleotide
  Sense strand starting at position 3426 of SEQ ID NO: 1883737
agguaauuacacuggucuu

SEQ ID NO: 2212785 - RNA, 19 nt, Artificial Sequence
  Description of Artificial Sequence: Synthetic oligonucleotide
  Antisense strand to SEQ ID NO: 2212784
aagaccaguguaauuaccu

SEQ ID NO: 2212786 - RNA, 19 nt, Artificial Sequence
  Description of Artificial Sequence: Synthetic oligonucleotide
  Sense strand starting at position 3980 of SEQ ID NO: 1883737
ccagcugugcaucaugaga

SEQ ID NO: 2212787 - RNA, 19 nt, Artificial Sequence
  Description of Artificial Sequence: Synthetic oligonucleotide
  Antisense strand to SEQ ID NO: 2212786
ucucaugaugcacagcugg

SEQ ID NO: 2212788 - RNA, 19 nt, Artificial Sequence
  Description of Artificial Sequence: Synthetic oligonucleotide
  Sense strand starting at position 1121 of SEQ ID NO: 1883737
ccaaauguguguucaggga

SEQ ID NO: 2212789 - RNA, 19 nt, Artificial Sequence
  Description of Artificial Sequence: Synthetic oligonucleotide
  Antisense strand to SEQ ID NO: 2212788
ucccugaacacacauuugg

SEQ ID NO: 2212790 - RNA, 19 nt, Artificial Sequence
  Description of Artificial Sequence: Synthetic oligonucleotide
  Sense strand starting at position 1924 of SEQ ID NO: 1883737
ccagaugugaucuguuuag

SEQ ID NO: 2212791 - RNA, 19 nt, Artificial Sequence
  Description of Artificial Sequence: Synthetic oligonucleotide
  Antisense strand to SEQ ID NO: 2212790
cuaaacagaucacaucugg

SEQ ID NO: 2212792 - RNA, 19 nt, Artificial Sequence
  Description of Artificial Sequence: Synthetic oligonucleotide
  Sense strand starting at position 2546 of SEQ ID NO: 1883737
uuuguaucauguuccagag

SEQ ID NO: 2212793 - RNA, 19 nt, Artificial Sequence
  Description of Artificial Sequence: Synthetic oligonucleotide
  Antisense strand to SEQ ID NO: 2212792
cucuggaacaugauacaaa

SEQ ID NO: 2212794 - RNA, 19 nt, Artificial Sequence
  Description of Artificial Sequence: Synthetic oligonucleotide
  Sense strand starting at position 263 of SEQ ID NO: 1883737
guugauucugagugaguga

SEQ ID NO: 2212795 - RNA, 19 nt, Artificial Sequence
  Description of Artificial Sequence: Synthetic oligonucleotide
  Antisense strand to SEQ ID NO: 2212794
ucacucacucagaaucaac

SEQ ID NO: 2212796 - RNA, 19 nt, Artificial Sequence
  Description of Artificial Sequence: Synthetic oligonucleotide
  Sense strand starting at position 3458 of SEQ ID NO: 1883737
aggccuaagccuggauauu

SEQ ID NO: 2212797 - RNA, 19 nt, Artificial Sequence
  Description of Artificial Sequence: Synthetic oligonucleotide
  Antisense strand to SEQ ID NO: 2212796
aauauccaggcuuaggccu

SEQ ID NO: 2212798 - RNA, 19 nt, Artificial Sequence
  Description of Artificial Sequence: Synthetic oligonucleotide
  Sense strand starting at position 1650 of SEQ ID NO: 1883737
guauuucucuuauaaggau

SEQ ID NO: 2212799 - RNA, 19 nt, Artificial Sequence
  Description of Artificial Sequence: Synthetic oligonucleotide
  Antisense strand to SEQ ID NO: 2212798
auccuuauaagagaaauac

SEQ ID NO: 2212800 - RNA, 19 nt, Artificial Sequence
  Description of Artificial Sequence: Synthetic oligonucleotide
  Sense strand starting at position 2841 of SEQ ID NO: 1883737
aagguuaucccuuguuuag

SEQ ID NO: 2212801 - RNA, 19 nt, Artificial Sequence
  Description of Artificial Sequence: Synthetic oligonucleotide
  Antisense strand to SEQ ID NO: 2212800
cuaaacaagggauaaccuu

SEQ ID NO: 2212802 - RNA, 19 nt, Artificial Sequence
  Description of Artificial Sequence: Synthetic oligonucleotide
  Sense strand starting at position 3577 of SEQ ID NO: 1883737
uuuccuauugugcagagua

SEQ ID NO: 2212803 - RNA, 19 nt, Artificial Sequence
  Description of Artificial Sequence: Synthetic oligonucleotide
  Antisense strand to SEQ ID NO: 2212802
uacucugcacaauaggaaa

SEQ ID NO: 2212804 - RNA, 19 nt, Artificial Sequence
  Description of Artificial Sequence: Synthetic oligonucleotide
  Sense strand starting at position 3670 of SEQ ID NO: 1883737
gagguccucuguuucugaa

SEQ ID NO: 2212805 - RNA, 19 nt, Artificial Sequence
  Description of Artificial Sequence: Synthetic oligonucleotide
  Antisense strand to SEQ ID NO: 2212804
uucagaaacagaggaccuc

SEQ ID NO: 2212806 - RNA, 19 nt, Artificial Sequence
  Description of Artificial Sequence: Synthetic oligonucleotide
  Sense strand starting at position 3672 of SEQ ID NO: 1883737
gguccucuguuucugaaag

SEQ ID NO: 2212807 - RNA, 19 nt, Artificial Sequence
  Description of Artificial Sequence: Synthetic oligonucleotide
  Antisense strand to SEQ ID NO: 2212806
cuuucagaaacagaggacc

SEQ ID NO: 2212808 - RNA, 19 nt, Artificial Sequence
  Description of Artificial Sequence: Synthetic oligonucleotide
  Sense strand starting at position 3224 of SEQ ID NO: 1883737
uguugauucugacccaggu

SEQ ID NO: 2212809 - RNA, 19 nt, Artificial Sequence
  Description of Artificial Sequence: Synthetic oligonucleotide
  Antisense strand to SEQ ID NO: 2212808
accugggucagaaucaaca

SEQ ID NO: 2212810 - RNA, 19 nt, Artificial Sequence
  Description of Artificial Sequence: Synthetic oligonucleotide
  Sense strand starting at position 2960 of SEQ ID NO: 1883737
ggaggagaauuccagggau

SEQ ID NO: 2212811 - RNA, 19 nt, Artificial Sequence
  Description of Artificial Sequence: Synthetic oligonucleotide
  Antisense strand to SEQ ID NO: 2212810
aucccuggaauucuccucc

SEQ ID NO: 2212812 - RNA, 19 nt, Artificial Sequence
  Description of Artificial Sequence: Synthetic oligonucleotide
  Sense strand starting at position 3582 of SEQ ID NO: 1883737
uauugugcagaguagcaau

SEQ ID NO: 2212813 - RNA, 19 nt, Artificial Sequence
  Description of Artificial Sequence: Synthetic oligonucleotide
  Antisense strand to SEQ ID NO: 2212812
auugcuacucugcacaaua

SEQ ID NO: 2212814 - RNA, 19 nt, Artificial Sequence
  Description of Artificial Sequence: Synthetic oligonucleotide
  Sense strand starting at position 1596 of SEQ ID NO: 1883738
ccacaauaucuuuggaaug

SEQ ID NO: 2212815 - RNA, 19 nt, Artificial Sequence
  Description of Artificial Sequence: Synthetic oligonucleotide
  Antisense strand to SEQ ID NO: 2212814
cauuccaaagauauugugg

SEQ ID NO: 2212816 - RNA, 19 nt, Artificial Sequence
  Description of Artificial Sequence: Synthetic oligonucleotide
  Sense strand starting at position 197 of SEQ ID NO: 1883738
gcaugagggcuugaagaua

SEQ ID NO: 2212817 - RNA, 19 nt, Artificial Sequence
  Description of Artificial Sequence: Synthetic oligonucleotide
  Antisense strand to SEQ ID NO: 2212816
uaucuucaagcccucaugc

SEQ ID NO: 2212818 - RNA, 19 nt, Artificial Sequence
  Description of Artificial Sequence: Synthetic oligonucleotide
  Sense strand starting at position 3747 of SEQ ID NO: 1883738
augguccugaugggagaua

SEQ ID NO: 2212819 - RNA, 19 nt, Artificial Sequence
  Description of Artificial Sequence: Synthetic oligonucleotide
  Antisense strand to SEQ ID NO: 2212818
uaucucccaucaggaccau

SEQ ID NO: 2212820 - RNA, 19 nt, Artificial Sequence
  Description of Artificial Sequence: Synthetic oligonucleotide
  Sense strand starting at position 2420 of SEQ ID NO: 1883738
gucacaucucucuacagga

SEQ ID NO: 2212821 - RNA, 19 nt, Artificial Sequence
  Description of Artificial Sequence: Synthetic oligonucleotide
  Antisense strand to SEQ ID NO: 2212820
uccuguagagagaugugac

SEQ ID NO: 2212822 - RNA, 19 nt, Artificial Sequence
  Description of Artificial Sequence: Synthetic oligonucleotide
  Sense strand starting at position 2661 of SEQ ID NO: 1883738
agaagacaaguuugauagu

SEQ ID NO: 2212823 - RNA, 19 nt, Artificial Sequence
  Description of Artificial Sequence: Synthetic oligonucleotide
  Antisense strand to SEQ ID NO: 2212822
acuaucaaacuugucuucu

SEQ ID NO: 2212824 - RNA, 19 nt, Artificial Sequence
  Description of Artificial Sequence: Synthetic oligonucleotide
  Sense strand starting at position 571 of SEQ ID NO: 1883738
guagaauucuauccuaaga

SEQ ID NO: 2212825 - RNA, 19 nt, Artificial Sequence
  Description of Artificial Sequence: Synthetic oligonucleotide
  Antisense strand to SEQ ID NO: 2212824
ucuuaggauagaauucuac

SEQ ID NO: 2212826 - RNA, 19 nt, Artificial Sequence
  Description of Artificial Sequence: Synthetic oligonucleotide
  Sense strand starting at position 2618 of SEQ ID NO: 1883738
ugugaugauuuggaagaaa

SEQ ID NO: 2212827 - RNA, 19 nt, Artificial Sequence
  Description of Artificial Sequence: Synthetic oligonucleotide
  Antisense strand to SEQ ID NO: 2212826
uuucuuccaaaucaucaca

SEQ ID NO: 2212828 - RNA, 19 nt, Artificial Sequence
  Description of Artificial Sequence: Synthetic oligonucleotide
  Sense strand starting at position 2512 of SEQ ID NO: 1883738
uggccugaucuacaaagua

SEQ ID NO: 2212829 - RNA, 19 nt, Artificial Sequence
  Description of Artificial Sequence: Synthetic oligonucleotide
  Antisense strand to SEQ ID NO: 2212828
uacuuuguagaucaggcca

SEQ ID NO: 2212830 - RNA, 19 nt, Artificial Sequence
  Description of Artificial Sequence: Synthetic oligonucleotide
  Sense strand starting at position 2807 of SEQ ID NO: 1883738
cuagauaggccuuaaaugu

SEQ ID NO: 2212831 - RNA, 19 nt, Artificial Sequence
  Description of Artificial Sequence: Synthetic oligonucleotide
  Antisense strand to SEQ ID NO: 2212830
acauuuaaggccuaucuag

SEQ ID NO: 2212832 - RNA, 19 nt, Artificial Sequence
  Description of Artificial Sequence: Synthetic oligonucleotide
  Sense strand starting at position 2638 of SEQ ID NO: 1883738
ccagguaagcaugaccuua

SEQ ID NO: 2212833 - RNA, 19 nt, Artificial Sequence
  Description of Artificial Sequence: Synthetic oligonucleotide
  Antisense strand to SEQ ID NO: 2212832
uaaggucaugcuuaccugg

SEQ ID NO: 2212834 - RNA, 19 nt, Artificial Sequence
  Description of Artificial Sequence: Synthetic oligonucleotide
  Sense strand starting at position 1503 of SEQ ID NO: 1883738
gauuguauuucugugucau

SEQ ID NO: 2212835 - RNA, 19 nt, Artificial Sequence
  Description of Artificial Sequence: Synthetic oligonucleotide
  Antisense strand to SEQ ID NO: 2212834
augacacagaaauacaauc

SEQ ID NO: 2212836 - RNA, 19 nt, Artificial Sequence
  Description of Artificial Sequence: Synthetic oligonucleotide
  Sense strand starting at position 667 of SEQ ID NO: 1883738
agugucaccauguagauaa

SEQ ID NO: 2212837 - RNA, 19 nt, Artificial Sequence
  Description of Artificial Sequence: Synthetic oligonucleotide
  Antisense strand to SEQ ID NO: 2212836
uuaucuacauggugacacu

SEQ ID NO: 2212838 - RNA, 19 nt, Artificial Sequence
  Description of Artificial Sequence: Synthetic oligonucleotide
  Sense strand starting at position 3152 of SEQ ID NO: 1883738
gcguguucuguccuucaga

SEQ ID NO: 2212839 - RNA, 19 nt, Artificial Sequence
  Description of Artificial Sequence: Synthetic oligonucleotide
  Antisense strand to SEQ ID NO: 2212838
ucugaaggacagaacacgc

SEQ ID NO: 2212840 - RNA, 19 nt, Artificial Sequence
  Description of Artificial Sequence: Synthetic oligonucleotide
  Sense strand starting at position 1766 of SEQ ID NO: 1883738
agauucugccuugaguaag

SEQ ID NO: 2212841 - RNA, 19 nt, Artificial Sequence
  Description of Artificial Sequence: Synthetic oligonucleotide
  Antisense strand to SEQ ID NO: 2212840
cuuacucaaggcagaaucu

SEQ ID NO: 2212842 - RNA, 19 nt, Artificial Sequence
  Description of Artificial Sequence: Synthetic oligonucleotide
  Sense strand starting at position 1853 of SEQ ID NO: 1883738
ccacaugggccaugggaua

SEQ ID NO: 2212843 - RNA, 19 nt, Artificial Sequence
  Description of Artificial Sequence: Synthetic oligonucleotide
  Antisense strand to SEQ ID NO: 2212842
uaucccauggcccaugugg

SEQ ID NO: 2212844 - RNA, 19 nt, Artificial Sequence
  Description of Artificial Sequence: Synthetic oligonucleotide
  Sense strand starting at position 2710 of SEQ ID NO: 1883738
gagagaaagaucuguguuc

SEQ ID NO: 2212845 - RNA, 19 nt, Artificial Sequence
  Description of Artificial Sequence: Synthetic oligonucleotide
  Antisense strand to SEQ ID NO: 2212844
gaacacagaucuuucucuc

SEQ ID NO: 2212846 - RNA, 19 nt, Artificial Sequence
  Description of Artificial Sequence: Synthetic oligonucleotide
  Sense strand starting at position 3918 of SEQ ID NO: 1883738
acacgucuuccuuaauaga

SEQ ID NO: 2212847 - RNA, 19 nt, Artificial Sequence
  Description of Artificial Sequence: Synthetic oligonucleotide
  Antisense strand to SEQ ID NO: 2212846
ucuauuaaggaagacgugu

SEQ ID NO: 2212848 - RNA, 19 nt, Artificial Sequence
  Description of Artificial Sequence: Synthetic oligonucleotide
  Sense strand starting at position 1374 of SEQ ID NO: 1883738
acaugaagacaaugugcua

SEQ ID NO: 2212849 - RNA, 19 nt, Artificial Sequence
  Description of Artificial Sequence: Synthetic oligonucleotide
  Antisense strand to SEQ ID NO: 2212848
uagcacauugucuucaugu

SEQ ID NO: 2212850 - RNA, 19 nt, Artificial Sequence
  Description of Artificial Sequence: Synthetic oligonucleotide
  Sense strand starting at position 1601 of SEQ ID NO: 1883738
auaucuuuggaaugaagcu

SEQ ID NO: 2212851 - RNA, 19 nt, Artificial Sequence
  Description of Artificial Sequence: Synthetic oligonucleotide
  Antisense strand to SEQ ID NO: 2212850
agcuucauuccaaagauau

SEQ ID NO: 2212852 - RNA, 19 nt, Artificial Sequence
  Description of Artificial Sequence: Synthetic oligonucleotide
  Sense strand starting at position 3150 of SEQ ID NO: 1883738
augcguguucuguccuuca

SEQ ID NO: 2212853 - RNA, 19 nt, Artificial Sequence
  Description of Artificial Sequence: Synthetic oligonucleotide
  Antisense strand to SEQ ID NO: 2212852
ugaaggacagaacacgcau

SEQ ID NO: 2212854 - RNA, 19 nt, Artificial Sequence
  Description of Artificial Sequence: Synthetic oligonucleotide
  Sense strand starting at position 1699 of SEQ ID NO: 1883738
ccuugcucccagugauuuc

SEQ ID NO: 2212855 - RNA, 19 nt, Artificial Sequence
  Description of Artificial Sequence: Synthetic oligonucleotide
  Antisense strand to SEQ ID NO: 2212854
gaaaucacugggagcaagg

SEQ ID NO: 2212856 - RNA, 19 nt, Artificial Sequence
  Description of Artificial Sequence: Synthetic oligonucleotide
  Sense strand starting at position 1209 of SEQ ID NO: 1883738
uaaugacuugcugaguuua

SEQ ID NO: 2212857 - RNA, 19 nt, Artificial Sequence
  Description of Artificial Sequence: Synthetic oligonucleotide
  Antisense strand to SEQ ID NO: 2212856
uaaacucagcaagucauua

SEQ ID NO: 2212858 - RNA, 19 nt, Artificial Sequence
  Description of Artificial Sequence: Synthetic oligonucleotide
  Sense strand starting at position 1504 of SEQ ID NO: 1883738
auuguauuucugugucauc

SEQ ID NO: 2212859 - RNA, 19 nt, Artificial Sequence
  Description of Artificial Sequence: Synthetic oligonucleotide
  Antisense strand to SEQ ID NO: 2212858
gaugacacagaaauacaau

SEQ ID NO: 2212860 - RNA, 19 nt, Artificial Sequence
  Description of Artificial Sequence: Synthetic oligonucleotide
  Sense strand starting at position 3773 of SEQ ID NO: 1883738
gauagaauuggugggccua

SEQ ID NO: 2212861 - RNA, 19 nt, Artificial Sequence
  Description of Artificial Sequence: Synthetic oligonucleotide
  Antisense strand to SEQ ID NO: 2212860
uaggcccaccaauucuauc

SEQ ID NO: 2212862 - RNA, 19 nt, Artificial Sequence
  Description of Artificial Sequence: Synthetic oligonucleotide
  Sense strand starting at position 559 of SEQ ID NO: 1883738
uugauaggcuuaguagaau

SEQ ID NO: 2212863 - RNA, 19 nt, Artificial Sequence
  Description of Artificial Sequence: Synthetic oligonucleotide
  Antisense strand to SEQ ID NO: 2212862
auucuacuaagccuaucaa

SEQ ID NO: 2212864 - RNA, 19 nt, Artificial Sequence
  Description of Artificial Sequence: Synthetic oligonucleotide
  Sense strand starting at position 1761 of SEQ ID NO: 1883738
cuggaagauucugccuuga

SEQ ID NO: 2212865 - RNA, 19 nt, Artificial Sequence
  Description of Artificial Sequence: Synthetic oligonucleotide
  Antisense strand to SEQ ID NO: 2212864
ucaaggcagaaucuuccag

SEQ ID NO: 2212866 - RNA, 19 nt, Artificial Sequence
  Description of Artificial Sequence: Synthetic oligonucleotide
  Sense strand starting at position 1646 of SEQ ID NO: 1883738
ucacuuauggcaugggacu

SEQ ID NO: 2212867 - RNA, 19 nt, Artificial Sequence
  Description of Artificial Sequence: Synthetic oligonucleotide
  Antisense strand to SEQ ID NO: 2212866
agucccaugccauaaguga

SEQ ID NO: 2212868 - RNA, 19 nt, Artificial Sequence
  Description of Artificial Sequence: Synthetic oligonucleotide
  Sense strand starting at position 1540 of SEQ ID NO: 1883738
gugacaauccuuuggguaa

SEQ ID NO: 2212869 - RNA, 19 nt, Artificial Sequence
  Description of Artificial Sequence: Synthetic oligonucleotide
  Antisense strand to SEQ ID NO: 2212868
uuacccaaaggauugucac

SEQ ID NO: 2212870 - RNA, 19 nt, Artificial Sequence
  Description of Artificial Sequence: Synthetic oligonucleotide
  Sense strand starting at position 1780 of SEQ ID NO: 1883738
guaagugauaccuggacuc

SEQ ID NO: 2212871 - RNA, 19 nt, Artificial Sequence
  Description of Artificial Sequence: Synthetic oligonucleotide
  Antisense strand to SEQ ID NO: 2212870
gaguccagguaucacuuac

SEQ ID NO: 2212872 - RNA, 19 nt, Artificial Sequence
  Description of Artificial Sequence: Synthetic oligonucleotide
  Sense strand starting at position 2815 of SEQ ID NO: 1883738
gccuuaaauguggagucua

SEQ ID NO: 2212873 - RNA, 19 nt, Artificial Sequence
  Description of Artificial Sequence: Synthetic oligonucleotide
  Antisense strand to SEQ ID NO: 2212872
uagacuccacauuuaaggc

SEQ ID NO: 2212874 - RNA, 19 nt, Artificial Sequence
  Description of Artificial Sequence: Synthetic oligonucleotide
  Sense strand starting at position 3774 of SEQ ID NO: 1883738
auagaauuggugggccuau

SEQ ID NO: 2212875 - RNA, 19 nt, Artificial Sequence
  Description of Artificial Sequence: Synthetic oligonucleotide
  Antisense strand to SEQ ID NO: 2212874
auaggcccaccaauucuau

SEQ ID NO: 2212876 - RNA, 19 nt, Artificial Sequence
  Description of Artificial Sequence: Synthetic oligonucleotide
  Sense strand starting at position 1865 of SEQ ID NO: 1883738
ugggauaggugccuugaca

SEQ ID NO: 2212877 - RNA, 19 nt, Artificial Sequence
  Description of Artificial Sequence: Synthetic oligonucleotide
  Antisense strand to SEQ ID NO: 2212876
ugucaaggcaccuauccca

SEQ ID NO: 2212878 - RNA, 19 nt, Artificial Sequence
  Description of Artificial Sequence: Synthetic oligonucleotide
  Sense strand starting at position 1124 of SEQ ID NO: 1883738
ucacacacugcaugaguaa

SEQ ID NO: 2212879 - RNA, 19 nt, Artificial Sequence
  Description of Artificial Sequence: Synthetic oligonucleotide
  Antisense strand to SEQ ID NO: 2212878
uuacucaugcaguguguga

SEQ ID NO: 2212880 - RNA, 19 nt, Artificial Sequence
  Description of Artificial Sequence: Synthetic oligonucleotide
  Sense strand starting at position 2608 of SEQ ID NO: 1883738
ugagugagggugugaugau

SEQ ID NO: 2212881 - RNA, 19 nt, Artificial Sequence
  Description of Artificial Sequence: Synthetic oligonucleotide
  Antisense strand to SEQ ID NO: 2212880
aucaucacacccucacuca

SEQ ID NO: 2212882 - RNA, 19 nt, Artificial Sequence
  Description of Artificial Sequence: Synthetic oligonucleotide
  Sense strand starting at position 2640 of SEQ ID NO: 1883738
agguaagcaugaccuuauu

SEQ ID NO: 2212883 - RNA, 19 nt, Artificial Sequence
  Description of Artificial Sequence: Synthetic oligonucleotide
  Antisense strand to SEQ ID NO: 2212882
aauaaggucaugcuuaccu

SEQ ID NO: 2212884 - RNA, 19 nt, Artificial Sequence
  Description of Artificial Sequence: Synthetic oligonucleotide
  Sense strand starting at position 2667 of SEQ ID NO: 1883738
caaguuugauagucaaagu

SEQ ID NO: 2212885 - RNA, 19 nt, Artificial Sequence
  Description of Artificial Sequence: Synthetic oligonucleotide
  Antisense strand to SEQ ID NO: 2212884
acuuugacuaucaaacuug

SEQ ID NO: 2212886 - RNA, 19 nt, Artificial Sequence
  Description of Artificial Sequence: Synthetic oligonucleotide
  Sense strand starting at position 1347 of SEQ ID NO: 1883738
gcagucuguagggaaucuu

SEQ ID NO: 2212887 - RNA, 19 nt, Artificial Sequence
  Description of Artificial Sequence: Synthetic oligonucleotide
  Antisense strand to SEQ ID NO: 2212886
aagauucccuacagacugc

SEQ ID NO: 2212888 - RNA, 19 nt, Artificial Sequence
  Description of Artificial Sequence: Synthetic oligonucleotide
  Sense strand starting at position 1211 of SEQ ID NO: 1883738
augacuugcugaguuuaga

SEQ ID NO: 2212889 - RNA, 19 nt, Artificial Sequence
  Description of Artificial Sequence: Synthetic oligonucleotide
  Antisense strand to SEQ ID NO: 2212888
ucuaaacucagcaagucau

SEQ ID NO: 2212890 - RNA, 19 nt, Artificial Sequence
  Description of Artificial Sequence: Synthetic oligonucleotide
  Sense strand starting at position 3548 of SEQ ID NO: 1883738
gagggacuuugcucuucca

SEQ ID NO: 2212891 - RNA, 19 nt, Artificial Sequence
  Description of Artificial Sequence: Synthetic oligonucleotide
  Antisense strand to SEQ ID NO: 2212890
uggaagagcaaagucccuc

SEQ ID NO: 2212892 - RNA, 19 nt, Artificial Sequence
  Description of Artificial Sequence: Synthetic oligonucleotide
  Sense strand starting at position 2111 of SEQ ID NO: 1883738
uguucauguggcuauggga

SEQ ID NO: 2212893 - RNA, 19 nt, Artificial Sequence
  Description of Artificial Sequence: Synthetic oligonucleotide
  Antisense strand to SEQ ID NO: 2212892
ucccauagccacaugaaca

SEQ ID NO: 2212894 - RNA, 19 nt, Artificial Sequence
  Description of Artificial Sequence: Synthetic oligonucleotide
  Sense strand starting at position 633 of SEQ ID NO: 1883739
aggagaauagccugggacu

SEQ ID NO: 2212895 - RNA, 19 nt, Artificial Sequence
  Description of Artificial Sequence: Synthetic oligonucleotide
  Antisense strand to SEQ ID NO: 2212894
agucccaggcuauucuccu

SEQ ID NO: 2212896 - RNA, 19 nt, Artificial Sequence
  Description of Artificial Sequence: Synthetic oligonucleotide
  Sense strand starting at position 332 of SEQ ID NO: 1883739
guuucuucugcucacauuu

SEQ ID NO: 2212897 - RNA, 19 nt, Artificial Sequence
  Description of Artificial Sequence: Synthetic oligonucleotide
  Antisense strand to SEQ ID NO: 2212896
aaaugugagcagaagaaac

SEQ ID NO: 2212898 - RNA, 19 nt, Artificial Sequence
  Description of Artificial Sequence: Synthetic oligonucleotide
  Sense strand starting at position 3366 of SEQ ID NO: 1883739
gcccaaagaagucaguaga

SEQ ID NO: 2212899 - RNA, 19 nt, Artificial Sequence
  Description of Artificial Sequence: Synthetic oligonucleotide
  Antisense strand to SEQ ID NO: 2212898
ucuacugacuucuuugggc

SEQ ID NO: 2212900 - RNA, 19 nt, Artificial Sequence
  Description of Artificial Sequence: Synthetic oligonucleotide
  Sense strand starting at position 1605 of SEQ ID NO: 1883739
guugcagagagauaacuuu

SEQ ID NO: 2212901 - RNA, 19 nt, Artificial Sequence
  Description of Artificial Sequence: Synthetic oligonucleotide
  Antisense strand to SEQ ID NO: 2212900
aaaguuaucucucugcaac

SEQ ID NO: 2212902 - RNA, 19 nt, Artificial Sequence
  Description of Artificial Sequence: Synthetic oligonucleotide
  Sense strand starting at position 1811 of SEQ ID NO: 1883739
cagguuucuguggaacuaa

SEQ ID NO: 2212903 - RNA, 19 nt, Artificial Sequence
  Description of Artificial Sequence: Synthetic oligonucleotide
  Antisense strand to SEQ ID NO: 2212902
uuaguuccacagaaaccug

SEQ ID NO: 2212904 - RNA, 19 nt, Artificial Sequence
  Description of Artificial Sequence: Synthetic oligonucleotide
  Sense strand starting at position 2186 of SEQ ID NO: 1883739
guguuuaugggacacccaa

SEQ ID NO: 2212905 - RNA, 19 nt, Artificial Sequence
  Description of Artificial Sequence: Synthetic oligonucleotide
  Antisense strand to SEQ ID NO: 2212904
uugggugucccauaaacac

SEQ ID NO: 2212906 - RNA, 19 nt, Artificial Sequence
  Description of Artificial Sequence: Synthetic oligonucleotide
  Sense strand starting at position 422 of SEQ ID NO: 1883739
gaagcagguguuuaagaau

SEQ ID NO: 2212907 - RNA, 19 nt, Artificial Sequence
  Description of Artificial Sequence: Synthetic oligonucleotide
  Antisense strand to SEQ ID NO: 2212906
auucuuaaacaccugcuuc

SEQ ID NO: 2212908 - RNA, 19 nt, Artificial Sequence
  Description of Artificial Sequence: Synthetic oligonucleotide
  Sense strand starting at position 1611 of SEQ ID NO: 1883739
gagagauaacuuugguuug

SEQ ID NO: 2212909 - RNA, 19 nt, Artificial Sequence
  Description of Artificial Sequence: Synthetic oligonucleotide
  Antisense strand to SEQ ID NO: 2212908
caaaccaaaguuaucucuc

SEQ ID NO: 2212910 - RNA, 19 nt, Artificial Sequence
  Description of Artificial Sequence: Synthetic oligonucleotide
  Sense strand starting at position 888 of SEQ ID NO: 1883739
ggcagagaucagcaguaag

SEQ ID NO: 2212911 - RNA, 19 nt, Artificial Sequence
  Description of Artificial Sequence: Synthetic oligonucleotide
  Antisense strand to SEQ ID NO: 2212910
cuuacugcugaucucugcc

SEQ ID NO: 2212912 - RNA, 19 nt, Artificial Sequence
  Description of Artificial Sequence: Synthetic oligonucleotide
  Sense strand starting at position 2636 of SEQ ID NO: 1883739
uuacuuccucuaggaaaug

SEQ ID NO: 2212913 - RNA, 19 nt, Artificial Sequence
  Description of Artificial Sequence: Synthetic oligonucleotide
  Antisense strand to SEQ ID NO: 2212912
cauuuccuagaggaaguaa

SEQ ID NO: 2212914 - RNA, 19 nt, Artificial Sequence
  Description of Artificial Sequence: Synthetic oligonucleotide
  Sense strand starting at position 106 of SEQ ID NO: 1883739
ggagaacauucugcuauga

SEQ ID NO: 2212915 - RNA, 19 nt, Artificial Sequence
  Description of Artificial Sequence: Synthetic oligonucleotide
  Antisense strand to SEQ ID NO: 2212914
ucauagcagaauguucucc

SEQ ID NO: 2212916 - RNA, 19 nt, Artificial Sequence
  Description of Artificial Sequence: Synthetic oligonucleotide
  Sense strand starting at position 93 of SEQ ID NO: 1883739
ccacuagguaguuggagaa

SEQ ID NO: 2212917 - RNA, 19 nt, Artificial Sequence
  Description of Artificial Sequence: Synthetic oligonucleotide
  Antisense strand to SEQ ID NO: 2212916
uucuccaacuaccuagugg

SEQ ID NO: 2212918 - RNA, 19 nt, Artificial Sequence
  Description of Artificial Sequence: Synthetic oligonucleotide
  Sense strand starting at position 3726 of SEQ ID NO: 1883739
gguagucagcuuuagaaag

SEQ ID NO: 2212919 - RNA, 19 nt, Artificial Sequence
  Description of Artificial Sequence: Synthetic oligonucleotide
  Antisense strand to SEQ ID NO: 2212918
cuuucuaaagcugacuacc

SEQ ID NO: 2212920 - RNA, 19 nt, Artificial Sequence
  Description of Artificial Sequence: Synthetic oligonucleotide
  Sense strand starting at position 421 of SEQ ID NO: 1883739
agaagcagguguuuaagaa

SEQ ID NO: 2212921 - RNA, 19 nt, Artificial Sequence
  Description of Artificial Sequence: Synthetic oligonucleotide
  Antisense strand to SEQ ID NO: 2212920
uucuuaaacaccugcuucu

SEQ ID NO: 2212922 - RNA, 19 nt, Artificial Sequence
  Description of Artificial Sequence: Synthetic oligonucleotide
  Sense strand starting at position 3564 of SEQ ID NO: 1883739
gggucacuaacauguauag

SEQ ID NO: 2212923 - RNA, 19 nt, Artificial Sequence
  Description of Artificial Sequence: Synthetic oligonucleotide
  Antisense strand to SEQ ID NO: 2212922
cuauacauguuagugaccc

SEQ ID NO: 2212924 - RNA, 19 nt, Artificial Sequence
  Description of Artificial Sequence: Synthetic oligonucleotide
  Sense strand starting at position 3621 of SEQ ID NO: 1883739
ugauuuccuuaugaugaga

SEQ ID NO: 2212925 - RNA, 19 nt, Artificial Sequence
  Description of Artificial Sequence: Synthetic oligonucleotide
  Antisense strand to SEQ ID NO: 2212924
ucucaucauaaggaaauca

SEQ ID NO: 2212926 - RNA, 19 nt, Artificial Sequence
  Description of Artificial Sequence: Synthetic oligonucleotide
  Sense strand starting at position 3291 of SEQ ID NO: 1883739
acagaugagucuguugaug

SEQ ID NO: 2212927 - RNA, 19 nt, Artificial Sequence
  Description of Artificial Sequence: Synthetic oligonucleotide
  Antisense strand to SEQ ID NO: 2212926
caucaacagacucaucugu

SEQ ID NO: 2212928 - RNA, 19 nt, Artificial Sequence
  Description of Artificial Sequence: Synthetic oligonucleotide
  Sense strand starting at position 2253 of SEQ ID NO: 1883739
cccugacaggcuuggagau

SEQ ID NO: 2212929 - RNA, 19 nt, Artificial Sequence
  Description of Artificial Sequence: Synthetic oligonucleotide
  Antisense strand to SEQ ID NO: 2212928
aucuccaagccugucaggg

SEQ ID NO: 2212930 - RNA, 19 nt, Artificial Sequence
  Description of Artificial Sequence: Synthetic oligonucleotide
  Sense strand starting at position 3290 of SEQ ID NO: 1883739
gacagaugagucuguugau

SEQ ID NO: 2212931 - RNA, 19 nt, Artificial Sequence
  Description of Artificial Sequence: Synthetic oligonucleotide
  Antisense strand to SEQ ID NO: 2212930
aucaacagacucaucuguc

SEQ ID NO: 2212932 - RNA, 19 nt, Artificial Sequence
  Description of Artificial Sequence: Synthetic oligonucleotide
  Sense strand starting at position 1034 of SEQ ID NO: 1883739
uccuuucucccagagucua

SEQ ID NO: 2212933 - RNA, 19 nt, Artificial Sequence
  Description of Artificial Sequence: Synthetic oligonucleotide
  Antisense strand to SEQ ID NO: 2212932
uagacucugggagaaagga

SEQ ID NO: 2212934 - RNA, 19 nt, Artificial Sequence
  Description of Artificial Sequence: Synthetic oligonucleotide
  Sense strand starting at position 1398 of SEQ ID NO: 1883739
cccugagugccuuagggau

SEQ ID NO: 2212935 - RNA, 19 nt, Artificial Sequence
  Description of Artificial Sequence: Synthetic oligonucleotide
  Antisense strand to SEQ ID NO: 2212934
aucccuaaggcacucaggg

SEQ ID NO: 2212936 - RNA, 19 nt, Artificial Sequence
  Description of Artificial Sequence: Synthetic oligonucleotide
  Sense strand starting at position 1270 of SEQ ID NO: 1883739
cgagcuucccaucaugaac

SEQ ID NO: 2212937 - RNA, 19 nt, Artificial Sequence
  Description of Artificial Sequence: Synthetic oligonucleotide
  Antisense strand to SEQ ID NO: 2212936
guucaugaugggaagcucg

SEQ ID NO: 2212938 - RNA, 19 nt, Artificial Sequence
  Description of Artificial Sequence: Synthetic oligonucleotide
  Sense strand starting at position 418 of SEQ ID NO: 1883739
gggagaagcagguguuuaa

SEQ ID NO: 2212939 - RNA, 19 nt, Artificial Sequence
  Description of Artificial Sequence: Synthetic oligonucleotide
  Antisense strand to SEQ ID NO: 2212938
uuaaacaccugcuucuccc

SEQ ID NO: 2212940 - RNA, 19 nt, Artificial Sequence
  Description of Artificial Sequence: Synthetic oligonucleotide
  Sense strand starting at position 2269 of SEQ ID NO: 1883739
gauugcguugccgucuuaa

SEQ ID NO: 2212941 - RNA, 19 nt, Artificial Sequence
  Description of Artificial Sequence: Synthetic oligonucleotide
  Antisense strand to SEQ ID NO: 2212940
uuaagacggcaacgcaauc

SEQ ID NO: 2212942 - RNA, 19 nt, Artificial Sequence
  Description of Artificial Sequence: Synthetic oligonucleotide
  Sense strand starting at position 1613 of SEQ ID NO: 1883739
gagauaacuuugguuugua

SEQ ID NO: 2212943 - RNA, 19 nt, Artificial Sequence
  Description of Artificial Sequence: Synthetic oligonucleotide
  Antisense strand to SEQ ID NO: 2212942
uacaaaccaaaguuaucuc

SEQ ID NO: 2212944 - RNA, 19 nt, Artificial Sequence
  Description of Artificial Sequence: Synthetic oligonucleotide
  Sense strand starting at position 2346 of SEQ ID NO: 1883739
gcacuugacagaugaggca

SEQ ID NO: 2212945 - RNA, 19 nt, Artificial Sequence
  Description of Artificial Sequence: Synthetic oligonucleotide
  Antisense strand to SEQ ID NO: 2212944
ugccucaucugucaagugc

SEQ ID NO: 2212946 - RNA, 19 nt, Artificial Sequence
  Description of Artificial Sequence: Synthetic oligonucleotide
  Sense strand starting at position 1162 of SEQ ID NO: 1883739
ggaaucaucuuagccaucu

SEQ ID NO: 2212947 - RNA, 19 nt, Artificial Sequence
  Description of Artificial Sequence: Synthetic oligonucleotide
  Antisense strand to SEQ ID NO: 2212946
agauggcuaagaugauucc

SEQ ID NO: 2212948 - RNA, 19 nt, Artificial Sequence
  Description of Artificial Sequence: Synthetic oligonucleotide
  Sense strand starting at position 774 of SEQ ID NO: 1883739
agugaaaucuacucacugu

SEQ ID NO: 2212949 - RNA, 19 nt, Artificial Sequence
  Description of Artificial Sequence: Synthetic oligonucleotide
  Antisense strand to SEQ ID NO: 2212948
acagugaguagauuucacu

SEQ ID NO: 2212950 - RNA, 19 nt, Artificial Sequence
  Description of Artificial Sequence: Synthetic oligonucleotide
  Sense strand starting at position 52 of SEQ ID NO: 1883739
agaugauggugcagagaga

SEQ ID NO: 2212951 - RNA, 19 nt, Artificial Sequence
  Description of Artificial Sequence: Synthetic oligonucleotide
  Antisense strand to SEQ ID NO: 2212950
ucucucugcaccaucaucu

SEQ ID NO: 2212952 - RNA, 19 nt, Artificial Sequence
  Description of Artificial Sequence: Synthetic oligonucleotide
  Sense strand starting at position 184 of SEQ ID NO: 1883739
guucuauugcagcaacaaa

SEQ ID NO: 2212953 - RNA, 19 nt, Artificial Sequence
  Description of Artificial Sequence: Synthetic oligonucleotide
  Antisense strand to SEQ ID NO: 2212952
uuuguugcugcaauagaac

SEQ ID NO: 2212954 - RNA, 19 nt, Artificial Sequence
  Description of Artificial Sequence: Synthetic oligonucleotide
  Sense strand starting at position 1614 of SEQ ID NO: 1883739
agauaacuuugguuuguac

SEQ ID NO: 2212955 - RNA, 19 nt, Artificial Sequence
  Description of Artificial Sequence: Synthetic oligonucleotide
  Antisense strand to SEQ ID NO: 2212954
guacaaaccaaaguuaucu

SEQ ID NO: 2212956 - RNA, 19 nt, Artificial Sequence
  Description of Artificial Sequence: Synthetic oligonucleotide
  Sense strand starting at position 431 of SEQ ID NO: 1883739
guuuaagaauagcugcaaa

SEQ ID NO: 2212957 - RNA, 19 nt, Artificial Sequence
  Description of Artificial Sequence: Synthetic oligonucleotide
  Antisense strand to SEQ ID NO: 2212956
uuugcagcuauucuuaaac

SEQ ID NO: 2212958 - RNA, 19 nt, Artificial Sequence
  Description of Artificial Sequence: Synthetic oligonucleotide
  Sense strand starting at position 615 of SEQ ID NO: 1883739
aaaugagcguuagugggaa

SEQ ID NO: 2212959 - RNA, 19 nt, Artificial Sequence
  Description of Artificial Sequence: Synthetic oligonucleotide
  Antisense strand to SEQ ID NO: 2212958
uucccacuaacgcucauuu

SEQ ID NO: 2212960 - RNA, 19 nt, Artificial Sequence
  Description of Artificial Sequence: Synthetic oligonucleotide
  Sense strand starting at position 3601 of SEQ ID NO: 1883739
ugaaaugaugggugugcca

SEQ ID NO: 2212961 - RNA, 19 nt, Artificial Sequence
  Description of Artificial Sequence: Synthetic oligonucleotide
  Antisense strand to SEQ ID NO: 2212960
uggcacacccaucauuuca

SEQ ID NO: 2212962 - RNA, 19 nt, Artificial Sequence
  Description of Artificial Sequence: Synthetic oligonucleotide
  Sense strand starting at position 2271 of SEQ ID NO: 1883739
uugcguugccgucuuaacu

SEQ ID NO: 2212963 - RNA, 19 nt, Artificial Sequence
  Description of Artificial Sequence: Synthetic oligonucleotide
  Antisense strand to SEQ ID NO: 2212962
aguuaagacggcaacgcaa

SEQ ID NO: 2212964 - RNA, 19 nt, Artificial Sequence
  Description of Artificial Sequence: Synthetic oligonucleotide
  Sense strand starting at position 3623 of SEQ ID NO: 1883739
auuuccuuaugaugagaca

SEQ ID NO: 2212965 - RNA, 19 nt, Artificial Sequence
  Description of Artificial Sequence: Synthetic oligonucleotide
  Antisense strand to SEQ ID NO: 2212964
ugucucaucauaaggaaau

SEQ ID NO: 2212966 - RNA, 19 nt, Artificial Sequence
  Description of Artificial Sequence: Synthetic oligonucleotide
  Sense strand starting at position 3603 of SEQ ID NO: 1883739
aaaugaugggugugccauu

SEQ ID NO: 2212967 - RNA, 19 nt, Artificial Sequence
  Description of Artificial Sequence: Synthetic oligonucleotide
  Antisense strand to SEQ ID NO: 2212966
aauggcacacccaucauuu

SEQ ID NO: 2212968 - RNA, 19 nt, Artificial Sequence
  Description of Artificial Sequence: Synthetic oligonucleotide
  Sense strand starting at position 1053 of SEQ ID NO: 1883739
cauuucuagugagaauggu

SEQ ID NO: 2212969 - RNA, 19 nt, Artificial Sequence
  Description of Artificial Sequence: Synthetic oligonucleotide
  Antisense strand to SEQ ID NO: 2212968
accauucucacuagaaaug

SEQ ID NO: 2212970 - RNA, 19 nt, Artificial Sequence
  Description of Artificial Sequence: Synthetic oligonucleotide
  Sense strand starting at position 499 of SEQ ID NO: 1883739
caguguuuggcugggaaug

SEQ ID NO: 2212971 - RNA, 19 nt, Artificial Sequence
  Description of Artificial Sequence: Synthetic oligonucleotide
  Antisense strand to SEQ ID NO: 2212970
cauucccagccaaacacug

SEQ ID NO: 2212972 - RNA, 19 nt, Artificial Sequence
  Description of Artificial Sequence: Synthetic oligonucleotide
  Sense strand starting at position 3620 of SEQ ID NO: 1883739
uugauuuccuuaugaugag

SEQ ID NO: 2212973 - RNA, 19 nt, Artificial Sequence
  Description of Artificial Sequence: Synthetic oligonucleotide
  Antisense strand to SEQ ID NO: 2212972
cucaucauaaggaaaucaa

SEQ ID NO: 2212974 - RNA, 19 nt, Artificial Sequence
  Description of Artificial Sequence: Synthetic oligonucleotide
  Sense strand starting at position 3079 of SEQ ID NO: 1883740
aucuucuugcuagaaugaa

SEQ ID NO: 2212975 - RNA, 19 nt, Artificial Sequence
  Description of Artificial Sequence: Synthetic oligonucleotide
  Antisense strand to SEQ ID NO: 2212974
uucauucuagcaagaagau

SEQ ID NO: 2212976 - RNA, 19 nt, Artificial Sequence
  Description of Artificial Sequence: Synthetic oligonucleotide
  Sense strand starting at position 143 of SEQ ID NO: 1883740
ggaaaugugagaugugaac

SEQ ID NO: 2212977 - RNA, 19 nt, Artificial Sequence
  Description of Artificial Sequence: Synthetic oligonucleotide
  Antisense strand to SEQ ID NO: 2212976
guucacaucucacauuucc

SEQ ID NO: 2212978 - RNA, 19 nt, Artificial Sequence
  Description of Artificial Sequence: Synthetic oligonucleotide
  Sense strand starting at position 81 of SEQ ID NO: 1883740
aaaggaaagugaguuuagu

SEQ ID NO: 2212979 - RNA, 19 nt, Artificial Sequence
  Description of Artificial Sequence: Synthetic oligonucleotide
  Antisense strand to SEQ ID NO: 2212978
acuaaacucacuuuccuuu

SEQ ID NO: 2212980 - RNA, 19 nt, Artificial Sequence
  Description of Artificial Sequence: Synthetic oligonucleotide
  Sense strand starting at position 1227 of SEQ ID NO: 1883740
aauugaagguccucggaga

SEQ ID NO: 2212981 - RNA, 19 nt, Artificial Sequence
  Description of Artificial Sequence: Synthetic oligonucleotide
  Antisense strand to SEQ ID NO: 2212980
ucuccgaggaccuucaauu

SEQ ID NO: 2212982 - RNA, 19 nt, Artificial Sequence
  Description of Artificial Sequence: Synthetic oligonucleotide
  Sense strand starting at position 3072 of SEQ ID NO: 1883740
cgcugucaucuucuugcua

SEQ ID NO: 2212983 - RNA, 19 nt, Artificial Sequence
  Description of Artificial Sequence: Synthetic oligonucleotide
  Antisense strand to SEQ ID NO: 2212982
uagcaagaagaugacagcg

SEQ ID NO: 2212984 - RNA, 19 nt, Artificial Sequence
  Description of Artificial Sequence: Synthetic oligonucleotide
  Sense strand starting at position 1331 of SEQ ID NO: 1883740
ggcugcuucucauuuccaa

SEQ ID NO: 2212985 - RNA, 19 nt, Artificial Sequence
  Description of Artificial Sequence: Synthetic oligonucleotide
  Antisense strand to SEQ ID NO: 2212984
uuggaaaugagaagcagcc

SEQ ID NO: 2212986 - RNA, 19 nt, Artificial Sequence
  Description of Artificial Sequence: Synthetic oligonucleotide
  Sense strand starting at position 1228 of SEQ ID NO: 1883740
auugaagguccucggagaa

SEQ ID NO: 2212987 - RNA, 19 nt, Artificial Sequence
  Description of Artificial Sequence: Synthetic oligonucleotide
  Antisense strand to SEQ ID NO: 2212986
uucuccgaggaccuucaau

SEQ ID NO: 2212988 - RNA, 19 nt, Artificial Sequence
  Description of Artificial Sequence: Synthetic oligonucleotide
  Sense strand starting at position 3894 of SEQ ID NO: 1883740
gcuagaugugcguuccgga

SEQ ID NO: 2212989 - RNA, 19 nt, Artificial Sequence
  Description of Artificial Sequence: Synthetic oligonucleotide
  Antisense strand to SEQ ID NO: 2212988
uccggaacgcacaucuagc

SEQ ID NO: 2212990 - RNA, 19 nt, Artificial Sequence
  Description of Artificial Sequence: Synthetic oligonucleotide
  Sense strand starting at position 1708 of SEQ ID NO: 1883740
uugucuuaagcagacaucu

SEQ ID NO: 2212991 - RNA, 19 nt, Artificial Sequence
  Description of Artificial Sequence: Synthetic oligonucleotide
  Antisense strand to SEQ ID NO: 2212990
agaugucugcuuaagacaa

SEQ ID NO: 2212992 - RNA, 19 nt, Artificial Sequence
  Description of Artificial Sequence: Synthetic oligonucleotide
  Sense strand starting at position 1795 of SEQ ID NO: 1883740
uuccaaauggcuugugaag

SEQ ID NO: 2212993 - RNA, 19 nt, Artificial Sequence
  Description of Artificial Sequence: Synthetic oligonucleotide
  Antisense strand to SEQ ID NO: 2212992
cuucacaagccauuuggaa

SEQ ID NO: 2212994 - RNA, 19 nt, Artificial Sequence
  Description of Artificial Sequence: Synthetic oligonucleotide
  Sense strand starting at position 1699 of SEQ ID NO: 1883740
uggagagccuugucuuaag

SEQ ID NO: 2212995 - RNA, 19 nt, Artificial Sequence
  Description of Artificial Sequence: Synthetic oligonucleotide
  Antisense strand to SEQ ID NO: 2212994
cuuaagacaaggcucucca

SEQ ID NO: 2212996 - RNA, 19 nt, Artificial Sequence
  Description of Artificial Sequence: Synthetic oligonucleotide
  Sense strand starting at position 3175 of SEQ ID NO: 1883740
ccaagucucagauggguuu

SEQ ID NO: 2212997 - RNA, 19 nt, Artificial Sequence
  Description of Artificial Sequence: Synthetic oligonucleotide
  Antisense strand to SEQ ID NO: 2212996
aaacccaucugagacuugg

SEQ ID NO: 2212998 - RNA, 19 nt, Artificial Sequence
  Description of Artificial Sequence: Synthetic oligonucleotide
  Sense strand starting at position 2096 of SEQ ID NO: 1883740
gacagagcauugcuaccau

SEQ ID NO: 2212999 - RNA, 19 nt, Artificial Sequence
  Description of Artificial Sequence: Synthetic oligonucleotide
  Antisense strand to SEQ ID NO: 2212998
augguagcaaugcucuguc

SEQ ID NO: 2213000 - RNA, 19 nt, Artificial Sequence
  Description of Artificial Sequence: Synthetic oligonucleotide
  Sense strand starting at position 2318 of SEQ ID NO: 1883740
cucaacuucgcuugggaaa

SEQ ID NO: 2213001 - RNA, 19 nt, Artificial Sequence
  Description of Artificial Sequence: Synthetic oligonucleotide
  Antisense strand to SEQ ID NO: 2213000
uuucccaagcgaaguugag

SEQ ID NO: 2213002 - RNA, 19 nt, Artificial Sequence
  Description of Artificial Sequence: Synthetic oligonucleotide
  Sense strand starting at position 3063 of SEQ ID NO: 1883740
agcugauuucgcugucauc

SEQ ID NO: 2213003 - RNA, 19 nt, Artificial Sequence
  Description of Artificial Sequence: Synthetic oligonucleotide
  Antisense strand to SEQ ID NO: 2213002
gaugacagcgaaaucagcu

SEQ ID NO: 2213004 - RNA, 19 nt, Artificial Sequence
  Description of Artificial Sequence: Synthetic oligonucleotide
  Sense strand starting at position 3641 of SEQ ID NO: 1883740
gcuggauagucuucuaauc

SEQ ID NO: 2213005 - RNA, 19 nt, Artificial Sequence
  Description of Artificial Sequence: Synthetic oligonucleotide
  Antisense strand to SEQ ID NO: 2213004
gauuagaagacuauccagc

SEQ ID NO: 2213006 - RNA, 19 nt, Artificial Sequence
  Description of Artificial Sequence: Synthetic oligonucleotide
  Sense strand starting at position 3762 of SEQ ID NO: 1883740
gcugauggcucccugaaca

SEQ ID NO: 2213007 - RNA, 19 nt, Artificial Sequence
  Description of Artificial Sequence: Synthetic oligonucleotide
  Antisense strand to SEQ ID NO: 2213006
uguucagggagccaucagc

SEQ ID NO: 2213008 - RNA, 19 nt, Artificial Sequence
  Description of Artificial Sequence: Synthetic oligonucleotide
  Sense strand starting at position 1697 of SEQ ID NO: 1883740
uuuggagagccuugucuua

SEQ ID NO: 2213009 - RNA, 19 nt, Artificial Sequence
  Description of Artificial Sequence: Synthetic oligonucleotide
  Antisense strand to SEQ ID NO: 2213008
uaagacaaggcucuccaaa

SEQ ID NO: 2213010 - RNA, 19 nt, Artificial Sequence
  Description of Artificial Sequence: Synthetic oligonucleotide
  Sense strand starting at position 65 of SEQ ID NO: 1883740
uggcccuuguuucuacaaa

SEQ ID NO: 2213011 - RNA, 19 nt, Artificial Sequence
  Description of Artificial Sequence: Synthetic oligonucleotide
  Antisense strand to SEQ ID NO: 2213010
uuuguagaaacaagggcca

SEQ ID NO: 2213012 - RNA, 19 nt, Artificial Sequence
  Description of Artificial Sequence: Synthetic oligonucleotide
  Sense strand starting at position 3076 of SEQ ID NO: 1883740
gucaucuucuugcuagaau

SEQ ID NO: 2213013 - RNA, 19 nt, Artificial Sequence
  Description of Artificial Sequence: Synthetic oligonucleotide
  Antisense strand to SEQ ID NO: 2213012
auucuagcaagaagaugac

SEQ ID NO: 2213014 - RNA, 19 nt, Artificial Sequence
  Description of Artificial Sequence: Synthetic oligonucleotide
  Sense strand starting at position 3469 of SEQ ID NO: 1883740
cuuaccacugcuugguaau

SEQ ID NO: 2213015 - RNA, 19 nt, Artificial Sequence
  Description of Artificial Sequence: Synthetic oligonucleotide
  Antisense strand to SEQ ID NO: 2213014
auuaccaagcagugguaag

SEQ ID NO: 2213016 - RNA, 19 nt, Artificial Sequence
  Description of Artificial Sequence: Synthetic oligonucleotide
  Sense strand starting at position 91 of SEQ ID NO: 1883740
gaguuuaguccguaggcca

SEQ ID NO: 2213017 - RNA, 19 nt, Artificial Sequence
  Description of Artificial Sequence: Synthetic oligonucleotide
  Antisense strand to SEQ ID NO: 2213016
uggccuacggacuaaacuc

SEQ ID NO: 2213018 - RNA, 19 nt, Artificial Sequence
  Description of Artificial Sequence: Synthetic oligonucleotide
  Sense strand starting at position 141 of SEQ ID NO: 1883740
agggaaaugugagauguga

SEQ ID NO: 2213019 - RNA, 19 nt, Artificial Sequence
  Description of Artificial Sequence: Synthetic oligonucleotide
  Antisense strand to SEQ ID NO: 2213018
ucacaucucacauuucccu

SEQ ID NO: 2213020 - RNA, 19 nt, Artificial Sequence
  Description of Artificial Sequence: Synthetic oligonucleotide
  Sense strand starting at position 87 of SEQ ID NO: 1883740
aagugaguuuaguccguag

SEQ ID NO: 2213021 - RNA, 19 nt, Artificial Sequence
  Description of Artificial Sequence: Synthetic oligonucleotide
  Antisense strand to SEQ ID NO: 2213020
cuacggacuaaacucacuu

SEQ ID NO: 2213022 - RNA, 19 nt, Artificial Sequence
  Description of Artificial Sequence: Synthetic oligonucleotide
  Sense strand starting at position 3899 of SEQ ID NO: 1883740
augugcguuccggaagguu

SEQ ID NO: 2213023 - RNA, 19 nt, Artificial Sequence
  Description of Artificial Sequence: Synthetic oligonucleotide
  Antisense strand to SEQ ID NO: 2213022
aaccuuccggaacgcacau

SEQ ID NO: 2213024 - RNA, 19 nt, Artificial Sequence
  Description of Artificial Sequence: Synthetic oligonucleotide
  Sense strand starting at position 1363 of SEQ ID NO: 1883740
agaagcaugccucgugcau

SEQ ID NO: 2213025 - RNA, 19 nt, Artificial Sequence
  Description of Artificial Sequence: Synthetic oligonucleotide
  Antisense strand to SEQ ID NO: 2213024
augcacgaggcaugcuucu

SEQ ID NO: 2213026 - RNA, 19 nt, Artificial Sequence
  Description of Artificial Sequence: Synthetic oligonucleotide
  Sense strand starting at position 3643 of SEQ ID NO: 1883740
uggauagucuucuaaucug

SEQ ID NO: 2213027 - RNA, 19 nt, Artificial Sequence
  Description of Artificial Sequence: Synthetic oligonucleotide
  Antisense strand to SEQ ID NO: 2213026
cagauuagaagacuaucca

SEQ ID NO: 2213028 - RNA, 19 nt, Artificial Sequence
  Description of Artificial Sequence: Synthetic oligonucleotide
  Sense strand starting at position 2035 of SEQ ID NO: 1883740
gcuugaagccgcugucuga

SEQ ID NO: 2213029 - RNA, 19 nt, Artificial Sequence
  Description of Artificial Sequence: Synthetic oligonucleotide
  Antisense strand to SEQ ID NO: 2213028
ucagacagcggcuucaagc

SEQ ID NO: 2213030 - RNA, 19 nt, Artificial Sequence
  Description of Artificial Sequence: Synthetic oligonucleotide
  Sense strand starting at position 3077 of SEQ ID NO: 1883740
ucaucuucuugcuagaaug

SEQ ID NO: 2213031 - RNA, 19 nt, Artificial Sequence
  Description of Artificial Sequence: Synthetic oligonucleotide
  Antisense strand to SEQ ID NO: 2213030
cauucuagcaagaagauga

SEQ ID NO: 2213032 - RNA, 19 nt, Artificial Sequence
  Description of Artificial Sequence: Synthetic oligonucleotide
  Sense strand starting at position 1797 of SEQ ID NO: 1883740
ccaaauggcuugugaagaa

SEQ ID NO: 2213033 - RNA, 19 nt, Artificial Sequence
  Description of Artificial Sequence: Synthetic oligonucleotide
  Antisense strand to SEQ ID NO: 2213032
uucuucacaagccauuugg

SEQ ID NO: 2213034 - RNA, 19 nt, Artificial Sequence
  Description of Artificial Sequence: Synthetic oligonucleotide
  Sense strand starting at position 66 of SEQ ID NO: 1883740
ggcccuuguuucuacaaag

SEQ ID NO: 2213035 - RNA, 19 nt, Artificial Sequence
  Description of Artificial Sequence: Synthetic oligonucleotide
  Antisense strand to SEQ ID NO: 2213034
cuuuguagaaacaagggcc

SEQ ID NO: 2213036 - RNA, 19 nt, Artificial Sequence
  Description of Artificial Sequence: Synthetic oligonucleotide
  Sense strand starting at position 2577 of SEQ ID NO: 1883740
aggcaugguucccagcauu

SEQ ID NO: 2213037 - RNA, 19 nt, Artificial Sequence
  Description of Artificial Sequence: Synthetic oligonucleotide
  Antisense strand to SEQ ID NO: 2213036
aaugcugggaaccaugccu

SEQ ID NO: 2213038 - RNA, 19 nt, Artificial Sequence
  Description of Artificial Sequence: Synthetic oligonucleotide
  Sense strand starting at position 845 of SEQ ID NO: 1883741
guagcagaaccauaucaac

SEQ ID NO: 2213039 - RNA, 19 nt, Artificial Sequence
  Description of Artificial Sequence: Synthetic oligonucleotide
  Antisense strand to SEQ ID NO: 2213038
guugauaugguucugcuac

SEQ ID NO: 2213040 - RNA, 19 nt, Artificial Sequence
  Description of Artificial Sequence: Synthetic oligonucleotide
  Sense strand starting at position 3345 of SEQ ID NO: 1883741
agccuuugccagcauuuaa

SEQ ID NO: 2213041 - RNA, 19 nt, Artificial Sequence
  Description of Artificial Sequence: Synthetic oligonucleotide
  Antisense strand to SEQ ID NO: 2213040
uuaaaugcuggcaaaggcu

SEQ ID NO: 2213042 - RNA, 19 nt, Artificial Sequence
  Description of Artificial Sequence: Synthetic oligonucleotide
  Sense strand starting at position 3230 of SEQ ID NO: 1883741
uagggagaucuguggacca

SEQ ID NO: 2213043 - RNA, 19 nt, Artificial Sequence
  Description of Artificial Sequence: Synthetic oligonucleotide
  Antisense strand to SEQ ID NO: 2213042
ugguccacagaucucccua

SEQ ID NO: 2213044 - RNA, 19 nt, Artificial Sequence
  Description of Artificial Sequence: Synthetic oligonucleotide
  Sense strand starting at position 839 of SEQ ID NO: 1883741
gaucauguagcagaaccau

SEQ ID NO: 2213045 - RNA, 19 nt, Artificial Sequence
  Description of Artificial Sequence: Synthetic oligonucleotide
  Antisense strand to SEQ ID NO: 2213044
augguucugcuacaugauc

SEQ ID NO: 2213046 - RNA, 19 nt, Artificial Sequence
  Description of Artificial Sequence: Synthetic oligonucleotide
  Sense strand starting at position 3851 of SEQ ID NO: 1883741
guggcuaaacaaugaagaa

SEQ ID NO: 2213047 - RNA, 19 nt, Artificial Sequence
  Description of Artificial Sequence: Synthetic oligonucleotide
  Antisense strand to SEQ ID NO: 2213046
uucuucauuguuuagccac

SEQ ID NO: 2213048 - RNA, 19 nt, Artificial Sequence
  Description of Artificial Sequence: Synthetic oligonucleotide
  Sense strand starting at position 926 of SEQ ID NO: 1883741
aacaaaguggcuuagagua

SEQ ID NO: 2213049 - RNA, 19 nt, Artificial Sequence
  Description of Artificial Sequence: Synthetic oligonucleotide
  Antisense strand to SEQ ID NO: 2213048
uacucuaagccacuuuguu

SEQ ID NO: 2213050 - RNA, 19 nt, Artificial Sequence
  Description of Artificial Sequence: Synthetic oligonucleotide
  Sense strand starting at position 2651 of SEQ ID NO: 1883741
cucauaaaucggcaaacau

SEQ ID NO: 2213051 - RNA, 19 nt, Artificial Sequence
  Description of Artificial Sequence: Synthetic oligonucleotide
  Antisense strand to SEQ ID NO: 2213050
auguuugccgauuuaugag

SEQ ID NO: 2213052 - RNA, 19 nt, Artificial Sequence
  Description of Artificial Sequence: Synthetic oligonucleotide
  Sense strand starting at position 2638 of SEQ ID NO: 1883741
gccauuuggucuucucaua

SEQ ID NO: 2213053 - RNA, 19 nt, Artificial Sequence
  Description of Artificial Sequence: Synthetic oligonucleotide
  Antisense strand to SEQ ID NO: 2213052
uaugagaagaccaaauggc

SEQ ID NO: 2213054 - RNA, 19 nt, Artificial Sequence
  Description of Artificial Sequence: Synthetic oligonucleotide
  Sense strand starting at position 1797 of SEQ ID NO: 1883741
gagaucaggucaucuaauc

SEQ ID NO: 2213055 - RNA, 19 nt, Artificial Sequence
  Description of Artificial Sequence: Synthetic oligonucleotide
  Antisense strand to SEQ ID NO: 2213054
gauuagaugaccugaucuc

SEQ ID NO: 2213056 - RNA, 19 nt, Artificial Sequence
  Description of Artificial Sequence: Synthetic oligonucleotide
  Sense strand starting at position 3062 of SEQ ID NO: 1883741
auacuugaguuauuggaac

SEQ ID NO: 2213057 - RNA, 19 nt, Artificial Sequence
  Description of Artificial Sequence: Synthetic oligonucleotide
  Antisense strand to SEQ ID NO: 2213056
guuccaauaacucaaguau

SEQ ID NO: 2213058 - RNA, 19 nt, Artificial Sequence
  Description of Artificial Sequence: Synthetic oligonucleotide
  Sense strand starting at position 2597 of SEQ ID NO: 1883741
guguuucauguagaaagag

SEQ ID NO: 2213059 - RNA, 19 nt, Artificial Sequence
  Description of Artificial Sequence: Synthetic oligonucleotide
  Antisense strand to SEQ ID NO: 2213058
cucuuucuacaugaaacac

SEQ ID NO: 2213060 - RNA, 19 nt, Artificial Sequence
  Description of Artificial Sequence: Synthetic oligonucleotide
  Sense strand starting at position 2129 of SEQ ID NO: 1883741
ggguucaugguuuacauga

SEQ ID NO: 2213061 - RNA, 19 nt, Artificial Sequence
  Description of Artificial Sequence: Synthetic oligonucleotide
  Antisense strand to SEQ ID NO: 2213060
ucauguaaaccaugaaccc

SEQ ID NO: 2213062 - RNA, 19 nt, Artificial Sequence
  Description of Artificial Sequence: Synthetic oligonucleotide
  Sense strand starting at position 197 of SEQ ID NO: 1883741
guuuaagcagguuaauaaa

SEQ ID NO: 2213063 - RNA, 19 nt, Artificial Sequence
  Description of Artificial Sequence: Synthetic oligonucleotide
  Antisense strand to SEQ ID NO: 2213062
uuuauuaaccugcuuaaac

SEQ ID NO: 2213064 - RNA, 19 nt, Artificial Sequence
  Description of Artificial Sequence: Synthetic oligonucleotide
  Sense strand starting at position 3634 of SEQ ID NO: 1883741
aaguguaagguuuacuaca

SEQ ID NO: 2213065 - RNA, 19 nt, Artificial Sequence
  Description of Artificial Sequence: Synthetic oligonucleotide
  Antisense strand to SEQ ID NO: 2213064
uguaguaaaccuuacacuu

SEQ ID NO: 2213066 - RNA, 19 nt, Artificial Sequence
  Description of Artificial Sequence: Synthetic oligonucleotide
  Sense strand starting at position 931 of SEQ ID NO: 1883741
aguggcuuagaguaccaaa

SEQ ID NO: 2213067 - RNA, 19 nt, Artificial Sequence
  Description of Artificial Sequence: Synthetic oligonucleotide
  Antisense strand to SEQ ID NO: 2213066
uuugguacucuaagccacu

SEQ ID NO: 2213068 - RNA, 19 nt, Artificial Sequence
  Description of Artificial Sequence: Synthetic oligonucleotide
  Sense strand starting at position 3627 of SEQ ID NO: 1883741
ucacuagaaguguaagguu

SEQ ID NO: 2213069 - RNA, 19 nt, Artificial Sequence
  Description of Artificial Sequence: Synthetic oligonucleotide
  Antisense strand to SEQ ID NO: 2213068
aaccuuacacuucuaguga

SEQ ID NO: 2213070 - RNA, 19 nt, Artificial Sequence
  Description of Artificial Sequence: Synthetic oligonucleotide
  Sense strand starting at position 233 of SEQ ID NO: 1883741
uuuaguugacacugauaca

SEQ ID NO: 2213071 - RNA, 19 nt, Artificial Sequence
  Description of Artificial Sequence: Synthetic oligonucleotide
  Antisense strand to SEQ ID NO: 2213070
uguaucagugucaacuaaa

SEQ ID NO: 2213072 - RNA, 19 nt, Artificial Sequence
  Description of Artificial Sequence: Synthetic oligonucleotide
  Sense strand starting at position 50 of SEQ ID NO: 1883741
cucugcugugaauaccaaa

SEQ ID NO: 2213073 - RNA, 19 nt, Artificial Sequence
  Description of Artificial Sequence: Synthetic oligonucleotide
  Antisense strand to SEQ ID NO: 2213072
uuugguauucacagcagag

SEQ ID NO: 2213074 - RNA, 19 nt, Artificial Sequence
  Description of Artificial Sequence: Synthetic oligonucleotide
  Sense strand starting at position 3843 of SEQ ID NO: 1883741
ccaaaucaguggcuaaaca

SEQ ID NO: 2213075 - RNA, 19 nt, Artificial Sequence
  Description of Artificial Sequence: Synthetic oligonucleotide
  Antisense strand to SEQ ID NO: 2213074
uguuuagccacugauuugg

SEQ ID NO: 2213076 - RNA, 19 nt, Artificial Sequence
  Description of Artificial Sequence: Synthetic oligonucleotide
  Sense strand starting at position 300 of SEQ ID NO: 1883741
caguaaguacaguggaaua

SEQ ID NO: 2213077 - RNA, 19 nt, Artificial Sequence
  Description of Artificial Sequence: Synthetic oligonucleotide
  Antisense strand to SEQ ID NO: 2213076
uauuccacuguacuuacug

SEQ ID NO: 2213078 - RNA, 19 nt, Artificial Sequence
  Description of Artificial Sequence: Synthetic oligonucleotide
  Sense strand starting at position 3445 of SEQ ID NO: 1883741
cuugaccauugccuagaaa

SEQ ID NO: 2213079 - RNA, 19 nt, Artificial Sequence
  Description of Artificial Sequence: Synthetic oligonucleotide
  Antisense strand to SEQ ID NO: 2213078
uuucuaggcaauggucaag

SEQ ID NO: 2213080 - RNA, 19 nt, Artificial Sequence
  Description of Artificial Sequence: Synthetic oligonucleotide
  Sense strand starting at position 370 of SEQ ID NO: 1883741
ugggaauagccucaguucu

SEQ ID NO: 2213081 - RNA, 19 nt, Artificial Sequence
  Description of Artificial Sequence: Synthetic oligonucleotide
  Antisense strand to SEQ ID NO: 2213080
agaacugaggcuauuccca

SEQ ID NO: 2213082 - RNA, 19 nt, Artificial Sequence
  Description of Artificial Sequence: Synthetic oligonucleotide
  Sense strand starting at position 3288 of SEQ ID NO: 1883741
gcuuucuacccagaacagu

SEQ ID NO: 2213083 - RNA, 19 nt, Artificial Sequence
  Description of Artificial Sequence: Synthetic oligonucleotide
  Antisense strand to SEQ ID NO: 2213082
acuguucuggguagaaagc

SEQ ID NO: 2213084 - RNA, 19 nt, Artificial Sequence
  Description of Artificial Sequence: Synthetic oligonucleotide
  Sense strand starting at position 2313 of SEQ ID NO: 1883741
caaugcuaugcagaguaca

SEQ ID NO: 2213085 - RNA, 19 nt, Artificial Sequence
  Description of Artificial Sequence: Synthetic oligonucleotide
  Antisense strand to SEQ ID NO: 2213084
uguacucugcauagcauug

SEQ ID NO: 2213086 - RNA, 19 nt, Artificial Sequence
  Description of Artificial Sequence: Synthetic oligonucleotide
  Sense strand starting at position 2650 of SEQ ID NO: 1883741
ucucauaaaucggcaaaca

SEQ ID NO: 2213087 - RNA, 19 nt, Artificial Sequence
  Description of Artificial Sequence: Synthetic oligonucleotide
  Antisense strand to SEQ ID NO: 2213086
uguuugccgauuuaugaga

SEQ ID NO: 2213088 - RNA, 19 nt, Artificial Sequence
  Description of Artificial Sequence: Synthetic oligonucleotide
  Sense strand starting at position 548 of SEQ ID NO: 1883741
aguauuacaucucuuuaug

SEQ ID NO: 2213089 - RNA, 19 nt, Artificial Sequence
  Description of Artificial Sequence: Synthetic oligonucleotide
  Antisense strand to SEQ ID NO: 2213088
cauaaagagauguaauacu

SEQ ID NO: 2213090 - RNA, 19 nt, Artificial Sequence
  Description of Artificial Sequence: Synthetic oligonucleotide
  Sense strand starting at position 1512 of SEQ ID NO: 1883741
ugaguagaauuugauucua

SEQ ID NO: 2213091 - RNA, 19 nt, Artificial Sequence
  Description of Artificial Sequence: Synthetic oligonucleotide
  Antisense strand to SEQ ID NO: 2213090
uagaaucaaauucuacuca

SEQ ID NO: 2213092 - RNA, 19 nt, Artificial Sequence
  Description of Artificial Sequence: Synthetic oligonucleotide
  Sense strand starting at position 1343 of SEQ ID NO: 1883741
agugaucgaucccucaaac

SEQ ID NO: 2213093 - RNA, 19 nt, Artificial Sequence
  Description of Artificial Sequence: Synthetic oligonucleotide
  Antisense strand to SEQ ID NO: 2213092
guuugagggaucgaucacu

SEQ ID NO: 2213094 - RNA, 19 nt, Artificial Sequence
  Description of Artificial Sequence: Synthetic oligonucleotide
  Sense strand starting at position 428 of SEQ ID NO: 1883741
ugcuuucuguauuugcuaa

SEQ ID NO: 2213095 - RNA, 19 nt, Artificial Sequence
  Description of Artificial Sequence: Synthetic oligonucleotide
  Antisense strand to SEQ ID NO: 2213094
uuagcaaauacagaaagca

SEQ ID NO: 2213096 - RNA, 19 nt, Artificial Sequence
  Description of Artificial Sequence: Synthetic oligonucleotide
  Sense strand starting at position 3208 of SEQ ID NO: 1883741
uuucgagauuagcuauaga

SEQ ID NO: 2213097 - RNA, 19 nt, Artificial Sequence
  Description of Artificial Sequence: Synthetic oligonucleotide
  Antisense strand to SEQ ID NO: 2213096
ucuauagcuaaucucgaaa

SEQ ID NO: 2213098 - RNA, 19 nt, Artificial Sequence
  Description of Artificial Sequence: Synthetic oligonucleotide
  Sense strand starting at position 777 of SEQ ID NO: 1883741
gagacacuuuggcuuaucu

SEQ ID NO: 2213099 - RNA, 19 nt, Artificial Sequence
  Description of Artificial Sequence: Synthetic oligonucleotide
  Antisense strand to SEQ ID NO: 2213098
agauaagccaaagugucuc

SEQ ID NO: 2213100 - RNA, 19 nt, Artificial Sequence
  Description of Artificial Sequence: Synthetic oligonucleotide
  Sense strand starting at position 1965 of SEQ ID NO: 1883741
cuuaguguucuccauuaca

SEQ ID NO: 2213101 - RNA, 19 nt, Artificial Sequence
  Description of Artificial Sequence: Synthetic oligonucleotide
  Antisense strand to SEQ ID NO: 2213100
uguaauggagaacacuaag

SEQ ID NO: 2213102 - RNA, 19 nt, Artificial Sequence
  Description of Artificial Sequence: Synthetic oligonucleotide
  Sense strand starting at position 194 of SEQ ID NO: 1883741
aaaguuuaagcagguuaau

SEQ ID NO: 2213103 - RNA, 19 nt, Artificial Sequence
  Description of Artificial Sequence: Synthetic oligonucleotide
  Antisense strand to SEQ ID NO: 2213102
auuaaccugcuuaaacuuu

SEQ ID NO: 2213104 - RNA, 19 nt, Artificial Sequence
  Description of Artificial Sequence: Synthetic oligonucleotide
  Sense strand starting at position 2316 of SEQ ID NO: 1883741
ugcuaugcagaguacauua

SEQ ID NO: 2213105 - RNA, 19 nt, Artificial Sequence
  Description of Artificial Sequence: Synthetic oligonucleotide
  Antisense strand to SEQ ID NO: 2213104
uaauguacucugcauagca

SEQ ID NO: 2213106 - RNA, 19 nt, Artificial Sequence
  Description of Artificial Sequence: Synthetic oligonucleotide
  Sense strand starting at position 1968 of SEQ ID NO: 1883741
aguguucuccauuacaagu

SEQ ID NO: 2213107 - RNA, 19 nt, Artificial Sequence
  Description of Artificial Sequence: Synthetic oligonucleotide
  Antisense strand to SEQ ID NO: 2213106
acuuguaauggagaacacu

SEQ ID NO: 2213108 - RNA, 19 nt, Artificial Sequence
  Description of Artificial Sequence: Synthetic oligonucleotide
  Sense strand starting at position 3636 of SEQ ID NO: 1883741
guguaagguuuacuacaga

SEQ ID NO: 2213109 - RNA, 19 nt, Artificial Sequence
  Description of Artificial Sequence: Synthetic oligonucleotide
  Antisense strand to SEQ ID NO: 2213108
ucuguaguaaaccuuacac

SEQ ID NO: 2213110 - RNA, 19 nt, Artificial Sequence
  Description of Artificial Sequence: Synthetic oligonucleotide
  Sense strand starting at position 2863 of SEQ ID NO: 1883741
gaagaauugcaauguguua

SEQ ID NO: 2213111 - RNA, 19 nt, Artificial Sequence
  Description of Artificial Sequence: Synthetic oligonucleotide
  Antisense strand to SEQ ID NO: 2213110
uaacacauugcaauucuuc

SEQ ID NO: 2213112 - RNA, 19 nt, Artificial Sequence
  Description of Artificial Sequence: Synthetic oligonucleotide
  Sense strand starting at position 2865 of SEQ ID NO: 1883741
agaauugcaauguguuaga

SEQ ID NO: 2213113 - RNA, 19 nt, Artificial Sequence
  Description of Artificial Sequence: Synthetic oligonucleotide
  Antisense strand to SEQ ID NO: 2213112
ucuaacacauugcaauucu

SEQ ID NO: 2213114 - RNA, 19 nt, Artificial Sequence
  Description of Artificial Sequence: Synthetic oligonucleotide
  Sense strand starting at position 1748 of SEQ ID NO: 1883741
auacgaaucuggcucauau

SEQ ID NO: 2213115 - RNA, 19 nt, Artificial Sequence
  Description of Artificial Sequence: Synthetic oligonucleotide
  Antisense strand to SEQ ID NO: 2213114
auaugagccagauucguau

SEQ ID NO: 2213116 - RNA, 19 nt, Artificial Sequence
  Description of Artificial Sequence: Synthetic oligonucleotide
  Sense strand starting at position 372 of SEQ ID NO: 1883741
ggaauagccucaguucuug

SEQ ID NO: 2213117 - RNA, 19 nt, Artificial Sequence
  Description of Artificial Sequence: Synthetic oligonucleotide
  Antisense strand to SEQ ID NO: 2213116
caagaacugaggcuauucc

SEQ ID NO: 2213118 - RNA, 19 nt, Artificial Sequence
  Description of Artificial Sequence: Synthetic oligonucleotide
  Sense strand starting at position 2303 of SEQ ID NO: 1883742
auguguaguauacaggaga

SEQ ID NO: 2213119 - RNA, 19 nt, Artificial Sequence
  Description of Artificial Sequence: Synthetic oligonucleotide
  Antisense strand to SEQ ID NO: 2213118
ucuccuguauacuacacau

SEQ ID NO: 2213120 - RNA, 19 nt, Artificial Sequence
  Description of Artificial Sequence: Synthetic oligonucleotide
  Sense strand starting at position 387 of SEQ ID NO: 1883742
uugaguauacccuauugac

SEQ ID NO: 2213121 - RNA, 19 nt, Artificial Sequence
  Description of Artificial Sequence: Synthetic oligonucleotide
  Antisense strand to SEQ ID NO: 2213120
gucaauaggguauacucaa

SEQ ID NO: 2213122 - RNA, 19 nt, Artificial Sequence
  Description of Artificial Sequence: Synthetic oligonucleotide
  Sense strand starting at position 2039 of SEQ ID NO: 1883742
agcugaauucuacagguaa

SEQ ID NO: 2213123 - RNA, 19 nt, Artificial Sequence
  Description of Artificial Sequence: Synthetic oligonucleotide
  Antisense strand to SEQ ID NO: 2213122
uuaccuguagaauucagcu

SEQ ID NO: 2213124 - RNA, 19 nt, Artificial Sequence
  Description of Artificial Sequence: Synthetic oligonucleotide
  Sense strand starting at position 177 of SEQ ID NO: 1883742
gagcaugugggugaaagau

SEQ ID NO: 2213125 - RNA, 19 nt, Artificial Sequence
  Description of Artificial Sequence: Synthetic oligonucleotide
  Antisense strand to SEQ ID NO: 2213124
aucuuucacccacaugcuc

SEQ ID NO: 2213126 - RNA, 19 nt, Artificial Sequence
  Description of Artificial Sequence: Synthetic oligonucleotide
  Sense strand starting at position 1969 of SEQ ID NO: 1883742
gugucugaucaugagacua

SEQ ID NO: 2213127 - RNA, 19 nt, Artificial Sequence
  Description of Artificial Sequence: Synthetic oligonucleotide
  Antisense strand to SEQ ID NO: 2213126
uagucucaugaucagacac

SEQ ID NO: 2213128 - RNA, 19 nt, Artificial Sequence
  Description of Artificial Sequence: Synthetic oligonucleotide
  Sense strand starting at position 1783 of SEQ ID NO: 1883742
guagguaaauaucugacaa

SEQ ID NO: 2213129 - RNA, 19 nt, Artificial Sequence
  Description of Artificial Sequence: Synthetic oligonucleotide
  Antisense strand to SEQ ID NO: 2213128
uugucagauauuuaccuac

SEQ ID NO: 2213130 - RNA, 19 nt, Artificial Sequence
  Description of Artificial Sequence: Synthetic oligonucleotide
  Sense strand starting at position 1024 of SEQ ID NO: 1883742
ggcaucuaacuaugaagac

SEQ ID NO: 2213131 - RNA, 19 nt, Artificial Sequence
  Description of Artificial Sequence: Synthetic oligonucleotide
  Antisense strand to SEQ ID NO: 2213130
gucuucauaguuagaugcc

SEQ ID NO: 2213132 - RNA, 19 nt, Artificial Sequence
  Description of Artificial Sequence: Synthetic oligonucleotide
  Sense strand starting at position 377 of SEQ ID NO: 1883742
ucuacuacaguugaguaua

SEQ ID NO: 2213133 - RNA, 19 nt, Artificial Sequence
  Description of Artificial Sequence: Synthetic oligonucleotide
  Antisense strand to SEQ ID NO: 2213132
uauacucaacuguaguaga

SEQ ID NO: 2213134 - RNA, 19 nt, Artificial Sequence
  Description of Artificial Sequence: Synthetic oligonucleotide
  Sense strand starting at position 1959 of SEQ ID NO: 1883742
agccauauuugugucugau

SEQ ID NO: 2213135 - RNA, 19 nt, Artificial Sequence
  Description of Artificial Sequence: Synthetic oligonucleotide
  Antisense strand to SEQ ID NO: 2213134
aucagacacaaauauggcu

SEQ ID NO: 2213136 - RNA, 19 nt, Artificial Sequence
  Description of Artificial Sequence: Synthetic oligonucleotide
  Sense strand starting at position 553 of SEQ ID NO: 1883742
cccagaaaccuggguuaca

SEQ ID NO: 2213137 - RNA, 19 nt, Artificial Sequence
  Description of Artificial Sequence: Synthetic oligonucleotide
  Antisense strand to SEQ ID NO: 2213136
uguaacccagguuucuggg

SEQ ID NO: 2213138 - RNA, 19 nt, Artificial Sequence
  Description of Artificial Sequence: Synthetic oligonucleotide
  Sense strand starting at position 3280 of SEQ ID NO: 1883742
acauuauucugggugauga

SEQ ID NO: 2213139 - RNA, 19 nt, Artificial Sequence
  Description of Artificial Sequence: Synthetic oligonucleotide
  Antisense strand to SEQ ID NO: 2213138
ucaucacccagaauaaugu

SEQ ID NO: 2213140 - RNA, 19 nt, Artificial Sequence
  Description of Artificial Sequence: Synthetic oligonucleotide
  Sense strand starting at position 3263 of SEQ ID NO: 1883742
agcagaaauucuccaugac

SEQ ID NO: 2213141 - RNA, 19 nt, Artificial Sequence
  Description of Artificial Sequence: Synthetic oligonucleotide
  Antisense strand to SEQ ID NO: 2213140
gucauggagaauuucugcu

SEQ ID NO: 2213142 - RNA, 19 nt, Artificial Sequence
  Description of Artificial Sequence: Synthetic oligonucleotide
  Sense strand starting at position 3291 of SEQ ID NO: 1883742
ggugaugauucuuuggaua

SEQ ID NO: 2213143 - RNA, 19 nt, Artificial Sequence
  Description of Artificial Sequence: Synthetic oligonucleotide
  Antisense strand to SEQ ID NO: 2213142
uauccaaagaaucaucacc

SEQ ID NO: 2213144 - RNA, 19 nt, Artificial Sequence
  Description of Artificial Sequence: Synthetic oligonucleotide
  Sense strand starting at position 3279 of SEQ ID NO: 1883742
gacauuauucugggugaug

SEQ ID NO: 2213145 - RNA, 19 nt, Artificial Sequence
  Description of Artificial Sequence: Synthetic oligonucleotide
  Antisense strand to SEQ ID NO: 2213144
caucacccagaauaauguc

SEQ ID NO: 2213146 - RNA, 19 nt, Artificial Sequence
  Description of Artificial Sequence: Synthetic oligonucleotide
  Sense strand starting at position 3290 of SEQ ID NO: 1883742
gggugaugauucuuuggau

SEQ ID NO: 2213147 - RNA, 19 nt, Artificial Sequence
  Description of Artificial Sequence: Synthetic oligonucleotide
  Antisense strand to SEQ ID NO: 2213146
auccaaagaaucaucaccc

SEQ ID NO: 2213148 - RNA, 19 nt, Artificial Sequence
  Description of Artificial Sequence: Synthetic oligonucleotide
  Sense strand starting at position 176 of SEQ ID NO: 1883742
agagcaugugggugaaaga

SEQ ID NO: 2213149 - RNA, 19 nt, Artificial Sequence
  Description of Artificial Sequence: Synthetic oligonucleotide
  Antisense strand to SEQ ID NO: 2213148
ucuuucacccacaugcucu

SEQ ID NO: 2213150 - RNA, 19 nt, Artificial Sequence
  Description of Artificial Sequence: Synthetic oligonucleotide
  Sense strand starting at position 1814 of SEQ ID NO: 1883742
gaguacugauuguugacaa

SEQ ID NO: 2213151 - RNA, 19 nt, Artificial Sequence
  Description of Artificial Sequence: Synthetic oligonucleotide
  Antisense strand to SEQ ID NO: 2213150
uugucaacaaucaguacuc

SEQ ID NO: 2213152 - RNA, 19 nt, Artificial Sequence
  Description of Artificial Sequence: Synthetic oligonucleotide
  Sense strand starting at position 72 of SEQ ID NO: 1883742
acuacucuauuggcugaaa

SEQ ID NO: 2213153 - RNA, 19 nt, Artificial Sequence
  Description of Artificial Sequence: Synthetic oligonucleotide
  Antisense strand to SEQ ID NO: 2213152
uuucagccaauagaguagu

SEQ ID NO: 2213154 - RNA, 19 nt, Artificial Sequence
  Description of Artificial Sequence: Synthetic oligonucleotide
  Sense strand starting at position 2010 of SEQ ID NO: 1883742
ugugauguuccuuacauag

SEQ ID NO: 2213155 - RNA, 19 nt, Artificial Sequence
  Description of Artificial Sequence: Synthetic oligonucleotide
  Antisense strand to SEQ ID NO: 2213154
cuauguaaggaacaucaca

SEQ ID NO: 2213156 - RNA, 19 nt, Artificial Sequence
  Description of Artificial Sequence: Synthetic oligonucleotide
  Sense strand starting at position 3281 of SEQ ID NO: 1883742
cauuauucugggugaugau

SEQ ID NO: 2213157 - RNA, 19 nt, Artificial Sequence
  Description of Artificial Sequence: Synthetic oligonucleotide
  Antisense strand to SEQ ID NO: 2213156
aucaucacccagaauaaug

SEQ ID NO: 2213158 - RNA, 19 nt, Artificial Sequence
  Description of Artificial Sequence: Synthetic oligonucleotide
  Sense strand starting at position 2295 of SEQ ID NO: 1883742
uagagauaauguguaguau

SEQ ID NO: 2213159 - RNA, 19 nt, Artificial Sequence
  Description of Artificial Sequence: Synthetic oligonucleotide
  Antisense strand to SEQ ID NO: 2213158
auacuacacauuaucucua

SEQ ID NO: 2213160 - RNA, 19 nt, Artificial Sequence
  Description of Artificial Sequence: Synthetic oligonucleotide
  Sense strand starting at position 2096 of SEQ ID NO: 1883742
ugcagacaacgugaucuua

SEQ ID NO: 2213161 - RNA, 19 nt, Artificial Sequence
  Description of Artificial Sequence: Synthetic oligonucleotide
  Antisense strand to SEQ ID NO: 2213160
uaagaucacguugucugca

SEQ ID NO: 2213162 - RNA, 19 nt, Artificial Sequence
  Description of Artificial Sequence: Synthetic oligonucleotide
  Sense strand starting at position 3885 of SEQ ID NO: 1883742
agauaucuguacuuccauu

SEQ ID NO: 2213163 - RNA, 19 nt, Artificial Sequence
  Description of Artificial Sequence: Synthetic oligonucleotide
  Antisense strand to SEQ ID NO: 2213162
aauggaaguacagauaucu

SEQ ID NO: 2213164 - RNA, 19 nt, Artificial Sequence
  Description of Artificial Sequence: Synthetic oligonucleotide
  Sense strand starting at position 2555 of SEQ ID NO: 1883742
auaugcuaacaaugagcua

SEQ ID NO: 2213165 - RNA, 19 nt, Artificial Sequence
  Description of Artificial Sequence: Synthetic oligonucleotide
  Antisense strand to SEQ ID NO: 2213164
uagcucauuguuagcauau

SEQ ID NO: 2213166 - RNA, 19 nt, Artificial Sequence
  Description of Artificial Sequence: Synthetic oligonucleotide
  Sense strand starting at position 551 of SEQ ID NO: 1883742
ugcccagaaaccuggguua

SEQ ID NO: 2213167 - RNA, 19 nt, Artificial Sequence
  Description of Artificial Sequence: Synthetic oligonucleotide
  Antisense strand to SEQ ID NO: 2213166
uaacccagguuucugggca

SEQ ID NO: 2213168 - RNA, 19 nt, Artificial Sequence
  Description of Artificial Sequence: Synthetic oligonucleotide
  Sense strand starting at position 1865 of SEQ ID NO: 1883742
cagaaugccuggcuugaca

SEQ ID NO: 2213169 - RNA, 19 nt, Artificial Sequence
  Description of Artificial Sequence: Synthetic oligonucleotide
  Antisense strand to SEQ ID NO: 2213168
ugucaagccaggcauucug

SEQ ID NO: 2213170 - RNA, 19 nt, Artificial Sequence
  Description of Artificial Sequence: Synthetic oligonucleotide
  Sense strand starting at position 1863 of SEQ ID NO: 1883742
uacagaaugccuggcuuga

SEQ ID NO: 2213171 - RNA, 19 nt, Artificial Sequence
  Description of Artificial Sequence: Synthetic oligonucleotide
  Antisense strand to SEQ ID NO: 2213170
ucaagccaggcauucugua

SEQ ID NO: 2213172 - RNA, 19 nt, Artificial Sequence
  Description of Artificial Sequence: Synthetic oligonucleotide
  Sense strand starting at position 2053 of SEQ ID NO: 1883742
gguaauagcuagccaccaa

SEQ ID NO: 2213173 - RNA, 19 nt, Artificial Sequence
  Description of Artificial Sequence: Synthetic oligonucleotide
  Antisense strand to SEQ ID NO: 2213172
uugguggcuagcuauuacc

SEQ ID NO: 2213174 - RNA, 19 nt, Artificial Sequence
  Description of Artificial Sequence: Synthetic oligonucleotide
  Sense strand starting at position 2009 of SEQ ID NO: 1883742
cugugauguuccuuacaua

SEQ ID NO: 2213175 - RNA, 19 nt, Artificial Sequence
  Description of Artificial Sequence: Synthetic oligonucleotide
  Antisense strand to SEQ ID NO: 2213174
uauguaaggaacaucacag

SEQ ID NO: 2213176 - RNA, 19 nt, Artificial Sequence
  Description of Artificial Sequence: Synthetic oligonucleotide
  Sense strand starting at position 968 of SEQ ID NO: 1883742
cuaugugugaggugacgaa

SEQ ID NO: 2213177 - RNA, 19 nt, Artificial Sequence
  Description of Artificial Sequence: Synthetic oligonucleotide
  Antisense strand to SEQ ID NO: 2213176
uucgucaccucacacauag

SEQ ID NO: 2213178 - RNA, 19 nt, Artificial Sequence
  Description of Artificial Sequence: Synthetic oligonucleotide
  Sense strand starting at position 376 of SEQ ID NO: 1883742
gucuacuacaguugaguau

SEQ ID NO: 2213179 - RNA, 19 nt, Artificial Sequence
  Description of Artificial Sequence: Synthetic oligonucleotide
  Antisense strand to SEQ ID NO: 2213178
auacucaacuguaguagac

SEQ ID NO: 2213180 - RNA, 19 nt, Artificial Sequence
  Description of Artificial Sequence: Synthetic oligonucleotide
  Sense strand starting at position 2125 of SEQ ID NO: 1883742
ugucuauauccauggguuc

SEQ ID NO: 2213181 - RNA, 19 nt, Artificial Sequence
  Description of Artificial Sequence: Synthetic oligonucleotide
  Antisense strand to SEQ ID NO: 2213180
gaacccauggauauagaca

SEQ ID NO: 2213182 - RNA, 19 nt, Artificial Sequence
  Description of Artificial Sequence: Synthetic oligonucleotide
  Sense strand starting at position 2541 of SEQ ID NO: 1883742
ucaguagcaucuguauaug

SEQ ID NO: 2213183 - RNA, 19 nt, Artificial Sequence
  Description of Artificial Sequence: Synthetic oligonucleotide
  Antisense strand to SEQ ID NO: 2213182
cauauacagaugcuacuga

SEQ ID NO: 2213184 - RNA, 19 nt, Artificial Sequence
  Description of Artificial Sequence: Synthetic oligonucleotide
  Sense strand starting at position 3674 of SEQ ID NO: 1883742
gugcuagaauggcuauuau

SEQ ID NO: 2213185 - RNA, 19 nt, Artificial Sequence
  Description of Artificial Sequence: Synthetic oligonucleotide
  Antisense strand to SEQ ID NO: 2213184
auaauagccauucuagcac

SEQ ID NO: 2213186 - RNA, 19 nt, Artificial Sequence
  Description of Artificial Sequence: Synthetic oligonucleotide
  Sense strand starting at position 2119 of SEQ ID NO: 1883742
guugcuugucuauauccau

SEQ ID NO: 2213187 - RNA, 19 nt, Artificial Sequence
  Description of Artificial Sequence: Synthetic oligonucleotide
  Antisense strand to SEQ ID NO: 2213186
auggauauagacaagcaac

SEQ ID NO: 2213188 - RNA, 19 nt, Artificial Sequence
  Description of Artificial Sequence: Synthetic oligonucleotide
  Sense strand starting at position 2544 of SEQ ID NO: 1883742
guagcaucuguauaugcua

SEQ ID NO: 2213189 - RNA, 19 nt, Artificial Sequence
  Description of Artificial Sequence: Synthetic oligonucleotide
  Antisense strand to SEQ ID NO: 2213188
uagcauauacagaugcuac

SEQ ID NO: 2213190 - RNA, 19 nt, Artificial Sequence
  Description of Artificial Sequence: Synthetic oligonucleotide
  Sense strand starting at position 2547 of SEQ ID NO: 1883742
gcaucuguauaugcuaaca

SEQ ID NO: 2213191 - RNA, 19 nt, Artificial Sequence
  Description of Artificial Sequence: Synthetic oligonucleotide
  Antisense strand to SEQ ID NO: 2213190
uguuagcauauacagaugc

SEQ ID NO: 2213192 - RNA, 19 nt, Artificial Sequence
  Description of Artificial Sequence: Synthetic oligonucleotide
  Sense strand starting at position 1963 of SEQ ID NO: 1883742
auauuugugucugaucaug

SEQ ID NO: 2213193 - RNA, 19 nt, Artificial Sequence
  Description of Artificial Sequence: Synthetic oligonucleotide
  Antisense strand to SEQ ID NO: 2213192
caugaucagacacaaauau

SEQ ID NO: 2213194 - RNA, 19 nt, Artificial Sequence
  Description of Artificial Sequence: Synthetic oligonucleotide
  Sense strand starting at position 1785 of SEQ ID NO: 1883742
agguaaauaucugacaaua

SEQ ID NO: 2213195 - RNA, 19 nt, Artificial Sequence
  Description of Artificial Sequence: Synthetic oligonucleotide
  Antisense strand to SEQ ID NO: 2213194
uauugucagauauuuaccu

SEQ ID NO: 2213196 - RNA, 19 nt, Artificial Sequence
  Description of Artificial Sequence: Synthetic oligonucleotide
  Sense strand starting at position 3294 of SEQ ID NO: 1883742
gaugauucuuuggauauga

SEQ ID NO: 2213197 - RNA, 19 nt, Artificial Sequence
  Description of Artificial Sequence: Synthetic oligonucleotide
  Antisense strand to SEQ ID NO: 2213196
ucauauccaaagaaucauc

SEQ ID NO: 2213198 - RNA, 19 nt, Artificial Sequence
  Description of Artificial Sequence: Synthetic oligonucleotide
  Sense strand starting at position 3683 of SEQ ID NO: 1883743
auccuaccugcucaggaaa

SEQ ID NO: 2213199 - RNA, 19 nt, Artificial Sequence
  Description of Artificial Sequence: Synthetic oligonucleotide
  Antisense strand to SEQ ID NO: 2213198
uuuccugagcagguaggau

SEQ ID NO: 2213200 - RNA, 19 nt, Artificial Sequence
  Description of Artificial Sequence: Synthetic oligonucleotide
  Sense strand starting at position 3605 of SEQ ID NO: 1883743
cccagacagcuugaucuga

SEQ ID NO: 2213201 - RNA, 19 nt, Artificial Sequence
  Description of Artificial Sequence: Synthetic oligonucleotide
  Antisense strand to SEQ ID NO: 2213200
ucagaucaagcugucuggg

SEQ ID NO: 2213202 - RNA, 19 nt, Artificial Sequence
  Description of Artificial Sequence: Synthetic oligonucleotide
  Sense strand starting at position 2710 of SEQ ID NO: 1883743
ccagacucugaaugugaga

SEQ ID NO: 2213203 - RNA, 19 nt, Artificial Sequence
  Description of Artificial Sequence: Synthetic oligonucleotide
  Antisense strand to SEQ ID NO: 2213202
ucucacauucagagucugg

SEQ ID NO: 2213204 - RNA, 19 nt, Artificial Sequence
  Description of Artificial Sequence: Synthetic oligonucleotide
  Sense strand starting at position 974 of SEQ ID NO: 1883743
acugaaagaugcuucugaa

SEQ ID NO: 2213205 - RNA, 19 nt, Artificial Sequence
  Description of Artificial Sequence: Synthetic oligonucleotide
  Antisense strand to SEQ ID NO: 2213204
uucagaagcaucuuucagu

SEQ ID NO: 2213206 - RNA, 19 nt, Artificial Sequence
  Description of Artificial Sequence: Synthetic oligonucleotide
  Sense strand starting at position 1113 of SEQ ID NO: 1883743
uugaaagucccuugauaaa

SEQ ID NO: 2213207 - RNA, 19 nt, Artificial Sequence
  Description of Artificial Sequence: Synthetic oligonucleotide
  Antisense strand to SEQ ID NO: 2213206
uuuaucaagggacuuucaa

SEQ ID NO: 2213208 - RNA, 19 nt, Artificial Sequence
  Description of Artificial Sequence: Synthetic oligonucleotide
  Sense strand starting at position 3776 of SEQ ID NO: 1883743
ugucuaccuccugagauac

SEQ ID NO: 2213209 - RNA, 19 nt, Artificial Sequence
  Description of Artificial Sequence: Synthetic oligonucleotide
  Antisense strand to SEQ ID NO: 2213208
guaucucaggagguagaca

SEQ ID NO: 2213210 - RNA, 19 nt, Artificial Sequence
  Description of Artificial Sequence: Synthetic oligonucleotide
  Sense strand starting at position 186 of SEQ ID NO: 1883743
augggccucgaucaauaau

SEQ ID NO: 2213211 - RNA, 19 nt, Artificial Sequence
  Description of Artificial Sequence: Synthetic oligonucleotide
  Antisense strand to SEQ ID NO: 2213210
auuauugaucgaggcccau

SEQ ID NO: 2213212 - RNA, 19 nt, Artificial Sequence
  Description of Artificial Sequence: Synthetic oligonucleotide
  Sense strand starting at position 828 of SEQ ID NO: 1883743
cuauuuguucuacgacagu

SEQ ID NO: 2213213 - RNA, 19 nt, Artificial Sequence
  Description of Artificial Sequence: Synthetic oligonucleotide
  Antisense strand to SEQ ID NO: 2213212
acugucguagaacaaauag

SEQ ID NO: 2213214 - RNA, 19 nt, Artificial Sequence
  Description of Artificial Sequence: Synthetic oligonucleotide
  Sense strand starting at position 3936 of SEQ ID NO: 1883743
aacagauauccaggagugu

SEQ ID NO: 2213215 - RNA, 19 nt, Artificial Sequence
  Description of Artificial Sequence: Synthetic oligonucleotide
  Antisense strand to SEQ ID NO: 2213214
acacuccuggauaucuguu

SEQ ID NO: 2213216 - RNA, 19 nt, Artificial Sequence
  Description of Artificial Sequence: Synthetic oligonucleotide
  Sense strand starting at position 753 of SEQ ID NO: 1883743
augugauaggacugucaaa

SEQ ID NO: 2213217 - RNA, 19 nt, Artificial Sequence
  Description of Artificial Sequence: Synthetic oligonucleotide
  Antisense strand to SEQ ID NO: 2213216
uuugacaguccuaucacau

SEQ ID NO: 2213218 - RNA, 19 nt, Artificial Sequence
  Description of Artificial Sequence: Synthetic oligonucleotide
  Sense strand starting at position 2936 of SEQ ID NO: 1883743
ugaagagauauguguauau

SEQ ID NO: 2213219 - RNA, 19 nt, Artificial Sequence
  Description of Artificial Sequence: Synthetic oligonucleotide
  Antisense strand to SEQ ID NO: 2213218
auauacacauaucucuuca

SEQ ID NO: 2213220 - RNA, 19 nt, Artificial Sequence
  Description of Artificial Sequence: Synthetic oligonucleotide
  Sense strand starting at position 3786 of SEQ ID NO: 1883743
cugagauacugcucauaga

SEQ ID NO: 2213221 - RNA, 19 nt, Artificial Sequence
  Description of Artificial Sequence: Synthetic oligonucleotide
  Antisense strand to SEQ ID NO: 2213220
ucuaugagcaguaucucag

SEQ ID NO: 2213222 - RNA, 19 nt, Artificial Sequence
  Description of Artificial Sequence: Synthetic oligonucleotide
  Sense strand starting at position 2094 of SEQ ID NO: 1883743
cugauauagguaugagagu

SEQ ID NO: 2213223 - RNA, 19 nt, Artificial Sequence
  Description of Artificial Sequence: Synthetic oligonucleotide
  Antisense strand to SEQ ID NO: 2213222
acucucauaccuauaucag

SEQ ID NO: 2213224 - RNA, 19 nt, Artificial Sequence
  Description of Artificial Sequence: Synthetic oligonucleotide
  Sense strand starting at position 2265 of SEQ ID NO: 1883743
cgauaacaauugguugaau

SEQ ID NO: 2213225 - RNA, 19 nt, Artificial Sequence
  Description of Artificial Sequence: Synthetic oligonucleotide
  Antisense strand to SEQ ID NO: 2213224
auucaaccaauuguuaucg

SEQ ID NO: 2213226 - RNA, 19 nt, Artificial Sequence
  Description of Artificial Sequence: Synthetic oligonucleotide
  Sense strand starting at position 1814 of SEQ ID NO: 1883743
uuuggcucagcagaauaau

SEQ ID NO: 2213227 - RNA, 19 nt, Artificial Sequence
  Description of Artificial Sequence: Synthetic oligonucleotide
  Antisense strand to SEQ ID NO: 2213226
auuauucugcugagccaaa

SEQ ID NO: 2213228 - RNA, 19 nt, Artificial Sequence
  Description of Artificial Sequence: Synthetic oligonucleotide
  Sense strand starting at position 2264 of SEQ ID NO: 1883743
ucgauaacaauugguugaa

SEQ ID NO: 2213229 - RNA, 19 nt, Artificial Sequence
  Description of Artificial Sequence: Synthetic oligonucleotide
  Antisense strand to SEQ ID NO: 2213228
uucaaccaauuguuaucga

SEQ ID NO: 2213230 - RNA, 19 nt, Artificial Sequence
  Description of Artificial Sequence: Synthetic oligonucleotide
  Sense strand starting at position 2111 of SEQ ID NO: 1883743
guaaacaagcaaggugaua

SEQ ID NO: 2213231 - RNA, 19 nt, Artificial Sequence
  Description of Artificial Sequence: Synthetic oligonucleotide
  Antisense strand to SEQ ID NO: 2213230
uaucaccuugcuuguuuac

SEQ ID NO: 2213232 - RNA, 19 nt, Artificial Sequence
  Description of Artificial Sequence: Synthetic oligonucleotide
  Sense strand starting at position 2088 of SEQ ID NO: 1883743
ggccuucugauauagguau

SEQ ID NO: 2213233 - RNA, 19 nt, Artificial Sequence
  Description of Artificial Sequence: Synthetic oligonucleotide
  Antisense strand to SEQ ID NO: 2213232
auaccuauaucagaaggcc

SEQ ID NO: 2213234 - RNA, 19 nt, Artificial Sequence
  Description of Artificial Sequence: Synthetic oligonucleotide
  Sense strand starting at position 2125 of SEQ ID NO: 1883743
ugauaauaguucucucuag

SEQ ID NO: 2213235 - RNA, 19 nt, Artificial Sequence
  Description of Artificial Sequence: Synthetic oligonucleotide
  Antisense strand to SEQ ID NO: 2213234
cuagagagaacuauuauca

SEQ ID NO: 2213236 - RNA, 19 nt, Artificial Sequence
  Description of Artificial Sequence: Synthetic oligonucleotide
  Sense strand starting at position 1640 of SEQ ID NO: 1883743
agacuucucuuugcagaag

SEQ ID NO: 2213237 - RNA, 19 nt, Artificial Sequence
  Description of Artificial Sequence: Synthetic oligonucleotide
  Antisense strand to SEQ ID NO: 2213236
cuucugcaaagagaagucu

SEQ ID NO: 2213238 - RNA, 19 nt, Artificial Sequence
  Description of Artificial Sequence: Synthetic oligonucleotide
  Sense strand starting at position 2204 of SEQ ID NO: 1883743
cuguuaucuccacacaagu

SEQ ID NO: 2213239 - RNA, 19 nt, Artificial Sequence
  Description of Artificial Sequence: Synthetic oligonucleotide
  Antisense strand to SEQ ID NO: 2213238
acuuguguggagauaacag

SEQ ID NO: 2213240 - RNA, 19 nt, Artificial Sequence
  Description of Artificial Sequence: Synthetic oligonucleotide
  Sense strand starting at position 2288 of SEQ ID NO: 1883743
gaagaaaugugucucuacu

SEQ ID NO: 2213241 - RNA, 19 nt, Artificial Sequence
  Description of Artificial Sequence: Synthetic oligonucleotide
  Antisense strand to SEQ ID NO: 2213240
aguagagacacauuucuuc

SEQ ID NO: 2213242 - RNA, 19 nt, Artificial Sequence
  Description of Artificial Sequence: Synthetic oligonucleotide
  Sense strand starting at position 182 of SEQ ID NO: 1883743
agggaugggccucgaucaa

SEQ ID NO: 2213243 - RNA, 19 nt, Artificial Sequence
  Description of Artificial Sequence: Synthetic oligonucleotide
  Antisense strand to SEQ ID NO: 2213242
uugaucgaggcccaucccu

SEQ ID NO: 2213244 - RNA, 19 nt, Artificial Sequence
  Description of Artificial Sequence: Synthetic oligonucleotide
  Sense strand starting at position 2263 of SEQ ID NO: 1883743
uucgauaacaauugguuga

SEQ ID NO: 2213245 - RNA, 19 nt, Artificial Sequence
  Description of Artificial Sequence: Synthetic oligonucleotide
  Antisense strand to SEQ ID NO: 2213244
ucaaccaauuguuaucgaa

SEQ ID NO: 2213246 - RNA, 19 nt, Artificial Sequence
  Description of Artificial Sequence: Synthetic oligonucleotide
  Sense strand starting at position 370 of SEQ ID NO: 1883743
gaggcuuggucauugauga

SEQ ID NO: 2213247 - RNA, 19 nt, Artificial Sequence
  Description of Artificial Sequence: Synthetic oligonucleotide
  Antisense strand to SEQ ID NO: 2213246
ucaucaaugaccaagccuc

SEQ ID NO: 2213248 - RNA, 19 nt, Artificial Sequence
  Description of Artificial Sequence: Synthetic oligonucleotide
  Sense strand starting at position 1774 of SEQ ID NO: 1883743
agucuuuggguagaugcua

SEQ ID NO: 2213249 - RNA, 19 nt, Artificial Sequence
  Description of Artificial Sequence: Synthetic oligonucleotide
  Antisense strand to SEQ ID NO: 2213248
uagcaucuacccaaagacu

SEQ ID NO: 2213250 - RNA, 19 nt, Artificial Sequence
  Description of Artificial Sequence: Synthetic oligonucleotide
  Sense strand starting at position 3816 of SEQ ID NO: 1883743
gcuguacggcuauggauuu

SEQ ID NO: 2213251 - RNA, 19 nt, Artificial Sequence
  Description of Artificial Sequence: Synthetic oligonucleotide
  Antisense strand to SEQ ID NO: 2213250
aaauccauagccguacagc

SEQ ID NO: 2213252 - RNA, 19 nt, Artificial Sequence
  Description of Artificial Sequence: Synthetic oligonucleotide
  Sense strand starting at position 1301 of SEQ ID NO: 1883743
cuuaauucugaugggcuua

SEQ ID NO: 2213253 - RNA, 19 nt, Artificial Sequence
  Description of Artificial Sequence: Synthetic oligonucleotide
  Antisense strand to SEQ ID NO: 2213252
uaagcccaucagaauuaag

SEQ ID NO: 2213254 - RNA, 19 nt, Artificial Sequence
  Description of Artificial Sequence: Synthetic oligonucleotide
  Sense strand starting at position 3541 of SEQ ID NO: 1883743
gguguugccaaguaaacau

SEQ ID NO: 2213255 - RNA, 19 nt, Artificial Sequence
  Description of Artificial Sequence: Synthetic oligonucleotide
  Antisense strand to SEQ ID NO: 2213254
auguuuacuuggcaacacc

SEQ ID NO: 2213256 - RNA, 19 nt, Artificial Sequence
  Description of Artificial Sequence: Synthetic oligonucleotide
  Sense strand starting at position 1771 of SEQ ID NO: 1883743
ccuagucuuuggguagaug

SEQ ID NO: 2213257 - RNA, 19 nt, Artificial Sequence
  Description of Artificial Sequence: Synthetic oligonucleotide
  Antisense strand to SEQ ID NO: 2213256
caucuacccaaagacuagg

SEQ ID NO: 2213258 - RNA, 19 nt, Artificial Sequence
  Description of Artificial Sequence: Synthetic oligonucleotide
  Sense strand starting at position 2290 of SEQ ID NO: 1883743
agaaaugugucucuacucu

SEQ ID NO: 2213259 - RNA, 19 nt, Artificial Sequence
  Description of Artificial Sequence: Synthetic oligonucleotide
  Antisense strand to SEQ ID NO: 2213258
agaguagagacacauuucu

SEQ ID NO: 2213260 - RNA, 19 nt, Artificial Sequence
  Description of Artificial Sequence: Synthetic oligonucleotide
  Sense strand starting at position 371 of SEQ ID NO: 1883743
aggcuuggucauugaugac

SEQ ID NO: 2213261 - RNA, 19 nt, Artificial Sequence
  Description of Artificial Sequence: Synthetic oligonucleotide
  Antisense strand to SEQ ID NO: 2213260
gucaucaaugaccaagccu

SEQ ID NO: 2213262 - RNA, 19 nt, Artificial Sequence
  Description of Artificial Sequence: Synthetic oligonucleotide
  Sense strand starting at position 2410 of SEQ ID NO: 1883743
ggccgcucagaguagagau

SEQ ID NO: 2213263 - RNA, 19 nt, Artificial Sequence
  Description of Artificial Sequence: Synthetic oligonucleotide
  Antisense strand to SEQ ID NO: 2213262
aucucuacucugagcggcc

SEQ ID NO: 2213264 - RNA, 19 nt, Artificial Sequence
  Description of Artificial Sequence: Synthetic oligonucleotide
  Sense strand starting at position 2974 of SEQ ID NO: 1883743
cucuauguauaugcauaua

SEQ ID NO: 2213265 - RNA, 19 nt, Artificial Sequence
  Description of Artificial Sequence: Synthetic oligonucleotide
  Antisense strand to SEQ ID NO: 2213264
uauaugcauauacauagag

SEQ ID NO: 2213266 - RNA, 19 nt, Artificial Sequence
  Description of Artificial Sequence: Synthetic oligonucleotide
  Sense strand starting at position 2440 of SEQ ID NO: 1883743
gccuuccuugcugacagau

SEQ ID NO: 2213267 - RNA, 19 nt, Artificial Sequence
  Description of Artificial Sequence: Synthetic oligonucleotide
  Antisense strand to SEQ ID NO: 2213266
aucugucagcaaggaaggc

SEQ ID NO: 2213268 - RNA, 19 nt, Artificial Sequence
  Description of Artificial Sequence: Synthetic oligonucleotide
  Sense strand starting at position 3950 of SEQ ID NO: 1883743
aguguuuacugucugaaag

SEQ ID NO: 2213269 - RNA, 19 nt, Artificial Sequence
  Description of Artificial Sequence: Synthetic oligonucleotide
  Antisense strand to SEQ ID NO: 2213268
cuuucagacaguaaacacu

SEQ ID NO: 2213270 - RNA, 19 nt, Artificial Sequence
  Description of Artificial Sequence: Synthetic oligonucleotide
  Sense strand starting at position 1957 of SEQ ID NO: 1883743
gucccuugacuaugaguca

SEQ ID NO: 2213271 - RNA, 19 nt, Artificial Sequence
  Description of Artificial Sequence: Synthetic oligonucleotide
  Antisense strand to SEQ ID NO: 2213270
ugacucauagucaagggac

SEQ ID NO: 2213272 - RNA, 19 nt, Artificial Sequence
  Description of Artificial Sequence: Synthetic oligonucleotide
  Sense strand starting at position 2191 of SEQ ID NO: 1883743
agaucuggguccucuguua

SEQ ID NO: 2213273 - RNA, 19 nt, Artificial Sequence
  Description of Artificial Sequence: Synthetic oligonucleotide
  Antisense strand to SEQ ID NO: 2213272
uaacagaggacccagaucu

SEQ ID NO: 2213274 - RNA, 19 nt, Artificial Sequence
  Description of Artificial Sequence: Synthetic oligonucleotide
  Sense strand starting at position 2682 of SEQ ID NO: 1883743
ugcuguaucagccauggau

SEQ ID NO: 2213275 - RNA, 19 nt, Artificial Sequence
  Description of Artificial Sequence: Synthetic oligonucleotide
  Antisense strand to SEQ ID NO: 2213274
auccauggcugauacagca

SEQ ID NO: 2213276 - RNA, 19 nt, Artificial Sequence
  Description of Artificial Sequence: Synthetic oligonucleotide
  Sense strand starting at position 3951 of SEQ ID NO: 1883743
guguuuacugucugaaaga

SEQ ID NO: 2213277 - RNA, 19 nt, Artificial Sequence
  Description of Artificial Sequence: Synthetic oligonucleotide
  Antisense strand to SEQ ID NO: 2213276
ucuuucagacaguaaacac

SEQ ID NO: 2213278 - RNA, 19 nt, Artificial Sequence
  Description of Artificial Sequence: Synthetic oligonucleotide
  Sense strand starting at position 3846 of SEQ ID NO: 1883744
ucguaugagguagaaauga

SEQ ID NO: 2213279 - RNA, 19 nt, Artificial Sequence
  Description of Artificial Sequence: Synthetic oligonucleotide
  Antisense strand to SEQ ID NO: 2213278
ucauuucuaccucauacga

SEQ ID NO: 2213280 - RNA, 19 nt, Artificial Sequence
  Description of Artificial Sequence: Synthetic oligonucleotide
  Sense strand starting at position 699 of SEQ ID NO: 1883744
caaggauucccagggcaaa

SEQ ID NO: 2213281 - RNA, 19 nt, Artificial Sequence
  Description of Artificial Sequence: Synthetic oligonucleotide
  Antisense strand to SEQ ID NO: 2213280
uuugcccugggaauccuug

SEQ ID NO: 2213282 - RNA, 19 nt, Artificial Sequence
  Description of Artificial Sequence: Synthetic oligonucleotide
  Sense strand starting at position 874 of SEQ ID NO: 1883744
gcgccaagcauuguucuaa

SEQ ID NO: 2213283 - RNA, 19 nt, Artificial Sequence
  Description of Artificial Sequence: Synthetic oligonucleotide
  Antisense strand to SEQ ID NO: 2213282
uuagaacaaugcuuggcgc

SEQ ID NO: 2213284 - RNA, 19 nt, Artificial Sequence
  Description of Artificial Sequence: Synthetic oligonucleotide
  Sense strand starting at position 186 of SEQ ID NO: 1883744
guguuauugacuuaggaau

SEQ ID NO: 2213285 - RNA, 19 nt, Artificial Sequence
  Description of Artificial Sequence: Synthetic oligonucleotide
  Antisense strand to SEQ ID NO: 2213284
auuccuaagucaauaacac

SEQ ID NO: 2213286 - RNA, 19 nt, Artificial Sequence
  Description of Artificial Sequence: Synthetic oligonucleotide
  Sense strand starting at position 3259 of SEQ ID NO: 1883744
ccagauugggcuuggaaag

SEQ ID NO: 2213287 - RNA, 19 nt, Artificial Sequence
  Description of Artificial Sequence: Synthetic oligonucleotide
  Antisense strand to SEQ ID NO: 2213286
cuuuccaagcccaaucugg

SEQ ID NO: 2213288 - RNA, 19 nt, Artificial Sequence
  Description of Artificial Sequence: Synthetic oligonucleotide
  Sense strand starting at position 2093 of SEQ ID NO: 1883744
agacuucuauggcuaggaa

SEQ ID NO: 2213289 - RNA, 19 nt, Artificial Sequence
  Description of Artificial Sequence: Synthetic oligonucleotide
  Antisense strand to SEQ ID NO: 2213288
uuccuagccauagaagucu

SEQ ID NO: 2213290 - RNA, 19 nt, Artificial Sequence
  Description of Artificial Sequence: Synthetic oligonucleotide
  Sense strand starting at position 2560 of SEQ ID NO: 1883744
gguacaugccuauaucaag

SEQ ID NO: 2213291 - RNA, 19 nt, Artificial Sequence
  Description of Artificial Sequence: Synthetic oligonucleotide
  Antisense strand to SEQ ID NO: 2213290
cuugauauaggcauguacc

SEQ ID NO: 2213292 - RNA, 19 nt, Artificial Sequence
  Description of Artificial Sequence: Synthetic oligonucleotide
  Sense strand starting at position 2305 of SEQ ID NO: 1883744
gaaccuuugucaucagagg

SEQ ID NO: 2213293 - RNA, 19 nt, Artificial Sequence
  Description of Artificial Sequence: Synthetic oligonucleotide
  Antisense strand to SEQ ID NO: 2213292
ccucugaugacaaagguuc

SEQ ID NO: 2213294 - RNA, 19 nt, Artificial Sequence
  Description of Artificial Sequence: Synthetic oligonucleotide
  Sense strand starting at position 2090 of SEQ ID NO: 1883744
aagagacuucuauggcuag

SEQ ID NO: 2213295 - RNA, 19 nt, Artificial Sequence
  Description of Artificial Sequence: Synthetic oligonucleotide
  Antisense strand to SEQ ID NO: 2213294
cuagccauagaagucucuu

SEQ ID NO: 2213296 - RNA, 19 nt, Artificial Sequence
  Description of Artificial Sequence: Synthetic oligonucleotide
  Sense strand starting at position 2102 of SEQ ID NO: 1883744
uggcuaggaaacugacauu

SEQ ID NO: 2213297 - RNA, 19 nt, Artificial Sequence
  Description of Artificial Sequence: Synthetic oligonucleotide
  Antisense strand to SEQ ID NO: 2213296
aaugucaguuuccuagcca

SEQ ID NO: 2213298 - RNA, 19 nt, Artificial Sequence
  Description of Artificial Sequence: Synthetic oligonucleotide
  Sense strand starting at position 1338 of SEQ ID NO: 1883744
gaacacuguguacaguaua

SEQ ID NO: 2213299 - RNA, 19 nt, Artificial Sequence
  Description of Artificial Sequence: Synthetic oligonucleotide
  Antisense strand to SEQ ID NO: 2213298
uauacuguacacaguguuc

SEQ ID NO: 2213300 - RNA, 19 nt, Artificial Sequence
  Description of Artificial Sequence: Synthetic oligonucleotide
  Sense strand starting at position 790 of SEQ ID NO: 1883744
uccugagugcucuaaagga

SEQ ID NO: 2213301 - RNA, 19 nt, Artificial Sequence
  Description of Artificial Sequence: Synthetic oligonucleotide
  Antisense strand to SEQ ID NO: 2213300
uccuuuagagcacucagga

SEQ ID NO: 2213302 - RNA, 19 nt, Artificial Sequence
  Description of Artificial Sequence: Synthetic oligonucleotide
  Sense strand starting at position 2301 of SEQ ID NO: 1883744
agaugaaccuuugucauca

SEQ ID NO: 2213303 - RNA, 19 nt, Artificial Sequence
  Description of Artificial Sequence: Synthetic oligonucleotide
  Antisense strand to SEQ ID NO: 2213302
ugaugacaaagguucaucu

SEQ ID NO: 2213304 - RNA, 19 nt, Artificial Sequence
  Description of Artificial Sequence: Synthetic oligonucleotide
  Sense strand starting at position 3959 of SEQ ID NO: 1883744
cuauaaccuugggcaagau

SEQ ID NO: 2213305 - RNA, 19 nt, Artificial Sequence
  Description of Artificial Sequence: Synthetic oligonucleotide
  Antisense strand to SEQ ID NO: 2213304
aucuugcccaagguuauag

SEQ ID NO: 2213306 - RNA, 19 nt, Artificial Sequence
  Description of Artificial Sequence: Synthetic oligonucleotide
  Sense strand starting at position 2921 of SEQ ID NO: 1883744
augugaaaucuuuguaaag

SEQ ID NO: 2213307 - RNA, 19 nt, Artificial Sequence
  Description of Artificial Sequence: Synthetic oligonucleotide
  Antisense strand to SEQ ID NO: 2213306
cuuuacaaagauuucacau

SEQ ID NO: 2213308 - RNA, 19 nt, Artificial Sequence
  Description of Artificial Sequence: Synthetic oligonucleotide
  Sense strand starting at position 2922 of SEQ ID NO: 1883744
ugugaaaucuuuguaaagg

SEQ ID NO: 2213309 - RNA, 19 nt, Artificial Sequence
  Description of Artificial Sequence: Synthetic oligonucleotide
  Antisense strand to SEQ ID NO: 2213308
ccuuuacaaagauuucaca

SEQ ID NO: 2213310 - RNA, 19 nt, Artificial Sequence
  Description of Artificial Sequence: Synthetic oligonucleotide
  Sense strand starting at position 3030 of SEQ ID NO: 1883744
ccaugugaucuccagcaag

SEQ ID NO: 2213311 - RNA, 19 nt, Artificial Sequence
  Description of Artificial Sequence: Synthetic oligonucleotide
  Antisense strand to SEQ ID NO: 2213310
cuugcuggagaucacaugg

SEQ ID NO: 2213312 - RNA, 19 nt, Artificial Sequence
  Description of Artificial Sequence: Synthetic oligonucleotide
  Sense strand starting at position 3305 of SEQ ID NO: 1883744
ucagaaauccucgauggcu

SEQ ID NO: 2213313 - RNA, 19 nt, Artificial Sequence
  Description of Artificial Sequence: Synthetic oligonucleotide
  Antisense strand to SEQ ID NO: 2213312
agccaucgaggauuucuga

SEQ ID NO: 2213314 - RNA, 19 nt, Artificial Sequence
  Description of Artificial Sequence: Synthetic oligonucleotide
  Sense strand starting at position 88 of SEQ ID NO: 1883744
agacaauggaugugcuaau

SEQ ID NO: 2213315 - RNA, 19 nt, Artificial Sequence
  Description of Artificial Sequence: Synthetic oligonucleotide
  Antisense strand to SEQ ID NO: 2213314
auuagcacauccauugucu

SEQ ID NO: 2213316 - RNA, 19 nt, Artificial Sequence
  Description of Artificial Sequence: Synthetic oligonucleotide
  Sense strand starting at position 2801 of SEQ ID NO: 1883744
ucucccuuccugggagaua

SEQ ID NO: 2213317 - RNA, 19 nt, Artificial Sequence
  Description of Artificial Sequence: Synthetic oligonucleotide
  Antisense strand to SEQ ID NO: 2213316
uaucucccaggaagggaga

SEQ ID NO: 2213318 - RNA, 19 nt, Artificial Sequence
  Description of Artificial Sequence: Synthetic oligonucleotide
  Sense strand starting at position 3924 of SEQ ID NO: 1883744
ggagcagauucuuuggauu

SEQ ID NO: 2213319 - RNA, 19 nt, Artificial Sequence
  Description of Artificial Sequence: Synthetic oligonucleotide
  Antisense strand to SEQ ID NO: 2213318
aauccaaagaaucugcucc

SEQ ID NO: 2213320 - RNA, 19 nt, Artificial Sequence
  Description of Artificial Sequence: Synthetic oligonucleotide
  Sense strand starting at position 3923 of SEQ ID NO: 1883744
uggagcagauucuuuggau

SEQ ID NO: 2213321 - RNA, 19 nt, Artificial Sequence
  Description of Artificial Sequence: Synthetic oligonucleotide
  Antisense strand to SEQ ID NO: 2213320
auccaaagaaucugcucca

SEQ ID NO: 2213322 - RNA, 19 nt, Artificial Sequence
  Description of Artificial Sequence: Synthetic oligonucleotide
  Sense strand starting at position 3839 of SEQ ID NO: 1883744
agaacaaucguaugaggua

SEQ ID NO: 2213323 - RNA, 19 nt, Artificial Sequence
  Description of Artificial Sequence: Synthetic oligonucleotide
  Antisense strand to SEQ ID NO: 2213322
uaccucauacgauuguucu

SEQ ID NO: 2213324 - RNA, 19 nt, Artificial Sequence
  Description of Artificial Sequence: Synthetic oligonucleotide
  Sense strand starting at position 578 of SEQ ID NO: 1883744
ugacaaagucaggguucua

SEQ ID NO: 2213325 - RNA, 19 nt, Artificial Sequence
  Description of Artificial Sequence: Synthetic oligonucleotide
  Antisense strand to SEQ ID NO: 2213324
uagaacccugacuuuguca

SEQ ID NO: 2213326 - RNA, 19 nt, Artificial Sequence
  Description of Artificial Sequence: Synthetic oligonucleotide
  Sense strand starting at position 963 of SEQ ID NO: 1883744
ccaguuugcagauaaggua

SEQ ID NO: 2213327 - RNA, 19 nt, Artificial Sequence
  Description of Artificial Sequence: Synthetic oligonucleotide
  Antisense strand to SEQ ID NO: 2213326
uaccuuaucugcaaacugg

SEQ ID NO: 2213328 - RNA, 19 nt, Artificial Sequence
  Description of Artificial Sequence: Synthetic oligonucleotide
  Sense strand starting at position 3742 of SEQ ID NO: 1883744
augcgagguacaugaagaa

SEQ ID NO: 2213329 - RNA, 19 nt, Artificial Sequence
  Description of Artificial Sequence: Synthetic oligonucleotide
  Antisense strand to SEQ ID NO: 2213328
uucuucauguaccucgcau

SEQ ID NO: 2213330 - RNA, 19 nt, Artificial Sequence
  Description of Artificial Sequence: Synthetic oligonucleotide
  Sense strand starting at position 2558 of SEQ ID NO: 1883744
uugguacaugccuauauca

SEQ ID NO: 2213331 - RNA, 19 nt, Artificial Sequence
  Description of Artificial Sequence: Synthetic oligonucleotide
  Antisense strand to SEQ ID NO: 2213330
ugauauaggcauguaccaa

SEQ ID NO: 2213332 - RNA, 19 nt, Artificial Sequence
  Description of Artificial Sequence: Synthetic oligonucleotide
  Sense strand starting at position 89 of SEQ ID NO: 1883744
gacaauggaugugcuaauu

SEQ ID NO: 2213333 - RNA, 19 nt, Artificial Sequence
  Description of Artificial Sequence: Synthetic oligonucleotide
  Antisense strand to SEQ ID NO: 2213332
aauuagcacauccauuguc

SEQ ID NO: 2213334 - RNA, 19 nt, Artificial Sequence
  Description of Artificial Sequence: Synthetic oligonucleotide
  Sense strand starting at position 1190 of SEQ ID NO: 1883744
uccuuauugcugggauaaa

SEQ ID NO: 2213335 - RNA, 19 nt, Artificial Sequence
  Description of Artificial Sequence: Synthetic oligonucleotide
  Antisense strand to SEQ ID NO: 2213334
uuuaucccagcaauaagga

SEQ ID NO: 2213336 - RNA, 19 nt, Artificial Sequence
  Description of Artificial Sequence: Synthetic oligonucleotide
  Sense strand starting at position 2096 of SEQ ID NO: 1883744
cuucuauggcuaggaaacu

SEQ ID NO: 2213337 - RNA, 19 nt, Artificial Sequence
  Description of Artificial Sequence: Synthetic oligonucleotide
  Antisense strand to SEQ ID NO: 2213336
aguuuccuagccauagaag

SEQ ID NO: 2213338 - RNA, 19 nt, Artificial Sequence
  Description of Artificial Sequence: Synthetic oligonucleotide
  Sense strand starting at position 1189 of SEQ ID NO: 1883744
auccuuauugcugggauaa

SEQ ID NO: 2213339 - RNA, 19 nt, Artificial Sequence
  Description of Artificial Sequence: Synthetic oligonucleotide
  Antisense strand to SEQ ID NO: 2213338
uuaucccagcaauaaggau

SEQ ID NO: 2213340 - RNA, 19 nt, Artificial Sequence
  Description of Artificial Sequence: Synthetic oligonucleotide
  Sense strand starting at position 3463 of SEQ ID NO: 1883744
acaguccuucucugaugga

SEQ ID NO: 2213341 - RNA, 19 nt, Artificial Sequence
  Description of Artificial Sequence: Synthetic oligonucleotide
  Antisense strand to SEQ ID NO: 2213340
uccaucagagaaggacugu

SEQ ID NO: 2213342 - RNA, 19 nt, Artificial Sequence
  Description of Artificial Sequence: Synthetic oligonucleotide
  Sense strand starting at position 1519 of SEQ ID NO: 1883744
ucuguauggcuugaauauu

SEQ ID NO: 2213343 - RNA, 19 nt, Artificial Sequence
  Description of Artificial Sequence: Synthetic oligonucleotide
  Antisense strand to SEQ ID NO: 2213342
aauauucaagccauacaga

SEQ ID NO: 2213344 - RNA, 19 nt, Artificial Sequence
  Description of Artificial Sequence: Synthetic oligonucleotide
  Sense strand starting at position 2414 of SEQ ID NO: 1883744
ucauaauuagcauguggag

SEQ ID NO: 2213345 - RNA, 19 nt, Artificial Sequence
  Description of Artificial Sequence: Synthetic oligonucleotide
  Antisense strand to SEQ ID NO: 2213344
cuccacaugcuaauuauga

SEQ ID NO: 2213346 - RNA, 19 nt, Artificial Sequence
  Description of Artificial Sequence: Synthetic oligonucleotide
  Sense strand starting at position 1294 of SEQ ID NO: 1883744
gcgaucuccaagggaaacu

SEQ ID NO: 2213347 - RNA, 19 nt, Artificial Sequence
  Description of Artificial Sequence: Synthetic oligonucleotide
  Antisense strand to SEQ ID NO: 2213346
aguuucccuuggagaucgc

SEQ ID NO: 2213348 - RNA, 19 nt, Artificial Sequence
  Description of Artificial Sequence: Synthetic oligonucleotide
  Sense strand starting at position 184 of SEQ ID NO: 1883744
ugguguuauugacuuagga

SEQ ID NO: 2213349 - RNA, 19 nt, Artificial Sequence
  Description of Artificial Sequence: Synthetic oligonucleotide
  Antisense strand to SEQ ID NO: 2213348
uccuaagucaauaacacca

SEQ ID NO: 2213350 - RNA, 19 nt, Artificial Sequence
  Description of Artificial Sequence: Synthetic oligonucleotide
  Sense strand starting at position 2285 of SEQ ID NO: 1883744
uaaugcugguucccaaaga

SEQ ID NO: 2213351 - RNA, 19 nt, Artificial Sequence
  Description of Artificial Sequence: Synthetic oligonucleotide
  Antisense strand to SEQ ID NO: 2213350
ucuuugggaaccagcauua

SEQ ID NO: 2213352 - RNA, 19 nt, Artificial Sequence
  Description of Artificial Sequence: Synthetic oligonucleotide
  Sense strand starting at position 3950 of SEQ ID NO: 1883744
cuaguuguucuauaaccuu

SEQ ID NO: 2213353 - RNA, 19 nt, Artificial Sequence
  Description of Artificial Sequence: Synthetic oligonucleotide
  Antisense strand to SEQ ID NO: 2213352
aagguuauagaacaacuag

SEQ ID NO: 2213354 - RNA, 19 nt, Artificial Sequence
  Description of Artificial Sequence: Synthetic oligonucleotide
  Sense strand starting at position 1540 of SEQ ID NO: 1883744
accacauguguguauuacu

SEQ ID NO: 2213355 - RNA, 19 nt, Artificial Sequence
  Description of Artificial Sequence: Synthetic oligonucleotide
  Antisense strand to SEQ ID NO: 2213354
aguaauacacacauguggu

SEQ ID NO: 2213356 - RNA, 19 nt, Artificial Sequence
  Description of Artificial Sequence: Synthetic oligonucleotide
  Sense strand starting at position 925 of SEQ ID NO: 1883744
gcagccacuccaggagaua

SEQ ID NO: 2213357 - RNA, 19 nt, Artificial Sequence
  Description of Artificial Sequence: Synthetic oligonucleotide
  Antisense strand to SEQ ID NO: 2213356
uaucuccuggaguggcugc

SEQ ID NO: 2213358 - RNA, 19 nt, Artificial Sequence
  Description of Artificial Sequence: Synthetic oligonucleotide
  Sense strand starting at position 3186 of SEQ ID NO: 1883745
gcuugucugcaguucuuaa

SEQ ID NO: 2213359 - RNA, 19 nt, Artificial Sequence
  Description of Artificial Sequence: Synthetic oligonucleotide
  Antisense strand to SEQ ID NO: 2213358
uuaagaacugcagacaagc

SEQ ID NO: 2213360 - RNA, 19 nt, Artificial Sequence
  Description of Artificial Sequence: Synthetic oligonucleotide
  Sense strand starting at position 2697 of SEQ ID NO: 1883745
uuauaagcacugggaaaua

SEQ ID NO: 2213361 - RNA, 19 nt, Artificial Sequence
  Description of Artificial Sequence: Synthetic oligonucleotide
  Antisense strand to SEQ ID NO: 2213360
uauuucccagugcuuauaa

SEQ ID NO: 2213362 - RNA, 19 nt, Artificial Sequence
  Description of Artificial Sequence: Synthetic oligonucleotide
  Sense strand starting at position 2235 of SEQ ID NO: 1883745
gauggaaucuaauccaggu

SEQ ID NO: 2213363 - RNA, 19 nt, Artificial Sequence
  Description of Artificial Sequence: Synthetic oligonucleotide
  Antisense strand to SEQ ID NO: 2213362
accuggauuagauuccauc

SEQ ID NO: 2213364 - RNA, 19 nt, Artificial Sequence
  Description of Artificial Sequence: Synthetic oligonucleotide
  Sense strand starting at position 2241 of SEQ ID NO: 1883745
aucuaauccagguggagau

SEQ ID NO: 2213365 - RNA, 19 nt, Artificial Sequence
  Description of Artificial Sequence: Synthetic oligonucleotide
  Antisense strand to SEQ ID NO: 2213364
aucuccaccuggauuagau

SEQ ID NO: 2213366 - RNA, 19 nt, Artificial Sequence
  Description of Artificial Sequence: Synthetic oligonucleotide
  Sense strand starting at position 2152 of SEQ ID NO: 1883745
augaaauugcuguaaacuc

SEQ ID NO: 2213367 - RNA, 19 nt, Artificial Sequence
  Description of Artificial Sequence: Synthetic oligonucleotide
  Antisense strand to SEQ ID NO: 2213366
gaguuuacagcaauuucau

SEQ ID NO: 2213368 - RNA, 19 nt, Artificial Sequence
  Description of Artificial Sequence: Synthetic oligonucleotide
  Sense strand starting at position 2755 of SEQ ID NO: 1883745
acugaaguggucuggaaca

SEQ ID NO: 2213369 - RNA, 19 nt, Artificial Sequence
  Description of Artificial Sequence: Synthetic oligonucleotide
  Antisense strand to SEQ ID NO: 2213368
uguuccagaccacuucagu

SEQ ID NO: 2213370 - RNA, 19 nt, Artificial Sequence
  Description of Artificial Sequence: Synthetic oligonucleotide
  Sense strand starting at position 974 of SEQ ID NO: 1883745
cuuagugaauauguagaau

SEQ ID NO: 2213371 - RNA, 19 nt, Artificial Sequence
  Description of Artificial Sequence: Synthetic oligonucleotide
  Antisense strand to SEQ ID NO: 2213370
auucuacauauucacuaag

SEQ ID NO: 2213372 - RNA, 19 nt, Artificial Sequence
  Description of Artificial Sequence: Synthetic oligonucleotide
  Sense strand starting at position 2256 of SEQ ID NO: 1883745
agaugcuaucaacauuguu

SEQ ID NO: 2213373 - RNA, 19 nt, Artificial Sequence
  Description of Artificial Sequence: Synthetic oligonucleotide
  Antisense strand to SEQ ID NO: 2213372
aacaauguugauagcaucu

SEQ ID NO: 2213374 - RNA, 19 nt, Artificial Sequence
  Description of Artificial Sequence: Synthetic oligonucleotide
  Sense strand starting at position 2725 of SEQ ID NO: 1883745
ugcaacuaacuugauugua

SEQ ID NO: 2213375 - RNA, 19 nt, Artificial Sequence
  Description of Artificial Sequence: Synthetic oligonucleotide
  Antisense strand to SEQ ID NO: 2213374
uacaaucaaguuaguugca

SEQ ID NO: 2213376 - RNA, 19 nt, Artificial Sequence
  Description of Artificial Sequence: Synthetic oligonucleotide
  Sense strand starting at position 2331 of SEQ ID NO: 1883745
aggguuugagaggguuuau

SEQ ID NO: 2213377 - RNA, 19 nt, Artificial Sequence
  Description of Artificial Sequence: Synthetic oligonucleotide
  Antisense strand to SEQ ID NO: 2213376
auaaacccucucaaacccu

SEQ ID NO: 2213378 - RNA, 19 nt, Artificial Sequence
  Description of Artificial Sequence: Synthetic oligonucleotide
  Sense strand starting at position 3890 of SEQ ID NO: 1883745
guaagcuuugaaugauaau

SEQ ID NO: 2213379 - RNA, 19 nt, Artificial Sequence
  Description of Artificial Sequence: Synthetic oligonucleotide
  Antisense strand to SEQ ID NO: 2213378
auuaucauucaaagcuuac

SEQ ID NO: 2213380 - RNA, 19 nt, Artificial Sequence
  Description of Artificial Sequence: Synthetic oligonucleotide
  Sense strand starting at position 2497 of SEQ ID NO: 1883745
gccagcagucaucaauaua

SEQ ID NO: 2213381 - RNA, 19 nt, Artificial Sequence
  Description of Artificial Sequence: Synthetic oligonucleotide
  Antisense strand to SEQ ID NO: 2213380
uauauugaugacugcuggc

SEQ ID NO: 2213382 - RNA, 19 nt, Artificial Sequence
  Description of Artificial Sequence: Synthetic oligonucleotide
  Sense strand starting at position 1838 of SEQ ID NO: 1883745
agugauuucuuugaugaau

SEQ ID NO: 2213383 - RNA, 19 nt, Artificial Sequence
  Description of Artificial Sequence: Synthetic oligonucleotide
  Antisense strand to SEQ ID NO: 2213382
auucaucaaagaaaucacu

SEQ ID NO: 2213384 - RNA, 19 nt, Artificial Sequence
  Description of Artificial Sequence: Synthetic oligonucleotide
  Sense strand starting at position 1174 of SEQ ID NO: 1883745
caucacugucugggugaca

SEQ ID NO: 2213385 - RNA, 19 nt, Artificial Sequence
  Description of Artificial Sequence: Synthetic oligonucleotide
  Antisense strand to SEQ ID NO: 2213384
ugucacccagacagugaug

SEQ ID NO: 2213386 - RNA, 19 nt, Artificial Sequence
  Description of Artificial Sequence: Synthetic oligonucleotide
  Sense strand starting at position 2147 of SEQ ID NO: 1883745
gugagaugaaauugcugua

SEQ ID NO: 2213387 - RNA, 19 nt, Artificial Sequence
  Description of Artificial Sequence: Synthetic oligonucleotide
  Antisense strand to SEQ ID NO: 2213386
uacagcaauuucaucucac

SEQ ID NO: 2213388 - RNA, 19 nt, Artificial Sequence
  Description of Artificial Sequence: Synthetic oligonucleotide
  Sense strand starting at position 2259 of SEQ ID NO: 1883745
ugcuaucaacauuguugaa

SEQ ID NO: 2213389 - RNA, 19 nt, Artificial Sequence
  Description of Artificial Sequence: Synthetic oligonucleotide
  Antisense strand to SEQ ID NO: 2213388
uucaacaauguugauagca

SEQ ID NO: 2213390 - RNA, 19 nt, Artificial Sequence
  Description of Artificial Sequence: Synthetic oligonucleotide
  Sense strand starting at position 3158 of SEQ ID NO: 1883745
ccauuacaggcuugagcaa

SEQ ID NO: 2213391 - RNA, 19 nt, Artificial Sequence
  Description of Artificial Sequence: Synthetic oligonucleotide
  Antisense strand to SEQ ID NO: 2213390
uugcucaagccuguaaugg

SEQ ID NO: 2213392 - RNA, 19 nt, Artificial Sequence
  Description of Artificial Sequence: Synthetic oligonucleotide
  Sense strand starting at position 2490 of SEQ ID NO: 1883745
cugauuagccagcagucau

SEQ ID NO: 2213393 - RNA, 19 nt, Artificial Sequence
  Description of Artificial Sequence: Synthetic oligonucleotide
  Antisense strand to SEQ ID NO: 2213392
augacugcuggcuaaucag

SEQ ID NO: 2213394 - RNA, 19 nt, Artificial Sequence
  Description of Artificial Sequence: Synthetic oligonucleotide
  Sense strand starting at position 882 of SEQ ID NO: 1883745
gcuaauuaguaaccacagu

SEQ ID NO: 2213395 - RNA, 19 nt, Artificial Sequence
  Description of Artificial Sequence: Synthetic oligonucleotide
  Antisense strand to SEQ ID NO: 2213394
acugugguuacuaauuagc

SEQ ID NO: 2213396 - RNA, 19 nt, Artificial Sequence
  Description of Artificial Sequence: Synthetic oligonucleotide
  Sense strand starting at position 933 of SEQ ID NO: 1883745
gcaagucucucacuuuaag

SEQ ID NO: 2213397 - RNA, 19 nt, Artificial Sequence
  Description of Artificial Sequence: Synthetic oligonucleotide
  Antisense strand to SEQ ID NO: 2213396
cuuaaagugagagacuugc

SEQ ID NO: 2213398 - RNA, 19 nt, Artificial Sequence
  Description of Artificial Sequence: Synthetic oligonucleotide
  Sense strand starting at position 3821 of SEQ ID NO: 1883745
uccuguugccauuauacuu

SEQ ID NO: 2213399 - RNA, 19 nt, Artificial Sequence
  Description of Artificial Sequence: Synthetic oligonucleotide
  Antisense strand to SEQ ID NO: 2213398
aaguauaauggcaacagga

SEQ ID NO: 2213400 - RNA, 19 nt, Artificial Sequence
  Description of Artificial Sequence: Synthetic oligonucleotide
  Sense strand starting at position 744 of SEQ ID NO: 1883745
ugcugccuggcucaugaaa

SEQ ID NO: 2213401 - RNA, 19 nt, Artificial Sequence
  Description of Artificial Sequence: Synthetic oligonucleotide
  Antisense strand to SEQ ID NO: 2213400
uuucaugagccaggcagca

SEQ ID NO: 2213402 - RNA, 19 nt, Artificial Sequence
  Description of Artificial Sequence: Synthetic oligonucleotide
  Sense strand starting at position 530 of SEQ ID NO: 1883745
gguggugaugccuggaauc

SEQ ID NO: 2213403 - RNA, 19 nt, Artificial Sequence
  Description of Artificial Sequence: Synthetic oligonucleotide
  Antisense strand to SEQ ID NO: 2213402
gauuccaggcaucaccacc

SEQ ID NO: 2213404 - RNA, 19 nt, Artificial Sequence
  Description of Artificial Sequence: Synthetic oligonucleotide
  Sense strand starting at position 3879 of SEQ ID NO: 1883745
gaaugugcacuguaagcuu

SEQ ID NO: 2213405 - RNA, 19 nt, Artificial Sequence
  Description of Artificial Sequence: Synthetic oligonucleotide
  Antisense strand to SEQ ID NO: 2213404
aagcuuacagugcacauuc

SEQ ID NO: 2213406 - RNA, 19 nt, Artificial Sequence
  Description of Artificial Sequence: Synthetic oligonucleotide
  Sense strand starting at position 3590 of SEQ ID NO: 1883745
gaagauucucugugcucug

SEQ ID NO: 2213407 - RNA, 19 nt, Artificial Sequence
  Description of Artificial Sequence: Synthetic oligonucleotide
  Antisense strand to SEQ ID NO: 2213406
cagagcacagagaaucuuc

SEQ ID NO: 2213408 - RNA, 19 nt, Artificial Sequence
  Description of Artificial Sequence: Synthetic oligonucleotide
  Sense strand starting at position 3589 of SEQ ID NO: 1883745
ugaagauucucugugcucu

SEQ ID NO: 2213409 - RNA, 19 nt, Artificial Sequence
  Description of Artificial Sequence: Synthetic oligonucleotide
  Antisense strand to SEQ ID NO: 2213408
agagcacagagaaucuuca

SEQ ID NO: 2213410 - RNA, 19 nt, Artificial Sequence
  Description of Artificial Sequence: Synthetic oligonucleotide
  Sense strand starting at position 1199 of SEQ ID NO: 1883745
cuguuaauagcaugguuua

SEQ ID NO: 2213411 - RNA, 19 nt, Artificial Sequence
  Description of Artificial Sequence: Synthetic oligonucleotide
  Antisense strand to SEQ ID NO: 2213410
uaaaccaugcuauuaacag

SEQ ID NO: 2213412 - RNA, 19 nt, Artificial Sequence
  Description of Artificial Sequence: Synthetic oligonucleotide
  Sense strand starting at position 1840 of SEQ ID NO: 1883745
ugauuucuuugaugaaucu

SEQ ID NO: 2213413 - RNA, 19 nt, Artificial Sequence
  Description of Artificial Sequence: Synthetic oligonucleotide
  Antisense strand to SEQ ID NO: 2213412
agauucaucaaagaaauca

SEQ ID NO: 2213414 - RNA, 19 nt, Artificial Sequence
  Description of Artificial Sequence: Synthetic oligonucleotide
  Sense strand starting at position 1436 of SEQ ID NO: 1883745
ggugguaguaccuguaauu

SEQ ID NO: 2213415 - RNA, 19 nt, Artificial Sequence
  Description of Artificial Sequence: Synthetic oligonucleotide
  Antisense strand to SEQ ID NO: 2213414
aauuacagguacuaccacc

SEQ ID NO: 2213416 - RNA, 19 nt, Artificial Sequence
  Description of Artificial Sequence: Synthetic oligonucleotide
  Sense strand starting at position 3896 of SEQ ID NO: 1883745
uuugaaugauaaugaagga

SEQ ID NO: 2213417 - RNA, 19 nt, Artificial Sequence
  Description of Artificial Sequence: Synthetic oligonucleotide
  Antisense strand to SEQ ID NO: 2213416
uccuucauuaucauucaaa

SEQ ID NO: 2213418 - RNA, 19 nt, Artificial Sequence
  Description of Artificial Sequence: Synthetic oligonucleotide
  Sense strand starting at position 3033 of SEQ ID NO: 1883745
agcacuaugccuggcuaua

SEQ ID NO: 2213419 - RNA, 19 nt, Artificial Sequence
  Description of Artificial Sequence: Synthetic oligonucleotide
  Antisense strand to SEQ ID NO: 2213418
uauagccaggcauagugcu

SEQ ID NO: 2213420 - RNA, 19 nt, Artificial Sequence
  Description of Artificial Sequence: Synthetic oligonucleotide
  Sense strand starting at position 3690 of SEQ ID NO: 1883745
gucauauaauuggaaucaa

SEQ ID NO: 2213421 - RNA, 19 nt, Artificial Sequence
  Description of Artificial Sequence: Synthetic oligonucleotide
  Antisense strand to SEQ ID NO: 2213420
uugauuccaauuauaugac

SEQ ID NO: 2213422 - RNA, 19 nt, Artificial Sequence
  Description of Artificial Sequence: Synthetic oligonucleotide
  Sense strand starting at position 3893 of SEQ ID NO: 1883745
agcuuugaaugauaaugaa

SEQ ID NO: 2213423 - RNA, 19 nt, Artificial Sequence
  Description of Artificial Sequence: Synthetic oligonucleotide
  Antisense strand to SEQ ID NO: 2213422
uucauuaucauucaaagcu

SEQ ID NO: 2213424 - RNA, 19 nt, Artificial Sequence
  Description of Artificial Sequence: Synthetic oligonucleotide
  Sense strand starting at position 3677 of SEQ ID NO: 1883745
ccguuuccagaacgucaua

SEQ ID NO: 2213425 - RNA, 19 nt, Artificial Sequence
  Description of Artificial Sequence: Synthetic oligonucleotide
  Antisense strand to SEQ ID NO: 2213424
uaugacguucuggaaacgg

SEQ ID NO: 2213426 - RNA, 19 nt, Artificial Sequence
  Description of Artificial Sequence: Synthetic oligonucleotide
  Sense strand starting at position 17 of SEQ ID NO: 1883745
gcgaagauggugugagcau

SEQ ID NO: 2213427 - RNA, 19 nt, Artificial Sequence
  Description of Artificial Sequence: Synthetic oligonucleotide
  Antisense strand to SEQ ID NO: 2213426
augcucacaccaucuucgc

SEQ ID NO: 2213428 - RNA, 19 nt, Artificial Sequence
  Description of Artificial Sequence: Synthetic oligonucleotide
  Sense strand starting at position 3587 of SEQ ID NO: 1883745
cgugaagauucucugugcu

SEQ ID NO: 2213429 - RNA, 19 nt, Artificial Sequence
  Description of Artificial Sequence: Synthetic oligonucleotide
  Antisense strand to SEQ ID NO: 2213428
agcacagagaaucuucacg

SEQ ID NO: 2213430 - RNA, 19 nt, Artificial Sequence
  Description of Artificial Sequence: Synthetic oligonucleotide
  Sense strand starting at position 2410 of SEQ ID NO: 1883745
agggaaaucuuuggugaaa

SEQ ID NO: 2213431 - RNA, 19 nt, Artificial Sequence
  Description of Artificial Sequence: Synthetic oligonucleotide
  Antisense strand to SEQ ID NO: 2213430
uuucaccaaagauuucccu

SEQ ID NO: 2213432 - RNA, 19 nt, Artificial Sequence
  Description of Artificial Sequence: Synthetic oligonucleotide
  Sense strand starting at position 2139 of SEQ ID NO: 1883745
gccuuaaggugagaugaaa

SEQ ID NO: 2213433 - RNA, 19 nt, Artificial Sequence
  Description of Artificial Sequence: Synthetic oligonucleotide
  Antisense strand to SEQ ID NO: 2213432
uuucaucucaccuuaaggc

SEQ ID NO: 2213434 - RNA, 19 nt, Artificial Sequence
  Description of Artificial Sequence: Synthetic oligonucleotide
  Sense strand starting at position 2253 of SEQ ID NO: 1883745
uggagaugcuaucaacauu

SEQ ID NO: 2213435 - RNA, 19 nt, Artificial Sequence
  Description of Artificial Sequence: Synthetic oligonucleotide
  Antisense strand to SEQ ID NO: 2213434
aauguugauagcaucucca

SEQ ID NO: 2213436 - RNA, 19 nt, Artificial Sequence
  Description of Artificial Sequence: Synthetic oligonucleotide
  Sense strand starting at position 2163 of SEQ ID NO: 1883745
guaaacucaugaugaaacu

SEQ ID NO: 2213437 - RNA, 19 nt, Artificial Sequence
  Description of Artificial Sequence: Synthetic oligonucleotide
  Antisense strand to SEQ ID NO: 2213436
aguuucaucaugaguuuac

SEQ ID NO: 2213438 - RNA, 19 nt, Artificial Sequence
  Description of Artificial Sequence: Synthetic oligonucleotide
  Sense strand starting at position 3853 of SEQ ID NO: 1883746
guacaacgugaagaguaaa

SEQ ID NO: 2213439 - RNA, 19 nt, Artificial Sequence
  Description of Artificial Sequence: Synthetic oligonucleotide
  Antisense strand to SEQ ID NO: 2213438
uuuacucuucacguuguac

SEQ ID NO: 2213440 - RNA, 19 nt, Artificial Sequence
  Description of Artificial Sequence: Synthetic oligonucleotide
  Sense strand starting at position 2094 of SEQ ID NO: 1883746
gcagaugugguagaaauca

SEQ ID NO: 2213441 - RNA, 19 nt, Artificial Sequence
  Description of Artificial Sequence: Synthetic oligonucleotide
  Antisense strand to SEQ ID NO: 2213440
ugauuucuaccacaucugc

SEQ ID NO: 2213442 - RNA, 19 nt, Artificial Sequence
  Description of Artificial Sequence: Synthetic oligonucleotide
  Sense strand starting at position 2696 of SEQ ID NO: 1883746
uuauaagcaccgggaaaua

SEQ ID NO: 2213443 - RNA, 19 nt, Artificial Sequence
  Description of Artificial Sequence: Synthetic oligonucleotide
  Antisense strand to SEQ ID NO: 2213442
uauuucccggugcuuauaa

SEQ ID NO: 2213444 - RNA, 19 nt, Artificial Sequence
  Description of Artificial Sequence: Synthetic oligonucleotide
  Sense strand starting at position 2538 of SEQ ID NO: 1883746
aagauuaugacgugguaag

SEQ ID NO: 2213445 - RNA, 19 nt, Artificial Sequence
  Description of Artificial Sequence: Synthetic oligonucleotide
  Antisense strand to SEQ ID NO: 2213444
cuuaccacgucauaaucuu

SEQ ID NO: 2213446 - RNA, 19 nt, Artificial Sequence
  Description of Artificial Sequence: Synthetic oligonucleotide
  Sense strand starting at position 3313 of SEQ ID NO: 1883746
gaacgcagucucuacuaaa

SEQ ID NO: 2213447 - RNA, 19 nt, Artificial Sequence
  Description of Artificial Sequence: Synthetic oligonucleotide
  Antisense strand to SEQ ID NO: 2213446
uuuaguagagacugcguuc

SEQ ID NO: 2213448 - RNA, 19 nt, Artificial Sequence
  Description of Artificial Sequence: Synthetic oligonucleotide
  Sense strand starting at position 2518 of SEQ ID NO: 1883746
gcaagacucucaccagcaa

SEQ ID NO: 2213449 - RNA, 19 nt, Artificial Sequence
  Description of Artificial Sequence: Synthetic oligonucleotide
  Antisense strand to SEQ ID NO: 2213448
uugcuggugagagucuugc

SEQ ID NO: 2213450 - RNA, 19 nt, Artificial Sequence
  Description of Artificial Sequence: Synthetic oligonucleotide
  Sense strand starting at position 849 of SEQ ID NO: 1883746
gcuaauuaguaaccacagu

SEQ ID NO: 2213451 - RNA, 19 nt, Artificial Sequence
  Description of Artificial Sequence: Synthetic oligonucleotide
  Antisense strand to SEQ ID NO: 2213450
acugugguuacuaauuagc

SEQ ID NO: 2213452 - RNA, 19 nt, Artificial Sequence
  Description of Artificial Sequence: Synthetic oligonucleotide
  Sense strand starting at position 900 of SEQ ID NO: 1883746
gcaagucucucacuuuaag

SEQ ID NO: 2213453 - RNA, 19 nt, Artificial Sequence
  Description of Artificial Sequence: Synthetic oligonucleotide
  Antisense strand to SEQ ID NO: 2213452
cuuaaagugagagacuugc

SEQ ID NO: 2213454 - RNA, 19 nt, Artificial Sequence
  Description of Artificial Sequence: Synthetic oligonucleotide
  Sense strand starting at position 2539 of SEQ ID NO: 1883746
agauuaugacgugguaagu

SEQ ID NO: 2213455 - RNA, 19 nt, Artificial Sequence
  Description of Artificial Sequence: Synthetic oligonucleotide
  Antisense strand to SEQ ID NO: 2213454
acuuaccacgucauaaucu

SEQ ID NO: 2213456 - RNA, 19 nt, Artificial Sequence
  Description of Artificial Sequence: Synthetic oligonucleotide
  Sense strand starting at position 3796 of SEQ ID NO: 1883746
uccuguuagcagugaauaa

SEQ ID NO: 2213457 - RNA, 19 nt, Artificial Sequence
  Description of Artificial Sequence: Synthetic oligonucleotide
  Antisense strand to SEQ ID NO: 2213456
uuauucacugcuaacagga

SEQ ID NO: 2213458 - RNA, 19 nt, Artificial Sequence
  Description of Artificial Sequence: Synthetic oligonucleotide
  Sense strand starting at position 3817 of SEQ ID NO: 1883746
ucccguugccauuauacuu

SEQ ID NO: 2213459 - RNA, 19 nt, Artificial Sequence
  Description of Artificial Sequence: Synthetic oligonucleotide
  Antisense strand to SEQ ID NO: 2213458
aaguauaauggcaacggga

SEQ ID NO: 2213460 - RNA, 19 nt, Artificial Sequence
  Description of Artificial Sequence: Synthetic oligonucleotide
  Sense strand starting at position 1405 of SEQ ID NO: 1883746
ggugguaguaccuguaauu

SEQ ID NO: 2213461 - RNA, 19 nt, Artificial Sequence
  Description of Artificial Sequence: Synthetic oligonucleotide
  Antisense strand to SEQ ID NO: 2213460
aauuacagguacuaccacc

SEQ ID NO: 2213462 - RNA, 19 nt, Artificial Sequence
  Description of Artificial Sequence: Synthetic oligonucleotide
  Sense strand starting at position 2749 of SEQ ID NO: 1883746
gccuuauugaaguguucug

SEQ ID NO: 2213463 - RNA, 19 nt, Artificial Sequence
  Description of Artificial Sequence: Synthetic oligonucleotide
  Antisense strand to SEQ ID NO: 2213462
cagaacacuucaauaaggc

SEQ ID NO: 2213464 - RNA, 19 nt, Artificial Sequence
  Description of Artificial Sequence: Synthetic oligonucleotide
  Sense strand starting at position 3811 of SEQ ID NO: 1883746
auaauaucccguugccauu

SEQ ID NO: 2213465 - RNA, 19 nt, Artificial Sequence
  Description of Artificial Sequence: Synthetic oligonucleotide
  Antisense strand to SEQ ID NO: 2213464
aauggcaacgggauauuau

SEQ ID NO: 2213466 - RNA, 19 nt, Artificial Sequence
  Description of Artificial Sequence: Synthetic oligonucleotide
  Sense strand starting at position 2252 of SEQ ID NO: 1883746
uggagaugcuaucaacauu

SEQ ID NO: 2213467 - RNA, 19 nt, Artificial Sequence
  Description of Artificial Sequence: Synthetic oligonucleotide
  Antisense strand to SEQ ID NO: 2213466
aauguugauagcaucucca

SEQ ID NO: 2213468 - RNA, 19 nt, Artificial Sequence
  Description of Artificial Sequence: Synthetic oligonucleotide
  Sense strand starting at position 101 of SEQ ID NO: 1883746
agcagagcccuguguucuu

SEQ ID NO: 2213469 - RNA, 19 nt, Artificial Sequence
  Description of Artificial Sequence: Synthetic oligonucleotide
  Antisense strand to SEQ ID NO: 2213468
aagaacacagggcucugcu

SEQ ID NO: 2213470 - RNA, 19 nt, Artificial Sequence
  Description of Artificial Sequence: Synthetic oligonucleotide
  Sense strand starting at position 3837 of SEQ ID NO: 1883746
ugucaagacucagaacgua

SEQ ID NO: 2213471 - RNA, 19 nt, Artificial Sequence
  Description of Artificial Sequence: Synthetic oligonucleotide
  Antisense strand to SEQ ID NO: 2213470
uacguucugagucuugaca

SEQ ID NO: 2213472 - RNA, 19 nt, Artificial Sequence
  Description of Artificial Sequence: Synthetic oligonucleotide
  Sense strand starting at position 2550 of SEQ ID NO: 1883746
ugguaagucucagauauuc

SEQ ID NO: 2213473 - RNA, 19 nt, Artificial Sequence
  Description of Artificial Sequence: Synthetic oligonucleotide
  Antisense strand to SEQ ID NO: 2213472
gaauaucugagacuuacca

SEQ ID NO: 2213474 - RNA, 19 nt, Artificial Sequence
  Description of Artificial Sequence: Synthetic oligonucleotide
  Sense strand starting at position 3651 of SEQ ID NO: 1883746
uucuacugaucccauaguu

SEQ ID NO: 2213475 - RNA, 19 nt, Artificial Sequence
  Description of Artificial Sequence: Synthetic oligonucleotide
  Antisense strand to SEQ ID NO: 2213474
aacuaugggaucaguagaa

SEQ ID NO: 2213476 - RNA, 19 nt, Artificial Sequence
  Description of Artificial Sequence: Synthetic oligonucleotide
  Sense strand starting at position 2778 of SEQ ID NO: 1883746
uacacuaucucugaggugu

SEQ ID NO: 2213477 - RNA, 19 nt, Artificial Sequence
  Description of Artificial Sequence: Synthetic oligonucleotide
  Antisense strand to SEQ ID NO: 2213476
acaccucagagauagugua

SEQ ID NO: 2213478 - RNA, 19 nt, Artificial Sequence
  Description of Artificial Sequence: Synthetic oligonucleotide
  Sense strand starting at position 2754 of SEQ ID NO: 1883746
auugaaguguucuggaaca

SEQ ID NO: 2213479 - RNA, 19 nt, Artificial Sequence
  Description of Artificial Sequence: Synthetic oligonucleotide
  Antisense strand to SEQ ID NO: 2213478
uguuccagaacacuucaau

SEQ ID NO: 2213480 - RNA, 19 nt, Artificial Sequence
  Description of Artificial Sequence: Synthetic oligonucleotide
  Sense strand starting at position 1723 of SEQ ID NO: 1883746
cauggcugcuaguacaaua

SEQ ID NO: 2213481 - RNA, 19 nt, Artificial Sequence
  Description of Artificial Sequence: Synthetic oligonucleotide
  Antisense strand to SEQ ID NO: 2213480
uauuguacuagcagccaug

SEQ ID NO: 2213482 - RNA, 19 nt, Artificial Sequence
  Description of Artificial Sequence: Synthetic oligonucleotide
  Sense strand starting at position 2548 of SEQ ID NO: 1883746
cgugguaagucucagauau

SEQ ID NO: 2213483 - RNA, 19 nt, Artificial Sequence
  Description of Artificial Sequence: Synthetic oligonucleotide
  Antisense strand to SEQ ID NO: 2213482
auaucugagacuuaccacg

SEQ ID NO: 2213484 - RNA, 19 nt, Artificial Sequence
  Description of Artificial Sequence: Synthetic oligonucleotide
  Sense strand starting at position 2864 of SEQ ID NO: 1883746
ugaguaugcuucuagguuu

SEQ ID NO: 2213485 - RNA, 19 nt, Artificial Sequence
  Description of Artificial Sequence: Synthetic oligonucleotide
  Antisense strand to SEQ ID NO: 2213484
aaaccuagaagcauacuca

SEQ ID NO: 2213486 - RNA, 19 nt, Artificial Sequence
  Description of Artificial Sequence: Synthetic oligonucleotide
  Sense strand starting at position 110 of SEQ ID NO: 1883746
cuguguucuuccugucuga

SEQ ID NO: 2213487 - RNA, 19 nt, Artificial Sequence
  Description of Artificial Sequence: Synthetic oligonucleotide
  Antisense strand to SEQ ID NO: 2213486
ucagacaggaagaacacag

SEQ ID NO: 2213488 - RNA, 19 nt, Artificial Sequence
  Description of Artificial Sequence: Synthetic oligonucleotide
  Sense strand starting at position 2167 of SEQ ID NO: 1883747
gcugaagguaaauauugua

SEQ ID NO: 2213489 - RNA, 19 nt, Artificial Sequence
  Description of Artificial Sequence: Synthetic oligonucleotide
  Antisense strand to SEQ ID NO: 2213488
uacaauauuuaccuucagc

SEQ ID NO: 2213490 - RNA, 19 nt, Artificial Sequence
  Description of Artificial Sequence: Synthetic oligonucleotide
  Sense strand starting at position 3305 of SEQ ID NO: 1883747
ugguguggccguagacaau

SEQ ID NO: 2213491 - RNA, 19 nt, Artificial Sequence
  Description of Artificial Sequence: Synthetic oligonucleotide
  Antisense strand to SEQ ID NO: 2213490
auugucuacggccacacca

SEQ ID NO: 2213492 - RNA, 19 nt, Artificial Sequence
  Description of Artificial Sequence: Synthetic oligonucleotide
  Sense strand starting at position 1204 of SEQ ID NO: 1883747
uuuauuucccagugcuuau

SEQ ID NO: 2213493 - RNA, 19 nt, Artificial Sequence
  Description of Artificial Sequence: Synthetic oligonucleotide
  Antisense strand to SEQ ID NO: 2213492
auaagcacugggaaauaaa

SEQ ID NO: 2213494 - RNA, 19 nt, Artificial Sequence
  Description of Artificial Sequence: Synthetic oligonucleotide
  Sense strand starting at position 1744 of SEQ ID NO: 1883747
ucaucaugaguuuacagca

SEQ ID NO: 2213495 - RNA, 19 nt, Artificial Sequence
  Description of Artificial Sequence: Synthetic oligonucleotide
  Antisense strand to SEQ ID NO: 2213494
ugcuguaaacucaugauga

SEQ ID NO: 2213496 - RNA, 19 nt, Artificial Sequence
  Description of Artificial Sequence: Synthetic oligonucleotide
  Sense strand starting at position 2956 of SEQ ID NO: 1883747
uuucuagcucuggacuuaa

SEQ ID NO: 2213497 - RNA, 19 nt, Artificial Sequence
  Description of Artificial Sequence: Synthetic oligonucleotide
  Antisense strand to SEQ ID NO: 2213496
uuaaguccagagcuagaaa

SEQ ID NO: 2213498 - RNA, 19 nt, Artificial Sequence
  Description of Artificial Sequence: Synthetic oligonucleotide
  Sense strand starting at position 1799 of SEQ ID NO: 1883747
guugucuugugauuucuac

SEQ ID NO: 2213499 - RNA, 19 nt, Artificial Sequence
  Description of Artificial Sequence: Synthetic oligonucleotide
  Antisense strand to SEQ ID NO: 2213498
guagaaaucacaagacaac

SEQ ID NO: 2213500 - RNA, 19 nt, Artificial Sequence
  Description of Artificial Sequence: Synthetic oligonucleotide
  Sense strand starting at position 1305 of SEQ ID NO: 1883747
guguacauaccuuaaguua

SEQ ID NO: 2213501 - RNA, 19 nt, Artificial Sequence
  Description of Artificial Sequence: Synthetic oligonucleotide
  Antisense strand to SEQ ID NO: 2213500
uaacuuaagguauguacac

SEQ ID NO: 2213502 - RNA, 19 nt, Artificial Sequence
  Description of Artificial Sequence: Synthetic oligonucleotide
  Sense strand starting at position 1238 of SEQ ID NO: 1883747
acuauauuguagucuaaug

SEQ ID NO: 2213503 - RNA, 19 nt, Artificial Sequence
  Description of Artificial Sequence: Synthetic oligonucleotide
  Antisense strand to SEQ ID NO: 2213502
cauuagacuacaauauagu

SEQ ID NO: 2213504 - RNA, 19 nt, Artificial Sequence
  Description of Artificial Sequence: Synthetic oligonucleotide
  Sense strand starting at position 1394 of SEQ ID NO: 1883747
gagucuugccucuauauug

SEQ ID NO: 2213505 - RNA, 19 nt, Artificial Sequence
  Description of Artificial Sequence: Synthetic oligonucleotide
  Antisense strand to SEQ ID NO: 2213504
caauauagaggcaagacuc

SEQ ID NO: 2213506 - RNA, 19 nt, Artificial Sequence
  Description of Artificial Sequence: Synthetic oligonucleotide
  Sense strand starting at position 3017 of SEQ ID NO: 1883747
ggccacugugguuacuaau

SEQ ID NO: 2213507 - RNA, 19 nt, Artificial Sequence
  Description of Artificial Sequence: Synthetic oligonucleotide
  Antisense strand to SEQ ID NO: 2213506
auuaguaaccacaguggcc

SEQ ID NO: 2213508 - RNA, 19 nt, Artificial Sequence
  Description of Artificial Sequence: Synthetic oligonucleotide
  Sense strand starting at position 1412 of SEQ ID NO: 1883747
gaugacugcuggcuaauca

SEQ ID NO: 2213509 - RNA, 19 nt, Artificial Sequence
  Description of Artificial Sequence: Synthetic oligonucleotide
  Antisense strand to SEQ ID NO: 2213508
ugauuagccagcagucauc

SEQ ID NO: 2213510 - RNA, 19 nt, Artificial Sequence
  Description of Artificial Sequence: Synthetic oligonucleotide
  Sense strand starting at position 753 of SEQ ID NO: 1883747
gccuguaauggcugcauuu

SEQ ID NO: 2213511 - RNA, 19 nt, Artificial Sequence
  Description of Artificial Sequence: Synthetic oligonucleotide
  Antisense strand to SEQ ID NO: 2213510
aaaugcagccauuacaggc

SEQ ID NO: 2213512 - RNA, 19 nt, Artificial Sequence
  Description of Artificial Sequence: Synthetic oligonucleotide
  Sense strand starting at position 2238 of SEQ ID NO: 1883747
cuggguggcuaggugaauu

SEQ ID NO: 2213513 - RNA, 19 nt, Artificial Sequence
  Description of Artificial Sequence: Synthetic oligonucleotide
  Antisense strand to SEQ ID NO: 2213512
aauucaccuagccacccag

SEQ ID NO: 2213514 - RNA, 19 nt, Artificial Sequence
  Description of Artificial Sequence: Synthetic oligonucleotide
  Sense strand starting at position 3016 of SEQ ID NO: 1883747
aggccacugugguuacuaa

SEQ ID NO: 2213515 - RNA, 19 nt, Artificial Sequence
  Description of Artificial Sequence: Synthetic oligonucleotide
  Antisense strand to SEQ ID NO: 2213514
uuaguaaccacaguggccu

SEQ ID NO: 2213516 - RNA, 19 nt, Artificial Sequence
  Description of Artificial Sequence: Synthetic oligonucleotide
  Sense strand starting at position 1450 of SEQ ID NO: 1883747
uuggaagccugugucaauu

SEQ ID NO: 2213517 - RNA, 19 nt, Artificial Sequence
  Description of Artificial Sequence: Synthetic oligonucleotide
  Antisense strand to SEQ ID NO: 2213516
aauugacacaggcuuccaa

SEQ ID NO: 2213518 - RNA, 19 nt, Artificial Sequence
  Description of Artificial Sequence: Synthetic oligonucleotide
  Sense strand starting at position 205 of SEQ ID NO: 1883747
cguacuguuugauuccaau

SEQ ID NO: 2213519 - RNA, 19 nt, Artificial Sequence
  Description of Artificial Sequence: Synthetic oligonucleotide
  Antisense strand to SEQ ID NO: 2213518
auuggaaucaaacaguacg

SEQ ID NO: 2213520 - RNA, 19 nt, Artificial Sequence
  Description of Artificial Sequence: Synthetic oligonucleotide
  Sense strand starting at position 1390 of SEQ ID NO: 1883747
gugagagucuugccucuau

SEQ ID NO: 2213521 - RNA, 19 nt, Artificial Sequence
  Description of Artificial Sequence: Synthetic oligonucleotide
  Antisense strand to SEQ ID NO: 2213520
auagaggcaagacucucac

SEQ ID NO: 2213522 - RNA, 19 nt, Artificial Sequence
  Description of Artificial Sequence: Synthetic oligonucleotide
  Sense strand starting at position 1449 of SEQ ID NO: 1883747
guuggaagccugugucaau

SEQ ID NO: 2213523 - RNA, 19 nt, Artificial Sequence
  Description of Artificial Sequence: Synthetic oligonucleotide
  Antisense strand to SEQ ID NO: 2213522
auugacacaggcuuccaac

SEQ ID NO: 2213524 - RNA, 19 nt, Artificial Sequence
  Description of Artificial Sequence: Synthetic oligonucleotide
  Sense strand starting at position 1671 of SEQ ID NO: 1883747
uggauuagauuccaucuca

SEQ ID NO: 2213525 - RNA, 19 nt, Artificial Sequence
  Description of Artificial Sequence: Synthetic oligonucleotide
  Antisense strand to SEQ ID NO: 2213524
ugagauggaaucuaaucca

SEQ ID NO: 2213526 - RNA, 19 nt, Artificial Sequence
  Description of Artificial Sequence: Synthetic oligonucleotide
  Sense strand starting at position 2955 of SEQ ID NO: 1883747
auuucuagcucuggacuua

SEQ ID NO: 2213527 - RNA, 19 nt, Artificial Sequence
  Description of Artificial Sequence: Synthetic oligonucleotide
  Antisense strand to SEQ ID NO: 2213526
uaaguccagagcuagaaau

SEQ ID NO: 2213528 - RNA, 19 nt, Artificial Sequence
  Description of Artificial Sequence: Synthetic oligonucleotide
  Sense strand starting at position 744 of SEQ ID NO: 1883747
guugcucaagccuguaaug

SEQ ID NO: 2213529 - RNA, 19 nt, Artificial Sequence
  Description of Artificial Sequence: Synthetic oligonucleotide
  Antisense strand to SEQ ID NO: 2213528
cauuacaggcuugagcaac

SEQ ID NO: 2213530 - RNA, 19 nt, Artificial Sequence
  Description of Artificial Sequence: Synthetic oligonucleotide
  Sense strand starting at position 244 of SEQ ID NO: 1883747
gugaaacuaugggaucagu

SEQ ID NO: 2213531 - RNA, 19 nt, Artificial Sequence
  Description of Artificial Sequence: Synthetic oligonucleotide
  Antisense strand to SEQ ID NO: 2213530
acugaucccauaguuucac

SEQ ID NO: 2213532 - RNA, 19 nt, Artificial Sequence
  Description of Artificial Sequence: Synthetic oligonucleotide
  Sense strand starting at position 2170 of SEQ ID NO: 1883747
gaagguaaauauuguacua

SEQ ID NO: 2213533 - RNA, 19 nt, Artificial Sequence
  Description of Artificial Sequence: Synthetic oligonucleotide
  Antisense strand to SEQ ID NO: 2213532
uaguacaauauuuaccuuc

SEQ ID NO: 2213534 - RNA, 19 nt, Artificial Sequence
  Description of Artificial Sequence: Synthetic oligonucleotide
  Sense strand starting at position 242 of SEQ ID NO: 1883747
cggugaaacuaugggauca

SEQ ID NO: 2213535 - RNA, 19 nt, Artificial Sequence
  Description of Artificial Sequence: Synthetic oligonucleotide
  Antisense strand to SEQ ID NO: 2213534
ugaucccauaguuucaccg

SEQ ID NO: 2213536 - RNA, 19 nt, Artificial Sequence
  Description of Artificial Sequence: Synthetic oligonucleotide
  Sense strand starting at position 1796 of SEQ ID NO: 1883747
cuaguugucuugugauuuc

SEQ ID NO: 2213537 - RNA, 19 nt, Artificial Sequence
  Description of Artificial Sequence: Synthetic oligonucleotide
  Antisense strand to SEQ ID NO: 2213536
gaaaucacaagacaacuag

SEQ ID NO: 2213538 - RNA, 19 nt, Artificial Sequence
  Description of Artificial Sequence: Synthetic oligonucleotide
  Sense strand starting at position 2976 of SEQ ID NO: 1883747
gugagagacuugcaagucu

SEQ ID NO: 2213539 - RNA, 19 nt, Artificial Sequence
  Description of Artificial Sequence: Synthetic oligonucleotide
  Antisense strand to SEQ ID NO: 2213538
agacuugcaagucucucac

SEQ ID NO: 2213540 - RNA, 19 nt, Artificial Sequence
  Description of Artificial Sequence: Synthetic oligonucleotide
  Sense strand starting at position 1183 of SEQ ID NO: 1883747
ucaaguuaguugcauaaac

SEQ ID NO: 2213541 - RNA, 19 nt, Artificial Sequence
  Description of Artificial Sequence: Synthetic oligonucleotide
  Antisense strand to SEQ ID NO: 2213540
guuuaugcaacuaacuuga

SEQ ID NO: 2213542 - RNA, 19 nt, Artificial Sequence
  Description of Artificial Sequence: Synthetic oligonucleotide
  Sense strand starting at position 1243 of SEQ ID NO: 1883747
auuguagucuaaugaguau

SEQ ID NO: 2213543 - RNA, 19 nt, Artificial Sequence
  Description of Artificial Sequence: Synthetic oligonucleotide
  Antisense strand to SEQ ID NO: 2213542
auacucauuagacuacaau

SEQ ID NO: 2213544 - RNA, 19 nt, Artificial Sequence
  Description of Artificial Sequence: Synthetic oligonucleotide
  Sense strand starting at position 1409 of SEQ ID NO: 1883747
auugaugacugcuggcuaa

SEQ ID NO: 2213545 - RNA, 19 nt, Artificial Sequence
  Description of Artificial Sequence: Synthetic oligonucleotide
  Antisense strand to SEQ ID NO: 2213544
uuagccagcagucaucaau

SEQ ID NO: 2213546 - RNA, 19 nt, Artificial Sequence
  Description of Artificial Sequence: Synthetic oligonucleotide
  Sense strand starting at position 321 of SEQ ID NO: 1883747
agagaaucuucacggcagu

SEQ ID NO: 2213547 - RNA, 19 nt, Artificial Sequence
  Description of Artificial Sequence: Synthetic oligonucleotide
  Antisense strand to SEQ ID NO: 2213546
acugccgugaagauucucu

SEQ ID NO: 2213548 - RNA, 19 nt, Artificial Sequence
  Description of Artificial Sequence: Synthetic oligonucleotide
  Sense strand starting at position 64 of SEQ ID NO: 1883747
cguucugagucuugacaaa

SEQ ID NO: 2213549 - RNA, 19 nt, Artificial Sequence
  Description of Artificial Sequence: Synthetic oligonucleotide
  Antisense strand to SEQ ID NO: 2213548
uuugucaagacucagaacg

SEQ ID NO: 2213550 - RNA, 19 nt, Artificial Sequence
  Description of Artificial Sequence: Synthetic oligonucleotide
  Sense strand starting at position 198 of SEQ ID NO: 1883747
aagucuacguacuguuuga

SEQ ID NO: 2213551 - RNA, 19 nt, Artificial Sequence
  Description of Artificial Sequence: Synthetic oligonucleotide
  Antisense strand to SEQ ID NO: 2213550
ucaaacaguacguagacuu

SEQ ID NO: 2213552 - RNA, 19 nt, Artificial Sequence
  Description of Artificial Sequence: Synthetic oligonucleotide
  Sense strand starting at position 1388 of SEQ ID NO: 1883747
uggugagagucuugccucu

SEQ ID NO: 2213553 - RNA, 19 nt, Artificial Sequence
  Description of Artificial Sequence: Synthetic oligonucleotide
  Antisense strand to SEQ ID NO: 2213552
agaggcaagacucucacca

SEQ ID NO: 2213554 - RNA, 19 nt, Artificial Sequence
  Description of Artificial Sequence: Synthetic oligonucleotide
  Sense strand starting at position 58 of SEQ ID NO: 1883747
gcuguacguucugagucuu

SEQ ID NO: 2213555 - RNA, 19 nt, Artificial Sequence
  Description of Artificial Sequence: Synthetic oligonucleotide
  Antisense strand to SEQ ID NO: 2213554
aagacucagaacguacagc

SEQ ID NO: 2213556 - RNA, 19 nt, Artificial Sequence
  Description of Artificial Sequence: Synthetic oligonucleotide
  Sense strand starting at position 93 of SEQ ID NO: 1883748
auggcaacgggauauuauu

SEQ ID NO: 2213557 - RNA, 19 nt, Artificial Sequence
  Description of Artificial Sequence: Synthetic oligonucleotide
  Antisense strand to SEQ ID NO: 2213556
aauaauaucccguugccau

SEQ ID NO: 2213558 - RNA, 19 nt, Artificial Sequence
  Description of Artificial Sequence: Synthetic oligonucleotide
  Sense strand starting at position 88 of SEQ ID NO: 1883748
guauaauggcaacgggaua

SEQ ID NO: 2213559 - RNA, 19 nt, Artificial Sequence
  Description of Artificial Sequence: Synthetic oligonucleotide
  Antisense strand to SEQ ID NO: 2213558
uaucccguugccauuauac

SEQ ID NO: 2213560 - RNA, 19 nt, Artificial Sequence
  Description of Artificial Sequence: Synthetic oligonucleotide
  Sense strand starting at position 1360 of SEQ ID NO: 1883748
ugagacuuaccacgucaua

SEQ ID NO: 2213561 - RNA, 19 nt, Artificial Sequence
  Description of Artificial Sequence: Synthetic oligonucleotide
  Antisense strand to SEQ ID NO: 2213560
uaugacgugguaagucuca

SEQ ID NO: 2213562 - RNA, 19 nt, Artificial Sequence
  Description of Artificial Sequence: Synthetic oligonucleotide
  Sense strand starting at position 1451 of SEQ ID NO: 1883748
uuggaaaccugugucaauu

SEQ ID NO: 2213563 - RNA, 19 nt, Artificial Sequence
  Description of Artificial Sequence: Synthetic oligonucleotide
  Antisense strand to SEQ ID NO: 2213562
aauugacacagguuuccaa

SEQ ID NO: 2213564 - RNA, 19 nt, Artificial Sequence
  Description of Artificial Sequence: Synthetic oligonucleotide
  Sense strand starting at position 3945 of SEQ ID NO: 1883748
ucccuaggaucccugaguu

SEQ ID NO: 2213565 - RNA, 19 nt, Artificial Sequence
  Description of Artificial Sequence: Synthetic oligonucleotide
  Antisense strand to SEQ ID NO: 2213564
aacucagggauccuaggga

SEQ ID NO: 2213566 - RNA, 19 nt, Artificial Sequence
  Description of Artificial Sequence: Synthetic oligonucleotide
  Sense strand starting at position 1205 of SEQ ID NO: 1883748
uuuauuucccggugcuuau

SEQ ID NO: 2213567 - RNA, 19 nt, Artificial Sequence
  Description of Artificial Sequence: Synthetic oligonucleotide
  Antisense strand to SEQ ID NO: 2213566
auaagcaccgggaaauaaa

SEQ ID NO: 2213568 - RNA, 19 nt, Artificial Sequence
  Description of Artificial Sequence: Synthetic oligonucleotide
  Sense strand starting at position 1395 of SEQ ID NO: 1883748
gagucuugccucuauauug

SEQ ID NO: 2213569 - RNA, 19 nt, Artificial Sequence
  Description of Artificial Sequence: Synthetic oligonucleotide
  Antisense strand to SEQ ID NO: 2213568
caauauagaggcaagacuc

SEQ ID NO: 2213570 - RNA, 19 nt, Artificial Sequence
  Description of Artificial Sequence: Synthetic oligonucleotide
  Sense strand starting at position 2855 of SEQ ID NO: 1883748
gagcacuggcuguaaccua

SEQ ID NO: 2213571 - RNA, 19 nt, Artificial Sequence
  Description of Artificial Sequence: Synthetic oligonucleotide
  Antisense strand to SEQ ID NO: 2213570
uagguuacagccagugcuc

SEQ ID NO: 2213572 - RNA, 19 nt, Artificial Sequence
  Description of Artificial Sequence: Synthetic oligonucleotide
  Sense strand starting at position 754 of SEQ ID NO: 1883748
gccuguaaugucugcauuu

SEQ ID NO: 2213573 - RNA, 19 nt, Artificial Sequence
  Description of Artificial Sequence: Synthetic oligonucleotide
  Antisense strand to SEQ ID NO: 2213572
aaaugcagacauuacaggc

SEQ ID NO: 2213574 - RNA, 19 nt, Artificial Sequence
  Description of Artificial Sequence: Synthetic oligonucleotide
  Sense strand starting at position 1450 of SEQ ID NO: 1883748
guuggaaaccugugucaau

SEQ ID NO: 2213575 - RNA, 19 nt, Artificial Sequence
  Description of Artificial Sequence: Synthetic oligonucleotide
  Antisense strand to SEQ ID NO: 2213574
auugacacagguuuccaac

SEQ ID NO: 2213576 - RNA, 19 nt, Artificial Sequence
  Description of Artificial Sequence: Synthetic oligonucleotide
  Sense strand starting at position 1793 of SEQ ID NO: 1883748
aauucuaguugucuuguga

SEQ ID NO: 2213577 - RNA, 19 nt, Artificial Sequence
  Description of Artificial Sequence: Synthetic oligonucleotide
  Antisense strand to SEQ ID NO: 2213576
ucacaagacaacuagaauu

SEQ ID NO: 2213578 - RNA, 19 nt, Artificial Sequence
  Description of Artificial Sequence: Synthetic oligonucleotide
  Sense strand starting at position 1351 of SEQ ID NO: 1883748
augaauaucugagacuuac

SEQ ID NO: 2213579 - RNA, 19 nt, Artificial Sequence
  Description of Artificial Sequence: Synthetic oligonucleotide
  Antisense strand to SEQ ID NO: 2213578
guaagucucagauauucau

SEQ ID NO: 2213580 - RNA, 19 nt, Artificial Sequence
  Description of Artificial Sequence: Synthetic oligonucleotide
  Sense strand starting at position 1391 of SEQ ID NO: 1883748
gugagagucuugccucuau

SEQ ID NO: 2213581 - RNA, 19 nt, Artificial Sequence
  Description of Artificial Sequence: Synthetic oligonucleotide
  Antisense strand to SEQ ID NO: 2213580
auagaggcaagacucucac

SEQ ID NO: 2213582 - RNA, 19 nt, Artificial Sequence
  Description of Artificial Sequence: Synthetic oligonucleotide
  Sense strand starting at position 3188 of SEQ ID NO: 1883748
gggcuuucgugagccagga

SEQ ID NO: 2213583 - RNA, 19 nt, Artificial Sequence
  Description of Artificial Sequence: Synthetic oligonucleotide
  Antisense strand to SEQ ID NO: 2213582
uccuggcucacgaaagccc

SEQ ID NO: 2213584 - RNA, 19 nt, Artificial Sequence
  Description of Artificial Sequence: Synthetic oligonucleotide
  Sense strand starting at position 1094 of SEQ ID NO: 1883748
aggcaaauguuacaaacaa

SEQ ID NO: 2213585 - RNA, 19 nt, Artificial Sequence
  Description of Artificial Sequence: Synthetic oligonucleotide
  Antisense strand to SEQ ID NO: 2213584
uuguuuguaacauuugccu

SEQ ID NO: 2213586 - RNA, 19 nt, Artificial Sequence
  Description of Artificial Sequence: Synthetic oligonucleotide
  Sense strand starting at position 248 of SEQ ID NO: 1883748
gugaaacuaugggaucagu

SEQ ID NO: 2213587 - RNA, 19 nt, Artificial Sequence
  Description of Artificial Sequence: Synthetic oligonucleotide
  Antisense strand to SEQ ID NO: 2213586
acugaucccauaguuucac

SEQ ID NO: 2213588 - RNA, 19 nt, Artificial Sequence
  Description of Artificial Sequence: Synthetic oligonucleotide
  Sense strand starting at position 2171 of SEQ ID NO: 1883748
gaagguaaauauuguacua

SEQ ID NO: 2213589 - RNA, 19 nt, Artificial Sequence
  Description of Artificial Sequence: Synthetic oligonucleotide
  Antisense strand to SEQ ID NO: 2213588
uaguacaauauuuaccuuc

SEQ ID NO: 2213590 - RNA, 19 nt, Artificial Sequence
  Description of Artificial Sequence: Synthetic oligonucleotide
  Sense strand starting at position 246 of SEQ ID NO: 1883748
cggugaaacuaugggauca

SEQ ID NO: 2213591 - RNA, 19 nt, Artificial Sequence
  Description of Artificial Sequence: Synthetic oligonucleotide
  Antisense strand to SEQ ID NO: 2213590
ugaucccauaguuucaccg

SEQ ID NO: 2213592 - RNA, 19 nt, Artificial Sequence
  Description of Artificial Sequence: Synthetic oligonucleotide
  Sense strand starting at position 1797 of SEQ ID NO: 1883748
cuaguugucuugugauuuc

SEQ ID NO: 2213593 - RNA, 19 nt, Artificial Sequence
  Description of Artificial Sequence: Synthetic oligonucleotide
  Antisense strand to SEQ ID NO: 2213592
gaaaucacaagacaacuag

SEQ ID NO: 2213594 - RNA, 19 nt, Artificial Sequence
  Description of Artificial Sequence: Synthetic oligonucleotide
  Sense strand starting at position 1389 of SEQ ID NO: 1883748
uggugagagucuugccucu

SEQ ID NO: 2213595 - RNA, 19 nt, Artificial Sequence
  Description of Artificial Sequence: Synthetic oligonucleotide
  Antisense strand to SEQ ID NO: 2213594
agaggcaagacucucacca

SEQ ID NO: 2213596 - RNA, 19 nt, Artificial Sequence
  Description of Artificial Sequence: Synthetic oligonucleotide
  Sense strand starting at position 62 of SEQ ID NO: 1883748
guuguacguucugagucuu

SEQ ID NO: 2213597 - RNA, 19 nt, Artificial Sequence
  Description of Artificial Sequence: Synthetic oligonucleotide
  Antisense strand to SEQ ID NO: 2213596
aagacucagaacguacaac

SEQ ID NO: 2213598 - RNA, 19 nt, Artificial Sequence
  Description of Artificial Sequence: Synthetic oligonucleotide
  Sense strand starting at position 61 of SEQ ID NO: 1883748
cguuguacguucugagucu

SEQ ID NO: 2213599 - RNA, 19 nt, Artificial Sequence
  Description of Artificial Sequence: Synthetic oligonucleotide
  Antisense strand to SEQ ID NO: 2213598
agacucagaacguacaacg

SEQ ID NO: 2213600 - RNA, 19 nt, Artificial Sequence
  Description of Artificial Sequence: Synthetic oligonucleotide
  Sense strand starting at position 2816 of SEQ ID NO: 1883749
acccauggccuccagagau

SEQ ID NO: 2213601 - RNA, 19 nt, Artificial Sequence
  Description of Artificial Sequence: Synthetic oligonucleotide
  Antisense strand to SEQ ID NO: 2213600
aucucuggaggccaugggu

SEQ ID NO: 2213602 - RNA, 19 nt, Artificial Sequence
  Description of Artificial Sequence: Synthetic oligonucleotide
  Sense strand starting at position 438 of SEQ ID NO: 1883749
caagauugucauggagauu

SEQ ID NO: 2213603 - RNA, 19 nt, Artificial Sequence
  Description of Artificial Sequence: Synthetic oligonucleotide
  Antisense strand to SEQ ID NO: 2213602
aaucuccaugacaaucuug

SEQ ID NO: 2213604 - RNA, 19 nt, Artificial Sequence
  Description of Artificial Sequence: Synthetic oligonucleotide
  Sense strand starting at position 2174 of SEQ ID NO: 1883749
uugccaugggucuaagaaa

SEQ ID NO: 2213605 - RNA, 19 nt, Artificial Sequence
  Description of Artificial Sequence: Synthetic oligonucleotide
  Antisense strand to SEQ ID NO: 2213604
uuucuuagacccauggcaa

SEQ ID NO: 2213606 - RNA, 19 nt, Artificial Sequence
  Description of Artificial Sequence: Synthetic oligonucleotide
  Sense strand starting at position 434 of SEQ ID NO: 1883749
ucaccaagauugucaugga

SEQ ID NO: 2213607 - RNA, 19 nt, Artificial Sequence
  Description of Artificial Sequence: Synthetic oligonucleotide
  Antisense strand to SEQ ID NO: 2213606
uccaugacaaucuugguga

SEQ ID NO: 2213608 - RNA, 19 nt, Artificial Sequence
  Description of Artificial Sequence: Synthetic oligonucleotide
  Sense strand starting at position 459 of SEQ ID NO: 1883749
auaagaaagugccuauaca

SEQ ID NO: 2213609 - RNA, 19 nt, Artificial Sequence
  Description of Artificial Sequence: Synthetic oligonucleotide
  Antisense strand to SEQ ID NO: 2213608
uguauaggcacuuucuuau

SEQ ID NO: 2213610 - RNA, 19 nt, Artificial Sequence
  Description of Artificial Sequence: Synthetic oligonucleotide
  Sense strand starting at position 2450 of SEQ ID NO: 1883749
uugacagacuuaucaaugu

SEQ ID NO: 2213611 - RNA, 19 nt, Artificial Sequence
  Description of Artificial Sequence: Synthetic oligonucleotide
  Antisense strand to SEQ ID NO: 2213610
acauugauaagucugucaa

SEQ ID NO: 2213612 - RNA, 19 nt, Artificial Sequence
  Description of Artificial Sequence: Synthetic oligonucleotide
  Sense strand starting at position 705 of SEQ ID NO: 1883749
ccguuuguaucauuauuua

SEQ ID NO: 2213613 - RNA, 19 nt, Artificial Sequence
  Description of Artificial Sequence: Synthetic oligonucleotide
  Antisense strand to SEQ ID NO: 2213612
uaaauaaugauacaaacgg

SEQ ID NO: 2213614 - RNA, 19 nt, Artificial Sequence
  Description of Artificial Sequence: Synthetic oligonucleotide
  Sense strand starting at position 51 of SEQ ID NO: 1883749
ccaagugguauuggacaga

SEQ ID NO: 2213615 - RNA, 19 nt, Artificial Sequence
  Description of Artificial Sequence: Synthetic oligonucleotide
  Antisense strand to SEQ ID NO: 2213614
ucuguccaauaccacuugg

SEQ ID NO: 2213616 - RNA, 19 nt, Artificial Sequence
  Description of Artificial Sequence: Synthetic oligonucleotide
  Sense strand starting at position 2613 of SEQ ID NO: 1883749
gcaugugucccuucugugu

SEQ ID NO: 2213617 - RNA, 19 nt, Artificial Sequence
  Description of Artificial Sequence: Synthetic oligonucleotide
  Antisense strand to SEQ ID NO: 2213616
acacagaagggacacaugc

SEQ ID NO: 2213618 - RNA, 19 nt, Artificial Sequence
  Description of Artificial Sequence: Synthetic oligonucleotide
  Sense strand starting at position 3010 of SEQ ID NO: 1883749
cuucuagggcuccagaagu

SEQ ID NO: 2213619 - RNA, 19 nt, Artificial Sequence
  Description of Artificial Sequence: Synthetic oligonucleotide
  Antisense strand to SEQ ID NO: 2213618
acuucuggagcccuagaag

SEQ ID NO: 2213620 - RNA, 19 nt, Artificial Sequence
  Description of Artificial Sequence: Synthetic oligonucleotide
  Sense strand starting at position 764 of SEQ ID NO: 1883749
ccaggcagagcugaguaau

SEQ ID NO: 2213621 - RNA, 19 nt, Artificial Sequence
  Description of Artificial Sequence: Synthetic oligonucleotide
  Antisense strand to SEQ ID NO: 2213620
auuacucagcucugccugg

SEQ ID NO: 2213622 - RNA, 19 nt, Artificial Sequence
  Description of Artificial Sequence: Synthetic oligonucleotide
  Sense strand starting at position 2439 of SEQ ID NO: 1883749
acauaucugccuugacaga

SEQ ID NO: 2213623 - RNA, 19 nt, Artificial Sequence
  Description of Artificial Sequence: Synthetic oligonucleotide
  Antisense strand to SEQ ID NO: 2213622
ucugucaaggcagauaugu

SEQ ID NO: 2213624 - RNA, 19 nt, Artificial Sequence
  Description of Artificial Sequence: Synthetic oligonucleotide
  Sense strand starting at position 3656 of SEQ ID NO: 1883749
uguagaguccuuuauuacc

SEQ ID NO: 2213625 - RNA, 19 nt, Artificial Sequence
  Description of Artificial Sequence: Synthetic oligonucleotide
  Antisense strand to SEQ ID NO: 2213624
gguaauaaaggacucuaca

SEQ ID NO: 2213626 - RNA, 19 nt, Artificial Sequence
  Description of Artificial Sequence: Synthetic oligonucleotide
  Sense strand starting at position 1683 of SEQ ID NO: 1883749
gaauacugucagcaauugu

SEQ ID NO: 2213627 - RNA, 19 nt, Artificial Sequence
  Description of Artificial Sequence: Synthetic oligonucleotide
  Antisense strand to SEQ ID NO: 2213626
acaauugcugacaguauuc

SEQ ID NO: 2213628 - RNA, 19 nt, Artificial Sequence
  Description of Artificial Sequence: Synthetic oligonucleotide
  Sense strand starting at position 1682 of SEQ ID NO: 1883749
ugaauacugucagcaauug

SEQ ID NO: 2213629 - RNA, 19 nt, Artificial Sequence
  Description of Artificial Sequence: Synthetic oligonucleotide
  Antisense strand to SEQ ID NO: 2213628
caauugcugacaguauuca

SEQ ID NO: 2213630 - RNA, 19 nt, Artificial Sequence
  Description of Artificial Sequence: Synthetic oligonucleotide
  Sense strand starting at position 527 of SEQ ID NO: 1883749
gcugguguuauuuguaacu

SEQ ID NO: 2213631 - RNA, 19 nt, Artificial Sequence
  Description of Artificial Sequence: Synthetic oligonucleotide
  Antisense strand to SEQ ID NO: 2213630
aguuacaaauaacaccagc

SEQ ID NO: 2213632 - RNA, 19 nt, Artificial Sequence
  Description of Artificial Sequence: Synthetic oligonucleotide
  Sense strand starting at position 3125 of SEQ ID NO: 1883749
gauacuuccugccugauga

SEQ ID NO: 2213633 - RNA, 19 nt, Artificial Sequence
  Description of Artificial Sequence: Synthetic oligonucleotide
  Antisense strand to SEQ ID NO: 2213632
ucaucaggcaggaaguauc

SEQ ID NO: 2213634 - RNA, 19 nt, Artificial Sequence
  Description of Artificial Sequence: Synthetic oligonucleotide
  Sense strand starting at position 278 of SEQ ID NO: 1883749
ucuguauagguggguaaga

SEQ ID NO: 2213635 - RNA, 19 nt, Artificial Sequence
  Description of Artificial Sequence: Synthetic oligonucleotide
  Antisense strand to SEQ ID NO: 2213634
ucuuacccaccuauacaga

SEQ ID NO: 2213636 - RNA, 19 nt, Artificial Sequence
  Description of Artificial Sequence: Synthetic oligonucleotide
  Sense strand starting at position 180 of SEQ ID NO: 1883749
ucauaaguugucgacacuu

SEQ ID NO: 2213637 - RNA, 19 nt, Artificial Sequence
  Description of Artificial Sequence: Synthetic oligonucleotide
  Antisense strand to SEQ ID NO: 2213636
aagugucgacaacuuauga

SEQ ID NO: 2213638 - RNA, 19 nt, Artificial Sequence
  Description of Artificial Sequence: Synthetic oligonucleotide
  Sense strand starting at position 1741 of SEQ ID NO: 1883749
augguuucccugcagguaa

SEQ ID NO: 2213639 - RNA, 19 nt, Artificial Sequence
  Description of Artificial Sequence: Synthetic oligonucleotide
  Antisense strand to SEQ ID NO: 2213638
uuaccugcagggaaaccau

SEQ ID NO: 2213640 - RNA, 19 nt, Artificial Sequence
  Description of Artificial Sequence: Synthetic oligonucleotide
  Sense strand starting at position 3654 of SEQ ID NO: 1883749
acuguagaguccuuuauua

SEQ ID NO: 2213641 - RNA, 19 nt, Artificial Sequence
  Description of Artificial Sequence: Synthetic oligonucleotide
  Antisense strand to SEQ ID NO: 2213640
uaauaaaggacucuacagu

SEQ ID NO: 2213642 - RNA, 19 nt, Artificial Sequence
  Description of Artificial Sequence: Synthetic oligonucleotide
  Sense strand starting at position 2555 of SEQ ID NO: 1883749
guuuacaccugucugaaua

SEQ ID NO: 2213643 - RNA, 19 nt, Artificial Sequence
  Description of Artificial Sequence: Synthetic oligonucleotide
  Antisense strand to SEQ ID NO: 2213642
uauucagacagguguaaac

SEQ ID NO: 2213644 - RNA, 19 nt, Artificial Sequence
  Description of Artificial Sequence: Synthetic oligonucleotide
  Sense strand starting at position 1112 of SEQ ID NO: 1883749
gugacaucucauggccaca

SEQ ID NO: 2213645 - RNA, 19 nt, Artificial Sequence
  Description of Artificial Sequence: Synthetic oligonucleotide
  Antisense strand to SEQ ID NO: 2213644
uguggccaugagaugucac

SEQ ID NO: 2213646 - RNA, 19 nt, Artificial Sequence
  Description of Artificial Sequence: Synthetic oligonucleotide
  Sense strand starting at position 18 of SEQ ID NO: 1883749
cugccucugcaagaaaugu

SEQ ID NO: 2213647 - RNA, 19 nt, Artificial Sequence
  Description of Artificial Sequence: Synthetic oligonucleotide
  Antisense strand to SEQ ID NO: 2213646
acauuucuugcagaggcag

SEQ ID NO: 2213648 - RNA, 19 nt, Artificial Sequence
  Description of Artificial Sequence: Synthetic oligonucleotide
  Sense strand starting at position 2437 of SEQ ID NO: 1883749
gcacauaucugccuugaca

SEQ ID NO: 2213649 - RNA, 19 nt, Artificial Sequence
  Description of Artificial Sequence: Synthetic oligonucleotide
  Antisense strand to SEQ ID NO: 2213648
ugucaaggcagauaugugc

SEQ ID NO: 2213650 - RNA, 19 nt, Artificial Sequence
  Description of Artificial Sequence: Synthetic oligonucleotide
  Sense strand starting at position 2484 of SEQ ID NO: 1883749
accuguaccuugucuauau

SEQ ID NO: 2213651 - RNA, 19 nt, Artificial Sequence
  Description of Artificial Sequence: Synthetic oligonucleotide
  Antisense strand to SEQ ID NO: 2213650
auauagacaagguacaggu

SEQ ID NO: 2213652 - RNA, 19 nt, Artificial Sequence
  Description of Artificial Sequence: Synthetic oligonucleotide
  Sense strand starting at position 1076 of SEQ ID NO: 1883749
gugaauuagugguugcaga

SEQ ID NO: 2213653 - RNA, 19 nt, Artificial Sequence
  Description of Artificial Sequence: Synthetic oligonucleotide
  Antisense strand to SEQ ID NO: 2213652
ucugcaaccacuaauucac

SEQ ID NO: 2213654 - RNA, 19 nt, Artificial Sequence
  Description of Artificial Sequence: Synthetic oligonucleotide
  Sense strand starting at position 3098 of SEQ ID NO: 1883749
ggugaaggaucagaaucaa

SEQ ID NO: 2213655 - RNA, 19 nt, Artificial Sequence
  Description of Artificial Sequence: Synthetic oligonucleotide
  Antisense strand to SEQ ID NO: 2213654
uugauucugauccuucacc

SEQ ID NO: 2213656 - RNA, 19 nt, Artificial Sequence
  Description of Artificial Sequence: Synthetic oligonucleotide
  Sense strand starting at position 2288 of SEQ ID NO: 1883749
cugugcucugaguaaggca

SEQ ID NO: 2213657 - RNA, 19 nt, Artificial Sequence
  Description of Artificial Sequence: Synthetic oligonucleotide
  Antisense strand to SEQ ID NO: 2213656
ugccuuacucagagcacag

SEQ ID NO: 2213658 - RNA, 19 nt, Artificial Sequence
  Description of Artificial Sequence: Synthetic oligonucleotide
  Sense strand starting at position 14 of SEQ ID NO: 1883749
cucucugccucugcaagaa

SEQ ID NO: 2213659 - RNA, 19 nt, Artificial Sequence
  Description of Artificial Sequence: Synthetic oligonucleotide
  Antisense strand to SEQ ID NO: 2213658
uucuugcagaggcagagag

SEQ ID NO: 2213660 - RNA, 19 nt, Artificial Sequence
  Description of Artificial Sequence: Synthetic oligonucleotide
  Sense strand starting at position 2357 of SEQ ID NO: 1883749
uauggauaugcauguuugu

SEQ ID NO: 2213661 - RNA, 19 nt, Artificial Sequence
  Description of Artificial Sequence: Synthetic oligonucleotide
  Antisense strand to SEQ ID NO: 2213660
acaaacaugcauauccaua

SEQ ID NO: 2213662 - RNA, 19 nt, Artificial Sequence
  Description of Artificial Sequence: Synthetic oligonucleotide
  Sense strand starting at position 2488 of SEQ ID NO: 1883749
guaccuugucuauaugugu

SEQ ID NO: 2213663 - RNA, 19 nt, Artificial Sequence
  Description of Artificial Sequence: Synthetic oligonucleotide
  Antisense strand to SEQ ID NO: 2213662
acacauauagacaagguac

SEQ ID NO: 2213664 - RNA, 19 nt, Artificial Sequence
  Description of Artificial Sequence: Synthetic oligonucleotide
  Sense strand starting at position 1074 of SEQ ID NO: 1883749
cagugaauuagugguugca

SEQ ID NO: 2213665 - RNA, 19 nt, Artificial Sequence
  Description of Artificial Sequence: Synthetic oligonucleotide
  Antisense strand to SEQ ID NO: 2213664
ugcaaccacuaauucacug

SEQ ID NO: 2213666 - RNA, 19 nt, Artificial Sequence
  Description of Artificial Sequence: Synthetic oligonucleotide
  Sense strand starting at position 931 of SEQ ID NO: 1883749
gggccaguguccucacuua

SEQ ID NO: 2213667 - RNA, 19 nt, Artificial Sequence
  Description of Artificial Sequence: Synthetic oligonucleotide
  Antisense strand to SEQ ID NO: 2213666
uaagugaggacacuggccc

SEQ ID NO: 2213668 - RNA, 19 nt, Artificial Sequence
  Description of Artificial Sequence: Synthetic oligonucleotide
  Sense strand starting at position 894 of SEQ ID NO: 1883749
gcugcuaugugacuuugga

SEQ ID NO: 2213669 - RNA, 19 nt, Artificial Sequence
  Description of Artificial Sequence: Synthetic oligonucleotide
  Antisense strand to SEQ ID NO: 2213668
uccaaagucacauagcagc

SEQ ID NO: 2213670 - RNA, 19 nt, Artificial Sequence
  Description of Artificial Sequence: Synthetic oligonucleotide
  Sense strand starting at position 27 of SEQ ID NO: 1883749
caagaaaugucagggagaa

SEQ ID NO: 2213671 - RNA, 19 nt, Artificial Sequence
  Description of Artificial Sequence: Synthetic oligonucleotide
  Antisense strand to SEQ ID NO: 2213670
uucucccugacauuucuug

SEQ ID NO: 2213672 - RNA, 19 nt, Artificial Sequence
  Description of Artificial Sequence: Synthetic oligonucleotide
  Sense strand starting at position 3260 of SEQ ID NO: 1883749
ggcugaggcucaagugaga

SEQ ID NO: 2213673 - RNA, 19 nt, Artificial Sequence
  Description of Artificial Sequence: Synthetic oligonucleotide
  Antisense strand to SEQ ID NO: 2213672
ucucacuugagccucagcc

SEQ ID NO: 2213674 - RNA, 19 nt, Artificial Sequence
  Description of Artificial Sequence: Synthetic oligonucleotide
  Sense strand starting at position 2366 of SEQ ID NO: 1883749
gcauguuuguuggcaggga

SEQ ID NO: 2213675 - RNA, 19 nt, Artificial Sequence
  Description of Artificial Sequence: Synthetic oligonucleotide
  Antisense strand to SEQ ID NO: 2213674
ucccugccaacaaacaugc

SEQ ID NO: 2213676 - RNA, 19 nt, Artificial Sequence
  Description of Artificial Sequence: Synthetic oligonucleotide
  Sense strand starting at position 360 of SEQ ID NO: 1883749
guccuuggcugaguuacuu

SEQ ID NO: 2213677 - RNA, 19 nt, Artificial Sequence
  Description of Artificial Sequence: Synthetic oligonucleotide
  Antisense strand to SEQ ID NO: 2213676
aaguaacucagccaaggac

SEQ ID NO: 2213678 - RNA, 19 nt, Artificial Sequence
  Description of Artificial Sequence: Synthetic oligonucleotide
  Sense strand starting at position 1153 of SEQ ID NO: 1883749
aauguucuggagcgccaua

SEQ ID NO: 2213679 - RNA, 19 nt, Artificial Sequence
  Description of Artificial Sequence: Synthetic oligonucleotide
  Antisense strand to SEQ ID NO: 2213678
uauggcgcuccagaacauu

SEQ ID NO: 2213680 - RNA, 19 nt, Artificial Sequence
  Description of Artificial Sequence: Synthetic oligonucleotide
  Sense strand starting at position 2424 of SEQ ID NO: 1883750
cgauuggucggcgcugaga

SEQ ID NO: 2213681 - RNA, 19 nt, Artificial Sequence
  Description of Artificial Sequence: Synthetic oligonucleotide
  Antisense strand to SEQ ID NO: 2213680
ucucagcgccgaccaaucg

SEQ ID NO: 2213682 - RNA, 19 nt, Artificial Sequence
  Description of Artificial Sequence: Synthetic oligonucleotide
  Sense strand starting at position 1129 of SEQ ID NO: 1883750
guccguucucaguccuagu

SEQ ID NO: 2213683 - RNA, 19 nt, Artificial Sequence
  Description of Artificial Sequence: Synthetic oligonucleotide
  Antisense strand to SEQ ID NO: 2213682
acuaggacugagaacggac

SEQ ID NO: 2213684 - RNA, 19 nt, Artificial Sequence
  Description of Artificial Sequence: Synthetic oligonucleotide
  Sense strand starting at position 2790 of SEQ ID NO: 1883750
gguaacauuuaugagaaac

SEQ ID NO: 2213685 - RNA, 19 nt, Artificial Sequence
  Description of Artificial Sequence: Synthetic oligonucleotide
  Antisense strand to SEQ ID NO: 2213684
guuucucauaaauguuacc

SEQ ID NO: 2213686 - RNA, 19 nt, Artificial Sequence
  Description of Artificial Sequence: Synthetic oligonucleotide
  Sense strand starting at position 3770 of SEQ ID NO: 1883750
ggaacuaacugagcucuca

SEQ ID NO: 2213687 - RNA, 19 nt, Artificial Sequence
  Description of Artificial Sequence: Synthetic oligonucleotide
  Antisense strand to SEQ ID NO: 2213686
ugagagcucaguuaguucc

SEQ ID NO: 2213688 - RNA, 19 nt, Artificial Sequence
  Description of Artificial Sequence: Synthetic oligonucleotide
  Sense strand starting at position 1009 of SEQ ID NO: 1883750
guguccacccauuaauaca

SEQ ID NO: 2213689 - RNA, 19 nt, Artificial Sequence
  Description of Artificial Sequence: Synthetic oligonucleotide
  Antisense strand to SEQ ID NO: 2213688
uguauuaauggguggacac

SEQ ID NO: 2213690 - RNA, 19 nt, Artificial Sequence
  Description of Artificial Sequence: Synthetic oligonucleotide
  Sense strand starting at position 1075 of SEQ ID NO: 1883750
ugaguuacagggcaguaau

SEQ ID NO: 2213691 - RNA, 19 nt, Artificial Sequence
  Description of Artificial Sequence: Synthetic oligonucleotide
  Antisense strand to SEQ ID NO: 2213690
auuacugcccuguaacuca

SEQ ID NO: 2213692 - RNA, 19 nt, Artificial Sequence
  Description of Artificial Sequence: Synthetic oligonucleotide
  Sense strand starting at position 466 of SEQ ID NO: 1883750
agcucaucugaguaauauu

SEQ ID NO: 2213693 - RNA, 19 nt, Artificial Sequence
  Description of Artificial Sequence: Synthetic oligonucleotide
  Antisense strand to SEQ ID NO: 2213692
aauauuacucagaugagcu

SEQ ID NO: 2213694 - RNA, 19 nt, Artificial Sequence
  Description of Artificial Sequence: Synthetic oligonucleotide
  Sense strand starting at position 1143 of SEQ ID NO: 1883750
cuaguuucccuugacuuga

SEQ ID NO: 2213695 - RNA, 19 nt, Artificial Sequence
  Description of Artificial Sequence: Synthetic oligonucleotide
  Antisense strand to SEQ ID NO: 2213694
ucaagucaagggaaacuag

SEQ ID NO: 2213696 - RNA, 19 nt, Artificial Sequence
  Description of Artificial Sequence: Synthetic oligonucleotide
  Sense strand starting at position 259 of SEQ ID NO: 1883750
cuggacuccacguaagagu

SEQ ID NO: 2213697 - RNA, 19 nt, Artificial Sequence
  Description of Artificial Sequence: Synthetic oligonucleotide
  Antisense strand to SEQ ID NO: 2213696
acucuuacguggaguccag

SEQ ID NO: 2213698 - RNA, 19 nt, Artificial Sequence
  Description of Artificial Sequence: Synthetic oligonucleotide
  Sense strand starting at position 2331 of SEQ ID NO: 1883750
gagagccauuggccagaua

SEQ ID NO: 2213699 - RNA, 19 nt, Artificial Sequence
  Description of Artificial Sequence: Synthetic oligonucleotide
  Antisense strand to SEQ ID NO: 2213698
uaucuggccaauggcucuc

SEQ ID NO: 2213700 - RNA, 19 nt, Artificial Sequence
  Description of Artificial Sequence: Synthetic oligonucleotide
  Sense strand starting at position 3438 of SEQ ID NO: 1883750
ggagguaagucuccuccaa

SEQ ID NO: 2213701 - RNA, 19 nt, Artificial Sequence
  Description of Artificial Sequence: Synthetic oligonucleotide
  Antisense strand to SEQ ID NO: 2213700
uuggaggagacuuaccucc

SEQ ID NO: 2213702 - RNA, 19 nt, Artificial Sequence
  Description of Artificial Sequence: Synthetic oligonucleotide
  Sense strand starting at position 2085 of SEQ ID NO: 1883750
cggagucucccugagaggu

SEQ ID NO: 2213703 - RNA, 19 nt, Artificial Sequence
  Description of Artificial Sequence: Synthetic oligonucleotide
  Antisense strand to SEQ ID NO: 2213702
accucucagggagacuccg

SEQ ID NO: 2213704 - RNA, 19 nt, Artificial Sequence
  Description of Artificial Sequence: Synthetic oligonucleotide
  Sense strand starting at position 2789 of SEQ ID NO: 1883750
ggguaacauuuaugagaaa

SEQ ID NO: 2213705 - RNA, 19 nt, Artificial Sequence
  Description of Artificial Sequence: Synthetic oligonucleotide
  Antisense strand to SEQ ID NO: 2213704
uuucucauaaauguuaccc

SEQ ID NO: 2213706 - RNA, 19 nt, Artificial Sequence
  Description of Artificial Sequence: Synthetic oligonucleotide
  Sense strand starting at position 3854 of SEQ ID NO: 1883750
gccagcucgggaugagaaa

SEQ ID NO: 2213707 - RNA, 19 nt, Artificial Sequence
  Description of Artificial Sequence: Synthetic oligonucleotide
  Antisense strand to SEQ ID NO: 2213706
uuucucaucccgagcuggc

SEQ ID NO: 2213708 - RNA, 19 nt, Artificial Sequence
  Description of Artificial Sequence: Synthetic oligonucleotide
  Sense strand starting at position 3442 of SEQ ID NO: 1883750
guaagucuccuccaagcau

SEQ ID NO: 2213709 - RNA, 19 nt, Artificial Sequence
  Description of Artificial Sequence: Synthetic oligonucleotide
  Antisense strand to SEQ ID NO: 2213708
augcuuggaggagacuuac

SEQ ID NO: 2213710 - RNA, 19 nt, Artificial Sequence
  Description of Artificial Sequence: Synthetic oligonucleotide
  Sense strand starting at position 3779 of SEQ ID NO: 1883750
ugagcucucaaacguaaga

SEQ ID NO: 2213711 - RNA, 19 nt, Artificial Sequence
  Description of Artificial Sequence: Synthetic oligonucleotide
  Antisense strand to SEQ ID NO: 2213710
ucuuacguuugagagcuca

SEQ ID NO: 2213712 - RNA, 19 nt, Artificial Sequence
  Description of Artificial Sequence: Synthetic oligonucleotide
  Sense strand starting at position 3426 of SEQ ID NO: 1883750
ggaaacguucacggaggua

SEQ ID NO: 2213713 - RNA, 19 nt, Artificial Sequence
  Description of Artificial Sequence: Synthetic oligonucleotide
  Antisense strand to SEQ ID NO: 2213712
uaccuccgugaacguuucc

SEQ ID NO: 2213714 - RNA, 19 nt, Artificial Sequence
  Description of Artificial Sequence: Synthetic oligonucleotide
  Sense strand starting at position 3576 of SEQ ID NO: 1883750
ucauauauguuacuugguu

SEQ ID NO: 2213715 - RNA, 19 nt, Artificial Sequence
  Description of Artificial Sequence: Synthetic oligonucleotide
  Antisense strand to SEQ ID NO: 2213714
aaccaaguaacauauauga

SEQ ID NO: 2213716 - RNA, 19 nt, Artificial Sequence
  Description of Artificial Sequence: Synthetic oligonucleotide
  Sense strand starting at position 3516 of SEQ ID NO: 1883750
aggcuuugaaguugcauaa

SEQ ID NO: 2213717 - RNA, 19 nt, Artificial Sequence
  Description of Artificial Sequence: Synthetic oligonucleotide
  Antisense strand to SEQ ID NO: 2213716
uuaugcaacuucaaagccu

SEQ ID NO: 2213718 - RNA, 19 nt, Artificial Sequence
  Description of Artificial Sequence: Synthetic oligonucleotide
  Sense strand starting at position 2872 of SEQ ID NO: 1883750
gagguaaugcucugcaacc

SEQ ID NO: 2213719 - RNA, 19 nt, Artificial Sequence
  Description of Artificial Sequence: Synthetic oligonucleotide
  Antisense strand to SEQ ID NO: 2213718
gguugcagagcauuaccuc

SEQ ID NO: 2213720 - RNA, 19 nt, Artificial Sequence
  Description of Artificial Sequence: Synthetic oligonucleotide
  Sense strand starting at position 3589 of SEQ ID NO: 1883750
uugguuugcaguuggaauu

SEQ ID NO: 2213721 - RNA, 19 nt, Artificial Sequence
  Description of Artificial Sequence: Synthetic oligonucleotide
  Antisense strand to SEQ ID NO: 2213720
aauuccaacugcaaaccaa

SEQ ID NO: 2213722 - RNA, 19 nt, Artificial Sequence
  Description of Artificial Sequence: Synthetic oligonucleotide
  Sense strand starting at position 1140 of SEQ ID NO: 1883750
guccuaguuucccuugacu

SEQ ID NO: 2213723 - RNA, 19 nt, Artificial Sequence
  Description of Artificial Sequence: Synthetic oligonucleotide
  Antisense strand to SEQ ID NO: 2213722
agucaagggaaacuaggac

SEQ ID NO: 2213724 - RNA, 19 nt, Artificial Sequence
  Description of Artificial Sequence: Synthetic oligonucleotide
  Sense strand starting at position 3580 of SEQ ID NO: 1883750
auauguuacuugguuugca

SEQ ID NO: 2213725 - RNA, 19 nt, Artificial Sequence
  Description of Artificial Sequence: Synthetic oligonucleotide
  Antisense strand to SEQ ID NO: 2213724
ugcaaaccaaguaacauau

SEQ ID NO: 2213726 - RNA, 19 nt, Artificial Sequence
  Description of Artificial Sequence: Synthetic oligonucleotide
  Sense strand starting at position 915 of SEQ ID NO: 1883750
auagaagcuugauaacaac

SEQ ID NO: 2213727 - RNA, 19 nt, Artificial Sequence
  Description of Artificial Sequence: Synthetic oligonucleotide
  Antisense strand to SEQ ID NO: 2213726
guuguuaucaagcuucuau

SEQ ID NO: 2213728 - RNA, 19 nt, Artificial Sequence
  Description of Artificial Sequence: Synthetic oligonucleotide
  Sense strand starting at position 3827 of SEQ ID NO: 1883750
gcucaaagcuguccugagu

SEQ ID NO: 2213729 - RNA, 19 nt, Artificial Sequence
  Description of Artificial Sequence: Synthetic oligonucleotide
  Antisense strand to SEQ ID NO: 2213728
acucaggacagcuuugagc

SEQ ID NO: 2213730 - RNA, 19 nt, Artificial Sequence
  Description of Artificial Sequence: Synthetic oligonucleotide
  Sense strand starting at position 1085 of SEQ ID NO: 1883750
ggcaguaauuccgucccuu

SEQ ID NO: 2213731 - RNA, 19 nt, Artificial Sequence
  Description of Artificial Sequence: Synthetic oligonucleotide
  Antisense strand to SEQ ID NO: 2213730
aagggacggaauuacugcc

SEQ ID NO: 2213732 - RNA, 19 nt, Artificial Sequence
  Description of Artificial Sequence: Synthetic oligonucleotide
  Sense strand starting at position 2778 of SEQ ID NO: 1883750
cgccucaauuuggguaaca

SEQ ID NO: 2213733 - RNA, 19 nt, Artificial Sequence
  Description of Artificial Sequence: Synthetic oligonucleotide
  Antisense strand to SEQ ID NO: 2213732
uguuacccaaauugaggcg

SEQ ID NO: 2213734 - RNA, 19 nt, Artificial Sequence
  Description of Artificial Sequence: Synthetic oligonucleotide
  Sense strand starting at position 2828 of SEQ ID NO: 1883750
acacuuaaguaagguauua

SEQ ID NO: 2213735 - RNA, 19 nt, Artificial Sequence
  Description of Artificial Sequence: Synthetic oligonucleotide
  Antisense strand to SEQ ID NO: 2213734
uaauaccuuacuuaagugu

SEQ ID NO: 2213736 - RNA, 19 nt, Artificial Sequence
  Description of Artificial Sequence: Synthetic oligonucleotide
  Sense strand starting at position 994 of SEQ ID NO: 1883750
ucuugaaccuuacaagugu

SEQ ID NO: 2213737 - RNA, 19 nt, Artificial Sequence
  Description of Artificial Sequence: Synthetic oligonucleotide
  Antisense strand to SEQ ID NO: 2213736
acacuuguaagguucaaga

SEQ ID NO: 2213738 - RNA, 19 nt, Artificial Sequence
  Description of Artificial Sequence: Synthetic oligonucleotide
  Sense strand starting at position 1432 of SEQ ID NO: 1883750
gccagauucuugcagacau

SEQ ID NO: 2213739 - RNA, 19 nt, Artificial Sequence
  Description of Artificial Sequence: Synthetic oligonucleotide
  Antisense strand to SEQ ID NO: 2213738
augucugcaagaaucuggc

SEQ ID NO: 2213740 - RNA, 19 nt, Artificial Sequence
  Description of Artificial Sequence: Synthetic oligonucleotide
  Sense strand starting at position 2005 of SEQ ID NO: 1883750
cccagcggcucagagaaau

SEQ ID NO: 2213741 - RNA, 19 nt, Artificial Sequence
  Description of Artificial Sequence: Synthetic oligonucleotide
  Antisense strand to SEQ ID NO: 2213740
auuucucugagccgcuggg

SEQ ID NO: 2213742 - RNA, 19 nt, Artificial Sequence
  Description of Artificial Sequence: Synthetic oligonucleotide
  Sense strand starting at position 3377 of SEQ ID NO: 1883750
cauccagccuuuggugaaa

SEQ ID NO: 2213743 - RNA, 19 nt, Artificial Sequence
  Description of Artificial Sequence: Synthetic oligonucleotide
  Antisense strand to SEQ ID NO: 2213742
uuucaccaaaggcuggaug

SEQ ID NO: 2213744 - RNA, 19 nt, Artificial Sequence
  Description of Artificial Sequence: Synthetic oligonucleotide
  Sense strand starting at position 41 of SEQ ID NO: 1883750
gcuguauuguuacacaagu

SEQ ID NO: 2213745 - RNA, 19 nt, Artificial Sequence
  Description of Artificial Sequence: Synthetic oligonucleotide
  Antisense strand to SEQ ID NO: 2213744
acuuguguaacaauacagc

SEQ ID NO: 2213746 - RNA, 19 nt, Artificial Sequence
  Description of Artificial Sequence: Synthetic oligonucleotide
  Sense strand starting at position 3177 of SEQ ID NO: 1883751
uugucugaugaaugaauaa

SEQ ID NO: 2213747 - RNA, 19 nt, Artificial Sequence
  Description of Artificial Sequence: Synthetic oligonucleotide
  Antisense strand to SEQ ID NO: 2213746
uuauucauucaucagacaa

SEQ ID NO: 2213748 - RNA, 19 nt, Artificial Sequence
  Description of Artificial Sequence: Synthetic oligonucleotide
  Sense strand starting at position 1141 of SEQ ID NO: 1883751
gucagugaugugccgggua

SEQ ID NO: 2213749 - RNA, 19 nt, Artificial Sequence
  Description of Artificial Sequence: Synthetic oligonucleotide
  Antisense strand to SEQ ID NO: 2213748
uacccggcacaucacugac

SEQ ID NO: 2213750 - RNA, 19 nt, Artificial Sequence
  Description of Artificial Sequence: Synthetic oligonucleotide
  Sense strand starting at position 2701 of SEQ ID NO: 1883751
aggaacaaugcuugacuga

SEQ ID NO: 2213751 - RNA, 19 nt, Artificial Sequence
  Description of Artificial Sequence: Synthetic oligonucleotide
  Antisense strand to SEQ ID NO: 2213750
ucagucaagcauuguuccu

SEQ ID NO: 2213752 - RNA, 19 nt, Artificial Sequence
  Description of Artificial Sequence: Synthetic oligonucleotide
  Sense strand starting at position 891 of SEQ ID NO: 1883751
ggauaaguccaauggaucu

SEQ ID NO: 2213753 - RNA, 19 nt, Artificial Sequence
  Description of Artificial Sequence: Synthetic oligonucleotide
  Antisense strand to SEQ ID NO: 2213752
agauccauuggacuuaucc

SEQ ID NO: 2213754 - RNA, 19 nt, Artificial Sequence
  Description of Artificial Sequence: Synthetic oligonucleotide
  Sense strand starting at position 3166 of SEQ ID NO: 1883751
ggacucagggauugucuga

SEQ ID NO: 2213755 - RNA, 19 nt, Artificial Sequence
  Description of Artificial Sequence: Synthetic oligonucleotide
  Antisense strand to SEQ ID NO: 2213754
ucagacaaucccugagucc

SEQ ID NO: 2213756 - RNA, 19 nt, Artificial Sequence
  Description of Artificial Sequence: Synthetic oligonucleotide
  Sense strand starting at position 3375 of SEQ ID NO: 1883751
cggaguuuauuugccaacu

SEQ ID NO: 2213757 - RNA, 19 nt, Artificial Sequence
  Description of Artificial Sequence: Synthetic oligonucleotide
  Antisense strand to SEQ ID NO: 2213756
aguuggcaaauaaacuccg

SEQ ID NO: 2213758 - RNA, 19 nt, Artificial Sequence
  Description of Artificial Sequence: Synthetic oligonucleotide
  Sense strand starting at position 2094 of SEQ ID NO: 1883751
guguuaagucaggacugga

SEQ ID NO: 2213759 - RNA, 19 nt, Artificial Sequence
  Description of Artificial Sequence: Synthetic oligonucleotide
  Antisense strand to SEQ ID NO: 2213758
uccaguccugacuuaacac

SEQ ID NO: 2213760 - RNA, 19 nt, Artificial Sequence
  Description of Artificial Sequence: Synthetic oligonucleotide
  Sense strand starting at position 1133 of SEQ ID NO: 1883751
uauuuagugucagugaugu

SEQ ID NO: 2213761 - RNA, 19 nt, Artificial Sequence
  Description of Artificial Sequence: Synthetic oligonucleotide
  Antisense strand to SEQ ID NO: 2213760
acaucacugacacuaaaua

SEQ ID NO: 2213762 - RNA, 19 nt, Artificial Sequence
  Description of Artificial Sequence: Synthetic oligonucleotide
  Sense strand starting at position 3373 of SEQ ID NO: 1883751
agcggaguuuauuugccaa

SEQ ID NO: 2213763 - RNA, 19 nt, Artificial Sequence
  Description of Artificial Sequence: Synthetic oligonucleotide
  Antisense strand to SEQ ID NO: 2213762
uuggcaaauaaacuccgcu

SEQ ID NO: 2213764 - RNA, 19 nt, Artificial Sequence
  Description of Artificial Sequence: Synthetic oligonucleotide
  Sense strand starting at position 2142 of SEQ ID NO: 1883751
ugaacuugauccuugugga

SEQ ID NO: 2213765 - RNA, 19 nt, Artificial Sequence
  Description of Artificial Sequence: Synthetic oligonucleotide
  Antisense strand to SEQ ID NO: 2213764
uccacaaggaucaaguuca

SEQ ID NO: 2213766 - RNA, 19 nt, Artificial Sequence
  Description of Artificial Sequence: Synthetic oligonucleotide
  Sense strand starting at position 3291 of SEQ ID NO: 1883751
agaacauauuccgcaaaug

SEQ ID NO: 2213767 - RNA, 19 nt, Artificial Sequence
  Description of Artificial Sequence: Synthetic oligonucleotide
  Antisense strand to SEQ ID NO: 2213766
cauuugcggaauauguucu

SEQ ID NO: 2213768 - RNA, 19 nt, Artificial Sequence
  Description of Artificial Sequence: Synthetic oligonucleotide
  Sense strand starting at position 2143 of SEQ ID NO: 1883751
gaacuugauccuuguggau

SEQ ID NO: 2213769 - RNA, 19 nt, Artificial Sequence
  Description of Artificial Sequence: Synthetic oligonucleotide
  Antisense strand to SEQ ID NO: 2213768
auccacaaggaucaaguuc

SEQ ID NO: 2213770 - RNA, 19 nt, Artificial Sequence
  Description of Artificial Sequence: Synthetic oligonucleotide
  Sense strand starting at position 885 of SEQ ID NO: 1883751
acguaaggauaaguccaau

SEQ ID NO: 2213771 - RNA, 19 nt, Artificial Sequence
  Description of Artificial Sequence: Synthetic oligonucleotide
  Antisense strand to SEQ ID NO: 2213770
auuggacuuauccuuacgu

SEQ ID NO: 2213772 - RNA, 19 nt, Artificial Sequence
  Description of Artificial Sequence: Synthetic oligonucleotide
  Sense strand starting at position 3732 of SEQ ID NO: 1883751
gcugauguuauugaaaggu

SEQ ID NO: 2213773 - RNA, 19 nt, Artificial Sequence
  Description of Artificial Sequence: Synthetic oligonucleotide
  Antisense strand to SEQ ID NO: 2213772
accuuucaauaacaucagc

SEQ ID NO: 2213774 - RNA, 19 nt, Artificial Sequence
  Description of Artificial Sequence: Synthetic oligonucleotide
  Sense strand starting at position 3120 of SEQ ID NO: 1883751
agucauuucugugcccauu

SEQ ID NO: 2213775 - RNA, 19 nt, Artificial Sequence
  Description of Artificial Sequence: Synthetic oligonucleotide
  Antisense strand to SEQ ID NO: 2213774
aaugggcacagaaaugacu

SEQ ID NO: 2213776 - RNA, 19 nt, Artificial Sequence
  Description of Artificial Sequence: Synthetic oligonucleotide
  Sense strand starting at position 3750 of SEQ ID NO: 1883751
ucaggaaggugccucaaau

SEQ ID NO: 2213777 - RNA, 19 nt, Artificial Sequence
  Description of Artificial Sequence: Synthetic oligonucleotide
  Antisense strand to SEQ ID NO: 2213776
auuugaggcaccuuccuga

SEQ ID NO: 2213778 - RNA, 19 nt, Artificial Sequence
  Description of Artificial Sequence: Synthetic oligonucleotide
  Sense strand starting at position 3414 of SEQ ID NO: 1883751
auaauuguccacugucaaa

SEQ ID NO: 2213779 - RNA, 19 nt, Artificial Sequence
  Description of Artificial Sequence: Synthetic oligonucleotide
  Antisense strand to SEQ ID NO: 2213778
uuugacaguggacaauuau

SEQ ID NO: 2213780 - RNA, 19 nt, Artificial Sequence
  Description of Artificial Sequence: Synthetic oligonucleotide
  Sense strand starting at position 1167 of SEQ ID NO: 1883751
gggcacaaaucaucuguca

SEQ ID NO: 2213781 - RNA, 19 nt, Artificial Sequence
  Description of Artificial Sequence: Synthetic oligonucleotide
  Antisense strand to SEQ ID NO: 2213780
ugacagaugauuugugccc

SEQ ID NO: 2213782 - RNA, 19 nt, Artificial Sequence
  Description of Artificial Sequence: Synthetic oligonucleotide
  Sense strand starting at position 1399 of SEQ ID NO: 1883751
cuuccuacucugugaaaug

SEQ ID NO: 2213783 - RNA, 19 nt, Artificial Sequence
  Description of Artificial Sequence: Synthetic oligonucleotide
  Antisense strand to SEQ ID NO: 2213782
cauuucacagaguaggaag

SEQ ID NO: 2213784 - RNA, 19 nt, Artificial Sequence
  Description of Artificial Sequence: Synthetic oligonucleotide
  Sense strand starting at position 1925 of SEQ ID NO: 1883751
gugacuucccucuaaggcu

SEQ ID NO: 2213785 - RNA, 19 nt, Artificial Sequence
  Description of Artificial Sequence: Synthetic oligonucleotide
  Antisense strand to SEQ ID NO: 2213784
agccuuagagggaagucac

SEQ ID NO: 2213786 - RNA, 19 nt, Artificial Sequence
  Description of Artificial Sequence: Synthetic oligonucleotide
  Sense strand starting at position 1354 of SEQ ID NO: 1883751
guacuaucacuugggcaag

SEQ ID NO: 2213787 - RNA, 19 nt, Artificial Sequence
  Description of Artificial Sequence: Synthetic oligonucleotide
  Antisense strand to SEQ ID NO: 2213786
cuugcccaagugauaguac

SEQ ID NO: 2213788 - RNA, 19 nt, Artificial Sequence
  Description of Artificial Sequence: Synthetic oligonucleotide
  Sense strand starting at position 1353 of SEQ ID NO: 1883751
gguacuaucacuugggcaa

SEQ ID NO: 2213789 - RNA, 19 nt, Artificial Sequence
  Description of Artificial Sequence: Synthetic oligonucleotide
  Antisense strand to SEQ ID NO: 2213788
uugcccaagugauaguacc

SEQ ID NO: 2213790 - RNA, 19 nt, Artificial Sequence
  Description of Artificial Sequence: Synthetic oligonucleotide
  Sense strand starting at position 1185 of SEQ ID NO: 1883751
aggugaugucaucaugccu

SEQ ID NO: 2213791 - RNA, 19 nt, Artificial Sequence
  Description of Artificial Sequence: Synthetic oligonucleotide
  Antisense strand to SEQ ID NO: 2213790
aggcaugaugacaucaccu

SEQ ID NO: 2213792 - RNA, 19 nt, Artificial Sequence
  Description of Artificial Sequence: Synthetic oligonucleotide
  Sense strand starting at position 801 of SEQ ID NO: 1883751
gggaaacuuuaagacaaac

SEQ ID NO: 2213793 - RNA, 19 nt, Artificial Sequence
  Description of Artificial Sequence: Synthetic oligonucleotide
  Antisense strand to SEQ ID NO: 2213792
guuugucuuaaaguuuccc

SEQ ID NO: 2213794 - RNA, 19 nt, Artificial Sequence
  Description of Artificial Sequence: Synthetic oligonucleotide
  Sense strand starting at position 1931 of SEQ ID NO: 1883751
ucccucuaaggcugguaaa

SEQ ID NO: 2213795 - RNA, 19 nt, Artificial Sequence
  Description of Artificial Sequence: Synthetic oligonucleotide
  Antisense strand to SEQ ID NO: 2213794
uuuaccagccuuagaggga

SEQ ID NO: 2213796 - RNA, 19 nt, Artificial Sequence
  Description of Artificial Sequence: Synthetic oligonucleotide
  Sense strand starting at position 1128 of SEQ ID NO: 1883751
acauuuauuuagugucagu

SEQ ID NO: 2213797 - RNA, 19 nt, Artificial Sequence
  Description of Artificial Sequence: Synthetic oligonucleotide
  Antisense strand to SEQ ID NO: 2213796
acugacacuaaauaaaugu

SEQ ID NO: 2213798 - RNA, 19 nt, Artificial Sequence
  Description of Artificial Sequence: Synthetic oligonucleotide
  Sense strand starting at position 3951 of SEQ ID NO: 1883751
cuaucugucugacuuucua

SEQ ID NO: 2213799 - RNA, 19 nt, Artificial Sequence
  Description of Artificial Sequence: Synthetic oligonucleotide
  Antisense strand to SEQ ID NO: 2213798
uagaaagucagacagauag

SEQ ID NO: 2213800 - RNA, 19 nt, Artificial Sequence
  Description of Artificial Sequence: Synthetic oligonucleotide
  Sense strand starting at position 2083 of SEQ ID NO: 1883751
cgaggagcaauguguuaag

SEQ ID NO: 2213801 - RNA, 19 nt, Artificial Sequence
  Description of Artificial Sequence: Synthetic oligonucleotide
  Antisense strand to SEQ ID NO: 2213800
cuuaacacauugcuccucg

SEQ ID NO: 2213802 - RNA, 19 nt, Artificial Sequence
  Description of Artificial Sequence: Synthetic oligonucleotide
  Sense strand starting at position 3090 of SEQ ID NO: 1883751
cgauucuccuaggucuuga

SEQ ID NO: 2213803 - RNA, 19 nt, Artificial Sequence
  Description of Artificial Sequence: Synthetic oligonucleotide
  Antisense strand to SEQ ID NO: 2213802
ucaagaccuaggagaaucg

SEQ ID NO: 2213804 - RNA, 19 nt, Artificial Sequence
  Description of Artificial Sequence: Synthetic oligonucleotide
  Sense strand starting at position 1341 of SEQ ID NO: 1883751
aggcucuaucuugguacua

SEQ ID NO: 2213805 - RNA, 19 nt, Artificial Sequence
  Description of Artificial Sequence: Synthetic oligonucleotide
  Antisense strand to SEQ ID NO: 2213804
uaguaccaagauagagccu

SEQ ID NO: 2213806 - RNA, 19 nt, Artificial Sequence
  Description of Artificial Sequence: Synthetic oligonucleotide
  Sense strand starting at position 3336 of SEQ ID NO: 1883751
cagcucacuggugguauaa

SEQ ID NO: 2213807 - RNA, 19 nt, Artificial Sequence
  Description of Artificial Sequence: Synthetic oligonucleotide
  Antisense strand to SEQ ID NO: 2213806
uuauaccaccagugagcug

SEQ ID NO: 2213808 - RNA, 19 nt, Artificial Sequence
  Description of Artificial Sequence: Synthetic oligonucleotide
  Sense strand starting at position 3948 of SEQ ID NO: 1883751
uuucuaucugucugacuuu

SEQ ID NO: 2213809 - RNA, 19 nt, Artificial Sequence
  Description of Artificial Sequence: Synthetic oligonucleotide
  Antisense strand to SEQ ID NO: 2213808
aaagucagacagauagaaa

SEQ ID NO: 2213810 - RNA, 19 nt, Artificial Sequence
  Description of Artificial Sequence: Synthetic oligonucleotide
  Sense strand starting at position 3130 of SEQ ID NO: 1883751
gugcccauucuuugaacua

SEQ ID NO: 2213811 - RNA, 19 nt, Artificial Sequence
  Description of Artificial Sequence: Synthetic oligonucleotide
  Antisense strand to SEQ ID NO: 2213810
uaguucaaagaaugggcac

SEQ ID NO: 2213812 - RNA, 19 nt, Artificial Sequence
  Description of Artificial Sequence: Synthetic oligonucleotide
  Sense strand starting at position 3834 of SEQ ID NO: 1883751
gcuccugguggcugaagaa

SEQ ID NO: 2213813 - RNA, 19 nt, Artificial Sequence
  Description of Artificial Sequence: Synthetic oligonucleotide
  Antisense strand to SEQ ID NO: 2213812
uucuucagccaccaggagc

SEQ ID NO: 2213814 - RNA, 19 nt, Artificial Sequence
  Description of Artificial Sequence: Synthetic oligonucleotide
  Sense strand starting at position 1342 of SEQ ID NO: 1883751
ggcucuaucuugguacuau

SEQ ID NO: 2213815 - RNA, 19 nt, Artificial Sequence
  Description of Artificial Sequence: Synthetic oligonucleotide
  Antisense strand to SEQ ID NO: 2213814
auaguaccaagauagagcc

SEQ ID NO: 2213816 - RNA, 19 nt, Artificial Sequence
  Description of Artificial Sequence: Synthetic oligonucleotide
  Sense strand starting at position 2726 of SEQ ID NO: 1883751
ugcguuaacgagcaaauua

SEQ ID NO: 2213817 - RNA, 19 nt, Artificial Sequence
  Description of Artificial Sequence: Synthetic oligonucleotide
  Antisense strand to SEQ ID NO: 2213816
uaauuugcucguuaacgca

SEQ ID NO: 2213818 - RNA, 19 nt, Artificial Sequence
  Description of Artificial Sequence: Synthetic oligonucleotide
  Sense strand starting at position 1176 of SEQ ID NO: 1883751
ucaucugucaggugauguc

SEQ ID NO: 2213819 - RNA, 19 nt, Artificial Sequence
  Description of Artificial Sequence: Synthetic oligonucleotide
  Antisense strand to SEQ ID NO: 2213818
gacaucaccugacagauga

SEQ ID NO: 2213820 - RNA, 19 nt, Artificial Sequence
  Description of Artificial Sequence: Synthetic oligonucleotide
  Sense strand starting at position 3795 of SEQ ID NO: 1883751
aucaucaauuauggaggaa

SEQ ID NO: 2213821 - RNA, 19 nt, Artificial Sequence
  Description of Artificial Sequence: Synthetic oligonucleotide
  Antisense strand to SEQ ID NO: 2213820
uuccuccauaauugaugau

SEQ ID NO: 2213822 - RNA, 19 nt, Artificial Sequence
  Description of Artificial Sequence: Synthetic oligonucleotide
  Sense strand starting at position 1368 of SEQ ID NO: 1883751
gcaaguuacucugugcaag

SEQ ID NO: 2213823 - RNA, 19 nt, Artificial Sequence
  Description of Artificial Sequence: Synthetic oligonucleotide
  Antisense strand to SEQ ID NO: 2213822
cuugcacagaguaacuugc

SEQ ID NO: 2213824 - RNA, 19 nt, Artificial Sequence
  Description of Artificial Sequence: Synthetic oligonucleotide
  Sense strand starting at position 2081 of SEQ ID NO: 1883751
ggcgaggagcaauguguua

SEQ ID NO: 2213825 - RNA, 19 nt, Artificial Sequence
  Description of Artificial Sequence: Synthetic oligonucleotide
  Antisense strand to SEQ ID NO: 2213824
uaacacauugcuccucgcc

SEQ ID NO: 2213826 - RNA, 19 nt, Artificial Sequence
  Description of Artificial Sequence: Synthetic oligonucleotide
  Sense strand starting at position 3282 of SEQ ID NO: 1883752
gaggaaguauuauuacuca

SEQ ID NO: 2213827 - RNA, 19 nt, Artificial Sequence
  Description of Artificial Sequence: Synthetic oligonucleotide
  Antisense strand to SEQ ID NO: 2213826
ugaguaauaauacuuccuc

SEQ ID NO: 2213828 - RNA, 19 nt, Artificial Sequence
  Description of Artificial Sequence: Synthetic oligonucleotide
  Sense strand starting at position 3090 of SEQ ID NO: 1883752
uccugaauagcugaucaca

SEQ ID NO: 2213829 - RNA, 19 nt, Artificial Sequence
  Description of Artificial Sequence: Synthetic oligonucleotide
  Antisense strand to SEQ ID NO: 2213828
ugugaucagcuauucagga

SEQ ID NO: 2213830 - RNA, 19 nt, Artificial Sequence
  Description of Artificial Sequence: Synthetic oligonucleotide
  Sense strand starting at position 1607 of SEQ ID NO: 1883752
ggaggaauuccuugacuuc

SEQ ID NO: 2213831 - RNA, 19 nt, Artificial Sequence
  Description of Artificial Sequence: Synthetic oligonucleotide
  Antisense strand to SEQ ID NO: 2213830
gaagucaaggaauuccucc

SEQ ID NO: 2213832 - RNA, 19 nt, Artificial Sequence
  Description of Artificial Sequence: Synthetic oligonucleotide
  Sense strand starting at position 875 of SEQ ID NO: 1883752
ggacuccucugacuuagau

SEQ ID NO: 2213833 - RNA, 19 nt, Artificial Sequence
  Description of Artificial Sequence: Synthetic oligonucleotide
  Antisense strand to SEQ ID NO: 2213832
aucuaagucagaggagucc

SEQ ID NO: 2213834 - RNA, 19 nt, Artificial Sequence
  Description of Artificial Sequence: Synthetic oligonucleotide
  Sense strand starting at position 2858 of SEQ ID NO: 1883752
uuuauugagcacgaaugau

SEQ ID NO: 2213835 - RNA, 19 nt, Artificial Sequence
  Description of Artificial Sequence: Synthetic oligonucleotide
  Antisense strand to SEQ ID NO: 2213834
aucauucgugcucaauaaa

SEQ ID NO: 2213836 - RNA, 19 nt, Artificial Sequence
  Description of Artificial Sequence: Synthetic oligonucleotide
  Sense strand starting at position 888 of SEQ ID NO: 1883752
uuagauacuuggucuggaa

SEQ ID NO: 2213837 - RNA, 19 nt, Artificial Sequence
  Description of Artificial Sequence: Synthetic oligonucleotide
  Antisense strand to SEQ ID NO: 2213836
uuccagaccaaguaucuaa

SEQ ID NO: 2213838 - RNA, 19 nt, Artificial Sequence
  Description of Artificial Sequence: Synthetic oligonucleotide
  Sense strand starting at position 1752 of SEQ ID NO: 1883752
aauguagcccuaggaaaga

SEQ ID NO: 2213839 - RNA, 19 nt, Artificial Sequence
  Description of Artificial Sequence: Synthetic oligonucleotide
  Antisense strand to SEQ ID NO: 2213838
ucuuuccuagggcuacauu

SEQ ID NO: 2213840 - RNA, 19 nt, Artificial Sequence
  Description of Artificial Sequence: Synthetic oligonucleotide
  Sense strand starting at position 739 of SEQ ID NO: 1883752
acaagugaguucccauaga

SEQ ID NO: 2213841 - RNA, 19 nt, Artificial Sequence
  Description of Artificial Sequence: Synthetic oligonucleotide
  Antisense strand to SEQ ID NO: 2213840
ucuaugggaacucacuugu

SEQ ID NO: 2213842 - RNA, 19 nt, Artificial Sequence
  Description of Artificial Sequence: Synthetic oligonucleotide
  Sense strand starting at position 2402 of SEQ ID NO: 1883752
gggaauuccuaaucaguuc

SEQ ID NO: 2213843 - RNA, 19 nt, Artificial Sequence
  Description of Artificial Sequence: Synthetic oligonucleotide
  Antisense strand to SEQ ID NO: 2213842
gaacugauuaggaauuccc

SEQ ID NO: 2213844 - RNA, 19 nt, Artificial Sequence
  Description of Artificial Sequence: Synthetic oligonucleotide
  Sense strand starting at position 3528 of SEQ ID NO: 1883752
ggcauccagcaugauuaau

SEQ ID NO: 2213845 - RNA, 19 nt, Artificial Sequence
  Description of Artificial Sequence: Synthetic oligonucleotide
  Antisense strand to SEQ ID NO: 2213844
auuaaucaugcuggaugcc

SEQ ID NO: 2213846 - RNA, 19 nt, Artificial Sequence
  Description of Artificial Sequence: Synthetic oligonucleotide
  Sense strand starting at position 1189 of SEQ ID NO: 1883752
cggcauugacaauauguaa

SEQ ID NO: 2213847 - RNA, 19 nt, Artificial Sequence
  Description of Artificial Sequence: Synthetic oligonucleotide
  Antisense strand to SEQ ID NO: 2213846
uuacauauugucaaugccg

SEQ ID NO: 2213848 - RNA, 19 nt, Artificial Sequence
  Description of Artificial Sequence: Synthetic oligonucleotide
  Sense strand starting at position 887 of SEQ ID NO: 1883752
cuuagauacuuggucugga

SEQ ID NO: 2213849 - RNA, 19 nt, Artificial Sequence
  Description of Artificial Sequence: Synthetic oligonucleotide
  Antisense strand to SEQ ID NO: 2213848
uccagaccaaguaucuaag

SEQ ID NO: 2213850 - RNA, 19 nt, Artificial Sequence
  Description of Artificial Sequence: Synthetic oligonucleotide
  Sense strand starting at position 1087 of SEQ ID NO: 1883752
agcagaugguuucuggaaa

SEQ ID NO: 2213851 - RNA, 19 nt, Artificial Sequence
  Description of Artificial Sequence: Synthetic oligonucleotide
  Antisense strand to SEQ ID NO: 2213850
uuuccagaaaccaucugcu

SEQ ID NO: 2213852 - RNA, 19 nt, Artificial Sequence
  Description of Artificial Sequence: Synthetic oligonucleotide
  Sense strand starting at position 726 of SEQ ID NO: 1883752
gcuuauggagguuacaagu

SEQ ID NO: 2213853 - RNA, 19 nt, Artificial Sequence
  Description of Artificial Sequence: Synthetic oligonucleotide
  Antisense strand to SEQ ID NO: 2213852
acuuguaaccuccauaagc

SEQ ID NO: 2213854 - RNA, 19 nt, Artificial Sequence
  Description of Artificial Sequence: Synthetic oligonucleotide
  Sense strand starting at position 2888 of SEQ ID NO: 1883752
gcugccagugcuuugcaua

SEQ ID NO: 2213855 - RNA, 19 nt, Artificial Sequence
  Description of Artificial Sequence: Synthetic oligonucleotide
  Antisense strand to SEQ ID NO: 2213854
uaugcaaagcacuggcagc

SEQ ID NO: 2213856 - RNA, 19 nt, Artificial Sequence
  Description of Artificial Sequence: Synthetic oligonucleotide
  Sense strand starting at position 2367 of SEQ ID NO: 1883752
acgacuagucaguagugga

SEQ ID NO: 2213857 - RNA, 19 nt, Artificial Sequence
  Description of Artificial Sequence: Synthetic oligonucleotide
  Antisense strand to SEQ ID NO: 2213856
uccacuacugacuagucgu

SEQ ID NO: 2213858 - RNA, 19 nt, Artificial Sequence
  Description of Artificial Sequence: Synthetic oligonucleotide
  Sense strand starting at position 872 of SEQ ID NO: 1883752
uuuggacuccucugacuua

SEQ ID NO: 2213859 - RNA, 19 nt, Artificial Sequence
  Description of Artificial Sequence: Synthetic oligonucleotide
  Antisense strand to SEQ ID NO: 2213858
uaagucagaggaguccaaa

SEQ ID NO: 2213860 - RNA, 19 nt, Artificial Sequence
  Description of Artificial Sequence: Synthetic oligonucleotide
  Sense strand starting at position 2855 of SEQ ID NO: 1883752
auguuuauugagcacgaau

SEQ ID NO: 2213861 - RNA, 19 nt, Artificial Sequence
  Description of Artificial Sequence: Synthetic oligonucleotide
  Antisense strand to SEQ ID NO: 2213860
auucgugcucaauaaacau

SEQ ID NO: 2213862 - RNA, 19 nt, Artificial Sequence
  Description of Artificial Sequence: Synthetic oligonucleotide
  Sense strand starting at position 2210 of SEQ ID NO: 1883752
gagugcuggcauuaacuaa

SEQ ID NO: 2213863 - RNA, 19 nt, Artificial Sequence
  Description of Artificial Sequence: Synthetic oligonucleotide
  Antisense strand to SEQ ID NO: 2213862
uuaguuaaugccagcacuc

SEQ ID NO: 2213864 - RNA, 19 nt, Artificial Sequence
  Description of Artificial Sequence: Synthetic oligonucleotide
  Sense strand starting at position 381 of SEQ ID NO: 1883752
cugcguaauagacacggaa

SEQ ID NO: 2213865 - RNA, 19 nt, Artificial Sequence
  Description of Artificial Sequence: Synthetic oligonucleotide
  Antisense strand to SEQ ID NO: 2213864
uuccgugucuauuacgcag

SEQ ID NO: 2213866 - RNA, 19 nt, Artificial Sequence
  Description of Artificial Sequence: Synthetic oligonucleotide
  Sense strand starting at position 29 of SEQ ID NO: 1883752
gagacugaguguucccuga

SEQ ID NO: 2213867 - RNA, 19 nt, Artificial Sequence
  Description of Artificial Sequence: Synthetic oligonucleotide
  Antisense strand to SEQ ID NO: 2213866
ucagggaacacucagucuc

SEQ ID NO: 2213868 - RNA, 19 nt, Artificial Sequence
  Description of Artificial Sequence: Synthetic oligonucleotide
  Sense strand starting at position 31 of SEQ ID NO: 1883752
gacugaguguucccugaga

SEQ ID NO: 2213869 - RNA, 19 nt, Artificial Sequence
  Description of Artificial Sequence: Synthetic oligonucleotide
  Antisense strand to SEQ ID NO: 2213868
ucucagggaacacucaguc

SEQ ID NO: 2213870 - RNA, 19 nt, Artificial Sequence
  Description of Artificial Sequence: Synthetic oligonucleotide
  Sense strand starting at position 3362 of SEQ ID NO: 1883752
acagcugaaaugugguaga

SEQ ID NO: 2213871 - RNA, 19 nt, Artificial Sequence
  Description of Artificial Sequence: Synthetic oligonucleotide
  Antisense strand to SEQ ID NO: 2213870
ucuaccacauuucagcugu

SEQ ID NO: 2213872 - RNA, 19 nt, Artificial Sequence
  Description of Artificial Sequence: Synthetic oligonucleotide
  Sense strand starting at position 1703 of SEQ ID NO: 1883752
uuacucguucuccaucaga

SEQ ID NO: 2213873 - RNA, 19 nt, Artificial Sequence
  Description of Artificial Sequence: Synthetic oligonucleotide
  Antisense strand to SEQ ID NO: 2213872
ucugauggagaacgaguaa

SEQ ID NO: 2213874 - RNA, 19 nt, Artificial Sequence
  Description of Artificial Sequence: Synthetic oligonucleotide
  Sense strand starting at position 732 of SEQ ID NO: 1883752
ggagguuacaagugaguuc

SEQ ID NO: 2213875 - RNA, 19 nt, Artificial Sequence
  Description of Artificial Sequence: Synthetic oligonucleotide
  Antisense strand to SEQ ID NO: 2213874
gaacucacuuguaaccucc

SEQ ID NO: 2213876 - RNA, 19 nt, Artificial Sequence
  Description of Artificial Sequence: Synthetic oligonucleotide
  Sense strand starting at position 2746 of SEQ ID NO: 1883752
cucauuagccugggaacuu

SEQ ID NO: 2213877 - RNA, 19 nt, Artificial Sequence
  Description of Artificial Sequence: Synthetic oligonucleotide
  Antisense strand to SEQ ID NO: 2213876
aaguucccaggcuaaugag

SEQ ID NO: 2213878 - RNA, 19 nt, Artificial Sequence
  Description of Artificial Sequence: Synthetic oligonucleotide
  Sense strand starting at position 2745 of SEQ ID NO: 1883752
ccucauuagccugggaacu

SEQ ID NO: 2213879 - RNA, 19 nt, Artificial Sequence
  Description of Artificial Sequence: Synthetic oligonucleotide
  Antisense strand to SEQ ID NO: 2213878
aguucccaggcuaaugagg

SEQ ID NO: 2213880 - RNA, 19 nt, Artificial Sequence
  Description of Artificial Sequence: Synthetic oligonucleotide
  Sense strand starting at position 2744 of SEQ ID NO: 1883752
uccucauuagccugggaac

SEQ ID NO: 2213881 - RNA, 19 nt, Artificial Sequence
  Description of Artificial Sequence: Synthetic oligonucleotide
  Antisense strand to SEQ ID NO: 2213880
guucccaggcuaaugagga

SEQ ID NO: 2213882 - RNA, 19 nt, Artificial Sequence
  Description of Artificial Sequence: Synthetic oligonucleotide
  Sense strand starting at position 3149 of SEQ ID NO: 1883752
guaguuacuuuaguagaga

SEQ ID NO: 2213883 - RNA, 19 nt, Artificial Sequence
  Description of Artificial Sequence: Synthetic oligonucleotide
  Antisense strand to SEQ ID NO: 2213882
ucucuacuaaaguaacuac

SEQ ID NO: 2213884 - RNA, 19 nt, Artificial Sequence
  Description of Artificial Sequence: Synthetic oligonucleotide
  Sense strand starting at position 2388 of SEQ ID NO: 1883752
ugugaauucucuucgggaa

SEQ ID NO: 2213885 - RNA, 19 nt, Artificial Sequence
  Description of Artificial Sequence: Synthetic oligonucleotide
  Antisense strand to SEQ ID NO: 2213884
uucccgaagagaauucaca

SEQ ID NO: 2213886 - RNA, 19 nt, Artificial Sequence
  Description of Artificial Sequence: Synthetic oligonucleotide
  Sense strand starting at position 2389 of SEQ ID NO: 1883752
gugaauucucuucgggaau

SEQ ID NO: 2213887 - RNA, 19 nt, Artificial Sequence
  Description of Artificial Sequence: Synthetic oligonucleotide
  Antisense strand to SEQ ID NO: 2213886
auucccgaagagaauucac

SEQ ID NO: 2213888 - RNA, 19 nt, Artificial Sequence
  Description of Artificial Sequence: Synthetic oligonucleotide
  Sense strand starting at position 2810 of SEQ ID NO: 1883752
gccacucuugguggaauga

SEQ ID NO: 2213889 - RNA, 19 nt, Artificial Sequence
  Description of Artificial Sequence: Synthetic oligonucleotide
  Antisense strand to SEQ ID NO: 2213888
ucauuccaccaagaguggc

SEQ ID NO: 2213890 - RNA, 19 nt, Artificial Sequence
  Description of Artificial Sequence: Synthetic oligonucleotide
  Sense strand starting at position 2854 of SEQ ID NO: 1883752
aauguuuauugagcacgaa

SEQ ID NO: 2213891 - RNA, 19 nt, Artificial Sequence
  Description of Artificial Sequence: Synthetic oligonucleotide
  Antisense strand to SEQ ID NO: 2213890
uucgugcucaauaaacauu

SEQ ID NO: 2213892 - RNA, 19 nt, Artificial Sequence
  Description of Artificial Sequence: Synthetic oligonucleotide
  Sense strand starting at position 3527 of SEQ ID NO: 1883752
uggcauccagcaugauuaa

SEQ ID NO: 2213893 - RNA, 19 nt, Artificial Sequence
  Description of Artificial Sequence: Synthetic oligonucleotide
  Antisense strand to SEQ ID NO: 2213892
uuaaucaugcuggaugcca

SEQ ID NO: 2213894 - RNA, 19 nt, Artificial Sequence
  Description of Artificial Sequence: Synthetic oligonucleotide
  Sense strand starting at position 33 of SEQ ID NO: 1883752
cugaguguucccugagaug

SEQ ID NO: 2213895 - RNA, 19 nt, Artificial Sequence
  Description of Artificial Sequence: Synthetic oligonucleotide
  Antisense strand to SEQ ID NO: 2213894
caucucagggaacacucag

SEQ ID NO: 2213896 - RNA, 19 nt, Artificial Sequence
  Description of Artificial Sequence: Synthetic oligonucleotide
  Sense strand starting at position 3692 of SEQ ID NO: 1883752
gccugucauccugauucca

SEQ ID NO: 2213897 - RNA, 19 nt, Artificial Sequence
  Description of Artificial Sequence: Synthetic oligonucleotide
  Antisense strand to SEQ ID NO: 2213896
uggaaucaggaugacaggc

SEQ ID NO: 2213898 - RNA, 19 nt, Artificial Sequence
  Description of Artificial Sequence: Synthetic oligonucleotide
  Sense strand starting at position 2857 of SEQ ID NO: 1883752
guuuauugagcacgaauga

SEQ ID NO: 2213899 - RNA, 19 nt, Artificial Sequence
  Description of Artificial Sequence: Synthetic oligonucleotide
  Antisense strand to SEQ ID NO: 2213898
ucauucgugcucaauaaac

SEQ ID NO: 2213900 - RNA, 19 nt, Artificial Sequence
  Description of Artificial Sequence: Synthetic oligonucleotide
  Sense strand starting at position 3525 of SEQ ID NO: 1883752
guuggcauccagcaugauu

SEQ ID NO: 2213901 - RNA, 19 nt, Artificial Sequence
  Description of Artificial Sequence: Synthetic oligonucleotide
  Antisense strand to SEQ ID NO: 2213900
aaucaugcuggaugccaac

SEQ ID NO: 2213902 - RNA, 19 nt, Artificial Sequence
  Description of Artificial Sequence: Synthetic oligonucleotide
  Sense strand starting at position 1501 of SEQ ID NO: 1883752
accguaaaucccugacuuc

SEQ ID NO: 2213903 - RNA, 19 nt, Artificial Sequence
  Description of Artificial Sequence: Synthetic oligonucleotide
  Antisense strand to SEQ ID NO: 2213902
gaagucagggauuuacggu

SEQ ID NO: 2213904 - RNA, 19 nt, Artificial Sequence
  Description of Artificial Sequence: Synthetic oligonucleotide
  Sense strand starting at position 704 of SEQ ID NO: 1883752
guccuaagguucucuauac

SEQ ID NO: 2213905 - RNA, 19 nt, Artificial Sequence
  Description of Artificial Sequence: Synthetic oligonucleotide
  Antisense strand to SEQ ID NO: 2213904
guauagagaaccuuaggac

SEQ ID NO: 2213906 - RNA, 19 nt, Artificial Sequence
  Description of Artificial Sequence: Synthetic oligonucleotide
  Sense strand starting at position 2612 of SEQ ID NO: 1883753
gaaguuagcgcuucucucu

SEQ ID NO: 2213907 - RNA, 19 nt, Artificial Sequence
  Description of Artificial Sequence: Synthetic oligonucleotide
  Antisense strand to SEQ ID NO: 2213906
agagagaagcgcuaacuuc

SEQ ID NO: 2213908 - RNA, 19 nt, Artificial Sequence
  Description of Artificial Sequence: Synthetic oligonucleotide
  Sense strand starting at position 3779 of SEQ ID NO: 1883753
uuugguucuugauuuguca

SEQ ID NO: 2213909 - RNA, 19 nt, Artificial Sequence
  Description of Artificial Sequence: Synthetic oligonucleotide
  Antisense strand to SEQ ID NO: 2213908
ugacaaaucaagaaccaaa

SEQ ID NO: 2213910 - RNA, 19 nt, Artificial Sequence
  Description of Artificial Sequence: Synthetic oligonucleotide
  Sense strand starting at position 3695 of SEQ ID NO: 1883753
gaauaauaugaguguauac

SEQ ID NO: 2213911 - RNA, 19 nt, Artificial Sequence
  Description of Artificial Sequence: Synthetic oligonucleotide
  Antisense strand to SEQ ID NO: 2213910
guauacacucauauuauuc

SEQ ID NO: 2213912 - RNA, 19 nt, Artificial Sequence
  Description of Artificial Sequence: Synthetic oligonucleotide
  Sense strand starting at position 3004 of SEQ ID NO: 1883753
agcguuuaggaugaaauau

SEQ ID NO: 2213913 - RNA, 19 nt, Artificial Sequence
  Description of Artificial Sequence: Synthetic oligonucleotide
  Antisense strand to SEQ ID NO: 2213912
auauuucauccuaaacgcu

SEQ ID NO: 2213914 - RNA, 19 nt, Artificial Sequence
  Description of Artificial Sequence: Synthetic oligonucleotide
  Sense strand starting at position 3905 of SEQ ID NO: 1883753
gugagcucucuuuaaggaa

SEQ ID NO: 2213915 - RNA, 19 nt, Artificial Sequence
  Description of Artificial Sequence: Synthetic oligonucleotide
  Antisense strand to SEQ ID NO: 2213914
uuccuuaaagagagcucac

SEQ ID NO: 2213916 - RNA, 19 nt, Artificial Sequence
  Description of Artificial Sequence: Synthetic oligonucleotide
  Sense strand starting at position 639 of SEQ ID NO: 1883753
agauuaucagcccaugcaa

SEQ ID NO: 2213917 - RNA, 19 nt, Artificial Sequence
  Description of Artificial Sequence: Synthetic oligonucleotide
  Antisense strand to SEQ ID NO: 2213916
uugcaugggcugauaaucu

SEQ ID NO: 2213918 - RNA, 19 nt, Artificial Sequence
  Description of Artificial Sequence: Synthetic oligonucleotide
  Sense strand starting at position 248 of SEQ ID NO: 1883753
uuuacuuaagagugauacu

SEQ ID NO: 2213919 - RNA, 19 nt, Artificial Sequence
  Description of Artificial Sequence: Synthetic oligonucleotide
  Antisense strand to SEQ ID NO: 2213918
aguaucacucuuaaguaaa

SEQ ID NO: 2213920 - RNA, 19 nt, Artificial Sequence
  Description of Artificial Sequence: Synthetic oligonucleotide
  Sense strand starting at position 3721 of SEQ ID NO: 1883753
cugaaacggcauuauacuu

SEQ ID NO: 2213921 - RNA, 19 nt, Artificial Sequence
  Description of Artificial Sequence: Synthetic oligonucleotide
  Antisense strand to SEQ ID NO: 2213920
aaguauaaugccguuucag

SEQ ID NO: 2213922 - RNA, 19 nt, Artificial Sequence
  Description of Artificial Sequence: Synthetic oligonucleotide
  Sense strand starting at position 609 of SEQ ID NO: 1883753
gucauuaaacaguaauugu

SEQ ID NO: 2213923 - RNA, 19 nt, Artificial Sequence
  Description of Artificial Sequence: Synthetic oligonucleotide
  Antisense strand to SEQ ID NO: 2213922
acaauuacuguuuaaugac

SEQ ID NO: 2213924 - RNA, 19 nt, Artificial Sequence
  Description of Artificial Sequence: Synthetic oligonucleotide
  Sense strand starting at position 3653 of SEQ ID NO: 1883753
guauaaguguuagccauuu

SEQ ID NO: 2213925 - RNA, 19 nt, Artificial Sequence
  Description of Artificial Sequence: Synthetic oligonucleotide
  Antisense strand to SEQ ID NO: 2213924
aaauggcuaacacuuauac

SEQ ID NO: 2213926 - RNA, 19 nt, Artificial Sequence
  Description of Artificial Sequence: Synthetic oligonucleotide
  Sense strand starting at position 2864 of SEQ ID NO: 1883753
ugaagagcuggguauaguu

SEQ ID NO: 2213927 - RNA, 19 nt, Artificial Sequence
  Description of Artificial Sequence: Synthetic oligonucleotide
  Antisense strand to SEQ ID NO: 2213926
aacuauacccagcucuuca

SEQ ID NO: 2213928 - RNA, 19 nt, Artificial Sequence
  Description of Artificial Sequence: Synthetic oligonucleotide
  Sense strand starting at position 3616 of SEQ ID NO: 1883753
augugaaaucaacagugcu

SEQ ID NO: 2213929 - RNA, 19 nt, Artificial Sequence
  Description of Artificial Sequence: Synthetic oligonucleotide
  Antisense strand to SEQ ID NO: 2213928
agcacuguugauuucacau

SEQ ID NO: 2213930 - RNA, 19 nt, Artificial Sequence
  Description of Artificial Sequence: Synthetic oligonucleotide
  Sense strand starting at position 3117 of SEQ ID NO: 1883753
uauggaguguuacuaaaug

SEQ ID NO: 2213931 - RNA, 19 nt, Artificial Sequence
  Description of Artificial Sequence: Synthetic oligonucleotide
  Antisense strand to SEQ ID NO: 2213930
cauuuaguaacacuccaua

SEQ ID NO: 2213932 - RNA, 19 nt, Artificial Sequence
  Description of Artificial Sequence: Synthetic oligonucleotide
  Sense strand starting at position 3456 of SEQ ID NO: 1883753
guaguugaaguggaauagu

SEQ ID NO: 2213933 - RNA, 19 nt, Artificial Sequence
  Description of Artificial Sequence: Synthetic oligonucleotide
  Antisense strand to SEQ ID NO: 2213932
acuauuccacuucaacuac

SEQ ID NO: 2213934 - RNA, 19 nt, Artificial Sequence
  Description of Artificial Sequence: Synthetic oligonucleotide
  Sense strand starting at position 3459 of SEQ ID NO: 1883753
guugaaguggaauaguagu

SEQ ID NO: 2213935 - RNA, 19 nt, Artificial Sequence
  Description of Artificial Sequence: Synthetic oligonucleotide
  Antisense strand to SEQ ID NO: 2213934
acuacuauuccacuucaac

SEQ ID NO: 2213936 - RNA, 19 nt, Artificial Sequence
  Description of Artificial Sequence: Synthetic oligonucleotide
  Sense strand starting at position 1208 of SEQ ID NO: 1883753
uggccuacgauugauuaca

SEQ ID NO: 2213937 - RNA, 19 nt, Artificial Sequence
  Description of Artificial Sequence: Synthetic oligonucleotide
  Antisense strand to SEQ ID NO: 2213936
uguaaucaaucguaggcca

SEQ ID NO: 2213938 - RNA, 19 nt, Artificial Sequence
  Description of Artificial Sequence: Synthetic oligonucleotide
  Sense strand starting at position 3274 of SEQ ID NO: 1883753
aggcaagucagaugauacu

SEQ ID NO: 2213939 - RNA, 19 nt, Artificial Sequence
  Description of Artificial Sequence: Synthetic oligonucleotide
  Antisense strand to SEQ ID NO: 2213938
aguaucaucugacuugccu

SEQ ID NO: 2213940 - RNA, 19 nt, Artificial Sequence
  Description of Artificial Sequence: Synthetic oligonucleotide
  Sense strand starting at position 3783 of SEQ ID NO: 1883753
guucuugauuugucacugu

SEQ ID NO: 2213941 - RNA, 19 nt, Artificial Sequence
  Description of Artificial Sequence: Synthetic oligonucleotide
  Antisense strand to SEQ ID NO: 2213940
acagugacaaaucaagaac

SEQ ID NO: 2213942 - RNA, 19 nt, Artificial Sequence
  Description of Artificial Sequence: Synthetic oligonucleotide
  Sense strand starting at position 1477 of SEQ ID NO: 1883753
gggcuucuaacugacaguu

SEQ ID NO: 2213943 - RNA, 19 nt, Artificial Sequence
  Description of Artificial Sequence: Synthetic oligonucleotide
  Antisense strand to SEQ ID NO: 2213942
aacugucaguuagaagccc

SEQ ID NO: 2213944 - RNA, 19 nt, Artificial Sequence
  Description of Artificial Sequence: Synthetic oligonucleotide
  Sense strand starting at position 356 of SEQ ID NO: 1883753
gagucagaguauccuaauc

SEQ ID NO: 2213945 - RNA, 19 nt, Artificial Sequence
  Description of Artificial Sequence: Synthetic oligonucleotide
  Antisense strand to SEQ ID NO: 2213944
gauuaggauacucugacuc

SEQ ID NO: 2213946 - RNA, 19 nt, Artificial Sequence
  Description of Artificial Sequence: Synthetic oligonucleotide
  Sense strand starting at position 585 of SEQ ID NO: 1883753
ugugaaugaugaguccacu

SEQ ID NO: 2213947 - RNA, 19 nt, Artificial Sequence
  Description of Artificial Sequence: Synthetic oligonucleotide
  Antisense strand to SEQ ID NO: 2213946
aguggacucaucauucaca

SEQ ID NO: 2213948 - RNA, 19 nt, Artificial Sequence
  Description of Artificial Sequence: Synthetic oligonucleotide
  Sense strand starting at position 200 of SEQ ID NO: 1883753
uguggaggacagugugaau

SEQ ID NO: 2213949 - RNA, 19 nt, Artificial Sequence
  Description of Artificial Sequence: Synthetic oligonucleotide
  Antisense strand to SEQ ID NO: 2213948
auucacacuguccuccaca

SEQ ID NO: 2213950 - RNA, 19 nt, Artificial Sequence
  Description of Artificial Sequence: Synthetic oligonucleotide
  Sense strand starting at position 3759 of SEQ ID NO: 1883753
ccuagaaauuguguuaauu

SEQ ID NO: 2213951 - RNA, 19 nt, Artificial Sequence
  Description of Artificial Sequence: Synthetic oligonucleotide
  Antisense strand to SEQ ID NO: 2213950
aauuaacacaauuucuagg

SEQ ID NO: 2213952 - RNA, 19 nt, Artificial Sequence
  Description of Artificial Sequence: Synthetic oligonucleotide
  Sense strand starting at position 2955 of SEQ ID NO: 1883753
ggaaguuggaccugcaacu

SEQ ID NO: 2213953 - RNA, 19 nt, Artificial Sequence
  Description of Artificial Sequence: Synthetic oligonucleotide
  Antisense strand to SEQ ID NO: 2213952
aguugcagguccaacuucc

SEQ ID NO: 2213954 - RNA, 19 nt, Artificial Sequence
  Description of Artificial Sequence: Synthetic oligonucleotide
  Sense strand starting at position 776 of SEQ ID NO: 1883753
gguggaaauuuguaacuga

SEQ ID NO: 2213955 - RNA, 19 nt, Artificial Sequence
  Description of Artificial Sequence: Synthetic oligonucleotide
  Antisense strand to SEQ ID NO: 2213954
ucaguuacaaauuuccacc

SEQ ID NO: 2213956 - RNA, 19 nt, Artificial Sequence
  Description of Artificial Sequence: Synthetic oligonucleotide
  Sense strand starting at position 636 of SEQ ID NO: 1883753
gugagauuaucagcccaug

SEQ ID NO: 2213957 - RNA, 19 nt, Artificial Sequence
  Description of Artificial Sequence: Synthetic oligonucleotide
  Antisense strand to SEQ ID NO: 2213956
caugggcugauaaucucac

SEQ ID NO: 2213958 - RNA, 19 nt, Artificial Sequence
  Description of Artificial Sequence: Synthetic oligonucleotide
  Sense strand starting at position 3003 of SEQ ID NO: 1883753
cagcguuuaggaugaaaua

SEQ ID NO: 2213959 - RNA, 19 nt, Artificial Sequence
  Description of Artificial Sequence: Synthetic oligonucleotide
  Antisense strand to SEQ ID NO: 2213958
uauuucauccuaaacgcug

SEQ ID NO: 2213960 - RNA, 19 nt, Artificial Sequence
  Description of Artificial Sequence: Synthetic oligonucleotide
  Sense strand starting at position 3686 of SEQ ID NO: 1883753
gcagucguugaauaauaug

SEQ ID NO: 2213961 - RNA, 19 nt, Artificial Sequence
  Description of Artificial Sequence: Synthetic oligonucleotide
  Antisense strand to SEQ ID NO: 2213960
cauauuauucaacgacugc

SEQ ID NO: 2213962 - RNA, 19 nt, Artificial Sequence
  Description of Artificial Sequence: Synthetic oligonucleotide
  Sense strand starting at position 3465 of SEQ ID NO: 1883753
guggaauaguaguuugacu

SEQ ID NO: 2213963 - RNA, 19 nt, Artificial Sequence
  Description of Artificial Sequence: Synthetic oligonucleotide
  Antisense strand to SEQ ID NO: 2213962
agucaaacuacuauuccac

SEQ ID NO: 2213964 - RNA, 19 nt, Artificial Sequence
  Description of Artificial Sequence: Synthetic oligonucleotide
  Sense strand starting at position 3467 of SEQ ID NO: 1883753
ggaauaguaguuugacugu

SEQ ID NO: 2213965 - RNA, 19 nt, Artificial Sequence
  Description of Artificial Sequence: Synthetic oligonucleotide
  Antisense strand to SEQ ID NO: 2213964
acagucaaacuacuauucc

SEQ ID NO: 2213966 - RNA, 19 nt, Artificial Sequence
  Description of Artificial Sequence: Synthetic oligonucleotide
  Sense strand starting at position 663 of SEQ ID NO: 1883753
uguuuaaugcuguacaacu

SEQ ID NO: 2213967 - RNA, 19 nt, Artificial Sequence
  Description of Artificial Sequence: Synthetic oligonucleotide
  Antisense strand to SEQ ID NO: 2213966
aguuguacagcauuaaaca

SEQ ID NO: 2213968 - RNA, 19 nt, Artificial Sequence
  Description of Artificial Sequence: Synthetic oligonucleotide
  Sense strand starting at position 459 of SEQ ID NO: 1883753
gguucuguguaccuagaaa

SEQ ID NO: 2213969 - RNA, 19 nt, Artificial Sequence
  Description of Artificial Sequence: Synthetic oligonucleotide
  Antisense strand to SEQ ID NO: 2213968
uuucuagguacacagaacc

SEQ ID NO: 2213970 - RNA, 19 nt, Artificial Sequence
  Description of Artificial Sequence: Synthetic oligonucleotide
  Sense strand starting at position 3094 of SEQ ID NO: 1883753
acccaugucggucaucgaa

SEQ ID NO: 2213971 - RNA, 19 nt, Artificial Sequence
  Description of Artificial Sequence: Synthetic oligonucleotide
  Antisense strand to SEQ ID NO: 2213970
uucgaugaccgacaugggu

SEQ ID NO: 2213972 - RNA, 19 nt, Artificial Sequence
  Description of Artificial Sequence: Synthetic oligonucleotide
  Sense strand starting at position 2872 of SEQ ID NO: 1883753
uggguauaguuugcagaug

SEQ ID NO: 2213973 - RNA, 19 nt, Artificial Sequence
  Description of Artificial Sequence: Synthetic oligonucleotide
  Antisense strand to SEQ ID NO: 2213972
caucugcaaacuauaccca

SEQ ID NO: 2213974 - RNA, 19 nt, Artificial Sequence
  Description of Artificial Sequence: Synthetic oligonucleotide
  Sense strand starting at position 2912 of SEQ ID NO: 1883753
ggaagaauugcacguguag

SEQ ID NO: 2213975 - RNA, 19 nt, Artificial Sequence
  Description of Artificial Sequence: Synthetic oligonucleotide
  Antisense strand to SEQ ID NO: 2213974
cuacacgugcaauucuucc

SEQ ID NO: 2213976 - RNA, 19 nt, Artificial Sequence
  Description of Artificial Sequence: Synthetic oligonucleotide
  Sense strand starting at position 133 of SEQ ID NO: 1883753
cuguaaaugcguuauauau

SEQ ID NO: 2213977 - RNA, 19 nt, Artificial Sequence
  Description of Artificial Sequence: Synthetic oligonucleotide
  Antisense strand to SEQ ID NO: 2213976
auauauaacgcauuuacag

SEQ ID NO: 2213978 - RNA, 19 nt, Artificial Sequence
  Description of Artificial Sequence: Synthetic oligonucleotide
  Sense strand starting at position 3470 of SEQ ID NO: 1883753
auaguaguuugacuguuua

SEQ ID NO: 2213979 - RNA, 19 nt, Artificial Sequence
  Description of Artificial Sequence: Synthetic oligonucleotide
  Antisense strand to SEQ ID NO: 2213978
uaaacagucaaacuacuau

SEQ ID NO: 2213980 - RNA, 19 nt, Artificial Sequence
  Description of Artificial Sequence: Synthetic oligonucleotide
  Sense strand starting at position 880 of SEQ ID NO: 1883753
auggucgaguccuuaaacu

SEQ ID NO: 2213981 - RNA, 19 nt, Artificial Sequence
  Description of Artificial Sequence: Synthetic oligonucleotide
  Antisense strand to SEQ ID NO: 2213980
aguuuaaggacucgaccau

SEQ ID NO: 2213982 - RNA, 19 nt, Artificial Sequence
  Description of Artificial Sequence: Synthetic oligonucleotide
  Sense strand starting at position 2450 of SEQ ID NO: 1883753
gugucugcugcagauggaa

SEQ ID NO: 2213983 - RNA, 19 nt, Artificial Sequence
  Description of Artificial Sequence: Synthetic oligonucleotide
  Antisense strand to SEQ ID NO: 2213982
uuccaucugcagcagacac

SEQ ID NO: 2213984 - RNA, 19 nt, Artificial Sequence
  Description of Artificial Sequence: Synthetic oligonucleotide
  Sense strand starting at position 3637 of SEQ ID NO: 1883753
ucccauaguuagccaagua

SEQ ID NO: 2213985 - RNA, 19 nt, Artificial Sequence
  Description of Artificial Sequence: Synthetic oligonucleotide
  Antisense strand to SEQ ID NO: 2213984
uacuuggcuaacuauggga

SEQ ID NO: 2213986 - RNA, 19 nt, Artificial Sequence
  Description of Artificial Sequence: Synthetic oligonucleotide
  Sense strand starting at position 2360 of SEQ ID NO: 1883754
gcuuuaugagaauaccuca

SEQ ID NO: 2213987 - RNA, 19 nt, Artificial Sequence
  Description of Artificial Sequence: Synthetic oligonucleotide
  Antisense strand to SEQ ID NO: 2213986
ugagguauucucauaaagc

SEQ ID NO: 2213988 - RNA, 19 nt, Artificial Sequence
  Description of Artificial Sequence: Synthetic oligonucleotide
  Sense strand starting at position 7 of SEQ ID NO: 1883754
aagaacuucccaugguaga

SEQ ID NO: 2213989 - RNA, 19 nt, Artificial Sequence
  Description of Artificial Sequence: Synthetic oligonucleotide
  Antisense strand to SEQ ID NO: 2213988
ucuaccaugggaaguucuu

SEQ ID NO: 2213990 - RNA, 19 nt, Artificial Sequence
  Description of Artificial Sequence: Synthetic oligonucleotide
  Sense strand starting at position 8 of SEQ ID NO: 1883754
agaacuucccaugguagaa

SEQ ID NO: 2213991 - RNA, 19 nt, Artificial Sequence
  Description of Artificial Sequence: Synthetic oligonucleotide
  Antisense strand to SEQ ID NO: 2213990
uucuaccaugggaaguucu

SEQ ID NO: 2213992 - RNA, 19 nt, Artificial Sequence
  Description of Artificial Sequence: Synthetic oligonucleotide
  Sense strand starting at position 1427 of SEQ ID NO: 1883754
aggaaacugucuucuugga

SEQ ID NO: 2213993 - RNA, 19 nt, Artificial Sequence
  Description of Artificial Sequence: Synthetic oligonucleotide
  Antisense strand to SEQ ID NO: 2213992
uccaagaagacaguuuccu

SEQ ID NO: 2213994 - RNA, 19 nt, Artificial Sequence
  Description of Artificial Sequence: Synthetic oligonucleotide
  Sense strand starting at position 1740 of SEQ ID NO: 1883754
gaaagagggucucugaguu

SEQ ID NO: 2213995 - RNA, 19 nt, Artificial Sequence
  Description of Artificial Sequence: Synthetic oligonucleotide
  Antisense strand to SEQ ID NO: 2213994
aacucagagacccucuuuc

SEQ ID NO: 2213996 - RNA, 19 nt, Artificial Sequence
  Description of Artificial Sequence: Synthetic oligonucleotide
  Sense strand starting at position 2016 of SEQ ID NO: 1883754
agggaauccuccuugguua

SEQ ID NO: 2213997 - RNA, 19 nt, Artificial Sequence
  Description of Artificial Sequence: Synthetic oligonucleotide
  Antisense strand to SEQ ID NO: 2213996
uaaccaaggaggauucccu

SEQ ID NO: 2213998 - RNA, 19 nt, Artificial Sequence
  Description of Artificial Sequence: Synthetic oligonucleotide
  Sense strand starting at position 1284 of SEQ ID NO: 1883754
ccuugagggccucacuauu

SEQ ID NO: 2213999 - RNA, 19 nt, Artificial Sequence
  Description of Artificial Sequence: Synthetic oligonucleotide
  Antisense strand to SEQ ID NO: 2213998
aauagugaggcccucaagg

SEQ ID NO: 2214000 - RNA, 19 nt, Artificial Sequence
  Description of Artificial Sequence: Synthetic oligonucleotide
  Sense strand starting at position 1431 of SEQ ID NO: 1883754
aacugucuucuuggagaug

SEQ ID NO: 2214001 - RNA, 19 nt, Artificial Sequence
  Description of Artificial Sequence: Synthetic oligonucleotide
  Antisense strand to SEQ ID NO: 2214000
caucuccaagaagacaguu

SEQ ID NO: 2214002 - RNA, 19 nt, Artificial Sequence
  Description of Artificial Sequence: Synthetic oligonucleotide
  Sense strand starting at position 2019 of SEQ ID NO: 1883754
gaauccuccuugguuauga

SEQ ID NO: 2214003 - RNA, 19 nt, Artificial Sequence
  Description of Artificial Sequence: Synthetic oligonucleotide
  Antisense strand to SEQ ID NO: 2214002
ucauaaccaaggaggauuc

SEQ ID NO: 2214004 - RNA, 19 nt, Artificial Sequence
  Description of Artificial Sequence: Synthetic oligonucleotide
  Sense strand starting at position 2039 of SEQ ID NO: 1883754
ccagcuagucuggaauucu

SEQ ID NO: 2214005 - RNA, 19 nt, Artificial Sequence
  Description of Artificial Sequence: Synthetic oligonucleotide
  Antisense strand to SEQ ID NO: 2214004
agaauuccagacuagcugg

SEQ ID NO: 2214006 - RNA, 19 nt, Artificial Sequence
  Description of Artificial Sequence: Synthetic oligonucleotide
  Sense strand starting at position 2050 of SEQ ID NO: 1883754
ggaauucuuucuuugcaaa

SEQ ID NO: 2214007 - RNA, 19 nt, Artificial Sequence
  Description of Artificial Sequence: Synthetic oligonucleotide
  Antisense strand to SEQ ID NO: 2214006
uuugcaaagaaagaauucc

SEQ ID NO: 2214008 - RNA, 19 nt, Artificial Sequence
  Description of Artificial Sequence: Synthetic oligonucleotide
  Sense strand starting at position 2017 of SEQ ID NO: 1883754
gggaauccuccuugguuau

SEQ ID NO: 2214009 - RNA, 19 nt, Artificial Sequence
  Description of Artificial Sequence: Synthetic oligonucleotide
  Antisense strand to SEQ ID NO: 2214008
auaaccaaggaggauuccc

SEQ ID NO: 2214010 - RNA, 19 nt, Artificial Sequence
  Description of Artificial Sequence: Synthetic oligonucleotide
  Sense strand starting at position 2049 of SEQ ID NO: 1883754
uggaauucuuucuuugcaa

SEQ ID NO: 2214011 - RNA, 19 nt, Artificial Sequence
  Description of Artificial Sequence: Synthetic oligonucleotide
  Antisense strand to SEQ ID NO: 2214010
uugcaaagaaagaauucca

SEQ ID NO: 2214012 - RNA, 19 nt, Artificial Sequence
  Description of Artificial Sequence: Synthetic oligonucleotide
  Sense strand starting at position 2048 of SEQ ID NO: 1883754
cuggaauucuuucuuugca

SEQ ID NO: 2214013 - RNA, 19 nt, Artificial Sequence
  Description of Artificial Sequence: Synthetic oligonucleotide
  Antisense strand to SEQ ID NO: 2214012
ugcaaagaaagaauuccag

SEQ ID NO: 2214014 - RNA, 19 nt, Artificial Sequence
  Description of Artificial Sequence: Synthetic oligonucleotide
  Sense strand starting at position 2818 of SEQ ID NO: 1883754
cuggccucccaauguauaa

SEQ ID NO: 2214015 - RNA, 19 nt, Artificial Sequence
  Description of Artificial Sequence: Synthetic oligonucleotide
  Antisense strand to SEQ ID NO: 2214014
uuauacauugggaggccag

SEQ ID NO: 2214016 - RNA, 19 nt, Artificial Sequence
  Description of Artificial Sequence: Synthetic oligonucleotide
  Sense strand starting at position 1727 of SEQ ID NO: 1883754
cacucagugcuccgaaaga

SEQ ID NO: 2214017 - RNA, 19 nt, Artificial Sequence
  Description of Artificial Sequence: Synthetic oligonucleotide
  Antisense strand to SEQ ID NO: 2214016
ucuuucggagcacugagug

SEQ ID NO: 2214018 - RNA, 19 nt, Artificial Sequence
  Description of Artificial Sequence: Synthetic oligonucleotide
  Sense strand starting at position 3652 of SEQ ID NO: 1883754
auaugugguuugccuaaag

SEQ ID NO: 2214019 - RNA, 19 nt, Artificial Sequence
  Description of Artificial Sequence: Synthetic oligonucleotide
  Antisense strand to SEQ ID NO: 2214018
cuuuaggcaaaccacauau

SEQ ID NO: 2214020 - RNA, 19 nt, Artificial Sequence
  Description of Artificial Sequence: Synthetic oligonucleotide
  Sense strand starting at position 1750 of SEQ ID NO: 1883754
cucugaguuuccucccauc

SEQ ID NO: 2214021 - RNA, 19 nt, Artificial Sequence
  Description of Artificial Sequence: Synthetic oligonucleotide
  Antisense strand to SEQ ID NO: 2214020
gaugggaggaaacucagag

SEQ ID NO: 2214022 - RNA, 19 nt, Artificial Sequence
  Description of Artificial Sequence: Synthetic oligonucleotide
  Sense strand starting at position 3715 of SEQ ID NO: 1883754
ucacuaguccuccguagau

SEQ ID NO: 2214023 - RNA, 19 nt, Artificial Sequence
  Description of Artificial Sequence: Synthetic oligonucleotide
  Antisense strand to SEQ ID NO: 2214022
aucuacggaggacuaguga

SEQ ID NO: 2214024 - RNA, 19 nt, Artificial Sequence
  Description of Artificial Sequence: Synthetic oligonucleotide
  Sense strand starting at position 3650 of SEQ ID NO: 1883754
uuauaugugguuugccuaa

SEQ ID NO: 2214025 - RNA, 19 nt, Artificial Sequence
  Description of Artificial Sequence: Synthetic oligonucleotide
  Antisense strand to SEQ ID NO: 2214024
uuaggcaaaccacauauaa

SEQ ID NO: 2214026 - RNA, 19 nt, Artificial Sequence
  Description of Artificial Sequence: Synthetic oligonucleotide
  Sense strand starting at position 3279 of SEQ ID NO: 1883754
gggaauagaugucagacuu

SEQ ID NO: 2214027 - RNA, 19 nt, Artificial Sequence
  Description of Artificial Sequence: Synthetic oligonucleotide
  Antisense strand to SEQ ID NO: 2214026
aagucugacaucuauuccc

SEQ ID NO: 2214028 - RNA, 19 nt, Artificial Sequence
  Description of Artificial Sequence: Synthetic oligonucleotide
  Sense strand starting at position 3931 of SEQ ID NO: 1883754
gcgggaucuuucccuuucu

SEQ ID NO: 2214029 - RNA, 19 nt, Artificial Sequence
  Description of Artificial Sequence: Synthetic oligonucleotide
  Antisense strand to SEQ ID NO: 2214028
agaaagggaaagaucccgc

SEQ ID NO: 2214030 - RNA, 19 nt, Artificial Sequence
  Description of Artificial Sequence: Synthetic oligonucleotide
  Sense strand starting at position 3427 of SEQ ID NO: 1883754
agccauuagccaugugcaa

SEQ ID NO: 2214031 - RNA, 19 nt, Artificial Sequence
  Description of Artificial Sequence: Synthetic oligonucleotide
  Antisense strand to SEQ ID NO: 2214030
uugcacauggcuaauggcu

SEQ ID NO: 2214032 - RNA, 19 nt, Artificial Sequence
  Description of Artificial Sequence: Synthetic oligonucleotide
  Sense strand starting at position 1523 of SEQ ID NO: 1883754
ucugaauucuagggaggac

SEQ ID NO: 2214033 - RNA, 19 nt, Artificial Sequence
  Description of Artificial Sequence: Synthetic oligonucleotide
  Antisense strand to SEQ ID NO: 2214032
guccucccuagaauucaga

SEQ ID NO: 2214034 - RNA, 19 nt, Artificial Sequence
  Description of Artificial Sequence: Synthetic oligonucleotide
  Sense strand starting at position 5 of SEQ ID NO: 1883754
ccaagaacuucccauggua

SEQ ID NO: 2214035 - RNA, 19 nt, Artificial Sequence
  Description of Artificial Sequence: Synthetic oligonucleotide
  Antisense strand to SEQ ID NO: 2214034
uaccaugggaaguucuugg

SEQ ID NO: 2214036 - RNA, 19 nt, Artificial Sequence
  Description of Artificial Sequence: Synthetic oligonucleotide
  Sense strand starting at position 2758 of SEQ ID NO: 1883754
acuagacaguucugacaca

SEQ ID NO: 2214037 - RNA, 19 nt, Artificial Sequence
  Description of Artificial Sequence: Synthetic oligonucleotide
  Antisense strand to SEQ ID NO: 2214036
ugugucagaacugucuagu

SEQ ID NO: 2214038 - RNA, 19 nt, Artificial Sequence
  Description of Artificial Sequence: Synthetic oligonucleotide
  Sense strand starting at position 3391 of SEQ ID NO: 1883754
ccauccauguucuaggauu

SEQ ID NO: 2214039 - RNA, 19 nt, Artificial Sequence
  Description of Artificial Sequence: Synthetic oligonucleotide
  Antisense strand to SEQ ID NO: 2214038
aauccuagaacauggaugg

SEQ ID NO: 2214040 - RNA, 19 nt, Artificial Sequence
  Description of Artificial Sequence: Synthetic oligonucleotide
  Sense strand starting at position 1432 of SEQ ID NO: 1883754
acugucuucuuggagaugu

SEQ ID NO: 2214041 - RNA, 19 nt, Artificial Sequence
  Description of Artificial Sequence: Synthetic oligonucleotide
  Antisense strand to SEQ ID NO: 2214040
acaucuccaagaagacagu

SEQ ID NO: 2214042 - RNA, 19 nt, Artificial Sequence
  Description of Artificial Sequence: Synthetic oligonucleotide
  Sense strand starting at position 1416 of SEQ ID NO: 1883754
gcuuuagcauuaggaaacu

SEQ ID NO: 2214043 - RNA, 19 nt, Artificial Sequence
  Description of Artificial Sequence: Synthetic oligonucleotide
  Antisense strand to SEQ ID NO: 2214042
aguuuccuaaugcuaaagc

SEQ ID NO: 2214044 - RNA, 19 nt, Artificial Sequence
  Description of Artificial Sequence: Synthetic oligonucleotide
  Sense strand starting at position 3366 of SEQ ID NO: 1883754
guaagacugugcuguagga

SEQ ID NO: 2214045 - RNA, 19 nt, Artificial Sequence
  Description of Artificial Sequence: Synthetic oligonucleotide
  Antisense strand to SEQ ID NO: 2214044
uccuacagcacagucuuac

SEQ ID NO: 2214046 - RNA, 19 nt, Artificial Sequence
  Description of Artificial Sequence: Synthetic oligonucleotide
  Sense strand starting at position 2954 of SEQ ID NO: 1883755
ucaugauuagcacaugacu

SEQ ID NO: 2214047 - RNA, 19 nt, Artificial Sequence
  Description of Artificial Sequence: Synthetic oligonucleotide
  Antisense strand to SEQ ID NO: 2214046
agucaugugcuaaucauga

SEQ ID NO: 2214048 - RNA, 19 nt, Artificial Sequence
  Description of Artificial Sequence: Synthetic oligonucleotide
  Sense strand starting at position 582 of SEQ ID NO: 1883755
guaggcauaaagcaugaaa

SEQ ID NO: 2214049 - RNA, 19 nt, Artificial Sequence
  Description of Artificial Sequence: Synthetic oligonucleotide
  Antisense strand to SEQ ID NO: 2214048
uuucaugcuuuaugccuac

SEQ ID NO: 2214050 - RNA, 19 nt, Artificial Sequence
  Description of Artificial Sequence: Synthetic oligonucleotide
  Sense strand starting at position 3652 of SEQ ID NO: 1883755
gugauagagaaaugcuaag

SEQ ID NO: 2214051 - RNA, 19 nt, Artificial Sequence
  Description of Artificial Sequence: Synthetic oligonucleotide
  Antisense strand to SEQ ID NO: 2214050
cuuagcauuucucuaucac

SEQ ID NO: 2214052 - RNA, 19 nt, Artificial Sequence
  Description of Artificial Sequence: Synthetic oligonucleotide
  Sense strand starting at position 2548 of SEQ ID NO: 1883755
aguguuauacagcaaauaa

SEQ ID NO: 2214053 - RNA, 19 nt, Artificial Sequence
  Description of Artificial Sequence: Synthetic oligonucleotide
  Antisense strand to SEQ ID NO: 2214052
uuauuugcuguauaacacu

SEQ ID NO: 2214054 - RNA, 19 nt, Artificial Sequence
  Description of Artificial Sequence: Synthetic oligonucleotide
  Sense strand starting at position 314 of SEQ ID NO: 1883755
cuaauuacagcacagugau

SEQ ID NO: 2214055 - RNA, 19 nt, Artificial Sequence
  Description of Artificial Sequence: Synthetic oligonucleotide
  Antisense strand to SEQ ID NO: 2214054
aucacugugcuguaauuag

SEQ ID NO: 2214056 - RNA, 19 nt, Artificial Sequence
  Description of Artificial Sequence: Synthetic oligonucleotide
  Sense strand starting at position 3127 of SEQ ID NO: 1883755
auagauuagucucugauga

SEQ ID NO: 2214057 - RNA, 19 nt, Artificial Sequence
  Description of Artificial Sequence: Synthetic oligonucleotide
  Antisense strand to SEQ ID NO: 2214056
ucaucagagacuaaucuau

SEQ ID NO: 2214058 - RNA, 19 nt, Artificial Sequence
  Description of Artificial Sequence: Synthetic oligonucleotide
  Sense strand starting at position 131 of SEQ ID NO: 1883755
uaagacauacuguguaaga

SEQ ID NO: 2214059 - RNA, 19 nt, Artificial Sequence
  Description of Artificial Sequence: Synthetic oligonucleotide
  Antisense strand to SEQ ID NO: 2214058
ucuuacacaguaugucuua

SEQ ID NO: 2214060 - RNA, 19 nt, Artificial Sequence
  Description of Artificial Sequence: Synthetic oligonucleotide
  Sense strand starting at position 354 of SEQ ID NO: 1883755
ccaacaagaguuggucaaa

SEQ ID NO: 2214061 - RNA, 19 nt, Artificial Sequence
  Description of Artificial Sequence: Synthetic oligonucleotide
  Antisense strand to SEQ ID NO: 2214060
uuugaccaacucuuguugg

SEQ ID NO: 2214062 - RNA, 19 nt, Artificial Sequence
  Description of Artificial Sequence: Synthetic oligonucleotide
  Sense strand starting at position 2441 of SEQ ID NO: 1883755
cgcucugaugaauacagau

SEQ ID NO: 2214063 - RNA, 19 nt, Artificial Sequence
  Description of Artificial Sequence: Synthetic oligonucleotide
  Antisense strand to SEQ ID NO: 2214062
aucuguauucaucagagcg

SEQ ID NO: 2214064 - RNA, 19 nt, Artificial Sequence
  Description of Artificial Sequence: Synthetic oligonucleotide
  Sense strand starting at position 320 of SEQ ID NO: 1883755
acagcacagugauuaacaa

SEQ ID NO: 2214065 - RNA, 19 nt, Artificial Sequence
  Description of Artificial Sequence: Synthetic oligonucleotide
  Antisense strand to SEQ ID NO: 2214064
uuguuaaucacugugcugu

SEQ ID NO: 2214066 - RNA, 19 nt, Artificial Sequence
  Description of Artificial Sequence: Synthetic oligonucleotide
  Sense strand starting at position 3124 of SEQ ID NO: 1883755
uuaauagauuagucucuga

SEQ ID NO: 2214067 - RNA, 19 nt, Artificial Sequence
  Description of Artificial Sequence: Synthetic oligonucleotide
  Antisense strand to SEQ ID NO: 2214066
ucagagacuaaucuauuaa

SEQ ID NO: 2214068 - RNA, 19 nt, Artificial Sequence
  Description of Artificial Sequence: Synthetic oligonucleotide
  Sense strand starting at position 3134 of SEQ ID NO: 1883755
agucucugaugacuacuaa

SEQ ID NO: 2214069 - RNA, 19 nt, Artificial Sequence
  Description of Artificial Sequence: Synthetic oligonucleotide
  Antisense strand to SEQ ID NO: 2214068
uuaguagucaucagagacu

SEQ ID NO: 2214070 - RNA, 19 nt, Artificial Sequence
  Description of Artificial Sequence: Synthetic oligonucleotide
  Sense strand starting at position 2438 of SEQ ID NO: 1883755
cuacgcucugaugaauaca

SEQ ID NO: 2214071 - RNA, 19 nt, Artificial Sequence
  Description of Artificial Sequence: Synthetic oligonucleotide
  Antisense strand to SEQ ID NO: 2214070
uguauucaucagagcguag

SEQ ID NO: 2214072 - RNA, 19 nt, Artificial Sequence
  Description of Artificial Sequence: Synthetic oligonucleotide
  Sense strand starting at position 3128 of SEQ ID NO: 1883755
uagauuagucucugaugac

SEQ ID NO: 2214073 - RNA, 19 nt, Artificial Sequence
  Description of Artificial Sequence: Synthetic oligonucleotide
  Antisense strand to SEQ ID NO: 2214072
gucaucagagacuaaucua

SEQ ID NO: 2214074 - RNA, 19 nt, Artificial Sequence
  Description of Artificial Sequence: Synthetic oligonucleotide
  Sense strand starting at position 3771 of SEQ ID NO: 1883755
aguuuaugacugcacugau

SEQ ID NO: 2214075 - RNA, 19 nt, Artificial Sequence
  Description of Artificial Sequence: Synthetic oligonucleotide
  Antisense strand to SEQ ID NO: 2214074
aucagugcagucauaaacu

SEQ ID NO: 2214076 - RNA, 19 nt, Artificial Sequence
  Description of Artificial Sequence: Synthetic oligonucleotide
  Sense strand starting at position 1538 of SEQ ID NO: 1883755
gcgauuauauaaccaauag

SEQ ID NO: 2214077 - RNA, 19 nt, Artificial Sequence
  Description of Artificial Sequence: Synthetic oligonucleotide
  Antisense strand to SEQ ID NO: 2214076
cuauugguuauauaaucgc

SEQ ID NO: 2214078 - RNA, 19 nt, Artificial Sequence
  Description of Artificial Sequence: Synthetic oligonucleotide
  Sense strand starting at position 317 of SEQ ID NO: 1883755
auuacagcacagugauuaa

SEQ ID NO: 2214079 - RNA, 19 nt, Artificial Sequence
  Description of Artificial Sequence: Synthetic oligonucleotide
  Antisense strand to SEQ ID NO: 2214078
uuaaucacugugcuguaau

SEQ ID NO: 2214080 - RNA, 19 nt, Artificial Sequence
  Description of Artificial Sequence: Synthetic oligonucleotide
  Sense strand starting at position 2973 of SEQ ID NO: 1883755
uaaggucuaccauacguau

SEQ ID NO: 2214081 - RNA, 19 nt, Artificial Sequence
  Description of Artificial Sequence: Synthetic oligonucleotide
  Antisense strand to SEQ ID NO: 2214080
auacguaugguagaccuua

SEQ ID NO: 2214082 - RNA, 19 nt, Artificial Sequence
  Description of Artificial Sequence: Synthetic oligonucleotide
  Sense strand starting at position 1641 of SEQ ID NO: 1883755
gcugaagaauggcucagau

SEQ ID NO: 2214083 - RNA, 19 nt, Artificial Sequence
  Description of Artificial Sequence: Synthetic oligonucleotide
  Antisense strand to SEQ ID NO: 2214082
aucugagccauucuucagc

SEQ ID NO: 2214084 - RNA, 19 nt, Artificial Sequence
  Description of Artificial Sequence: Synthetic oligonucleotide
  Sense strand starting at position 11 of SEQ ID NO: 1883755
agaguaaacucauccuguc

SEQ ID NO: 2214085 - RNA, 19 nt, Artificial Sequence
  Description of Artificial Sequence: Synthetic oligonucleotide
  Antisense strand to SEQ ID NO: 2214084
gacaggaugaguuuacucu

SEQ ID NO: 2214086 - RNA, 19 nt, Artificial Sequence
  Description of Artificial Sequence: Synthetic oligonucleotide
  Sense strand starting at position 88 of SEQ ID NO: 1883755
gguauuaaauacuuguauc

SEQ ID NO: 2214087 - RNA, 19 nt, Artificial Sequence
  Description of Artificial Sequence: Synthetic oligonucleotide
  Antisense strand to SEQ ID NO: 2214086
gauacaaguauuuaauacc

SEQ ID NO: 2214088 - RNA, 19 nt, Artificial Sequence
  Description of Artificial Sequence: Synthetic oligonucleotide
  Sense strand starting at position 163 of SEQ ID NO: 1883755
gugaaaugugucugaaaug

SEQ ID NO: 2214089 - RNA, 19 nt, Artificial Sequence
  Description of Artificial Sequence: Synthetic oligonucleotide
  Antisense strand to SEQ ID NO: 2214088
cauuucagacacauuucac

SEQ ID NO: 2214090 - RNA, 19 nt, Artificial Sequence
  Description of Artificial Sequence: Synthetic oligonucleotide
  Sense strand starting at position 3658 of SEQ ID NO: 1883755
gagaaaugcuaagucaguc

SEQ ID NO: 2214091 - RNA, 19 nt, Artificial Sequence
  Description of Artificial Sequence: Synthetic oligonucleotide
  Antisense strand to SEQ ID NO: 2214090
gacugacuuagcauuucuc

SEQ ID NO: 2214092 - RNA, 19 nt, Artificial Sequence
  Description of Artificial Sequence: Synthetic oligonucleotide
  Sense strand starting at position 162 of SEQ ID NO: 1883755
ugugaaaugugucugaaau

SEQ ID NO: 2214093 - RNA, 19 nt, Artificial Sequence
  Description of Artificial Sequence: Synthetic oligonucleotide
  Antisense strand to SEQ ID NO: 2214092
auuucagacacauuucaca

SEQ ID NO: 2214094 - RNA, 19 nt, Artificial Sequence
  Description of Artificial Sequence: Synthetic oligonucleotide
  Sense strand starting at position 151 of SEQ ID NO: 1883755
aauagcucaugugugaaau

SEQ ID NO: 2214095 - RNA, 19 nt, Artificial Sequence
  Description of Artificial Sequence: Synthetic oligonucleotide
  Antisense strand to SEQ ID NO: 2214094
auuucacacaugagcuauu

SEQ ID NO: 2214096 - RNA, 19 nt, Artificial Sequence
  Description of Artificial Sequence: Synthetic oligonucleotide
  Sense strand starting at position 3774 of SEQ ID NO: 1883755
uuaugacugcacugauagu

SEQ ID NO: 2214097 - RNA, 19 nt, Artificial Sequence
  Description of Artificial Sequence: Synthetic oligonucleotide
  Antisense strand to SEQ ID NO: 2214096
acuaucagugcagucauaa

SEQ ID NO: 2214098 - RNA, 19 nt, Artificial Sequence
  Description of Artificial Sequence: Synthetic oligonucleotide
  Sense strand starting at position 152 of SEQ ID NO: 1883755
auagcucaugugugaaaug

SEQ ID NO: 2214099 - RNA, 19 nt, Artificial Sequence
  Description of Artificial Sequence: Synthetic oligonucleotide
  Antisense strand to SEQ ID NO: 2214098
cauuucacacaugagcuau

SEQ ID NO: 2214100 - RNA, 19 nt, Artificial Sequence
  Description of Artificial Sequence: Synthetic oligonucleotide
  Sense strand starting at position 530 of SEQ ID NO: 1883755
aggccuagcuaucuuauua

SEQ ID NO: 2214101 - RNA, 19 nt, Artificial Sequence
  Description of Artificial Sequence: Synthetic oligonucleotide
  Antisense strand to SEQ ID NO: 2214100
uaauaagauagcuaggccu

SEQ ID NO: 2214102 - RNA, 19 nt, Artificial Sequence
  Description of Artificial Sequence: Synthetic oligonucleotide
  Sense strand starting at position 424 of SEQ ID NO: 1883755
gguucauugcagugagacc

SEQ ID NO: 2214103 - RNA, 19 nt, Artificial Sequence
  Description of Artificial Sequence: Synthetic oligonucleotide
  Antisense strand to SEQ ID NO: 2214102
ggucucacugcaaugaacc

SEQ ID NO: 2214104 - RNA, 19 nt, Artificial Sequence
  Description of Artificial Sequence: Synthetic oligonucleotide
  Sense strand starting at position 783 of SEQ ID NO: 1883755
gaguuuguugcagagcauc

SEQ ID NO: 2214105 - RNA, 19 nt, Artificial Sequence
  Description of Artificial Sequence: Synthetic oligonucleotide
  Antisense strand to SEQ ID NO: 2214104
gaugcucugcaacaaacuc

SEQ ID NO: 2214106 - RNA, 19 nt, Artificial Sequence
  Description of Artificial Sequence: Synthetic oligonucleotide
  Sense strand starting at position 159 of SEQ ID NO: 1883755
augugugaaaugugucuga

SEQ ID NO: 2214107 - RNA, 19 nt, Artificial Sequence
  Description of Artificial Sequence: Synthetic oligonucleotide
  Antisense strand to SEQ ID NO: 2214106
ucagacacauuucacacau

SEQ ID NO: 2214108 - RNA, 19 nt, Artificial Sequence
  Description of Artificial Sequence: Synthetic oligonucleotide
  Sense strand starting at position 767 of SEQ ID NO: 1883755
gaaggauacugucacagag

SEQ ID NO: 2214109 - RNA, 19 nt, Artificial Sequence
  Description of Artificial Sequence: Synthetic oligonucleotide
  Antisense strand to SEQ ID NO: 2214108
cucugugacaguauccuuc

SEQ ID NO: 2214110 - RNA, 19 nt, Artificial Sequence
  Description of Artificial Sequence: Synthetic oligonucleotide
  Sense strand starting at position 2434 of SEQ ID NO: 1883755
uggccuacgcucugaugaa

SEQ ID NO: 2214111 - RNA, 19 nt, Artificial Sequence
  Description of Artificial Sequence: Synthetic oligonucleotide
  Antisense strand to SEQ ID NO: 2214110
uucaucagagcguaggcca

SEQ ID NO: 2214112 - RNA, 19 nt, Artificial Sequence
  Description of Artificial Sequence: Synthetic oligonucleotide
  Sense strand starting at position 2880 of SEQ ID NO: 1883755
agcguaacugguuaugcau

SEQ ID NO: 2214113 - RNA, 19 nt, Artificial Sequence
  Description of Artificial Sequence: Synthetic oligonucleotide
  Antisense strand to SEQ ID NO: 2214112
augcauaaccaguuacgcu

SEQ ID NO: 2214114 - RNA, 19 nt, Artificial Sequence
  Description of Artificial Sequence: Synthetic oligonucleotide
  Sense strand starting at position 3227 of SEQ ID NO: 1883755
ugaacacaaucaugacaga

SEQ ID NO: 2214115 - RNA, 19 nt, Artificial Sequence
  Description of Artificial Sequence: Synthetic oligonucleotide
  Antisense strand to SEQ ID NO: 2214114
ucugucaugauuguguuca

SEQ ID NO: 2214116 - RNA, 19 nt, Artificial Sequence
  Description of Artificial Sequence: Synthetic oligonucleotide
  Sense strand starting at position 157 of SEQ ID NO: 1883755
ucaugugugaaaugugucu

SEQ ID NO: 2214117 - RNA, 19 nt, Artificial Sequence
  Description of Artificial Sequence: Synthetic oligonucleotide
  Antisense strand to SEQ ID NO: 2214116
agacacauuucacacauga

SEQ ID NO: 2214118 - RNA, 19 nt, Artificial Sequence
  Description of Artificial Sequence: Synthetic oligonucleotide
  Sense strand starting at position 3690 of SEQ ID NO: 1883755
aguggcuucuuagcaaagu

SEQ ID NO: 2214119 - RNA, 19 nt, Artificial Sequence
  Description of Artificial Sequence: Synthetic oligonucleotide
  Antisense strand to SEQ ID NO: 2214118
acuuugcuaagaagccacu

SEQ ID NO: 2214120 - RNA, 19 nt, Artificial Sequence
  Description of Artificial Sequence: Synthetic oligonucleotide
  Sense strand starting at position 2879 of SEQ ID NO: 1883755
aagcguaacugguuaugca

SEQ ID NO: 2214121 - RNA, 19 nt, Artificial Sequence
  Description of Artificial Sequence: Synthetic oligonucleotide
  Antisense strand to SEQ ID NO: 2214120
ugcauaaccaguuacgcuu

SEQ ID NO: 2214122 - RNA, 19 nt, Artificial Sequence
  Description of Artificial Sequence: Synthetic oligonucleotide
  Sense strand starting at position 48 of SEQ ID NO: 1883755
gcaauuuauugauggcuag

SEQ ID NO: 2214123 - RNA, 19 nt, Artificial Sequence
  Description of Artificial Sequence: Synthetic oligonucleotide
  Antisense strand to SEQ ID NO: 2214122
cuagccaucaauaaauugc

SEQ ID NO: 2214124 - RNA, 19 nt, Artificial Sequence
  Description of Artificial Sequence: Synthetic oligonucleotide
  Sense strand starting at position 2392 of SEQ ID NO: 1883755
ugucuaggaugucaaagaa

SEQ ID NO: 2214125 - RNA, 19 nt, Artificial Sequence
  Description of Artificial Sequence: Synthetic oligonucleotide
  Antisense strand to SEQ ID NO: 2214124
uucuuugacauccuagaca

SEQ ID NO: 2214126 - RNA, 19 nt, Artificial Sequence
  Description of Artificial Sequence: Synthetic oligonucleotide
  Sense strand starting at position 3705 of SEQ ID NO: 1883756
acaucucugcaagaguaga

SEQ ID NO: 2214127 - RNA, 19 nt, Artificial Sequence
  Description of Artificial Sequence: Synthetic oligonucleotide
  Antisense strand to SEQ ID NO: 2214126
ucuacucuugcagagaugu

SEQ ID NO: 2214128 - RNA, 19 nt, Artificial Sequence
  Description of Artificial Sequence: Synthetic oligonucleotide
  Sense strand starting at position 1053 of SEQ ID NO: 1883756
ccagguucuccaggagaac

SEQ ID NO: 2214129 - RNA, 19 nt, Artificial Sequence
  Description of Artificial Sequence: Synthetic oligonucleotide
  Antisense strand to SEQ ID NO: 2214128
guucuccuggagaaccugg

SEQ ID NO: 2214130 - RNA, 19 nt, Artificial Sequence
  Description of Artificial Sequence: Synthetic oligonucleotide
  Sense strand starting at position 3678 of SEQ ID NO: 1883756
gcagcuggaagucagaaua

SEQ ID NO: 2214131 - RNA, 19 nt, Artificial Sequence
  Description of Artificial Sequence: Synthetic oligonucleotide
  Antisense strand to SEQ ID NO: 2214130
uauucugacuuccagcugc

SEQ ID NO: 2214132 - RNA, 19 nt, Artificial Sequence
  Description of Artificial Sequence: Synthetic oligonucleotide
  Sense strand starting at position 2110 of SEQ ID NO: 1883756
gcaucugugcccucggcaa

SEQ ID NO: 2214133 - RNA, 19 nt, Artificial Sequence
  Description of Artificial Sequence: Synthetic oligonucleotide
  Antisense strand to SEQ ID NO: 2214132
uugccgagggcacagaugc

SEQ ID NO: 2214134 - RNA, 19 nt, Artificial Sequence
  Description of Artificial Sequence: Synthetic oligonucleotide
  Sense strand starting at position 3322 of SEQ ID NO: 1883756
cacagucaucgugaaaccu

SEQ ID NO: 2214135 - RNA, 19 nt, Artificial Sequence
  Description of Artificial Sequence: Synthetic oligonucleotide
  Antisense strand to SEQ ID NO: 2214134
agguuucacgaugacugug

SEQ ID NO: 2214136 - RNA, 19 nt, Artificial Sequence
  Description of Artificial Sequence: Synthetic oligonucleotide
  Sense strand starting at position 661 of SEQ ID NO: 1883756
cuggaaaggugcuucauga

SEQ ID NO: 2214137 - RNA, 19 nt, Artificial Sequence
  Description of Artificial Sequence: Synthetic oligonucleotide
  Antisense strand to SEQ ID NO: 2214136
ucaugaagcaccuuuccag

SEQ ID NO: 2214138 - RNA, 19 nt, Artificial Sequence
  Description of Artificial Sequence: Synthetic oligonucleotide
  Sense strand starting at position 3702 of SEQ ID NO: 1883756
guuacaucucugcaagagu

SEQ ID NO: 2214139 - RNA, 19 nt, Artificial Sequence
  Description of Artificial Sequence: Synthetic oligonucleotide
  Antisense strand to SEQ ID NO: 2214138
acucuugcagagauguaac

SEQ ID NO: 2214140 - RNA, 19 nt, Artificial Sequence
  Description of Artificial Sequence: Synthetic oligonucleotide
  Sense strand starting at position 3700 of SEQ ID NO: 1883756
auguuacaucucugcaaga

SEQ ID NO: 2214141 - RNA, 19 nt, Artificial Sequence
  Description of Artificial Sequence: Synthetic oligonucleotide
  Antisense strand to SEQ ID NO: 2214140
ucuugcagagauguaacau

SEQ ID NO: 2214142 - RNA, 19 nt, Artificial Sequence
  Description of Artificial Sequence: Synthetic oligonucleotide
  Sense strand starting at position 3701 of SEQ ID NO: 1883756
uguuacaucucugcaagag

SEQ ID NO: 2214143 - RNA, 19 nt, Artificial Sequence
  Description of Artificial Sequence: Synthetic oligonucleotide
  Antisense strand to SEQ ID NO: 2214142
cucuugcagagauguaaca

SEQ ID NO: 2214144 - RNA, 19 nt, Artificial Sequence
  Description of Artificial Sequence: Synthetic oligonucleotide
  Sense strand starting at position 3319 of SEQ ID NO: 1883756
agccacagucaucgugaaa

SEQ ID NO: 2214145 - RNA, 19 nt, Artificial Sequence
  Description of Artificial Sequence: Synthetic oligonucleotide
  Antisense strand to SEQ ID NO: 2214144
uuucacgaugacuguggcu

SEQ ID NO: 2214146 - RNA, 19 nt, Artificial Sequence
  Description of Artificial Sequence: Synthetic oligonucleotide
  Sense strand starting at position 1172 of SEQ ID NO: 1883756
cugggaucggcgugacuca

SEQ ID NO: 2214147 - RNA, 19 nt, Artificial Sequence
  Description of Artificial Sequence: Synthetic oligonucleotide
  Antisense strand to SEQ ID NO: 2214146
ugagucacgccgaucccag

SEQ ID NO: 2214148 - RNA, 19 nt, Artificial Sequence
  Description of Artificial Sequence: Synthetic oligonucleotide
  Sense strand starting at position 2974 of SEQ ID NO: 1883756
cugcguucuggaggcagau

SEQ ID NO: 2214149 - RNA, 19 nt, Artificial Sequence
  Description of Artificial Sequence: Synthetic oligonucleotide
  Antisense strand to SEQ ID NO: 2214148
aucugccuccagaacgcag

SEQ ID NO: 2214150 - RNA, 19 nt, Artificial Sequence
  Description of Artificial Sequence: Synthetic oligonucleotide
  Sense strand starting at position 2488 of SEQ ID NO: 1883756
gcaggacaaucugacuuga

SEQ ID NO: 2214151 - RNA, 19 nt, Artificial Sequence
  Description of Artificial Sequence: Synthetic oligonucleotide
  Antisense strand to SEQ ID NO: 2214150
ucaagucagauuguccugc

SEQ ID NO: 2214152 - RNA, 19 nt, Artificial Sequence
  Description of Artificial Sequence: Synthetic oligonucleotide
  Sense strand starting at position 3549 of SEQ ID NO: 1883756
ccauacugguucugaugga

SEQ ID NO: 2214153 - RNA, 19 nt, Artificial Sequence
  Description of Artificial Sequence: Synthetic oligonucleotide
  Antisense strand to SEQ ID NO: 2214152
uccaucagaaccaguaugg

SEQ ID NO: 2214154 - RNA, 19 nt, Artificial Sequence
  Description of Artificial Sequence: Synthetic oligonucleotide
  Sense strand starting at position 500 of SEQ ID NO: 1883756
ugcugucucuacugcagau

SEQ ID NO: 2214155 - RNA, 19 nt, Artificial Sequence
  Description of Artificial Sequence: Synthetic oligonucleotide
  Antisense strand to SEQ ID NO: 2214154
aucugcaguagagacagca

SEQ ID NO: 2214156 - RNA, 19 nt, Artificial Sequence
  Description of Artificial Sequence: Synthetic oligonucleotide
  Sense strand starting at position 3193 of SEQ ID NO: 1883757
augagaugccucuacauac

SEQ ID NO: 2214157 - RNA, 19 nt, Artificial Sequence
  Description of Artificial Sequence: Synthetic oligonucleotide
  Antisense strand to SEQ ID NO: 2214156
guauguagaggcaucucau

SEQ ID NO: 2214158 - RNA, 19 nt, Artificial Sequence
  Description of Artificial Sequence: Synthetic oligonucleotide
  Sense strand starting at position 1546 of SEQ ID NO: 1883757
ggaaauuccaaggguaucu

SEQ ID NO: 2214159 - RNA, 19 nt, Artificial Sequence
  Description of Artificial Sequence: Synthetic oligonucleotide
  Antisense strand to SEQ ID NO: 2214158
agauacccuuggaauuucc

SEQ ID NO: 2214160 - RNA, 19 nt, Artificial Sequence
  Description of Artificial Sequence: Synthetic oligonucleotide
  Sense strand starting at position 2404 of SEQ ID NO: 1883757
cugaguacuggauagcaca

SEQ ID NO: 2214161 - RNA, 19 nt, Artificial Sequence
  Description of Artificial Sequence: Synthetic oligonucleotide
  Antisense strand to SEQ ID NO: 2214160
ugugcuauccaguacucag

SEQ ID NO: 2214162 - RNA, 19 nt, Artificial Sequence
  Description of Artificial Sequence: Synthetic oligonucleotide
  Sense strand starting at position 1532 of SEQ ID NO: 1883757
uaagacaagcugugggaaa

SEQ ID NO: 2214163 - RNA, 19 nt, Artificial Sequence
  Description of Artificial Sequence: Synthetic oligonucleotide
  Antisense strand to SEQ ID NO: 2214162
uuucccacagcuugucuua

SEQ ID NO: 2214164 - RNA, 19 nt, Artificial Sequence
  Description of Artificial Sequence: Synthetic oligonucleotide
  Sense strand starting at position 2066 of SEQ ID NO: 1883757
aguaauagggacuacguau

SEQ ID NO: 2214165 - RNA, 19 nt, Artificial Sequence
  Description of Artificial Sequence: Synthetic oligonucleotide
  Antisense strand to SEQ ID NO: 2214164
auacguagucccuauuacu

SEQ ID NO: 2214166 - RNA, 19 nt, Artificial Sequence
  Description of Artificial Sequence: Synthetic oligonucleotide
  Sense strand starting at position 1494 of SEQ ID NO: 1883757
uguugauauccagauucuu

SEQ ID NO: 2214167 - RNA, 19 nt, Artificial Sequence
  Description of Artificial Sequence: Synthetic oligonucleotide
  Antisense strand to SEQ ID NO: 2214166
aagaaucuggauaucaaca

SEQ ID NO: 2214168 - RNA, 19 nt, Artificial Sequence
  Description of Artificial Sequence: Synthetic oligonucleotide
  Sense strand starting at position 2192 of SEQ ID NO: 1883757
aaucaaaugcccggagaga

SEQ ID NO: 2214169 - RNA, 19 nt, Artificial Sequence
  Description of Artificial Sequence: Synthetic oligonucleotide
  Antisense strand to SEQ ID NO: 2214168
ucucuccgggcauuugauu

SEQ ID NO: 2214170 - RNA, 19 nt, Artificial Sequence
  Description of Artificial Sequence: Synthetic oligonucleotide
  Sense strand starting at position 2224 of SEQ ID NO: 1883757
ugcuuacucccucaaggga

SEQ ID NO: 2214171 - RNA, 19 nt, Artificial Sequence
  Description of Artificial Sequence: Synthetic oligonucleotide
  Antisense strand to SEQ ID NO: 2214170
ucccuugagggaguaagca

SEQ ID NO: 2214172 - RNA, 19 nt, Artificial Sequence
  Description of Artificial Sequence: Synthetic oligonucleotide
  Sense strand starting at position 2596 of SEQ ID NO: 1883757
cugguagaguacucagaag

SEQ ID NO: 2214173 - RNA, 19 nt, Artificial Sequence
  Description of Artificial Sequence: Synthetic oligonucleotide
  Antisense strand to SEQ ID NO: 2214172
cuucugaguacucuaccag

SEQ ID NO: 2214174 - RNA, 19 nt, Artificial Sequence
  Description of Artificial Sequence: Synthetic oligonucleotide
  Sense strand starting at position 443 of SEQ ID NO: 1883757
cuaauaauacaucguaaag

SEQ ID NO: 2214175 - RNA, 19 nt, Artificial Sequence
  Description of Artificial Sequence: Synthetic oligonucleotide
  Antisense strand to SEQ ID NO: 2214174
cuuuacgauguauuauuag

SEQ ID NO: 2214176 - RNA, 19 nt, Artificial Sequence
  Description of Artificial Sequence: Synthetic oligonucleotide
  Sense strand starting at position 1534 of SEQ ID NO: 1883757
agacaagcugugggaaauu

SEQ ID NO: 2214177 - RNA, 19 nt, Artificial Sequence
  Description of Artificial Sequence: Synthetic oligonucleotide
  Antisense strand to SEQ ID NO: 2214176
aauuucccacagcuugucu

SEQ ID NO: 2214178 - RNA, 19 nt, Artificial Sequence
  Description of Artificial Sequence: Synthetic oligonucleotide
  Sense strand starting at position 862 of SEQ ID NO: 1883757
guaaguacccuagauagug

SEQ ID NO: 2214179 - RNA, 19 nt, Artificial Sequence
  Description of Artificial Sequence: Synthetic oligonucleotide
  Antisense strand to SEQ ID NO: 2214178
cacuaucuaggguacuuac

SEQ ID NO: 2214180 - RNA, 19 nt, Artificial Sequence
  Description of Artificial Sequence: Synthetic oligonucleotide
  Sense strand starting at position 677 of SEQ ID NO: 1883757
guuaaauuacaguaagcua

SEQ ID NO: 2214181 - RNA, 19 nt, Artificial Sequence
  Description of Artificial Sequence: Synthetic oligonucleotide
  Antisense strand to SEQ ID NO: 2214180
uagcuuacuguaauuuaac

SEQ ID NO: 2214182 - RNA, 19 nt, Artificial Sequence
  Description of Artificial Sequence: Synthetic oligonucleotide
  Sense strand starting at position 57 of SEQ ID NO: 1883757
uguuauuacccaugaagac

SEQ ID NO: 2214183 - RNA, 19 nt, Artificial Sequence
  Description of Artificial Sequence: Synthetic oligonucleotide
  Antisense strand to SEQ ID NO: 2214182
gucuucauggguaauaaca

SEQ ID NO: 2214184 - RNA, 19 nt, Artificial Sequence
  Description of Artificial Sequence: Synthetic oligonucleotide
  Sense strand starting at position 1410 of SEQ ID NO: 1883757
cuuuaugauguaugacaac

SEQ ID NO: 2214185 - RNA, 19 nt, Artificial Sequence
  Description of Artificial Sequence: Synthetic oligonucleotide
  Antisense strand to SEQ ID NO: 2214184
guugucauacaucauaaag

SEQ ID NO: 2214186 - RNA, 19 nt, Artificial Sequence
  Description of Artificial Sequence: Synthetic oligonucleotide
  Sense strand starting at position 11 of SEQ ID NO: 1883757
ugguuccuucaggagguau

SEQ ID NO: 2214187 - RNA, 19 nt, Artificial Sequence
  Description of Artificial Sequence: Synthetic oligonucleotide
  Antisense strand to SEQ ID NO: 2214186
auaccuccugaaggaacca

SEQ ID NO: 2214188 - RNA, 19 nt, Artificial Sequence
  Description of Artificial Sequence: Synthetic oligonucleotide
  Sense strand starting at position 2203 of SEQ ID NO: 1883757
cggagagaccugugauuga

SEQ ID NO: 2214189 - RNA, 19 nt, Artificial Sequence
  Description of Artificial Sequence: Synthetic oligonucleotide
  Antisense strand to SEQ ID NO: 2214188
ucaaucacaggucucuccg

SEQ ID NO: 2214190 - RNA, 19 nt, Artificial Sequence
  Description of Artificial Sequence: Synthetic oligonucleotide
  Sense strand starting at position 2847 of SEQ ID NO: 1883757
cagaaaugacagugcugau

SEQ ID NO: 2214191 - RNA, 19 nt, Artificial Sequence
  Description of Artificial Sequence: Synthetic oligonucleotide
  Antisense strand to SEQ ID NO: 2214190
aucagcacugucauuucug

SEQ ID NO: 2214192 - RNA, 19 nt, Artificial Sequence
  Description of Artificial Sequence: Synthetic oligonucleotide
  Sense strand starting at position 2613 of SEQ ID NO: 1883757
agagcauuagcucaguaga

SEQ ID NO: 2214193 - RNA, 19 nt, Artificial Sequence
  Description of Artificial Sequence: Synthetic oligonucleotide
  Antisense strand to SEQ ID NO: 2214192
ucuacugagcuaaugcucu

SEQ ID NO: 2214194 - RNA, 19 nt, Artificial Sequence
  Description of Artificial Sequence: Synthetic oligonucleotide
  Sense strand starting at position 1748 of SEQ ID NO: 1883757
ggccuaaguacagauguca

SEQ ID NO: 2214195 - RNA, 19 nt, Artificial Sequence
  Description of Artificial Sequence: Synthetic oligonucleotide
  Antisense strand to SEQ ID NO: 2214194
ugacaucuguacuuaggcc

SEQ ID NO: 2214196 - RNA, 19 nt, Artificial Sequence
  Description of Artificial Sequence: Synthetic oligonucleotide
  Sense strand starting at position 3653 of SEQ ID NO: 1883757
ugagauggcauauguauga

SEQ ID NO: 2214197 - RNA, 19 nt, Artificial Sequence
  Description of Artificial Sequence: Synthetic oligonucleotide
  Antisense strand to SEQ ID NO: 2214196
ucauacauaugccaucuca

SEQ ID NO: 2214198 - RNA, 19 nt, Artificial Sequence
  Description of Artificial Sequence: Synthetic oligonucleotide
  Sense strand starting at position 1783 of SEQ ID NO: 1883757
uuacauucugcauacagua

SEQ ID NO: 2214199 - RNA, 19 nt, Artificial Sequence
  Description of Artificial Sequence: Synthetic oligonucleotide
  Antisense strand to SEQ ID NO: 2214198
uacuguaugcagaauguaa

SEQ ID NO: 2214200 - RNA, 19 nt, Artificial Sequence
  Description of Artificial Sequence: Synthetic oligonucleotide
  Sense strand starting at position 2616 of SEQ ID NO: 1883757
gcauuagcucaguagagga

SEQ ID NO: 2214201 - RNA, 19 nt, Artificial Sequence
  Description of Artificial Sequence: Synthetic oligonucleotide
  Antisense strand to SEQ ID NO: 2214200
uccucuacugagcuaaugc

SEQ ID NO: 2214202 - RNA, 19 nt, Artificial Sequence
  Description of Artificial Sequence: Synthetic oligonucleotide
  Sense strand starting at position 54 of SEQ ID NO: 1883757
gaguguuauuacccaugaa

SEQ ID NO: 2214203 - RNA, 19 nt, Artificial Sequence
  Description of Artificial Sequence: Synthetic oligonucleotide
  Antisense strand to SEQ ID NO: 2214202
uucauggguaauaacacuc

SEQ ID NO: 2214204 - RNA, 19 nt, Artificial Sequence
  Description of Artificial Sequence: Synthetic oligonucleotide
  Sense strand starting at position 1684 of SEQ ID NO: 1883757
gauuguuucuuaguagaaa

SEQ ID NO: 2214205 - RNA, 19 nt, Artificial Sequence
  Description of Artificial Sequence: Synthetic oligonucleotide
  Antisense strand to SEQ ID NO: 2214204
uuucuacuaagaaacaauc

SEQ ID NO: 2214206 - RNA, 19 nt, Artificial Sequence
  Description of Artificial Sequence: Synthetic oligonucleotide
  Sense strand starting at position 858 of SEQ ID NO: 1883757
caugguaaguacccuagau

SEQ ID NO: 2214207 - RNA, 19 nt, Artificial Sequence
  Description of Artificial Sequence: Synthetic oligonucleotide
  Antisense strand to SEQ ID NO: 2214206
aucuaggguacuuaccaug

SEQ ID NO: 2214208 - RNA, 19 nt, Artificial Sequence
  Description of Artificial Sequence: Synthetic oligonucleotide
  Sense strand starting at position 1475 of SEQ ID NO: 1883757
gugacauaugacuguaauu

SEQ ID NO: 2214209 - RNA, 19 nt, Artificial Sequence
  Description of Artificial Sequence: Synthetic oligonucleotide
  Antisense strand to SEQ ID NO: 2214208
aauuacagucauaugucac

SEQ ID NO: 2214210 - RNA, 19 nt, Artificial Sequence
  Description of Artificial Sequence: Synthetic oligonucleotide
  Sense strand starting at position 1469 of SEQ ID NO: 1883757
cgcuaagugacauaugacu

SEQ ID NO: 2214211 - RNA, 19 nt, Artificial Sequence
  Description of Artificial Sequence: Synthetic oligonucleotide
  Antisense strand to SEQ ID NO: 2214210
agucauaugucacuuagcg

SEQ ID NO: 2214212 - RNA, 19 nt, Artificial Sequence
  Description of Artificial Sequence: Synthetic oligonucleotide
  Sense strand starting at position 2420 of SEQ ID NO: 1883757
acauguauguaaguaaacu

SEQ ID NO: 2214213 - RNA, 19 nt, Artificial Sequence
  Description of Artificial Sequence: Synthetic oligonucleotide
  Antisense strand to SEQ ID NO: 2214212
aguuuacuuacauacaugu

SEQ ID NO: 2214214 - RNA, 19 nt, Artificial Sequence
  Description of Artificial Sequence: Synthetic oligonucleotide
  Sense strand starting at position 144 of SEQ ID NO: 1883757
ggcuaaugcguguuugucu

SEQ ID NO: 2214215 - RNA, 19 nt, Artificial Sequence
  Description of Artificial Sequence: Synthetic oligonucleotide
  Antisense strand to SEQ ID NO: 2214214
agacaaacacgcauuagcc

SEQ ID NO: 2214216 - RNA, 19 nt, Artificial Sequence
  Description of Artificial Sequence: Synthetic oligonucleotide
  Sense strand starting at position 2705 of SEQ ID NO: 1883757
agaauuaaacugcguacaa

SEQ ID NO: 2214217 - RNA, 19 nt, Artificial Sequence
  Description of Artificial Sequence: Synthetic oligonucleotide
  Antisense strand to SEQ ID NO: 2214216
uuguacgcaguuuaauucu

SEQ ID NO: 2214218 - RNA, 19 nt, Artificial Sequence
  Description of Artificial Sequence: Synthetic oligonucleotide
  Sense strand starting at position 2166 of SEQ ID NO: 1883757
gccagugaucccugaaagg

SEQ ID NO: 2214219 - RNA, 19 nt, Artificial Sequence
  Description of Artificial Sequence: Synthetic oligonucleotide
  Antisense strand to SEQ ID NO: 2214218
ccuuucagggaucacuggc

SEQ ID NO: 2214220 - RNA, 19 nt, Artificial Sequence
  Description of Artificial Sequence: Synthetic oligonucleotide
  Sense strand starting at position 280 of SEQ ID NO: 1883757
agccaaguguuauuaagaa

SEQ ID NO: 2214221 - RNA, 19 nt, Artificial Sequence
  Description of Artificial Sequence: Synthetic oligonucleotide
  Antisense strand to SEQ ID NO: 2214220
uucuuaauaacacuuggcu

SEQ ID NO: 2214222 - RNA, 19 nt, Artificial Sequence
  Description of Artificial Sequence: Synthetic oligonucleotide
  Sense strand starting at position 2201 of SEQ ID NO: 1883757
cccggagagaccugugauu

SEQ ID NO: 2214223 - RNA, 19 nt, Artificial Sequence
  Description of Artificial Sequence: Synthetic oligonucleotide
  Antisense strand to SEQ ID NO: 2214222
aaucacaggucucuccggg

SEQ ID NO: 2214224 - RNA, 19 nt, Artificial Sequence
  Description of Artificial Sequence: Synthetic oligonucleotide
  Sense strand starting at position 2869 of SEQ ID NO: 1883757
cuaauaaaguagguguuua

SEQ ID NO: 2214225 - RNA, 19 nt, Artificial Sequence
  Description of Artificial Sequence: Synthetic oligonucleotide
  Antisense strand to SEQ ID NO: 2214224
uaaacaccuacuuuauuag

SEQ ID NO: 2214226 - RNA, 19 nt, Artificial Sequence
  Description of Artificial Sequence: Synthetic oligonucleotide
  Sense strand starting at position 6 of SEQ ID NO: 1883757
ugaggugguuccuucagga

SEQ ID NO: 2214227 - RNA, 19 nt, Artificial Sequence
  Description of Artificial Sequence: Synthetic oligonucleotide
  Antisense strand to SEQ ID NO: 2214226
uccugaaggaaccaccuca

SEQ ID NO: 2214228 - RNA, 19 nt, Artificial Sequence
  Description of Artificial Sequence: Synthetic oligonucleotide
  Sense strand starting at position 2726 of SEQ ID NO: 1883757
acuugacagugucucagau

SEQ ID NO: 2214229 - RNA, 19 nt, Artificial Sequence
  Description of Artificial Sequence: Synthetic oligonucleotide
  Antisense strand to SEQ ID NO: 2214228
aucugagacacugucaagu

SEQ ID NO: 2214230 - RNA, 19 nt, Artificial Sequence
  Description of Artificial Sequence: Synthetic oligonucleotide
  Sense strand starting at position 1249 of SEQ ID NO: 1883757
ggcuuuagauauguuuaga

SEQ ID NO: 2214231 - RNA, 19 nt, Artificial Sequence
  Description of Artificial Sequence: Synthetic oligonucleotide
  Antisense strand to SEQ ID NO: 2214230
ucuaaacauaucuaaagcc

SEQ ID NO: 2214232 - RNA, 19 nt, Artificial Sequence
  Description of Artificial Sequence: Synthetic oligonucleotide
  Sense strand starting at position 2393 of SEQ ID NO: 1883757
gaagucuuccacugaguac

SEQ ID NO: 2214233 - RNA, 19 nt, Artificial Sequence
  Description of Artificial Sequence: Synthetic oligonucleotide
  Antisense strand to SEQ ID NO: 2214232
guacucaguggaagacuuc

SEQ ID NO: 2214234 - RNA, 19 nt, Artificial Sequence
  Description of Artificial Sequence: Synthetic oligonucleotide
  Sense strand starting at position 1841 of SEQ ID NO: 1883757
agaucaccuucccuguauu

SEQ ID NO: 2214235 - RNA, 19 nt, Artificial Sequence
  Description of Artificial Sequence: Synthetic oligonucleotide
  Antisense strand to SEQ ID NO: 2214234
aauacagggaaggugaucu

SEQ ID NO: 2214236 - RNA, 19 nt, Artificial Sequence
  Description of Artificial Sequence: Synthetic oligonucleotide
  Sense strand starting at position 3428 of SEQ ID NO: 1883758
ccuugcagucccguuuauu

SEQ ID NO: 2214237 - RNA, 19 nt, Artificial Sequence
  Description of Artificial Sequence: Synthetic oligonucleotide
  Antisense strand to SEQ ID NO: 2214236
aauaaacgggacugcaagg

SEQ ID NO: 2214238 - RNA, 19 nt, Artificial Sequence
  Description of Artificial Sequence: Synthetic oligonucleotide
  Sense strand starting at position 3438 of SEQ ID NO: 1883758
ccguuuauuucucccauac

SEQ ID NO: 2214239 - RNA, 19 nt, Artificial Sequence
  Description of Artificial Sequence: Synthetic oligonucleotide
  Antisense strand to SEQ ID NO: 2214238
guaugggagaaauaaacgg

SEQ ID NO: 2214240 - RNA, 19 nt, Artificial Sequence
  Description of Artificial Sequence: Synthetic oligonucleotide
  Sense strand starting at position 3437 of SEQ ID NO: 1883758
cccguuuauuucucccaua

SEQ ID NO: 2214241 - RNA, 19 nt, Artificial Sequence
  Description of Artificial Sequence: Synthetic oligonucleotide
  Antisense strand to SEQ ID NO: 2214240
uaugggagaaauaaacggg

SEQ ID NO: 2214242 - RNA, 19 nt, Artificial Sequence
  Description of Artificial Sequence: Synthetic oligonucleotide
  Sense strand starting at position 1786 of SEQ ID NO: 1883758
cagcuuuaggaaugggauu

SEQ ID NO: 2214243 - RNA, 19 nt, Artificial Sequence
  Description of Artificial Sequence: Synthetic oligonucleotide
  Antisense strand to SEQ ID NO: 2214242
aaucccauuccuaaagcug

SEQ ID NO: 2214244 - RNA, 19 nt, Artificial Sequence
  Description of Artificial Sequence: Synthetic oligonucleotide
  Sense strand starting at position 3125 of SEQ ID NO: 1883758
gggucugaggucugaagga

SEQ ID NO: 2214245 - RNA, 19 nt, Artificial Sequence
  Description of Artificial Sequence: Synthetic oligonucleotide
  Antisense strand to SEQ ID NO: 2214244
uccuucagaccucagaccc

SEQ ID NO: 2214246 - RNA, 19 nt, Artificial Sequence
  Description of Artificial Sequence: Synthetic oligonucleotide
  Sense strand starting at position 3792 of SEQ ID NO: 1883758
ggagacugaugucccuuua

SEQ ID NO: 2214247 - RNA, 19 nt, Artificial Sequence
  Description of Artificial Sequence: Synthetic oligonucleotide
  Antisense strand to SEQ ID NO: 2214246
uaaagggacaucagucucc

SEQ ID NO: 2214248 - RNA, 19 nt, Artificial Sequence
  Description of Artificial Sequence: Synthetic oligonucleotide
  Sense strand starting at position 348 of SEQ ID NO: 1883758
cuuagaaauuccuuuagug

SEQ ID NO: 2214249 - RNA, 19 nt, Artificial Sequence
  Description of Artificial Sequence: Synthetic oligonucleotide
  Antisense strand to SEQ ID NO: 2214248
cacuaaaggaauuucuaag

SEQ ID NO: 2214250 - RNA, 19 nt, Artificial Sequence
  Description of Artificial Sequence: Synthetic oligonucleotide
  Sense strand starting at position 3459 of SEQ ID NO: 1883758
ccuugugacaccgagguaa

SEQ ID NO: 2214251 - RNA, 19 nt, Artificial Sequence
  Description of Artificial Sequence: Synthetic oligonucleotide
  Antisense strand to SEQ ID NO: 2214250
uuaccucggugucacaagg

SEQ ID NO: 2214252 - RNA, 19 nt, Artificial Sequence
  Description of Artificial Sequence: Synthetic oligonucleotide
  Sense strand starting at position 2165 of SEQ ID NO: 1883758
gggagaugacuccguacca

SEQ ID NO: 2214253 - RNA, 19 nt, Artificial Sequence
  Description of Artificial Sequence: Synthetic oligonucleotide
  Antisense strand to SEQ ID NO: 2214252
ugguacggagucaucuccc

SEQ ID NO: 2214254 - RNA, 19 nt, Artificial Sequence
  Description of Artificial Sequence: Synthetic oligonucleotide
  Sense strand starting at position 3929 of SEQ ID NO: 1883758
uguguuuauagggagccaa

SEQ ID NO: 2214255 - RNA, 19 nt, Artificial Sequence
  Description of Artificial Sequence: Synthetic oligonucleotide
  Antisense strand to SEQ ID NO: 2214254
uuggcucccuauaaacaca

SEQ ID NO: 2214256 - RNA, 19 nt, Artificial Sequence
  Description of Artificial Sequence: Synthetic oligonucleotide
  Sense strand starting at position 1780 of SEQ ID NO: 1883758
cugccacagcuuuaggaau

SEQ ID NO: 2214257 - RNA, 19 nt, Artificial Sequence
  Description of Artificial Sequence: Synthetic oligonucleotide
  Antisense strand to SEQ ID NO: 2214256
auuccuaaagcuguggcag

SEQ ID NO: 2214258 - RNA, 19 nt, Artificial Sequence
  Description of Artificial Sequence: Synthetic oligonucleotide
  Sense strand starting at position 1943 of SEQ ID NO: 1883758
cuguguaaccaagaggcuu

SEQ ID NO: 2214259 - RNA, 19 nt, Artificial Sequence
  Description of Artificial Sequence: Synthetic oligonucleotide
  Antisense strand to SEQ ID NO: 2214258
aagccucuugguuacacag

SEQ ID NO: 2214260 - RNA, 19 nt, Artificial Sequence
  Description of Artificial Sequence: Synthetic oligonucleotide
  Sense strand starting at position 1530 of SEQ ID NO: 1883758
ggaggcacuugucucacaa

SEQ ID NO: 2214261 - RNA, 19 nt, Artificial Sequence
  Description of Artificial Sequence: Synthetic oligonucleotide
  Antisense strand to SEQ ID NO: 2214260
uugugagacaagugccucc

SEQ ID NO: 2214262 - RNA, 19 nt, Artificial Sequence
  Description of Artificial Sequence: Synthetic oligonucleotide
  Sense strand starting at position 2358 of SEQ ID NO: 1883758
acaguaggcucuuuacaca

SEQ ID NO: 2214263 - RNA, 19 nt, Artificial Sequence
  Description of Artificial Sequence: Synthetic oligonucleotide
  Antisense strand to SEQ ID NO: 2214262
uguguaaagagccuacugu

SEQ ID NO: 2214264 - RNA, 19 nt, Artificial Sequence
  Description of Artificial Sequence: Synthetic oligonucleotide
  Sense strand starting at position 3698 of SEQ ID NO: 1883758
gaagguguaucugcaggau

SEQ ID NO: 2214265 - RNA, 19 nt, Artificial Sequence
  Description of Artificial Sequence: Synthetic oligonucleotide
  Antisense strand to SEQ ID NO: 2214264
auccugcagauacaccuuc

SEQ ID NO: 2214266 - RNA, 19 nt, Artificial Sequence
  Description of Artificial Sequence: Synthetic oligonucleotide
  Sense strand starting at position 3450 of SEQ ID NO: 1883758
cccauacagccuugugaca

SEQ ID NO: 2214267 - RNA, 19 nt, Artificial Sequence
  Description of Artificial Sequence: Synthetic oligonucleotide
  Antisense strand to SEQ ID NO: 2214266
ugucacaaggcuguauggg

SEQ ID NO: 2214268 - RNA, 19 nt, Artificial Sequence
  Description of Artificial Sequence: Synthetic oligonucleotide
  Sense strand starting at position 2414 of SEQ ID NO: 1883758
agccucugggcuugagauu

SEQ ID NO: 2214269 - RNA, 19 nt, Artificial Sequence
  Description of Artificial Sequence: Synthetic oligonucleotide
  Antisense strand to SEQ ID NO: 2214268
aaucucaagcccagaggcu

SEQ ID NO: 2214270 - RNA, 19 nt, Artificial Sequence
  Description of Artificial Sequence: Synthetic oligonucleotide
  Sense strand starting at position 3440 of SEQ ID NO: 1883758
guuuauuucucccauacag

SEQ ID NO: 2214271 - RNA, 19 nt, Artificial Sequence
  Description of Artificial Sequence: Synthetic oligonucleotide
  Antisense strand to SEQ ID NO: 2214270
cuguaugggagaaauaaac

SEQ ID NO: 2214272 - RNA, 19 nt, Artificial Sequence
  Description of Artificial Sequence: Synthetic oligonucleotide
  Sense strand starting at position 3848 of SEQ ID NO: 1883758
uguuguccugcccacauau

SEQ ID NO: 2214273 - RNA, 19 nt, Artificial Sequence
  Description of Artificial Sequence: Synthetic oligonucleotide
  Antisense strand to SEQ ID NO: 2214272
auaugugggcaggacaaca

SEQ ID NO: 2214274 - RNA, 19 nt, Artificial Sequence
  Description of Artificial Sequence: Synthetic oligonucleotide
  Sense strand starting at position 836 of SEQ ID NO: 1883758
augccacguuucucauaga

SEQ ID NO: 2214275 - RNA, 19 nt, Artificial Sequence
  Description of Artificial Sequence: Synthetic oligonucleotide
  Antisense strand to SEQ ID NO: 2214274
ucuaugagaaacguggcau

SEQ ID NO: 2214276 - RNA, 19 nt, Artificial Sequence
  Description of Artificial Sequence: Synthetic oligonucleotide
  Sense strand starting at position 1628 of SEQ ID NO: 1883758
guccgugucauuggaacag

SEQ ID NO: 2214277 - RNA, 19 nt, Artificial Sequence
  Description of Artificial Sequence: Synthetic oligonucleotide
  Antisense strand to SEQ ID NO: 2214276
cuguuccaaugacacggac

SEQ ID NO: 2214278 - RNA, 19 nt, Artificial Sequence
  Description of Artificial Sequence: Synthetic oligonucleotide
  Sense strand starting at position 2115 of SEQ ID NO: 1883758
cuagcuccuccguaguuaa

SEQ ID NO: 2214279 - RNA, 19 nt, Artificial Sequence
  Description of Artificial Sequence: Synthetic oligonucleotide
  Antisense strand to SEQ ID NO: 2214278
uuaacuacggaggagcuag

SEQ ID NO: 2214280 - RNA, 19 nt, Artificial Sequence
  Description of Artificial Sequence: Synthetic oligonucleotide
  Sense strand starting at position 99 of SEQ ID NO: 1883758
accgguucugccugaacau

SEQ ID NO: 2214281 - RNA, 19 nt, Artificial Sequence
  Description of Artificial Sequence: Synthetic oligonucleotide
  Antisense strand to SEQ ID NO: 2214280
auguucaggcagaaccggu

SEQ ID NO: 2214282 - RNA, 19 nt, Artificial Sequence
  Description of Artificial Sequence: Synthetic oligonucleotide
  Sense strand starting at position 1646 of SEQ ID NO: 1883758
gcaugucauccaugucauc

SEQ ID NO: 2214283 - RNA, 19 nt, Artificial Sequence
  Description of Artificial Sequence: Synthetic oligonucleotide
  Antisense strand to SEQ ID NO: 2214282
gaugacauggaugacaugc

SEQ ID NO: 2214284 - RNA, 19 nt, Artificial Sequence
  Description of Artificial Sequence: Synthetic oligonucleotide
  Sense strand starting at position 1296 of SEQ ID NO: 1883758
augccagaccugugcucau

SEQ ID NO: 2214285 - RNA, 19 nt, Artificial Sequence
  Description of Artificial Sequence: Synthetic oligonucleotide
  Antisense strand to SEQ ID NO: 2214284
augagcacaggucuggcau

SEQ ID NO: 2214286 - RNA, 19 nt, Artificial Sequence
  Description of Artificial Sequence: Synthetic oligonucleotide
  Sense strand starting at position 3609 of SEQ ID NO: 1883758
cuggccuuguguguaugaa

SEQ ID NO: 2214287 - RNA, 19 nt, Artificial Sequence
  Description of Artificial Sequence: Synthetic oligonucleotide
  Antisense strand to SEQ ID NO: 2214286
uucauacacacaaggccag

SEQ ID NO: 2214288 - RNA, 19 nt, Artificial Sequence
  Description of Artificial Sequence: Synthetic oligonucleotide
  Sense strand starting at position 364 of SEQ ID NO: 1883758
gugcucagcuguccaugaa

SEQ ID NO: 2214289 - RNA, 19 nt, Artificial Sequence
  Description of Artificial Sequence: Synthetic oligonucleotide
  Antisense strand to SEQ ID NO: 2214288
uucauggacagcugagcac

SEQ ID NO: 2214290 - RNA, 19 nt, Artificial Sequence
  Description of Artificial Sequence: Synthetic oligonucleotide
  Sense strand starting at position 1620 of SEQ ID NO: 1883758
ugagcaauguccgugucau

SEQ ID NO: 2214291 - RNA, 19 nt, Artificial Sequence
  Description of Artificial Sequence: Synthetic oligonucleotide
  Antisense strand to SEQ ID NO: 2214290
augacacggacauugcuca

SEQ ID NO: 2214292 - RNA, 19 nt, Artificial Sequence
  Description of Artificial Sequence: Synthetic oligonucleotide
  Sense strand starting at position 1619 of SEQ ID NO: 1883758
cugagcaauguccguguca

SEQ ID NO: 2214293 - RNA, 19 nt, Artificial Sequence
  Description of Artificial Sequence: Synthetic oligonucleotide
  Antisense strand to SEQ ID NO: 2214292
ugacacggacauugcucag

SEQ ID NO: 2214294 - RNA, 19 nt, Artificial Sequence
  Description of Artificial Sequence: Synthetic oligonucleotide
  Sense strand starting at position 1621 of SEQ ID NO: 1883758
gagcaauguccgugucauu

SEQ ID NO: 2214295 - RNA, 19 nt, Artificial Sequence
  Description of Artificial Sequence: Synthetic oligonucleotide
  Antisense strand to SEQ ID NO: 2214294
aaugacacggacauugcuc

SEQ ID NO: 2214296 - RNA, 19 nt, Artificial Sequence
  Description of Artificial Sequence: Synthetic oligonucleotide
  Sense strand starting at position 2114 of SEQ ID NO: 1883758
ccuagcuccuccguaguua

SEQ ID NO: 2214297 - RNA, 19 nt, Artificial Sequence
  Description of Artificial Sequence: Synthetic oligonucleotide
  Antisense strand to SEQ ID NO: 2214296
uaacuacggaggagcuagg

SEQ ID NO: 2214298 - RNA, 19 nt, Artificial Sequence
  Description of Artificial Sequence: Synthetic oligonucleotide
  Sense strand starting at position 1481 of SEQ ID NO: 1883758
gcgccuuuaucuuuccuua

SEQ ID NO: 2214299 - RNA, 19 nt, Artificial Sequence
  Description of Artificial Sequence: Synthetic oligonucleotide
  Antisense strand to SEQ ID NO: 2214298
uaaggaaagauaaaggcgc

SEQ ID NO: 2214300 - RNA, 19 nt, Artificial Sequence
  Description of Artificial Sequence: Synthetic oligonucleotide
  Sense strand starting at position 3514 of SEQ ID NO: 1883758
acgugugcauuccugcaua

SEQ ID NO: 2214301 - RNA, 19 nt, Artificial Sequence
  Description of Artificial Sequence: Synthetic oligonucleotide
  Antisense strand to SEQ ID NO: 2214300
uaugcaggaaugcacacgu

SEQ ID NO: 2214302 - RNA, 19 nt, Artificial Sequence
  Description of Artificial Sequence: Synthetic oligonucleotide
  Sense strand starting at position 1640 of SEQ ID NO: 1883758
ggaacagcaugucauccau

SEQ ID NO: 2214303 - RNA, 19 nt, Artificial Sequence
  Description of Artificial Sequence: Synthetic oligonucleotide
  Antisense strand to SEQ ID NO: 2214302
auggaugacaugcuguucc

SEQ ID NO: 2214304 - RNA, 19 nt, Artificial Sequence
  Description of Artificial Sequence: Synthetic oligonucleotide
  Sense strand starting at position 839 of SEQ ID NO: 1883758
ccacguuucucauagaagg

SEQ ID NO: 2214305 - RNA, 19 nt, Artificial Sequence
  Description of Artificial Sequence: Synthetic oligonucleotide
  Antisense strand to SEQ ID NO: 2214304
ccuucuaugagaaacgugg

SEQ ID NO: 2214306 - RNA, 19 nt, Artificial Sequence
  Description of Artificial Sequence: Synthetic oligonucleotide
  Sense strand starting at position 1532 of SEQ ID NO: 1883758
aggcacuugucucacaauu

SEQ ID NO: 2214307 - RNA, 19 nt, Artificial Sequence
  Description of Artificial Sequence: Synthetic oligonucleotide
  Antisense strand to SEQ ID NO: 2214306
aauugugagacaagugccu

SEQ ID NO: 2214308 - RNA, 19 nt, Artificial Sequence
  Description of Artificial Sequence: Synthetic oligonucleotide
  Sense strand starting at position 29 of SEQ ID NO: 1883758
aacauaugcucagagcgau

SEQ ID NO: 2214309 - RNA, 19 nt, Artificial Sequence
  Description of Artificial Sequence: Synthetic oligonucleotide
  Antisense strand to SEQ ID NO: 2214308
aucgcucugagcauauguu

SEQ ID NO: 2214310 - RNA, 19 nt, Artificial Sequence
  Description of Artificial Sequence: Synthetic oligonucleotide
  Sense strand starting at position 2077 of SEQ ID NO: 1883758
uuuguccucgccugcgaua

SEQ ID NO: 2214311 - RNA, 19 nt, Artificial Sequence
  Description of Artificial Sequence: Synthetic oligonucleotide
  Antisense strand to SEQ ID NO: 2214310
uaucgcaggcgaggacaaa

SEQ ID NO: 2214312 - RNA, 19 nt, Artificial Sequence
  Description of Artificial Sequence: Synthetic oligonucleotide
  Sense strand starting at position 1269 of SEQ ID NO: 1883758
gcucuaggcucucaucaac

SEQ ID NO: 2214313 - RNA, 19 nt, Artificial Sequence
  Description of Artificial Sequence: Synthetic oligonucleotide
  Antisense strand to SEQ ID NO: 2214312
guugaugagagccuagagc

SEQ ID NO: 2214314 - RNA, 19 nt, Artificial Sequence
  Description of Artificial Sequence: Synthetic oligonucleotide
  Sense strand starting at position 837 of SEQ ID NO: 1883758
ugccacguuucucauagaa

SEQ ID NO: 2214315 - RNA, 19 nt, Artificial Sequence
  Description of Artificial Sequence: Synthetic oligonucleotide
  Antisense strand to SEQ ID NO: 2214314
uucuaugagaaacguggca

SEQ ID NO: 2214316 - RNA, 19 nt, Artificial Sequence
  Description of Artificial Sequence: Synthetic oligonucleotide
  Sense strand starting at position 2171 of SEQ ID NO: 1883759
ccagaagauucugucacaa

SEQ ID NO: 2214317 - RNA, 19 nt, Artificial Sequence
  Description of Artificial Sequence: Synthetic oligonucleotide
  Antisense strand to SEQ ID NO: 2214316
uugugacagaaucuucugg

SEQ ID NO: 2214318 - RNA, 19 nt, Artificial Sequence
  Description of Artificial Sequence: Synthetic oligonucleotide
  Sense strand starting at position 2251 of SEQ ID NO: 1883759
cucagagcucccuacaaug

SEQ ID NO: 2214319 - RNA, 19 nt, Artificial Sequence
  Description of Artificial Sequence: Synthetic oligonucleotide
  Antisense strand to SEQ ID NO: 2214318
cauuguagggagcucugag

SEQ ID NO: 2214320 - RNA, 19 nt, Artificial Sequence
  Description of Artificial Sequence: Synthetic oligonucleotide
  Sense strand starting at position 1886 of SEQ ID NO: 1883759
aguuguuuccuggacaauc

SEQ ID NO: 2214321 - RNA, 19 nt, Artificial Sequence
  Description of Artificial Sequence: Synthetic oligonucleotide
  Antisense strand to SEQ ID NO: 2214320
gauuguccaggaaacaacu

SEQ ID NO: 2214322 - RNA, 19 nt, Artificial Sequence
  Description of Artificial Sequence: Synthetic oligonucleotide
  Sense strand starting at position 3581 of SEQ ID NO: 1883759
auggucaucucacccugaa

SEQ ID NO: 2214323 - RNA, 19 nt, Artificial Sequence
  Description of Artificial Sequence: Synthetic oligonucleotide
  Antisense strand to SEQ ID NO: 2214322
uucagggugagaugaccau

SEQ ID NO: 2214324 - RNA, 19 nt, Artificial Sequence
  Description of Artificial Sequence: Synthetic oligonucleotide
  Sense strand starting at position 1175 of SEQ ID NO: 1883759
ccacauccucgguacagua

SEQ ID NO: 2214325 - RNA, 19 nt, Artificial Sequence
  Description of Artificial Sequence: Synthetic oligonucleotide
  Antisense strand to SEQ ID NO: 2214324
uacuguaccgaggaugugg

SEQ ID NO: 2214326 - RNA, 19 nt, Artificial Sequence
  Description of Artificial Sequence: Synthetic oligonucleotide
  Sense strand starting at position 1043 of SEQ ID NO: 1883759
uggcacagucaucaauguu

SEQ ID NO: 2214327 - RNA, 19 nt, Artificial Sequence
  Description of Artificial Sequence: Synthetic oligonucleotide
  Antisense strand to SEQ ID NO: 2214326
aacauugaugacugugcca

SEQ ID NO: 2214328 - RNA, 19 nt, Artificial Sequence
  Description of Artificial Sequence: Synthetic oligonucleotide
  Sense strand starting at position 1894 of SEQ ID NO: 1883759
ccuggacaaucgucgauau

SEQ ID NO: 2214329 - RNA, 19 nt, Artificial Sequence
  Description of Artificial Sequence: Synthetic oligonucleotide
  Antisense strand to SEQ ID NO: 2214328
auaucgacgauuguccagg

SEQ ID NO: 2214330 - RNA, 19 nt, Artificial Sequence
  Description of Artificial Sequence: Synthetic oligonucleotide
  Sense strand starting at position 1895 of SEQ ID NO: 1883759
cuggacaaucgucgauauu

SEQ ID NO: 2214331 - RNA, 19 nt, Artificial Sequence
  Description of Artificial Sequence: Synthetic oligonucleotide
  Antisense strand to SEQ ID NO: 2214330
aauaucgacgauuguccag

SEQ ID NO: 2214332 - RNA, 19 nt, Artificial Sequence
  Description of Artificial Sequence: Synthetic oligonucleotide
  Sense strand starting at position 1042 of SEQ ID NO: 1883759
cuggcacagucaucaaugu

SEQ ID NO: 2214333 - RNA, 19 nt, Artificial Sequence
  Description of Artificial Sequence: Synthetic oligonucleotide
  Antisense strand to SEQ ID NO: 2214332
acauugaugacugugccag

SEQ ID NO: 2214334 - RNA, 19 nt, Artificial Sequence
  Description of Artificial Sequence: Synthetic oligonucleotide
  Sense strand starting at position 3952 of SEQ ID NO: 1883759
auccgugugacuggaggua

SEQ ID NO: 2214335 - RNA, 19 nt, Artificial Sequence
  Description of Artificial Sequence: Synthetic oligonucleotide
  Antisense strand to SEQ ID NO: 2214334
uaccuccagucacacggau

SEQ ID NO: 2214336 - RNA, 19 nt, Artificial Sequence
  Description of Artificial Sequence: Synthetic oligonucleotide
  Sense strand starting at position 858 of SEQ ID NO: 1883759
ucagguuauccugggugca

SEQ ID NO: 2214337 - RNA, 19 nt, Artificial Sequence
  Description of Artificial Sequence: Synthetic oligonucleotide
  Antisense strand to SEQ ID NO: 2214336
ugcacccaggauaaccuga

SEQ ID NO: 2214338 - RNA, 19 nt, Artificial Sequence
  Description of Artificial Sequence: Synthetic oligonucleotide
  Sense strand starting at position 2607 of SEQ ID NO: 1883759
ccugcagccgguuacuaau

SEQ ID NO: 2214339 - RNA, 19 nt, Artificial Sequence
  Description of Artificial Sequence: Synthetic oligonucleotide
  Antisense strand to SEQ ID NO: 2214338
auuaguaaccggcugcagg

SEQ ID NO: 2214340 - RNA, 19 nt, Artificial Sequence
  Description of Artificial Sequence: Synthetic oligonucleotide
  Sense strand starting at position 1883 of SEQ ID NO: 1883759
ugcaguuguuuccuggaca

SEQ ID NO: 2214341 - RNA, 19 nt, Artificial Sequence
  Description of Artificial Sequence: Synthetic oligonucleotide
  Antisense strand to SEQ ID NO: 2214340
uguccaggaaacaacugca

SEQ ID NO: 2214342 - RNA, 19 nt, Artificial Sequence
  Description of Artificial Sequence: Synthetic oligonucleotide
  Sense strand starting at position 1751 of SEQ ID NO: 1883759
gcaguuuaguaagugggua

SEQ ID NO: 2214343 - RNA, 19 nt, Artificial Sequence
  Description of Artificial Sequence: Synthetic oligonucleotide
  Antisense strand to SEQ ID NO: 2214342
uacccacuuacuaaacugc

SEQ ID NO: 2214344 - RNA, 19 nt, Artificial Sequence
  Description of Artificial Sequence: Synthetic oligonucleotide
  Sense strand starting at position 1919 of SEQ ID NO: 1883759
cacaguucuggccggugaa

SEQ ID NO: 2214345 - RNA, 19 nt, Artificial Sequence
  Description of Artificial Sequence: Synthetic oligonucleotide
  Antisense strand to SEQ ID NO: 2214344
uucaccggccagaacugug

SEQ ID NO: 2214346 - RNA, 19 nt, Artificial Sequence
  Description of Artificial Sequence: Synthetic oligonucleotide
  Sense strand starting at position 2527 of SEQ ID NO: 1883759
gcagccaguuagcuauuaa

SEQ ID NO: 2214347 - RNA, 19 nt, Artificial Sequence
  Description of Artificial Sequence: Synthetic oligonucleotide
  Antisense strand to SEQ ID NO: 2214346
uuaauagcuaacuggcugc

SEQ ID NO: 2214348 - RNA, 19 nt, Artificial Sequence
  Description of Artificial Sequence: Synthetic oligonucleotide
  Sense strand starting at position 571 of SEQ ID NO: 1883759
ugcagauggccuugccauu

SEQ ID NO: 2214349 - RNA, 19 nt, Artificial Sequence
  Description of Artificial Sequence: Synthetic oligonucleotide
  Antisense strand to SEQ ID NO: 2214348
aauggcaaggccaucugca

SEQ ID NO: 2214350 - RNA, 19 nt, Artificial Sequence
  Description of Artificial Sequence: Synthetic oligonucleotide
  Sense strand starting at position 1437 of SEQ ID NO: 1883759
gaggguaauucccgaacac

SEQ ID NO: 2214351 - RNA, 19 nt, Artificial Sequence
  Description of Artificial Sequence: Synthetic oligonucleotide
  Antisense strand to SEQ ID NO: 2214350
guguucgggaauuacccuc

SEQ ID NO: 2214352 - RNA, 19 nt, Artificial Sequence
  Description of Artificial Sequence: Synthetic oligonucleotide
  Sense strand starting at position 1884 of SEQ ID NO: 1883759
gcaguuguuuccuggacaa

SEQ ID NO: 2214353 - RNA, 19 nt, Artificial Sequence
  Description of Artificial Sequence: Synthetic oligonucleotide
  Antisense strand to SEQ ID NO: 2214352
uuguccaggaaacaacugc

SEQ ID NO: 2214354 - RNA, 19 nt, Artificial Sequence
  Description of Artificial Sequence: Synthetic oligonucleotide
  Sense strand starting at position 1052 of SEQ ID NO: 1883759
caucaauguucucgcugca

SEQ ID NO: 2214355 - RNA, 19 nt, Artificial Sequence
  Description of Artificial Sequence: Synthetic oligonucleotide
  Antisense strand to SEQ ID NO: 2214354
ugcagcgagaacauugaug

SEQ ID NO: 2214356 - RNA, 19 nt, Artificial Sequence
  Description of Artificial Sequence: Synthetic oligonucleotide
  Sense strand starting at position 3085 of SEQ ID NO: 1883760
gccugcguccucccagaau

SEQ ID NO: 2214357 - RNA, 19 nt, Artificial Sequence
  Description of Artificial Sequence: Synthetic oligonucleotide
  Antisense strand to SEQ ID NO: 2214356
auucugggaggacgcaggc

SEQ ID NO: 2214358 - RNA, 19 nt, Artificial Sequence
  Description of Artificial Sequence: Synthetic oligonucleotide
  Sense strand starting at position 1063 of SEQ ID NO: 1883760
agauaaauggcccggagaa

SEQ ID NO: 2214359 - RNA, 19 nt, Artificial Sequence
  Description of Artificial Sequence: Synthetic oligonucleotide
  Antisense strand to SEQ ID NO: 2214358
uucuccgggccauuuaucu

SEQ ID NO: 2214360 - RNA, 19 nt, Artificial Sequence
  Description of Artificial Sequence: Synthetic oligonucleotide
  Sense strand starting at position 2712 of SEQ ID NO: 1883760
gccauagucccugcgcaaa

SEQ ID NO: 2214361 - RNA, 19 nt, Artificial Sequence
  Description of Artificial Sequence: Synthetic oligonucleotide
  Antisense strand to SEQ ID NO: 2214360
uuugcgcagggacuauggc

SEQ ID NO: 2214362 - RNA, 19 nt, Artificial Sequence
  Description of Artificial Sequence: Synthetic oligonucleotide
  Sense strand starting at position 1064 of SEQ ID NO: 1883760
gauaaauggcccggagaag

SEQ ID NO: 2214363 - RNA, 19 nt, Artificial Sequence
  Description of Artificial Sequence: Synthetic oligonucleotide
  Antisense strand to SEQ ID NO: 2214362
cuucuccgggccauuuauc

SEQ ID NO: 2214364 - RNA, 19 nt, Artificial Sequence
  Description of Artificial Sequence: Synthetic oligonucleotide
  Sense strand starting at position 3178 of SEQ ID NO: 1883760
agagauguuuauguaacag

SEQ ID NO: 2214365 - RNA, 19 nt, Artificial Sequence
  Description of Artificial Sequence: Synthetic oligonucleotide
  Antisense strand to SEQ ID NO: 2214364
cuguuacauaaacaucucu

SEQ ID NO: 2214366 - RNA, 19 nt, Artificial Sequence
  Description of Artificial Sequence: Synthetic oligonucleotide
  Sense strand starting at position 3175 of SEQ ID NO: 1883760
agcagagauguuuauguaa

SEQ ID NO: 2214367 - RNA, 19 nt, Artificial Sequence
  Description of Artificial Sequence: Synthetic oligonucleotide
  Antisense strand to SEQ ID NO: 2214366
uuacauaaacaucucugcu

SEQ ID NO: 2214368 - RNA, 19 nt, Artificial Sequence
  Description of Artificial Sequence: Synthetic oligonucleotide
  Sense strand starting at position 704 of SEQ ID NO: 1883760
ccuccaacucucggagaaa

SEQ ID NO: 2214369 - RNA, 19 nt, Artificial Sequence
  Description of Artificial Sequence: Synthetic oligonucleotide
  Antisense strand to SEQ ID NO: 2214368
uuucuccgagaguuggagg

SEQ ID NO: 2214370 - RNA, 19 nt, Artificial Sequence
  Description of Artificial Sequence: Synthetic oligonucleotide
  Sense strand starting at position 2089 of SEQ ID NO: 1883760
acaacuggcgacugaaauu

SEQ ID NO: 2214371 - RNA, 19 nt, Artificial Sequence
  Description of Artificial Sequence: Synthetic oligonucleotide
  Antisense strand to SEQ ID NO: 2214370
aauuucagucgccaguugu

SEQ ID NO: 2214372 - RNA, 19 nt, Artificial Sequence
  Description of Artificial Sequence: Synthetic oligonucleotide
  Sense strand starting at position 50 of SEQ ID NO: 1883760
cccagaguucuguagucag

SEQ ID NO: 2214373 - RNA, 19 nt, Artificial Sequence
  Description of Artificial Sequence: Synthetic oligonucleotide
  Antisense strand to SEQ ID NO: 2214372
cugacuacagaacucuggg

SEQ ID NO: 2214374 - RNA, 19 nt, Artificial Sequence
  Description of Artificial Sequence: Synthetic oligonucleotide
  Sense strand starting at position 725 of SEQ ID NO: 1883760
guggauuaaucacucgauu

SEQ ID NO: 2214375 - RNA, 19 nt, Artificial Sequence
  Description of Artificial Sequence: Synthetic oligonucleotide
  Antisense strand to SEQ ID NO: 2214374
aaucgagugauuaauccac

SEQ ID NO: 2214376 - RNA, 19 nt, Artificial Sequence
  Description of Artificial Sequence: Synthetic oligonucleotide
  Sense strand starting at position 2621 of SEQ ID NO: 1883760
gcuccuuccggcugauuua

SEQ ID NO: 2214377 - RNA, 19 nt, Artificial Sequence
  Description of Artificial Sequence: Synthetic oligonucleotide
  Antisense strand to SEQ ID NO: 2214376
uaaaucagccggaaggagc

SEQ ID NO: 2214378 - RNA, 19 nt, Artificial Sequence
  Description of Artificial Sequence: Synthetic oligonucleotide
  Sense strand starting at position 2000 of SEQ ID NO: 1883760
gacuacuucucguuugaaa

SEQ ID NO: 2214379 - RNA, 19 nt, Artificial Sequence
  Description of Artificial Sequence: Synthetic oligonucleotide
  Antisense strand to SEQ ID NO: 2214378
uuucaaacgagaaguaguc

SEQ ID NO: 2214380 - RNA, 19 nt, Artificial Sequence
  Description of Artificial Sequence: Synthetic oligonucleotide
  Sense strand starting at position 692 of SEQ ID NO: 1883760
agauaauucucgccuccaa

SEQ ID NO: 2214381 - RNA, 19 nt, Artificial Sequence
  Description of Artificial Sequence: Synthetic oligonucleotide
  Antisense strand to SEQ ID NO: 2214380
uuggaggcgagaauuaucu

SEQ ID NO: 2214382 - RNA, 19 nt, Artificial Sequence
  Description of Artificial Sequence: Synthetic oligonucleotide
  Sense strand starting at position 39 of SEQ ID NO: 1883760
ucaacauucugcccagagu

SEQ ID NO: 2214383 - RNA, 19 nt, Artificial Sequence
  Description of Artificial Sequence: Synthetic oligonucleotide
  Antisense strand to SEQ ID NO: 2214382
acucugggcagaauguuga

SEQ ID NO: 2214384 - RNA, 19 nt, Artificial Sequence
  Description of Artificial Sequence: Synthetic oligonucleotide
  Sense strand starting at position 2098 of SEQ ID NO: 1883760
gacugaaauuugcauguga

SEQ ID NO: 2214385 - RNA, 19 nt, Artificial Sequence
  Description of Artificial Sequence: Synthetic oligonucleotide
  Antisense strand to SEQ ID NO: 2214384
ucacaugcaaauuucaguc

SEQ ID NO: 2214386 - RNA, 19 nt, Artificial Sequence
  Description of Artificial Sequence: Synthetic oligonucleotide
  Sense strand starting at position 2374 of SEQ ID NO: 1883760
gcacuugaccgcgagggau

SEQ ID NO: 2214387 - RNA, 19 nt, Artificial Sequence
  Description of Artificial Sequence: Synthetic oligonucleotide
  Antisense strand to SEQ ID NO: 2214386
aucccucgcggucaagugc

SEQ ID NO: 2214388 - RNA, 19 nt, Artificial Sequence
  Description of Artificial Sequence: Synthetic oligonucleotide
  Sense strand starting at position 3415 of SEQ ID NO: 1883760
gccagaaguaauggcccau

SEQ ID NO: 2214389 - RNA, 19 nt, Artificial Sequence
  Description of Artificial Sequence: Synthetic oligonucleotide
  Antisense strand to SEQ ID NO: 2214388
augggccauuacuucuggc

SEQ ID NO: 2214390 - RNA, 19 nt, Artificial Sequence
  Description of Artificial Sequence: Synthetic oligonucleotide
  Sense strand starting at position 2957 of SEQ ID NO: 1883760
ggacaaaucucacaccuga

SEQ ID NO: 2214391 - RNA, 19 nt, Artificial Sequence
  Description of Artificial Sequence: Synthetic oligonucleotide
  Antisense strand to SEQ ID NO: 2214390
ucaggugugagauuugucc

SEQ ID NO: 2214392 - RNA, 19 nt, Artificial Sequence
  Description of Artificial Sequence: Synthetic oligonucleotide
  Sense strand starting at position 2002 of SEQ ID NO: 1883760
cuacuucucguuugaaagu

SEQ ID NO: 2214393 - RNA, 19 nt, Artificial Sequence
  Description of Artificial Sequence: Synthetic oligonucleotide
  Antisense strand to SEQ ID NO: 2214392
acuuucaaacgagaaguag

SEQ ID NO: 2214394 - RNA, 19 nt, Artificial Sequence
  Description of Artificial Sequence: Synthetic oligonucleotide
  Sense strand starting at position 705 of SEQ ID NO: 1883760
cuccaacucucggagaaag

SEQ ID NO: 2214395 - RNA, 19 nt, Artificial Sequence
  Description of Artificial Sequence: Synthetic oligonucleotide
  Antisense strand to SEQ ID NO: 2214394
cuuucuccgagaguuggag

SEQ ID NO: 2214396 - RNA, 19 nt, Artificial Sequence
  Description of Artificial Sequence: Synthetic oligonucleotide
  Sense strand starting at position 2360 of SEQ ID NO: 1883760
ccgugauugcccgagcacu

SEQ ID NO: 2214397 - RNA, 19 nt, Artificial Sequence
  Description of Artificial Sequence: Synthetic oligonucleotide
  Antisense strand to SEQ ID NO: 2214396
agugcucgggcaaucacgg

SEQ ID NO: 2214398 - RNA, 19 nt, Artificial Sequence
  Description of Artificial Sequence: Synthetic oligonucleotide
  Sense strand starting at position 3177 of SEQ ID NO: 1883760
cagagauguuuauguaaca

SEQ ID NO: 2214399 - RNA, 19 nt, Artificial Sequence
  Description of Artificial Sequence: Synthetic oligonucleotide
  Antisense strand to SEQ ID NO: 2214398
uguuacauaaacaucucug

SEQ ID NO: 2214400 - RNA, 19 nt, Artificial Sequence
  Description of Artificial Sequence: Synthetic oligonucleotide
  Sense strand starting at position 249 of SEQ ID NO: 1883760
cgccgagauugccucuguu

SEQ ID NO: 2214401 - RNA, 19 nt, Artificial Sequence
  Description of Artificial Sequence: Synthetic oligonucleotide
  Antisense strand to SEQ ID NO: 2214400
aacagaggcaaucucggcg

SEQ ID NO: 2214402 - RNA, 19 nt, Artificial Sequence
  Description of Artificial Sequence: Synthetic oligonucleotide
  Sense strand starting at position 3835 of SEQ ID NO: 1883760
gcaaguaggugagaagcuu

SEQ ID NO: 2214403 - RNA, 19 nt, Artificial Sequence
  Description of Artificial Sequence: Synthetic oligonucleotide
  Antisense strand to SEQ ID NO: 2214402
aagcuucucaccuacuugc

SEQ ID NO: 2214404 - RNA, 19 nt, Artificial Sequence
  Description of Artificial Sequence: Synthetic oligonucleotide
  Sense strand starting at position 703 of SEQ ID NO: 1883760
gccuccaacucucggagaa

SEQ ID NO: 2214405 - RNA, 19 nt, Artificial Sequence
  Description of Artificial Sequence: Synthetic oligonucleotide
  Antisense strand to SEQ ID NO: 2214404
uucuccgagaguuggaggc

SEQ ID NO: 2214406 - RNA, 19 nt, Artificial Sequence
  Description of Artificial Sequence: Synthetic oligonucleotide
  Sense strand starting at position 2003 of SEQ ID NO: 1883760
uacuucucguuugaaaguu

SEQ ID NO: 2214407 - RNA, 19 nt, Artificial Sequence
  Description of Artificial Sequence: Synthetic oligonucleotide
  Antisense strand to SEQ ID NO: 2214406
aacuuucaaacgagaagua

SEQ ID NO: 2214408 - RNA, 19 nt, Artificial Sequence
  Description of Artificial Sequence: Synthetic oligonucleotide
  Sense strand starting at position 1998 of SEQ ID NO: 1883760
gggacuacuucucguuuga

SEQ ID NO: 2214409 - RNA, 19 nt, Artificial Sequence
  Description of Artificial Sequence: Synthetic oligonucleotide
  Antisense strand to SEQ ID NO: 2214408
ucaaacgagaaguaguccc

SEQ ID NO: 2214410 - RNA, 19 nt, Artificial Sequence
  Description of Artificial Sequence: Synthetic oligonucleotide
  Sense strand starting at position 3945 of SEQ ID NO: 1883760
gaguacaucugcuggccua

SEQ ID NO: 2214411 - RNA, 19 nt, Artificial Sequence
  Description of Artificial Sequence: Synthetic oligonucleotide
  Antisense strand to SEQ ID NO: 2214410
uaggccagcagauguacuc

SEQ ID NO: 2214412 - RNA, 19 nt, Artificial Sequence
  Description of Artificial Sequence: Synthetic oligonucleotide
  Sense strand starting at position 522 of SEQ ID NO: 1883761
ccagguuaccaauaagcaa

SEQ ID NO: 2214413 - RNA, 19 nt, Artificial Sequence
  Description of Artificial Sequence: Synthetic oligonucleotide
  Antisense strand to SEQ ID NO: 2214412
uugcuuauugguaaccugg

SEQ ID NO: 2214414 - RNA, 19 nt, Artificial Sequence
  Description of Artificial Sequence: Synthetic oligonucleotide
  Sense strand starting at position 1701 of SEQ ID NO: 1883761
uuaaguguucuauaacaga

SEQ ID NO: 2214415 - RNA, 19 nt, Artificial Sequence
  Description of Artificial Sequence: Synthetic oligonucleotide
  Antisense strand to SEQ ID NO: 2214414
ucuguuauagaacacuuaa

SEQ ID NO: 2214416 - RNA, 19 nt, Artificial Sequence
  Description of Artificial Sequence: Synthetic oligonucleotide
  Sense strand starting at position 2772 of SEQ ID NO: 1883761
augugugcagcuucuguaa

SEQ ID NO: 2214417 - RNA, 19 nt, Artificial Sequence
  Description of Artificial Sequence: Synthetic oligonucleotide
  Antisense strand to SEQ ID NO: 2214416
uuacagaagcugcacacau

SEQ ID NO: 2214418 - RNA, 19 nt, Artificial Sequence
  Description of Artificial Sequence: Synthetic oligonucleotide
  Sense strand starting at position 491 of SEQ ID NO: 1883761
cagaauagcccucaaggua

SEQ ID NO: 2214419 - RNA, 19 nt, Artificial Sequence
  Description of Artificial Sequence: Synthetic oligonucleotide
  Antisense strand to SEQ ID NO: 2214418
uaccuugagggcuauucug

SEQ ID NO: 2214420 - RNA, 19 nt, Artificial Sequence
  Description of Artificial Sequence: Synthetic oligonucleotide
  Sense strand starting at position 129 of SEQ ID NO: 1883761
gcauuucuacugugaucug

SEQ ID NO: 2214421 - RNA, 19 nt, Artificial Sequence
  Description of Artificial Sequence: Synthetic oligonucleotide
  Antisense strand to SEQ ID NO: 2214420
cagaucacaguagaaaugc

SEQ ID NO: 2214422 - RNA, 19 nt, Artificial Sequence
  Description of Artificial Sequence: Synthetic oligonucleotide
  Sense strand starting at position 334 of SEQ ID NO: 1883761
ugaacacagucccuuagaa

SEQ ID NO: 2214423 - RNA, 19 nt, Artificial Sequence
  Description of Artificial Sequence: Synthetic oligonucleotide
  Antisense strand to SEQ ID NO: 2214422
uucuaagggacuguguuca

SEQ ID NO: 2214424 - RNA, 19 nt, Artificial Sequence
  Description of Artificial Sequence: Synthetic oligonucleotide
  Sense strand starting at position 1996 of SEQ ID NO: 1883761
agucaauucccacagcaga

SEQ ID NO: 2214425 - RNA, 19 nt, Artificial Sequence
  Description of Artificial Sequence: Synthetic oligonucleotide
  Antisense strand to SEQ ID NO: 2214424
ucugcugugggaauugacu

SEQ ID NO: 2214426 - RNA, 19 nt, Artificial Sequence
  Description of Artificial Sequence: Synthetic oligonucleotide
  Sense strand starting at position 861 of SEQ ID NO: 1883761
cugcaaagucuccagaaca

SEQ ID NO: 2214427 - RNA, 19 nt, Artificial Sequence
  Description of Artificial Sequence: Synthetic oligonucleotide
  Antisense strand to SEQ ID NO: 2214426
uguucuggagacuuugcag

SEQ ID NO: 2214428 - RNA, 19 nt, Artificial Sequence
  Description of Artificial Sequence: Synthetic oligonucleotide
  Sense strand starting at position 2690 of SEQ ID NO: 1883761
aauuaccugugauuggaua

SEQ ID NO: 2214429 - RNA, 19 nt, Artificial Sequence
  Description of Artificial Sequence: Synthetic oligonucleotide
  Antisense strand to SEQ ID NO: 2214428
uauccaaucacagguaauu

SEQ ID NO: 2214430 - RNA, 19 nt, Artificial Sequence
  Description of Artificial Sequence: Synthetic oligonucleotide
  Sense strand starting at position 959 of SEQ ID NO: 1883761
ggugcuuguggucuaguuu

SEQ ID NO: 2214431 - RNA, 19 nt, Artificial Sequence
  Description of Artificial Sequence: Synthetic oligonucleotide
  Antisense strand to SEQ ID NO: 2214430
aaacuagaccacaagcacc

SEQ ID NO: 2214432 - RNA, 19 nt, Artificial Sequence
  Description of Artificial Sequence: Synthetic oligonucleotide
  Sense strand starting at position 2691 of SEQ ID NO: 1883761
auuaccugugauuggauaa

SEQ ID NO: 2214433 - RNA, 19 nt, Artificial Sequence
  Description of Artificial Sequence: Synthetic oligonucleotide
  Antisense strand to SEQ ID NO: 2214432
uuauccaaucacagguaau

SEQ ID NO: 2214434 - RNA, 19 nt, Artificial Sequence
  Description of Artificial Sequence: Synthetic oligonucleotide
  Sense strand starting at position 2692 of SEQ ID NO: 1883761
uuaccugugauuggauaag

SEQ ID NO: 2214435 - RNA, 19 nt, Artificial Sequence
  Description of Artificial Sequence: Synthetic oligonucleotide
  Antisense strand to SEQ ID NO: 2214434
cuuauccaaucacagguaa

SEQ ID NO: 2214436 - RNA, 19 nt, Artificial Sequence
  Description of Artificial Sequence: Synthetic oligonucleotide
  Sense strand starting at position 1386 of SEQ ID NO: 1883761
acgugugugaaucaaagaa

SEQ ID NO: 2214437 - RNA, 19 nt, Artificial Sequence
  Description of Artificial Sequence: Synthetic oligonucleotide
  Antisense strand to SEQ ID NO: 2214436
uucuuugauucacacacgu

SEQ ID NO: 2214438 - RNA, 19 nt, Artificial Sequence
  Description of Artificial Sequence: Synthetic oligonucleotide
  Sense strand starting at position 2325 of SEQ ID NO: 1883761
ggauaugucuucuuaaaua

SEQ ID NO: 2214439 - RNA, 19 nt, Artificial Sequence
  Description of Artificial Sequence: Synthetic oligonucleotide
  Antisense strand to SEQ ID NO: 2214438
uauuuaagaagacauaucc

SEQ ID NO: 2214440 - RNA, 19 nt, Artificial Sequence
  Description of Artificial Sequence: Synthetic oligonucleotide
  Sense strand starting at position 1008 of SEQ ID NO: 1883761
uuaaguuuaguccaacuua

SEQ ID NO: 2214441 - RNA, 19 nt, Artificial Sequence
  Description of Artificial Sequence: Synthetic oligonucleotide
  Antisense strand to SEQ ID NO: 2214440
uaaguuggacuaaacuuaa

SEQ ID NO: 2214442 - RNA, 19 nt, Artificial Sequence
  Description of Artificial Sequence: Synthetic oligonucleotide
  Sense strand starting at position 1189 of SEQ ID NO: 1883761
ugccaauuagucuaugaua

SEQ ID NO: 2214443 - RNA, 19 nt, Artificial Sequence
  Description of Artificial Sequence: Synthetic oligonucleotide
  Antisense strand to SEQ ID NO: 2214442
uaucauagacuaauuggca

SEQ ID NO: 2214444 - RNA, 19 nt, Artificial Sequence
  Description of Artificial Sequence: Synthetic oligonucleotide
  Sense strand starting at position 946 of SEQ ID NO: 1883761
gauuuaagaccguggugcu

SEQ ID NO: 2214445 - RNA, 19 nt, Artificial Sequence
  Description of Artificial Sequence: Synthetic oligonucleotide
  Antisense strand to SEQ ID NO: 2214444
agcaccacggucuuaaauc

SEQ ID NO: 2214446 - RNA, 19 nt, Artificial Sequence
  Description of Artificial Sequence: Synthetic oligonucleotide
  Sense strand starting at position 443 of SEQ ID NO: 1883761
uguagaaggcauugaauua

SEQ ID NO: 2214447 - RNA, 19 nt, Artificial Sequence
  Description of Artificial Sequence: Synthetic oligonucleotide
  Antisense strand to SEQ ID NO: 2214446
uaauucaaugccuucuaca

SEQ ID NO: 2214448 - RNA, 19 nt, Artificial Sequence
  Description of Artificial Sequence: Synthetic oligonucleotide
  Sense strand starting at position 375 of SEQ ID NO: 1883761
aguugauaugaguaugcca

SEQ ID NO: 2214449 - RNA, 19 nt, Artificial Sequence
  Description of Artificial Sequence: Synthetic oligonucleotide
  Antisense strand to SEQ ID NO: 2214448
uggcauacucauaucaacu

SEQ ID NO: 2214450 - RNA, 19 nt, Artificial Sequence
  Description of Artificial Sequence: Synthetic oligonucleotide
  Sense strand starting at position 23 of SEQ ID NO: 1883761
gucucauuccuagaggguu

SEQ ID NO: 2214451 - RNA, 19 nt, Artificial Sequence
  Description of Artificial Sequence: Synthetic oligonucleotide
  Antisense strand to SEQ ID NO: 2214450
aacccucuaggaaugagac

SEQ ID NO: 2214452 - RNA, 19 nt, Artificial Sequence
  Description of Artificial Sequence: Synthetic oligonucleotide
  Sense strand starting at position 825 of SEQ ID NO: 1883761
accaaauuacgguauagcu

SEQ ID NO: 2214453 - RNA, 19 nt, Artificial Sequence
  Description of Artificial Sequence: Synthetic oligonucleotide
  Antisense strand to SEQ ID NO: 2214452
agcuauaccguaauuuggu

SEQ ID NO: 2214454 - RNA, 19 nt, Artificial Sequence
  Description of Artificial Sequence: Synthetic oligonucleotide
  Sense strand starting at position 2917 of SEQ ID NO: 1883761
cagaguaauccuuggcaaa

SEQ ID NO: 2214455 - RNA, 19 nt, Artificial Sequence
  Description of Artificial Sequence: Synthetic oligonucleotide
  Antisense strand to SEQ ID NO: 2214454
uuugccaaggauuacucug

SEQ ID NO: 2214456 - RNA, 19 nt, Artificial Sequence
  Description of Artificial Sequence: Synthetic oligonucleotide
  Sense strand starting at position 3220 of SEQ ID NO: 1883761
aagugugaagccuagguga

SEQ ID NO: 2214457 - RNA, 19 nt, Artificial Sequence
  Description of Artificial Sequence: Synthetic oligonucleotide
  Antisense strand to SEQ ID NO: 2214456
ucaccuaggcuucacacuu

SEQ ID NO: 2214458 - RNA, 19 nt, Artificial Sequence
  Description of Artificial Sequence: Synthetic oligonucleotide
  Sense strand starting at position 2021 of SEQ ID NO: 1883761
cgaaguuaauuguugaaag

SEQ ID NO: 2214459 - RNA, 19 nt, Artificial Sequence
  Description of Artificial Sequence: Synthetic oligonucleotide
  Antisense strand to SEQ ID NO: 2214458
cuuucaacaauuaacuucg

SEQ ID NO: 2214460 - RNA, 19 nt, Artificial Sequence
  Description of Artificial Sequence: Synthetic oligonucleotide
  Sense strand starting at position 585 of SEQ ID NO: 1883761
aauugcugucaguaucaga

SEQ ID NO: 2214461 - RNA, 19 nt, Artificial Sequence
  Description of Artificial Sequence: Synthetic oligonucleotide
  Antisense strand to SEQ ID NO: 2214460
ucugauacugacagcaauu

SEQ ID NO: 2214462 - RNA, 19 nt, Artificial Sequence
  Description of Artificial Sequence: Synthetic oligonucleotide
  Sense strand starting at position 2817 of SEQ ID NO: 1883761
uuccaacuggucugaauug

SEQ ID NO: 2214463 - RNA, 19 nt, Artificial Sequence
  Description of Artificial Sequence: Synthetic oligonucleotide
  Antisense strand to SEQ ID NO: 2214462
caauucagaccaguuggaa

SEQ ID NO: 2214464 - RNA, 19 nt, Artificial Sequence
  Description of Artificial Sequence: Synthetic oligonucleotide
  Sense strand starting at position 2236 of SEQ ID NO: 1883761
ucuucuaucuuaguagaua

SEQ ID NO: 2214465 - RNA, 19 nt, Artificial Sequence
  Description of Artificial Sequence: Synthetic oligonucleotide
  Antisense strand to SEQ ID NO: 2214464
uaucuacuaagauagaaga

SEQ ID NO: 2214466 - RNA, 19 nt, Artificial Sequence
  Description of Artificial Sequence: Synthetic oligonucleotide
  Sense strand starting at position 1855 of SEQ ID NO: 1883761
ugugaauaguauccuccaa

SEQ ID NO: 2214467 - RNA, 19 nt, Artificial Sequence
  Description of Artificial Sequence: Synthetic oligonucleotide
  Antisense strand to SEQ ID NO: 2214466
uuggaggauacuauucaca

SEQ ID NO: 2214468 - RNA, 19 nt, Artificial Sequence
  Description of Artificial Sequence: Synthetic oligonucleotide
  Sense strand starting at position 2144 of SEQ ID NO: 1883761
accagaauguuucuaguua

SEQ ID NO: 2214469 - RNA, 19 nt, Artificial Sequence
  Description of Artificial Sequence: Synthetic oligonucleotide
  Antisense strand to SEQ ID NO: 2214468
uaacuagaaacauucuggu

SEQ ID NO: 2214470 - RNA, 19 nt, Artificial Sequence
  Description of Artificial Sequence: Synthetic oligonucleotide
  Sense strand starting at position 2863 of SEQ ID NO: 1883761
augugaauguaauccauuc

SEQ ID NO: 2214471 - RNA, 19 nt, Artificial Sequence
  Description of Artificial Sequence: Synthetic oligonucleotide
  Antisense strand to SEQ ID NO: 2214470
gaauggauuacauucacau

SEQ ID NO: 2214472 - RNA, 19 nt, Artificial Sequence
  Description of Artificial Sequence: Synthetic oligonucleotide
  Sense strand starting at position 2434 of SEQ ID NO: 1883761
ccuacuaguuaaucaaggu

SEQ ID NO: 2214473 - RNA, 19 nt, Artificial Sequence
  Description of Artificial Sequence: Synthetic oligonucleotide
  Antisense strand to SEQ ID NO: 2214472
accuugauuaacuaguagg

SEQ ID NO: 2214474 - RNA, 19 nt, Artificial Sequence
  Description of Artificial Sequence: Synthetic oligonucleotide
  Sense strand starting at position 2907 of SEQ ID NO: 1883761
cagggcucugcagaguaau

SEQ ID NO: 2214475 - RNA, 19 nt, Artificial Sequence
  Description of Artificial Sequence: Synthetic oligonucleotide
  Antisense strand to SEQ ID NO: 2214474
auuacucugcagagcccug

SEQ ID NO: 2214476 - RNA, 19 nt, Artificial Sequence
  Description of Artificial Sequence: Synthetic oligonucleotide
  Sense strand starting at position 2815 of SEQ ID NO: 1883761
ucuuccaacuggucugaau

SEQ ID NO: 2214477 - RNA, 19 nt, Artificial Sequence
  Description of Artificial Sequence: Synthetic oligonucleotide
  Antisense strand to SEQ ID NO: 2214476
auucagaccaguuggaaga

SEQ ID NO: 2214478 - RNA, 19 nt, Artificial Sequence
  Description of Artificial Sequence: Synthetic oligonucleotide
  Sense strand starting at position 132 of SEQ ID NO: 1883761
uuucuacugugaucugaac

SEQ ID NO: 2214479 - RNA, 19 nt, Artificial Sequence
  Description of Artificial Sequence: Synthetic oligonucleotide
  Antisense strand to SEQ ID NO: 2214478
guucagaucacaguagaaa

SEQ ID NO: 2214480 - RNA, 19 nt, Artificial Sequence
  Description of Artificial Sequence: Synthetic oligonucleotide
  Sense strand starting at position 190 of SEQ ID NO: 1883761
guagcaaucuuaucugaag

SEQ ID NO: 2214481 - RNA, 19 nt, Artificial Sequence
  Description of Artificial Sequence: Synthetic oligonucleotide
  Antisense strand to SEQ ID NO: 2214480
cuucagauaagauugcuac

SEQ ID NO: 2214482 - RNA, 19 nt, Artificial Sequence
  Description of Artificial Sequence: Synthetic oligonucleotide
  Sense strand starting at position 1419 of SEQ ID NO: 1883761
ucgagcagugguuacagaa

SEQ ID NO: 2214483 - RNA, 19 nt, Artificial Sequence
  Description of Artificial Sequence: Synthetic oligonucleotide
  Antisense strand to SEQ ID NO: 2214482
uucuguaaccacugcucga

SEQ ID NO: 2214484 - RNA, 19 nt, Artificial Sequence
  Description of Artificial Sequence: Synthetic oligonucleotide
  Sense strand starting at position 3921 of SEQ ID NO: 1883761
cgguuuaaaguauaugcaa

SEQ ID NO: 2214485 - RNA, 19 nt, Artificial Sequence
  Description of Artificial Sequence: Synthetic oligonucleotide
  Antisense strand to SEQ ID NO: 2214484
uugcauauacuuuaaaccg

SEQ ID NO: 2214486 - RNA, 19 nt, Artificial Sequence
  Description of Artificial Sequence: Synthetic oligonucleotide
  Sense strand starting at position 2031 of SEQ ID NO: 1883761
uguugaaaguauccaaggu

SEQ ID NO: 2214487 - RNA, 19 nt, Artificial Sequence
  Description of Artificial Sequence: Synthetic oligonucleotide
  Antisense strand to SEQ ID NO: 2214486
accuuggauacuuucaaca

SEQ ID NO: 2214488 - RNA, 19 nt, Artificial Sequence
  Description of Artificial Sequence: Synthetic oligonucleotide
  Sense strand starting at position 1697 of SEQ ID NO: 1883761
cuacuuaaguguucuauaa

SEQ ID NO: 2214489 - RNA, 19 nt, Artificial Sequence
  Description of Artificial Sequence: Synthetic oligonucleotide
  Antisense strand to SEQ ID NO: 2214488
uuauagaacacuuaaguag

SEQ ID NO: 2214490 - RNA, 19 nt, Artificial Sequence
  Description of Artificial Sequence: Synthetic oligonucleotide
  Sense strand starting at position 172 of SEQ ID NO: 1883761
gcauaugugauccagcuag

SEQ ID NO: 2214491 - RNA, 19 nt, Artificial Sequence
  Description of Artificial Sequence: Synthetic oligonucleotide
  Antisense strand to SEQ ID NO: 2214490
cuagcuggaucacauaugc

SEQ ID NO: 2214492 - RNA, 19 nt, Artificial Sequence
  Description of Artificial Sequence: Synthetic oligonucleotide
  Sense strand starting at position 1801 of SEQ ID NO: 1883762
ccuuuaguauuuguaagua

SEQ ID NO: 2214493 - RNA, 19 nt, Artificial Sequence
  Description of Artificial Sequence: Synthetic oligonucleotide
  Antisense strand to SEQ ID NO: 2214492
uacuuacaaauacuaaagg

SEQ ID NO: 2214494 - RNA, 19 nt, Artificial Sequence
  Description of Artificial Sequence: Synthetic oligonucleotide
  Sense strand starting at position 2687 of SEQ ID NO: 1883762
cagauaucuccggaagggu

SEQ ID NO: 2214495 - RNA, 19 nt, Artificial Sequence
  Description of Artificial Sequence: Synthetic oligonucleotide
  Antisense strand to SEQ ID NO: 2214494
acccuuccggagauaucug

SEQ ID NO: 2214496 - RNA, 19 nt, Artificial Sequence
  Description of Artificial Sequence: Synthetic oligonucleotide
  Sense strand starting at position 3391 of SEQ ID NO: 1883762
ugggaaguucugggaauua

SEQ ID NO: 2214497 - RNA, 19 nt, Artificial Sequence
  Description of Artificial Sequence: Synthetic oligonucleotide
  Antisense strand to SEQ ID NO: 2214496
uaauucccagaacuuccca

SEQ ID NO: 2214498 - RNA, 19 nt, Artificial Sequence
  Description of Artificial Sequence: Synthetic oligonucleotide
  Sense strand starting at position 3141 of SEQ ID NO: 1883762
acaagaggacacugucauu

SEQ ID NO: 2214499 - RNA, 19 nt, Artificial Sequence
  Description of Artificial Sequence: Synthetic oligonucleotide
  Antisense strand to SEQ ID NO: 2214498
aaugacaguguccucuugu

SEQ ID NO: 2214500 - RNA, 19 nt, Artificial Sequence
  Description of Artificial Sequence: Synthetic oligonucleotide
  Sense strand starting at position 3152 of SEQ ID NO: 1883762
cugucauuugccuagucau

SEQ ID NO: 2214501 - RNA, 19 nt, Artificial Sequence
  Description of Artificial Sequence: Synthetic oligonucleotide
  Antisense strand to SEQ ID NO: 2214500
augacuaggcaaaugacag

SEQ ID NO: 2214502 - RNA, 19 nt, Artificial Sequence
  Description of Artificial Sequence: Synthetic oligonucleotide
  Sense strand starting at position 1196 of SEQ ID NO: 1883762
ugcaaaucucggucugugu

SEQ ID NO: 2214503 - RNA, 19 nt, Artificial Sequence
  Description of Artificial Sequence: Synthetic oligonucleotide
  Antisense strand to SEQ ID NO: 2214502
acacagaccgagauuugca

SEQ ID NO: 2214504 - RNA, 19 nt, Artificial Sequence
  Description of Artificial Sequence: Synthetic oligonucleotide
  Sense strand starting at position 2995 of SEQ ID NO: 1883762
ccuagaccgucuuccauuu

SEQ ID NO: 2214505 - RNA, 19 nt, Artificial Sequence
  Description of Artificial Sequence: Synthetic oligonucleotide
  Antisense strand to SEQ ID NO: 2214504
aaauggaagacggucuagg

SEQ ID NO: 2214506 - RNA, 19 nt, Artificial Sequence
  Description of Artificial Sequence: Synthetic oligonucleotide
  Sense strand starting at position 1749 of SEQ ID NO: 1883762
gccuguuaguaauuauuua

SEQ ID NO: 2214507 - RNA, 19 nt, Artificial Sequence
  Description of Artificial Sequence: Synthetic oligonucleotide
  Antisense strand to SEQ ID NO: 2214506
uaaauaauuacuaacaggc

SEQ ID NO: 2214508 - RNA, 19 nt, Artificial Sequence
  Description of Artificial Sequence: Synthetic oligonucleotide
  Sense strand starting at position 1325 of SEQ ID NO: 1883762
uaggaaauaucuucuguga

SEQ ID NO: 2214509 - RNA, 19 nt, Artificial Sequence
  Description of Artificial Sequence: Synthetic oligonucleotide
  Antisense strand to SEQ ID NO: 2214508
ucacagaagauauuuccua

SEQ ID NO: 2214510 - RNA, 19 nt, Artificial Sequence
  Description of Artificial Sequence: Synthetic oligonucleotide
  Sense strand starting at position 3366 of SEQ ID NO: 1883762
gcagauguagagcaaauau

SEQ ID NO: 2214511 - RNA, 19 nt, Artificial Sequence
  Description of Artificial Sequence: Synthetic oligonucleotide
  Antisense strand to SEQ ID NO: 2214510
auauuugcucuacaucugc

SEQ ID NO: 2214512 - RNA, 19 nt, Artificial Sequence
  Description of Artificial Sequence: Synthetic oligonucleotide
  Sense strand starting at position 322 of SEQ ID NO: 1883762
uggcucucccacuaggaua

SEQ ID NO: 2214513 - RNA, 19 nt, Artificial Sequence
  Description of Artificial Sequence: Synthetic oligonucleotide
  Antisense strand to SEQ ID NO: 2214512
uauccuagugggagagcca

SEQ ID NO: 2214514 - RNA, 19 nt, Artificial Sequence
  Description of Artificial Sequence: Synthetic oligonucleotide
  Sense strand starting at position 1881 of SEQ ID NO: 1883762
aagccugugcaggaagaau

SEQ ID NO: 2214515 - RNA, 19 nt, Artificial Sequence
  Description of Artificial Sequence: Synthetic oligonucleotide
  Antisense strand to SEQ ID NO: 2214514
auucuuccugcacaggcuu

SEQ ID NO: 2214516 - RNA, 19 nt, Artificial Sequence
  Description of Artificial Sequence: Synthetic oligonucleotide
  Sense strand starting at position 205 of SEQ ID NO: 1883762
ggaggccagugaucaugaa

SEQ ID NO: 2214517 - RNA, 19 nt, Artificial Sequence
  Description of Artificial Sequence: Synthetic oligonucleotide
  Antisense strand to SEQ ID NO: 2214516
uucaugaucacuggccucc

SEQ ID NO: 2214518 - RNA, 19 nt, Artificial Sequence
  Description of Artificial Sequence: Synthetic oligonucleotide
  Sense strand starting at position 3151 of SEQ ID NO: 1883762
acugucauuugccuaguca

SEQ ID NO: 2214519 - RNA, 19 nt, Artificial Sequence
  Description of Artificial Sequence: Synthetic oligonucleotide
  Antisense strand to SEQ ID NO: 2214518
ugacuaggcaaaugacagu

SEQ ID NO: 2214520 - RNA, 19 nt, Artificial Sequence
  Description of Artificial Sequence: Synthetic oligonucleotide
  Sense strand starting at position 3190 of SEQ ID NO: 1883762
aguguagaauucuugauaa

SEQ ID NO: 2214521 - RNA, 19 nt, Artificial Sequence
  Description of Artificial Sequence: Synthetic oligonucleotide
  Antisense strand to SEQ ID NO: 2214520
uuaucaagaauucuacacu

SEQ ID NO: 2214522 - RNA, 19 nt, Artificial Sequence
  Description of Artificial Sequence: Synthetic oligonucleotide
  Sense strand starting at position 3124 of SEQ ID NO: 1883762
ugcauaauuuccgauuuac

SEQ ID NO: 2214523 - RNA, 19 nt, Artificial Sequence
  Description of Artificial Sequence: Synthetic oligonucleotide
  Antisense strand to SEQ ID NO: 2214522
guaaaucggaaauuaugca

SEQ ID NO: 2214524 - RNA, 19 nt, Artificial Sequence
  Description of Artificial Sequence: Synthetic oligonucleotide
  Sense strand starting at position 1770 of SEQ ID NO: 1883762
aucuauaaguacccaagua

SEQ ID NO: 2214525 - RNA, 19 nt, Artificial Sequence
  Description of Artificial Sequence: Synthetic oligonucleotide
  Antisense strand to SEQ ID NO: 2214524
uacuuggguacuuauagau

SEQ ID NO: 2214526 - RNA, 19 nt, Artificial Sequence
  Description of Artificial Sequence: Synthetic oligonucleotide
  Sense strand starting at position 1526 of SEQ ID NO: 1883762
cuaaguaucuaaguacaua

SEQ ID NO: 2214527 - RNA, 19 nt, Artificial Sequence
  Description of Artificial Sequence: Synthetic oligonucleotide
  Antisense strand to SEQ ID NO: 2214526
uauguacuuagauacuuag

SEQ ID NO: 2214528 - RNA, 19 nt, Artificial Sequence
  Description of Artificial Sequence: Synthetic oligonucleotide
  Sense strand starting at position 1601 of SEQ ID NO: 1883762
ucaguagguacccaaguau

SEQ ID NO: 2214529 - RNA, 19 nt, Artificial Sequence
  Description of Artificial Sequence: Synthetic oligonucleotide
  Antisense strand to SEQ ID NO: 2214528
auacuuggguaccuacuga

SEQ ID NO: 2214530 - RNA, 19 nt, Artificial Sequence
  Description of Artificial Sequence: Synthetic oligonucleotide
  Sense strand starting at position 202 of SEQ ID NO: 1883762
acaggaggccagugaucau

SEQ ID NO: 2214531 - RNA, 19 nt, Artificial Sequence
  Description of Artificial Sequence: Synthetic oligonucleotide
  Antisense strand to SEQ ID NO: 2214530
augaucacuggccuccugu

SEQ ID NO: 2214532 - RNA, 19 nt, Artificial Sequence
  Description of Artificial Sequence: Synthetic oligonucleotide
  Sense strand starting at position 1473 of SEQ ID NO: 1883762
ggugaagaguaucuguaag

SEQ ID NO: 2214533 - RNA, 19 nt, Artificial Sequence
  Description of Artificial Sequence: Synthetic oligonucleotide
  Antisense strand to SEQ ID NO: 2214532
cuuacagauacucuucacc

SEQ ID NO: 2214534 - RNA, 19 nt, Artificial Sequence
  Description of Artificial Sequence: Synthetic oligonucleotide
  Sense strand starting at position 3377 of SEQ ID NO: 1883762
gcaaauaucuccuuuggga

SEQ ID NO: 2214535 - RNA, 19 nt, Artificial Sequence
  Description of Artificial Sequence: Synthetic oligonucleotide
  Antisense strand to SEQ ID NO: 2214534
ucccaaaggagauauuugc

SEQ ID NO: 2214536 - RNA, 19 nt, Artificial Sequence
  Description of Artificial Sequence: Synthetic oligonucleotide
  Sense strand starting at position 2685 of SEQ ID NO: 1883762
ggcagauaucuccggaagg

SEQ ID NO: 2214537 - RNA, 19 nt, Artificial Sequence
  Description of Artificial Sequence: Synthetic oligonucleotide
  Antisense strand to SEQ ID NO: 2214536
ccuuccggagauaucugcc

SEQ ID NO: 2214538 - RNA, 19 nt, Artificial Sequence
  Description of Artificial Sequence: Synthetic oligonucleotide
  Sense strand starting at position 1475 of SEQ ID NO: 1883762
ugaagaguaucuguaagua

SEQ ID NO: 2214539 - RNA, 19 nt, Artificial Sequence
  Description of Artificial Sequence: Synthetic oligonucleotide
  Antisense strand to SEQ ID NO: 2214538
uacuuacagauacucuuca

SEQ ID NO: 2214540 - RNA, 19 nt, Artificial Sequence
  Description of Artificial Sequence: Synthetic oligonucleotide
  Sense strand starting at position 1561 of SEQ ID NO: 1883762
gucuauaauuacccaagua

SEQ ID NO: 2214541 - RNA, 19 nt, Artificial Sequence
  Description of Artificial Sequence: Synthetic oligonucleotide
  Antisense strand to SEQ ID NO: 2214540
uacuuggguaauuauagac

SEQ ID NO: 2214542 - RNA, 19 nt, Artificial Sequence
  Description of Artificial Sequence: Synthetic oligonucleotide
  Sense strand starting at position 1522 of SEQ ID NO: 1883762
aucccuaaguaucuaagua

SEQ ID NO: 2214543 - RNA, 19 nt, Artificial Sequence
  Description of Artificial Sequence: Synthetic oligonucleotide
  Antisense strand to SEQ ID NO: 2214542
uacuuagauacuuagggau

SEQ ID NO: 2214544 - RNA, 19 nt, Artificial Sequence
  Description of Artificial Sequence: Synthetic oligonucleotide
  Sense strand starting at position 1848 of SEQ ID NO: 1883762
guaaguaccuaaguaacua

SEQ ID NO: 2214545 - RNA, 19 nt, Artificial Sequence
  Description of Artificial Sequence: Synthetic oligonucleotide
  Antisense strand to SEQ ID NO: 2214544
uaguuacuuagguacuuac

SEQ ID NO: 2214546 - RNA, 19 nt, Artificial Sequence
  Description of Artificial Sequence: Synthetic oligonucleotide
  Sense strand starting at position 660 of SEQ ID NO: 1883762
gaguaucaugcuggacuga

SEQ ID NO: 2214547 - RNA, 19 nt, Artificial Sequence
  Description of Artificial Sequence: Synthetic oligonucleotide
  Antisense strand to SEQ ID NO: 2214546
ucaguccagcaugauacuc

SEQ ID NO: 2214548 - RNA, 19 nt, Artificial Sequence
  Description of Artificial Sequence: Synthetic oligonucleotide
  Sense strand starting at position 926 of SEQ ID NO: 1883762
gccugugagacaggaguaa

SEQ ID NO: 2214549 - RNA, 19 nt, Artificial Sequence
  Description of Artificial Sequence: Synthetic oligonucleotide
  Antisense strand to SEQ ID NO: 2214548
uuacuccugucucacaggc

SEQ ID NO: 2214550 - RNA, 19 nt, Artificial Sequence
  Description of Artificial Sequence: Synthetic oligonucleotide
  Sense strand starting at position 1560 of SEQ ID NO: 1883762
ugucuauaauuacccaagu

SEQ ID NO: 2214551 - RNA, 19 nt, Artificial Sequence
  Description of Artificial Sequence: Synthetic oligonucleotide
  Antisense strand to SEQ ID NO: 2214550
acuuggguaauuauagaca

SEQ ID NO: 2214552 - RNA, 19 nt, Artificial Sequence
  Description of Artificial Sequence: Synthetic oligonucleotide
  Sense strand starting at position 1061 of SEQ ID NO: 1883762
uagcauccucagggaaguu

SEQ ID NO: 2214553 - RNA, 19 nt, Artificial Sequence
  Description of Artificial Sequence: Synthetic oligonucleotide
  Antisense strand to SEQ ID NO: 2214552
aacuucccugaggaugcua

SEQ ID NO: 2214554 - RNA, 19 nt, Artificial Sequence
  Description of Artificial Sequence: Synthetic oligonucleotide
  Sense strand starting at position 2626 of SEQ ID NO: 1883762
ugcauugugcauuaaugga

SEQ ID NO: 2214555 - RNA, 19 nt, Artificial Sequence
  Description of Artificial Sequence: Synthetic oligonucleotide
  Antisense strand to SEQ ID NO: 2214554
uccauuaaugcacaaugca

SEQ ID NO: 2214556 - RNA, 19 nt, Artificial Sequence
  Description of Artificial Sequence: Synthetic oligonucleotide
  Sense strand starting at position 1780 of SEQ ID NO: 1883762
acccaaguaucuguaagua

SEQ ID NO: 2214557 - RNA, 19 nt, Artificial Sequence
  Description of Artificial Sequence: Synthetic oligonucleotide
  Antisense strand to SEQ ID NO: 2214556
uacuuacagauacuugggu

SEQ ID NO: 2214558 - RNA, 19 nt, Artificial Sequence
  Description of Artificial Sequence: Synthetic oligonucleotide
  Sense strand starting at position 1844 of SEQ ID NO: 1883762
aucuguaaguaccuaagua

SEQ ID NO: 2214559 - RNA, 19 nt, Artificial Sequence
  Description of Artificial Sequence: Synthetic oligonucleotide
  Antisense strand to SEQ ID NO: 2214558
uacuuagguacuuacagau

SEQ ID NO: 2214560 - RNA, 19 nt, Artificial Sequence
  Description of Artificial Sequence: Synthetic oligonucleotide
  Sense strand starting at position 3359 of SEQ ID NO: 1883762
auuguaugcagauguagag

SEQ ID NO: 2214561 - RNA, 19 nt, Artificial Sequence
  Description of Artificial Sequence: Synthetic oligonucleotide
  Antisense strand to SEQ ID NO: 2214560
cucuacaucugcauacaau

SEQ ID NO: 2214562 - RNA, 19 nt, Artificial Sequence
  Description of Artificial Sequence: Synthetic oligonucleotide
  Sense strand starting at position 3332 of SEQ ID NO: 1883762
auacuccagugguuucuaa

SEQ ID NO: 2214563 - RNA, 19 nt, Artificial Sequence
  Description of Artificial Sequence: Synthetic oligonucleotide
  Antisense strand to SEQ ID NO: 2214562
uuagaaaccacuggaguau

SEQ ID NO: 2214564 - RNA, 19 nt, Artificial Sequence
  Description of Artificial Sequence: Synthetic oligonucleotide
  Sense strand starting at position 3470 of SEQ ID NO: 1883762
guaguccgaggucauauua

SEQ ID NO: 2214565 - RNA, 19 nt, Artificial Sequence
  Description of Artificial Sequence: Synthetic oligonucleotide
  Antisense strand to SEQ ID NO: 2214564
uaauaugaccucggacuac

SEQ ID NO: 2214566 - RNA, 19 nt, Artificial Sequence
  Description of Artificial Sequence: Synthetic oligonucleotide
  Sense strand starting at position 108 of SEQ ID NO: 1883762
gaggcaugaaggugcaauu

SEQ ID NO: 2214567 - RNA, 19 nt, Artificial Sequence
  Description of Artificial Sequence: Synthetic oligonucleotide
  Antisense strand to SEQ ID NO: 2214566
aauugcaccuucaugccuc

SEQ ID NO: 2214568 - RNA, 19 nt, Artificial Sequence
  Description of Artificial Sequence: Synthetic oligonucleotide
  Sense strand starting at position 3123 of SEQ ID NO: 1883762
cugcauaauuuccgauuua

SEQ ID NO: 2214569 - RNA, 19 nt, Artificial Sequence
  Description of Artificial Sequence: Synthetic oligonucleotide
  Antisense strand to SEQ ID NO: 2214568
uaaaucggaaauuaugcag

SEQ ID NO: 2214570 - RNA, 19 nt, Artificial Sequence
  Description of Artificial Sequence: Synthetic oligonucleotide
  Sense strand starting at position 1293 of SEQ ID NO: 1883762
gggccaaugaguggucaca

SEQ ID NO: 2214571 - RNA, 19 nt, Artificial Sequence
  Description of Artificial Sequence: Synthetic oligonucleotide
  Antisense strand to SEQ ID NO: 2214570
ugugaccacucauuggccc

SEQ ID NO: 2214572 - RNA, 19 nt, Artificial Sequence
  Description of Artificial Sequence: Synthetic oligonucleotide
  Sense strand starting at position 1325 of SEQ ID NO: 1883763
ccacuuagagcuuaaugac

SEQ ID NO: 2214573 - RNA, 19 nt, Artificial Sequence
  Description of Artificial Sequence: Synthetic oligonucleotide
  Antisense strand to SEQ ID NO: 2214572
gucauuaagcucuaagugg

SEQ ID NO: 2214574 - RNA, 19 nt, Artificial Sequence
  Description of Artificial Sequence: Synthetic oligonucleotide
  Sense strand starting at position 1125 of SEQ ID NO: 1883763
ugcagauugguggaacuga

SEQ ID NO: 2214575 - RNA, 19 nt, Artificial Sequence
  Description of Artificial Sequence: Synthetic oligonucleotide
  Antisense strand to SEQ ID NO: 2214574
ucaguuccaccaaucugca

SEQ ID NO: 2214576 - RNA, 19 nt, Artificial Sequence
  Description of Artificial Sequence: Synthetic oligonucleotide
  Sense strand starting at position 1248 of SEQ ID NO: 1883763
guuucuggaagugauggau

SEQ ID NO: 2214577 - RNA, 19 nt, Artificial Sequence
  Description of Artificial Sequence: Synthetic oligonucleotide
  Antisense strand to SEQ ID NO: 2214576
auccaucacuuccagaaac

SEQ ID NO: 2214578 - RNA, 19 nt, Artificial Sequence
  Description of Artificial Sequence: Synthetic oligonucleotide
  Sense strand starting at position 3670 of SEQ ID NO: 1883763
ggugucuccgcugaaauuu

SEQ ID NO: 2214579 - RNA, 19 nt, Artificial Sequence
  Description of Artificial Sequence: Synthetic oligonucleotide
  Antisense strand to SEQ ID NO: 2214578
aaauuucagcggagacacc

SEQ ID NO: 2214580 - RNA, 19 nt, Artificial Sequence
  Description of Artificial Sequence: Synthetic oligonucleotide
  Sense strand starting at position 2937 of SEQ ID NO: 1883763
ucaguuaugaguggaagag

SEQ ID NO: 2214581 - RNA, 19 nt, Artificial Sequence
  Description of Artificial Sequence: Synthetic oligonucleotide
  Antisense strand to SEQ ID NO: 2214580
cucuuccacucauaacuga

SEQ ID NO: 2214582 - RNA, 19 nt, Artificial Sequence
  Description of Artificial Sequence: Synthetic oligonucleotide
  Sense strand starting at position 224 of SEQ ID NO: 1883763
ucugaaucuguugauucua

SEQ ID NO: 2214583 - RNA, 19 nt, Artificial Sequence
  Description of Artificial Sequence: Synthetic oligonucleotide
  Antisense strand to SEQ ID NO: 2214582
uagaaucaacagauucaga

SEQ ID NO: 2214584 - RNA, 19 nt, Artificial Sequence
  Description of Artificial Sequence: Synthetic oligonucleotide
  Sense strand starting at position 2396 of SEQ ID NO: 1883763
gugugaagugugagcuacu

SEQ ID NO: 2214585 - RNA, 19 nt, Artificial Sequence
  Description of Artificial Sequence: Synthetic oligonucleotide
  Antisense strand to SEQ ID NO: 2214584
aguagcucacacuucacac

SEQ ID NO: 2214586 - RNA, 19 nt, Artificial Sequence
  Description of Artificial Sequence: Synthetic oligonucleotide
  Sense strand starting at position 226 of SEQ ID NO: 1883763
ugaaucuguugauucuaga

SEQ ID NO: 2214587 - RNA, 19 nt, Artificial Sequence
  Description of Artificial Sequence: Synthetic oligonucleotide
  Antisense strand to SEQ ID NO: 2214586
ucuagaaucaacagauuca

SEQ ID NO: 2214588 - RNA, 19 nt, Artificial Sequence
  Description of Artificial Sequence: Synthetic oligonucleotide
  Sense strand starting at position 911 of SEQ ID NO: 1883763
aaugcauuccugcaggaug

SEQ ID NO: 2214589 - RNA, 19 nt, Artificial Sequence
  Description of Artificial Sequence: Synthetic oligonucleotide
  Antisense strand to SEQ ID NO: 2214588
cauccugcaggaaugcauu

SEQ ID NO: 2214590 - RNA, 19 nt, Artificial Sequence
  Description of Artificial Sequence: Synthetic oligonucleotide
  Sense strand starting at position 2468 of SEQ ID NO: 1883763
auguuuagcccaggaagga

SEQ ID NO: 2214591 - RNA, 19 nt, Artificial Sequence
  Description of Artificial Sequence: Synthetic oligonucleotide
  Antisense strand to SEQ ID NO: 2214590
uccuuccugggcuaaacau

SEQ ID NO: 2214592 - RNA, 19 nt, Artificial Sequence
  Description of Artificial Sequence: Synthetic oligonucleotide
  Sense strand starting at position 2399 of SEQ ID NO: 1883763
ugaagugugagcuacuuga

SEQ ID NO: 2214593 - RNA, 19 nt, Artificial Sequence
  Description of Artificial Sequence: Synthetic oligonucleotide
  Antisense strand to SEQ ID NO: 2214592
ucaaguagcucacacuuca

SEQ ID NO: 2214594 - RNA, 19 nt, Artificial Sequence
  Description of Artificial Sequence: Synthetic oligonucleotide
  Sense strand starting at position 626 of SEQ ID NO: 1883763
aagguaguggucugaauag

SEQ ID NO: 2214595 - RNA, 19 nt, Artificial Sequence
  Description of Artificial Sequence: Synthetic oligonucleotide
  Antisense strand to SEQ ID NO: 2214594
cuauucagaccacuaccuu

SEQ ID NO: 2214596 - RNA, 19 nt, Artificial Sequence
  Description of Artificial Sequence: Synthetic oligonucleotide
  Sense strand starting at position 2936 of SEQ ID NO: 1883763
gucaguuaugaguggaaga

SEQ ID NO: 2214597 - RNA, 19 nt, Artificial Sequence
  Description of Artificial Sequence: Synthetic oligonucleotide
  Antisense strand to SEQ ID NO: 2214596
ucuuccacucauaacugac

SEQ ID NO: 2214598 - RNA, 19 nt, Artificial Sequence
  Description of Artificial Sequence: Synthetic oligonucleotide
  Sense strand starting at position 2381 of SEQ ID NO: 1883763
agaugucaugaguaggugu

SEQ ID NO: 2214599 - RNA, 19 nt, Artificial Sequence
  Description of Artificial Sequence: Synthetic oligonucleotide
  Antisense strand to SEQ ID NO: 2214598
acaccuacucaugacaucu

SEQ ID NO: 2214600 - RNA, 19 nt, Artificial Sequence
  Description of Artificial Sequence: Synthetic oligonucleotide
  Sense strand starting at position 1563 of SEQ ID NO: 1883763
cuagacguaugguuauaaa

SEQ ID NO: 2214601 - RNA, 19 nt, Artificial Sequence
  Description of Artificial Sequence: Synthetic oligonucleotide
  Antisense strand to SEQ ID NO: 2214600
uuuauaaccauacgucuag

SEQ ID NO: 2214602 - RNA, 19 nt, Artificial Sequence
  Description of Artificial Sequence: Synthetic oligonucleotide
  Sense strand starting at position 1026 of SEQ ID NO: 1883763
caucacugguggucucaga

SEQ ID NO: 2214603 - RNA, 19 nt, Artificial Sequence
  Description of Artificial Sequence: Synthetic oligonucleotide
  Antisense strand to SEQ ID NO: 2214602
ucugagaccaccagugaug

SEQ ID NO: 2214604 - RNA, 19 nt, Artificial Sequence
  Description of Artificial Sequence: Synthetic oligonucleotide
  Sense strand starting at position 221 of SEQ ID NO: 1883763
cucucugaaucuguugauu

SEQ ID NO: 2214605 - RNA, 19 nt, Artificial Sequence
  Description of Artificial Sequence: Synthetic oligonucleotide
  Antisense strand to SEQ ID NO: 2214604
aaucaacagauucagagag

SEQ ID NO: 2214606 - RNA, 19 nt, Artificial Sequence
  Description of Artificial Sequence: Synthetic oligonucleotide
  Sense strand starting at position 1409 of SEQ ID NO: 1883763
gacuaaggcucauccaguu

SEQ ID NO: 2214607 - RNA, 19 nt, Artificial Sequence
  Description of Artificial Sequence: Synthetic oligonucleotide
  Antisense strand to SEQ ID NO: 2214606
aacuggaugagccuuaguc

SEQ ID NO: 2214608 - RNA, 19 nt, Artificial Sequence
  Description of Artificial Sequence: Synthetic oligonucleotide
  Sense strand starting at position 3718 of SEQ ID NO: 1883763
uguuuaauugguggugaaa

SEQ ID NO: 2214609 - RNA, 19 nt, Artificial Sequence
  Description of Artificial Sequence: Synthetic oligonucleotide
  Antisense strand to SEQ ID NO: 2214608
uuucaccaccaauuaaaca

SEQ ID NO: 2214610 - RNA, 19 nt, Artificial Sequence
  Description of Artificial Sequence: Synthetic oligonucleotide
  Sense strand starting at position 644 of SEQ ID NO: 1883763
gugucuguugagcaaauga

SEQ ID NO: 2214611 - RNA, 19 nt, Artificial Sequence
  Description of Artificial Sequence: Synthetic oligonucleotide
  Antisense strand to SEQ ID NO: 2214610
ucauuugcucaacagacac

SEQ ID NO: 2214612 - RNA, 19 nt, Artificial Sequence
  Description of Artificial Sequence: Synthetic oligonucleotide
  Sense strand starting at position 1100 of SEQ ID NO: 1883763
aagagucuguuccuguaaa

SEQ ID NO: 2214613 - RNA, 19 nt, Artificial Sequence
  Description of Artificial Sequence: Synthetic oligonucleotide
  Antisense strand to SEQ ID NO: 2214612
uuuacaggaacagacucuu

SEQ ID NO: 2214614 - RNA, 19 nt, Artificial Sequence
  Description of Artificial Sequence: Synthetic oligonucleotide
  Sense strand starting at position 3265 of SEQ ID NO: 1883763
gagacucacuugcuuggua

SEQ ID NO: 2214615 - RNA, 19 nt, Artificial Sequence
  Description of Artificial Sequence: Synthetic oligonucleotide
  Antisense strand to SEQ ID NO: 2214614
uaccaagcaagugagucuc

SEQ ID NO: 2214616 - RNA, 19 nt, Artificial Sequence
  Description of Artificial Sequence: Synthetic oligonucleotide
  Sense strand starting at position 1247 of SEQ ID NO: 1883763
cguuucuggaagugaugga

SEQ ID NO: 2214617 - RNA, 19 nt, Artificial Sequence
  Description of Artificial Sequence: Synthetic oligonucleotide
  Antisense strand to SEQ ID NO: 2214616
uccaucacuuccagaaacg

SEQ ID NO: 2214618 - RNA, 19 nt, Artificial Sequence
  Description of Artificial Sequence: Synthetic oligonucleotide
  Sense strand starting at position 2574 of SEQ ID NO: 1883763
ccagcagcuccuugggaaa

SEQ ID NO: 2214619 - RNA, 19 nt, Artificial Sequence
  Description of Artificial Sequence: Synthetic oligonucleotide
  Antisense strand to SEQ ID NO: 2214618
uuucccaaggagcugcugg

SEQ ID NO: 2214620 - RNA, 19 nt, Artificial Sequence
  Description of Artificial Sequence: Synthetic oligonucleotide
  Sense strand starting at position 1098 of SEQ ID NO: 1883763
ggaagagucuguuccugua

SEQ ID NO: 2214621 - RNA, 19 nt, Artificial Sequence
  Description of Artificial Sequence: Synthetic oligonucleotide
  Antisense strand to SEQ ID NO: 2214620
uacaggaacagacucuucc

SEQ ID NO: 2214622 - RNA, 19 nt, Artificial Sequence
  Description of Artificial Sequence: Synthetic oligonucleotide
  Sense strand starting at position 3261 of SEQ ID NO: 1883763
gcaagagacucacuugcuu

SEQ ID NO: 2214623 - RNA, 19 nt, Artificial Sequence
  Description of Artificial Sequence: Synthetic oligonucleotide
  Antisense strand to SEQ ID NO: 2214622
aagcaagugagucucuugc

SEQ ID NO: 2214624 - RNA, 19 nt, Artificial Sequence
  Description of Artificial Sequence: Synthetic oligonucleotide
  Sense strand starting at position 2384 of SEQ ID NO: 1883763
ugucaugaguaggugugaa

SEQ ID NO: 2214625 - RNA, 19 nt, Artificial Sequence
  Description of Artificial Sequence: Synthetic oligonucleotide
  Antisense strand to SEQ ID NO: 2214624
uucacaccuacucaugaca

SEQ ID NO: 2214626 - RNA, 19 nt, Artificial Sequence
  Description of Artificial Sequence: Synthetic oligonucleotide
  Sense strand starting at position 637 of SEQ ID NO: 1883763
cugaauagugucuguugag

SEQ ID NO: 2214627 - RNA, 19 nt, Artificial Sequence
  Description of Artificial Sequence: Synthetic oligonucleotide
  Antisense strand to SEQ ID NO: 2214626
cucaacagacacuauucag

SEQ ID NO: 2214628 - RNA, 19 nt, Artificial Sequence
  Description of Artificial Sequence: Synthetic oligonucleotide
  Sense strand starting at position 2383 of SEQ ID NO: 1883763
augucaugaguagguguga

SEQ ID NO: 2214629 - RNA, 19 nt, Artificial Sequence
  Description of Artificial Sequence: Synthetic oligonucleotide
  Antisense strand to SEQ ID NO: 2214628
ucacaccuacucaugacau

SEQ ID NO: 2214630 - RNA, 19 nt, Artificial Sequence
  Description of Artificial Sequence: Synthetic oligonucleotide
  Sense strand starting at position 636 of SEQ ID NO: 1883763
ucugaauagugucuguuga

SEQ ID NO: 2214631 - RNA, 19 nt, Artificial Sequence
  Description of Artificial Sequence: Synthetic oligonucleotide
  Antisense strand to SEQ ID NO: 2214630
ucaacagacacuauucaga

SEQ ID NO: 2214632 - RNA, 19 nt, Artificial Sequence
  Description of Artificial Sequence: Synthetic oligonucleotide
  Sense strand starting at position 2169 of SEQ ID NO: 1883763
cuaucuagugagugagcau

SEQ ID NO: 2214633 - RNA, 19 nt, Artificial Sequence
  Description of Artificial Sequence: Synthetic oligonucleotide
  Antisense strand to SEQ ID NO: 2214632
augcucacucacuagauag

SEQ ID NO: 2214634 - RNA, 19 nt, Artificial Sequence
  Description of Artificial Sequence: Synthetic oligonucleotide
  Sense strand starting at position 2928 of SEQ ID NO: 1883763
cccacaucgucaguuauga

SEQ ID NO: 2214635 - RNA, 19 nt, Artificial Sequence
  Description of Artificial Sequence: Synthetic oligonucleotide
  Antisense strand to SEQ ID NO: 2214634
ucauaacugacgauguggg

SEQ ID NO: 2214636 - RNA, 19 nt, Artificial Sequence
  Description of Artificial Sequence: Synthetic oligonucleotide
  Sense strand starting at position 1558 of SEQ ID NO: 1883763
uggcucuagacguaugguu

SEQ ID NO: 2214637 - RNA, 19 nt, Artificial Sequence
  Description of Artificial Sequence: Synthetic oligonucleotide
  Antisense strand to SEQ ID NO: 2214636
aaccauacgucuagagcca

SEQ ID NO: 2214638 - RNA, 19 nt, Artificial Sequence
  Description of Artificial Sequence: Synthetic oligonucleotide
  Sense strand starting at position 3716 of SEQ ID NO: 1883763
gguguuuaauuggugguga

SEQ ID NO: 2214639 - RNA, 19 nt, Artificial Sequence
  Description of Artificial Sequence: Synthetic oligonucleotide
  Antisense strand to SEQ ID NO: 2214638
ucaccaccaauuaaacacc

SEQ ID NO: 2214640 - RNA, 19 nt, Artificial Sequence
  Description of Artificial Sequence: Synthetic oligonucleotide
  Sense strand starting at position 1113 of SEQ ID NO: 1883763
uguaaaguaguuugcagau

SEQ ID NO: 2214641 - RNA, 19 nt, Artificial Sequence
  Description of Artificial Sequence: Synthetic oligonucleotide
  Antisense strand to SEQ ID NO: 2214640
aucugcaaacuacuuuaca

SEQ ID NO: 2214642 - RNA, 19 nt, Artificial Sequence
  Description of Artificial Sequence: Synthetic oligonucleotide
  Sense strand starting at position 1930 of SEQ ID NO: 1883763
guucuauuagguugaugca

SEQ ID NO: 2214643 - RNA, 19 nt, Artificial Sequence
  Description of Artificial Sequence: Synthetic oligonucleotide
  Antisense strand to SEQ ID NO: 2214642
ugcaucaaccuaauagaac

SEQ ID NO: 2214644 - RNA, 19 nt, Artificial Sequence
  Description of Artificial Sequence: Synthetic oligonucleotide
  Sense strand starting at position 2836 of SEQ ID NO: 1883763
gucacaagaucucuucgca

SEQ ID NO: 2214645 - RNA, 19 nt, Artificial Sequence
  Description of Artificial Sequence: Synthetic oligonucleotide
  Antisense strand to SEQ ID NO: 2214644
ugcgaagagaucuugugac

SEQ ID NO: 2214646 - RNA, 19 nt, Artificial Sequence
  Description of Artificial Sequence: Synthetic oligonucleotide
  Sense strand starting at position 1040 of SEQ ID NO: 1883763
ucagaaaucucugaagauu

SEQ ID NO: 2214647 - RNA, 19 nt, Artificial Sequence
  Description of Artificial Sequence: Synthetic oligonucleotide
  Antisense strand to SEQ ID NO: 2214646
aaucuucagagauuucuga

SEQ ID NO: 2214648 - RNA, 19 nt, Artificial Sequence
  Description of Artificial Sequence: Synthetic oligonucleotide
  Sense strand starting at position 1494 of SEQ ID NO: 1883763
cccagcgacuguguuagaa

SEQ ID NO: 2214649 - RNA, 19 nt, Artificial Sequence
  Description of Artificial Sequence: Synthetic oligonucleotide
  Antisense strand to SEQ ID NO: 2214648
uucuaacacagucgcuggg

SEQ ID NO: 2214650 - RNA, 19 nt, Artificial Sequence
  Description of Artificial Sequence: Synthetic oligonucleotide
  Sense strand starting at position 2394 of SEQ ID NO: 1883763
aggugugaagugugagcua

SEQ ID NO: 2214651 - RNA, 19 nt, Artificial Sequence
  Description of Artificial Sequence: Synthetic oligonucleotide
  Antisense strand to SEQ ID NO: 2214650
uagcucacacuucacaccu

SEQ ID NO: 2214652 - RNA, 19 nt, Artificial Sequence
  Description of Artificial Sequence: Synthetic oligonucleotide
  Sense strand starting at position 1007 of SEQ ID NO: 1883764
ccugguaugcuggaaagga

SEQ ID NO: 2214653 - RNA, 19 nt, Artificial Sequence
  Description of Artificial Sequence: Synthetic oligonucleotide
  Antisense strand to SEQ ID NO: 2214652
uccuuuccagcauaccagg

SEQ ID NO: 2214654 - RNA, 19 nt, Artificial Sequence
  Description of Artificial Sequence: Synthetic oligonucleotide
  Sense strand starting at position 702 of SEQ ID NO: 1883764
caaaguacccuugggaaca

SEQ ID NO: 2214655 - RNA, 19 nt, Artificial Sequence
  Description of Artificial Sequence: Synthetic oligonucleotide
  Antisense strand to SEQ ID NO: 2214654
uguucccaaggguacuuug

SEQ ID NO: 2214656 - RNA, 19 nt, Artificial Sequence
  Description of Artificial Sequence: Synthetic oligonucleotide
  Sense strand starting at position 393 of SEQ ID NO: 1883764
agggaaagguuucuaucca

SEQ ID NO: 2214657 - RNA, 19 nt, Artificial Sequence
  Description of Artificial Sequence: Synthetic oligonucleotide
  Antisense strand to SEQ ID NO: 2214656
uggauagaaaccuuucccu

SEQ ID NO: 2214658 - RNA, 19 nt, Artificial Sequence
  Description of Artificial Sequence: Synthetic oligonucleotide
  Sense strand starting at position 3748 of SEQ ID NO: 1883764
cuucccuuccuggagaacu

SEQ ID NO: 2214659 - RNA, 19 nt, Artificial Sequence
  Description of Artificial Sequence: Synthetic oligonucleotide
  Antisense strand to SEQ ID NO: 2214658
aguucuccaggaagggaag

SEQ ID NO: 2214660 - RNA, 19 nt, Artificial Sequence
  Description of Artificial Sequence: Synthetic oligonucleotide
  Sense strand starting at position 1042 of SEQ ID NO: 1883764
ggagacagcuccucagaga

SEQ ID NO: 2214661 - RNA, 19 nt, Artificial Sequence
  Description of Artificial Sequence: Synthetic oligonucleotide
  Antisense strand to SEQ ID NO: 2214660
ucucugaggagcugucucc

SEQ ID NO: 2214662 - RNA, 19 nt, Artificial Sequence
  Description of Artificial Sequence: Synthetic oligonucleotide
  Sense strand starting at position 3413 of SEQ ID NO: 1883764
auaagccaauggucagaaa

SEQ ID NO: 2214663 - RNA, 19 nt, Artificial Sequence
  Description of Artificial Sequence: Synthetic oligonucleotide
  Antisense strand to SEQ ID NO: 2214662
uuucugaccauuggcuuau

SEQ ID NO: 2214664 - RNA, 19 nt, Artificial Sequence
  Description of Artificial Sequence: Synthetic oligonucleotide
  Sense strand starting at position 1689 of SEQ ID NO: 1883764
guaaauuacagguggagac

SEQ ID NO: 2214665 - RNA, 19 nt, Artificial Sequence
  Description of Artificial Sequence: Synthetic oligonucleotide
  Antisense strand to SEQ ID NO: 2214664
gucuccaccuguaauuuac

SEQ ID NO: 2214666 - RNA, 19 nt, Artificial Sequence
  Description of Artificial Sequence: Synthetic oligonucleotide
  Sense strand starting at position 3732 of SEQ ID NO: 1883764
ccguuaucugguccugcuu

SEQ ID NO: 2214667 - RNA, 19 nt, Artificial Sequence
  Description of Artificial Sequence: Synthetic oligonucleotide
  Antisense strand to SEQ ID NO: 2214666
aagcaggaccagauaacgg

SEQ ID NO: 2214668 - RNA, 19 nt, Artificial Sequence
  Description of Artificial Sequence: Synthetic oligonucleotide
  Sense strand starting at position 1959 of SEQ ID NO: 1883764
acaagagccuuccuaugaa

SEQ ID NO: 2214669 - RNA, 19 nt, Artificial Sequence
  Description of Artificial Sequence: Synthetic oligonucleotide
  Antisense strand to SEQ ID NO: 2214668
uucauaggaaggcucuugu

SEQ ID NO: 2214670 - RNA, 19 nt, Artificial Sequence
  Description of Artificial Sequence: Synthetic oligonucleotide
  Sense strand starting at position 1814 of SEQ ID NO: 1883764
uuagguuagagucaagcaa

SEQ ID NO: 2214671 - RNA, 19 nt, Artificial Sequence
  Description of Artificial Sequence: Synthetic oligonucleotide
  Antisense strand to SEQ ID NO: 2214670
uugcuugacucuaaccuaa

SEQ ID NO: 2214672 - RNA, 19 nt, Artificial Sequence
  Description of Artificial Sequence: Synthetic oligonucleotide
  Sense strand starting at position 2221 of SEQ ID NO: 1883764
gaggcacuucuguaccaga

SEQ ID NO: 2214673 - RNA, 19 nt, Artificial Sequence
  Description of Artificial Sequence: Synthetic oligonucleotide
  Antisense strand to SEQ ID NO: 2214672
ucugguacagaagugccuc

SEQ ID NO: 2214674 - RNA, 19 nt, Artificial Sequence
  Description of Artificial Sequence: Synthetic oligonucleotide
  Sense strand starting at position 3529 of SEQ ID NO: 1883764
cagacaugguccuccauag

SEQ ID NO: 2214675 - RNA, 19 nt, Artificial Sequence
  Description of Artificial Sequence: Synthetic oligonucleotide
  Antisense strand to SEQ ID NO: 2214674
cuauggaggaccaugucug

SEQ ID NO: 2214676 - RNA, 19 nt, Artificial Sequence
  Description of Artificial Sequence: Synthetic oligonucleotide
  Sense strand starting at position 3848 of SEQ ID NO: 1883764
auucuaucaccugggacuu

SEQ ID NO: 2214677 - RNA, 19 nt, Artificial Sequence
  Description of Artificial Sequence: Synthetic oligonucleotide
  Antisense strand to SEQ ID NO: 2214676
aagucccaggugauagaau

SEQ ID NO: 2214678 - RNA, 19 nt, Artificial Sequence
  Description of Artificial Sequence: Synthetic oligonucleotide
  Sense strand starting at position 2289 of SEQ ID NO: 1883764
uucuguaucccugaccuga

SEQ ID NO: 2214679 - RNA, 19 nt, Artificial Sequence
  Description of Artificial Sequence: Synthetic oligonucleotide
  Antisense strand to SEQ ID NO: 2214678
ucaggucagggauacagaa

SEQ ID NO: 2214680 - RNA, 19 nt, Artificial Sequence
  Description of Artificial Sequence: Synthetic oligonucleotide
  Sense strand starting at position 3504 of SEQ ID NO: 1883764
aacggaaaggcguaacuua

SEQ ID NO: 2214681 - RNA, 19 nt, Artificial Sequence
  Description of Artificial Sequence: Synthetic oligonucleotide
  Antisense strand to SEQ ID NO: 2214680
uaaguuacgccuuuccguu

SEQ ID NO: 2214682 - RNA, 19 nt, Artificial Sequence
  Description of Artificial Sequence: Synthetic oligonucleotide
  Sense strand starting at position 2925 of SEQ ID NO: 1883764
agaccaugcucagcagaaa

SEQ ID NO: 2214683 - RNA, 19 nt, Artificial Sequence
  Description of Artificial Sequence: Synthetic oligonucleotide
  Antisense strand to SEQ ID NO: 2214682
uuucugcugagcauggucu

SEQ ID NO: 2214684 - RNA, 19 nt, Artificial Sequence
  Description of Artificial Sequence: Synthetic oligonucleotide
  Sense strand starting at position 39 of SEQ ID NO: 1883764
ggaugaaggccagguaucu

SEQ ID NO: 2214685 - RNA, 19 nt, Artificial Sequence
  Description of Artificial Sequence: Synthetic oligonucleotide
  Antisense strand to SEQ ID NO: 2214684
agauaccuggccuucaucc

SEQ ID NO: 2214686 - RNA, 19 nt, Artificial Sequence
  Description of Artificial Sequence: Synthetic oligonucleotide
  Sense strand starting at position 2146 of SEQ ID NO: 1883764
uucuuagagcuguaccaua

SEQ ID NO: 2214687 - RNA, 19 nt, Artificial Sequence
  Description of Artificial Sequence: Synthetic oligonucleotide
  Antisense strand to SEQ ID NO: 2214686
uaugguacagcucuaagaa

SEQ ID NO: 2214688 - RNA, 19 nt, Artificial Sequence
  Description of Artificial Sequence: Synthetic oligonucleotide
  Sense strand starting at position 1543 of SEQ ID NO: 1883764
ugguaagugacauggaagu

SEQ ID NO: 2214689 - RNA, 19 nt, Artificial Sequence
  Description of Artificial Sequence: Synthetic oligonucleotide
  Antisense strand to SEQ ID NO: 2214688
acuuccaugucacuuacca

SEQ ID NO: 2214690 - RNA, 19 nt, Artificial Sequence
  Description of Artificial Sequence: Synthetic oligonucleotide
  Sense strand starting at position 138 of SEQ ID NO: 1883764
auguaauaauugccucaga

SEQ ID NO: 2214691 - RNA, 19 nt, Artificial Sequence
  Description of Artificial Sequence: Synthetic oligonucleotide
  Antisense strand to SEQ ID NO: 2214690
ucugaggcaauuauuacau

SEQ ID NO: 2214692 - RNA, 19 nt, Artificial Sequence
  Description of Artificial Sequence: Synthetic oligonucleotide
  Sense strand starting at position 139 of SEQ ID NO: 1883764
uguaauaauugccucagag

SEQ ID NO: 2214693 - RNA, 19 nt, Artificial Sequence
  Description of Artificial Sequence: Synthetic oligonucleotide
  Antisense strand to SEQ ID NO: 2214692
cucugaggcaauuauuaca

SEQ ID NO: 2214694 - RNA, 19 nt, Artificial Sequence
  Description of Artificial Sequence: Synthetic oligonucleotide
  Sense strand starting at position 2967 of SEQ ID NO: 1883764
cugagcauuccucaaugca

SEQ ID NO: 2214695 - RNA, 19 nt, Artificial Sequence
  Description of Artificial Sequence: Synthetic oligonucleotide
  Antisense strand to SEQ ID NO: 2214694
ugcauugaggaaugcucag

SEQ ID NO: 2214696 - RNA, 19 nt, Artificial Sequence
  Description of Artificial Sequence: Synthetic oligonucleotide
  Sense strand starting at position 645 of SEQ ID NO: 1883764
gggcuaacgguaugaugaa

SEQ ID NO: 2214697 - RNA, 19 nt, Artificial Sequence
  Description of Artificial Sequence: Synthetic oligonucleotide
  Antisense strand to SEQ ID NO: 2214696
uucaucauaccguuagccc

SEQ ID NO: 2214698 - RNA, 19 nt, Artificial Sequence
  Description of Artificial Sequence: Synthetic oligonucleotide
  Sense strand starting at position 1805 of SEQ ID NO: 1883764
cagaaauauuuagguuaga

SEQ ID NO: 2214699 - RNA, 19 nt, Artificial Sequence
  Description of Artificial Sequence: Synthetic oligonucleotide
  Antisense strand to SEQ ID NO: 2214698
ucuaaccuaaauauuucug

SEQ ID NO: 2214700 - RNA, 19 nt, Artificial Sequence
  Description of Artificial Sequence: Synthetic oligonucleotide
  Sense strand starting at position 1810 of SEQ ID NO: 1883764
auauuuagguuagagucaa

SEQ ID NO: 2214701 - RNA, 19 nt, Artificial Sequence
  Description of Artificial Sequence: Synthetic oligonucleotide
  Antisense strand to SEQ ID NO: 2214700
uugacucuaaccuaaauau

SEQ ID NO: 2214702 - RNA, 19 nt, Artificial Sequence
  Description of Artificial Sequence: Synthetic oligonucleotide
  Sense strand starting at position 1508 of SEQ ID NO: 1883764
gagccagugaagugauauc

SEQ ID NO: 2214703 - RNA, 19 nt, Artificial Sequence
  Description of Artificial Sequence: Synthetic oligonucleotide
  Antisense strand to SEQ ID NO: 2214702
gauaucacuucacuggcuc

SEQ ID NO: 2214704 - RNA, 19 nt, Artificial Sequence
  Description of Artificial Sequence: Synthetic oligonucleotide
  Sense strand starting at position 1554 of SEQ ID NO: 1883764
auggaagugccucggaaau

SEQ ID NO: 2214705 - RNA, 19 nt, Artificial Sequence
  Description of Artificial Sequence: Synthetic oligonucleotide
  Antisense strand to SEQ ID NO: 2214704
auuuccgaggcacuuccau

SEQ ID NO: 2214706 - RNA, 19 nt, Artificial Sequence
  Description of Artificial Sequence: Synthetic oligonucleotide
  Sense strand starting at position 1537 of SEQ ID NO: 1883764
gaggcuugguaagugacau

SEQ ID NO: 2214707 - RNA, 19 nt, Artificial Sequence
  Description of Artificial Sequence: Synthetic oligonucleotide
  Antisense strand to SEQ ID NO: 2214706
augucacuuaccaagccuc

SEQ ID NO: 2214708 - RNA, 19 nt, Artificial Sequence
  Description of Artificial Sequence: Synthetic oligonucleotide
  Sense strand starting at position 3706 of SEQ ID NO: 1883764
cuccucauuguuugacaca

SEQ ID NO: 2214709 - RNA, 19 nt, Artificial Sequence
  Description of Artificial Sequence: Synthetic oligonucleotide
  Antisense strand to SEQ ID NO: 2214708
ugugucaaacaaugaggag

SEQ ID NO: 2214710 - RNA, 19 nt, Artificial Sequence
  Description of Artificial Sequence: Synthetic oligonucleotide
  Sense strand starting at position 2291 of SEQ ID NO: 1883764
cuguaucccugaccugauu

SEQ ID NO: 2214711 - RNA, 19 nt, Artificial Sequence
  Description of Artificial Sequence: Synthetic oligonucleotide
  Antisense strand to SEQ ID NO: 2214710
aaucaggucagggauacag

SEQ ID NO: 2214712 - RNA, 19 nt, Artificial Sequence
  Description of Artificial Sequence: Synthetic oligonucleotide
  Sense strand starting at position 3314 of SEQ ID NO: 1883764
guacgugaaucuuuaggau

SEQ ID NO: 2214713 - RNA, 19 nt, Artificial Sequence
  Description of Artificial Sequence: Synthetic oligonucleotide
  Antisense strand to SEQ ID NO: 2214712
auccuaaagauucacguac

SEQ ID NO: 2214714 - RNA, 19 nt, Artificial Sequence
  Description of Artificial Sequence: Synthetic oligonucleotide
  Sense strand starting at position 732 of SEQ ID NO: 1883764
cucacuguuccuggaagua

SEQ ID NO: 2214715 - RNA, 19 nt, Artificial Sequence
  Description of Artificial Sequence: Synthetic oligonucleotide
  Antisense strand to SEQ ID NO: 2214714
uacuuccaggaacagugag

SEQ ID NO: 2214716 - RNA, 19 nt, Artificial Sequence
  Description of Artificial Sequence: Synthetic oligonucleotide
  Sense strand starting at position 3872 of SEQ ID NO: 1883764
agcccuguucuguaugaug

SEQ ID NO: 2214717 - RNA, 19 nt, Artificial Sequence
  Description of Artificial Sequence: Synthetic oligonucleotide
  Antisense strand to SEQ ID NO: 2214716
caucauacagaacagggcu

SEQ ID NO: 2214718 - RNA, 19 nt, Artificial Sequence
  Description of Artificial Sequence: Synthetic oligonucleotide
  Sense strand starting at position 745 of SEQ ID NO: 1883764
gaaguacgauugcccuaau

SEQ ID NO: 2214719 - RNA, 19 nt, Artificial Sequence
  Description of Artificial Sequence: Synthetic oligonucleotide
  Antisense strand to SEQ ID NO: 2214718
auuagggcaaucguacuuc

SEQ ID NO: 2214720 - RNA, 19 nt, Artificial Sequence
  Description of Artificial Sequence: Synthetic oligonucleotide
  Sense strand starting at position 3540 of SEQ ID NO: 1883764
cuccauagccagugacauu

SEQ ID NO: 2214721 - RNA, 19 nt, Artificial Sequence
  Description of Artificial Sequence: Synthetic oligonucleotide
  Antisense strand to SEQ ID NO: 2214720
aaugucacuggcuauggag

SEQ ID NO: 2214722 - RNA, 19 nt, Artificial Sequence
  Description of Artificial Sequence: Synthetic oligonucleotide
  Sense strand starting at position 2173 of SEQ ID NO: 1883764
agagcuacuccauguccau

SEQ ID NO: 2214723 - RNA, 19 nt, Artificial Sequence
  Description of Artificial Sequence: Synthetic oligonucleotide
  Antisense strand to SEQ ID NO: 2214722
auggacauggaguagcucu

SEQ ID NO: 2214724 - RNA, 19 nt, Artificial Sequence
  Description of Artificial Sequence: Synthetic oligonucleotide
  Sense strand starting at position 3832 of SEQ ID NO: 1883764
agcccuucucuuugagauu

SEQ ID NO: 2214725 - RNA, 19 nt, Artificial Sequence
  Description of Artificial Sequence: Synthetic oligonucleotide
  Antisense strand to SEQ ID NO: 2214724
aaucucaaagagaagggcu

SEQ ID NO: 2214726 - RNA, 19 nt, Artificial Sequence
  Description of Artificial Sequence: Synthetic oligonucleotide
  Sense strand starting at position 1962 of SEQ ID NO: 1883764
agagccuuccuaugaagcu

SEQ ID NO: 2214727 - RNA, 19 nt, Artificial Sequence
  Description of Artificial Sequence: Synthetic oligonucleotide
  Antisense strand to SEQ ID NO: 2214726
agcuucauaggaaggcucu

SEQ ID NO: 2214728 - RNA, 19 nt, Artificial Sequence
  Description of Artificial Sequence: Synthetic oligonucleotide
  Sense strand starting at position 1355 of SEQ ID NO: 1883764
aguagagggaugcgucuaa

SEQ ID NO: 2214729 - RNA, 19 nt, Artificial Sequence
  Description of Artificial Sequence: Synthetic oligonucleotide
  Antisense strand to SEQ ID NO: 2214728
uuagacgcaucccucuacu

SEQ ID NO: 2214730 - RNA, 19 nt, Artificial Sequence
  Description of Artificial Sequence: Synthetic oligonucleotide
  Sense strand starting at position 3563 of SEQ ID NO: 1883764
auaagcauuugugaucaca

SEQ ID NO: 2214731 - RNA, 19 nt, Artificial Sequence
  Description of Artificial Sequence: Synthetic oligonucleotide
  Antisense strand to SEQ ID NO: 2214730
ugugaucacaaaugcuuau

SEQ ID NO: 2214732 - RNA, 19 nt, Artificial Sequence
  Description of Artificial Sequence: Synthetic oligonucleotide
  Sense strand starting at position 1582 of SEQ ID NO: 1883765
ggacaauggucaucauuga

SEQ ID NO: 2214733 - RNA, 19 nt, Artificial Sequence
  Description of Artificial Sequence: Synthetic oligonucleotide
  Antisense strand to SEQ ID NO: 2214732
ucaaugaugaccauugucc

SEQ ID NO: 2214734 - RNA, 19 nt, Artificial Sequence
  Description of Artificial Sequence: Synthetic oligonucleotide
  Sense strand starting at position 2804 of SEQ ID NO: 1883765
guggaugaggcggaacaua

SEQ ID NO: 2214735 - RNA, 19 nt, Artificial Sequence
  Description of Artificial Sequence: Synthetic oligonucleotide
  Antisense strand to SEQ ID NO: 2214734
uauguuccgccucauccac

SEQ ID NO: 2214736 - RNA, 19 nt, Artificial Sequence
  Description of Artificial Sequence: Synthetic oligonucleotide
  Sense strand starting at position 2023 of SEQ ID NO: 1883765
cuccaucugggucaaugau

SEQ ID NO: 2214737 - RNA, 19 nt, Artificial Sequence
  Description of Artificial Sequence: Synthetic oligonucleotide
  Antisense strand to SEQ ID NO: 2214736
aucauugacccagauggag

SEQ ID NO: 2214738 - RNA, 19 nt, Artificial Sequence
  Description of Artificial Sequence: Synthetic oligonucleotide
  Sense strand starting at position 1580 of SEQ ID NO: 1883765
guggacaauggucaucauu

SEQ ID NO: 2214739 - RNA, 19 nt, Artificial Sequence
  Description of Artificial Sequence: Synthetic oligonucleotide
  Antisense strand to SEQ ID NO: 2214738
aaugaugaccauuguccac

SEQ ID NO: 2214740 - RNA, 19 nt, Artificial Sequence
  Description of Artificial Sequence: Synthetic oligonucleotide
  Sense strand starting at position 2650 of SEQ ID NO: 1883765
ugagacuuccgagaagucu

SEQ ID NO: 2214741 - RNA, 19 nt, Artificial Sequence
  Description of Artificial Sequence: Synthetic oligonucleotide
  Antisense strand to SEQ ID NO: 2214740
agacuucucggaagucuca

SEQ ID NO: 2214742 - RNA, 19 nt, Artificial Sequence
  Description of Artificial Sequence: Synthetic oligonucleotide
  Sense strand starting at position 3708 of SEQ ID NO: 1883765
acagucaugcucuagaaca

SEQ ID NO: 2214743 - RNA, 19 nt, Artificial Sequence
  Description of Artificial Sequence: Synthetic oligonucleotide
  Antisense strand to SEQ ID NO: 2214742
uguucuagagcaugacugu

SEQ ID NO: 2214744 - RNA, 19 nt, Artificial Sequence
  Description of Artificial Sequence: Synthetic oligonucleotide
  Sense strand starting at position 3837 of SEQ ID NO: 1883765
ggaauacuuuguccugaaa

SEQ ID NO: 2214745 - RNA, 19 nt, Artificial Sequence
  Description of Artificial Sequence: Synthetic oligonucleotide
  Antisense strand to SEQ ID NO: 2214744
uuucaggacaaaguauucc

SEQ ID NO: 2214746 - RNA, 19 nt, Artificial Sequence
  Description of Artificial Sequence: Synthetic oligonucleotide
  Sense strand starting at position 3836 of SEQ ID NO: 1883765
aggaauacuuuguccugaa

SEQ ID NO: 2214747 - RNA, 19 nt, Artificial Sequence
  Description of Artificial Sequence: Synthetic oligonucleotide
  Antisense strand to SEQ ID NO: 2214746
uucaggacaaaguauuccu

SEQ ID NO: 2214748 - RNA, 19 nt, Artificial Sequence
  Description of Artificial Sequence: Synthetic oligonucleotide
  Sense strand starting at position 3835 of SEQ ID NO: 1883765
gaggaauacuuuguccuga

SEQ ID NO: 2214749 - RNA, 19 nt, Artificial Sequence
  Description of Artificial Sequence: Synthetic oligonucleotide
  Antisense strand to SEQ ID NO: 2214748
ucaggacaaaguauuccuc

SEQ ID NO: 2214750 - RNA, 19 nt, Artificial Sequence
  Description of Artificial Sequence: Synthetic oligonucleotide
  Sense strand starting at position 3939 of SEQ ID NO: 1883765
guuacagcagcagaagaau

SEQ ID NO: 2214751 - RNA, 19 nt, Artificial Sequence
  Description of Artificial Sequence: Synthetic oligonucleotide
  Antisense strand to SEQ ID NO: 2214750
auucuucugcugcuguaac

SEQ ID NO: 2214752 - RNA, 19 nt, Artificial Sequence
  Description of Artificial Sequence: Synthetic oligonucleotide
  Sense strand starting at position 3534 of SEQ ID NO: 1883765
gugguuuggagagaucucu

SEQ ID NO: 2214753 - RNA, 19 nt, Artificial Sequence
  Description of Artificial Sequence: Synthetic oligonucleotide
  Antisense strand to SEQ ID NO: 2214752
agagaucucuccaaaccac

SEQ ID NO: 2214754 - RNA, 19 nt, Artificial Sequence
  Description of Artificial Sequence: Synthetic oligonucleotide
  Sense strand starting at position 229 of SEQ ID NO: 1883765
guuuccagucaugauuaag

SEQ ID NO: 2214755 - RNA, 19 nt, Artificial Sequence
  Description of Artificial Sequence: Synthetic oligonucleotide
  Antisense strand to SEQ ID NO: 2214754
cuuaaucaugacuggaaac

SEQ ID NO: 2214756 - RNA, 19 nt, Artificial Sequence
  Description of Artificial Sequence: Synthetic oligonucleotide
  Sense strand starting at position 1064 of SEQ ID NO: 1883765
ggugaagaugcugauaggu

SEQ ID NO: 2214757 - RNA, 19 nt, Artificial Sequence
  Description of Artificial Sequence: Synthetic oligonucleotide
  Antisense strand to SEQ ID NO: 2214756
accuaucagcaucuucacc

SEQ ID NO: 2214758 - RNA, 19 nt, Artificial Sequence
  Description of Artificial Sequence: Synthetic oligonucleotide
  Sense strand starting at position 1284 of SEQ ID NO: 1883765
ugagcagugguccaggaga

SEQ ID NO: 2214759 - RNA, 19 nt, Artificial Sequence
  Description of Artificial Sequence: Synthetic oligonucleotide
  Antisense strand to SEQ ID NO: 2214758
ucuccuggaccacugcuca

SEQ ID NO: 2214760 - RNA, 19 nt, Artificial Sequence
  Description of Artificial Sequence: Synthetic oligonucleotide
  Sense strand starting at position 349 of SEQ ID NO: 1883765
uguauuuguaagugaagcu

SEQ ID NO: 2214761 - RNA, 19 nt, Artificial Sequence
  Description of Artificial Sequence: Synthetic oligonucleotide
  Antisense strand to SEQ ID NO: 2214760
agcuucacuuacaaauaca

SEQ ID NO: 2214762 - RNA, 19 nt, Artificial Sequence
  Description of Artificial Sequence: Synthetic oligonucleotide
  Sense strand starting at position 2697 of SEQ ID NO: 1883765
acaccagauugcucuggaa

SEQ ID NO: 2214763 - RNA, 19 nt, Artificial Sequence
  Description of Artificial Sequence: Synthetic oligonucleotide
  Antisense strand to SEQ ID NO: 2214762
uuccagagcaaucuggugu

SEQ ID NO: 2214764 - RNA, 19 nt, Artificial Sequence
  Description of Artificial Sequence: Synthetic oligonucleotide
  Sense strand starting at position 232 of SEQ ID NO: 1883765
uccagucaugauuaagcca

SEQ ID NO: 2214765 - RNA, 19 nt, Artificial Sequence
  Description of Artificial Sequence: Synthetic oligonucleotide
  Antisense strand to SEQ ID NO: 2214764
uggcuuaaucaugacugga

SEQ ID NO: 2214766 - RNA, 19 nt, Artificial Sequence
  Description of Artificial Sequence: Synthetic oligonucleotide
  Sense strand starting at position 14 of SEQ ID NO: 1883765
auucuaucaccugggacuu

SEQ ID NO: 2214767 - RNA, 19 nt, Artificial Sequence
  Description of Artificial Sequence: Synthetic oligonucleotide
  Antisense strand to SEQ ID NO: 2214766
aagucccaggugauagaau

SEQ ID NO: 2214768 - RNA, 19 nt, Artificial Sequence
  Description of Artificial Sequence: Synthetic oligonucleotide
  Sense strand starting at position 3661 of SEQ ID NO: 1883765
gagagaggacuguguucua

SEQ ID NO: 2214769 - RNA, 19 nt, Artificial Sequence
  Description of Artificial Sequence: Synthetic oligonucleotide
  Antisense strand to SEQ ID NO: 2214768
uagaacacaguccucucuc

SEQ ID NO: 2214770 - RNA, 19 nt, Artificial Sequence
  Description of Artificial Sequence: Synthetic oligonucleotide
  Sense strand starting at position 337 of SEQ ID NO: 1883765
acuacagcccuguguauuu

SEQ ID NO: 2214771 - RNA, 19 nt, Artificial Sequence
  Description of Artificial Sequence: Synthetic oligonucleotide
  Antisense strand to SEQ ID NO: 2214770
aaauacacagggcuguagu

SEQ ID NO: 2214772 - RNA, 19 nt, Artificial Sequence
  Description of Artificial Sequence: Synthetic oligonucleotide
  Sense strand starting at position 3664 of SEQ ID NO: 1883765
agaggacuguguucuauga

SEQ ID NO: 2214773 - RNA, 19 nt, Artificial Sequence
  Description of Artificial Sequence: Synthetic oligonucleotide
  Antisense strand to SEQ ID NO: 2214772
ucauagaacacaguccucu

SEQ ID NO: 2214774 - RNA, 19 nt, Artificial Sequence
  Description of Artificial Sequence: Synthetic oligonucleotide
  Sense strand starting at position 1805 of SEQ ID NO: 1883765
uugguaaauuacucaguaa

SEQ ID NO: 2214775 - RNA, 19 nt, Artificial Sequence
  Description of Artificial Sequence: Synthetic oligonucleotide
  Antisense strand to SEQ ID NO: 2214774
uuacugaguaauuuaccaa

SEQ ID NO: 2214776 - RNA, 19 nt, Artificial Sequence
  Description of Artificial Sequence: Synthetic oligonucleotide
  Sense strand starting at position 1133 of SEQ ID NO: 1883765
uggaguguggcccaccaaa

SEQ ID NO: 2214777 - RNA, 19 nt, Artificial Sequence
  Description of Artificial Sequence: Synthetic oligonucleotide
  Antisense strand to SEQ ID NO: 2214776
uuuggugggccacacucca

SEQ ID NO: 2214778 - RNA, 19 nt, Artificial Sequence
  Description of Artificial Sequence: Synthetic oligonucleotide
  Sense strand starting at position 251 of SEQ ID NO: 1883765
aaggguaagucaucucuau

SEQ ID NO: 2214779 - RNA, 19 nt, Artificial Sequence
  Description of Artificial Sequence: Synthetic oligonucleotide
  Antisense strand to SEQ ID NO: 2214778
auagagaugacuuacccuu

SEQ ID NO: 2214780 - RNA, 19 nt, Artificial Sequence
  Description of Artificial Sequence: Synthetic oligonucleotide
  Sense strand starting at position 464 of SEQ ID NO: 1883765
guccauaaagccugaaaug

SEQ ID NO: 2214781 - RNA, 19 nt, Artificial Sequence
  Description of Artificial Sequence: Synthetic oligonucleotide
  Antisense strand to SEQ ID NO: 2214780
cauuucaggcuuuauggac

SEQ ID NO: 2214782 - RNA, 19 nt, Artificial Sequence
  Description of Artificial Sequence: Synthetic oligonucleotide
  Sense strand starting at position 2732 of SEQ ID NO: 1883765
ggugaucccauggguuaga

SEQ ID NO: 2214783 - RNA, 19 nt, Artificial Sequence
  Description of Artificial Sequence: Synthetic oligonucleotide
  Antisense strand to SEQ ID NO: 2214782
ucuaacccaugggaucacc

SEQ ID NO: 2214784 - RNA, 19 nt, Artificial Sequence
  Description of Artificial Sequence: Synthetic oligonucleotide
  Sense strand starting at position 1579 of SEQ ID NO: 1883765
uguggacaauggucaucau

SEQ ID NO: 2214785 - RNA, 19 nt, Artificial Sequence
  Description of Artificial Sequence: Synthetic oligonucleotide
  Antisense strand to SEQ ID NO: 2214784
augaugaccauuguccaca

SEQ ID NO: 2214786 - RNA, 19 nt, Artificial Sequence
  Description of Artificial Sequence: Synthetic oligonucleotide
  Sense strand starting at position 1967 of SEQ ID NO: 1883765
ggaggacucucauucuguu

SEQ ID NO: 2214787 - RNA, 19 nt, Artificial Sequence
  Description of Artificial Sequence: Synthetic oligonucleotide
  Antisense strand to SEQ ID NO: 2214786
aacagaaugagaguccucc

SEQ ID NO: 2214788 - RNA, 19 nt, Artificial Sequence
  Description of Artificial Sequence: Synthetic oligonucleotide
  Sense strand starting at position 1804 of SEQ ID NO: 1883765
cuugguaaauuacucagua

SEQ ID NO: 2214789 - RNA, 19 nt, Artificial Sequence
  Description of Artificial Sequence: Synthetic oligonucleotide
  Antisense strand to SEQ ID NO: 2214788
uacugaguaauuuaccaag

SEQ ID NO: 2214790 - RNA, 19 nt, Artificial Sequence
  Description of Artificial Sequence: Synthetic oligonucleotide
  Sense strand starting at position 3397 of SEQ ID NO: 1883765
uccaguuguggugaaauuc

SEQ ID NO: 2214791 - RNA, 19 nt, Artificial Sequence
  Description of Artificial Sequence: Synthetic oligonucleotide
  Antisense strand to SEQ ID NO: 2214790
gaauuucaccacaacugga

SEQ ID NO: 2214792 - RNA, 19 nt, Artificial Sequence
  Description of Artificial Sequence: Synthetic oligonucleotide
  Sense strand starting at position 573 of SEQ ID NO: 1883765
auuuguguagccuguugau

SEQ ID NO: 2214793 - RNA, 19 nt, Artificial Sequence
  Description of Artificial Sequence: Synthetic oligonucleotide
  Antisense strand to SEQ ID NO: 2214792
aucaacaggcuacacaaau

SEQ ID NO: 2214794 - RNA, 19 nt, Artificial Sequence
  Description of Artificial Sequence: Synthetic oligonucleotide
  Sense strand starting at position 2742 of SEQ ID NO: 1883765
uggguuagagcacauguuu

SEQ ID NO: 2214795 - RNA, 19 nt, Artificial Sequence
  Description of Artificial Sequence: Synthetic oligonucleotide
  Antisense strand to SEQ ID NO: 2214794
aaacaugugcucuaaccca

SEQ ID NO: 2214796 - RNA, 19 nt, Artificial Sequence
  Description of Artificial Sequence: Synthetic oligonucleotide
  Sense strand starting at position 2380 of SEQ ID NO: 1883765
acuggcuucccauaauugu

SEQ ID NO: 2214797 - RNA, 19 nt, Artificial Sequence
  Description of Artificial Sequence: Synthetic oligonucleotide
  Antisense strand to SEQ ID NO: 2214796
acaauuaugggaagccagu

SEQ ID NO: 2214798 - RNA, 19 nt, Artificial Sequence
  Description of Artificial Sequence: Synthetic oligonucleotide
  Sense strand starting at position 2342 of SEQ ID NO: 1883765
ugucaucgcgggaggugua

SEQ ID NO: 2214799 - RNA, 19 nt, Artificial Sequence
  Description of Artificial Sequence: Synthetic oligonucleotide
  Antisense strand to SEQ ID NO: 2214798
uacaccucccgcgaugaca

SEQ ID NO: 2214800 - RNA, 19 nt, Artificial Sequence
  Description of Artificial Sequence: Synthetic oligonucleotide
  Sense strand starting at position 255 of SEQ ID NO: 1883765
guaagucaucucuauaguc

SEQ ID NO: 2214801 - RNA, 19 nt, Artificial Sequence
  Description of Artificial Sequence: Synthetic oligonucleotide
  Antisense strand to SEQ ID NO: 2214800
gacuauagagaugacuuac

SEQ ID NO: 2214802 - RNA, 19 nt, Artificial Sequence
  Description of Artificial Sequence: Synthetic oligonucleotide
  Sense strand starting at position 580 of SEQ ID NO: 1883765
uagccuguugauuaacagu

SEQ ID NO: 2214803 - RNA, 19 nt, Artificial Sequence
  Description of Artificial Sequence: Synthetic oligonucleotide
  Antisense strand to SEQ ID NO: 2214802
acuguuaaucaacaggcua

SEQ ID NO: 2214804 - RNA, 19 nt, Artificial Sequence
  Description of Artificial Sequence: Synthetic oligonucleotide
  Sense strand starting at position 854 of SEQ ID NO: 1883765
ucaagaacuugggaaagaa

SEQ ID NO: 2214805 - RNA, 19 nt, Artificial Sequence
  Description of Artificial Sequence: Synthetic oligonucleotide
  Antisense strand to SEQ ID NO: 2214804
uucuuucccaaguucuuga

SEQ ID NO: 2214806 - RNA, 19 nt, Artificial Sequence
  Description of Artificial Sequence: Synthetic oligonucleotide
  Sense strand starting at position 1808 of SEQ ID NO: 1883765
guaaauuacucaguaagca

SEQ ID NO: 2214807 - RNA, 19 nt, Artificial Sequence
  Description of Artificial Sequence: Synthetic oligonucleotide
  Antisense strand to SEQ ID NO: 2214806
ugcuuacugaguaauuuac

SEQ ID NO: 2214808 - RNA, 19 nt, Artificial Sequence
  Description of Artificial Sequence: Synthetic oligonucleotide
  Sense strand starting at position 2211 of SEQ ID NO: 1883765
acaucagaguucguccaaa

SEQ ID NO: 2214809 - RNA, 19 nt, Artificial Sequence
  Description of Artificial Sequence: Synthetic oligonucleotide
  Antisense strand to SEQ ID NO: 2214808
uuuggacgaacucugaugu

SEQ ID NO: 2214810 - RNA, 19 nt, Artificial Sequence
  Description of Artificial Sequence: Synthetic oligonucleotide
  Sense strand starting at position 2210 of SEQ ID NO: 1883765
aacaucagaguucguccaa

SEQ ID NO: 2214811 - RNA, 19 nt, Artificial Sequence
  Description of Artificial Sequence: Synthetic oligonucleotide
  Antisense strand to SEQ ID NO: 2214810
uuggacgaacucugauguu

SEQ ID NO: 2214812 - RNA, 19 nt, Artificial Sequence
  Description of Artificial Sequence: Synthetic oligonucleotide
  Sense strand starting at position 3807 of SEQ ID NO: 1883766
gagaaagucuaucucugaa

SEQ ID NO: 2214813 - RNA, 19 nt, Artificial Sequence
  Description of Artificial Sequence: Synthetic oligonucleotide
  Antisense strand to SEQ ID NO: 2214812
uucagagauagacuuucuc

SEQ ID NO: 2214814 - RNA, 19 nt, Artificial Sequence
  Description of Artificial Sequence: Synthetic oligonucleotide
  Sense strand starting at position 3670 of SEQ ID NO: 1883766
ggauguuaggcugagaauu

SEQ ID NO: 2214815 - RNA, 19 nt, Artificial Sequence
  Description of Artificial Sequence: Synthetic oligonucleotide
  Antisense strand to SEQ ID NO: 2214814
aauucucagccuaacaucc

SEQ ID NO: 2214816 - RNA, 19 nt, Artificial Sequence
  Description of Artificial Sequence: Synthetic oligonucleotide
  Sense strand starting at position 391 of SEQ ID NO: 1883766
agaugaagaucugugauuc

SEQ ID NO: 2214817 - RNA, 19 nt, Artificial Sequence
  Description of Artificial Sequence: Synthetic oligonucleotide
  Antisense strand to SEQ ID NO: 2214816
gaaucacagaucuucaucu

SEQ ID NO: 2214818 - RNA, 19 nt, Artificial Sequence
  Description of Artificial Sequence: Synthetic oligonucleotide
  Sense strand starting at position 2755 of SEQ ID NO: 1883766
gacacaggguucuuacaga

SEQ ID NO: 2214819 - RNA, 19 nt, Artificial Sequence
  Description of Artificial Sequence: Synthetic oligonucleotide
  Antisense strand to SEQ ID NO: 2214818
ucuguaagaacccuguguc

SEQ ID NO: 2214820 - RNA, 19 nt, Artificial Sequence
  Description of Artificial Sequence: Synthetic oligonucleotide
  Sense strand starting at position 862 of SEQ ID NO: 1883766
uuggaaugauguccugaaa

SEQ ID NO: 2214821 - RNA, 19 nt, Artificial Sequence
  Description of Artificial Sequence: Synthetic oligonucleotide
  Antisense strand to SEQ ID NO: 2214820
uuucaggacaucauuccaa

SEQ ID NO: 2214822 - RNA, 19 nt, Artificial Sequence
  Description of Artificial Sequence: Synthetic oligonucleotide
  Sense strand starting at position 3139 of SEQ ID NO: 1883766
agaugaggauaguuccauu

SEQ ID NO: 2214823 - RNA, 19 nt, Artificial Sequence
  Description of Artificial Sequence: Synthetic oligonucleotide
  Antisense strand to SEQ ID NO: 2214822
aauggaacuauccucaucu

SEQ ID NO: 2214824 - RNA, 19 nt, Artificial Sequence
  Description of Artificial Sequence: Synthetic oligonucleotide
  Sense strand starting at position 2038 of SEQ ID NO: 1883766
cugaguugucuggauagag

SEQ ID NO: 2214825 - RNA, 19 nt, Artificial Sequence
  Description of Artificial Sequence: Synthetic oligonucleotide
  Antisense strand to SEQ ID NO: 2214824
cucuauccagacaacucag

SEQ ID NO: 2214826 - RNA, 19 nt, Artificial Sequence
  Description of Artificial Sequence: Synthetic oligonucleotide
  Sense strand starting at position 1322 of SEQ ID NO: 1883766
agaauauucuggguuuaca

SEQ ID NO: 2214827 - RNA, 19 nt, Artificial Sequence
  Description of Artificial Sequence: Synthetic oligonucleotide
  Antisense strand to SEQ ID NO: 2214826
uguaaacccagaauauucu

SEQ ID NO: 2214828 - RNA, 19 nt, Artificial Sequence
  Description of Artificial Sequence: Synthetic oligonucleotide
  Sense strand starting at position 2722 of SEQ ID NO: 1883766
cacgcuugggcuucgcaaa

SEQ ID NO: 2214829 - RNA, 19 nt, Artificial Sequence
  Description of Artificial Sequence: Synthetic oligonucleotide
  Antisense strand to SEQ ID NO: 2214828
uuugcgaagcccaagcgug

SEQ ID NO: 2214830 - RNA, 19 nt, Artificial Sequence
  Description of Artificial Sequence: Synthetic oligonucleotide
  Sense strand starting at position 261 of SEQ ID NO: 1883766
gcaauuggaagugagaguu

SEQ ID NO: 2214831 - RNA, 19 nt, Artificial Sequence
  Description of Artificial Sequence: Synthetic oligonucleotide
  Antisense strand to SEQ ID NO: 2214830
aacucucacuuccaauugc

SEQ ID NO: 2214832 - RNA, 19 nt, Artificial Sequence
  Description of Artificial Sequence: Synthetic oligonucleotide
  Sense strand starting at position 1321 of SEQ ID NO: 1883766
aagaauauucuggguuuac

SEQ ID NO: 2214833 - RNA, 19 nt, Artificial Sequence
  Description of Artificial Sequence: Synthetic oligonucleotide
  Antisense strand to SEQ ID NO: 2214832
guaaacccagaauauucuu

SEQ ID NO: 2214834 - RNA, 19 nt, Artificial Sequence
  Description of Artificial Sequence: Synthetic oligonucleotide
  Sense strand starting at position 376 of SEQ ID NO: 1883766
ugauauucccaguggagau

SEQ ID NO: 2214835 - RNA, 19 nt, Artificial Sequence
  Description of Artificial Sequence: Synthetic oligonucleotide
  Antisense strand to SEQ ID NO: 2214834
aucuccacugggaauauca

SEQ ID NO: 2214836 - RNA, 19 nt, Artificial Sequence
  Description of Artificial Sequence: Synthetic oligonucleotide
  Sense strand starting at position 1682 of SEQ ID NO: 1883766
gaacuuucugggcaaaguc

SEQ ID NO: 2214837 - RNA, 19 nt, Artificial Sequence
  Description of Artificial Sequence: Synthetic oligonucleotide
  Antisense strand to SEQ ID NO: 2214836
gacuuugcccagaaaguuc

SEQ ID NO: 2214838 - RNA, 19 nt, Artificial Sequence
  Description of Artificial Sequence: Synthetic oligonucleotide
  Sense strand starting at position 668 of SEQ ID NO: 1883766
gcugaugacaguugagaaa

SEQ ID NO: 2214839 - RNA, 19 nt, Artificial Sequence
  Description of Artificial Sequence: Synthetic oligonucleotide
  Antisense strand to SEQ ID NO: 2214838
uuucucaacugucaucagc

SEQ ID NO: 2214840 - RNA, 19 nt, Artificial Sequence
  Description of Artificial Sequence: Synthetic oligonucleotide
  Sense strand starting at position 865 of SEQ ID NO: 1883766
gaaugauguccugaaacgu

SEQ ID NO: 2214841 - RNA, 19 nt, Artificial Sequence
  Description of Artificial Sequence: Synthetic oligonucleotide
  Antisense strand to SEQ ID NO: 2214840
acguuucaggacaucauuc

SEQ ID NO: 2214842 - RNA, 19 nt, Artificial Sequence
  Description of Artificial Sequence: Synthetic oligonucleotide
  Sense strand starting at position 3667 of SEQ ID NO: 1883766
gauggauguuaggcugaga

SEQ ID NO: 2214843 - RNA, 19 nt, Artificial Sequence
  Description of Artificial Sequence: Synthetic oligonucleotide
  Antisense strand to SEQ ID NO: 2214842
ucucagccuaacauccauc

SEQ ID NO: 2214844 - RNA, 19 nt, Artificial Sequence
  Description of Artificial Sequence: Synthetic oligonucleotide
  Sense strand starting at position 3176 of SEQ ID NO: 1883766
uggugaggguccaaugaga

SEQ ID NO: 2214845 - RNA, 19 nt, Artificial Sequence
  Description of Artificial Sequence: Synthetic oligonucleotide
  Antisense strand to SEQ ID NO: 2214844
ucucauuggacccucacca

SEQ ID NO: 2214846 - RNA, 19 nt, Artificial Sequence
  Description of Artificial Sequence: Synthetic oligonucleotide
  Sense strand starting at position 1311 of SEQ ID NO: 1883766
uguguaaugcaagaauauu

SEQ ID NO: 2214847 - RNA, 19 nt, Artificial Sequence
  Description of Artificial Sequence: Synthetic oligonucleotide
  Antisense strand to SEQ ID NO: 2214846
aauauucuugcauuacaca

SEQ ID NO: 2214848 - RNA, 19 nt, Artificial Sequence
  Description of Artificial Sequence: Synthetic oligonucleotide
  Sense strand starting at position 783 of SEQ ID NO: 1883766
cggguugcacuagaaauac

SEQ ID NO: 2214849 - RNA, 19 nt, Artificial Sequence
  Description of Artificial Sequence: Synthetic oligonucleotide
  Antisense strand to SEQ ID NO: 2214848
guauuucuagugcaacccg

SEQ ID NO: 2214850 - RNA, 19 nt, Artificial Sequence
  Description of Artificial Sequence: Synthetic oligonucleotide
  Sense strand starting at position 3224 of SEQ ID NO: 1883766
ggcccuuaucaaugacaau

SEQ ID NO: 2214851 - RNA, 19 nt, Artificial Sequence
  Description of Artificial Sequence: Synthetic oligonucleotide
  Antisense strand to SEQ ID NO: 2214850
auugucauugauaagggcc

SEQ ID NO: 2214852 - RNA, 19 nt, Artificial Sequence
  Description of Artificial Sequence: Synthetic oligonucleotide
  Sense strand starting at position 3183 of SEQ ID NO: 1883766
gguccaaugagaugauguc

SEQ ID NO: 2214853 - RNA, 19 nt, Artificial Sequence
  Description of Artificial Sequence: Synthetic oligonucleotide
  Antisense strand to SEQ ID NO: 2214852
gacaucaucucauuggacc

SEQ ID NO: 2214854 - RNA, 19 nt, Artificial Sequence
  Description of Artificial Sequence: Synthetic oligonucleotide
  Sense strand starting at position 2389 of SEQ ID NO: 1883766
agggcaguccuguauauag

SEQ ID NO: 2214855 - RNA, 19 nt, Artificial Sequence
  Description of Artificial Sequence: Synthetic oligonucleotide
  Antisense strand to SEQ ID NO: 2214854
cuauauacaggacugcccu

SEQ ID NO: 2214856 - RNA, 19 nt, Artificial Sequence
  Description of Artificial Sequence: Synthetic oligonucleotide
  Sense strand starting at position 1198 of SEQ ID NO: 1883766
cggcguaagucaaugugau

SEQ ID NO: 2214857 - RNA, 19 nt, Artificial Sequence
  Description of Artificial Sequence: Synthetic oligonucleotide
  Antisense strand to SEQ ID NO: 2214856
aucacauugacuuacgccg

SEQ ID NO: 2214858 - RNA, 19 nt, Artificial Sequence
  Description of Artificial Sequence: Synthetic oligonucleotide
  Sense strand starting at position 1681 of SEQ ID NO: 1883766
ggaacuuucugggcaaagu

SEQ ID NO: 2214859 - RNA, 19 nt, Artificial Sequence
  Description of Artificial Sequence: Synthetic oligonucleotide
  Antisense strand to SEQ ID NO: 2214858
acuuugcccagaaaguucc

SEQ ID NO: 2214860 - RNA, 19 nt, Artificial Sequence
  Description of Artificial Sequence: Synthetic oligonucleotide
  Sense strand starting at position 3717 of SEQ ID NO: 1883766
ugguccagucgacauuaca

SEQ ID NO: 2214861 - RNA, 19 nt, Artificial Sequence
  Description of Artificial Sequence: Synthetic oligonucleotide
  Antisense strand to SEQ ID NO: 2214860
uguaaugucgacuggacca

SEQ ID NO: 2214862 - RNA, 19 nt, Artificial Sequence
  Description of Artificial Sequence: Synthetic oligonucleotide
  Sense strand starting at position 1581 of SEQ ID NO: 1883766
ggaguccucucuuccaaau

SEQ ID NO: 2214863 - RNA, 19 nt, Artificial Sequence
  Description of Artificial Sequence: Synthetic oligonucleotide
  Antisense strand to SEQ ID NO: 2214862
auuuggaagagaggacucc

SEQ ID NO: 2214864 - RNA, 19 nt, Artificial Sequence
  Description of Artificial Sequence: Synthetic oligonucleotide
  Sense strand starting at position 260 of SEQ ID NO: 1883766
ugcaauuggaagugagagu

SEQ ID NO: 2214865 - RNA, 19 nt, Artificial Sequence
  Description of Artificial Sequence: Synthetic oligonucleotide
  Antisense strand to SEQ ID NO: 2214864
acucucacuuccaauugca

SEQ ID NO: 2214866 - RNA, 19 nt, Artificial Sequence
  Description of Artificial Sequence: Synthetic oligonucleotide
  Sense strand starting at position 2950 of SEQ ID NO: 1883766
uucugaacauuuggauaaa

SEQ ID NO: 2214867 - RNA, 19 nt, Artificial Sequence
  Description of Artificial Sequence: Synthetic oligonucleotide
  Antisense strand to SEQ ID NO: 2214866
uuuauccaaauguucagaa

SEQ ID NO: 2214868 - RNA, 19 nt, Artificial Sequence
  Description of Artificial Sequence: Synthetic oligonucleotide
  Sense strand starting at position 1803 of SEQ ID NO: 1883766
gcuugacagcucgaaauca

SEQ ID NO: 2214869 - RNA, 19 nt, Artificial Sequence
  Description of Artificial Sequence: Synthetic oligonucleotide
  Antisense strand to SEQ ID NO: 2214868
ugauuucgagcugucaagc

SEQ ID NO: 2214870 - RNA, 19 nt, Artificial Sequence
  Description of Artificial Sequence: Synthetic oligonucleotide
  Sense strand starting at position 3659 of SEQ ID NO: 1883766
gaguucgugauggauguua

SEQ ID NO: 2214871 - RNA, 19 nt, Artificial Sequence
  Description of Artificial Sequence: Synthetic oligonucleotide
  Antisense strand to SEQ ID NO: 2214870
uaacauccaucacgaacuc

SEQ ID NO: 2214872 - RNA, 19 nt, Artificial Sequence
  Description of Artificial Sequence: Synthetic oligonucleotide
  Sense strand starting at position 1716 of SEQ ID NO: 1883766
ugggcugguuccuuaaaga

SEQ ID NO: 2214873 - RNA, 19 nt, Artificial Sequence
  Description of Artificial Sequence: Synthetic oligonucleotide
  Antisense strand to SEQ ID NO: 2214872
ucuuuaaggaaccagccca

SEQ ID NO: 2214874 - RNA, 19 nt, Artificial Sequence
  Description of Artificial Sequence: Synthetic oligonucleotide
  Sense strand starting at position 2331 of SEQ ID NO: 1883766
acauaaauccuccggcaca

SEQ ID NO: 2214875 - RNA, 19 nt, Artificial Sequence
  Description of Artificial Sequence: Synthetic oligonucleotide
  Antisense strand to SEQ ID NO: 2214874
ugugccggaggauuuaugu

SEQ ID NO: 2214876 - RNA, 19 nt, Artificial Sequence
  Description of Artificial Sequence: Synthetic oligonucleotide
  Sense strand starting at position 3715 of SEQ ID NO: 1883766
uuugguccagucgacauua

SEQ ID NO: 2214877 - RNA, 19 nt, Artificial Sequence
  Description of Artificial Sequence: Synthetic oligonucleotide
  Antisense strand to SEQ ID NO: 2214876
uaaugucgacuggaccaaa

SEQ ID NO: 2214878 - RNA, 19 nt, Artificial Sequence
  Description of Artificial Sequence: Synthetic oligonucleotide
  Sense strand starting at position 3784 of SEQ ID NO: 1883766
agggauggguugagagcua

SEQ ID NO: 2214879 - RNA, 19 nt, Artificial Sequence
  Description of Artificial Sequence: Synthetic oligonucleotide
  Antisense strand to SEQ ID NO: 2214878
uagcucucaacccaucccu

SEQ ID NO: 2214880 - RNA, 19 nt, Artificial Sequence
  Description of Artificial Sequence: Synthetic oligonucleotide
  Sense strand starting at position 3655 of SEQ ID NO: 1883766
gccagaguucgugauggau

SEQ ID NO: 2214881 - RNA, 19 nt, Artificial Sequence
  Description of Artificial Sequence: Synthetic oligonucleotide
  Antisense strand to SEQ ID NO: 2214880
auccaucacgaacucuggc

SEQ ID NO: 2214882 - RNA, 19 nt, Artificial Sequence
  Description of Artificial Sequence: Synthetic oligonucleotide
  Sense strand starting at position 2646 of SEQ ID NO: 1883766
aguccuguucccugaauga

SEQ ID NO: 2214883 - RNA, 19 nt, Artificial Sequence
  Description of Artificial Sequence: Synthetic oligonucleotide
  Antisense strand to SEQ ID NO: 2214882
ucauucagggaacaggacu

SEQ ID NO: 2214884 - RNA, 19 nt, Artificial Sequence
  Description of Artificial Sequence: Synthetic oligonucleotide
  Sense strand starting at position 1540 of SEQ ID NO: 1883766
ggcuauugugcagagcaaa

SEQ ID NO: 2214885 - RNA, 19 nt, Artificial Sequence
  Description of Artificial Sequence: Synthetic oligonucleotide
  Antisense strand to SEQ ID NO: 2214884
uuugcucugcacaauagcc

SEQ ID NO: 2214886 - RNA, 19 nt, Artificial Sequence
  Description of Artificial Sequence: Synthetic oligonucleotide
  Sense strand starting at position 3725 of SEQ ID NO: 1883766
ucgacauuacauggcuuua

SEQ ID NO: 2214887 - RNA, 19 nt, Artificial Sequence
  Description of Artificial Sequence: Synthetic oligonucleotide
  Antisense strand to SEQ ID NO: 2214886
uaaagccauguaaugucga

SEQ ID NO: 2214888 - RNA, 19 nt, Artificial Sequence
  Description of Artificial Sequence: Synthetic oligonucleotide
  Sense strand starting at position 2391 of SEQ ID NO: 1883766
ggcaguccuguauauaggu

SEQ ID NO: 2214889 - RNA, 19 nt, Artificial Sequence
  Description of Artificial Sequence: Synthetic oligonucleotide
  Antisense strand to SEQ ID NO: 2214888
accuauauacaggacugcc

SEQ ID NO: 2214890 - RNA, 19 nt, Artificial Sequence
  Description of Artificial Sequence: Synthetic oligonucleotide
  Sense strand starting at position 3076 of SEQ ID NO: 1883766
ggaauucuguggccuauuc

SEQ ID NO: 2214891 - RNA, 19 nt, Artificial Sequence
  Description of Artificial Sequence: Synthetic oligonucleotide
  Antisense strand to SEQ ID NO: 2214890
gaauaggccacagaauucc

SEQ ID NO: 2214892 - RNA, 19 nt, Artificial Sequence
  Description of Artificial Sequence: Synthetic oligonucleotide
  Sense strand starting at position 1655 of SEQ ID NO: 1883767
ggagacguacaucagugaa

SEQ ID NO: 2214893 - RNA, 19 nt, Artificial Sequence
  Description of Artificial Sequence: Synthetic oligonucleotide
  Antisense strand to SEQ ID NO: 2214892
uucacugauguacgucucc

SEQ ID NO: 2214894 - RNA, 19 nt, Artificial Sequence
  Description of Artificial Sequence: Synthetic oligonucleotide
  Sense strand starting at position 1588 of SEQ ID NO: 1883767
agagucacccucuggacaa

SEQ ID NO: 2214895 - RNA, 19 nt, Artificial Sequence
  Description of Artificial Sequence: Synthetic oligonucleotide
  Antisense strand to SEQ ID NO: 2214894
uuguccagagggugacucu

SEQ ID NO: 2214896 - RNA, 19 nt, Artificial Sequence
  Description of Artificial Sequence: Synthetic oligonucleotide
  Sense strand starting at position 1509 of SEQ ID NO: 1883767
caggcuagucuguaauaaa

SEQ ID NO: 2214897 - RNA, 19 nt, Artificial Sequence
  Description of Artificial Sequence: Synthetic oligonucleotide
  Antisense strand to SEQ ID NO: 2214896
uuuauuacagacuagccug

SEQ ID NO: 2214898 - RNA, 19 nt, Artificial Sequence
  Description of Artificial Sequence: Synthetic oligonucleotide
  Sense strand starting at position 3717 of SEQ ID NO: 1883767
gugaauucuguguauuaaa

SEQ ID NO: 2214899 - RNA, 19 nt, Artificial Sequence
  Description of Artificial Sequence: Synthetic oligonucleotide
  Antisense strand to SEQ ID NO: 2214898
uuuaauacacagaauucac

SEQ ID NO: 2214900 - RNA, 19 nt, Artificial Sequence
  Description of Artificial Sequence: Synthetic oligonucleotide
  Sense strand starting at position 1811 of SEQ ID NO: 1883767
cgucauugcacuucgcgaa

SEQ ID NO: 2214901 - RNA, 19 nt, Artificial Sequence
  Description of Artificial Sequence: Synthetic oligonucleotide
  Antisense strand to SEQ ID NO: 2214900
uucgcgaagugcaaugacg

SEQ ID NO: 2214902 - RNA, 19 nt, Artificial Sequence
  Description of Artificial Sequence: Synthetic oligonucleotide
  Sense strand starting at position 1327 of SEQ ID NO: 1883767
ugcagaaggucuuucuaaa

SEQ ID NO: 2214903 - RNA, 19 nt, Artificial Sequence
  Description of Artificial Sequence: Synthetic oligonucleotide
  Antisense strand to SEQ ID NO: 2214902
uuuagaaagaccuucugca

SEQ ID NO: 2214904 - RNA, 19 nt, Artificial Sequence
  Description of Artificial Sequence: Synthetic oligonucleotide
  Sense strand starting at position 2036 of SEQ ID NO: 1883767
aggucucgugcguugaguu

SEQ ID NO: 2214905 - RNA, 19 nt, Artificial Sequence
  Description of Artificial Sequence: Synthetic oligonucleotide
  Antisense strand to SEQ ID NO: 2214904
aacucaacgcacgagaccu

SEQ ID NO: 2214906 - RNA, 19 nt, Artificial Sequence
  Description of Artificial Sequence: Synthetic oligonucleotide
  Sense strand starting at position 3945 of SEQ ID NO: 1883767
gugggacucaccugaugug

SEQ ID NO: 2214907 - RNA, 19 nt, Artificial Sequence
  Description of Artificial Sequence: Synthetic oligonucleotide
  Antisense strand to SEQ ID NO: 2214906
cacaucaggugagucccac

SEQ ID NO: 2214908 - RNA, 19 nt, Artificial Sequence
  Description of Artificial Sequence: Synthetic oligonucleotide
  Sense strand starting at position 3145 of SEQ ID NO: 1883767
accaauaccuguuuguaca

SEQ ID NO: 2214909 - RNA, 19 nt, Artificial Sequence
  Description of Artificial Sequence: Synthetic oligonucleotide
  Antisense strand to SEQ ID NO: 2214908
uguacaaacagguauuggu

SEQ ID NO: 2214910 - RNA, 19 nt, Artificial Sequence
  Description of Artificial Sequence: Synthetic oligonucleotide
  Sense strand starting at position 1124 of SEQ ID NO: 1883767
aaaggcauuugucagaaug

SEQ ID NO: 2214911 - RNA, 19 nt, Artificial Sequence
  Description of Artificial Sequence: Synthetic oligonucleotide
  Antisense strand to SEQ ID NO: 2214910
cauucugacaaaugccuuu

SEQ ID NO: 2214912 - RNA, 19 nt, Artificial Sequence
  Description of Artificial Sequence: Synthetic oligonucleotide
  Sense strand starting at position 1508 of SEQ ID NO: 1883767
acaggcuagucuguaauaa

SEQ ID NO: 2214913 - RNA, 19 nt, Artificial Sequence
  Description of Artificial Sequence: Synthetic oligonucleotide
  Antisense strand to SEQ ID NO: 2214912
uuauuacagacuagccugu

SEQ ID NO: 2214914 - RNA, 19 nt, Artificial Sequence
  Description of Artificial Sequence: Synthetic oligonucleotide
  Sense strand starting at position 1815 of SEQ ID NO: 1883767
auugcacuucgcgaaagaa

SEQ ID NO: 2214915 - RNA, 19 nt, Artificial Sequence
  Description of Artificial Sequence: Synthetic oligonucleotide
  Antisense strand to SEQ ID NO: 2214914
uucuuucgcgaagugcaau

SEQ ID NO: 2214916 - RNA, 19 nt, Artificial Sequence
  Description of Artificial Sequence: Synthetic oligonucleotide
  Sense strand starting at position 2057 of SEQ ID NO: 1883767
ugguaauaaguagguguga

SEQ ID NO: 2214917 - RNA, 19 nt, Artificial Sequence
  Description of Artificial Sequence: Synthetic oligonucleotide
  Antisense strand to SEQ ID NO: 2214916
ucacaccuacuuauuacca

SEQ ID NO: 2214918 - RNA, 19 nt, Artificial Sequence
  Description of Artificial Sequence: Synthetic oligonucleotide
  Sense strand starting at position 3679 of SEQ ID NO: 1883767
aguuaugacugugcuggaa

SEQ ID NO: 2214919 - RNA, 19 nt, Artificial Sequence
  Description of Artificial Sequence: Synthetic oligonucleotide
  Antisense strand to SEQ ID NO: 2214918
uuccagcacagucauaacu

SEQ ID NO: 2214920 - RNA, 19 nt, Artificial Sequence
  Description of Artificial Sequence: Synthetic oligonucleotide
  Sense strand starting at position 689 of SEQ ID NO: 1883767
agaacucccaugugugagu

SEQ ID NO: 2214921 - RNA, 19 nt, Artificial Sequence
  Description of Artificial Sequence: Synthetic oligonucleotide
  Antisense strand to SEQ ID NO: 2214920
acucacacaugggaguucu

SEQ ID NO: 2214922 - RNA, 19 nt, Artificial Sequence
  Description of Artificial Sequence: Synthetic oligonucleotide
  Sense strand starting at position 687 of SEQ ID NO: 1883767
cgagaacucccauguguga

SEQ ID NO: 2214923 - RNA, 19 nt, Artificial Sequence
  Description of Artificial Sequence: Synthetic oligonucleotide
  Antisense strand to SEQ ID NO: 2214922
ucacacaugggaguucucg

SEQ ID NO: 2214924 - RNA, 19 nt, Artificial Sequence
  Description of Artificial Sequence: Synthetic oligonucleotide
  Sense strand starting at position 2824 of SEQ ID NO: 1883767
ccaccuggucccugugaga

SEQ ID NO: 2214925 - RNA, 19 nt, Artificial Sequence
  Description of Artificial Sequence: Synthetic oligonucleotide
  Antisense strand to SEQ ID NO: 2214924
ucucacagggaccaggugg

SEQ ID NO: 2214926 - RNA, 19 nt, Artificial Sequence
  Description of Artificial Sequence: Synthetic oligonucleotide
  Sense strand starting at position 2059 of SEQ ID NO: 1883767
guaauaaguaggugugacu

SEQ ID NO: 2214927 - RNA, 19 nt, Artificial Sequence
  Description of Artificial Sequence: Synthetic oligonucleotide
  Antisense strand to SEQ ID NO: 2214926
agucacaccuacuuauuac

SEQ ID NO: 2214928 - RNA, 19 nt, Artificial Sequence
  Description of Artificial Sequence: Synthetic oligonucleotide
  Sense strand starting at position 766 of SEQ ID NO: 1883767
gcaagucccuuucuuagga

SEQ ID NO: 2214929 - RNA, 19 nt, Artificial Sequence
  Description of Artificial Sequence: Synthetic oligonucleotide
  Antisense strand to SEQ ID NO: 2214928
uccuaagaaagggacuugc

SEQ ID NO: 2214930 - RNA, 19 nt, Artificial Sequence
  Description of Artificial Sequence: Synthetic oligonucleotide
  Sense strand starting at position 1810 of SEQ ID NO: 1883767
gcgucauugcacuucgcga

SEQ ID NO: 2214931 - RNA, 19 nt, Artificial Sequence
  Description of Artificial Sequence: Synthetic oligonucleotide
  Antisense strand to SEQ ID NO: 2214930
ucgcgaagugcaaugacgc

SEQ ID NO: 2214932 - RNA, 19 nt, Artificial Sequence
  Description of Artificial Sequence: Synthetic oligonucleotide
  Sense strand starting at position 3678 of SEQ ID NO: 1883767
caguuaugacugugcugga

SEQ ID NO: 2214933 - RNA, 19 nt, Artificial Sequence
  Description of Artificial Sequence: Synthetic oligonucleotide
  Antisense strand to SEQ ID NO: 2214932
uccagcacagucauaacug

SEQ ID NO: 2214934 - RNA, 19 nt, Artificial Sequence
  Description of Artificial Sequence: Synthetic oligonucleotide
  Sense strand starting at position 3727 of SEQ ID NO: 1883767
uguauuaaaccguggagug

SEQ ID NO: 2214935 - RNA, 19 nt, Artificial Sequence
  Description of Artificial Sequence: Synthetic oligonucleotide
  Antisense strand to SEQ ID NO: 2214934
cacuccacgguuuaauaca

SEQ ID NO: 2214936 - RNA, 19 nt, Artificial Sequence
  Description of Artificial Sequence: Synthetic oligonucleotide
  Sense strand starting at position 3749 of SEQ ID NO: 1883767
gagcguguuacugagguua

SEQ ID NO: 2214937 - RNA, 19 nt, Artificial Sequence
  Description of Artificial Sequence: Synthetic oligonucleotide
  Antisense strand to SEQ ID NO: 2214936
uaaccucaguaacacgcuc

SEQ ID NO: 2214938 - RNA, 19 nt, Artificial Sequence
  Description of Artificial Sequence: Synthetic oligonucleotide
  Sense strand starting at position 782 of SEQ ID NO: 1883767
ggaauucgcccucgacuga

SEQ ID NO: 2214939 - RNA, 19 nt, Artificial Sequence
  Description of Artificial Sequence: Synthetic oligonucleotide
  Antisense strand to SEQ ID NO: 2214938
ucagucgagggcgaauucc

SEQ ID NO: 2214940 - RNA, 19 nt, Artificial Sequence
  Description of Artificial Sequence: Synthetic oligonucleotide
  Sense strand starting at position 3716 of SEQ ID NO: 1883767
cgugaauucuguguauuaa

SEQ ID NO: 2214941 - RNA, 19 nt, Artificial Sequence
  Description of Artificial Sequence: Synthetic oligonucleotide
  Antisense strand to SEQ ID NO: 2214940
uuaauacacagaauucacg

SEQ ID NO: 2214942 - RNA, 19 nt, Artificial Sequence
  Description of Artificial Sequence: Synthetic oligonucleotide
  Sense strand starting at position 1126 of SEQ ID NO: 1883767
aggcauuugucagaaugca

SEQ ID NO: 2214943 - RNA, 19 nt, Artificial Sequence
  Description of Artificial Sequence: Synthetic oligonucleotide
  Antisense strand to SEQ ID NO: 2214942
ugcauucugacaaaugccu

SEQ ID NO: 2214944 - RNA, 19 nt, Artificial Sequence
  Description of Artificial Sequence: Synthetic oligonucleotide
  Sense strand starting at position 217 of SEQ ID NO: 1883767
auuccuaaauucgagaaga

SEQ ID NO: 2214945 - RNA, 19 nt, Artificial Sequence
  Description of Artificial Sequence: Synthetic oligonucleotide
  Antisense strand to SEQ ID NO: 2214944
ucuucucgaauuuaggaau

SEQ ID NO: 2214946 - RNA, 19 nt, Artificial Sequence
  Description of Artificial Sequence: Synthetic oligonucleotide
  Sense strand starting at position 3728 of SEQ ID NO: 1883767
guauuaaaccguggagugu

SEQ ID NO: 2214947 - RNA, 19 nt, Artificial Sequence
  Description of Artificial Sequence: Synthetic oligonucleotide
  Antisense strand to SEQ ID NO: 2214946
acacuccacgguuuaauac

SEQ ID NO: 2214948 - RNA, 19 nt, Artificial Sequence
  Description of Artificial Sequence: Synthetic oligonucleotide
  Sense strand starting at position 954 of SEQ ID NO: 1883767
acugcaugguuccuguuau

SEQ ID NO: 2214949 - RNA, 19 nt, Artificial Sequence
  Description of Artificial Sequence: Synthetic oligonucleotide
  Antisense strand to SEQ ID NO: 2214948
auaacaggaaccaugcagu

SEQ ID NO: 2214950 - RNA, 19 nt, Artificial Sequence
  Description of Artificial Sequence: Synthetic oligonucleotide
  Sense strand starting at position 285 of SEQ ID NO: 1883767
cagagaaaguacuaaucga

SEQ ID NO: 2214951 - RNA, 19 nt, Artificial Sequence
  Description of Artificial Sequence: Synthetic oligonucleotide
  Antisense strand to SEQ ID NO: 2214950
ucgauuaguacuuucucug

SEQ ID NO: 2214952 - RNA, 19 nt, Artificial Sequence
  Description of Artificial Sequence: Synthetic oligonucleotide
  Sense strand starting at position 836 of SEQ ID NO: 1883767
gcugauagcugcuuuauug

SEQ ID NO: 2214953 - RNA, 19 nt, Artificial Sequence
  Description of Artificial Sequence: Synthetic oligonucleotide
  Antisense strand to SEQ ID NO: 2214952
caauaaagcagcuaucagc

SEQ ID NO: 2214954 - RNA, 19 nt, Artificial Sequence
  Description of Artificial Sequence: Synthetic oligonucleotide
  Sense strand starting at position 3715 of SEQ ID NO: 1883767
gcgugaauucuguguauua

SEQ ID NO: 2214955 - RNA, 19 nt, Artificial Sequence
  Description of Artificial Sequence: Synthetic oligonucleotide
  Antisense strand to SEQ ID NO: 2214954
uaauacacagaauucacgc

SEQ ID NO: 2214956 - RNA, 19 nt, Artificial Sequence
  Description of Artificial Sequence: Synthetic oligonucleotide
  Sense strand starting at position 1812 of SEQ ID NO: 1883767
gucauugcacuucgcgaaa

SEQ ID NO: 2214957 - RNA, 19 nt, Artificial Sequence
  Description of Artificial Sequence: Synthetic oligonucleotide
  Antisense strand to SEQ ID NO: 2214956
uuucgcgaagugcaaugac

SEQ ID NO: 2214958 - RNA, 19 nt, Artificial Sequence
  Description of Artificial Sequence: Synthetic oligonucleotide
  Sense strand starting at position 3124 of SEQ ID NO: 1883767
guuugcuguuggcuuaauu

SEQ ID NO: 2214959 - RNA, 19 nt, Artificial Sequence
  Description of Artificial Sequence: Synthetic oligonucleotide
  Antisense strand to SEQ ID NO: 2214958
aauuaagccaacagcaaac

SEQ ID NO: 2214960 - RNA, 19 nt, Artificial Sequence
  Description of Artificial Sequence: Synthetic oligonucleotide
  Sense strand starting at position 3740 of SEQ ID NO: 1883767
ggagugucugagcguguua

SEQ ID NO: 2214961 - RNA, 19 nt, Artificial Sequence
  Description of Artificial Sequence: Synthetic oligonucleotide
  Antisense strand to SEQ ID NO: 2214960
uaacacgcucagacacucc

SEQ ID NO: 2214962 - RNA, 19 nt, Artificial Sequence
  Description of Artificial Sequence: Synthetic oligonucleotide
  Sense strand starting at position 1839 of SEQ ID NO: 1883767
auacauacgucacaaaggu

SEQ ID NO: 2214963 - RNA, 19 nt, Artificial Sequence
  Description of Artificial Sequence: Synthetic oligonucleotide
  Antisense strand to SEQ ID NO: 2214962
accuuugugacguauguau

SEQ ID NO: 2214964 - RNA, 19 nt, Artificial Sequence
  Description of Artificial Sequence: Synthetic oligonucleotide
  Sense strand starting at position 1686 of SEQ ID NO: 1883767
uggcgucuucugugugaug

SEQ ID NO: 2214965 - RNA, 19 nt, Artificial Sequence
  Description of Artificial Sequence: Synthetic oligonucleotide
  Antisense strand to SEQ ID NO: 2214964
caucacacagaagacgcca

SEQ ID NO: 2214966 - RNA, 19 nt, Artificial Sequence
  Description of Artificial Sequence: Synthetic oligonucleotide
  Sense strand starting at position 958 of SEQ ID NO: 1883767
caugguuccuguuauagaa

SEQ ID NO: 2214967 - RNA, 19 nt, Artificial Sequence
  Description of Artificial Sequence: Synthetic oligonucleotide
  Antisense strand to SEQ ID NO: 2214966
uucuauaacaggaaccaug

SEQ ID NO: 2214968 - RNA, 19 nt, Artificial Sequence
  Description of Artificial Sequence: Synthetic oligonucleotide
  Sense strand starting at position 960 of SEQ ID NO: 1883767
ugguuccuguuauagaaac

SEQ ID NO: 2214969 - RNA, 19 nt, Artificial Sequence
  Description of Artificial Sequence: Synthetic oligonucleotide
  Antisense strand to SEQ ID NO: 2214968
guuucuauaacaggaacca

SEQ ID NO: 2214970 - RNA, 19 nt, Artificial Sequence
  Description of Artificial Sequence: Synthetic oligonucleotide
  Sense strand starting at position 2971 of SEQ ID NO: 1883767
gagucugguuuagggacaa

SEQ ID NO: 2214971 - RNA, 19 nt, Artificial Sequence
  Description of Artificial Sequence: Synthetic oligonucleotide
  Antisense strand to SEQ ID NO: 2214970
uugucccuaaaccagacuc

SEQ ID NO: 2214972 - RNA, 19 nt, Artificial Sequence
  Description of Artificial Sequence: Synthetic oligonucleotide
  Sense strand starting at position 3318 of SEQ ID NO: 1883768
ggcacuuugggagaguaua

SEQ ID NO: 2214973 - RNA, 19 nt, Artificial Sequence
  Description of Artificial Sequence: Synthetic oligonucleotide
  Antisense strand to SEQ ID NO: 2214972
uauacucucccaaagugcc

SEQ ID NO: 2214974 - RNA, 19 nt, Artificial Sequence
  Description of Artificial Sequence: Synthetic oligonucleotide
  Sense strand starting at position 3838 of SEQ ID NO: 1883768
ggagucugcagagaucuga

SEQ ID NO: 2214975 - RNA, 19 nt, Artificial Sequence
  Description of Artificial Sequence: Synthetic oligonucleotide
  Antisense strand to SEQ ID NO: 2214974
ucagaucucugcagacucc

SEQ ID NO: 2214976 - RNA, 19 nt, Artificial Sequence
  Description of Artificial Sequence: Synthetic oligonucleotide
  Sense strand starting at position 1286 of SEQ ID NO: 1883768
ugucuaaaguaacuaaaga

SEQ ID NO: 2214977 - RNA, 19 nt, Artificial Sequence
  Description of Artificial Sequence: Synthetic oligonucleotide
  Antisense strand to SEQ ID NO: 2214976
ucuuuaguuacuuuagaca

SEQ ID NO: 2214978 - RNA, 19 nt, Artificial Sequence
  Description of Artificial Sequence: Synthetic oligonucleotide
  Sense strand starting at position 164 of SEQ ID NO: 1883768
gccugaaguccagacagau

SEQ ID NO: 2214979 - RNA, 19 nt, Artificial Sequence
  Description of Artificial Sequence: Synthetic oligonucleotide
  Antisense strand to SEQ ID NO: 2214978
aucugucuggacuucaggc

SEQ ID NO: 2214980 - RNA, 19 nt, Artificial Sequence
  Description of Artificial Sequence: Synthetic oligonucleotide
  Sense strand starting at position 3401 of SEQ ID NO: 1883768
acaccuuacuaaguugaga

SEQ ID NO: 2214981 - RNA, 19 nt, Artificial Sequence
  Description of Artificial Sequence: Synthetic oligonucleotide
  Antisense strand to SEQ ID NO: 2214980
ucucaacuuaguaaggugu

SEQ ID NO: 2214982 - RNA, 19 nt, Artificial Sequence
  Description of Artificial Sequence: Synthetic oligonucleotide
  Sense strand starting at position 291 of SEQ ID NO: 1883768
cagagugagcccuguauuu

SEQ ID NO: 2214983 - RNA, 19 nt, Artificial Sequence
  Description of Artificial Sequence: Synthetic oligonucleotide
  Antisense strand to SEQ ID NO: 2214982
aaauacagggcucacucug

SEQ ID NO: 2214984 - RNA, 19 nt, Artificial Sequence
  Description of Artificial Sequence: Synthetic oligonucleotide
  Sense strand starting at position 335 of SEQ ID NO: 1883768
ugggaauauggcuaaguuu

SEQ ID NO: 2214985 - RNA, 19 nt, Artificial Sequence
  Description of Artificial Sequence: Synthetic oligonucleotide
  Antisense strand to SEQ ID NO: 2214984
aaacuuagccauauuccca

SEQ ID NO: 2214986 - RNA, 19 nt, Artificial Sequence
  Description of Artificial Sequence: Synthetic oligonucleotide
  Sense strand starting at position 3179 of SEQ ID NO: 1883768
cuuucuauccuggaaggca

SEQ ID NO: 2214987 - RNA, 19 nt, Artificial Sequence
  Description of Artificial Sequence: Synthetic oligonucleotide
  Antisense strand to SEQ ID NO: 2214986
ugccuuccaggauagaaag

SEQ ID NO: 2214988 - RNA, 19 nt, Artificial Sequence
  Description of Artificial Sequence: Synthetic oligonucleotide
  Sense strand starting at position 1063 of SEQ ID NO: 1883768
gcaggcuuuccacaggaaa

SEQ ID NO: 2214989 - RNA, 19 nt, Artificial Sequence
  Description of Artificial Sequence: Synthetic oligonucleotide
  Antisense strand to SEQ ID NO: 2214988
uuuccuguggaaagccugc

SEQ ID NO: 2214990 - RNA, 19 nt, Artificial Sequence
  Description of Artificial Sequence: Synthetic oligonucleotide
  Sense strand starting at position 2367 of SEQ ID NO: 1883768
agacgaaagucaucucuaa

SEQ ID NO: 2214991 - RNA, 19 nt, Artificial Sequence
  Description of Artificial Sequence: Synthetic oligonucleotide
  Antisense strand to SEQ ID NO: 2214990
uuagagaugacuuucgucu

SEQ ID NO: 2214992 - RNA, 19 nt, Artificial Sequence
  Description of Artificial Sequence: Synthetic oligonucleotide
  Sense strand starting at position 1066 of SEQ ID NO: 1883768
ggcuuuccacaggaaaguu

SEQ ID NO: 2214993 - RNA, 19 nt, Artificial Sequence
  Description of Artificial Sequence: Synthetic oligonucleotide
  Antisense strand to SEQ ID NO: 2214992
aacuuuccuguggaaagcc

SEQ ID NO: 2214994 - RNA, 19 nt, Artificial Sequence
  Description of Artificial Sequence: Synthetic oligonucleotide
  Sense strand starting at position 395 of SEQ ID NO: 1883768
ugguuucugguguggauuu

SEQ ID NO: 2214995 - RNA, 19 nt, Artificial Sequence
  Description of Artificial Sequence: Synthetic oligonucleotide
  Antisense strand to SEQ ID NO: 2214994
aaauccacaccagaaacca

SEQ ID NO: 2214996 - RNA, 19 nt, Artificial Sequence
  Description of Artificial Sequence: Synthetic oligonucleotide
  Sense strand starting at position 983 of SEQ ID NO: 1883768
aaagaaaguucuuugugau

SEQ ID NO: 2214997 - RNA, 19 nt, Artificial Sequence
  Description of Artificial Sequence: Synthetic oligonucleotide
  Antisense strand to SEQ ID NO: 2214996
aucacaaagaacuuucuuu

SEQ ID NO: 2214998 - RNA, 19 nt, Artificial Sequence
  Description of Artificial Sequence: Synthetic oligonucleotide
  Sense strand starting at position 598 of SEQ ID NO: 1883768
cccagagaauguguaaauc

SEQ ID NO: 2214999 - RNA, 19 nt, Artificial Sequence
  Description of Artificial Sequence: Synthetic oligonucleotide
  Antisense strand to SEQ ID NO: 2214998
gauuuacacauucucuggg

SEQ ID NO: 2215000 - RNA, 19 nt, Artificial Sequence
  Description of Artificial Sequence: Synthetic oligonucleotide
  Sense strand starting at position 1543 of SEQ ID NO: 1883768
gcaaucauacugugagaaa

SEQ ID NO: 2215001 - RNA, 19 nt, Artificial Sequence
  Description of Artificial Sequence: Synthetic oligonucleotide
  Antisense strand to SEQ ID NO: 2215000
uuucucacaguaugauugc

SEQ ID NO: 2215002 - RNA, 19 nt, Artificial Sequence
  Description of Artificial Sequence: Synthetic oligonucleotide
  Sense strand starting at position 3868 of SEQ ID NO: 1883768
ggagucugcggagaucuaa

SEQ ID NO: 2215003 - RNA, 19 nt, Artificial Sequence
  Description of Artificial Sequence: Synthetic oligonucleotide
  Antisense strand to SEQ ID NO: 2215002
uuagaucuccgcagacucc

SEQ ID NO: 2215004 - RNA, 19 nt, Artificial Sequence
  Description of Artificial Sequence: Synthetic oligonucleotide
  Sense strand starting at position 265 of SEQ ID NO: 1883768
cuggaaagcuauguugaga

SEQ ID NO: 2215005 - RNA, 19 nt, Artificial Sequence
  Description of Artificial Sequence: Synthetic oligonucleotide
  Antisense strand to SEQ ID NO: 2215004
ucucaacauagcuuuccag

SEQ ID NO: 2215006 - RNA, 19 nt, Artificial Sequence
  Description of Artificial Sequence: Synthetic oligonucleotide
  Sense strand starting at position 334 of SEQ ID NO: 1883768
augggaauauggcuaaguu

SEQ ID NO: 2215007 - RNA, 19 nt, Artificial Sequence
  Description of Artificial Sequence: Synthetic oligonucleotide
  Antisense strand to SEQ ID NO: 2215006
aacuuagccauauucccau

SEQ ID NO: 2215008 - RNA, 19 nt, Artificial Sequence
  Description of Artificial Sequence: Synthetic oligonucleotide
  Sense strand starting at position 1774 of SEQ ID NO: 1883768
ccugacaaugcuggaugau

SEQ ID NO: 2215009 - RNA, 19 nt, Artificial Sequence
  Description of Artificial Sequence: Synthetic oligonucleotide
  Antisense strand to SEQ ID NO: 2215008
aucauccagcauugucagg

SEQ ID NO: 2215010 - RNA, 19 nt, Artificial Sequence
  Description of Artificial Sequence: Synthetic oligonucleotide
  Sense strand starting at position 2392 of SEQ ID NO: 1883768
gaguucuagcacugaaagg

SEQ ID NO: 2215011 - RNA, 19 nt, Artificial Sequence
  Description of Artificial Sequence: Synthetic oligonucleotide
  Antisense strand to SEQ ID NO: 2215010
ccuuucagugcuagaacuc

SEQ ID NO: 2215012 - RNA, 19 nt, Artificial Sequence
  Description of Artificial Sequence: Synthetic oligonucleotide
  Sense strand starting at position 3533 of SEQ ID NO: 1883768
ggagaccuccagugaagca

SEQ ID NO: 2215013 - RNA, 19 nt, Artificial Sequence
  Description of Artificial Sequence: Synthetic oligonucleotide
  Antisense strand to SEQ ID NO: 2215012
ugcuucacuggaggucucc

SEQ ID NO: 2215014 - RNA, 19 nt, Artificial Sequence
  Description of Artificial Sequence: Synthetic oligonucleotide
  Sense strand starting at position 338 of SEQ ID NO: 1883768
gaauauggcuaaguuuaca

SEQ ID NO: 2215015 - RNA, 19 nt, Artificial Sequence
  Description of Artificial Sequence: Synthetic oligonucleotide
  Antisense strand to SEQ ID NO: 2215014
uguaaacuuagccauauuc

SEQ ID NO: 2215016 - RNA, 19 nt, Artificial Sequence
  Description of Artificial Sequence: Synthetic oligonucleotide
  Sense strand starting at position 3159 of SEQ ID NO: 1883768
uccaaucaaccuggaguuu

SEQ ID NO: 2215017 - RNA, 19 nt, Artificial Sequence
  Description of Artificial Sequence: Synthetic oligonucleotide
  Antisense strand to SEQ ID NO: 2215016
aaacuccagguugauugga

SEQ ID NO: 2215018 - RNA, 19 nt, Artificial Sequence
  Description of Artificial Sequence: Synthetic oligonucleotide
  Sense strand starting at position 1359 of SEQ ID NO: 1883768
ggaauaaugcucugucaaa

SEQ ID NO: 2215019 - RNA, 19 nt, Artificial Sequence
  Description of Artificial Sequence: Synthetic oligonucleotide
  Antisense strand to SEQ ID NO: 2215018
uuugacagagcauuauucc

SEQ ID NO: 2215020 - RNA, 19 nt, Artificial Sequence
  Description of Artificial Sequence: Synthetic oligonucleotide
  Sense strand starting at position 984 of SEQ ID NO: 1883768
aagaaaguucuuugugauu

SEQ ID NO: 2215021 - RNA, 19 nt, Artificial Sequence
  Description of Artificial Sequence: Synthetic oligonucleotide
  Antisense strand to SEQ ID NO: 2215020
aaucacaaagaacuuucuu

SEQ ID NO: 2215022 - RNA, 19 nt, Artificial Sequence
  Description of Artificial Sequence: Synthetic oligonucleotide
  Sense strand starting at position 1065 of SEQ ID NO: 1883768
aggcuuuccacaggaaagu

SEQ ID NO: 2215023 - RNA, 19 nt, Artificial Sequence
  Description of Artificial Sequence: Synthetic oligonucleotide
  Antisense strand to SEQ ID NO: 2215022
acuuuccuguggaaagccu

SEQ ID NO: 2215024 - RNA, 19 nt, Artificial Sequence
  Description of Artificial Sequence: Synthetic oligonucleotide
  Sense strand starting at position 553 of SEQ ID NO: 1883768
ccuggcuauaccggaagaa

SEQ ID NO: 2215025 - RNA, 19 nt, Artificial Sequence
  Description of Artificial Sequence: Synthetic oligonucleotide
  Antisense strand to SEQ ID NO: 2215024
uucuuccgguauagccagg

SEQ ID NO: 2215026 - RNA, 19 nt, Artificial Sequence
  Description of Artificial Sequence: Synthetic oligonucleotide
  Sense strand starting at position 204 of SEQ ID NO: 1883768
gccacaguucuagagagca

SEQ ID NO: 2215027 - RNA, 19 nt, Artificial Sequence
  Description of Artificial Sequence: Synthetic oligonucleotide
  Antisense strand to SEQ ID NO: 2215026
ugcucucuagaacuguggc

SEQ ID NO: 2215028 - RNA, 19 nt, Artificial Sequence
  Description of Artificial Sequence: Synthetic oligonucleotide
  Sense strand starting at position 1555 of SEQ ID NO: 1883768
ugagaaacggccuaaugcu

SEQ ID NO: 2215029 - RNA, 19 nt, Artificial Sequence
  Description of Artificial Sequence: Synthetic oligonucleotide
  Antisense strand to SEQ ID NO: 2215028
agcauuaggccguuucuca

SEQ ID NO: 2215030 - RNA, 19 nt, Artificial Sequence
  Description of Artificial Sequence: Synthetic oligonucleotide
  Sense strand starting at position 264 of SEQ ID NO: 1883768
ccuggaaagcuauguugag

SEQ ID NO: 2215031 - RNA, 19 nt, Artificial Sequence
  Description of Artificial Sequence: Synthetic oligonucleotide
  Antisense strand to SEQ ID NO: 2215030
cucaacauagcuuuccagg

SEQ ID NO: 2215032 - RNA, 19 nt, Artificial Sequence
  Description of Artificial Sequence: Synthetic oligonucleotide
  Sense strand starting at position 445 of SEQ ID NO: 1883768
acuacugacugagcuguaa

SEQ ID NO: 2215033 - RNA, 19 nt, Artificial Sequence
  Description of Artificial Sequence: Synthetic oligonucleotide
  Antisense strand to SEQ ID NO: 2215032
uuacagcucagucaguagu

SEQ ID NO: 2215034 - RNA, 19 nt, Artificial Sequence
  Description of Artificial Sequence: Synthetic oligonucleotide
  Sense strand starting at position 2618 of SEQ ID NO: 1883768
ccaccuuuggacugcaaau

SEQ ID NO: 2215035 - RNA, 19 nt, Artificial Sequence
  Description of Artificial Sequence: Synthetic oligonucleotide
  Antisense strand to SEQ ID NO: 2215034
auuugcaguccaaaggugg

SEQ ID NO: 2215036 - RNA, 19 nt, Artificial Sequence
  Description of Artificial Sequence: Synthetic oligonucleotide
  Sense strand starting at position 3344 of SEQ ID NO: 1883768
uaggguggccucuaaaugu

SEQ ID NO: 2215037 - RNA, 19 nt, Artificial Sequence
  Description of Artificial Sequence: Synthetic oligonucleotide
  Antisense strand to SEQ ID NO: 2215036
acauuuagaggccacccua

SEQ ID NO: 2215038 - RNA, 19 nt, Artificial Sequence
  Description of Artificial Sequence: Synthetic oligonucleotide
  Sense strand starting at position 693 of SEQ ID NO: 1883768
uucagaggucgguaacagu

SEQ ID NO: 2215039 - RNA, 19 nt, Artificial Sequence
  Description of Artificial Sequence: Synthetic oligonucleotide
  Antisense strand to SEQ ID NO: 2215038
acuguuaccgaccucugaa

SEQ ID NO: 2215040 - RNA, 19 nt, Artificial Sequence
  Description of Artificial Sequence: Synthetic oligonucleotide
  Sense strand starting at position 775 of SEQ ID NO: 1883768
ucuaauaaagucuggcuga

SEQ ID NO: 2215041 - RNA, 19 nt, Artificial Sequence
  Description of Artificial Sequence: Synthetic oligonucleotide
  Antisense strand to SEQ ID NO: 2215040
ucagccagacuuuauuaga

SEQ ID NO: 2215042 - RNA, 19 nt, Artificial Sequence
  Description of Artificial Sequence: Synthetic oligonucleotide
  Sense strand starting at position 1146 of SEQ ID NO: 1883768
ccguccugacuuugaaaga

SEQ ID NO: 2215043 - RNA, 19 nt, Artificial Sequence
  Description of Artificial Sequence: Synthetic oligonucleotide
  Antisense strand to SEQ ID NO: 2215042
ucuuucaaagucaggacgg

SEQ ID NO: 2215044 - RNA, 19 nt, Artificial Sequence
  Description of Artificial Sequence: Synthetic oligonucleotide
  Sense strand starting at position 2489 of SEQ ID NO: 1883768
uugguaaguuccucuagag

SEQ ID NO: 2215045 - RNA, 19 nt, Artificial Sequence
  Description of Artificial Sequence: Synthetic oligonucleotide
  Antisense strand to SEQ ID NO: 2215044
cucuagaggaacuuaccaa

SEQ ID NO: 2215046 - RNA, 19 nt, Artificial Sequence
  Description of Artificial Sequence: Synthetic oligonucleotide
  Sense strand starting at position 2488 of SEQ ID NO: 1883768
uuugguaaguuccucuaga

SEQ ID NO: 2215047 - RNA, 19 nt, Artificial Sequence
  Description of Artificial Sequence: Synthetic oligonucleotide
  Antisense strand to SEQ ID NO: 2215046
ucuagaggaacuuaccaaa

SEQ ID NO: 2215048 - RNA, 19 nt, Artificial Sequence
  Description of Artificial Sequence: Synthetic oligonucleotide
  Sense strand starting at position 2083 of SEQ ID NO: 1883768
acgcuuagacucuggauca

SEQ ID NO: 2215049 - RNA, 19 nt, Artificial Sequence
  Description of Artificial Sequence: Synthetic oligonucleotide
  Antisense strand to SEQ ID NO: 2215048
ugauccagagucuaagcgu

SEQ ID NO: 2215050 - RNA, 19 nt, Artificial Sequence
  Description of Artificial Sequence: Synthetic oligonucleotide
  Sense strand starting at position 402 of SEQ ID NO: 1883768
ugguguggauuucagaaca

SEQ ID NO: 2215051 - RNA, 19 nt, Artificial Sequence
  Description of Artificial Sequence: Synthetic oligonucleotide
  Antisense strand to SEQ ID NO: 2215050
uguucugaaauccacacca

SEQ ID NO: 2215052 - RNA, 19 nt, Artificial Sequence
  Description of Artificial Sequence: Synthetic oligonucleotide
  Sense strand starting at position 905 of SEQ ID NO: 1883769
cuuuaucagguccaugaca

SEQ ID NO: 2215053 - RNA, 19 nt, Artificial Sequence
  Description of Artificial Sequence: Synthetic oligonucleotide
  Antisense strand to SEQ ID NO: 2215052
ugucauggaccugauaaag

SEQ ID NO: 2215054 - RNA, 19 nt, Artificial Sequence
  Description of Artificial Sequence: Synthetic oligonucleotide
  Sense strand starting at position 3760 of SEQ ID NO: 1883769
uuucuuccaccagaagguu

SEQ ID NO: 2215055 - RNA, 19 nt, Artificial Sequence
  Description of Artificial Sequence: Synthetic oligonucleotide
  Antisense strand to SEQ ID NO: 2215054
aaccuucugguggaagaaa

SEQ ID NO: 2215056 - RNA, 19 nt, Artificial Sequence
  Description of Artificial Sequence: Synthetic oligonucleotide
  Sense strand starting at position 3723 of SEQ ID NO: 1883769
gaguguguggaucaaccau

SEQ ID NO: 2215057 - RNA, 19 nt, Artificial Sequence
  Description of Artificial Sequence: Synthetic oligonucleotide
  Antisense strand to SEQ ID NO: 2215056
augguugauccacacacuc

SEQ ID NO: 2215058 - RNA, 19 nt, Artificial Sequence
  Description of Artificial Sequence: Synthetic oligonucleotide
  Sense strand starting at position 1084 of SEQ ID NO: 1883769
ggaaaccuguucucggaga

SEQ ID NO: 2215059 - RNA, 19 nt, Artificial Sequence
  Description of Artificial Sequence: Synthetic oligonucleotide
  Antisense strand to SEQ ID NO: 2215058
ucuccgagaacagguuucc

SEQ ID NO: 2215060 - RNA, 19 nt, Artificial Sequence
  Description of Artificial Sequence: Synthetic oligonucleotide
  Sense strand starting at position 907 of SEQ ID NO: 1883769
uuaucagguccaugacacu

SEQ ID NO: 2215061 - RNA, 19 nt, Artificial Sequence
  Description of Artificial Sequence: Synthetic oligonucleotide
  Antisense strand to SEQ ID NO: 2215060
agugucauggaccugauaa

SEQ ID NO: 2215062 - RNA, 19 nt, Artificial Sequence
  Description of Artificial Sequence: Synthetic oligonucleotide
  Sense strand starting at position 3590 of SEQ ID NO: 1883769
ugaauuucuccgugugggu

SEQ ID NO: 2215063 - RNA, 19 nt, Artificial Sequence
  Description of Artificial Sequence: Synthetic oligonucleotide
  Antisense strand to SEQ ID NO: 2215062
acccacacggagaaauuca

SEQ ID NO: 2215064 - RNA, 19 nt, Artificial Sequence
  Description of Artificial Sequence: Synthetic oligonucleotide
  Sense strand starting at position 1154 of SEQ ID NO: 1883769
agagauccucagugccaga

SEQ ID NO: 2215065 - RNA, 19 nt, Artificial Sequence
  Description of Artificial Sequence: Synthetic oligonucleotide
  Antisense strand to SEQ ID NO: 2215064
ucuggcacugaggaucucu

SEQ ID NO: 2215066 - RNA, 19 nt, Artificial Sequence
  Description of Artificial Sequence: Synthetic oligonucleotide
  Sense strand starting at position 236 of SEQ ID NO: 1883769
acuccagcugagugaagau

SEQ ID NO: 2215067 - RNA, 19 nt, Artificial Sequence
  Description of Artificial Sequence: Synthetic oligonucleotide
  Antisense strand to SEQ ID NO: 2215066
aucuucacucagcuggagu

SEQ ID NO: 2215068 - RNA, 19 nt, Artificial Sequence
  Description of Artificial Sequence: Synthetic oligonucleotide
  Sense strand starting at position 1153 of SEQ ID NO: 1883769
gagagauccucagugccag

SEQ ID NO: 2215069 - RNA, 19 nt, Artificial Sequence
  Description of Artificial Sequence: Synthetic oligonucleotide
  Antisense strand to SEQ ID NO: 2215068
cuggcacugaggaucucuc

SEQ ID NO: 2215070 - RNA, 19 nt, Artificial Sequence
  Description of Artificial Sequence: Synthetic oligonucleotide
  Sense strand starting at position 2045 of SEQ ID NO: 1883769
ggauuuauguuaugaaaga

SEQ ID NO: 2215071 - RNA, 19 nt, Artificial Sequence
  Description of Artificial Sequence: Synthetic oligonucleotide
  Antisense strand to SEQ ID NO: 2215070
ucuuucauaacauaaaucc

SEQ ID NO: 2215072 - RNA, 19 nt, Artificial Sequence
  Description of Artificial Sequence: Synthetic oligonucleotide
  Sense strand starting at position 896 of SEQ ID NO: 1883769
ggaguuucgcuuuaucagg

SEQ ID NO: 2215073 - RNA, 19 nt, Artificial Sequence
  Description of Artificial Sequence: Synthetic oligonucleotide
  Antisense strand to SEQ ID NO: 2215072
ccugauaaagcgaaacucc

SEQ ID NO: 2215074 - RNA, 19 nt, Artificial Sequence
  Description of Artificial Sequence: Synthetic oligonucleotide
  Sense strand starting at position 2023 of SEQ ID NO: 1883769
cguccaugaccauauuguu

SEQ ID NO: 2215075 - RNA, 19 nt, Artificial Sequence
  Description of Artificial Sequence: Synthetic oligonucleotide
  Antisense strand to SEQ ID NO: 2215074
aacaauauggucauggacg

SEQ ID NO: 2215076 - RNA, 19 nt, Artificial Sequence
  Description of Artificial Sequence: Synthetic oligonucleotide
  Sense strand starting at position 1086 of SEQ ID NO: 1883769
aaaccuguucucggagagu

SEQ ID NO: 2215077 - RNA, 19 nt, Artificial Sequence
  Description of Artificial Sequence: Synthetic oligonucleotide
  Antisense strand to SEQ ID NO: 2215076
acucuccgagaacagguuu

SEQ ID NO: 2215078 - RNA, 19 nt, Artificial Sequence
  Description of Artificial Sequence: Synthetic oligonucleotide
  Sense strand starting at position 256 of SEQ ID NO: 1883769
auggcauagucucugaagu

SEQ ID NO: 2215079 - RNA, 19 nt, Artificial Sequence
  Description of Artificial Sequence: Synthetic oligonucleotide
  Antisense strand to SEQ ID NO: 2215078
acuucagagacuaugccau

SEQ ID NO: 2215080 - RNA, 19 nt, Artificial Sequence
  Description of Artificial Sequence: Synthetic oligonucleotide
  Sense strand starting at position 1082 of SEQ ID NO: 1883769
ccggaaaccuguucucgga

SEQ ID NO: 2215081 - RNA, 19 nt, Artificial Sequence
  Description of Artificial Sequence: Synthetic oligonucleotide
  Antisense strand to SEQ ID NO: 2215080
uccgagaacagguuuccgg

SEQ ID NO: 2215082 - RNA, 19 nt, Artificial Sequence
  Description of Artificial Sequence: Synthetic oligonucleotide
  Sense strand starting at position 302 of SEQ ID NO: 1883769
cgccuauugcuaggaaaca

SEQ ID NO: 2215083 - RNA, 19 nt, Artificial Sequence
  Description of Artificial Sequence: Synthetic oligonucleotide
  Antisense strand to SEQ ID NO: 2215082
uguuuccuagcaauaggcg

SEQ ID NO: 2215084 - RNA, 19 nt, Artificial Sequence
  Description of Artificial Sequence: Synthetic oligonucleotide
  Sense strand starting at position 257 of SEQ ID NO: 1883769
uggcauagucucugaaguu

SEQ ID NO: 2215085 - RNA, 19 nt, Artificial Sequence
  Description of Artificial Sequence: Synthetic oligonucleotide
  Antisense strand to SEQ ID NO: 2215084
aacuucagagacuaugcca

SEQ ID NO: 2215086 - RNA, 19 nt, Artificial Sequence
  Description of Artificial Sequence: Synthetic oligonucleotide
  Sense strand starting at position 2067 of SEQ ID NO: 1883769
agugguucuuagguccgaa

SEQ ID NO: 2215087 - RNA, 19 nt, Artificial Sequence
  Description of Artificial Sequence: Synthetic oligonucleotide
  Antisense strand to SEQ ID NO: 2215086
uucggaccuaagaaccacu

SEQ ID NO: 2215088 - RNA, 19 nt, Artificial Sequence
  Description of Artificial Sequence: Synthetic oligonucleotide
  Sense strand starting at position 1508 of SEQ ID NO: 1883769
gugcaaugguguuugccaa

SEQ ID NO: 2215089 - RNA, 19 nt, Artificial Sequence
  Description of Artificial Sequence: Synthetic oligonucleotide
  Antisense strand to SEQ ID NO: 2215088
uuggcaaacaccauugcac

SEQ ID NO: 2215090 - RNA, 19 nt, Artificial Sequence
  Description of Artificial Sequence: Synthetic oligonucleotide
  Sense strand starting at position 1826 of SEQ ID NO: 1883769
ccacucuucugugaaggga

SEQ ID NO: 2215091 - RNA, 19 nt, Artificial Sequence
  Description of Artificial Sequence: Synthetic oligonucleotide
  Antisense strand to SEQ ID NO: 2215090
ucccuucacagaagagugg

SEQ ID NO: 2215092 - RNA, 19 nt, Artificial Sequence
  Description of Artificial Sequence: Synthetic oligonucleotide
  Sense strand starting at position 893 of SEQ ID NO: 1883769
uccggaguuucgcuuuauc

SEQ ID NO: 2215093 - RNA, 19 nt, Artificial Sequence
  Description of Artificial Sequence: Synthetic oligonucleotide
  Antisense strand to SEQ ID NO: 2215092
gauaaagcgaaacuccgga

SEQ ID NO: 2215094 - RNA, 19 nt, Artificial Sequence
  Description of Artificial Sequence: Synthetic oligonucleotide
  Sense strand starting at position 861 of SEQ ID NO: 1883769
ccgucagacucacagggau

SEQ ID NO: 2215095 - RNA, 19 nt, Artificial Sequence
  Description of Artificial Sequence: Synthetic oligonucleotide
  Antisense strand to SEQ ID NO: 2215094
aucccugugagucugacgg

SEQ ID NO: 2215096 - RNA, 19 nt, Artificial Sequence
  Description of Artificial Sequence: Synthetic oligonucleotide
  Sense strand starting at position 245 of SEQ ID NO: 1883769
gagugaagaugauggcaua

SEQ ID NO: 2215097 - RNA, 19 nt, Artificial Sequence
  Description of Artificial Sequence: Synthetic oligonucleotide
  Antisense strand to SEQ ID NO: 2215096
uaugccaucaucuucacuc

SEQ ID NO: 2215098 - RNA, 19 nt, Artificial Sequence
  Description of Artificial Sequence: Synthetic oligonucleotide
  Sense strand starting at position 303 of SEQ ID NO: 1883769
gccuauugcuaggaaacaa

SEQ ID NO: 2215099 - RNA, 19 nt, Artificial Sequence
  Description of Artificial Sequence: Synthetic oligonucleotide
  Antisense strand to SEQ ID NO: 2215098
uuguuuccuagcaauaggc

SEQ ID NO: 2215100 - RNA, 19 nt, Artificial Sequence
  Description of Artificial Sequence: Synthetic oligonucleotide
  Sense strand starting at position 1512 of SEQ ID NO: 1883769
aaugguguuugccaaggaa

SEQ ID NO: 2215101 - RNA, 19 nt, Artificial Sequence
  Description of Artificial Sequence: Synthetic oligonucleotide
  Antisense strand to SEQ ID NO: 2215100
uuccuuggcaaacaccauu

SEQ ID NO: 2215102 - RNA, 19 nt, Artificial Sequence
  Description of Artificial Sequence: Synthetic oligonucleotide
  Sense strand starting at position 258 of SEQ ID NO: 1883769
ggcauagucucugaaguug

SEQ ID NO: 2215103 - RNA, 19 nt, Artificial Sequence
  Description of Artificial Sequence: Synthetic oligonucleotide
  Antisense strand to SEQ ID NO: 2215102
caacuucagagacuaugcc

SEQ ID NO: 2215104 - RNA, 19 nt, Artificial Sequence
  Description of Artificial Sequence: Synthetic oligonucleotide
  Sense strand starting at position 300 of SEQ ID NO: 1883769
cacgccuauugcuaggaaa

SEQ ID NO: 2215105 - RNA, 19 nt, Artificial Sequence
  Description of Artificial Sequence: Synthetic oligonucleotide
  Antisense strand to SEQ ID NO: 2215104
uuuccuagcaauaggcgug

SEQ ID NO: 2215106 - RNA, 19 nt, Artificial Sequence
  Description of Artificial Sequence: Synthetic oligonucleotide
  Sense strand starting at position 3719 of SEQ ID NO: 1883769
ucuggaguguguggaucaa

SEQ ID NO: 2215107 - RNA, 19 nt, Artificial Sequence
  Description of Artificial Sequence: Synthetic oligonucleotide
  Antisense strand to SEQ ID NO: 2215106
uugauccacacacuccaga

SEQ ID NO: 2215108 - RNA, 19 nt, Artificial Sequence
  Description of Artificial Sequence: Synthetic oligonucleotide
  Sense strand starting at position 1823 of SEQ ID NO: 1883769
aggccacucuucugugaag

SEQ ID NO: 2215109 - RNA, 19 nt, Artificial Sequence
  Description of Artificial Sequence: Synthetic oligonucleotide
  Antisense strand to SEQ ID NO: 2215108
cuucacagaagaguggccu

SEQ ID NO: 2215110 - RNA, 19 nt, Artificial Sequence
  Description of Artificial Sequence: Synthetic oligonucleotide
  Sense strand starting at position 2071 of SEQ ID NO: 1883769
guucuuagguccgaaugca

SEQ ID NO: 2215111 - RNA, 19 nt, Artificial Sequence
  Description of Artificial Sequence: Synthetic oligonucleotide
  Antisense strand to SEQ ID NO: 2215110
ugcauucggaccuaagaac

SEQ ID NO: 2215112 - RNA, 19 nt, Artificial Sequence
  Description of Artificial Sequence: Synthetic oligonucleotide
  Sense strand starting at position 1052 of SEQ ID NO: 1883769
gcuuccaucuucugccaga

SEQ ID NO: 2215113 - RNA, 19 nt, Artificial Sequence
  Description of Artificial Sequence: Synthetic oligonucleotide
  Antisense strand to SEQ ID NO: 2215112
ucuggcagaagauggaagc

SEQ ID NO: 2215114 - RNA, 19 nt, Artificial Sequence
  Description of Artificial Sequence: Synthetic oligonucleotide
  Sense strand starting at position 2256 of SEQ ID NO: 1883770
gggcuuagaccaggagaca

SEQ ID NO: 2215115 - RNA, 19 nt, Artificial Sequence
  Description of Artificial Sequence: Synthetic oligonucleotide
  Antisense strand to SEQ ID NO: 2215114
ugucuccuggucuaagccc

SEQ ID NO: 2215116 - RNA, 19 nt, Artificial Sequence
  Description of Artificial Sequence: Synthetic oligonucleotide
  Sense strand starting at position 2578 of SEQ ID NO: 1883770
agggaucugagcugagaca

SEQ ID NO: 2215117 - RNA, 19 nt, Artificial Sequence
  Description of Artificial Sequence: Synthetic oligonucleotide
  Antisense strand to SEQ ID NO: 2215116
ugucucagcucagaucccu

SEQ ID NO: 2215118 - RNA, 19 nt, Artificial Sequence
  Description of Artificial Sequence: Synthetic oligonucleotide
  Sense strand starting at position 1089 of SEQ ID NO: 1883770
ggcuauguucucgcucaac

SEQ ID NO: 2215119 - RNA, 19 nt, Artificial Sequence
  Description of Artificial Sequence: Synthetic oligonucleotide
  Antisense strand to SEQ ID NO: 2215118
guugagcgagaacauagcc

SEQ ID NO: 2215120 - RNA, 19 nt, Artificial Sequence
  Description of Artificial Sequence: Synthetic oligonucleotide
  Sense strand starting at position 2335 of SEQ ID NO: 1883770
agagucugggcugagacau

SEQ ID NO: 2215121 - RNA, 19 nt, Artificial Sequence
  Description of Artificial Sequence: Synthetic oligonucleotide
  Antisense strand to SEQ ID NO: 2215120
augucucagcccagacucu

SEQ ID NO: 2215122 - RNA, 19 nt, Artificial Sequence
  Description of Artificial Sequence: Synthetic oligonucleotide
  Sense strand starting at position 3873 of SEQ ID NO: 1883770
uucucauaucuggagagca

SEQ ID NO: 2215123 - RNA, 19 nt, Artificial Sequence
  Description of Artificial Sequence: Synthetic oligonucleotide
  Antisense strand to SEQ ID NO: 2215122
ugcucuccagauaugagaa

SEQ ID NO: 2215124 - RNA, 19 nt, Artificial Sequence
  Description of Artificial Sequence: Synthetic oligonucleotide
  Sense strand starting at position 2124 of SEQ ID NO: 1883770
ggguuugggagucaucaac

SEQ ID NO: 2215125 - RNA, 19 nt, Artificial Sequence
  Description of Artificial Sequence: Synthetic oligonucleotide
  Antisense strand to SEQ ID NO: 2215124
guugaugacucccaaaccc

SEQ ID NO: 2215126 - RNA, 19 nt, Artificial Sequence
  Description of Artificial Sequence: Synthetic oligonucleotide
  Sense strand starting at position 298 of SEQ ID NO: 1883770
agaagagucagaggucuca

SEQ ID NO: 2215127 - RNA, 19 nt, Artificial Sequence
  Description of Artificial Sequence: Synthetic oligonucleotide
  Antisense strand to SEQ ID NO: 2215126
ugagaccucugacucuucu

SEQ ID NO: 2215128 - RNA, 19 nt, Artificial Sequence
  Description of Artificial Sequence: Synthetic oligonucleotide
  Sense strand starting at position 2631 of SEQ ID NO: 1883770
gcugaagugaaucacaagu

SEQ ID NO: 2215129 - RNA, 19 nt, Artificial Sequence
  Description of Artificial Sequence: Synthetic oligonucleotide
  Antisense strand to SEQ ID NO: 2215128
acuugugauucacuucagc

SEQ ID NO: 2215130 - RNA, 19 nt, Artificial Sequence
  Description of Artificial Sequence: Synthetic oligonucleotide
  Sense strand starting at position 2288 of SEQ ID NO: 1883770
acucuuugaagaggaguuu

SEQ ID NO: 2215131 - RNA, 19 nt, Artificial Sequence
  Description of Artificial Sequence: Synthetic oligonucleotide
  Antisense strand to SEQ ID NO: 2215130
aaacuccucuucaaagagu

SEQ ID NO: 2215132 - RNA, 19 nt, Artificial Sequence
  Description of Artificial Sequence: Synthetic oligonucleotide
  Sense strand starting at position 2000 of SEQ ID NO: 1883770
gaaugaucugagcaccugu

SEQ ID NO: 2215133 - RNA, 19 nt, Artificial Sequence
  Description of Artificial Sequence: Synthetic oligonucleotide
  Antisense strand to SEQ ID NO: 2215132
acaggugcucagaucauuc

SEQ ID NO: 2215134 - RNA, 19 nt, Artificial Sequence
  Description of Artificial Sequence: Synthetic oligonucleotide
  Sense strand starting at position 3870 of SEQ ID NO: 1883770
caguucucauaucuggaga

SEQ ID NO: 2215135 - RNA, 19 nt, Artificial Sequence
  Description of Artificial Sequence: Synthetic oligonucleotide
  Antisense strand to SEQ ID NO: 2215134
ucuccagauaugagaacug

SEQ ID NO: 2215136 - RNA, 19 nt, Artificial Sequence
  Description of Artificial Sequence: Synthetic oligonucleotide
  Sense strand starting at position 929 of SEQ ID NO: 1883770
gcagauugauuacucuaca

SEQ ID NO: 2215137 - RNA, 19 nt, Artificial Sequence
  Description of Artificial Sequence: Synthetic oligonucleotide
  Antisense strand to SEQ ID NO: 2215136
uguagaguaaucaaucugc

SEQ ID NO: 2215138 - RNA, 19 nt, Artificial Sequence
  Description of Artificial Sequence: Synthetic oligonucleotide
  Sense strand starting at position 2117 of SEQ ID NO: 1883770
ggaucauggguuugggagu

SEQ ID NO: 2215139 - RNA, 19 nt, Artificial Sequence
  Description of Artificial Sequence: Synthetic oligonucleotide
  Antisense strand to SEQ ID NO: 2215138
acucccaaacccaugaucc

SEQ ID NO: 2215140 - RNA, 19 nt, Artificial Sequence
  Description of Artificial Sequence: Synthetic oligonucleotide
  Sense strand starting at position 3180 of SEQ ID NO: 1883770
gggcuaccugugggaugaa

SEQ ID NO: 2215141 - RNA, 19 nt, Artificial Sequence
  Description of Artificial Sequence: Synthetic oligonucleotide
  Antisense strand to SEQ ID NO: 2215140
uucaucccacagguagccc

SEQ ID NO: 2215142 - RNA, 19 nt, Artificial Sequence
  Description of Artificial Sequence: Synthetic oligonucleotide
  Sense strand starting at position 3820 of SEQ ID NO: 1883770
ggcuccucugcugacagaa

SEQ ID NO: 2215143 - RNA, 19 nt, Artificial Sequence
  Description of Artificial Sequence: Synthetic oligonucleotide
  Antisense strand to SEQ ID NO: 2215142
uucugucagcagaggagcc

SEQ ID NO: 2215144 - RNA, 19 nt, Artificial Sequence
  Description of Artificial Sequence: Synthetic oligonucleotide
  Sense strand starting at position 3122 of SEQ ID NO: 1883770
ggacucgagaacuguaucu

SEQ ID NO: 2215145 - RNA, 19 nt, Artificial Sequence
  Description of Artificial Sequence: Synthetic oligonucleotide
  Antisense strand to SEQ ID NO: 2215144
agauacaguucucgagucc

SEQ ID NO: 2215146 - RNA, 19 nt, Artificial Sequence
  Description of Artificial Sequence: Synthetic oligonucleotide
  Sense strand starting at position 2454 of SEQ ID NO: 1883770
cggagaaggccugguggaa

SEQ ID NO: 2215147 - RNA, 19 nt, Artificial Sequence
  Description of Artificial Sequence: Synthetic oligonucleotide
  Antisense strand to SEQ ID NO: 2215146
uuccaccaggccuucuccg

SEQ ID NO: 2215148 - RNA, 19 nt, Artificial Sequence
  Description of Artificial Sequence: Synthetic oligonucleotide
  Sense strand starting at position 2593 of SEQ ID NO: 1883770
gacauaaacugaucccguu

SEQ ID NO: 2215149 - RNA, 19 nt, Artificial Sequence
  Description of Artificial Sequence: Synthetic oligonucleotide
  Antisense strand to SEQ ID NO: 2215148
aacgggaucaguuuauguc

SEQ ID NO: 2215150 - RNA, 19 nt, Artificial Sequence
  Description of Artificial Sequence: Synthetic oligonucleotide
  Sense strand starting at position 653 of SEQ ID NO: 1883770
gggugagcucccugaacag

SEQ ID NO: 2215151 - RNA, 19 nt, Artificial Sequence
  Description of Artificial Sequence: Synthetic oligonucleotide
  Antisense strand to SEQ ID NO: 2215150
cuguucagggagcucaccc

SEQ ID NO: 2215152 - RNA, 19 nt, Artificial Sequence
  Description of Artificial Sequence: Synthetic oligonucleotide
  Sense strand starting at position 2007 of SEQ ID NO: 1883770
cugagcaccugucugaaga

SEQ ID NO: 2215153 - RNA, 19 nt, Artificial Sequence
  Description of Artificial Sequence: Synthetic oligonucleotide
  Antisense strand to SEQ ID NO: 2215152
ucuucagacaggugcucag

SEQ ID NO: 2215154 - RNA, 19 nt, Artificial Sequence
  Description of Artificial Sequence: Synthetic oligonucleotide
  Sense strand starting at position 1643 of SEQ ID NO: 1883770
cuuucuagcuagcuagaaa

SEQ ID NO: 2215155 - RNA, 19 nt, Artificial Sequence
  Description of Artificial Sequence: Synthetic oligonucleotide
  Antisense strand to SEQ ID NO: 2215154
uuucuagcuagcuagaaag

SEQ ID NO: 2215156 - RNA, 19 nt, Artificial Sequence
  Description of Artificial Sequence: Synthetic oligonucleotide
  Sense strand starting at position 3832 of SEQ ID NO: 1883770
gacagaagugccugagcca

SEQ ID NO: 2215157 - RNA, 19 nt, Artificial Sequence
  Description of Artificial Sequence: Synthetic oligonucleotide
  Antisense strand to SEQ ID NO: 2215156
uggcucaggcacuucuguc

SEQ ID NO: 2215158 - RNA, 19 nt, Artificial Sequence
  Description of Artificial Sequence: Synthetic oligonucleotide
  Sense strand starting at position 1671 of SEQ ID NO: 1883770
ggaggaaugguguguccuu

SEQ ID NO: 2215159 - RNA, 19 nt, Artificial Sequence
  Description of Artificial Sequence: Synthetic oligonucleotide
  Antisense strand to SEQ ID NO: 2215158
aaggacacaccauuccucc

SEQ ID NO: 2215160 - RNA, 19 nt, Artificial Sequence
  Description of Artificial Sequence: Synthetic oligonucleotide
  Sense strand starting at position 2804 of SEQ ID NO: 1883770
cuaguugccucacccagaa

SEQ ID NO: 2215161 - RNA, 19 nt, Artificial Sequence
  Description of Artificial Sequence: Synthetic oligonucleotide
  Antisense strand to SEQ ID NO: 2215160
uucugggugaggcaacuag

SEQ ID NO: 2215162 - RNA, 19 nt, Artificial Sequence
  Description of Artificial Sequence: Synthetic oligonucleotide
  Sense strand starting at position 3712 of SEQ ID NO: 1883770
guccuuguccuguaggauu

SEQ ID NO: 2215163 - RNA, 19 nt, Artificial Sequence
  Description of Artificial Sequence: Synthetic oligonucleotide
  Antisense strand to SEQ ID NO: 2215162
aauccuacaggacaaggac

SEQ ID NO: 2215164 - RNA, 19 nt, Artificial Sequence
  Description of Artificial Sequence: Synthetic oligonucleotide
  Sense strand starting at position 3142 of SEQ ID NO: 1883770
gcaggacccauguguuaua

SEQ ID NO: 2215165 - RNA, 19 nt, Artificial Sequence
  Description of Artificial Sequence: Synthetic oligonucleotide
  Antisense strand to SEQ ID NO: 2215164
uauaacacauggguccugc

SEQ ID NO: 2215166 - RNA, 19 nt, Artificial Sequence
  Description of Artificial Sequence: Synthetic oligonucleotide
  Sense strand starting at position 2310 of SEQ ID NO: 1883770
ggguucugguacuugcaaa

SEQ ID NO: 2215167 - RNA, 19 nt, Artificial Sequence
  Description of Artificial Sequence: Synthetic oligonucleotide
  Antisense strand to SEQ ID NO: 2215166
uuugcaaguaccagaaccc

SEQ ID NO: 2215168 - RNA, 19 nt, Artificial Sequence
  Description of Artificial Sequence: Synthetic oligonucleotide
  Sense strand starting at position 12 of SEQ ID NO: 1883770
gggaguacucuguggccua

SEQ ID NO: 2215169 - RNA, 19 nt, Artificial Sequence
  Description of Artificial Sequence: Synthetic oligonucleotide
  Antisense strand to SEQ ID NO: 2215168
uaggccacagaguacuccc

SEQ ID NO: 2215170 - RNA, 19 nt, Artificial Sequence
  Description of Artificial Sequence: Synthetic oligonucleotide
  Sense strand starting at position 1559 of SEQ ID NO: 1883770
gguggaucuuggcugaugu

SEQ ID NO: 2215171 - RNA, 19 nt, Artificial Sequence
  Description of Artificial Sequence: Synthetic oligonucleotide
  Antisense strand to SEQ ID NO: 2215170
acaucagccaagauccacc

SEQ ID NO: 2215172 - RNA, 19 nt, Artificial Sequence
  Description of Artificial Sequence: Synthetic oligonucleotide
  Sense strand starting at position 2599 of SEQ ID NO: 1883770
aacugaucccguugacugu

SEQ ID NO: 2215173 - RNA, 19 nt, Artificial Sequence
  Description of Artificial Sequence: Synthetic oligonucleotide
  Antisense strand to SEQ ID NO: 2215172
acagucaacgggaucaguu

SEQ ID NO: 2215174 - RNA, 19 nt, Artificial Sequence
  Description of Artificial Sequence: Synthetic oligonucleotide
  Sense strand starting at position 3951 of SEQ ID NO: 1883770
auggucugcucuucugauu

SEQ ID NO: 2215175 - RNA, 19 nt, Artificial Sequence
  Description of Artificial Sequence: Synthetic oligonucleotide
  Antisense strand to SEQ ID NO: 2215174
aaucagaagagcagaccau

SEQ ID NO: 2215176 - RNA, 19 nt, Artificial Sequence
  Description of Artificial Sequence: Synthetic oligonucleotide
  Sense strand starting at position 3764 of SEQ ID NO: 1883770
gcacauaagugcuugugga

SEQ ID NO: 2215177 - RNA, 19 nt, Artificial Sequence
  Description of Artificial Sequence: Synthetic oligonucleotide
  Antisense strand to SEQ ID NO: 2215176
uccacaagcacuuaugugc

SEQ ID NO: 2215178 - RNA, 19 nt, Artificial Sequence
  Description of Artificial Sequence: Synthetic oligonucleotide
  Sense strand starting at position 2865 of SEQ ID NO: 1883770
uauggaucuugcguguaga

SEQ ID NO: 2215179 - RNA, 19 nt, Artificial Sequence
  Description of Artificial Sequence: Synthetic oligonucleotide
  Antisense strand to SEQ ID NO: 2215178
ucuacacgcaagauccaua

SEQ ID NO: 2215180 - RNA, 19 nt, Artificial Sequence
  Description of Artificial Sequence: Synthetic oligonucleotide
  Sense strand starting at position 3501 of SEQ ID NO: 1883770
ugugccuucuccuccagau

SEQ ID NO: 2215181 - RNA, 19 nt, Artificial Sequence
  Description of Artificial Sequence: Synthetic oligonucleotide
  Antisense strand to SEQ ID NO: 2215180
aucuggaggagaaggcaca

SEQ ID NO: 2215182 - RNA, 19 nt, Artificial Sequence
  Description of Artificial Sequence: Synthetic oligonucleotide
  Sense strand starting at position 2866 of SEQ ID NO: 1883770
auggaucuugcguguagac

SEQ ID NO: 2215183 - RNA, 19 nt, Artificial Sequence
  Description of Artificial Sequence: Synthetic oligonucleotide
  Antisense strand to SEQ ID NO: 2215182
gucuacacgcaagauccau

SEQ ID NO: 2215184 - RNA, 19 nt, Artificial Sequence
  Description of Artificial Sequence: Synthetic oligonucleotide
  Sense strand starting at position 179 of SEQ ID NO: 1883770
ccaugcuguugugucaaca

SEQ ID NO: 2215185 - RNA, 19 nt, Artificial Sequence
  Description of Artificial Sequence: Synthetic oligonucleotide
  Antisense strand to SEQ ID NO: 2215184
uguugacacaacagcaugg

SEQ ID NO: 2215186 - RNA, 19 nt, Artificial Sequence
  Description of Artificial Sequence: Synthetic oligonucleotide
  Sense strand starting at position 1540 of SEQ ID NO: 1883770
cccagagucuuugugcuuu

SEQ ID NO: 2215187 - RNA, 19 nt, Artificial Sequence
  Description of Artificial Sequence: Synthetic oligonucleotide
  Antisense strand to SEQ ID NO: 2215186
aaagcacaaagacucuggg

SEQ ID NO: 2215188 - RNA, 19 nt, Artificial Sequence
  Description of Artificial Sequence: Synthetic oligonucleotide
  Sense strand starting at position 2746 of SEQ ID NO: 1883770
gacugcuacugggaugaga

SEQ ID NO: 2215189 - RNA, 19 nt, Artificial Sequence
  Description of Artificial Sequence: Synthetic oligonucleotide
  Antisense strand to SEQ ID NO: 2215188
ucucaucccaguagcaguc

SEQ ID NO: 2215190 - RNA, 19 nt, Artificial Sequence
  Description of Artificial Sequence: Synthetic oligonucleotide
  Sense strand starting at position 35 of SEQ ID NO: 1883770
ccuauuacccagcguggua

SEQ ID NO: 2215191 - RNA, 19 nt, Artificial Sequence
  Description of Artificial Sequence: Synthetic oligonucleotide
  Antisense strand to SEQ ID NO: 2215190
uaccacgcuggguaauagg

SEQ ID NO: 2215192 - RNA, 19 nt, Artificial Sequence
  Description of Artificial Sequence: Synthetic oligonucleotide
  Sense strand starting at position 1546 of SEQ ID NO: 1883770
gucuuugugcuuuggugga

SEQ ID NO: 2215193 - RNA, 19 nt, Artificial Sequence
  Description of Artificial Sequence: Synthetic oligonucleotide
  Antisense strand to SEQ ID NO: 2215192
uccaccaaagcacaaagac

SEQ ID NO: 2215194 - RNA, 19 nt, Artificial Sequence
  Description of Artificial Sequence: Synthetic oligonucleotide
  Sense strand starting at position 3097 of SEQ ID NO: 1883771
cagggagaagucugguaaa

SEQ ID NO: 2215195 - RNA, 19 nt, Artificial Sequence
  Description of Artificial Sequence: Synthetic oligonucleotide
  Antisense strand to SEQ ID NO: 2215194
uuuaccagacuucucccug

SEQ ID NO: 2215196 - RNA, 19 nt, Artificial Sequence
  Description of Artificial Sequence: Synthetic oligonucleotide
  Sense strand starting at position 361 of SEQ ID NO: 1883771
caaagagguuuagugaaac

SEQ ID NO: 2215197 - RNA, 19 nt, Artificial Sequence
  Description of Artificial Sequence: Synthetic oligonucleotide
  Antisense strand to SEQ ID NO: 2215196
guuucacuaaaccucuuug

SEQ ID NO: 2215198 - RNA, 19 nt, Artificial Sequence
  Description of Artificial Sequence: Synthetic oligonucleotide
  Sense strand starting at position 89 of SEQ ID NO: 1883771
guuugagagccauauauaa

SEQ ID NO: 2215199 - RNA, 19 nt, Artificial Sequence
  Description of Artificial Sequence: Synthetic oligonucleotide
  Antisense strand to SEQ ID NO: 2215198
uuauauauggcucucaaac

SEQ ID NO: 2215200 - RNA, 19 nt, Artificial Sequence
  Description of Artificial Sequence: Synthetic oligonucleotide
  Sense strand starting at position 2307 of SEQ ID NO: 1883771
uagugaugagcugauugau

SEQ ID NO: 2215201 - RNA, 19 nt, Artificial Sequence
  Description of Artificial Sequence: Synthetic oligonucleotide
  Antisense strand to SEQ ID NO: 2215200
aucaaucagcucaucacua

SEQ ID NO: 2215202 - RNA, 19 nt, Artificial Sequence
  Description of Artificial Sequence: Synthetic oligonucleotide
  Sense strand starting at position 205 of SEQ ID NO: 1883771
gucagauauuuggaaagga

SEQ ID NO: 2215203 - RNA, 19 nt, Artificial Sequence
  Description of Artificial Sequence: Synthetic oligonucleotide
  Antisense strand to SEQ ID NO: 2215202
uccuuuccaaauaucugac

SEQ ID NO: 2215204 - RNA, 19 nt, Artificial Sequence
  Description of Artificial Sequence: Synthetic oligonucleotide
  Sense strand starting at position 3168 of SEQ ID NO: 1883771
cugggaagucagggucaaa

SEQ ID NO: 2215205 - RNA, 19 nt, Artificial Sequence
  Description of Artificial Sequence: Synthetic oligonucleotide
  Antisense strand to SEQ ID NO: 2215204
uuugacccugacuucccag

SEQ ID NO: 2215206 - RNA, 19 nt, Artificial Sequence
  Description of Artificial Sequence: Synthetic oligonucleotide
  Sense strand starting at position 1748 of SEQ ID NO: 1883771
guaugucaggcugagagaa

SEQ ID NO: 2215207 - RNA, 19 nt, Artificial Sequence
  Description of Artificial Sequence: Synthetic oligonucleotide
  Antisense strand to SEQ ID NO: 2215206
uucucucagccugacauac

SEQ ID NO: 2215208 - RNA, 19 nt, Artificial Sequence
  Description of Artificial Sequence: Synthetic oligonucleotide
  Sense strand starting at position 2059 of SEQ ID NO: 1883771
ugaguucuccauuacacug

SEQ ID NO: 2215209 - RNA, 19 nt, Artificial Sequence
  Description of Artificial Sequence: Synthetic oligonucleotide
  Antisense strand to SEQ ID NO: 2215208
caguguaauggagaacuca

SEQ ID NO: 2215210 - RNA, 19 nt, Artificial Sequence
  Description of Artificial Sequence: Synthetic oligonucleotide
  Sense strand starting at position 2712 of SEQ ID NO: 1883771
ggaucuucuuucccagaca

SEQ ID NO: 2215211 - RNA, 19 nt, Artificial Sequence
  Description of Artificial Sequence: Synthetic oligonucleotide
  Antisense strand to SEQ ID NO: 2215210
ugucugggaaagaagaucc

SEQ ID NO: 2215212 - RNA, 19 nt, Artificial Sequence
  Description of Artificial Sequence: Synthetic oligonucleotide
  Sense strand starting at position 2056 of SEQ ID NO: 1883771
cuuugaguucuccauuaca

SEQ ID NO: 2215213 - RNA, 19 nt, Artificial Sequence
  Description of Artificial Sequence: Synthetic oligonucleotide
  Antisense strand to SEQ ID NO: 2215212
uguaauggagaacucaaag

SEQ ID NO: 2215214 - RNA, 19 nt, Artificial Sequence
  Description of Artificial Sequence: Synthetic oligonucleotide
  Sense strand starting at position 795 of SEQ ID NO: 1883771
aggcaaaguuaagugauaa

SEQ ID NO: 2215215 - RNA, 19 nt, Artificial Sequence
  Description of Artificial Sequence: Synthetic oligonucleotide
  Antisense strand to SEQ ID NO: 2215214
uuaucacuuaacuuugccu

SEQ ID NO: 2215216 - RNA, 19 nt, Artificial Sequence
  Description of Artificial Sequence: Synthetic oligonucleotide
  Sense strand starting at position 3456 of SEQ ID NO: 1883771
ggagaugacuagcucuacu

SEQ ID NO: 2215217 - RNA, 19 nt, Artificial Sequence
  Description of Artificial Sequence: Synthetic oligonucleotide
  Antisense strand to SEQ ID NO: 2215216
aguagagcuagucaucucc

SEQ ID NO: 2215218 - RNA, 19 nt, Artificial Sequence
  Description of Artificial Sequence: Synthetic oligonucleotide
  Sense strand starting at position 164 of SEQ ID NO: 1883771
gaagguuauuaggcuaauu

SEQ ID NO: 2215219 - RNA, 19 nt, Artificial Sequence
  Description of Artificial Sequence: Synthetic oligonucleotide
  Antisense strand to SEQ ID NO: 2215218
aauuagccuaauaaccuuc

SEQ ID NO: 2215220 - RNA, 19 nt, Artificial Sequence
  Description of Artificial Sequence: Synthetic oligonucleotide
  Sense strand starting at position 3204 of SEQ ID NO: 1883771
gaaggagaggccuggcauu

SEQ ID NO: 2215221 - RNA, 19 nt, Artificial Sequence
  Description of Artificial Sequence: Synthetic oligonucleotide
  Antisense strand to SEQ ID NO: 2215220
aaugccaggccucuccuuc

SEQ ID NO: 2215222 - RNA, 19 nt, Artificial Sequence
  Description of Artificial Sequence: Synthetic oligonucleotide
  Sense strand starting at position 1651 of SEQ ID NO: 1883771
ucaguaauugcugacaagu

SEQ ID NO: 2215223 - RNA, 19 nt, Artificial Sequence
  Description of Artificial Sequence: Synthetic oligonucleotide
  Antisense strand to SEQ ID NO: 2215222
acuugucagcaauuacuga

SEQ ID NO: 2215224 - RNA, 19 nt, Artificial Sequence
  Description of Artificial Sequence: Synthetic oligonucleotide
  Sense strand starting at position 87 of SEQ ID NO: 1883771
acguuugagagccauauau

SEQ ID NO: 2215225 - RNA, 19 nt, Artificial Sequence
  Description of Artificial Sequence: Synthetic oligonucleotide
  Antisense strand to SEQ ID NO: 2215224
auauauggcucucaaacgu

SEQ ID NO: 2215226 - RNA, 19 nt, Artificial Sequence
  Description of Artificial Sequence: Synthetic oligonucleotide
  Sense strand starting at position 796 of SEQ ID NO: 1883771
ggcaaaguuaagugauaac

SEQ ID NO: 2215227 - RNA, 19 nt, Artificial Sequence
  Description of Artificial Sequence: Synthetic oligonucleotide
  Antisense strand to SEQ ID NO: 2215226
guuaucacuuaacuuugcc

SEQ ID NO: 2215228 - RNA, 19 nt, Artificial Sequence
  Description of Artificial Sequence: Synthetic oligonucleotide
  Sense strand starting at position 2581 of SEQ ID NO: 1883771
ccagaagaaguuugcuuga

SEQ ID NO: 2215229 - RNA, 19 nt, Artificial Sequence
  Description of Artificial Sequence: Synthetic oligonucleotide
  Antisense strand to SEQ ID NO: 2215228
ucaagcaaacuucuucugg

SEQ ID NO: 2215230 - RNA, 19 nt, Artificial Sequence
  Description of Artificial Sequence: Synthetic oligonucleotide
  Sense strand starting at position 2389 of SEQ ID NO: 1883771
cuggguccuauguaaguau

SEQ ID NO: 2215231 - RNA, 19 nt, Artificial Sequence
  Description of Artificial Sequence: Synthetic oligonucleotide
  Antisense strand to SEQ ID NO: 2215230
auacuuacauaggacccag

SEQ ID NO: 2215232 - RNA, 19 nt, Artificial Sequence
  Description of Artificial Sequence: Synthetic oligonucleotide
  Sense strand starting at position 2054 of SEQ ID NO: 1883771
accuuugaguucuccauua

SEQ ID NO: 2215233 - RNA, 19 nt, Artificial Sequence
  Description of Artificial Sequence: Synthetic oligonucleotide
  Antisense strand to SEQ ID NO: 2215232
uaauggagaacucaaaggu

SEQ ID NO: 2215234 - RNA, 19 nt, Artificial Sequence
  Description of Artificial Sequence: Synthetic oligonucleotide
  Sense strand starting at position 1592 of SEQ ID NO: 1883771
guguaauccuaaccaaagu

SEQ ID NO: 2215235 - RNA, 19 nt, Artificial Sequence
  Description of Artificial Sequence: Synthetic oligonucleotide
  Antisense strand to SEQ ID NO: 2215234
acuuugguuaggauuacac

SEQ ID NO: 2215236 - RNA, 19 nt, Artificial Sequence
  Description of Artificial Sequence: Synthetic oligonucleotide
  Sense strand starting at position 195 of SEQ ID NO: 1883771
accuccaugcgucagauau

SEQ ID NO: 2215237 - RNA, 19 nt, Artificial Sequence
  Description of Artificial Sequence: Synthetic oligonucleotide
  Antisense strand to SEQ ID NO: 2215236
auaucugacgcauggaggu

SEQ ID NO: 2215238 - RNA, 19 nt, Artificial Sequence
  Description of Artificial Sequence: Synthetic oligonucleotide
  Sense strand starting at position 2380 of SEQ ID NO: 1883771
ucaucauuccuggguccua

SEQ ID NO: 2215239 - RNA, 19 nt, Artificial Sequence
  Description of Artificial Sequence: Synthetic oligonucleotide
  Antisense strand to SEQ ID NO: 2215238
uaggacccaggaaugauga

SEQ ID NO: 2215240 - RNA, 19 nt, Artificial Sequence
  Description of Artificial Sequence: Synthetic oligonucleotide
  Sense strand starting at position 2001 of SEQ ID NO: 1883771
ucugguuagcuccauccua

SEQ ID NO: 2215241 - RNA, 19 nt, Artificial Sequence
  Description of Artificial Sequence: Synthetic oligonucleotide
  Antisense strand to SEQ ID NO: 2215240
uaggauggagcuaaccaga

SEQ ID NO: 2215242 - RNA, 19 nt, Artificial Sequence
  Description of Artificial Sequence: Synthetic oligonucleotide
  Sense strand starting at position 3134 of SEQ ID NO: 1883771
gcacauagccugggaguaa

SEQ ID NO: 2215243 - RNA, 19 nt, Artificial Sequence
  Description of Artificial Sequence: Synthetic oligonucleotide
  Antisense strand to SEQ ID NO: 2215242
uuacucccaggcuaugugc

SEQ ID NO: 2215244 - RNA, 19 nt, Artificial Sequence
  Description of Artificial Sequence: Synthetic oligonucleotide
  Sense strand starting at position 3133 of SEQ ID NO: 1883771
ggcacauagccugggagua

SEQ ID NO: 2215245 - RNA, 19 nt, Artificial Sequence
  Description of Artificial Sequence: Synthetic oligonucleotide
  Antisense strand to SEQ ID NO: 2215244
uacucccaggcuaugugcc

SEQ ID NO: 2215246 - RNA, 19 nt, Artificial Sequence
  Description of Artificial Sequence: Synthetic oligonucleotide
  Sense strand starting at position 1706 of SEQ ID NO: 1883771
agaguuggcuuugcaaaca

SEQ ID NO: 2215247 - RNA, 19 nt, Artificial Sequence
  Description of Artificial Sequence: Synthetic oligonucleotide
  Antisense strand to SEQ ID NO: 2215246
uguuugcaaagccaacucu

SEQ ID NO: 2215248 - RNA, 19 nt, Artificial Sequence
  Description of Artificial Sequence: Synthetic oligonucleotide
  Sense strand starting at position 2118 of SEQ ID NO: 1883771
cuggguucuccaggaguuc

SEQ ID NO: 2215249 - RNA, 19 nt, Artificial Sequence
  Description of Artificial Sequence: Synthetic oligonucleotide
  Antisense strand to SEQ ID NO: 2215248
gaacuccuggagaacccag

SEQ ID NO: 2215250 - RNA, 19 nt, Artificial Sequence
  Description of Artificial Sequence: Synthetic oligonucleotide
  Sense strand starting at position 22 of SEQ ID NO: 1883771
uuagauauguuuguguaug

SEQ ID NO: 2215251 - RNA, 19 nt, Artificial Sequence
  Description of Artificial Sequence: Synthetic oligonucleotide
  Antisense strand to SEQ ID NO: 2215250
cauacacaaacauaucuaa

SEQ ID NO: 2215252 - RNA, 19 nt, Artificial Sequence
  Description of Artificial Sequence: Synthetic oligonucleotide
  Sense strand starting at position 2236 of SEQ ID NO: 1883771
ccaugugucuaccuccaau

SEQ ID NO: 2215253 - RNA, 19 nt, Artificial Sequence
  Description of Artificial Sequence: Synthetic oligonucleotide
  Antisense strand to SEQ ID NO: 2215252
auuggagguagacacaugg

SEQ ID NO: 2215254 - RNA, 19 nt, Artificial Sequence
  Description of Artificial Sequence: Synthetic oligonucleotide
  Sense strand starting at position 2490 of SEQ ID NO: 1883771
cugggcuucucagcaacua

SEQ ID NO: 2215255 - RNA, 19 nt, Artificial Sequence
  Description of Artificial Sequence: Synthetic oligonucleotide
  Antisense strand to SEQ ID NO: 2215254
uaguugcugagaagcccag

SEQ ID NO: 2215256 - RNA, 19 nt, Artificial Sequence
  Description of Artificial Sequence: Synthetic oligonucleotide
  Sense strand starting at position 3468 of SEQ ID NO: 1883771
cucuacugccucugaaagu

SEQ ID NO: 2215257 - RNA, 19 nt, Artificial Sequence
  Description of Artificial Sequence: Synthetic oligonucleotide
  Antisense strand to SEQ ID NO: 2215256
acuuucagaggcaguagag

SEQ ID NO: 2215258 - RNA, 19 nt, Artificial Sequence
  Description of Artificial Sequence: Synthetic oligonucleotide
  Sense strand starting at position 3843 of SEQ ID NO: 1883771
acugcacugagccgaaauu

SEQ ID NO: 2215259 - RNA, 19 nt, Artificial Sequence
  Description of Artificial Sequence: Synthetic oligonucleotide
  Antisense strand to SEQ ID NO: 2215258
aauuucggcucagugcagu

SEQ ID NO: 2215260 - RNA, 19 nt, Artificial Sequence
  Description of Artificial Sequence: Synthetic oligonucleotide
  Sense strand starting at position 1705 of SEQ ID NO: 1883771
uagaguuggcuuugcaaac

SEQ ID NO: 2215261 - RNA, 19 nt, Artificial Sequence
  Description of Artificial Sequence: Synthetic oligonucleotide
  Antisense strand to SEQ ID NO: 2215260
guuugcaaagccaacucua

SEQ ID NO: 2215262 - RNA, 19 nt, Artificial Sequence
  Description of Artificial Sequence: Synthetic oligonucleotide
  Sense strand starting at position 24 of SEQ ID NO: 1883771
agauauguuuguguauguu

SEQ ID NO: 2215263 - RNA, 19 nt, Artificial Sequence
  Description of Artificial Sequence: Synthetic oligonucleotide
  Antisense strand to SEQ ID NO: 2215262
aacauacacaaacauaucu

SEQ ID NO: 2215264 - RNA, 19 nt, Artificial Sequence
  Description of Artificial Sequence: Synthetic oligonucleotide
  Sense strand starting at position 3100 of SEQ ID NO: 1883771
ggagaagucugguaaagga

SEQ ID NO: 2215265 - RNA, 19 nt, Artificial Sequence
  Description of Artificial Sequence: Synthetic oligonucleotide
  Antisense strand to SEQ ID NO: 2215264
uccuuuaccagacuucucc

SEQ ID NO: 2215266 - RNA, 19 nt, Artificial Sequence
  Description of Artificial Sequence: Synthetic oligonucleotide
  Sense strand starting at position 1646 of SEQ ID NO: 1883771
gguguucaguaauugcuga

SEQ ID NO: 2215267 - RNA, 19 nt, Artificial Sequence
  Description of Artificial Sequence: Synthetic oligonucleotide
  Antisense strand to SEQ ID NO: 2215266
ucagcaauuacugaacacc

SEQ ID NO: 2215268 - RNA, 19 nt, Artificial Sequence
  Description of Artificial Sequence: Synthetic oligonucleotide
  Sense strand starting at position 1581 of SEQ ID NO: 1883771
acgguugggcaguguaauc

SEQ ID NO: 2215269 - RNA, 19 nt, Artificial Sequence
  Description of Artificial Sequence: Synthetic oligonucleotide
  Antisense strand to SEQ ID NO: 2215268
gauuacacugcccaaccgu

SEQ ID NO: 2215270 - RNA, 19 nt, Artificial Sequence
  Description of Artificial Sequence: Synthetic oligonucleotide
  Sense strand starting at position 2436 of SEQ ID NO: 1883771
ccaagaagcucucaugaac

SEQ ID NO: 2215271 - RNA, 19 nt, Artificial Sequence
  Description of Artificial Sequence: Synthetic oligonucleotide
  Antisense strand to SEQ ID NO: 2215270
guucaugagagcuucuugg

SEQ ID NO: 2215272 - RNA, 19 nt, Artificial Sequence
  Description of Artificial Sequence: Synthetic oligonucleotide
  Sense strand starting at position 197 of SEQ ID NO: 1883771
cuccaugcgucagauauuu

SEQ ID NO: 2215273 - RNA, 19 nt, Artificial Sequence
  Description of Artificial Sequence: Synthetic oligonucleotide
  Antisense strand to SEQ ID NO: 2215272
aaauaucugacgcauggag

SEQ ID NO: 2215274 - RNA, 19 nt, Artificial Sequence
  Description of Artificial Sequence: Synthetic oligonucleotide
  Sense strand starting at position 959 of SEQ ID NO: 1883772
ucuauuaaugagcacugau

SEQ ID NO: 2215275 - RNA, 19 nt, Artificial Sequence
  Description of Artificial Sequence: Synthetic oligonucleotide
  Antisense strand to SEQ ID NO: 2215274
aucagugcucauuaauaga

SEQ ID NO: 2215276 - RNA, 19 nt, Artificial Sequence
  Description of Artificial Sequence: Synthetic oligonucleotide
  Sense strand starting at position 2948 of SEQ ID NO: 1883772
cuauuaguuggagagguca

SEQ ID NO: 2215277 - RNA, 19 nt, Artificial Sequence
  Description of Artificial Sequence: Synthetic oligonucleotide
  Antisense strand to SEQ ID NO: 2215276
ugaccucuccaacuaauag

SEQ ID NO: 2215278 - RNA, 19 nt, Artificial Sequence
  Description of Artificial Sequence: Synthetic oligonucleotide
  Sense strand starting at position 561 of SEQ ID NO: 1883772
aagagagugacuuguagag

SEQ ID NO: 2215279 - RNA, 19 nt, Artificial Sequence
  Description of Artificial Sequence: Synthetic oligonucleotide
  Antisense strand to SEQ ID NO: 2215278
cucuacaagucacucucuu

SEQ ID NO: 2215280 - RNA, 19 nt, Artificial Sequence
  Description of Artificial Sequence: Synthetic oligonucleotide
  Sense strand starting at position 3546 of SEQ ID NO: 1883772
agggauuggauaugagucu

SEQ ID NO: 2215281 - RNA, 19 nt, Artificial Sequence
  Description of Artificial Sequence: Synthetic oligonucleotide
  Antisense strand to SEQ ID NO: 2215280
agacucauauccaaucccu

SEQ ID NO: 2215282 - RNA, 19 nt, Artificial Sequence
  Description of Artificial Sequence: Synthetic oligonucleotide
  Sense strand starting at position 365 of SEQ ID NO: 1883772
auuucuauccguuggacuu

SEQ ID NO: 2215283 - RNA, 19 nt, Artificial Sequence
  Description of Artificial Sequence: Synthetic oligonucleotide
  Antisense strand to SEQ ID NO: 2215282
aaguccaacggauagaaau

SEQ ID NO: 2215284 - RNA, 19 nt, Artificial Sequence
  Description of Artificial Sequence: Synthetic oligonucleotide
  Sense strand starting at position 3679 of SEQ ID NO: 1883772
auaguugaccuugagcaga

SEQ ID NO: 2215285 - RNA, 19 nt, Artificial Sequence
  Description of Artificial Sequence: Synthetic oligonucleotide
  Antisense strand to SEQ ID NO: 2215284
ucugcucaaggucaacuau

SEQ ID NO: 2215286 - RNA, 19 nt, Artificial Sequence
  Description of Artificial Sequence: Synthetic oligonucleotide
  Sense strand starting at position 1428 of SEQ ID NO: 1883772
agagucuuaccuuagugag

SEQ ID NO: 2215287 - RNA, 19 nt, Artificial Sequence
  Description of Artificial Sequence: Synthetic oligonucleotide
  Antisense strand to SEQ ID NO: 2215286
cucacuaagguaagacucu

SEQ ID NO: 2215288 - RNA, 19 nt, Artificial Sequence
  Description of Artificial Sequence: Synthetic oligonucleotide
  Sense strand starting at position 25 of SEQ ID NO: 1883772
ggcaguauucaggcgacgu

SEQ ID NO: 2215289 - RNA, 19 nt, Artificial Sequence
  Description of Artificial Sequence: Synthetic oligonucleotide
  Antisense strand to SEQ ID NO: 2215288
acgucgccugaauacugcc

SEQ ID NO: 2215290 - RNA, 19 nt, Artificial Sequence
  Description of Artificial Sequence: Synthetic oligonucleotide
  Sense strand starting at position 3376 of SEQ ID NO: 1883772
gcuuguuugagggauuaaa

SEQ ID NO: 2215291 - RNA, 19 nt, Artificial Sequence
  Description of Artificial Sequence: Synthetic oligonucleotide
  Antisense strand to SEQ ID NO: 2215290
uuuaaucccucaaacaagc

SEQ ID NO: 2215292 - RNA, 19 nt, Artificial Sequence
  Description of Artificial Sequence: Synthetic oligonucleotide
  Sense strand starting at position 3240 of SEQ ID NO: 1883772
gugugagucagguccguuu

SEQ ID NO: 2215293 - RNA, 19 nt, Artificial Sequence
  Description of Artificial Sequence: Synthetic oligonucleotide
  Antisense strand to SEQ ID NO: 2215292
aaacggaccugacucacac

SEQ ID NO: 2215294 - RNA, 19 nt, Artificial Sequence
  Description of Artificial Sequence: Synthetic oligonucleotide
  Sense strand starting at position 543 of SEQ ID NO: 1883772
gccaguaucaaggaaagca

SEQ ID NO: 2215295 - RNA, 19 nt, Artificial Sequence
  Description of Artificial Sequence: Synthetic oligonucleotide
  Antisense strand to SEQ ID NO: 2215294
ugcuuuccuugauacuggc

SEQ ID NO: 2215296 - RNA, 19 nt, Artificial Sequence
  Description of Artificial Sequence: Synthetic oligonucleotide
  Sense strand starting at position 3430 of SEQ ID NO: 1883772
gaaagcgugaguuaggaau

SEQ ID NO: 2215297 - RNA, 19 nt, Artificial Sequence
  Description of Artificial Sequence: Synthetic oligonucleotide
  Antisense strand to SEQ ID NO: 2215296
auuccuaacucacgcuuuc

SEQ ID NO: 2215298 - RNA, 19 nt, Artificial Sequence
  Description of Artificial Sequence: Synthetic oligonucleotide
  Sense strand starting at position 3812 of SEQ ID NO: 1883772
agcguucuggcuuuagcua

SEQ ID NO: 2215299 - RNA, 19 nt, Artificial Sequence
  Description of Artificial Sequence: Synthetic oligonucleotide
  Antisense strand to SEQ ID NO: 2215298
uagcuaaagccagaacgcu

SEQ ID NO: 2215300 - RNA, 19 nt, Artificial Sequence
  Description of Artificial Sequence: Synthetic oligonucleotide
  Sense strand starting at position 3273 of SEQ ID NO: 1883772
uuagauuacggucauuauc

SEQ ID NO: 2215301 - RNA, 19 nt, Artificial Sequence
  Description of Artificial Sequence: Synthetic oligonucleotide
  Antisense strand to SEQ ID NO: 2215300
gauaaugaccguaaucuaa

SEQ ID NO: 2215302 - RNA, 19 nt, Artificial Sequence
  Description of Artificial Sequence: Synthetic oligonucleotide
  Sense strand starting at position 3326 of SEQ ID NO: 1883772
ugaguucagggucagguua

SEQ ID NO: 2215303 - RNA, 19 nt, Artificial Sequence
  Description of Artificial Sequence: Synthetic oligonucleotide
  Antisense strand to SEQ ID NO: 2215302
uaaccugacccugaacuca

SEQ ID NO: 2215304 - RNA, 19 nt, Artificial Sequence
  Description of Artificial Sequence: Synthetic oligonucleotide
  Sense strand starting at position 958 of SEQ ID NO: 1883772
uucuauuaaugagcacuga

SEQ ID NO: 2215305 - RNA, 19 nt, Artificial Sequence
  Description of Artificial Sequence: Synthetic oligonucleotide
  Antisense strand to SEQ ID NO: 2215304
ucagugcucauuaauagaa

SEQ ID NO: 2215306 - RNA, 19 nt, Artificial Sequence
  Description of Artificial Sequence: Synthetic oligonucleotide
  Sense strand starting at position 611 of SEQ ID NO: 1883772
ccaugaacuuucuuaguag

SEQ ID NO: 2215307 - RNA, 19 nt, Artificial Sequence
  Description of Artificial Sequence: Synthetic oligonucleotide
  Antisense strand to SEQ ID NO: 2215306
cuacuaagaaaguucaugg

SEQ ID NO: 2215308 - RNA, 19 nt, Artificial Sequence
  Description of Artificial Sequence: Synthetic oligonucleotide
  Sense strand starting at position 2943 of SEQ ID NO: 1883772
ggguccuauuaguuggaga

SEQ ID NO: 2215309 - RNA, 19 nt, Artificial Sequence
  Description of Artificial Sequence: Synthetic oligonucleotide
  Antisense strand to SEQ ID NO: 2215308
ucuccaacuaauaggaccc

SEQ ID NO: 2215310 - RNA, 19 nt, Artificial Sequence
  Description of Artificial Sequence: Synthetic oligonucleotide
  Sense strand starting at position 3044 of SEQ ID NO: 1883772
cuaugucugggauaggcuu

SEQ ID NO: 2215311 - RNA, 19 nt, Artificial Sequence
  Description of Artificial Sequence: Synthetic oligonucleotide
  Antisense strand to SEQ ID NO: 2215310
aagccuaucccagacauag

SEQ ID NO: 2215312 - RNA, 19 nt, Artificial Sequence
  Description of Artificial Sequence: Synthetic oligonucleotide
  Sense strand starting at position 3408 of SEQ ID NO: 1883772
gucgguguuaaggauaaac

SEQ ID NO: 2215313 - RNA, 19 nt, Artificial Sequence
  Description of Artificial Sequence: Synthetic oligonucleotide
  Antisense strand to SEQ ID NO: 2215312
guuuauccuuaacaccgac

SEQ ID NO: 2215314 - RNA, 19 nt, Artificial Sequence
  Description of Artificial Sequence: Synthetic oligonucleotide
  Sense strand starting at position 2944 of SEQ ID NO: 1883772
gguccuauuaguuggagag

SEQ ID NO: 2215315 - RNA, 19 nt, Artificial Sequence
  Description of Artificial Sequence: Synthetic oligonucleotide
  Antisense strand to SEQ ID NO: 2215314
cucuccaacuaauaggacc

SEQ ID NO: 2215316 - RNA, 19 nt, Artificial Sequence
  Description of Artificial Sequence: Synthetic oligonucleotide
  Sense strand starting at position 3925 of SEQ ID NO: 1883772
gacuguguuguuuacagac

SEQ ID NO: 2215317 - RNA, 19 nt, Artificial Sequence
  Description of Artificial Sequence: Synthetic oligonucleotide
  Antisense strand to SEQ ID NO: 2215316
gucuguaaacaacacaguc

SEQ ID NO: 2215318 - RNA, 19 nt, Artificial Sequence
  Description of Artificial Sequence: Synthetic oligonucleotide
  Sense strand starting at position 1425 of SEQ ID NO: 1883772
augagagucuuaccuuagu

SEQ ID NO: 2215319 - RNA, 19 nt, Artificial Sequence
  Description of Artificial Sequence: Synthetic oligonucleotide
  Antisense strand to SEQ ID NO: 2215318
acuaagguaagacucucau

SEQ ID NO: 2215320 - RNA, 19 nt, Artificial Sequence
  Description of Artificial Sequence: Synthetic oligonucleotide
  Sense strand starting at position 3041 of SEQ ID NO: 1883772
guccuaugucugggauagg

SEQ ID NO: 2215321 - RNA, 19 nt, Artificial Sequence
  Description of Artificial Sequence: Synthetic oligonucleotide
  Antisense strand to SEQ ID NO: 2215320
ccuaucccagacauaggac

SEQ ID NO: 2215322 - RNA, 19 nt, Artificial Sequence
  Description of Artificial Sequence: Synthetic oligonucleotide
  Sense strand starting at position 3142 of SEQ ID NO: 1883772
guaggaaagcuuuggguga

SEQ ID NO: 2215323 - RNA, 19 nt, Artificial Sequence
  Description of Artificial Sequence: Synthetic oligonucleotide
  Antisense strand to SEQ ID NO: 2215322
ucacccaaagcuuuccuac

SEQ ID NO: 2215324 - RNA, 19 nt, Artificial Sequence
  Description of Artificial Sequence: Synthetic oligonucleotide
  Sense strand starting at position 3391 of SEQ ID NO: 1883772
uaaagaauguuggcauggu

SEQ ID NO: 2215325 - RNA, 19 nt, Artificial Sequence
  Description of Artificial Sequence: Synthetic oligonucleotide
  Antisense strand to SEQ ID NO: 2215324
accaugccaacauucuuua

SEQ ID NO: 2215326 - RNA, 19 nt, Artificial Sequence
  Description of Artificial Sequence: Synthetic oligonucleotide
  Sense strand starting at position 3039 of SEQ ID NO: 1883772
caguccuaugucugggaua

SEQ ID NO: 2215327 - RNA, 19 nt, Artificial Sequence
  Description of Artificial Sequence: Synthetic oligonucleotide
  Antisense strand to SEQ ID NO: 2215326
uaucccagacauaggacug

SEQ ID NO: 2215328 - RNA, 19 nt, Artificial Sequence
  Description of Artificial Sequence: Synthetic oligonucleotide
  Sense strand starting at position 3187 of SEQ ID NO: 1883772
ggaaucaagggucgcuaua

SEQ ID NO: 2215329 - RNA, 19 nt, Artificial Sequence
  Description of Artificial Sequence: Synthetic oligonucleotide
  Antisense strand to SEQ ID NO: 2215328
uauagcgacccuugauucc

SEQ ID NO: 2215330 - RNA, 19 nt, Artificial Sequence
  Description of Artificial Sequence: Synthetic oligonucleotide
  Sense strand starting at position 3307 of SEQ ID NO: 1883772
gccaucauacgucauaauu

SEQ ID NO: 2215331 - RNA, 19 nt, Artificial Sequence
  Description of Artificial Sequence: Synthetic oligonucleotide
  Antisense strand to SEQ ID NO: 2215330
aauuaugacguaugauggc

SEQ ID NO: 2215332 - RNA, 19 nt, Artificial Sequence
  Description of Artificial Sequence: Synthetic oligonucleotide
  Sense strand starting at position 514 of SEQ ID NO: 1883772
cucuuaguaucugucaaag

SEQ ID NO: 2215333 - RNA, 19 nt, Artificial Sequence
  Description of Artificial Sequence: Synthetic oligonucleotide
  Antisense strand to SEQ ID NO: 2215332
cuuugacagauacuaagag

SEQ ID NO: 2215334 - RNA, 19 nt, Artificial Sequence
  Description of Artificial Sequence: Synthetic oligonucleotide
  Sense strand starting at position 3275 of SEQ ID NO: 1883772
agauuacggucauuaucuu

SEQ ID NO: 2215335 - RNA, 19 nt, Artificial Sequence
  Description of Artificial Sequence: Synthetic oligonucleotide
  Antisense strand to SEQ ID NO: 2215334
aagauaaugaccguaaucu

SEQ ID NO: 2215336 - RNA, 19 nt, Artificial Sequence
  Description of Artificial Sequence: Synthetic oligonucleotide
  Sense strand starting at position 259 of SEQ ID NO: 1883772
ccaugaucucgccacuauu

SEQ ID NO: 2215337 - RNA, 19 nt, Artificial Sequence
  Description of Artificial Sequence: Synthetic oligonucleotide
  Antisense strand to SEQ ID NO: 2215336
aauaguggcgagaucaugg

SEQ ID NO: 2215338 - RNA, 19 nt, Artificial Sequence
  Description of Artificial Sequence: Synthetic oligonucleotide
  Sense strand starting at position 3627 of SEQ ID NO: 1883772
gguuaauguuaggaauuug

SEQ ID NO: 2215339 - RNA, 19 nt, Artificial Sequence
  Description of Artificial Sequence: Synthetic oligonucleotide
  Antisense strand to SEQ ID NO: 2215338
caaauuccuaacauuaacc

SEQ ID NO: 2215340 - RNA, 19 nt, Artificial Sequence
  Description of Artificial Sequence: Synthetic oligonucleotide
  Sense strand starting at position 3426 of SEQ ID NO: 1883772
cagugaaagcgugaguuag

SEQ ID NO: 2215341 - RNA, 19 nt, Artificial Sequence
  Description of Artificial Sequence: Synthetic oligonucleotide
  Antisense strand to SEQ ID NO: 2215340
cuaacucacgcuuucacug

SEQ ID NO: 2215342 - RNA, 19 nt, Artificial Sequence
  Description of Artificial Sequence: Synthetic oligonucleotide
  Sense strand starting at position 3555 of SEQ ID NO: 1883772
auaugagucugugcuagga

SEQ ID NO: 2215343 - RNA, 19 nt, Artificial Sequence
  Description of Artificial Sequence: Synthetic oligonucleotide
  Antisense strand to SEQ ID NO: 2215342
uccuagcacagacucauau

SEQ ID NO: 2215344 - RNA, 19 nt, Artificial Sequence
  Description of Artificial Sequence: Synthetic oligonucleotide
  Sense strand starting at position 614 of SEQ ID NO: 1883772
ugaacuuucuuaguagcca

SEQ ID NO: 2215345 - RNA, 19 nt, Artificial Sequence
  Description of Artificial Sequence: Synthetic oligonucleotide
  Antisense strand to SEQ ID NO: 2215344
uggcuacuaagaaaguuca

SEQ ID NO: 2215346 - RNA, 19 nt, Artificial Sequence
  Description of Artificial Sequence: Synthetic oligonucleotide
  Sense strand starting at position 3833 of SEQ ID NO: 1883772
auugcaggcaucugggauu

SEQ ID NO: 2215347 - RNA, 19 nt, Artificial Sequence
  Description of Artificial Sequence: Synthetic oligonucleotide
  Antisense strand to SEQ ID NO: 2215346
aaucccagaugccugcaau

SEQ ID NO: 2215348 - RNA, 19 nt, Artificial Sequence
  Description of Artificial Sequence: Synthetic oligonucleotide
  Sense strand starting at position 3553 of SEQ ID NO: 1883772
ggauaugagucugugcuag

SEQ ID NO: 2215349 - RNA, 19 nt, Artificial Sequence
  Description of Artificial Sequence: Synthetic oligonucleotide
  Antisense strand to SEQ ID NO: 2215348
cuagcacagacucauaucc

SEQ ID NO: 2215350 - RNA, 19 nt, Artificial Sequence
  Description of Artificial Sequence: Synthetic oligonucleotide
  Sense strand starting at position 3663 of SEQ ID NO: 1883772
gugguuugaggcuagcaua

SEQ ID NO: 2215351 - RNA, 19 nt, Artificial Sequence
  Description of Artificial Sequence: Synthetic oligonucleotide
  Antisense strand to SEQ ID NO: 2215350
uaugcuagccucaaaccac

SEQ ID NO: 2215352 - RNA, 19 nt, Artificial Sequence
  Description of Artificial Sequence: Synthetic oligonucleotide
  Sense strand starting at position 3750 of SEQ ID NO: 1883772
cuuuauuccuauguaguua

SEQ ID NO: 2215353 - RNA, 19 nt, Artificial Sequence
  Description of Artificial Sequence: Synthetic oligonucleotide
  Antisense strand to SEQ ID NO: 2215352
uaacuacauaggaauaaag

SEQ ID NO: 2215354 - RNA, 19 nt, Artificial Sequence
  Description of Artificial Sequence: Synthetic oligonucleotide
  Sense strand starting at position 1570 of SEQ ID NO: 1883773
uugaguaaucaacagcaua

SEQ ID NO: 2215355 - RNA, 19 nt, Artificial Sequence
  Description of Artificial Sequence: Synthetic oligonucleotide
  Antisense strand to SEQ ID NO: 2215354
uaugcuguugauuacucaa

SEQ ID NO: 2215356 - RNA, 19 nt, Artificial Sequence
  Description of Artificial Sequence: Synthetic oligonucleotide
  Sense strand starting at position 2940 of SEQ ID NO: 1883773
ggauauauacaucaugccu

SEQ ID NO: 2215357 - RNA, 19 nt, Artificial Sequence
  Description of Artificial Sequence: Synthetic oligonucleotide
  Antisense strand to SEQ ID NO: 2215356
aggcaugauguauauaucc

SEQ ID NO: 2215358 - RNA, 19 nt, Artificial Sequence
  Description of Artificial Sequence: Synthetic oligonucleotide
  Sense strand starting at position 1113 of SEQ ID NO: 1883773
cucucugggauguaggauu

SEQ ID NO: 2215359 - RNA, 19 nt, Artificial Sequence
  Description of Artificial Sequence: Synthetic oligonucleotide
  Antisense strand to SEQ ID NO: 2215358
aauccuacaucccagagag

SEQ ID NO: 2215360 - RNA, 19 nt, Artificial Sequence
  Description of Artificial Sequence: Synthetic oligonucleotide
  Sense strand starting at position 1488 of SEQ ID NO: 1883773
aagagacaguuauuagagu

SEQ ID NO: 2215361 - RNA, 19 nt, Artificial Sequence
  Description of Artificial Sequence: Synthetic oligonucleotide
  Antisense strand to SEQ ID NO: 2215360
acucuaauaacugucucuu

SEQ ID NO: 2215362 - RNA, 19 nt, Artificial Sequence
  Description of Artificial Sequence: Synthetic oligonucleotide
  Sense strand starting at position 2628 of SEQ ID NO: 1883773
uguuuaugugcugucuauu

SEQ ID NO: 2215363 - RNA, 19 nt, Artificial Sequence
  Description of Artificial Sequence: Synthetic oligonucleotide
  Antisense strand to SEQ ID NO: 2215362
aauagacagcacauaaaca

SEQ ID NO: 2215364 - RNA, 19 nt, Artificial Sequence
  Description of Artificial Sequence: Synthetic oligonucleotide
  Sense strand starting at position 206 of SEQ ID NO: 1883773
cuuugagaacucuaauguc

SEQ ID NO: 2215365 - RNA, 19 nt, Artificial Sequence
  Description of Artificial Sequence: Synthetic oligonucleotide
  Antisense strand to SEQ ID NO: 2215364
gacauuagaguucucaaag

SEQ ID NO: 2215366 - RNA, 19 nt, Artificial Sequence
  Description of Artificial Sequence: Synthetic oligonucleotide
  Sense strand starting at position 1563 of SEQ ID NO: 1883773
cagguucuugaguaaucaa

SEQ ID NO: 2215367 - RNA, 19 nt, Artificial Sequence
  Description of Artificial Sequence: Synthetic oligonucleotide
  Antisense strand to SEQ ID NO: 2215366
uugauuacucaagaaccug

SEQ ID NO: 2215368 - RNA, 19 nt, Artificial Sequence
  Description of Artificial Sequence: Synthetic oligonucleotide
  Sense strand starting at position 1494 of SEQ ID NO: 1883773
caguuauuagaguagaucu

SEQ ID NO: 2215369 - RNA, 19 nt, Artificial Sequence
  Description of Artificial Sequence: Synthetic oligonucleotide
  Antisense strand to SEQ ID NO: 2215368
agaucuacucuaauaacug

SEQ ID NO: 2215370 - RNA, 19 nt, Artificial Sequence
  Description of Artificial Sequence: Synthetic oligonucleotide
  Sense strand starting at position 1872 of SEQ ID NO: 1883773
cgaaacugauggucagaga

SEQ ID NO: 2215371 - RNA, 19 nt, Artificial Sequence
  Description of Artificial Sequence: Synthetic oligonucleotide
  Antisense strand to SEQ ID NO: 2215370
ucucugaccaucaguuucg

SEQ ID NO: 2215372 - RNA, 19 nt, Artificial Sequence
  Description of Artificial Sequence: Synthetic oligonucleotide
  Sense strand starting at position 3908 of SEQ ID NO: 1883773
cccaguuuauaauuagaga

SEQ ID NO: 2215373 - RNA, 19 nt, Artificial Sequence
  Description of Artificial Sequence: Synthetic oligonucleotide
  Antisense strand to SEQ ID NO: 2215372
ucucuaauuauaaacuggg

SEQ ID NO: 2215374 - RNA, 19 nt, Artificial Sequence
  Description of Artificial Sequence: Synthetic oligonucleotide
  Sense strand starting at position 3315 of SEQ ID NO: 1883773
ggccaaaugacuuagcaug

SEQ ID NO: 2215375 - RNA, 19 nt, Artificial Sequence
  Description of Artificial Sequence: Synthetic oligonucleotide
  Antisense strand to SEQ ID NO: 2215374
caugcuaagucauuuggcc

SEQ ID NO: 2215376 - RNA, 19 nt, Artificial Sequence
  Description of Artificial Sequence: Synthetic oligonucleotide
  Sense strand starting at position 3232 of SEQ ID NO: 1883773
uugggacuaaaguguuaaa

SEQ ID NO: 2215377 - RNA, 19 nt, Artificial Sequence
  Description of Artificial Sequence: Synthetic oligonucleotide
  Antisense strand to SEQ ID NO: 2215376
uuuaacacuuuagucccaa

SEQ ID NO: 2215378 - RNA, 19 nt, Artificial Sequence
  Description of Artificial Sequence: Synthetic oligonucleotide
  Sense strand starting at position 2540 of SEQ ID NO: 1883773
uggguuacaaccuaugguu

SEQ ID NO: 2215379 - RNA, 19 nt, Artificial Sequence
  Description of Artificial Sequence: Synthetic oligonucleotide
  Antisense strand to SEQ ID NO: 2215378
aaccauagguuguaaccca

SEQ ID NO: 2215380 - RNA, 19 nt, Artificial Sequence
  Description of Artificial Sequence: Synthetic oligonucleotide
  Sense strand starting at position 1544 of SEQ ID NO: 1883773
gacuuacuuugagugacau

SEQ ID NO: 2215381 - RNA, 19 nt, Artificial Sequence
  Description of Artificial Sequence: Synthetic oligonucleotide
  Antisense strand to SEQ ID NO: 2215380
augucacucaaaguaaguc

SEQ ID NO: 2215382 - RNA, 19 nt, Artificial Sequence
  Description of Artificial Sequence: Synthetic oligonucleotide
  Sense strand starting at position 3376 of SEQ ID NO: 1883773
gaguuacuccaguagguga

SEQ ID NO: 2215383 - RNA, 19 nt, Artificial Sequence
  Description of Artificial Sequence: Synthetic oligonucleotide
  Antisense strand to SEQ ID NO: 2215382
ucaccuacuggaguaacuc

SEQ ID NO: 2215384 - RNA, 19 nt, Artificial Sequence
  Description of Artificial Sequence: Synthetic oligonucleotide
  Sense strand starting at position 2344 of SEQ ID NO: 1883773
cucuauguacuaggagauu

SEQ ID NO: 2215385 - RNA, 19 nt, Artificial Sequence
  Description of Artificial Sequence: Synthetic oligonucleotide
  Antisense strand to SEQ ID NO: 2215384
aaucuccuaguacauagag

SEQ ID NO: 2215386 - RNA, 19 nt, Artificial Sequence
  Description of Artificial Sequence: Synthetic oligonucleotide
  Sense strand starting at position 2372 of SEQ ID NO: 1883773
cacagaucugucugaugau

SEQ ID NO: 2215387 - RNA, 19 nt, Artificial Sequence
  Description of Artificial Sequence: Synthetic oligonucleotide
  Antisense strand to SEQ ID NO: 2215386
aucaucagacagaucugug

SEQ ID NO: 2215388 - RNA, 19 nt, Artificial Sequence
  Description of Artificial Sequence: Synthetic oligonucleotide
  Sense strand starting at position 1334 of SEQ ID NO: 1883773
gauaucugugcccagauau

SEQ ID NO: 2215389 - RNA, 19 nt, Artificial Sequence
  Description of Artificial Sequence: Synthetic oligonucleotide
  Antisense strand to SEQ ID NO: 2215388
auaucugggcacagauauc

SEQ ID NO: 2215390 - RNA, 19 nt, Artificial Sequence
  Description of Artificial Sequence: Synthetic oligonucleotide
  Sense strand starting at position 1602 of SEQ ID NO: 1883773
caguuuggccuuuaaagac

SEQ ID NO: 2215391 - RNA, 19 nt, Artificial Sequence
  Description of Artificial Sequence: Synthetic oligonucleotide
  Antisense strand to SEQ ID NO: 2215390
gucuuuaaaggccaaacug

SEQ ID NO: 2215392 - RNA, 19 nt, Artificial Sequence
  Description of Artificial Sequence: Synthetic oligonucleotide
  Sense strand starting at position 2467 of SEQ ID NO: 1883773
auuccaagcuaaguuaaga

SEQ ID NO: 2215393 - RNA, 19 nt, Artificial Sequence
  Description of Artificial Sequence: Synthetic oligonucleotide
  Antisense strand to SEQ ID NO: 2215392
ucuuaacuuagcuuggaau

SEQ ID NO: 2215394 - RNA, 19 nt, Artificial Sequence
  Description of Artificial Sequence: Synthetic oligonucleotide
  Sense strand starting at position 171 of SEQ ID NO: 1883773
augaguuaagaacguauga

SEQ ID NO: 2215395 - RNA, 19 nt, Artificial Sequence
  Description of Artificial Sequence: Synthetic oligonucleotide
  Antisense strand to SEQ ID NO: 2215394
ucauacguucuuaacucau

SEQ ID NO: 2215396 - RNA, 19 nt, Artificial Sequence
  Description of Artificial Sequence: Synthetic oligonucleotide
  Sense strand starting at position 1566 of SEQ ID NO: 1883773
guucuugaguaaucaacag

SEQ ID NO: 2215397 - RNA, 19 nt, Artificial Sequence
  Description of Artificial Sequence: Synthetic oligonucleotide
  Antisense strand to SEQ ID NO: 2215396
cuguugauuacucaagaac

SEQ ID NO: 2215398 - RNA, 19 nt, Artificial Sequence
  Description of Artificial Sequence: Synthetic oligonucleotide
  Sense strand starting at position 3708 of SEQ ID NO: 1883773
agaacagucuuguuccaga

SEQ ID NO: 2215399 - RNA, 19 nt, Artificial Sequence
  Description of Artificial Sequence: Synthetic oligonucleotide
  Antisense strand to SEQ ID NO: 2215398
ucuggaacaagacuguucu

SEQ ID NO: 2215400 - RNA, 19 nt, Artificial Sequence
  Description of Artificial Sequence: Synthetic oligonucleotide
  Sense strand starting at position 1805 of SEQ ID NO: 1883773
guucgguuccgugugauuc

SEQ ID NO: 2215401 - RNA, 19 nt, Artificial Sequence
  Description of Artificial Sequence: Synthetic oligonucleotide
  Antisense strand to SEQ ID NO: 2215400
gaaucacacggaaccgaac

SEQ ID NO: 2215402 - RNA, 19 nt, Artificial Sequence
  Description of Artificial Sequence: Synthetic oligonucleotide
  Sense strand starting at position 1545 of SEQ ID NO: 1883773
acuuacuuugagugacauc

SEQ ID NO: 2215403 - RNA, 19 nt, Artificial Sequence
  Description of Artificial Sequence: Synthetic oligonucleotide
  Antisense strand to SEQ ID NO: 2215402
gaugucacucaaaguaagu

SEQ ID NO: 2215404 - RNA, 19 nt, Artificial Sequence
  Description of Artificial Sequence: Synthetic oligonucleotide
  Sense strand starting at position 1742 of SEQ ID NO: 1883773
gacuuuaacuccuugguga

SEQ ID NO: 2215405 - RNA, 19 nt, Artificial Sequence
  Description of Artificial Sequence: Synthetic oligonucleotide
  Antisense strand to SEQ ID NO: 2215404
ucaccaaggaguuaaaguc

SEQ ID NO: 2215406 - RNA, 19 nt, Artificial Sequence
  Description of Artificial Sequence: Synthetic oligonucleotide
  Sense strand starting at position 2421 of SEQ ID NO: 1883773
auucuugcuccagagagca

SEQ ID NO: 2215407 - RNA, 19 nt, Artificial Sequence
  Description of Artificial Sequence: Synthetic oligonucleotide
  Antisense strand to SEQ ID NO: 2215406
ugcucucuggagcaagaau

SEQ ID NO: 2215408 - RNA, 19 nt, Artificial Sequence
  Description of Artificial Sequence: Synthetic oligonucleotide
  Sense strand starting at position 3224 of SEQ ID NO: 1883773
ccuauuucuugggacuaaa

SEQ ID NO: 2215409 - RNA, 19 nt, Artificial Sequence
  Description of Artificial Sequence: Synthetic oligonucleotide
  Antisense strand to SEQ ID NO: 2215408
uuuagucccaagaaauagg

SEQ ID NO: 2215410 - RNA, 19 nt, Artificial Sequence
  Description of Artificial Sequence: Synthetic oligonucleotide
  Sense strand starting at position 1558 of SEQ ID NO: 1883773
gacaucagguucuugagua

SEQ ID NO: 2215411 - RNA, 19 nt, Artificial Sequence
  Description of Artificial Sequence: Synthetic oligonucleotide
  Antisense strand to SEQ ID NO: 2215410
uacucaagaaccugauguc

SEQ ID NO: 2215412 - RNA, 19 nt, Artificial Sequence
  Description of Artificial Sequence: Synthetic oligonucleotide
  Sense strand starting at position 1743 of SEQ ID NO: 1883773
acuuuaacuccuuggugag

SEQ ID NO: 2215413 - RNA, 19 nt, Artificial Sequence
  Description of Artificial Sequence: Synthetic oligonucleotide
  Antisense strand to SEQ ID NO: 2215412
cucaccaaggaguuaaagu

SEQ ID NO: 2215414 - RNA, 19 nt, Artificial Sequence
  Description of Artificial Sequence: Synthetic oligonucleotide
  Sense strand starting at position 3713 of SEQ ID NO: 1883773
agucuuguuccagaucgaa

SEQ ID NO: 2215415 - RNA, 19 nt, Artificial Sequence
  Description of Artificial Sequence: Synthetic oligonucleotide
  Antisense strand to SEQ ID NO: 2215414
uucgaucuggaacaagacu

SEQ ID NO: 2215416 - RNA, 19 nt, Artificial Sequence
  Description of Artificial Sequence: Synthetic oligonucleotide
  Sense strand starting at position 2419 of SEQ ID NO: 1883773
gcauucuugcuccagagag

SEQ ID NO: 2215417 - RNA, 19 nt, Artificial Sequence
  Description of Artificial Sequence: Synthetic oligonucleotide
  Antisense strand to SEQ ID NO: 2215416
cucucuggagcaagaaugc

SEQ ID NO: 2215418 - RNA, 19 nt, Artificial Sequence
  Description of Artificial Sequence: Synthetic oligonucleotide
  Sense strand starting at position 1870 of SEQ ID NO: 1883773
agcgaaacugauggucaga

SEQ ID NO: 2215419 - RNA, 19 nt, Artificial Sequence
  Description of Artificial Sequence: Synthetic oligonucleotide
  Antisense strand to SEQ ID NO: 2215418
ucugaccaucaguuucgcu

SEQ ID NO: 2215420 - RNA, 19 nt, Artificial Sequence
  Description of Artificial Sequence: Synthetic oligonucleotide
  Sense strand starting at position 2164 of SEQ ID NO: 1883773
cuacauaaacguuauugca

SEQ ID NO: 2215421 - RNA, 19 nt, Artificial Sequence
  Description of Artificial Sequence: Synthetic oligonucleotide
  Antisense strand to SEQ ID NO: 2215420
ugcaauaacguuuauguag

SEQ ID NO: 2215422 - RNA, 19 nt, Artificial Sequence
  Description of Artificial Sequence: Synthetic oligonucleotide
  Sense strand starting at position 2531 of SEQ ID NO: 1883773
uuuaucuccuggguuacaa

SEQ ID NO: 2215423 - RNA, 19 nt, Artificial Sequence
  Description of Artificial Sequence: Synthetic oligonucleotide
  Antisense strand to SEQ ID NO: 2215422
uuguaacccaggagauaaa

SEQ ID NO: 2215424 - RNA, 19 nt, Artificial Sequence
  Description of Artificial Sequence: Synthetic oligonucleotide
  Sense strand starting at position 1333 of SEQ ID NO: 1883773
agauaucugugcccagaua

SEQ ID NO: 2215425 - RNA, 19 nt, Artificial Sequence
  Description of Artificial Sequence: Synthetic oligonucleotide
  Antisense strand to SEQ ID NO: 2215424
uaucugggcacagauaucu

SEQ ID NO: 2215426 - RNA, 19 nt, Artificial Sequence
  Description of Artificial Sequence: Synthetic oligonucleotide
  Sense strand starting at position 1562 of SEQ ID NO: 1883773
ucagguucuugaguaauca

SEQ ID NO: 2215427 - RNA, 19 nt, Artificial Sequence
  Description of Artificial Sequence: Synthetic oligonucleotide
  Antisense strand to SEQ ID NO: 2215426
ugauuacucaagaaccuga

SEQ ID NO: 2215428 - RNA, 19 nt, Artificial Sequence
  Description of Artificial Sequence: Synthetic oligonucleotide
  Sense strand starting at position 2499 of SEQ ID NO: 1883773
cacaguugauugucucaag

SEQ ID NO: 2215429 - RNA, 19 nt, Artificial Sequence
  Description of Artificial Sequence: Synthetic oligonucleotide
  Antisense strand to SEQ ID NO: 2215428
cuugagacaaucaacugug

SEQ ID NO: 2215430 - RNA, 19 nt, Artificial Sequence
  Description of Artificial Sequence: Synthetic oligonucleotide
  Sense strand starting at position 1145 of SEQ ID NO: 1883773
aaugucuguguguaugaga

SEQ ID NO: 2215431 - RNA, 19 nt, Artificial Sequence
  Description of Artificial Sequence: Synthetic oligonucleotide
  Antisense strand to SEQ ID NO: 2215430
ucucauacacacagacauu

SEQ ID NO: 2215432 - RNA, 19 nt, Artificial Sequence
  Description of Artificial Sequence: Synthetic oligonucleotide
  Sense strand starting at position 3762 of SEQ ID NO: 1883773
gccugcagagcucagaaau

SEQ ID NO: 2215433 - RNA, 19 nt, Artificial Sequence
  Description of Artificial Sequence: Synthetic oligonucleotide
  Antisense strand to SEQ ID NO: 2215432
auuucugagcucugcaggc

SEQ ID NO: 2215434 - RNA, 19 nt, Artificial Sequence
  Description of Artificial Sequence: Synthetic oligonucleotide
  Sense strand starting at position 910 of SEQ ID NO: 1883774
ggguaucugaugggaucaa

SEQ ID NO: 2215435 - RNA, 19 nt, Artificial Sequence
  Description of Artificial Sequence: Synthetic oligonucleotide
  Antisense strand to SEQ ID NO: 2215434
uugaucccaucagauaccc

SEQ ID NO: 2215436 - RNA, 19 nt, Artificial Sequence
  Description of Artificial Sequence: Synthetic oligonucleotide
  Sense strand starting at position 2835 of SEQ ID NO: 1883774
ggacgaaagccugacccua

SEQ ID NO: 2215437 - RNA, 19 nt, Artificial Sequence
  Description of Artificial Sequence: Synthetic oligonucleotide
  Antisense strand to SEQ ID NO: 2215436
uagggucaggcuuucgucc

SEQ ID NO: 2215438 - RNA, 19 nt, Artificial Sequence
  Description of Artificial Sequence: Synthetic oligonucleotide
  Sense strand starting at position 909 of SEQ ID NO: 1883774
uggguaucugaugggauca

SEQ ID NO: 2215439 - RNA, 19 nt, Artificial Sequence
  Description of Artificial Sequence: Synthetic oligonucleotide
  Antisense strand to SEQ ID NO: 2215438
ugaucccaucagauaccca

SEQ ID NO: 2215440 - RNA, 19 nt, Artificial Sequence
  Description of Artificial Sequence: Synthetic oligonucleotide
  Sense strand starting at position 507 of SEQ ID NO: 1883774
ugaccaugugcauguauuu

SEQ ID NO: 2215441 - RNA, 19 nt, Artificial Sequence
  Description of Artificial Sequence: Synthetic oligonucleotide
  Antisense strand to SEQ ID NO: 2215440
aaauacaugcacaugguca

SEQ ID NO: 2215442 - RNA, 19 nt, Artificial Sequence
  Description of Artificial Sequence: Synthetic oligonucleotide
  Sense strand starting at position 751 of SEQ ID NO: 1883774
uguagaaacucaucaguaa

SEQ ID NO: 2215443 - RNA, 19 nt, Artificial Sequence
  Description of Artificial Sequence: Synthetic oligonucleotide
  Antisense strand to SEQ ID NO: 2215442
uuacugaugaguuucuaca

SEQ ID NO: 2215444 - RNA, 19 nt, Artificial Sequence
  Description of Artificial Sequence: Synthetic oligonucleotide
  Sense strand starting at position 356 of SEQ ID NO: 1883774
cuaugaggccuuuagagua

SEQ ID NO: 2215445 - RNA, 19 nt, Artificial Sequence
  Description of Artificial Sequence: Synthetic oligonucleotide
  Antisense strand to SEQ ID NO: 2215444
uacucuaaaggccucauag

SEQ ID NO: 2215446 - RNA, 19 nt, Artificial Sequence
  Description of Artificial Sequence: Synthetic oligonucleotide
  Sense strand starting at position 698 of SEQ ID NO: 1883774
aggaaugggcaauguuuaa

SEQ ID NO: 2215447 - RNA, 19 nt, Artificial Sequence
  Description of Artificial Sequence: Synthetic oligonucleotide
  Antisense strand to SEQ ID NO: 2215446
uuaaacauugcccauuccu

SEQ ID NO: 2215448 - RNA, 19 nt, Artificial Sequence
  Description of Artificial Sequence: Synthetic oligonucleotide
  Sense strand starting at position 2397 of SEQ ID NO: 1883774
gagucacaugacuggguaa

SEQ ID NO: 2215449 - RNA, 19 nt, Artificial Sequence
  Description of Artificial Sequence: Synthetic oligonucleotide
  Antisense strand to SEQ ID NO: 2215448
uuacccagucaugugacuc

SEQ ID NO: 2215450 - RNA, 19 nt, Artificial Sequence
  Description of Artificial Sequence: Synthetic oligonucleotide
  Sense strand starting at position 455 of SEQ ID NO: 1883774
ucagguuugcaagauguaa

SEQ ID NO: 2215451 - RNA, 19 nt, Artificial Sequence
  Description of Artificial Sequence: Synthetic oligonucleotide
  Antisense strand to SEQ ID NO: 2215450
uuacaucuugcaaaccuga

SEQ ID NO: 2215452 - RNA, 19 nt, Artificial Sequence
  Description of Artificial Sequence: Synthetic oligonucleotide
  Sense strand starting at position 331 of SEQ ID NO: 1883774
uggcaaguacuguauaauu

SEQ ID NO: 2215453 - RNA, 19 nt, Artificial Sequence
  Description of Artificial Sequence: Synthetic oligonucleotide
  Antisense strand to SEQ ID NO: 2215452
aauuauacaguacuugcca

SEQ ID NO: 2215454 - RNA, 19 nt, Artificial Sequence
  Description of Artificial Sequence: Synthetic oligonucleotide
  Sense strand starting at position 3832 of SEQ ID NO: 1883774
acagcuagaaagugucaga

SEQ ID NO: 2215455 - RNA, 19 nt, Artificial Sequence
  Description of Artificial Sequence: Synthetic oligonucleotide
  Antisense strand to SEQ ID NO: 2215454
ucugacacuuucuagcugu

SEQ ID NO: 2215456 - RNA, 19 nt, Artificial Sequence
  Description of Artificial Sequence: Synthetic oligonucleotide
  Sense strand starting at position 2837 of SEQ ID NO: 1883774
acgaaagccugacccuaau

SEQ ID NO: 2215457 - RNA, 19 nt, Artificial Sequence
  Description of Artificial Sequence: Synthetic oligonucleotide
  Antisense strand to SEQ ID NO: 2215456
auuagggucaggcuuucgu

SEQ ID NO: 2215458 - RNA, 19 nt, Artificial Sequence
  Description of Artificial Sequence: Synthetic oligonucleotide
  Sense strand starting at position 2961 of SEQ ID NO: 1883774
ugaauugggcuccagcauu

SEQ ID NO: 2215459 - RNA, 19 nt, Artificial Sequence
  Description of Artificial Sequence: Synthetic oligonucleotide
  Antisense strand to SEQ ID NO: 2215458
aaugcuggagcccaauuca

SEQ ID NO: 2215460 - RNA, 19 nt, Artificial Sequence
  Description of Artificial Sequence: Synthetic oligonucleotide
  Sense strand starting at position 53 of SEQ ID NO: 1883774
guggcuccucgagaaauua

SEQ ID NO: 2215461 - RNA, 19 nt, Artificial Sequence
  Description of Artificial Sequence: Synthetic oligonucleotide
  Antisense strand to SEQ ID NO: 2215460
uaauuucucgaggagccac

SEQ ID NO: 2215462 - RNA, 19 nt, Artificial Sequence
  Description of Artificial Sequence: Synthetic oligonucleotide
  Sense strand starting at position 3589 of SEQ ID NO: 1883774
acucuuggguguccuagaa

SEQ ID NO: 2215463 - RNA, 19 nt, Artificial Sequence
  Description of Artificial Sequence: Synthetic oligonucleotide
  Antisense strand to SEQ ID NO: 2215462
uucuaggacacccaagagu

SEQ ID NO: 2215464 - RNA, 19 nt, Artificial Sequence
  Description of Artificial Sequence: Synthetic oligonucleotide
  Sense strand starting at position 295 of SEQ ID NO: 1883774
ggacguuaugcucaguaaa

SEQ ID NO: 2215465 - RNA, 19 nt, Artificial Sequence
  Description of Artificial Sequence: Synthetic oligonucleotide
  Antisense strand to SEQ ID NO: 2215464
uuuacugagcauaacgucc

SEQ ID NO: 2215466 - RNA, 19 nt, Artificial Sequence
  Description of Artificial Sequence: Synthetic oligonucleotide
  Sense strand starting at position 364 of SEQ ID NO: 1883774
ccuuuagaguagucacauu

SEQ ID NO: 2215467 - RNA, 19 nt, Artificial Sequence
  Description of Artificial Sequence: Synthetic oligonucleotide
  Antisense strand to SEQ ID NO: 2215466
aaugugacuacucuaaagg

SEQ ID NO: 2215468 - RNA, 19 nt, Artificial Sequence
  Description of Artificial Sequence: Synthetic oligonucleotide
  Sense strand starting at position 3038 of SEQ ID NO: 1883774
gucauucgggucuagugaa

SEQ ID NO: 2215469 - RNA, 19 nt, Artificial Sequence
  Description of Artificial Sequence: Synthetic oligonucleotide
  Antisense strand to SEQ ID NO: 2215468
uucacuagacccgaaugac

SEQ ID NO: 2215470 - RNA, 19 nt, Artificial Sequence
  Description of Artificial Sequence: Synthetic oligonucleotide
  Sense strand starting at position 423 of SEQ ID NO: 1883774
ggaguagggagcuguuuca

SEQ ID NO: 2215471 - RNA, 19 nt, Artificial Sequence
  Description of Artificial Sequence: Synthetic oligonucleotide
  Antisense strand to SEQ ID NO: 2215470
ugaaacagcucccuacucc

SEQ ID NO: 2215472 - RNA, 19 nt, Artificial Sequence
  Description of Artificial Sequence: Synthetic oligonucleotide
  Sense strand starting at position 165 of SEQ ID NO: 1883774
cugaguguccacugacgga

SEQ ID NO: 2215473 - RNA, 19 nt, Artificial Sequence
  Description of Artificial Sequence: Synthetic oligonucleotide
  Antisense strand to SEQ ID NO: 2215472
uccgucaguggacacucag

SEQ ID NO: 2215474 - RNA, 19 nt, Artificial Sequence
  Description of Artificial Sequence: Synthetic oligonucleotide
  Sense strand starting at position 2387 of SEQ ID NO: 1883774
ugacauccgugagucacau

SEQ ID NO: 2215475 - RNA, 19 nt, Artificial Sequence
  Description of Artificial Sequence: Synthetic oligonucleotide
  Antisense strand to SEQ ID NO: 2215474
augugacucacggauguca

SEQ ID NO: 2215476 - RNA, 19 nt, Artificial Sequence
  Description of Artificial Sequence: Synthetic oligonucleotide
  Sense strand starting at position 2384 of SEQ ID NO: 1883774
gagugacauccgugaguca

SEQ ID NO: 2215477 - RNA, 19 nt, Artificial Sequence
  Description of Artificial Sequence: Synthetic oligonucleotide
  Antisense strand to SEQ ID NO: 2215476
ugacucacggaugucacuc

SEQ ID NO: 2215478 - RNA, 19 nt, Artificial Sequence
  Description of Artificial Sequence: Synthetic oligonucleotide
  Sense strand starting at position 2382 of SEQ ID NO: 1883774
uggagugacauccgugagu

SEQ ID NO: 2215479 - RNA, 19 nt, Artificial Sequence
  Description of Artificial Sequence: Synthetic oligonucleotide
  Antisense strand to SEQ ID NO: 2215478
acucacggaugucacucca

SEQ ID NO: 2215480 - RNA, 19 nt, Artificial Sequence
  Description of Artificial Sequence: Synthetic oligonucleotide
  Sense strand starting at position 2601 of SEQ ID NO: 1883774
aaccuuucuugagcacgua

SEQ ID NO: 2215481 - RNA, 19 nt, Artificial Sequence
  Description of Artificial Sequence: Synthetic oligonucleotide
  Antisense strand to SEQ ID NO: 2215480
uacgugcucaagaaagguu

SEQ ID NO: 2215482 - RNA, 19 nt, Artificial Sequence
  Description of Artificial Sequence: Synthetic oligonucleotide
  Sense strand starting at position 571 of SEQ ID NO: 1883774
ugguuauggugguaaauuu

SEQ ID NO: 2215483 - RNA, 19 nt, Artificial Sequence
  Description of Artificial Sequence: Synthetic oligonucleotide
  Antisense strand to SEQ ID NO: 2215482
aaauuuaccaccauaacca

SEQ ID NO: 2215484 - RNA, 19 nt, Artificial Sequence
  Description of Artificial Sequence: Synthetic oligonucleotide
  Sense strand starting at position 49 of SEQ ID NO: 1883774
uacgguggcuccucgagaa

SEQ ID NO: 2215485 - RNA, 19 nt, Artificial Sequence
  Description of Artificial Sequence: Synthetic oligonucleotide
  Antisense strand to SEQ ID NO: 2215484
uucucgaggagccaccgua

SEQ ID NO: 2215486 - RNA, 19 nt, Artificial Sequence
  Description of Artificial Sequence: Synthetic oligonucleotide
  Sense strand starting at position 2426 of SEQ ID NO: 1883774
aucucaugccucuguguca

SEQ ID NO: 2215487 - RNA, 19 nt, Artificial Sequence
  Description of Artificial Sequence: Synthetic oligonucleotide
  Antisense strand to SEQ ID NO: 2215486
ugacacagaggcaugagau

SEQ ID NO: 2215488 - RNA, 19 nt, Artificial Sequence
  Description of Artificial Sequence: Synthetic oligonucleotide
  Sense strand starting at position 3773 of SEQ ID NO: 1883774
ccauucuucugaggauaac

SEQ ID NO: 2215489 - RNA, 19 nt, Artificial Sequence
  Description of Artificial Sequence: Synthetic oligonucleotide
  Antisense strand to SEQ ID NO: 2215488
guuauccucagaagaaugg

SEQ ID NO: 2215490 - RNA, 19 nt, Artificial Sequence
  Description of Artificial Sequence: Synthetic oligonucleotide
  Sense strand starting at position 2391 of SEQ ID NO: 1883774
auccgugagucacaugacu

SEQ ID NO: 2215491 - RNA, 19 nt, Artificial Sequence
  Description of Artificial Sequence: Synthetic oligonucleotide
  Antisense strand to SEQ ID NO: 2215490
agucaugugacucacggau

SEQ ID NO: 2215492 - RNA, 19 nt, Artificial Sequence
  Description of Artificial Sequence: Synthetic oligonucleotide
  Sense strand starting at position 908 of SEQ ID NO: 1883774
guggguaucugaugggauc

SEQ ID NO: 2215493 - RNA, 19 nt, Artificial Sequence
  Description of Artificial Sequence: Synthetic oligonucleotide
  Antisense strand to SEQ ID NO: 2215492
gaucccaucagauacccac

SEQ ID NO: 2215494 - RNA, 19 nt, Artificial Sequence
  Description of Artificial Sequence: Synthetic oligonucleotide
  Sense strand starting at position 329 of SEQ ID NO: 1883774
aauggcaaguacuguauaa

SEQ ID NO: 2215495 - RNA, 19 nt, Artificial Sequence
  Description of Artificial Sequence: Synthetic oligonucleotide
  Antisense strand to SEQ ID NO: 2215494
uuauacaguacuugccauu

SEQ ID NO: 2215496 - RNA, 19 nt, Artificial Sequence
  Description of Artificial Sequence: Synthetic oligonucleotide
  Sense strand starting at position 430 of SEQ ID NO: 1883774
ggagcuguuucacggauac

SEQ ID NO: 2215497 - RNA, 19 nt, Artificial Sequence
  Description of Artificial Sequence: Synthetic oligonucleotide
  Antisense strand to SEQ ID NO: 2215496
guauccgugaaacagcucc

SEQ ID NO: 2215498 - RNA, 19 nt, Artificial Sequence
  Description of Artificial Sequence: Synthetic oligonucleotide
  Sense strand starting at position 2969 of SEQ ID NO: 1883774
gcuccagcauuaugagcua

SEQ ID NO: 2215499 - RNA, 19 nt, Artificial Sequence
  Description of Artificial Sequence: Synthetic oligonucleotide
  Antisense strand to SEQ ID NO: 2215498
uagcucauaaugcuggagc

SEQ ID NO: 2215500 - RNA, 19 nt, Artificial Sequence
  Description of Artificial Sequence: Synthetic oligonucleotide
  Sense strand starting at position 538 of SEQ ID NO: 1883774
cugugcacuuucuguuaaa

SEQ ID NO: 2215501 - RNA, 19 nt, Artificial Sequence
  Description of Artificial Sequence: Synthetic oligonucleotide
  Antisense strand to SEQ ID NO: 2215500
uuuaacagaaagugcacag

SEQ ID NO: 2215502 - RNA, 19 nt, Artificial Sequence
  Description of Artificial Sequence: Synthetic oligonucleotide
  Sense strand starting at position 2838 of SEQ ID NO: 1883775
guugauuaagaguaaagug

SEQ ID NO: 2215503 - RNA, 19 nt, Artificial Sequence
  Description of Artificial Sequence: Synthetic oligonucleotide
  Antisense strand to SEQ ID NO: 2215502
cacuuuacucuuaaucaac

SEQ ID NO: 2215504 - RNA, 19 nt, Artificial Sequence
  Description of Artificial Sequence: Synthetic oligonucleotide
  Sense strand starting at position 1926 of SEQ ID NO: 1883775
gucucuuuccuggaaagau

SEQ ID NO: 2215505 - RNA, 19 nt, Artificial Sequence
  Description of Artificial Sequence: Synthetic oligonucleotide
  Antisense strand to SEQ ID NO: 2215504
aucuuuccaggaaagagac

SEQ ID NO: 2215506 - RNA, 19 nt, Artificial Sequence
  Description of Artificial Sequence: Synthetic oligonucleotide
  Sense strand starting at position 3772 of SEQ ID NO: 1883775
gcugaacgagcuugauuua

SEQ ID NO: 2215507 - RNA, 19 nt, Artificial Sequence
  Description of Artificial Sequence: Synthetic oligonucleotide
  Antisense strand to SEQ ID NO: 2215506
uaaaucaagcucguucagc

SEQ ID NO: 2215508 - RNA, 19 nt, Artificial Sequence
  Description of Artificial Sequence: Synthetic oligonucleotide
  Sense strand starting at position 2809 of SEQ ID NO: 1883775
ugaagaaauguugggcaaa

SEQ ID NO: 2215509 - RNA, 19 nt, Artificial Sequence
  Description of Artificial Sequence: Synthetic oligonucleotide
  Antisense strand to SEQ ID NO: 2215508
uuugcccaacauuucuuca

SEQ ID NO: 2215510 - RNA, 19 nt, Artificial Sequence
  Description of Artificial Sequence: Synthetic oligonucleotide
  Sense strand starting at position 2731 of SEQ ID NO: 1883775
cuuaaauguggagggugaa

SEQ ID NO: 2215511 - RNA, 19 nt, Artificial Sequence
  Description of Artificial Sequence: Synthetic oligonucleotide
  Antisense strand to SEQ ID NO: 2215510
uucacccuccacauuuaag

SEQ ID NO: 2215512 - RNA, 19 nt, Artificial Sequence
  Description of Artificial Sequence: Synthetic oligonucleotide
  Sense strand starting at position 1137 of SEQ ID NO: 1883775
cugccaauggcugagaaau

SEQ ID NO: 2215513 - RNA, 19 nt, Artificial Sequence
  Description of Artificial Sequence: Synthetic oligonucleotide
  Antisense strand to SEQ ID NO: 2215512
auuucucagccauuggcag

SEQ ID NO: 2215514 - RNA, 19 nt, Artificial Sequence
  Description of Artificial Sequence: Synthetic oligonucleotide
  Sense strand starting at position 1468 of SEQ ID NO: 1883775
caaucagucgauugacaaa

SEQ ID NO: 2215515 - RNA, 19 nt, Artificial Sequence
  Description of Artificial Sequence: Synthetic oligonucleotide
  Antisense strand to SEQ ID NO: 2215514
uuugucaaucgacugauug

SEQ ID NO: 2215516 - RNA, 19 nt, Artificial Sequence
  Description of Artificial Sequence: Synthetic oligonucleotide
  Sense strand starting at position 1211 of SEQ ID NO: 1883775
gaaugaggguuucuuccua

SEQ ID NO: 2215517 - RNA, 19 nt, Artificial Sequence
  Description of Artificial Sequence: Synthetic oligonucleotide
  Antisense strand to SEQ ID NO: 2215516
uaggaagaaacccucauuc

SEQ ID NO: 2215518 - RNA, 19 nt, Artificial Sequence
  Description of Artificial Sequence: Synthetic oligonucleotide
  Sense strand starting at position 1455 of SEQ ID NO: 1883775
gugaguuaauuaccaauca

SEQ ID NO: 2215519 - RNA, 19 nt, Artificial Sequence
  Description of Artificial Sequence: Synthetic oligonucleotide
  Antisense strand to SEQ ID NO: 2215518
ugauugguaauuaacucac

SEQ ID NO: 2215520 - RNA, 19 nt, Artificial Sequence
  Description of Artificial Sequence: Synthetic oligonucleotide
  Sense strand starting at position 3005 of SEQ ID NO: 1883775
cuggguaugccacagaucu

SEQ ID NO: 2215521 - RNA, 19 nt, Artificial Sequence
  Description of Artificial Sequence: Synthetic oligonucleotide
  Antisense strand to SEQ ID NO: 2215520
agaucuguggcauacccag

SEQ ID NO: 2215522 - RNA, 19 nt, Artificial Sequence
  Description of Artificial Sequence: Synthetic oligonucleotide
  Sense strand starting at position 2572 of SEQ ID NO: 1883775
uggagaagucucugaggca

SEQ ID NO: 2215523 - RNA, 19 nt, Artificial Sequence
  Description of Artificial Sequence: Synthetic oligonucleotide
  Antisense strand to SEQ ID NO: 2215522
ugccucagagacuucucca

SEQ ID NO: 2215524 - RNA, 19 nt, Artificial Sequence
  Description of Artificial Sequence: Synthetic oligonucleotide
  Sense strand starting at position 2009 of SEQ ID NO: 1883775
gguuaagugacaggaugua

SEQ ID NO: 2215525 - RNA, 19 nt, Artificial Sequence
  Description of Artificial Sequence: Synthetic oligonucleotide
  Antisense strand to SEQ ID NO: 2215524
uacauccugucacuuaacc

SEQ ID NO: 2215526 - RNA, 19 nt, Artificial Sequence
  Description of Artificial Sequence: Synthetic oligonucleotide
  Sense strand starting at position 954 of SEQ ID NO: 1883775
gcugucaaauaccuaauga

SEQ ID NO: 2215527 - RNA, 19 nt, Artificial Sequence
  Description of Artificial Sequence: Synthetic oligonucleotide
  Antisense strand to SEQ ID NO: 2215526
ucauuagguauuugacagc

SEQ ID NO: 2215528 - RNA, 19 nt, Artificial Sequence
  Description of Artificial Sequence: Synthetic oligonucleotide
  Sense strand starting at position 2832 of SEQ ID NO: 1883775
gcucauguugauuaagagu

SEQ ID NO: 2215529 - RNA, 19 nt, Artificial Sequence
  Description of Artificial Sequence: Synthetic oligonucleotide
  Antisense strand to SEQ ID NO: 2215528
acucuuaaucaacaugagc

SEQ ID NO: 2215530 - RNA, 19 nt, Artificial Sequence
  Description of Artificial Sequence: Synthetic oligonucleotide
  Sense strand starting at position 1169 of SEQ ID NO: 1883775
ccugguucucagugaagga

SEQ ID NO: 2215531 - RNA, 19 nt, Artificial Sequence
  Description of Artificial Sequence: Synthetic oligonucleotide
  Antisense strand to SEQ ID NO: 2215530
uccuucacugagaaccagg

SEQ ID NO: 2215532 - RNA, 19 nt, Artificial Sequence
  Description of Artificial Sequence: Synthetic oligonucleotide
  Sense strand starting at position 2141 of SEQ ID NO: 1883775
gaacacacgugguuacaua

SEQ ID NO: 2215533 - RNA, 19 nt, Artificial Sequence
  Description of Artificial Sequence: Synthetic oligonucleotide
  Antisense strand to SEQ ID NO: 2215532
uauguaaccacguguguuc

SEQ ID NO: 2215534 - RNA, 19 nt, Artificial Sequence
  Description of Artificial Sequence: Synthetic oligonucleotide
  Sense strand starting at position 2853 of SEQ ID NO: 1883775
agugaacguuuacccagaa

SEQ ID NO: 2215535 - RNA, 19 nt, Artificial Sequence
  Description of Artificial Sequence: Synthetic oligonucleotide
  Antisense strand to SEQ ID NO: 2215534
uucuggguaaacguucacu

SEQ ID NO: 2215536 - RNA, 19 nt, Artificial Sequence
  Description of Artificial Sequence: Synthetic oligonucleotide
  Sense strand starting at position 2993 of SEQ ID NO: 1883775
acagucaacuuucugggua

SEQ ID NO: 2215537 - RNA, 19 nt, Artificial Sequence
  Description of Artificial Sequence: Synthetic oligonucleotide
  Antisense strand to SEQ ID NO: 2215536
uacccagaaaguugacugu

SEQ ID NO: 2215538 - RNA, 19 nt, Artificial Sequence
  Description of Artificial Sequence: Synthetic oligonucleotide
  Sense strand starting at position 2831 of SEQ ID NO: 1883775
ugcucauguugauuaagag

SEQ ID NO: 2215539 - RNA, 19 nt, Artificial Sequence
  Description of Artificial Sequence: Synthetic oligonucleotide
  Antisense strand to SEQ ID NO: 2215538
cucuuaaucaacaugagca

SEQ ID NO: 2215540 - RNA, 19 nt, Artificial Sequence
  Description of Artificial Sequence: Synthetic oligonucleotide
  Sense strand starting at position 8 of SEQ ID NO: 1883775
uguguuuaucauggaaauc

SEQ ID NO: 2215541 - RNA, 19 nt, Artificial Sequence
  Description of Artificial Sequence: Synthetic oligonucleotide
  Antisense strand to SEQ ID NO: 2215540
gauuuccaugauaaacaca

SEQ ID NO: 2215542 - RNA, 19 nt, Artificial Sequence
  Description of Artificial Sequence: Synthetic oligonucleotide
  Sense strand starting at position 1293 of SEQ ID NO: 1883775
cgugacucacgguaaauau

SEQ ID NO: 2215543 - RNA, 19 nt, Artificial Sequence
  Description of Artificial Sequence: Synthetic oligonucleotide
  Antisense strand to SEQ ID NO: 2215542
auauuuaccgugagucacg

SEQ ID NO: 2215544 - RNA, 19 nt, Artificial Sequence
  Description of Artificial Sequence: Synthetic oligonucleotide
  Sense strand starting at position 1336 of SEQ ID NO: 1883775
acauguuacgcggaucaag

SEQ ID NO: 2215545 - RNA, 19 nt, Artificial Sequence
  Description of Artificial Sequence: Synthetic oligonucleotide
  Antisense strand to SEQ ID NO: 2215544
cuugauccgcguaacaugu

SEQ ID NO: 2215546 - RNA, 19 nt, Artificial Sequence
  Description of Artificial Sequence: Synthetic oligonucleotide
  Sense strand starting at position 524 of SEQ ID NO: 1883775
cuagcuaaucgucaaccua

SEQ ID NO: 2215547 - RNA, 19 nt, Artificial Sequence
  Description of Artificial Sequence: Synthetic oligonucleotide
  Antisense strand to SEQ ID NO: 2215546
uagguugacgauuagcuag

SEQ ID NO: 2215548 - RNA, 19 nt, Artificial Sequence
  Description of Artificial Sequence: Synthetic oligonucleotide
  Sense strand starting at position 2854 of SEQ ID NO: 1883775
gugaacguuuacccagaau

SEQ ID NO: 2215549 - RNA, 19 nt, Artificial Sequence
  Description of Artificial Sequence: Synthetic oligonucleotide
  Antisense strand to SEQ ID NO: 2215548
auucuggguaaacguucac

SEQ ID NO: 2215550 - RNA, 19 nt, Artificial Sequence
  Description of Artificial Sequence: Synthetic oligonucleotide
  Sense strand starting at position 2511 of SEQ ID NO: 1883775
agggauacuucagaaggga

SEQ ID NO: 2215551 - RNA, 19 nt, Artificial Sequence
  Description of Artificial Sequence: Synthetic oligonucleotide
  Antisense strand to SEQ ID NO: 2215550
ucccuucugaaguaucccu

SEQ ID NO: 2215552 - RNA, 19 nt, Artificial Sequence
  Description of Artificial Sequence: Synthetic oligonucleotide
  Sense strand starting at position 3821 of SEQ ID NO: 1883775
agaauugccugggucucua

SEQ ID NO: 2215553 - RNA, 19 nt, Artificial Sequence
  Description of Artificial Sequence: Synthetic oligonucleotide
  Antisense strand to SEQ ID NO: 2215552
uagagacccaggcaauucu

SEQ ID NO: 2215554 - RNA, 19 nt, Artificial Sequence
  Description of Artificial Sequence: Synthetic oligonucleotide
  Sense strand starting at position 1925 of SEQ ID NO: 1883775
cgucucuuuccuggaaaga

SEQ ID NO: 2215555 - RNA, 19 nt, Artificial Sequence
  Description of Artificial Sequence: Synthetic oligonucleotide
  Antisense strand to SEQ ID NO: 2215554
ucuuuccaggaaagagacg

SEQ ID NO: 2215556 - RNA, 19 nt, Artificial Sequence
  Description of Artificial Sequence: Synthetic oligonucleotide
  Sense strand starting at position 1215 of SEQ ID NO: 1883775
gaggguuucuuccuaaugu

SEQ ID NO: 2215557 - RNA, 19 nt, Artificial Sequence
  Description of Artificial Sequence: Synthetic oligonucleotide
  Antisense strand to SEQ ID NO: 2215556
acauuaggaagaaacccuc

SEQ ID NO: 2215558 - RNA, 19 nt, Artificial Sequence
  Description of Artificial Sequence: Synthetic oligonucleotide
  Sense strand starting at position 3818 of SEQ ID NO: 1883775
uuaagaauugccugggucu

SEQ ID NO: 2215559 - RNA, 19 nt, Artificial Sequence
  Description of Artificial Sequence: Synthetic oligonucleotide
  Antisense strand to SEQ ID NO: 2215558
agacccaggcaauucuuaa

SEQ ID NO: 2215560 - RNA, 19 nt, Artificial Sequence
  Description of Artificial Sequence: Synthetic oligonucleotide
  Sense strand starting at position 520 of SEQ ID NO: 1883775
agaucuagcuaaucgucaa

SEQ ID NO: 2215561 - RNA, 19 nt, Artificial Sequence
  Description of Artificial Sequence: Synthetic oligonucleotide
  Antisense strand to SEQ ID NO: 2215560
uugacgauuagcuagaucu

SEQ ID NO: 2215562 - RNA, 19 nt, Artificial Sequence
  Description of Artificial Sequence: Synthetic oligonucleotide
  Sense strand starting at position 2847 of SEQ ID NO: 1883775
gaguaaagugaacguuuac

SEQ ID NO: 2215563 - RNA, 19 nt, Artificial Sequence
  Description of Artificial Sequence: Synthetic oligonucleotide
  Antisense strand to SEQ ID NO: 2215562
guaaacguucacuuuacuc

SEQ ID NO: 2215564 - RNA, 19 nt, Artificial Sequence
  Description of Artificial Sequence: Synthetic oligonucleotide
  Sense strand starting at position 1438 of SEQ ID NO: 1883775
cucuaaguuccuuggaggu

SEQ ID NO: 2215565 - RNA, 19 nt, Artificial Sequence
  Description of Artificial Sequence: Synthetic oligonucleotide
  Antisense strand to SEQ ID NO: 2215564
accuccaaggaacuuagag

SEQ ID NO: 2215566 - RNA, 19 nt, Artificial Sequence
  Description of Artificial Sequence: Synthetic oligonucleotide
  Sense strand starting at position 2743 of SEQ ID NO: 1883775
gggugaaccuggucaagcu

SEQ ID NO: 2215567 - RNA, 19 nt, Artificial Sequence
  Description of Artificial Sequence: Synthetic oligonucleotide
  Antisense strand to SEQ ID NO: 2215566
agcuugaccagguucaccc

SEQ ID NO: 2215568 - RNA, 19 nt, Artificial Sequence
  Description of Artificial Sequence: Synthetic oligonucleotide
  Sense strand starting at position 1444 of SEQ ID NO: 1883775
guuccuuggaggugaguua

SEQ ID NO: 2215569 - RNA, 19 nt, Artificial Sequence
  Description of Artificial Sequence: Synthetic oligonucleotide
  Antisense strand to SEQ ID NO: 2215568
uaacucaccuccaaggaac

SEQ ID NO: 2215570 - RNA, 19 nt, Artificial Sequence
  Description of Artificial Sequence: Synthetic oligonucleotide
  Sense strand starting at position 1136 of SEQ ID NO: 1883775
gcugccaauggcugagaaa

SEQ ID NO: 2215571 - RNA, 19 nt, Artificial Sequence
  Description of Artificial Sequence: Synthetic oligonucleotide
  Antisense strand to SEQ ID NO: 2215570
uuucucagccauuggcagc

SEQ ID NO: 2215572 - RNA, 19 nt, Artificial Sequence
  Description of Artificial Sequence: Synthetic oligonucleotide
  Sense strand starting at position 3781 of SEQ ID NO: 1883775
gcuugauuuaguggccguu

SEQ ID NO: 2215573 - RNA, 19 nt, Artificial Sequence
  Description of Artificial Sequence: Synthetic oligonucleotide
  Antisense strand to SEQ ID NO: 2215572
aacggccacuaaaucaagc

SEQ ID NO: 2215574 - RNA, 19 nt, Artificial Sequence
  Description of Artificial Sequence: Synthetic oligonucleotide
  Sense strand starting at position 1148 of SEQ ID NO: 1883775
ugagaaauguggcugcucu

SEQ ID NO: 2215575 - RNA, 19 nt, Artificial Sequence
  Description of Artificial Sequence: Synthetic oligonucleotide
  Antisense strand to SEQ ID NO: 2215574
agagcagccacauuucuca

SEQ ID NO: 2215576 - RNA, 19 nt, Artificial Sequence
  Description of Artificial Sequence: Synthetic oligonucleotide
  Sense strand starting at position 1149 of SEQ ID NO: 1883775
gagaaauguggcugcucuc

SEQ ID NO: 2215577 - RNA, 19 nt, Artificial Sequence
  Description of Artificial Sequence: Synthetic oligonucleotide
  Antisense strand to SEQ ID NO: 2215576
gagagcagccacauuucuc

SEQ ID NO: 2215578 - RNA, 19 nt, Artificial Sequence
  Description of Artificial Sequence: Synthetic oligonucleotide
  Sense strand starting at position 917 of SEQ ID NO: 1883775
uugagaaacucuggagaga

SEQ ID NO: 2215579 - RNA, 19 nt, Artificial Sequence
  Description of Artificial Sequence: Synthetic oligonucleotide
  Antisense strand to SEQ ID NO: 2215578
ucucuccagaguuucucaa

SEQ ID NO: 2215580 - RNA, 19 nt, Artificial Sequence
  Description of Artificial Sequence: Synthetic oligonucleotide
  Sense strand starting at position 1923 of SEQ ID NO: 1883775
gccgucucuuuccuggaaa

SEQ ID NO: 2215581 - RNA, 19 nt, Artificial Sequence
  Description of Artificial Sequence: Synthetic oligonucleotide
  Antisense strand to SEQ ID NO: 2215580
uuuccaggaaagagacggc

SEQ ID NO: 2215582 - RNA, 19 nt, Artificial Sequence
  Description of Artificial Sequence: Synthetic oligonucleotide
  Sense strand starting at position 2654 of SEQ ID NO: 1883776
caguucuaacgguaagaaa

SEQ ID NO: 2215583 - RNA, 19 nt, Artificial Sequence
  Description of Artificial Sequence: Synthetic oligonucleotide
  Antisense strand to SEQ ID NO: 2215582
uuucuuaccguuagaacug

SEQ ID NO: 2215584 - RNA, 19 nt, Artificial Sequence
  Description of Artificial Sequence: Synthetic oligonucleotide
  Sense strand starting at position 2476 of SEQ ID NO: 1883776
cagugacugcuggaaauca

SEQ ID NO: 2215585 - RNA, 19 nt, Artificial Sequence
  Description of Artificial Sequence: Synthetic oligonucleotide
  Antisense strand to SEQ ID NO: 2215584
ugauuuccagcagucacug

SEQ ID NO: 2215586 - RNA, 19 nt, Artificial Sequence
  Description of Artificial Sequence: Synthetic oligonucleotide
  Sense strand starting at position 786 of SEQ ID NO: 1883776
ggccuaaucgaugagacau

SEQ ID NO: 2215587 - RNA, 19 nt, Artificial Sequence
  Description of Artificial Sequence: Synthetic oligonucleotide
  Antisense strand to SEQ ID NO: 2215586
augucucaucgauuaggcc

SEQ ID NO: 2215588 - RNA, 19 nt, Artificial Sequence
  Description of Artificial Sequence: Synthetic oligonucleotide
  Sense strand starting at position 2893 of SEQ ID NO: 1883776
gcacuaaggaauggguaaa

SEQ ID NO: 2215589 - RNA, 19 nt, Artificial Sequence
  Description of Artificial Sequence: Synthetic oligonucleotide
  Antisense strand to SEQ ID NO: 2215588
uuuacccauuccuuagugc

SEQ ID NO: 2215590 - RNA, 19 nt, Artificial Sequence
  Description of Artificial Sequence: Synthetic oligonucleotide
  Sense strand starting at position 669 of SEQ ID NO: 1883776
cuaggagugagccaucaug

SEQ ID NO: 2215591 - RNA, 19 nt, Artificial Sequence
  Description of Artificial Sequence: Synthetic oligonucleotide
  Antisense strand to SEQ ID NO: 2215590
caugauggcucacuccuag

SEQ ID NO: 2215592 - RNA, 19 nt, Artificial Sequence
  Description of Artificial Sequence: Synthetic oligonucleotide
  Sense strand starting at position 1357 of SEQ ID NO: 1883776
uuuggaaccucaguaauga

SEQ ID NO: 2215593 - RNA, 19 nt, Artificial Sequence
  Description of Artificial Sequence: Synthetic oligonucleotide
  Antisense strand to SEQ ID NO: 2215592
ucauuacugagguuccaaa

SEQ ID NO: 2215594 - RNA, 19 nt, Artificial Sequence
  Description of Artificial Sequence: Synthetic oligonucleotide
  Sense strand starting at position 3950 of SEQ ID NO: 1883776
uggcauugucaugaaacac

SEQ ID NO: 2215595 - RNA, 19 nt, Artificial Sequence
  Description of Artificial Sequence: Synthetic oligonucleotide
  Antisense strand to SEQ ID NO: 2215594
guguuucaugacaaugcca

SEQ ID NO: 2215596 - RNA, 19 nt, Artificial Sequence
  Description of Artificial Sequence: Synthetic oligonucleotide
  Sense strand starting at position 2848 of SEQ ID NO: 1883776
cgacacagccuuuagacau

SEQ ID NO: 2215597 - RNA, 19 nt, Artificial Sequence
  Description of Artificial Sequence: Synthetic oligonucleotide
  Antisense strand to SEQ ID NO: 2215596
augucuaaaggcugugucg

SEQ ID NO: 2215598 - RNA, 19 nt, Artificial Sequence
  Description of Artificial Sequence: Synthetic oligonucleotide
  Sense strand starting at position 2168 of SEQ ID NO: 1883776
gggucucucaaacgauaag

SEQ ID NO: 2215599 - RNA, 19 nt, Artificial Sequence
  Description of Artificial Sequence: Synthetic oligonucleotide
  Antisense strand to SEQ ID NO: 2215598
cuuaucguuugagagaccc

SEQ ID NO: 2215600 - RNA, 19 nt, Artificial Sequence
  Description of Artificial Sequence: Synthetic oligonucleotide
  Sense strand starting at position 3601 of SEQ ID NO: 1883776
gcuggcaauggugaaauca

SEQ ID NO: 2215601 - RNA, 19 nt, Artificial Sequence
  Description of Artificial Sequence: Synthetic oligonucleotide
  Antisense strand to SEQ ID NO: 2215600
ugauuucaccauugccagc

SEQ ID NO: 2215602 - RNA, 19 nt, Artificial Sequence
  Description of Artificial Sequence: Synthetic oligonucleotide
  Sense strand starting at position 3408 of SEQ ID NO: 1883776
gccacaacugccuaugaca

SEQ ID NO: 2215603 - RNA, 19 nt, Artificial Sequence
  Description of Artificial Sequence: Synthetic oligonucleotide
  Antisense strand to SEQ ID NO: 2215602
ugucauaggcaguuguggc

SEQ ID NO: 2215604 - RNA, 19 nt, Artificial Sequence
  Description of Artificial Sequence: Synthetic oligonucleotide
  Sense strand starting at position 3337 of SEQ ID NO: 1883776
gacaucugugcugggaaag

SEQ ID NO: 2215605 - RNA, 19 nt, Artificial Sequence
  Description of Artificial Sequence: Synthetic oligonucleotide
  Antisense strand to SEQ ID NO: 2215604
cuuucccagcacagauguc

SEQ ID NO: 2215606 - RNA, 19 nt, Artificial Sequence
  Description of Artificial Sequence: Synthetic oligonucleotide
  Sense strand starting at position 785 of SEQ ID NO: 1883776
uggccuaaucgaugagaca

SEQ ID NO: 2215607 - RNA, 19 nt, Artificial Sequence
  Description of Artificial Sequence: Synthetic oligonucleotide
  Antisense strand to SEQ ID NO: 2215606
ugucucaucgauuaggcca

SEQ ID NO: 2215608 - RNA, 19 nt, Artificial Sequence
  Description of Artificial Sequence: Synthetic oligonucleotide
  Sense strand starting at position 3886 of SEQ ID NO: 1883776
augacucuuuggcucacaa

SEQ ID NO: 2215609 - RNA, 19 nt, Artificial Sequence
  Description of Artificial Sequence: Synthetic oligonucleotide
  Antisense strand to SEQ ID NO: 2215608
uugugagccaaagagucau

SEQ ID NO: 2215610 - RNA, 19 nt, Artificial Sequence
  Description of Artificial Sequence: Synthetic oligonucleotide
  Sense strand starting at position 761 of SEQ ID NO: 1883776
auauuaagugcccaauguu

SEQ ID NO: 2215611 - RNA, 19 nt, Artificial Sequence
  Description of Artificial Sequence: Synthetic oligonucleotide
  Antisense strand to SEQ ID NO: 2215610
aacauugggcacuuaauau

SEQ ID NO: 2215612 - RNA, 19 nt, Artificial Sequence
  Description of Artificial Sequence: Synthetic oligonucleotide
  Sense strand starting at position 1235 of SEQ ID NO: 1883776
agaaaugagucuuucuugu

SEQ ID NO: 2215613 - RNA, 19 nt, Artificial Sequence
  Description of Artificial Sequence: Synthetic oligonucleotide
  Antisense strand to SEQ ID NO: 2215612
acaagaaagacucauuucu

SEQ ID NO: 2215614 - RNA, 19 nt, Artificial Sequence
  Description of Artificial Sequence: Synthetic oligonucleotide
  Sense strand starting at position 3944 of SEQ ID NO: 1883776
accaaauggcauugucaug

SEQ ID NO: 2215615 - RNA, 19 nt, Artificial Sequence
  Description of Artificial Sequence: Synthetic oligonucleotide
  Antisense strand to SEQ ID NO: 2215614
caugacaaugccauuuggu

SEQ ID NO: 2215616 - RNA, 19 nt, Artificial Sequence
  Description of Artificial Sequence: Synthetic oligonucleotide
  Sense strand starting at position 1820 of SEQ ID NO: 1883776
agcugacacuuaccaugua

SEQ ID NO: 2215617 - RNA, 19 nt, Artificial Sequence
  Description of Artificial Sequence: Synthetic oligonucleotide
  Antisense strand to SEQ ID NO: 2215616
uacaugguaagugucagcu

SEQ ID NO: 2215618 - RNA, 19 nt, Artificial Sequence
  Description of Artificial Sequence: Synthetic oligonucleotide
  Sense strand starting at position 161 of SEQ ID NO: 1883776
gccuguuaucugggacaga

SEQ ID NO: 2215619 - RNA, 19 nt, Artificial Sequence
  Description of Artificial Sequence: Synthetic oligonucleotide
  Antisense strand to SEQ ID NO: 2215618
ucugucccagauaacaggc

SEQ ID NO: 2215620 - RNA, 19 nt, Artificial Sequence
  Description of Artificial Sequence: Synthetic oligonucleotide
  Sense strand starting at position 1553 of SEQ ID NO: 1883776
agcugucuuagggaugcua

SEQ ID NO: 2215621 - RNA, 19 nt, Artificial Sequence
  Description of Artificial Sequence: Synthetic oligonucleotide
  Antisense strand to SEQ ID NO: 2215620
uagcaucccuaagacagcu

SEQ ID NO: 2215622 - RNA, 19 nt, Artificial Sequence
  Description of Artificial Sequence: Synthetic oligonucleotide
  Sense strand starting at position 1373 of SEQ ID NO: 1883776
ugacaugugucuuuacaug

SEQ ID NO: 2215623 - RNA, 19 nt, Artificial Sequence
  Description of Artificial Sequence: Synthetic oligonucleotide
  Antisense strand to SEQ ID NO: 2215622
cauguaaagacacauguca

SEQ ID NO: 2215624 - RNA, 19 nt, Artificial Sequence
  Description of Artificial Sequence: Synthetic oligonucleotide
  Sense strand starting at position 159 of SEQ ID NO: 1883776
gggccuguuaucugggaca

SEQ ID NO: 2215625 - RNA, 19 nt, Artificial Sequence
  Description of Artificial Sequence: Synthetic oligonucleotide
  Antisense strand to SEQ ID NO: 2215624
ugucccagauaacaggccc

SEQ ID NO: 2215626 - RNA, 19 nt, Artificial Sequence
  Description of Artificial Sequence: Synthetic oligonucleotide
  Sense strand starting at position 2652 of SEQ ID NO: 1883776
uccaguucuaacgguaaga

SEQ ID NO: 2215627 - RNA, 19 nt, Artificial Sequence
  Description of Artificial Sequence: Synthetic oligonucleotide
  Antisense strand to SEQ ID NO: 2215626
ucuuaccguuagaacugga

SEQ ID NO: 2215628 - RNA, 19 nt, Artificial Sequence
  Description of Artificial Sequence: Synthetic oligonucleotide
  Sense strand starting at position 1366 of SEQ ID NO: 1883776
ucaguaaugacaugugucu

SEQ ID NO: 2215629 - RNA, 19 nt, Artificial Sequence
  Description of Artificial Sequence: Synthetic oligonucleotide
  Antisense strand to SEQ ID NO: 2215628
agacacaugucauuacuga

SEQ ID NO: 2215630 - RNA, 19 nt, Artificial Sequence
  Description of Artificial Sequence: Synthetic oligonucleotide
  Sense strand starting at position 1368 of SEQ ID NO: 1883776
aguaaugacaugugucuuu

SEQ ID NO: 2215631 - RNA, 19 nt, Artificial Sequence
  Description of Artificial Sequence: Synthetic oligonucleotide
  Antisense strand to SEQ ID NO: 2215630
aaagacacaugucauuacu

SEQ ID NO: 2215632 - RNA, 19 nt, Artificial Sequence
  Description of Artificial Sequence: Synthetic oligonucleotide
  Sense strand starting at position 1237 of SEQ ID NO: 1883776
aaaugagucuuucuugugu

SEQ ID NO: 2215633 - RNA, 19 nt, Artificial Sequence
  Description of Artificial Sequence: Synthetic oligonucleotide
  Antisense strand to SEQ ID NO: 2215632
acacaagaaagacucauuu

SEQ ID NO: 2215634 - RNA, 19 nt, Artificial Sequence
  Description of Artificial Sequence: Synthetic oligonucleotide
  Sense strand starting at position 1382 of SEQ ID NO: 1883776
ucuuuacaugcuuguggau

SEQ ID NO: 2215635 - RNA, 19 nt, Artificial Sequence
  Description of Artificial Sequence: Synthetic oligonucleotide
  Antisense strand to SEQ ID NO: 2215634
auccacaagcauguaaaga

SEQ ID NO: 2215636 - RNA, 19 nt, Artificial Sequence
  Description of Artificial Sequence: Synthetic oligonucleotide
  Sense strand starting at position 3359 of SEQ ID NO: 1883776
cccagaguuggcugcuaaa

SEQ ID NO: 2215637 - RNA, 19 nt, Artificial Sequence
  Description of Artificial Sequence: Synthetic oligonucleotide
  Antisense strand to SEQ ID NO: 2215636
uuuagcagccaacucuggg

SEQ ID NO: 2215638 - RNA, 19 nt, Artificial Sequence
  Description of Artificial Sequence: Synthetic oligonucleotide
  Sense strand starting at position 3830 of SEQ ID NO: 1883776
cgagaaggcuggcugcaaa

SEQ ID NO: 2215639 - RNA, 19 nt, Artificial Sequence
  Description of Artificial Sequence: Synthetic oligonucleotide
  Antisense strand to SEQ ID NO: 2215638
uuugcagccagccuucucg

SEQ ID NO: 2215640 - RNA, 19 nt, Artificial Sequence
  Description of Artificial Sequence: Synthetic oligonucleotide
  Sense strand starting at position 3598 of SEQ ID NO: 1883776
gcagcuggcaauggugaaa

SEQ ID NO: 2215641 - RNA, 19 nt, Artificial Sequence
  Description of Artificial Sequence: Synthetic oligonucleotide
  Antisense strand to SEQ ID NO: 2215640
uuucaccauugccagcugc

SEQ ID NO: 2215642 - RNA, 19 nt, Artificial Sequence
  Description of Artificial Sequence: Synthetic oligonucleotide
  Sense strand starting at position 764 of SEQ ID NO: 1883776
uuaagugcccaauguuacu

SEQ ID NO: 2215643 - RNA, 19 nt, Artificial Sequence
  Description of Artificial Sequence: Synthetic oligonucleotide
  Antisense strand to SEQ ID NO: 2215642
aguaacauugggcacuuaa

SEQ ID NO: 2215644 - RNA, 19 nt, Artificial Sequence
  Description of Artificial Sequence: Synthetic oligonucleotide
  Sense strand starting at position 1381 of SEQ ID NO: 1883776
gucuuuacaugcuugugga

SEQ ID NO: 2215645 - RNA, 19 nt, Artificial Sequence
  Description of Artificial Sequence: Synthetic oligonucleotide
  Antisense strand to SEQ ID NO: 2215644
uccacaagcauguaaagac

SEQ ID NO: 2215646 - RNA, 19 nt, Artificial Sequence
  Description of Artificial Sequence: Synthetic oligonucleotide
  Sense strand starting at position 2749 of SEQ ID NO: 1883776
cccagagcuccacguuuau

SEQ ID NO: 2215647 - RNA, 19 nt, Artificial Sequence
  Description of Artificial Sequence: Synthetic oligonucleotide
  Antisense strand to SEQ ID NO: 2215646
auaaacguggagcucuggg

SEQ ID NO: 2215648 - RNA, 19 nt, Artificial Sequence
  Description of Artificial Sequence: Synthetic oligonucleotide
  Sense strand starting at position 3641 of SEQ ID NO: 1883776
aacgcaauccguugucaaa

SEQ ID NO: 2215649 - RNA, 19 nt, Artificial Sequence
  Description of Artificial Sequence: Synthetic oligonucleotide
  Antisense strand to SEQ ID NO: 2215648
uuugacaacggauugcguu

SEQ ID NO: 2215650 - RNA, 19 nt, Artificial Sequence
  Description of Artificial Sequence: Synthetic oligonucleotide
  Sense strand starting at position 162 of SEQ ID NO: 1883776
ccuguuaucugggacagaa

SEQ ID NO: 2215651 - RNA, 19 nt, Artificial Sequence
  Description of Artificial Sequence: Synthetic oligonucleotide
  Antisense strand to SEQ ID NO: 2215650
uucugucccagauaacagg

SEQ ID NO: 2215652 - RNA, 19 nt, Artificial Sequence
  Description of Artificial Sequence: Synthetic oligonucleotide
  Sense strand starting at position 2190 of SEQ ID NO: 1883776
cauggucgcuguccucaua

SEQ ID NO: 2215653 - RNA, 19 nt, Artificial Sequence
  Description of Artificial Sequence: Synthetic oligonucleotide
  Antisense strand to SEQ ID NO: 2215652
uaugaggacagcgaccaug

SEQ ID NO: 2215654 - RNA, 19 nt, Artificial Sequence
  Description of Artificial Sequence: Synthetic oligonucleotide
  Sense strand starting at position 661 of SEQ ID NO: 1883776
ccgggauucuaggagugag

SEQ ID NO: 2215655 - RNA, 19 nt, Artificial Sequence
  Description of Artificial Sequence: Synthetic oligonucleotide
  Antisense strand to SEQ ID NO: 2215654
cucacuccuagaaucccgg

SEQ ID NO: 2215656 - RNA, 19 nt, Artificial Sequence
  Description of Artificial Sequence: Synthetic oligonucleotide
  Sense strand starting at position 1821 of SEQ ID NO: 1883776
gcugacacuuaccauguaa

SEQ ID NO: 2215657 - RNA, 19 nt, Artificial Sequence
  Description of Artificial Sequence: Synthetic oligonucleotide
  Antisense strand to SEQ ID NO: 2215656
uuacaugguaagugucagc

SEQ ID NO: 2215658 - RNA, 19 nt, Artificial Sequence
  Description of Artificial Sequence: Synthetic oligonucleotide
  Sense strand starting at position 3842 of SEQ ID NO: 1883776
cugcaaaggucccaucaca

SEQ ID NO: 2215659 - RNA, 19 nt, Artificial Sequence
  Description of Artificial Sequence: Synthetic oligonucleotide
  Antisense strand to SEQ ID NO: 2215658
ugugaugggaccuuugcag

SEQ ID NO: 2215660 - RNA, 19 nt, Artificial Sequence
  Description of Artificial Sequence: Synthetic oligonucleotide
  Sense strand starting at position 3362 of SEQ ID NO: 1883776
agaguuggcugcuaaagga

SEQ ID NO: 2215661 - RNA, 19 nt, Artificial Sequence
  Description of Artificial Sequence: Synthetic oligonucleotide
  Antisense strand to SEQ ID NO: 2215660
uccuuuagcagccaacucu

SEQ ID NO: 2215662 - RNA, 19 nt, Artificial Sequence
  Description of Artificial Sequence: Synthetic oligonucleotide
  Sense strand starting at position 2168 of SEQ ID NO: 1883777
cuauuagaauguuuagaag

SEQ ID NO: 2215663 - RNA, 19 nt, Artificial Sequence
  Description of Artificial Sequence: Synthetic oligonucleotide
  Antisense strand to SEQ ID NO: 2215662
cuucuaaacauucuaauag

SEQ ID NO: 2215664 - RNA, 19 nt, Artificial Sequence
  Description of Artificial Sequence: Synthetic oligonucleotide
  Sense strand starting at position 1917 of SEQ ID NO: 1883777
ggcagacugugauuuguug

SEQ ID NO: 2215665 - RNA, 19 nt, Artificial Sequence
  Description of Artificial Sequence: Synthetic oligonucleotide
  Antisense strand to SEQ ID NO: 2215664
caacaaaucacagucugcc

SEQ ID NO: 2215666 - RNA, 19 nt, Artificial Sequence
  Description of Artificial Sequence: Synthetic oligonucleotide
  Sense strand starting at position 912 of SEQ ID NO: 1883777
gccuauguccaacaagaga

SEQ ID NO: 2215667 - RNA, 19 nt, Artificial Sequence
  Description of Artificial Sequence: Synthetic oligonucleotide
  Antisense strand to SEQ ID NO: 2215666
ucucuuguuggacauaggc

SEQ ID NO: 2215668 - RNA, 19 nt, Artificial Sequence
  Description of Artificial Sequence: Synthetic oligonucleotide
  Sense strand starting at position 576 of SEQ ID NO: 1883777
uuaagucuauaggugagaa

SEQ ID NO: 2215669 - RNA, 19 nt, Artificial Sequence
  Description of Artificial Sequence: Synthetic oligonucleotide
  Antisense strand to SEQ ID NO: 2215668
uucucaccuauagacuuaa

SEQ ID NO: 2215670 - RNA, 19 nt, Artificial Sequence
  Description of Artificial Sequence: Synthetic oligonucleotide
  Sense strand starting at position 1764 of SEQ ID NO: 1883777
uaguaaaucggacauuagu

SEQ ID NO: 2215671 - RNA, 19 nt, Artificial Sequence
  Description of Artificial Sequence: Synthetic oligonucleotide
  Antisense strand to SEQ ID NO: 2215670
acuaauguccgauuuacua

SEQ ID NO: 2215672 - RNA, 19 nt, Artificial Sequence
  Description of Artificial Sequence: Synthetic oligonucleotide
  Sense strand starting at position 1802 of SEQ ID NO: 1883777
ggaauugaaaguuguuaau

SEQ ID NO: 2215673 - RNA, 19 nt, Artificial Sequence
  Description of Artificial Sequence: Synthetic oligonucleotide
  Antisense strand to SEQ ID NO: 2215672
auuaacaacuuucaauucc

SEQ ID NO: 2215674 - RNA, 19 nt, Artificial Sequence
  Description of Artificial Sequence: Synthetic oligonucleotide
  Sense strand starting at position 573 of SEQ ID NO: 1883777
aguuuaagucuauagguga

SEQ ID NO: 2215675 - RNA, 19 nt, Artificial Sequence
  Description of Artificial Sequence: Synthetic oligonucleotide
  Antisense strand to SEQ ID NO: 2215674
ucaccuauagacuuaaacu

SEQ ID NO: 2215676 - RNA, 19 nt, Artificial Sequence
  Description of Artificial Sequence: Synthetic oligonucleotide
  Sense strand starting at position 1921 of SEQ ID NO: 1883777
gacugugauuuguugucga

SEQ ID NO: 2215677 - RNA, 19 nt, Artificial Sequence
  Description of Artificial Sequence: Synthetic oligonucleotide
  Antisense strand to SEQ ID NO: 2215676
ucgacaacaaaucacaguc

SEQ ID NO: 2215678 - RNA, 19 nt, Artificial Sequence
  Description of Artificial Sequence: Synthetic oligonucleotide
  Sense strand starting at position 3565 of SEQ ID NO: 1883777
gccuaauuugcauguuaca

SEQ ID NO: 2215679 - RNA, 19 nt, Artificial Sequence
  Description of Artificial Sequence: Synthetic oligonucleotide
  Antisense strand to SEQ ID NO: 2215678
uguaacaugcaaauuaggc

SEQ ID NO: 2215680 - RNA, 19 nt, Artificial Sequence
  Description of Artificial Sequence: Synthetic oligonucleotide
  Sense strand starting at position 3211 of SEQ ID NO: 1883777
uguaguugggauuaugagu

SEQ ID NO: 2215681 - RNA, 19 nt, Artificial Sequence
  Description of Artificial Sequence: Synthetic oligonucleotide
  Antisense strand to SEQ ID NO: 2215680
acucauaaucccaacuaca

SEQ ID NO: 2215682 - RNA, 19 nt, Artificial Sequence
  Description of Artificial Sequence: Synthetic oligonucleotide
  Sense strand starting at position 571 of SEQ ID NO: 1883777
acaguuuaagucuauaggu

SEQ ID NO: 2215683 - RNA, 19 nt, Artificial Sequence
  Description of Artificial Sequence: Synthetic oligonucleotide
  Antisense strand to SEQ ID NO: 2215682
accuauagacuuaaacugu

SEQ ID NO: 2215684 - RNA, 19 nt, Artificial Sequence
  Description of Artificial Sequence: Synthetic oligonucleotide
  Sense strand starting at position 3216 of SEQ ID NO: 1883777
uugggauuaugagugagca

SEQ ID NO: 2215685 - RNA, 19 nt, Artificial Sequence
  Description of Artificial Sequence: Synthetic oligonucleotide
  Antisense strand to SEQ ID NO: 2215684
ugcucacucauaaucccaa

SEQ ID NO: 2215686 - RNA, 19 nt, Artificial Sequence
  Description of Artificial Sequence: Synthetic oligonucleotide
  Sense strand starting at position 2104 of SEQ ID NO: 1883777
ccagcaagauuaguauuga

SEQ ID NO: 2215687 - RNA, 19 nt, Artificial Sequence
  Description of Artificial Sequence: Synthetic oligonucleotide
  Antisense strand to SEQ ID NO: 2215686
ucaauacuaaucuugcugg

SEQ ID NO: 2215688 - RNA, 19 nt, Artificial Sequence
  Description of Artificial Sequence: Synthetic oligonucleotide
  Sense strand starting at position 3958 of SEQ ID NO: 1883777
ccucuugcagguuaauaau

SEQ ID NO: 2215689 - RNA, 19 nt, Artificial Sequence
  Description of Artificial Sequence: Synthetic oligonucleotide
  Antisense strand to SEQ ID NO: 2215688
auuauuaaccugcaagagg

SEQ ID NO: 2215690 - RNA, 19 nt, Artificial Sequence
  Description of Artificial Sequence: Synthetic oligonucleotide
  Sense strand starting at position 812 of SEQ ID NO: 1883777
agcuuauuauaagcaugaa

SEQ ID NO: 2215691 - RNA, 19 nt, Artificial Sequence
  Description of Artificial Sequence: Synthetic oligonucleotide
  Antisense strand to SEQ ID NO: 2215690
uucaugcuuauaauaagcu

SEQ ID NO: 2215692 - RNA, 19 nt, Artificial Sequence
  Description of Artificial Sequence: Synthetic oligonucleotide
  Sense strand starting at position 2491 of SEQ ID NO: 1883777
aaaguauguguuuacgaua

SEQ ID NO: 2215693 - RNA, 19 nt, Artificial Sequence
  Description of Artificial Sequence: Synthetic oligonucleotide
  Antisense strand to SEQ ID NO: 2215692
uaucguaaacacauacuuu

SEQ ID NO: 2215694 - RNA, 19 nt, Artificial Sequence
  Description of Artificial Sequence: Synthetic oligonucleotide
  Sense strand starting at position 1760 of SEQ ID NO: 1883777
ugaguaguaaaucggacau

SEQ ID NO: 2215695 - RNA, 19 nt, Artificial Sequence
  Description of Artificial Sequence: Synthetic oligonucleotide
  Antisense strand to SEQ ID NO: 2215694
auguccgauuuacuacuca

SEQ ID NO: 2215696 - RNA, 19 nt, Artificial Sequence
  Description of Artificial Sequence: Synthetic oligonucleotide
  Sense strand starting at position 568 of SEQ ID NO: 1883777
uugacaguuuaagucuaua

SEQ ID NO: 2215697 - RNA, 19 nt, Artificial Sequence
  Description of Artificial Sequence: Synthetic oligonucleotide
  Antisense strand to SEQ ID NO: 2215696
uauagacuuaaacugucaa

SEQ ID NO: 2215698 - RNA, 19 nt, Artificial Sequence
  Description of Artificial Sequence: Synthetic oligonucleotide
  Sense strand starting at position 3441 of SEQ ID NO: 1883777
ucugaugggcuccauguau

SEQ ID NO: 2215699 - RNA, 19 nt, Artificial Sequence
  Description of Artificial Sequence: Synthetic oligonucleotide
  Antisense strand to SEQ ID NO: 2215698
auacauggagcccaucaga

SEQ ID NO: 2215700 - RNA, 19 nt, Artificial Sequence
  Description of Artificial Sequence: Synthetic oligonucleotide
  Sense strand starting at position 3653 of SEQ ID NO: 1883777
guaauccuccagcagcaaa

SEQ ID NO: 2215701 - RNA, 19 nt, Artificial Sequence
  Description of Artificial Sequence: Synthetic oligonucleotide
  Antisense strand to SEQ ID NO: 2215700
uuugcugcuggaggauuac

SEQ ID NO: 2215702 - RNA, 19 nt, Artificial Sequence
  Description of Artificial Sequence: Synthetic oligonucleotide
  Sense strand starting at position 79 of SEQ ID NO: 1883777
ugaggaaagcucuggcuga

SEQ ID NO: 2215703 - RNA, 19 nt, Artificial Sequence
  Description of Artificial Sequence: Synthetic oligonucleotide
  Antisense strand to SEQ ID NO: 2215702
ucagccagagcuuuccuca

SEQ ID NO: 2215704 - RNA, 19 nt, Artificial Sequence
  Description of Artificial Sequence: Synthetic oligonucleotide
  Sense strand starting at position 2496 of SEQ ID NO: 1883777
auguguuuacgauauacuu

SEQ ID NO: 2215705 - RNA, 19 nt, Artificial Sequence
  Description of Artificial Sequence: Synthetic oligonucleotide
  Antisense strand to SEQ ID NO: 2215704
aaguauaucguaaacacau

SEQ ID NO: 2215706 - RNA, 19 nt, Artificial Sequence
  Description of Artificial Sequence: Synthetic oligonucleotide
  Sense strand starting at position 2096 of SEQ ID NO: 1883777
ggcuucuuccagcaagauu

SEQ ID NO: 2215707 - RNA, 19 nt, Artificial Sequence
  Description of Artificial Sequence: Synthetic oligonucleotide
  Antisense strand to SEQ ID NO: 2215706
aaucuugcuggaagaagcc

SEQ ID NO: 2215708 - RNA, 19 nt, Artificial Sequence
  Description of Artificial Sequence: Synthetic oligonucleotide
  Sense strand starting at position 932 of SEQ ID NO: 1883777
gcacuuauauguccaacag

SEQ ID NO: 2215709 - RNA, 19 nt, Artificial Sequence
  Description of Artificial Sequence: Synthetic oligonucleotide
  Antisense strand to SEQ ID NO: 2215708
cuguuggacauauaagugc

SEQ ID NO: 2215710 - RNA, 19 nt, Artificial Sequence
  Description of Artificial Sequence: Synthetic oligonucleotide
  Sense strand starting at position 2301 of SEQ ID NO: 1883777
ugaccuguucugcagcaaa

SEQ ID NO: 2215711 - RNA, 19 nt, Artificial Sequence
  Description of Artificial Sequence: Synthetic oligonucleotide
  Antisense strand to SEQ ID NO: 2215710
uuugcugcagaacagguca

SEQ ID NO: 2215712 - RNA, 19 nt, Artificial Sequence
  Description of Artificial Sequence: Synthetic oligonucleotide
  Sense strand starting at position 3752 of SEQ ID NO: 1883777
cgugaacuacauugugaca

SEQ ID NO: 2215713 - RNA, 19 nt, Artificial Sequence
  Description of Artificial Sequence: Synthetic oligonucleotide
  Antisense strand to SEQ ID NO: 2215712
ugucacaauguaguucacg

SEQ ID NO: 2215714 - RNA, 19 nt, Artificial Sequence
  Description of Artificial Sequence: Synthetic oligonucleotide
  Sense strand starting at position 83 of SEQ ID NO: 1883777
gaaagcucuggcugacuau

SEQ ID NO: 2215715 - RNA, 19 nt, Artificial Sequence
  Description of Artificial Sequence: Synthetic oligonucleotide
  Antisense strand to SEQ ID NO: 2215714
auagucagccagagcuuuc

SEQ ID NO: 2215716 - RNA, 19 nt, Artificial Sequence
  Description of Artificial Sequence: Synthetic oligonucleotide
  Sense strand starting at position 2017 of SEQ ID NO: 1883777
ucuacaggcucuguacaau

SEQ ID NO: 2215717 - RNA, 19 nt, Artificial Sequence
  Description of Artificial Sequence: Synthetic oligonucleotide
  Antisense strand to SEQ ID NO: 2215716
auuguacagagccuguaga

SEQ ID NO: 2215718 - RNA, 19 nt, Artificial Sequence
  Description of Artificial Sequence: Synthetic oligonucleotide
  Sense strand starting at position 1842 of SEQ ID NO: 1883777
augcuaguaaggugugaaa

SEQ ID NO: 2215719 - RNA, 19 nt, Artificial Sequence
  Description of Artificial Sequence: Synthetic oligonucleotide
  Antisense strand to SEQ ID NO: 2215718
uuucacaccuuacuagcau

SEQ ID NO: 2215720 - RNA, 19 nt, Artificial Sequence
  Description of Artificial Sequence: Synthetic oligonucleotide
  Sense strand starting at position 2078 of SEQ ID NO: 1883777
agaaguuugcuugguuaag

SEQ ID NO: 2215721 - RNA, 19 nt, Artificial Sequence
  Description of Artificial Sequence: Synthetic oligonucleotide
  Antisense strand to SEQ ID NO: 2215720
cuuaaccaagcaaacuucu

SEQ ID NO: 2215722 - RNA, 19 nt, Artificial Sequence
  Description of Artificial Sequence: Synthetic oligonucleotide
  Sense strand starting at position 1732 of SEQ ID NO: 1883777
aagcaauguuaagugucaa

SEQ ID NO: 2215723 - RNA, 19 nt, Artificial Sequence
  Description of Artificial Sequence: Synthetic oligonucleotide
  Antisense strand to SEQ ID NO: 2215722
uugacacuuaacauugcuu

SEQ ID NO: 2215724 - RNA, 19 nt, Artificial Sequence
  Description of Artificial Sequence: Synthetic oligonucleotide
  Sense strand starting at position 888 of SEQ ID NO: 1883777
gaacuaaguuugccaaguu

SEQ ID NO: 2215725 - RNA, 19 nt, Artificial Sequence
  Description of Artificial Sequence: Synthetic oligonucleotide
  Antisense strand to SEQ ID NO: 2215724
aacuuggcaaacuuaguuc

SEQ ID NO: 2215726 - RNA, 19 nt, Artificial Sequence
  Description of Artificial Sequence: Synthetic oligonucleotide
  Sense strand starting at position 1844 of SEQ ID NO: 1883777
gcuaguaaggugugaaaug

SEQ ID NO: 2215727 - RNA, 19 nt, Artificial Sequence
  Description of Artificial Sequence: Synthetic oligonucleotide
  Antisense strand to SEQ ID NO: 2215726
cauuucacaccuuacuagc

SEQ ID NO: 2215728 - RNA, 19 nt, Artificial Sequence
  Description of Artificial Sequence: Synthetic oligonucleotide
  Sense strand starting at position 841 of SEQ ID NO: 1883777
ggaauuucuucccagcaau

SEQ ID NO: 2215729 - RNA, 19 nt, Artificial Sequence
  Description of Artificial Sequence: Synthetic oligonucleotide
  Antisense strand to SEQ ID NO: 2215728
auugcugggaagaaauucc

SEQ ID NO: 2215730 - RNA, 19 nt, Artificial Sequence
  Description of Artificial Sequence: Synthetic oligonucleotide
  Sense strand starting at position 1733 of SEQ ID NO: 1883777
agcaauguuaagugucaag

SEQ ID NO: 2215731 - RNA, 19 nt, Artificial Sequence
  Description of Artificial Sequence: Synthetic oligonucleotide
  Antisense strand to SEQ ID NO: 2215730
cuugacacuuaacauugcu

SEQ ID NO: 2215732 - RNA, 19 nt, Artificial Sequence
  Description of Artificial Sequence: Synthetic oligonucleotide
  Sense strand starting at position 3865 of SEQ ID NO: 1883777
ggucucugcaagcauagua

SEQ ID NO: 2215733 - RNA, 19 nt, Artificial Sequence
  Description of Artificial Sequence: Synthetic oligonucleotide
  Antisense strand to SEQ ID NO: 2215732
uacuaugcuugcagagacc

SEQ ID NO: 2215734 - RNA, 19 nt, Artificial Sequence
  Description of Artificial Sequence: Synthetic oligonucleotide
  Sense strand starting at position 2644 of SEQ ID NO: 1883777
acuaauguuucccuuaguu

SEQ ID NO: 2215735 - RNA, 19 nt, Artificial Sequence
  Description of Artificial Sequence: Synthetic oligonucleotide
  Antisense strand to SEQ ID NO: 2215734
aacuaagggaaacauuagu

SEQ ID NO: 2215736 - RNA, 19 nt, Artificial Sequence
  Description of Artificial Sequence: Synthetic oligonucleotide
  Sense strand starting at position 2075 of SEQ ID NO: 1883777
augagaaguuugcuugguu

SEQ ID NO: 2215737 - RNA, 19 nt, Artificial Sequence
  Description of Artificial Sequence: Synthetic oligonucleotide
  Antisense strand to SEQ ID NO: 2215736
aaccaagcaaacuucucau

SEQ ID NO: 2215738 - RNA, 19 nt, Artificial Sequence
  Description of Artificial Sequence: Synthetic oligonucleotide
  Sense strand starting at position 2076 of SEQ ID NO: 1883777
ugagaaguuugcuugguua

SEQ ID NO: 2215739 - RNA, 19 nt, Artificial Sequence
  Description of Artificial Sequence: Synthetic oligonucleotide
  Antisense strand to SEQ ID NO: 2215738
uaaccaagcaaacuucuca

SEQ ID NO: 2215740 - RNA, 19 nt, Artificial Sequence
  Description of Artificial Sequence: Synthetic oligonucleotide
  Sense strand starting at position 138 of SEQ ID NO: 1883777
gcuaaauuaccacguuaau

SEQ ID NO: 2215741 - RNA, 19 nt, Artificial Sequence
  Description of Artificial Sequence: Synthetic oligonucleotide
  Antisense strand to SEQ ID NO: 2215740
auuaacgugguaauuuagc

SEQ ID NO: 2215742 - RNA, 19 nt, Artificial Sequence
  Description of Artificial Sequence: Synthetic oligonucleotide
  Sense strand starting at position 406 of SEQ ID NO: 1883778
gugccagcgaguuucucaa

SEQ ID NO: 2215743 - RNA, 19 nt, Artificial Sequence
  Description of Artificial Sequence: Synthetic oligonucleotide
  Antisense strand to SEQ ID NO: 2215742
uugagaaacucgcuggcac

SEQ ID NO: 2215744 - RNA, 19 nt, Artificial Sequence
  Description of Artificial Sequence: Synthetic oligonucleotide
  Sense strand starting at position 657 of SEQ ID NO: 1883778
ggucuaaguaagcagggau

SEQ ID NO: 2215745 - RNA, 19 nt, Artificial Sequence
  Description of Artificial Sequence: Synthetic oligonucleotide
  Antisense strand to SEQ ID NO: 2215744
aucccugcuuacuuagacc

SEQ ID NO: 2215746 - RNA, 19 nt, Artificial Sequence
  Description of Artificial Sequence: Synthetic oligonucleotide
  Sense strand starting at position 684 of SEQ ID NO: 1883778
gcaagaggaguguaaguga

SEQ ID NO: 2215747 - RNA, 19 nt, Artificial Sequence
  Description of Artificial Sequence: Synthetic oligonucleotide
  Antisense strand to SEQ ID NO: 2215746
ucacuuacacuccucuugc

SEQ ID NO: 2215748 - RNA, 19 nt, Artificial Sequence
  Description of Artificial Sequence: Synthetic oligonucleotide
  Sense strand starting at position 2159 of SEQ ID NO: 1883778
ccaggaccucccuguaaga

SEQ ID NO: 2215749 - RNA, 19 nt, Artificial Sequence
  Description of Artificial Sequence: Synthetic oligonucleotide
  Antisense strand to SEQ ID NO: 2215748
ucuuacagggagguccugg

SEQ ID NO: 2215750 - RNA, 19 nt, Artificial Sequence
  Description of Artificial Sequence: Synthetic oligonucleotide
  Sense strand starting at position 164 of SEQ ID NO: 1883778
ucacuaugaggguaucgua

SEQ ID NO: 2215751 - RNA, 19 nt, Artificial Sequence
  Description of Artificial Sequence: Synthetic oligonucleotide
  Antisense strand to SEQ ID NO: 2215750
uacgauacccucauaguga

SEQ ID NO: 2215752 - RNA, 19 nt, Artificial Sequence
  Description of Artificial Sequence: Synthetic oligonucleotide
  Sense strand starting at position 155 of SEQ ID NO: 1883778
guuuaauggucacuaugag

SEQ ID NO: 2215753 - RNA, 19 nt, Artificial Sequence
  Description of Artificial Sequence: Synthetic oligonucleotide
  Antisense strand to SEQ ID NO: 2215752
cucauagugaccauuaaac

SEQ ID NO: 2215754 - RNA, 19 nt, Artificial Sequence
  Description of Artificial Sequence: Synthetic oligonucleotide
  Sense strand starting at position 152 of SEQ ID NO: 1883778
cagguuuaauggucacuau

SEQ ID NO: 2215755 - RNA, 19 nt, Artificial Sequence
  Description of Artificial Sequence: Synthetic oligonucleotide
  Antisense strand to SEQ ID NO: 2215754
auagugaccauuaaaccug

SEQ ID NO: 2215756 - RNA, 19 nt, Artificial Sequence
  Description of Artificial Sequence: Synthetic oligonucleotide
  Sense strand starting at position 649 of SEQ ID NO: 1883778
ccggcugaggucuaaguaa

SEQ ID NO: 2215757 - RNA, 19 nt, Artificial Sequence
  Description of Artificial Sequence: Synthetic oligonucleotide
  Antisense strand to SEQ ID NO: 2215756
uuacuuagaccucagccgg

SEQ ID NO: 2215758 - RNA, 19 nt, Artificial Sequence
  Description of Artificial Sequence: Synthetic oligonucleotide
  Sense strand starting at position 743 of SEQ ID NO: 1883778
cagagacucggccagugua

SEQ ID NO: 2215759 - RNA, 19 nt, Artificial Sequence
  Description of Artificial Sequence: Synthetic oligonucleotide
  Antisense strand to SEQ ID NO: 2215758
uacacuggccgagucucug

SEQ ID NO: 2215760 - RNA, 19 nt, Artificial Sequence
  Description of Artificial Sequence: Synthetic oligonucleotide
  Sense strand starting at position 682 of SEQ ID NO: 1883778
uggcaagaggaguguaagu

SEQ ID NO: 2215761 - RNA, 19 nt, Artificial Sequence
  Description of Artificial Sequence: Synthetic oligonucleotide
  Antisense strand to SEQ ID NO: 2215760
acuuacacuccucuugcca

SEQ ID NO: 2215762 - RNA, 19 nt, Artificial Sequence
  Description of Artificial Sequence: Synthetic oligonucleotide
  Sense strand starting at position 926 of SEQ ID NO: 1883778
gugcuuaacuaguuaacaa

SEQ ID NO: 2215763 - RNA, 19 nt, Artificial Sequence
  Description of Artificial Sequence: Synthetic oligonucleotide
  Antisense strand to SEQ ID NO: 2215762
uuguuaacuaguuaagcac

SEQ ID NO: 2215764 - RNA, 19 nt, Artificial Sequence
  Description of Artificial Sequence: Synthetic oligonucleotide
  Sense strand starting at position 975 of SEQ ID NO: 1883778
ggguguagaaauugcacuu

SEQ ID NO: 2215765 - RNA, 19 nt, Artificial Sequence
  Description of Artificial Sequence: Synthetic oligonucleotide
  Antisense strand to SEQ ID NO: 2215764
aagugcaauuucuacaccc

SEQ ID NO: 2215766 - RNA, 19 nt, Artificial Sequence
  Description of Artificial Sequence: Synthetic oligonucleotide
  Sense strand starting at position 1872 of SEQ ID NO: 1883778
ccaugauguggaugacguu

SEQ ID NO: 2215767 - RNA, 19 nt, Artificial Sequence
  Description of Artificial Sequence: Synthetic oligonucleotide
  Antisense strand to SEQ ID NO: 2215766
aacgucauccacaucaugg

SEQ ID NO: 2215768 - RNA, 19 nt, Artificial Sequence
  Description of Artificial Sequence: Synthetic oligonucleotide
  Sense strand starting at position 2129 of SEQ ID NO: 1883778
gccaccuuguucuugagga

SEQ ID NO: 2215769 - RNA, 19 nt, Artificial Sequence
  Description of Artificial Sequence: Synthetic oligonucleotide
  Antisense strand to SEQ ID NO: 2215768
uccucaagaacaagguggc

SEQ ID NO: 2215770 - RNA, 19 nt, Artificial Sequence
  Description of Artificial Sequence: Synthetic oligonucleotide
  Sense strand starting at position 3662 of SEQ ID NO: 1883778
gucucuucuccuugaucua

SEQ ID NO: 2215771 - RNA, 19 nt, Artificial Sequence
  Description of Artificial Sequence: Synthetic oligonucleotide
  Antisense strand to SEQ ID NO: 2215770
uagaucaaggagaagagac

SEQ ID NO: 2215772 - RNA, 19 nt, Artificial Sequence
  Description of Artificial Sequence: Synthetic oligonucleotide
  Sense strand starting at position 2078 of SEQ ID NO: 1883778
ccggcuucucacugaauca

SEQ ID NO: 2215773 - RNA, 19 nt, Artificial Sequence
  Description of Artificial Sequence: Synthetic oligonucleotide
  Antisense strand to SEQ ID NO: 2215772
ugauucagugagaagccgg

SEQ ID NO: 2215774 - RNA, 19 nt, Artificial Sequence
  Description of Artificial Sequence: Synthetic oligonucleotide
  Sense strand starting at position 171 of SEQ ID NO: 1883778
gaggguaucguacaucguu

SEQ ID NO: 2215775 - RNA, 19 nt, Artificial Sequence
  Description of Artificial Sequence: Synthetic oligonucleotide
  Antisense strand to SEQ ID NO: 2215774
aacgauguacgauacccuc

SEQ ID NO: 2215776 - RNA, 19 nt, Artificial Sequence
  Description of Artificial Sequence: Synthetic oligonucleotide
  Sense strand starting at position 821 of SEQ ID NO: 1883778
gcuggugaucgauacggca

SEQ ID NO: 2215777 - RNA, 19 nt, Artificial Sequence
  Description of Artificial Sequence: Synthetic oligonucleotide
  Antisense strand to SEQ ID NO: 2215776
ugccguaucgaucaccagc

SEQ ID NO: 2215778 - RNA, 19 nt, Artificial Sequence
  Description of Artificial Sequence: Synthetic oligonucleotide
  Sense strand starting at position 1349 of SEQ ID NO: 1883778
ggcucuuccacaggcgaua

SEQ ID NO: 2215779 - RNA, 19 nt, Artificial Sequence
  Description of Artificial Sequence: Synthetic oligonucleotide
  Antisense strand to SEQ ID NO: 2215778
uaucgccuguggaagagcc

SEQ ID NO: 2215780 - RNA, 19 nt, Artificial Sequence
  Description of Artificial Sequence: Synthetic oligonucleotide
  Sense strand starting at position 918 of SEQ ID NO: 1883778
gcagcauagugcuuaacua

SEQ ID NO: 2215781 - RNA, 19 nt, Artificial Sequence
  Description of Artificial Sequence: Synthetic oligonucleotide
  Antisense strand to SEQ ID NO: 2215780
uaguuaagcacuaugcugc

SEQ ID NO: 2215782 - RNA, 19 nt, Artificial Sequence
  Description of Artificial Sequence: Synthetic oligonucleotide
  Sense strand starting at position 142 of SEQ ID NO: 1883778
gguggaggaucagguuuaa

SEQ ID NO: 2215783 - RNA, 19 nt, Artificial Sequence
  Description of Artificial Sequence: Synthetic oligonucleotide
  Antisense strand to SEQ ID NO: 2215782
uuaaaccugauccuccacc

SEQ ID NO: 2215784 - RNA, 19 nt, Artificial Sequence
  Description of Artificial Sequence: Synthetic oligonucleotide
  Sense strand starting at position 2133 of SEQ ID NO: 1883778
ccuuguucuugaggagaua

SEQ ID NO: 2215785 - RNA, 19 nt, Artificial Sequence
  Description of Artificial Sequence: Synthetic oligonucleotide
  Antisense strand to SEQ ID NO: 2215784
uaucuccucaagaacaagg

SEQ ID NO: 2215786 - RNA, 19 nt, Artificial Sequence
  Description of Artificial Sequence: Synthetic oligonucleotide
  Sense strand starting at position 1561 of SEQ ID NO: 1883778
ucaugaggguccugagguu

SEQ ID NO: 2215787 - RNA, 19 nt, Artificial Sequence
  Description of Artificial Sequence: Synthetic oligonucleotide
  Antisense strand to SEQ ID NO: 2215786
aaccucaggacccucauga

SEQ ID NO: 2215788 - RNA, 19 nt, Artificial Sequence
  Description of Artificial Sequence: Synthetic oligonucleotide
  Sense strand starting at position 167 of SEQ ID NO: 1883778
cuaugaggguaucguacau

SEQ ID NO: 2215789 - RNA, 19 nt, Artificial Sequence
  Description of Artificial Sequence: Synthetic oligonucleotide
  Antisense strand to SEQ ID NO: 2215788
auguacgauacccucauag

SEQ ID NO: 2215790 - RNA, 19 nt, Artificial Sequence
  Description of Artificial Sequence: Synthetic oligonucleotide
  Sense strand starting at position 1379 of SEQ ID NO: 1883778
caaaguacgucucgaucau

SEQ ID NO: 2215791 - RNA, 19 nt, Artificial Sequence
  Description of Artificial Sequence: Synthetic oligonucleotide
  Antisense strand to SEQ ID NO: 2215790
augaucgagacguacuuug

SEQ ID NO: 2215792 - RNA, 19 nt, Artificial Sequence
  Description of Artificial Sequence: Synthetic oligonucleotide
  Sense strand starting at position 1557 of SEQ ID NO: 1883779
ggaaacaugucucuugaaa

SEQ ID NO: 2215793 - RNA, 19 nt, Artificial Sequence
  Description of Artificial Sequence: Synthetic oligonucleotide
  Antisense strand to SEQ ID NO: 2215792
uuucaagagacauguuucc

SEQ ID NO: 2215794 - RNA, 19 nt, Artificial Sequence
  Description of Artificial Sequence: Synthetic oligonucleotide
  Sense strand starting at position 3637 of SEQ ID NO: 1883779
gcucaaguucguuuaaguu

SEQ ID NO: 2215795 - RNA, 19 nt, Artificial Sequence
  Description of Artificial Sequence: Synthetic oligonucleotide
  Antisense strand to SEQ ID NO: 2215794
aacuuaaacgaacuugagc

SEQ ID NO: 2215796 - RNA, 19 nt, Artificial Sequence
  Description of Artificial Sequence: Synthetic oligonucleotide
  Sense strand starting at position 227 of SEQ ID NO: 1883779
aggccagauguguaagaga

SEQ ID NO: 2215797 - RNA, 19 nt, Artificial Sequence
  Description of Artificial Sequence: Synthetic oligonucleotide
  Antisense strand to SEQ ID NO: 2215796
ucucuuacacaucuggccu

SEQ ID NO: 2215798 - RNA, 19 nt, Artificial Sequence
  Description of Artificial Sequence: Synthetic oligonucleotide
  Sense strand starting at position 622 of SEQ ID NO: 1883779
cacaaagaucuggguuuaa

SEQ ID NO: 2215799 - RNA, 19 nt, Artificial Sequence
  Description of Artificial Sequence: Synthetic oligonucleotide
  Antisense strand to SEQ ID NO: 2215798
uuaaacccagaucuuugug

SEQ ID NO: 2215800 - RNA, 19 nt, Artificial Sequence
  Description of Artificial Sequence: Synthetic oligonucleotide
  Sense strand starting at position 1769 of SEQ ID NO: 1883779
agcagaggagcucauuaau

SEQ ID NO: 2215801 - RNA, 19 nt, Artificial Sequence
  Description of Artificial Sequence: Synthetic oligonucleotide
  Antisense strand to SEQ ID NO: 2215800
auuaaugagcuccucugcu

SEQ ID NO: 2215802 - RNA, 19 nt, Artificial Sequence
  Description of Artificial Sequence: Synthetic oligonucleotide
  Sense strand starting at position 752 of SEQ ID NO: 1883779
cccagagauucuuccagac

SEQ ID NO: 2215803 - RNA, 19 nt, Artificial Sequence
  Description of Artificial Sequence: Synthetic oligonucleotide
  Antisense strand to SEQ ID NO: 2215802
gucuggaagaaucucuggg

SEQ ID NO: 2215804 - RNA, 19 nt, Artificial Sequence
  Description of Artificial Sequence: Synthetic oligonucleotide
  Sense strand starting at position 3516 of SEQ ID NO: 1883779
aacagaggucacugagagu

SEQ ID NO: 2215805 - RNA, 19 nt, Artificial Sequence
  Description of Artificial Sequence: Synthetic oligonucleotide
  Antisense strand to SEQ ID NO: 2215804
acucucagugaccucuguu

SEQ ID NO: 2215806 - RNA, 19 nt, Artificial Sequence
  Description of Artificial Sequence: Synthetic oligonucleotide
  Sense strand starting at position 1680 of SEQ ID NO: 1883779
aggugugggcaauaauuaa

SEQ ID NO: 2215807 - RNA, 19 nt, Artificial Sequence
  Description of Artificial Sequence: Synthetic oligonucleotide
  Antisense strand to SEQ ID NO: 2215806
uuaauuauugcccacaccu

SEQ ID NO: 2215808 - RNA, 19 nt, Artificial Sequence
  Description of Artificial Sequence: Synthetic oligonucleotide
  Sense strand starting at position 238 of SEQ ID NO: 1883779
guaagagagacucaguugu

SEQ ID NO: 2215809 - RNA, 19 nt, Artificial Sequence
  Description of Artificial Sequence: Synthetic oligonucleotide
  Antisense strand to SEQ ID NO: 2215808
acaacugagucucucuuac

SEQ ID NO: 2215810 - RNA, 19 nt, Artificial Sequence
  Description of Artificial Sequence: Synthetic oligonucleotide
  Sense strand starting at position 2117 of SEQ ID NO: 1883779
gacgcuuugcucucaguuu

SEQ ID NO: 2215811 - RNA, 19 nt, Artificial Sequence
  Description of Artificial Sequence: Synthetic oligonucleotide
  Antisense strand to SEQ ID NO: 2215810
aaacugagagcaaagcguc

SEQ ID NO: 2215812 - RNA, 19 nt, Artificial Sequence
  Description of Artificial Sequence: Synthetic oligonucleotide
  Sense strand starting at position 77 of SEQ ID NO: 1883779
uggcucugucgcucauuau

SEQ ID NO: 2215813 - RNA, 19 nt, Artificial Sequence
  Description of Artificial Sequence: Synthetic oligonucleotide
  Antisense strand to SEQ ID NO: 2215812
auaaugagcgacagagcca

SEQ ID NO: 2215814 - RNA, 19 nt, Artificial Sequence
  Description of Artificial Sequence: Synthetic oligonucleotide
  Sense strand starting at position 876 of SEQ ID NO: 1883779
gggugcuuugugagguacu

SEQ ID NO: 2215815 - RNA, 19 nt, Artificial Sequence
  Description of Artificial Sequence: Synthetic oligonucleotide
  Antisense strand to SEQ ID NO: 2215814
aguaccucacaaagcaccc

SEQ ID NO: 2215816 - RNA, 19 nt, Artificial Sequence
  Description of Artificial Sequence: Synthetic oligonucleotide
  Sense strand starting at position 434 of SEQ ID NO: 1883779
gagggacuugguuaugucu

SEQ ID NO: 2215817 - RNA, 19 nt, Artificial Sequence
  Description of Artificial Sequence: Synthetic oligonucleotide
  Antisense strand to SEQ ID NO: 2215816
agacauaaccaagucccuc

SEQ ID NO: 2215818 - RNA, 19 nt, Artificial Sequence
  Description of Artificial Sequence: Synthetic oligonucleotide
  Sense strand starting at position 1788 of SEQ ID NO: 1883779
gagaguaauuagguguaaa

SEQ ID NO: 2215819 - RNA, 19 nt, Artificial Sequence
  Description of Artificial Sequence: Synthetic oligonucleotide
  Antisense strand to SEQ ID NO: 2215818
uuuacaccuaauuacucuc

SEQ ID NO: 2215820 - RNA, 19 nt, Artificial Sequence
  Description of Artificial Sequence: Synthetic oligonucleotide
  Sense strand starting at position 3077 of SEQ ID NO: 1883779
gugaaaccaucccugauau

SEQ ID NO: 2215821 - RNA, 19 nt, Artificial Sequence
  Description of Artificial Sequence: Synthetic oligonucleotide
  Antisense strand to SEQ ID NO: 2215820
auaucagggaugguuucac

SEQ ID NO: 2215822 - RNA, 19 nt, Artificial Sequence
  Description of Artificial Sequence: Synthetic oligonucleotide
  Sense strand starting at position 2166 of SEQ ID NO: 1883779
uuacaaaguuuccuggaua

SEQ ID NO: 2215823 - RNA, 19 nt, Artificial Sequence
  Description of Artificial Sequence: Synthetic oligonucleotide
  Antisense strand to SEQ ID NO: 2215822
uauccaggaaacuuuguaa

SEQ ID NO: 2215824 - RNA, 19 nt, Artificial Sequence
  Description of Artificial Sequence: Synthetic oligonucleotide
  Sense strand starting at position 1789 of SEQ ID NO: 1883779
agaguaauuagguguaaag

SEQ ID NO: 2215825 - RNA, 19 nt, Artificial Sequence
  Description of Artificial Sequence: Synthetic oligonucleotide
  Antisense strand to SEQ ID NO: 2215824
cuuuacaccuaauuacucu

SEQ ID NO: 2215826 - RNA, 19 nt, Artificial Sequence
  Description of Artificial Sequence: Synthetic oligonucleotide
  Sense strand starting at position 2091 of SEQ ID NO: 1883779
gggaaagaagccugagcau

SEQ ID NO: 2215827 - RNA, 19 nt, Artificial Sequence
  Description of Artificial Sequence: Synthetic oligonucleotide
  Antisense strand to SEQ ID NO: 2215826
augcucaggcuucuuuccc

SEQ ID NO: 2215828 - RNA, 19 nt, Artificial Sequence
  Description of Artificial Sequence: Synthetic oligonucleotide
  Sense strand starting at position 3196 of SEQ ID NO: 1883779
cuuacacuccucugggaau

SEQ ID NO: 2215829 - RNA, 19 nt, Artificial Sequence
  Description of Artificial Sequence: Synthetic oligonucleotide
  Antisense strand to SEQ ID NO: 2215828
auucccagaggaguguaag

SEQ ID NO: 2215830 - RNA, 19 nt, Artificial Sequence
  Description of Artificial Sequence: Synthetic oligonucleotide
  Sense strand starting at position 3578 of SEQ ID NO: 1883779
agacaaguccgggaugucu

SEQ ID NO: 2215831 - RNA, 19 nt, Artificial Sequence
  Description of Artificial Sequence: Synthetic oligonucleotide
  Antisense strand to SEQ ID NO: 2215830
agacaucccggacuugucu

SEQ ID NO: 2215832 - RNA, 19 nt, Artificial Sequence
  Description of Artificial Sequence: Synthetic oligonucleotide
  Sense strand starting at position 3775 of SEQ ID NO: 1883779
agagcagggucuucagaau

SEQ ID NO: 2215833 - RNA, 19 nt, Artificial Sequence
  Description of Artificial Sequence: Synthetic oligonucleotide
  Antisense strand to SEQ ID NO: 2215832
auucugaagacccugcucu

SEQ ID NO: 2215834 - RNA, 19 nt, Artificial Sequence
  Description of Artificial Sequence: Synthetic oligonucleotide
  Sense strand starting at position 3596 of SEQ ID NO: 1883779
ucaguuauauaagccaaga

SEQ ID NO: 2215835 - RNA, 19 nt, Artificial Sequence
  Description of Artificial Sequence: Synthetic oligonucleotide
  Antisense strand to SEQ ID NO: 2215834
ucuuggcuuauauaacuga

SEQ ID NO: 2215836 - RNA, 19 nt, Artificial Sequence
  Description of Artificial Sequence: Synthetic oligonucleotide
  Sense strand starting at position 419 of SEQ ID NO: 1883779
gucuaaaucuggucagagg

SEQ ID NO: 2215837 - RNA, 19 nt, Artificial Sequence
  Description of Artificial Sequence: Synthetic oligonucleotide
  Antisense strand to SEQ ID NO: 2215836
ccucugaccagauuuagac

SEQ ID NO: 2215838 - RNA, 19 nt, Artificial Sequence
  Description of Artificial Sequence: Synthetic oligonucleotide
  Sense strand starting at position 2165 of SEQ ID NO: 1883779
uuuacaaaguuuccuggau

SEQ ID NO: 2215839 - RNA, 19 nt, Artificial Sequence
  Description of Artificial Sequence: Synthetic oligonucleotide
  Antisense strand to SEQ ID NO: 2215838
auccaggaaacuuuguaaa

SEQ ID NO: 2215840 - RNA, 19 nt, Artificial Sequence
  Description of Artificial Sequence: Synthetic oligonucleotide
  Sense strand starting at position 709 of SEQ ID NO: 1883779
ugaggacuuugcccuugaa

SEQ ID NO: 2215841 - RNA, 19 nt, Artificial Sequence
  Description of Artificial Sequence: Synthetic oligonucleotide
  Antisense strand to SEQ ID NO: 2215840
uucaagggcaaaguccuca

SEQ ID NO: 2215842 - RNA, 19 nt, Artificial Sequence
  Description of Artificial Sequence: Synthetic oligonucleotide
  Sense strand starting at position 430 of SEQ ID NO: 1883779
gucagagggacuugguuau

SEQ ID NO: 2215843 - RNA, 19 nt, Artificial Sequence
  Description of Artificial Sequence: Synthetic oligonucleotide
  Antisense strand to SEQ ID NO: 2215842
auaaccaagucccucugac

SEQ ID NO: 2215844 - RNA, 19 nt, Artificial Sequence
  Description of Artificial Sequence: Synthetic oligonucleotide
  Sense strand starting at position 3347 of SEQ ID NO: 1883779
cccagaagugaucgacacu

SEQ ID NO: 2215845 - RNA, 19 nt, Artificial Sequence
  Description of Artificial Sequence: Synthetic oligonucleotide
  Antisense strand to SEQ ID NO: 2215844
agugucgaucacuucuggg

SEQ ID NO: 2215846 - RNA, 19 nt, Artificial Sequence
  Description of Artificial Sequence: Synthetic oligonucleotide
  Sense strand starting at position 1393 of SEQ ID NO: 1883779
agugguagccacuauaauu

SEQ ID NO: 2215847 - RNA, 19 nt, Artificial Sequence
  Description of Artificial Sequence: Synthetic oligonucleotide
  Antisense strand to SEQ ID NO: 2215846
aauuauaguggcuaccacu

SEQ ID NO: 2215848 - RNA, 19 nt, Artificial Sequence
  Description of Artificial Sequence: Synthetic oligonucleotide
  Sense strand starting at position 1839 of SEQ ID NO: 1883779
aggagcuaaucauuaagcu

SEQ ID NO: 2215849 - RNA, 19 nt, Artificial Sequence
  Description of Artificial Sequence: Synthetic oligonucleotide
  Antisense strand to SEQ ID NO: 2215848
agcuuaaugauuagcuccu

SEQ ID NO: 2215850 - RNA, 19 nt, Artificial Sequence
  Description of Artificial Sequence: Synthetic oligonucleotide
  Sense strand starting at position 1530 of SEQ ID NO: 1883779
augaaaugagcauguguga

SEQ ID NO: 2215851 - RNA, 19 nt, Artificial Sequence
  Description of Artificial Sequence: Synthetic oligonucleotide
  Antisense strand to SEQ ID NO: 2215850
ucacacaugcucauuucau

SEQ ID NO: 2215852 - RNA, 19 nt, Artificial Sequence
  Description of Artificial Sequence: Synthetic oligonucleotide
  Sense strand starting at position 1315 of SEQ ID NO: 1883779
cuguaacauggagguagua

SEQ ID NO: 2215853 - RNA, 19 nt, Artificial Sequence
  Description of Artificial Sequence: Synthetic oligonucleotide
  Antisense strand to SEQ ID NO: 2215852
uacuaccuccauguuacag

SEQ ID NO: 2215854 - RNA, 19 nt, Artificial Sequence
  Description of Artificial Sequence: Synthetic oligonucleotide
  Sense strand starting at position 3913 of SEQ ID NO: 1883779
ccaaauggcuuuccuggau

SEQ ID NO: 2215855 - RNA, 19 nt, Artificial Sequence
  Description of Artificial Sequence: Synthetic oligonucleotide
  Antisense strand to SEQ ID NO: 2215854
auccaggaaagccauuugg

SEQ ID NO: 2215856 - RNA, 19 nt, Artificial Sequence
  Description of Artificial Sequence: Synthetic oligonucleotide
  Sense strand starting at position 1606 of SEQ ID NO: 1883779
aaaucugcucgugauuaua

SEQ ID NO: 2215857 - RNA, 19 nt, Artificial Sequence
  Description of Artificial Sequence: Synthetic oligonucleotide
  Antisense strand to SEQ ID NO: 2215856
uauaaucacgagcagauuu

SEQ ID NO: 2215858 - RNA, 19 nt, Artificial Sequence
  Description of Artificial Sequence: Synthetic oligonucleotide
  Sense strand starting at position 480 of SEQ ID NO: 1883779
ugcuccuauccugaaaguu

SEQ ID NO: 2215859 - RNA, 19 nt, Artificial Sequence
  Description of Artificial Sequence: Synthetic oligonucleotide
  Antisense strand to SEQ ID NO: 2215858
aacuuucaggauaggagca

SEQ ID NO: 2215860 - RNA, 19 nt, Artificial Sequence
  Description of Artificial Sequence: Synthetic oligonucleotide
  Sense strand starting at position 1183 of SEQ ID NO: 1883779
ggagcuucugggcaacagu

SEQ ID NO: 2215861 - RNA, 19 nt, Artificial Sequence
  Description of Artificial Sequence: Synthetic oligonucleotide
  Antisense strand to SEQ ID NO: 2215860
acuguugcccagaagcucc

SEQ ID NO: 2215862 - RNA, 19 nt, Artificial Sequence
  Description of Artificial Sequence: Synthetic oligonucleotide
  Sense strand starting at position 527 of SEQ ID NO: 1883779
gggaaacucuugucuuucu

SEQ ID NO: 2215863 - RNA, 19 nt, Artificial Sequence
  Description of Artificial Sequence: Synthetic oligonucleotide
  Antisense strand to SEQ ID NO: 2215862
agaaagacaagaguuuccc

SEQ ID NO: 2215864 - RNA, 19 nt, Artificial Sequence
  Description of Artificial Sequence: Synthetic oligonucleotide
  Sense strand starting at position 2706 of SEQ ID NO: 1883779
ggaacacugugcucuuaga

SEQ ID NO: 2215865 - RNA, 19 nt, Artificial Sequence
  Description of Artificial Sequence: Synthetic oligonucleotide
  Antisense strand to SEQ ID NO: 2215864
ucuaagagcacaguguucc

SEQ ID NO: 2215866 - RNA, 19 nt, Artificial Sequence
  Description of Artificial Sequence: Synthetic oligonucleotide
  Sense strand starting at position 3321 of SEQ ID NO: 1883779
uggucacaccaaugaguuu

SEQ ID NO: 2215867 - RNA, 19 nt, Artificial Sequence
  Description of Artificial Sequence: Synthetic oligonucleotide
  Antisense strand to SEQ ID NO: 2215866
aaacucauuggugugacca

SEQ ID NO: 2215868 - RNA, 19 nt, Artificial Sequence
  Description of Artificial Sequence: Synthetic oligonucleotide
  Sense strand starting at position 242 of SEQ ID NO: 1883779
gagagacucaguugugggu

SEQ ID NO: 2215869 - RNA, 19 nt, Artificial Sequence
  Description of Artificial Sequence: Synthetic oligonucleotide
  Antisense strand to SEQ ID NO: 2215868
acccacaacugagucucuc

SEQ ID NO: 2215870 - RNA, 19 nt, Artificial Sequence
  Description of Artificial Sequence: Synthetic oligonucleotide
  Sense strand starting at position 3754 of SEQ ID NO: 1883779
ccaauauuauugcugguaa

SEQ ID NO: 2215871 - RNA, 19 nt, Artificial Sequence
  Description of Artificial Sequence: Synthetic oligonucleotide
  Antisense strand to SEQ ID NO: 2215870
uuaccagcaauaauauugg

SEQ ID NO: 2215872 - RNA, 19 nt, Artificial Sequence
  Description of Artificial Sequence: Synthetic oligonucleotide
  Sense strand starting at position 1571 of SEQ ID NO: 1883780
caugaauacuuguugaaag

SEQ ID NO: 2215873 - RNA, 19 nt, Artificial Sequence
  Description of Artificial Sequence: Synthetic oligonucleotide
  Antisense strand to SEQ ID NO: 2215872
cuuucaacaaguauucaug

SEQ ID NO: 2215874 - RNA, 19 nt, Artificial Sequence
  Description of Artificial Sequence: Synthetic oligonucleotide
  Sense strand starting at position 385 of SEQ ID NO: 1883780
acucaugaugcuuacaaug

SEQ ID NO: 2215875 - RNA, 19 nt, Artificial Sequence
  Description of Artificial Sequence: Synthetic oligonucleotide
  Antisense strand to SEQ ID NO: 2215874
cauuguaagcaucaugagu

SEQ ID NO: 2215876 - RNA, 19 nt, Artificial Sequence
  Description of Artificial Sequence: Synthetic oligonucleotide
  Sense strand starting at position 3361 of SEQ ID NO: 1883780
ggaguaguaggccaaauag

SEQ ID NO: 2215877 - RNA, 19 nt, Artificial Sequence
  Description of Artificial Sequence: Synthetic oligonucleotide
  Antisense strand to SEQ ID NO: 2215876
cuauuuggccuacuacucc

SEQ ID NO: 2215878 - RNA, 19 nt, Artificial Sequence
  Description of Artificial Sequence: Synthetic oligonucleotide
  Sense strand starting at position 3483 of SEQ ID NO: 1883780
uggagaagacuuugaugug

SEQ ID NO: 2215879 - RNA, 19 nt, Artificial Sequence
  Description of Artificial Sequence: Synthetic oligonucleotide
  Antisense strand to SEQ ID NO: 2215878
cacaucaaagucuucucca

SEQ ID NO: 2215880 - RNA, 19 nt, Artificial Sequence
  Description of Artificial Sequence: Synthetic oligonucleotide
  Sense strand starting at position 1051 of SEQ ID NO: 1883780
gauggaaugcuuuggagga

SEQ ID NO: 2215881 - RNA, 19 nt, Artificial Sequence
  Description of Artificial Sequence: Synthetic oligonucleotide
  Antisense strand to SEQ ID NO: 2215880
uccuccaaagcauuccauc

SEQ ID NO: 2215882 - RNA, 19 nt, Artificial Sequence
  Description of Artificial Sequence: Synthetic oligonucleotide
  Sense strand starting at position 2596 of SEQ ID NO: 1883780
uggcuuguucucucggcaa

SEQ ID NO: 2215883 - RNA, 19 nt, Artificial Sequence
  Description of Artificial Sequence: Synthetic oligonucleotide
  Antisense strand to SEQ ID NO: 2215882
uugccgagagaacaagcca

SEQ ID NO: 2215884 - RNA, 19 nt, Artificial Sequence
  Description of Artificial Sequence: Synthetic oligonucleotide
  Sense strand starting at position 3800 of SEQ ID NO: 1883780
cugauugagccaggaauaa

SEQ ID NO: 2215885 - RNA, 19 nt, Artificial Sequence
  Description of Artificial Sequence: Synthetic oligonucleotide
  Antisense strand to SEQ ID NO: 2215884
uuauuccuggcucaaucag

SEQ ID NO: 2215886 - RNA, 19 nt, Artificial Sequence
  Description of Artificial Sequence: Synthetic oligonucleotide
  Sense strand starting at position 3181 of SEQ ID NO: 1883780
ggaguaucuaaaggugaau

SEQ ID NO: 2215887 - RNA, 19 nt, Artificial Sequence
  Description of Artificial Sequence: Synthetic oligonucleotide
  Antisense strand to SEQ ID NO: 2215886
auucaccuuuagauacucc

SEQ ID NO: 2215888 - RNA, 19 nt, Artificial Sequence
  Description of Artificial Sequence: Synthetic oligonucleotide
  Sense strand starting at position 3143 of SEQ ID NO: 1883780
uguaccacacuguaaauau

SEQ ID NO: 2215889 - RNA, 19 nt, Artificial Sequence
  Description of Artificial Sequence: Synthetic oligonucleotide
  Antisense strand to SEQ ID NO: 2215888
auauuuacagugugguaca

SEQ ID NO: 2215890 - RNA, 19 nt, Artificial Sequence
  Description of Artificial Sequence: Synthetic oligonucleotide
  Sense strand starting at position 3604 of SEQ ID NO: 1883780
aguguauaacacuauuauc

SEQ ID NO: 2215891 - RNA, 19 nt, Artificial Sequence
  Description of Artificial Sequence: Synthetic oligonucleotide
  Antisense strand to SEQ ID NO: 2215890
gauaauaguguuauacacu

SEQ ID NO: 2215892 - RNA, 19 nt, Artificial Sequence
  Description of Artificial Sequence: Synthetic oligonucleotide
  Sense strand starting at position 162 of SEQ ID NO: 1883780
auggcauauccaggaauua

SEQ ID NO: 2215893 - RNA, 19 nt, Artificial Sequence
  Description of Artificial Sequence: Synthetic oligonucleotide
  Antisense strand to SEQ ID NO: 2215892
uaauuccuggauaugccau

SEQ ID NO: 2215894 - RNA, 19 nt, Artificial Sequence
  Description of Artificial Sequence: Synthetic oligonucleotide
  Sense strand starting at position 532 of SEQ ID NO: 1883780
gugucaccugaauaucaau

SEQ ID NO: 2215895 - RNA, 19 nt, Artificial Sequence
  Description of Artificial Sequence: Synthetic oligonucleotide
  Antisense strand to SEQ ID NO: 2215894
auugauauucaggugacac

SEQ ID NO: 2215896 - RNA, 19 nt, Artificial Sequence
  Description of Artificial Sequence: Synthetic oligonucleotide
  Sense strand starting at position 376 of SEQ ID NO: 1883780
gggagugccacucaugaug

SEQ ID NO: 2215897 - RNA, 19 nt, Artificial Sequence
  Description of Artificial Sequence: Synthetic oligonucleotide
  Antisense strand to SEQ ID NO: 2215896
caucaugaguggcacuccc

SEQ ID NO: 2215898 - RNA, 19 nt, Artificial Sequence
  Description of Artificial Sequence: Synthetic oligonucleotide
  Sense strand starting at position 923 of SEQ ID NO: 1883780
uagucaaaggauugauucu

SEQ ID NO: 2215899 - RNA, 19 nt, Artificial Sequence
  Description of Artificial Sequence: Synthetic oligonucleotide
  Antisense strand to SEQ ID NO: 2215898
agaaucaauccuuugacua

SEQ ID NO: 2215900 - RNA, 19 nt, Artificial Sequence
  Description of Artificial Sequence: Synthetic oligonucleotide
  Sense strand starting at position 2733 of SEQ ID NO: 1883780
gcuugaauucuagaauagu

SEQ ID NO: 2215901 - RNA, 19 nt, Artificial Sequence
  Description of Artificial Sequence: Synthetic oligonucleotide
  Antisense strand to SEQ ID NO: 2215900
acuauucuagaauucaagc

SEQ ID NO: 2215902 - RNA, 19 nt, Artificial Sequence
  Description of Artificial Sequence: Synthetic oligonucleotide
  Sense strand starting at position 3243 of SEQ ID NO: 1883780
cucagauugaucgaagcca

SEQ ID NO: 2215903 - RNA, 19 nt, Artificial Sequence
  Description of Artificial Sequence: Synthetic oligonucleotide
  Antisense strand to SEQ ID NO: 2215902
uggcuucgaucaaucugag

SEQ ID NO: 2215904 - RNA, 19 nt, Artificial Sequence
  Description of Artificial Sequence: Synthetic oligonucleotide
  Sense strand starting at position 3350 of SEQ ID NO: 1883780
uaauguuugagggaguagu

SEQ ID NO: 2215905 - RNA, 19 nt, Artificial Sequence
  Description of Artificial Sequence: Synthetic oligonucleotide
  Antisense strand to SEQ ID NO: 2215904
acuacucccucaaacauua

SEQ ID NO: 2215906 - RNA, 19 nt, Artificial Sequence
  Description of Artificial Sequence: Synthetic oligonucleotide
  Sense strand starting at position 237 of SEQ ID NO: 1883780
gccuuaacuagagauggca

SEQ ID NO: 2215907 - RNA, 19 nt, Artificial Sequence
  Description of Artificial Sequence: Synthetic oligonucleotide
  Antisense strand to SEQ ID NO: 2215906
ugccaucucuaguuaaggc

SEQ ID NO: 2215908 - RNA, 19 nt, Artificial Sequence
  Description of Artificial Sequence: Synthetic oligonucleotide
  Sense strand starting at position 2709 of SEQ ID NO: 1883780
aucuaaauggaauguggua

SEQ ID NO: 2215909 - RNA, 19 nt, Artificial Sequence
  Description of Artificial Sequence: Synthetic oligonucleotide
  Antisense strand to SEQ ID NO: 2215908
uaccacauuccauuuagau

SEQ ID NO: 2215910 - RNA, 19 nt, Artificial Sequence
  Description of Artificial Sequence: Synthetic oligonucleotide
  Sense strand starting at position 2776 of SEQ ID NO: 1883780
gcgaaaucuggauaaaguc

SEQ ID NO: 2215911 - RNA, 19 nt, Artificial Sequence
  Description of Artificial Sequence: Synthetic oligonucleotide
  Antisense strand to SEQ ID NO: 2215910
gacuuuauccagauuucgc

SEQ ID NO: 2215912 - RNA, 19 nt, Artificial Sequence
  Description of Artificial Sequence: Synthetic oligonucleotide
  Sense strand starting at position 3369 of SEQ ID NO: 1883780
aggccaaauagaggugauu

SEQ ID NO: 2215913 - RNA, 19 nt, Artificial Sequence
  Description of Artificial Sequence: Synthetic oligonucleotide
  Antisense strand to SEQ ID NO: 2215912
aaucaccucuauuuggccu

SEQ ID NO: 2215914 - RNA, 19 nt, Artificial Sequence
  Description of Artificial Sequence: Synthetic oligonucleotide
  Sense strand starting at position 1880 of SEQ ID NO: 1883780
cgaugauguagucauauga

SEQ ID NO: 2215915 - RNA, 19 nt, Artificial Sequence
  Description of Artificial Sequence: Synthetic oligonucleotide
  Antisense strand to SEQ ID NO: 2215914
ucauaugacuacaucaucg

SEQ ID NO: 2215916 - RNA, 19 nt, Artificial Sequence
  Description of Artificial Sequence: Synthetic oligonucleotide
  Sense strand starting at position 2015 of SEQ ID NO: 1883780
ucauuagugccagacccaa

SEQ ID NO: 2215917 - RNA, 19 nt, Artificial Sequence
  Description of Artificial Sequence: Synthetic oligonucleotide
  Antisense strand to SEQ ID NO: 2215916
uugggucuggcacuaauga

SEQ ID NO: 2215918 - RNA, 19 nt, Artificial Sequence
  Description of Artificial Sequence: Synthetic oligonucleotide
  Sense strand starting at position 656 of SEQ ID NO: 1883780
ugccaaauuccacaauggu

SEQ ID NO: 2215919 - RNA, 19 nt, Artificial Sequence
  Description of Artificial Sequence: Synthetic oligonucleotide
  Antisense strand to SEQ ID NO: 2215918
accauuguggaauuuggca

SEQ ID NO: 2215920 - RNA, 19 nt, Artificial Sequence
  Description of Artificial Sequence: Synthetic oligonucleotide
  Sense strand starting at position 1064 of SEQ ID NO: 1883780
ggaggagcucucugaauug

SEQ ID NO: 2215921 - RNA, 19 nt, Artificial Sequence
  Description of Artificial Sequence: Synthetic oligonucleotide
  Antisense strand to SEQ ID NO: 2215920
caauucagagagcuccucc

SEQ ID NO: 2215922 - RNA, 19 nt, Artificial Sequence
  Description of Artificial Sequence: Synthetic oligonucleotide
  Sense strand starting at position 802 of SEQ ID NO: 1883780
cccaguucugucuaaagac

SEQ ID NO: 2215923 - RNA, 19 nt, Artificial Sequence
  Description of Artificial Sequence: Synthetic oligonucleotide
  Antisense strand to SEQ ID NO: 2215922
gucuuuagacagaacuggg

SEQ ID NO: 2215924 - RNA, 19 nt, Artificial Sequence
  Description of Artificial Sequence: Synthetic oligonucleotide
  Sense strand starting at position 3338 of SEQ ID NO: 1883780
aggcaaauaguuuaauguu

SEQ ID NO: 2215925 - RNA, 19 nt, Artificial Sequence
  Description of Artificial Sequence: Synthetic oligonucleotide
  Antisense strand to SEQ ID NO: 2215924
aacauuaaacuauuugccu

SEQ ID NO: 2215926 - RNA, 19 nt, Artificial Sequence
  Description of Artificial Sequence: Synthetic oligonucleotide
  Sense strand starting at position 1254 of SEQ ID NO: 1883780
uggccuagucaagacuauu

SEQ ID NO: 2215927 - RNA, 19 nt, Artificial Sequence
  Description of Artificial Sequence: Synthetic oligonucleotide
  Antisense strand to SEQ ID NO: 2215926
aauagucuugacuaggcca

SEQ ID NO: 2215928 - RNA, 19 nt, Artificial Sequence
  Description of Artificial Sequence: Synthetic oligonucleotide
  Sense strand starting at position 3575 of SEQ ID NO: 1883780
cagcuuggaguuuauuaca

SEQ ID NO: 2215929 - RNA, 19 nt, Artificial Sequence
  Description of Artificial Sequence: Synthetic oligonucleotide
  Antisense strand to SEQ ID NO: 2215928
uguaauaaacuccaagcug

SEQ ID NO: 2215930 - RNA, 19 nt, Artificial Sequence
  Description of Artificial Sequence: Synthetic oligonucleotide
  Sense strand starting at position 1481 of SEQ ID NO: 1883780
ugugacaucauaggucaga

SEQ ID NO: 2215931 - RNA, 19 nt, Artificial Sequence
  Description of Artificial Sequence: Synthetic oligonucleotide
  Antisense strand to SEQ ID NO: 2215930
ucugaccuaugaugucaca

SEQ ID NO: 2215932 - RNA, 19 nt, Artificial Sequence
  Description of Artificial Sequence: Synthetic oligonucleotide
  Sense strand starting at position 3658 of SEQ ID NO: 1883780
gcaauuucuuaagcagcuu

SEQ ID NO: 2215933 - RNA, 19 nt, Artificial Sequence
  Description of Artificial Sequence: Synthetic oligonucleotide
  Antisense strand to SEQ ID NO: 2215932
aagcugcuuaagaaauugc

SEQ ID NO: 2215934 - RNA, 19 nt, Artificial Sequence
  Description of Artificial Sequence: Synthetic oligonucleotide
  Sense strand starting at position 1276 of SEQ ID NO: 1883780
auacguaguguauaggaau

SEQ ID NO: 2215935 - RNA, 19 nt, Artificial Sequence
  Description of Artificial Sequence: Synthetic oligonucleotide
  Antisense strand to SEQ ID NO: 2215934
auuccuauacacuacguau

SEQ ID NO: 2215936 - RNA, 19 nt, Artificial Sequence
  Description of Artificial Sequence: Synthetic oligonucleotide
  Sense strand starting at position 2611 of SEQ ID NO: 1883780
gcaaauauacauugaguac

SEQ ID NO: 2215937 - RNA, 19 nt, Artificial Sequence
  Description of Artificial Sequence: Synthetic oligonucleotide
  Antisense strand to SEQ ID NO: 2215936
guacucaauguauauuugc

SEQ ID NO: 2215938 - RNA, 19 nt, Artificial Sequence
  Description of Artificial Sequence: Synthetic oligonucleotide
  Sense strand starting at position 1628 of SEQ ID NO: 1883780
agaugucuuguagagucca

SEQ ID NO: 2215939 - RNA, 19 nt, Artificial Sequence
  Description of Artificial Sequence: Synthetic oligonucleotide
  Antisense strand to SEQ ID NO: 2215938
uggacucuacaagacaucu

SEQ ID NO: 2215940 - RNA, 19 nt, Artificial Sequence
  Description of Artificial Sequence: Synthetic oligonucleotide
  Sense strand starting at position 3345 of SEQ ID NO: 1883780
uaguuuaauguuugaggga

SEQ ID NO: 2215941 - RNA, 19 nt, Artificial Sequence
  Description of Artificial Sequence: Synthetic oligonucleotide
  Antisense strand to SEQ ID NO: 2215940
ucccucaaacauuaaacua

SEQ ID NO: 2215942 - RNA, 19 nt, Artificial Sequence
  Description of Artificial Sequence: Synthetic oligonucleotide
  Sense strand starting at position 3488 of SEQ ID NO: 1883780
aagacuuugaugugguuga

SEQ ID NO: 2215943 - RNA, 19 nt, Artificial Sequence
  Description of Artificial Sequence: Synthetic oligonucleotide
  Antisense strand to SEQ ID NO: 2215942
ucaaccacaucaaagucuu

SEQ ID NO: 2215944 - RNA, 19 nt, Artificial Sequence
  Description of Artificial Sequence: Synthetic oligonucleotide
  Sense strand starting at position 3238 of SEQ ID NO: 1883780
gaggucucagauugaucga

SEQ ID NO: 2215945 - RNA, 19 nt, Artificial Sequence
  Description of Artificial Sequence: Synthetic oligonucleotide
  Antisense strand to SEQ ID NO: 2215944
ucgaucaaucugagaccuc

SEQ ID NO: 2215946 - RNA, 19 nt, Artificial Sequence
  Description of Artificial Sequence: Synthetic oligonucleotide
  Sense strand starting at position 1092 of SEQ ID NO: 1883780
cuaguaaauuagucuugga

SEQ ID NO: 2215947 - RNA, 19 nt, Artificial Sequence
  Description of Artificial Sequence: Synthetic oligonucleotide
  Antisense strand to SEQ ID NO: 2215946
uccaagacuaauuuacuag

SEQ ID NO: 2215948 - RNA, 19 nt, Artificial Sequence
  Description of Artificial Sequence: Synthetic oligonucleotide
  Sense strand starting at position 749 of SEQ ID NO: 1883780
gggacauccuuucuaaguc

SEQ ID NO: 2215949 - RNA, 19 nt, Artificial Sequence
  Description of Artificial Sequence: Synthetic oligonucleotide
  Antisense strand to SEQ ID NO: 2215948
gacuuagaaaggauguccc

SEQ ID NO: 2215950 - RNA, 19 nt, Artificial Sequence
  Description of Artificial Sequence: Synthetic oligonucleotide
  Sense strand starting at position 3598 of SEQ ID NO: 1883780
ccauguaguguauaacacu

SEQ ID NO: 2215951 - RNA, 19 nt, Artificial Sequence
  Description of Artificial Sequence: Synthetic oligonucleotide
  Antisense strand to SEQ ID NO: 2215950
aguguuauacacuacaugg

SEQ ID NO: 2215952 - RNA, 19 nt, Artificial Sequence
  Description of Artificial Sequence: Synthetic oligonucleotide
  Sense strand starting at position 2553 of SEQ ID NO: 1883781
auuauuccagaugagcauu

SEQ ID NO: 2215953 - RNA, 19 nt, Artificial Sequence
  Description of Artificial Sequence: Synthetic oligonucleotide
  Antisense strand to SEQ ID NO: 2215952
aaugcucaucuggaauaau

SEQ ID NO: 2215954 - RNA, 19 nt, Artificial Sequence
  Description of Artificial Sequence: Synthetic oligonucleotide
  Sense strand starting at position 587 of SEQ ID NO: 1883781
guugauaucuuguccauuu

SEQ ID NO: 2215955 - RNA, 19 nt, Artificial Sequence
  Description of Artificial Sequence: Synthetic oligonucleotide
  Antisense strand to SEQ ID NO: 2215954
aaauggacaagauaucaac

SEQ ID NO: 2215956 - RNA, 19 nt, Artificial Sequence
  Description of Artificial Sequence: Synthetic oligonucleotide
  Sense strand starting at position 3830 of SEQ ID NO: 1883781
aauagauuccaguaucgau

SEQ ID NO: 2215957 - RNA, 19 nt, Artificial Sequence
  Description of Artificial Sequence: Synthetic oligonucleotide
  Antisense strand to SEQ ID NO: 2215956
aucgauacuggaaucuauu

SEQ ID NO: 2215958 - RNA, 19 nt, Artificial Sequence
  Description of Artificial Sequence: Synthetic oligonucleotide
  Sense strand starting at position 2834 of SEQ ID NO: 1883781
uccagaacucaguggaaca

SEQ ID NO: 2215959 - RNA, 19 nt, Artificial Sequence
  Description of Artificial Sequence: Synthetic oligonucleotide
  Antisense strand to SEQ ID NO: 2215958
uguuccacugaguucugga

SEQ ID NO: 2215960 - RNA, 19 nt, Artificial Sequence
  Description of Artificial Sequence: Synthetic oligonucleotide
  Sense strand starting at position 3085 of SEQ ID NO: 1883781
auaagcaguguagagauua

SEQ ID NO: 2215961 - RNA, 19 nt, Artificial Sequence
  Description of Artificial Sequence: Synthetic oligonucleotide
  Antisense strand to SEQ ID NO: 2215960
uaaucucuacacugcuuau

SEQ ID NO: 2215962 - RNA, 19 nt, Artificial Sequence
  Description of Artificial Sequence: Synthetic oligonucleotide
  Sense strand starting at position 3877 of SEQ ID NO: 1883781
uuagucggauuuguaaagu

SEQ ID NO: 2215963 - RNA, 19 nt, Artificial Sequence
  Description of Artificial Sequence: Synthetic oligonucleotide
  Antisense strand to SEQ ID NO: 2215962
acuuuacaaauccgacuaa

SEQ ID NO: 2215964 - RNA, 19 nt, Artificial Sequence
  Description of Artificial Sequence: Synthetic oligonucleotide
  Sense strand starting at position 2008 of SEQ ID NO: 1883781
gcuggaucacagggaauca

SEQ ID NO: 2215965 - RNA, 19 nt, Artificial Sequence
  Description of Artificial Sequence: Synthetic oligonucleotide
  Antisense strand to SEQ ID NO: 2215964
ugauucccugugauccagc

SEQ ID NO: 2215966 - RNA, 19 nt, Artificial Sequence
  Description of Artificial Sequence: Synthetic oligonucleotide
  Sense strand starting at position 3387 of SEQ ID NO: 1883781
cagugaguucuggacuaau

SEQ ID NO: 2215967 - RNA, 19 nt, Artificial Sequence
  Description of Artificial Sequence: Synthetic oligonucleotide
  Antisense strand to SEQ ID NO: 2215966
auuaguccagaacucacug

SEQ ID NO: 2215968 - RNA, 19 nt, Artificial Sequence
  Description of Artificial Sequence: Synthetic oligonucleotide
  Sense strand starting at position 3727 of SEQ ID NO: 1883781
augagaaaucagugguaug

SEQ ID NO: 2215969 - RNA, 19 nt, Artificial Sequence
  Description of Artificial Sequence: Synthetic oligonucleotide
  Antisense strand to SEQ ID NO: 2215968
cauaccacugauuucucau

SEQ ID NO: 2215970 - RNA, 19 nt, Artificial Sequence
  Description of Artificial Sequence: Synthetic oligonucleotide
  Sense strand starting at position 3728 of SEQ ID NO: 1883781
ugagaaaucagugguauga

SEQ ID NO: 2215971 - RNA, 19 nt, Artificial Sequence
  Description of Artificial Sequence: Synthetic oligonucleotide
  Antisense strand to SEQ ID NO: 2215970
ucauaccacugauuucuca

SEQ ID NO: 2215972 - RNA, 19 nt, Artificial Sequence
  Description of Artificial Sequence: Synthetic oligonucleotide
  Sense strand starting at position 3896 of SEQ ID NO: 1883781
uguuauuaguauuugccaa

SEQ ID NO: 2215973 - RNA, 19 nt, Artificial Sequence
  Description of Artificial Sequence: Synthetic oligonucleotide
  Antisense strand to SEQ ID NO: 2215972
uuggcaaauacuaauaaca

SEQ ID NO: 2215974 - RNA, 19 nt, Artificial Sequence
  Description of Artificial Sequence: Synthetic oligonucleotide
  Sense strand starting at position 1020 of SEQ ID NO: 1883781
ugucguuaugcaucagcca

SEQ ID NO: 2215975 - RNA, 19 nt, Artificial Sequence
  Description of Artificial Sequence: Synthetic oligonucleotide
  Antisense strand to SEQ ID NO: 2215974
uggcugaugcauaacgaca

SEQ ID NO: 2215976 - RNA, 19 nt, Artificial Sequence
  Description of Artificial Sequence: Synthetic oligonucleotide
  Sense strand starting at position 3180 of SEQ ID NO: 1883781
guaacuuaggcacaugacu

SEQ ID NO: 2215977 - RNA, 19 nt, Artificial Sequence
  Description of Artificial Sequence: Synthetic oligonucleotide
  Antisense strand to SEQ ID NO: 2215976
agucaugugccuaaguuac

SEQ ID NO: 2215978 - RNA, 19 nt, Artificial Sequence
  Description of Artificial Sequence: Synthetic oligonucleotide
  Sense strand starting at position 2374 of SEQ ID NO: 1883781
ugaagaucuccuggacuuc

SEQ ID NO: 2215979 - RNA, 19 nt, Artificial Sequence
  Description of Artificial Sequence: Synthetic oligonucleotide
  Antisense strand to SEQ ID NO: 2215978
gaaguccaggagaucuuca

SEQ ID NO: 2215980 - RNA, 19 nt, Artificial Sequence
  Description of Artificial Sequence: Synthetic oligonucleotide
  Sense strand starting at position 3083 of SEQ ID NO: 1883781
ucauaagcaguguagagau

SEQ ID NO: 2215981 - RNA, 19 nt, Artificial Sequence
  Description of Artificial Sequence: Synthetic oligonucleotide
  Antisense strand to SEQ ID NO: 2215980
aucucuacacugcuuauga

SEQ ID NO: 2215982 - RNA, 19 nt, Artificial Sequence
  Description of Artificial Sequence: Synthetic oligonucleotide
  Sense strand starting at position 3869 of SEQ ID NO: 1883781
gacagagauuagucggauu

SEQ ID NO: 2215983 - RNA, 19 nt, Artificial Sequence
  Description of Artificial Sequence: Synthetic oligonucleotide
  Antisense strand to SEQ ID NO: 2215982
aauccgacuaaucucuguc

SEQ ID NO: 2215984 - RNA, 19 nt, Artificial Sequence
  Description of Artificial Sequence: Synthetic oligonucleotide
  Sense strand starting at position 2550 of SEQ ID NO: 1883781
gcaauuauuccagaugagc

SEQ ID NO: 2215985 - RNA, 19 nt, Artificial Sequence
  Description of Artificial Sequence: Synthetic oligonucleotide
  Antisense strand to SEQ ID NO: 2215984
gcucaucuggaauaauugc

SEQ ID NO: 2215986 - RNA, 19 nt, Artificial Sequence
  Description of Artificial Sequence: Synthetic oligonucleotide
  Sense strand starting at position 3 of SEQ ID NO: 1883781
guccuugugaaaggaacau

SEQ ID NO: 2215987 - RNA, 19 nt, Artificial Sequence
  Description of Artificial Sequence: Synthetic oligonucleotide
  Antisense strand to SEQ ID NO: 2215986
auguuccuuucacaaggac

SEQ ID NO: 2215988 - RNA, 19 nt, Artificial Sequence
  Description of Artificial Sequence: Synthetic oligonucleotide
  Sense strand starting at position 3838 of SEQ ID NO: 1883781
ccaguaucgaucuagugag

SEQ ID NO: 2215989 - RNA, 19 nt, Artificial Sequence
  Description of Artificial Sequence: Synthetic oligonucleotide
  Antisense strand to SEQ ID NO: 2215988
cucacuagaucgauacugg

SEQ ID NO: 2215990 - RNA, 19 nt, Artificial Sequence
  Description of Artificial Sequence: Synthetic oligonucleotide
  Sense strand starting at position 2065 of SEQ ID NO: 1883781
agggaaagucuuuguucag

SEQ ID NO: 2215991 - RNA, 19 nt, Artificial Sequence
  Description of Artificial Sequence: Synthetic oligonucleotide
  Antisense strand to SEQ ID NO: 2215990
cugaacaaagacuuucccu

SEQ ID NO: 2215992 - RNA, 19 nt, Artificial Sequence
  Description of Artificial Sequence: Synthetic oligonucleotide
  Sense strand starting at position 3284 of SEQ ID NO: 1883781
uugggagugcuaugaagau

SEQ ID NO: 2215993 - RNA, 19 nt, Artificial Sequence
  Description of Artificial Sequence: Synthetic oligonucleotide
  Antisense strand to SEQ ID NO: 2215992
aucuucauagcacucccaa

SEQ ID NO: 2215994 - RNA, 19 nt, Artificial Sequence
  Description of Artificial Sequence: Synthetic oligonucleotide
  Sense strand starting at position 2586 of SEQ ID NO: 1883781
gugccuccucuacagauaa

SEQ ID NO: 2215995 - RNA, 19 nt, Artificial Sequence
  Description of Artificial Sequence: Synthetic oligonucleotide
  Antisense strand to SEQ ID NO: 2215994
uuaucuguagaggaggcac

SEQ ID NO: 2215996 - RNA, 19 nt, Artificial Sequence
  Description of Artificial Sequence: Synthetic oligonucleotide
  Sense strand starting at position 3732 of SEQ ID NO: 1883781
aaaucagugguaugacuuu

SEQ ID NO: 2215997 - RNA, 19 nt, Artificial Sequence
  Description of Artificial Sequence: Synthetic oligonucleotide
  Antisense strand to SEQ ID NO: 2215996
aaagucauaccacugauuu

SEQ ID NO: 2215998 - RNA, 19 nt, Artificial Sequence
  Description of Artificial Sequence: Synthetic oligonucleotide
  Sense strand starting at position 3043 of SEQ ID NO: 1883781
aagugcuaucuccagugaa

SEQ ID NO: 2215999 - RNA, 19 nt, Artificial Sequence
  Description of Artificial Sequence: Synthetic oligonucleotide
  Antisense strand to SEQ ID NO: 2215998
uucacuggagauagcacuu

SEQ ID NO: 2216000 - RNA, 19 nt, Artificial Sequence
  Description of Artificial Sequence: Synthetic oligonucleotide
  Sense strand starting at position 1326 of SEQ ID NO: 1883781
ggccuuaauguccagauuc

SEQ ID NO: 2216001 - RNA, 19 nt, Artificial Sequence
  Description of Artificial Sequence: Synthetic oligonucleotide
  Antisense strand to SEQ ID NO: 2216000
gaaucuggacauuaaggcc

SEQ ID NO: 2216002 - RNA, 19 nt, Artificial Sequence
  Description of Artificial Sequence: Synthetic oligonucleotide
  Sense strand starting at position 1305 of SEQ ID NO: 1883781
ucauuauuauugucaugac

SEQ ID NO: 2216003 - RNA, 19 nt, Artificial Sequence
  Description of Artificial Sequence: Synthetic oligonucleotide
  Antisense strand to SEQ ID NO: 2216002
gucaugacaauaauaauga

SEQ ID NO: 2216004 - RNA, 19 nt, Artificial Sequence
  Description of Artificial Sequence: Synthetic oligonucleotide
  Sense strand starting at position 3633 of SEQ ID NO: 1883781
gcagcuaaucacugauaaa

SEQ ID NO: 2216005 - RNA, 19 nt, Artificial Sequence
  Description of Artificial Sequence: Synthetic oligonucleotide
  Antisense strand to SEQ ID NO: 2216004
uuuaucagugauuagcugc

SEQ ID NO: 2216006 - RNA, 19 nt, Artificial Sequence
  Description of Artificial Sequence: Synthetic oligonucleotide
  Sense strand starting at position 3378 of SEQ ID NO: 1883781
ccaggauaccagugaguuc

SEQ ID NO: 2216007 - RNA, 19 nt, Artificial Sequence
  Description of Artificial Sequence: Synthetic oligonucleotide
  Antisense strand to SEQ ID NO: 2216006
gaacucacugguauccugg

SEQ ID NO: 2216008 - RNA, 19 nt, Artificial Sequence
  Description of Artificial Sequence: Synthetic oligonucleotide
  Sense strand starting at position 2546 of SEQ ID NO: 1883781
gugagcaauuauuccagau

SEQ ID NO: 2216009 - RNA, 19 nt, Artificial Sequence
  Description of Artificial Sequence: Synthetic oligonucleotide
  Antisense strand to SEQ ID NO: 2216008
aucuggaauaauugcucac

SEQ ID NO: 2216010 - RNA, 19 nt, Artificial Sequence
  Description of Artificial Sequence: Synthetic oligonucleotide
  Sense strand starting at position 652 of SEQ ID NO: 1883781
uagagaugucagugucaga

SEQ ID NO: 2216011 - RNA, 19 nt, Artificial Sequence
  Description of Artificial Sequence: Synthetic oligonucleotide
  Antisense strand to SEQ ID NO: 2216010
ucugacacugacaucucua

SEQ ID NO: 2216012 - RNA, 19 nt, Artificial Sequence
  Description of Artificial Sequence: Synthetic oligonucleotide
  Sense strand starting at position 2539 of SEQ ID NO: 1883781
cuuucuugugagcaauuau

SEQ ID NO: 2216013 - RNA, 19 nt, Artificial Sequence
  Description of Artificial Sequence: Synthetic oligonucleotide
  Antisense strand to SEQ ID NO: 2216012
auaauugcucacaagaaag

SEQ ID NO: 2216014 - RNA, 19 nt, Artificial Sequence
  Description of Artificial Sequence: Synthetic oligonucleotide
  Sense strand starting at position 1087 of SEQ ID NO: 1883781
uuggaauccugguucuacu

SEQ ID NO: 2216015 - RNA, 19 nt, Artificial Sequence
  Description of Artificial Sequence: Synthetic oligonucleotide
  Antisense strand to SEQ ID NO: 2216014
aguagaaccaggauuccaa

SEQ ID NO: 2216016 - RNA, 19 nt, Artificial Sequence
  Description of Artificial Sequence: Synthetic oligonucleotide
  Sense strand starting at position 3046 of SEQ ID NO: 1883781
ugcuaucuccagugaaaga

SEQ ID NO: 2216017 - RNA, 19 nt, Artificial Sequence
  Description of Artificial Sequence: Synthetic oligonucleotide
  Antisense strand to SEQ ID NO: 2216016
ucuuucacuggagauagca

SEQ ID NO: 2216018 - RNA, 19 nt, Artificial Sequence
  Description of Artificial Sequence: Synthetic oligonucleotide
  Sense strand starting at position 402 of SEQ ID NO: 1883781
gaaacccugcauggucaua

SEQ ID NO: 2216019 - RNA, 19 nt, Artificial Sequence
  Description of Artificial Sequence: Synthetic oligonucleotide
  Antisense strand to SEQ ID NO: 2216018
uaugaccaugcaggguuuc

SEQ ID NO: 2216020 - RNA, 19 nt, Artificial Sequence
  Description of Artificial Sequence: Synthetic oligonucleotide
  Sense strand starting at position 2322 of SEQ ID NO: 1883781
uugcgaugcgcccuguaau

SEQ ID NO: 2216021 - RNA, 19 nt, Artificial Sequence
  Description of Artificial Sequence: Synthetic oligonucleotide
  Antisense strand to SEQ ID NO: 2216020
auuacagggcgcaucgcaa

SEQ ID NO: 2216022 - RNA, 19 nt, Artificial Sequence
  Description of Artificial Sequence: Synthetic oligonucleotide
  Sense strand starting at position 2453 of SEQ ID NO: 1883781
uuugccuucccugaugauu

SEQ ID NO: 2216023 - RNA, 19 nt, Artificial Sequence
  Description of Artificial Sequence: Synthetic oligonucleotide
  Antisense strand to SEQ ID NO: 2216022
aaucaucagggaaggcaaa

SEQ ID NO: 2216024 - RNA, 19 nt, Artificial Sequence
  Description of Artificial Sequence: Synthetic oligonucleotide
  Sense strand starting at position 1754 of SEQ ID NO: 1883781
cacagucacccuggauagu

SEQ ID NO: 2216025 - RNA, 19 nt, Artificial Sequence
  Description of Artificial Sequence: Synthetic oligonucleotide
  Antisense strand to SEQ ID NO: 2216024
acuauccagggugacugug

SEQ ID NO: 2216026 - RNA, 19 nt, Artificial Sequence
  Description of Artificial Sequence: Synthetic oligonucleotide
  Sense strand starting at position 3632 of SEQ ID NO: 1883781
ugcagcuaaucacugauaa

SEQ ID NO: 2216027 - RNA, 19 nt, Artificial Sequence
  Description of Artificial Sequence: Synthetic oligonucleotide
  Antisense strand to SEQ ID NO: 2216026
uuaucagugauuagcugca

SEQ ID NO: 2216028 - RNA, 19 nt, Artificial Sequence
  Description of Artificial Sequence: Synthetic oligonucleotide
  Sense strand starting at position 2599 of SEQ ID NO: 1883781
agauaagucucagccauuc

SEQ ID NO: 2216029 - RNA, 19 nt, Artificial Sequence
  Description of Artificial Sequence: Synthetic oligonucleotide
  Antisense strand to SEQ ID NO: 2216028
gaauggcugagacuuaucu

SEQ ID NO: 2216030 - RNA, 19 nt, Artificial Sequence
  Description of Artificial Sequence: Synthetic oligonucleotide
  Sense strand starting at position 1872 of SEQ ID NO: 1883781
ggucauaagcgacaauugu

SEQ ID NO: 2216031 - RNA, 19 nt, Artificial Sequence
  Description of Artificial Sequence: Synthetic oligonucleotide
  Antisense strand to SEQ ID NO: 2216030
acaauugucgcuuaugacc

SEQ ID NO: 2216032 - RNA, 19 nt, Artificial Sequence
  Description of Artificial Sequence: Synthetic oligonucleotide
  Sense strand starting at position 760 of SEQ ID NO: 1883782
ugagaacuguaauccuaga

SEQ ID NO: 2216033 - RNA, 19 nt, Artificial Sequence
  Description of Artificial Sequence: Synthetic oligonucleotide
  Antisense strand to SEQ ID NO: 2216032
ucuaggauuacaguucuca

SEQ ID NO: 2216034 - RNA, 19 nt, Artificial Sequence
  Description of Artificial Sequence: Synthetic oligonucleotide
  Sense strand starting at position 1260 of SEQ ID NO: 1883782
uugaauuugucacucuugu

SEQ ID NO: 2216035 - RNA, 19 nt, Artificial Sequence
  Description of Artificial Sequence: Synthetic oligonucleotide
  Antisense strand to SEQ ID NO: 2216034
acaagagugacaaauucaa

SEQ ID NO: 2216036 - RNA, 19 nt, Artificial Sequence
  Description of Artificial Sequence: Synthetic oligonucleotide
  Sense strand starting at position 716 of SEQ ID NO: 1883782
ggaucauggguuuagaugu

SEQ ID NO: 2216037 - RNA, 19 nt, Artificial Sequence
  Description of Artificial Sequence: Synthetic oligonucleotide
  Antisense strand to SEQ ID NO: 2216036
acaucuaaacccaugaucc

SEQ ID NO: 2216038 - RNA, 19 nt, Artificial Sequence
  Description of Artificial Sequence: Synthetic oligonucleotide
  Sense strand starting at position 1382 of SEQ ID NO: 1883782
cuaaaugugguccauugaa

SEQ ID NO: 2216039 - RNA, 19 nt, Artificial Sequence
  Description of Artificial Sequence: Synthetic oligonucleotide
  Antisense strand to SEQ ID NO: 2216038
uucaauggaccacauuuag

SEQ ID NO: 2216040 - RNA, 19 nt, Artificial Sequence
  Description of Artificial Sequence: Synthetic oligonucleotide
  Sense strand starting at position 2535 of SEQ ID NO: 1883782
ggauauaaaugugugauga

SEQ ID NO: 2216041 - RNA, 19 nt, Artificial Sequence
  Description of Artificial Sequence: Synthetic oligonucleotide
  Antisense strand to SEQ ID NO: 2216040
ucaucacacauuuauaucc

SEQ ID NO: 2216042 - RNA, 19 nt, Artificial Sequence
  Description of Artificial Sequence: Synthetic oligonucleotide
  Sense strand starting at position 289 of SEQ ID NO: 1883782
uugaucuacaugugggaaa

SEQ ID NO: 2216043 - RNA, 19 nt, Artificial Sequence
  Description of Artificial Sequence: Synthetic oligonucleotide
  Antisense strand to SEQ ID NO: 2216042
uuucccacauguagaucaa

SEQ ID NO: 2216044 - RNA, 19 nt, Artificial Sequence
  Description of Artificial Sequence: Synthetic oligonucleotide
  Sense strand starting at position 798 of SEQ ID NO: 1883782
aggucuacugaccagugau

SEQ ID NO: 2216045 - RNA, 19 nt, Artificial Sequence
  Description of Artificial Sequence: Synthetic oligonucleotide
  Antisense strand to SEQ ID NO: 2216044
aucacuggucaguagaccu

SEQ ID NO: 2216046 - RNA, 19 nt, Artificial Sequence
  Description of Artificial Sequence: Synthetic oligonucleotide
  Sense strand starting at position 1199 of SEQ ID NO: 1883782
cucacuaauguaggauaca

SEQ ID NO: 2216047 - RNA, 19 nt, Artificial Sequence
  Description of Artificial Sequence: Synthetic oligonucleotide
  Antisense strand to SEQ ID NO: 2216046
uguauccuacauuagugag

SEQ ID NO: 2216048 - RNA, 19 nt, Artificial Sequence
  Description of Artificial Sequence: Synthetic oligonucleotide
  Sense strand starting at position 3611 of SEQ ID NO: 1883782
agaggaguuuggaggacaa

SEQ ID NO: 2216049 - RNA, 19 nt, Artificial Sequence
  Description of Artificial Sequence: Synthetic oligonucleotide
  Antisense strand to SEQ ID NO: 2216048
uuguccuccaaacuccucu

SEQ ID NO: 2216050 - RNA, 19 nt, Artificial Sequence
  Description of Artificial Sequence: Synthetic oligonucleotide
  Sense strand starting at position 1586 of SEQ ID NO: 1883782
cugcaaggucuauaaauua

SEQ ID NO: 2216051 - RNA, 19 nt, Artificial Sequence
  Description of Artificial Sequence: Synthetic oligonucleotide
  Antisense strand to SEQ ID NO: 2216050
uaauuuauagaccuugcag

SEQ ID NO: 2216052 - RNA, 19 nt, Artificial Sequence
  Description of Artificial Sequence: Synthetic oligonucleotide
  Sense strand starting at position 2294 of SEQ ID NO: 1883782
ucaauaaugccugagucaa

SEQ ID NO: 2216053 - RNA, 19 nt, Artificial Sequence
  Description of Artificial Sequence: Synthetic oligonucleotide
  Antisense strand to SEQ ID NO: 2216052
uugacucaggcauuauuga

SEQ ID NO: 2216054 - RNA, 19 nt, Artificial Sequence
  Description of Artificial Sequence: Synthetic oligonucleotide
  Sense strand starting at position 1893 of SEQ ID NO: 1883782
auugcaaagcaguagaaau

SEQ ID NO: 2216055 - RNA, 19 nt, Artificial Sequence
  Description of Artificial Sequence: Synthetic oligonucleotide
  Antisense strand to SEQ ID NO: 2216054
auuucuacugcuuugcaau

SEQ ID NO: 2216056 - RNA, 19 nt, Artificial Sequence
  Description of Artificial Sequence: Synthetic oligonucleotide
  Sense strand starting at position 2863 of SEQ ID NO: 1883782
ggugguaaucaucaaggua

SEQ ID NO: 2216057 - RNA, 19 nt, Artificial Sequence
  Description of Artificial Sequence: Synthetic oligonucleotide
  Antisense strand to SEQ ID NO: 2216056
uaccuugaugauuaccacc

SEQ ID NO: 2216058 - RNA, 19 nt, Artificial Sequence
  Description of Artificial Sequence: Synthetic oligonucleotide
  Sense strand starting at position 2439 of SEQ ID NO: 1883782
gcaguauuuccaugucaca

SEQ ID NO: 2216059 - RNA, 19 nt, Artificial Sequence
  Description of Artificial Sequence: Synthetic oligonucleotide
  Antisense strand to SEQ ID NO: 2216058
ugugacauggaaauacugc

SEQ ID NO: 2216060 - RNA, 19 nt, Artificial Sequence
  Description of Artificial Sequence: Synthetic oligonucleotide
  Sense strand starting at position 2866 of SEQ ID NO: 1883782
gguaaucaucaagguaaau

SEQ ID NO: 2216061 - RNA, 19 nt, Artificial Sequence
  Description of Artificial Sequence: Synthetic oligonucleotide
  Antisense strand to SEQ ID NO: 2216060
auuuaccuugaugauuacc

SEQ ID NO: 2216062 - RNA, 19 nt, Artificial Sequence
  Description of Artificial Sequence: Synthetic oligonucleotide
  Sense strand starting at position 3092 of SEQ ID NO: 1883782
ucaugcuugguacagaaua

SEQ ID NO: 2216063 - RNA, 19 nt, Artificial Sequence
  Description of Artificial Sequence: Synthetic oligonucleotide
  Antisense strand to SEQ ID NO: 2216062
uauucuguaccaagcauga

SEQ ID NO: 2216064 - RNA, 19 nt, Artificial Sequence
  Description of Artificial Sequence: Synthetic oligonucleotide
  Sense strand starting at position 355 of SEQ ID NO: 1883782
agaugagcuccuugaauga

SEQ ID NO: 2216065 - RNA, 19 nt, Artificial Sequence
  Description of Artificial Sequence: Synthetic oligonucleotide
  Antisense strand to SEQ ID NO: 2216064
ucauucaaggagcucaucu

SEQ ID NO: 2216066 - RNA, 19 nt, Artificial Sequence
  Description of Artificial Sequence: Synthetic oligonucleotide
  Sense strand starting at position 3198 of SEQ ID NO: 1883782
cuaucuaggaauuggcaga

SEQ ID NO: 2216067 - RNA, 19 nt, Artificial Sequence
  Description of Artificial Sequence: Synthetic oligonucleotide
  Antisense strand to SEQ ID NO: 2216066
ucugccaauuccuagauag

SEQ ID NO: 2216068 - RNA, 19 nt, Artificial Sequence
  Description of Artificial Sequence: Synthetic oligonucleotide
  Sense strand starting at position 414 of SEQ ID NO: 1883782
uuggcauuaggaugaacua

SEQ ID NO: 2216069 - RNA, 19 nt, Artificial Sequence
  Description of Artificial Sequence: Synthetic oligonucleotide
  Antisense strand to SEQ ID NO: 2216068
uaguucauccuaaugccaa

SEQ ID NO: 2216070 - RNA, 19 nt, Artificial Sequence
  Description of Artificial Sequence: Synthetic oligonucleotide
  Sense strand starting at position 765 of SEQ ID NO: 1883782
acuguaauccuagauugug

SEQ ID NO: 2216071 - RNA, 19 nt, Artificial Sequence
  Description of Artificial Sequence: Synthetic oligonucleotide
  Antisense strand to SEQ ID NO: 2216070
cacaaucuaggauuacagu

SEQ ID NO: 2216072 - RNA, 19 nt, Artificial Sequence
  Description of Artificial Sequence: Synthetic oligonucleotide
  Sense strand starting at position 811 of SEQ ID NO: 1883782
agugauugacgauacuucu

SEQ ID NO: 2216073 - RNA, 19 nt, Artificial Sequence
  Description of Artificial Sequence: Synthetic oligonucleotide
  Antisense strand to SEQ ID NO: 2216072
agaaguaucgucaaucacu

SEQ ID NO: 2216074 - RNA, 19 nt, Artificial Sequence
  Description of Artificial Sequence: Synthetic oligonucleotide
  Sense strand starting at position 2536 of SEQ ID NO: 1883782
gauauaaaugugugaugau

SEQ ID NO: 2216075 - RNA, 19 nt, Artificial Sequence
  Description of Artificial Sequence: Synthetic oligonucleotide
  Antisense strand to SEQ ID NO: 2216074
aucaucacacauuuauauc

SEQ ID NO: 2216076 - RNA, 19 nt, Artificial Sequence
  Description of Artificial Sequence: Synthetic oligonucleotide
  Sense strand starting at position 257 of SEQ ID NO: 1883782
ugaguugaugcugacauau

SEQ ID NO: 2216077 - RNA, 19 nt, Artificial Sequence
  Description of Artificial Sequence: Synthetic oligonucleotide
  Antisense strand to SEQ ID NO: 2216076
auaugucagcaucaacuca

SEQ ID NO: 2216078 - RNA, 19 nt, Artificial Sequence
  Description of Artificial Sequence: Synthetic oligonucleotide
  Sense strand starting at position 757 of SEQ ID NO: 1883782
ggcugagaacuguaauccu

SEQ ID NO: 2216079 - RNA, 19 nt, Artificial Sequence
  Description of Artificial Sequence: Synthetic oligonucleotide
  Antisense strand to SEQ ID NO: 2216078
aggauuacaguucucagcc

SEQ ID NO: 2216080 - RNA, 19 nt, Artificial Sequence
  Description of Artificial Sequence: Synthetic oligonucleotide
  Sense strand starting at position 3631 of SEQ ID NO: 1883782
gggacauucucucuuuaau

SEQ ID NO: 2216081 - RNA, 19 nt, Artificial Sequence
  Description of Artificial Sequence: Synthetic oligonucleotide
  Antisense strand to SEQ ID NO: 2216080
auuaaagagagaauguccc

SEQ ID NO: 2216082 - RNA, 19 nt, Artificial Sequence
  Description of Artificial Sequence: Synthetic oligonucleotide
  Sense strand starting at position 2534 of SEQ ID NO: 1883782
uggauauaaaugugugaug

SEQ ID NO: 2216083 - RNA, 19 nt, Artificial Sequence
  Description of Artificial Sequence: Synthetic oligonucleotide
  Antisense strand to SEQ ID NO: 2216082
caucacacauuuauaucca

SEQ ID NO: 2216084 - RNA, 19 nt, Artificial Sequence
  Description of Artificial Sequence: Synthetic oligonucleotide
  Sense strand starting at position 1169 of SEQ ID NO: 1883782
uagguaugacuaugaguag

SEQ ID NO: 2216085 - RNA, 19 nt, Artificial Sequence
  Description of Artificial Sequence: Synthetic oligonucleotide
  Antisense strand to SEQ ID NO: 2216084
cuacucauagucauaccua

SEQ ID NO: 2216086 - RNA, 19 nt, Artificial Sequence
  Description of Artificial Sequence: Synthetic oligonucleotide
  Sense strand starting at position 1584 of SEQ ID NO: 1883782
uccugcaaggucuauaaau

SEQ ID NO: 2216087 - RNA, 19 nt, Artificial Sequence
  Description of Artificial Sequence: Synthetic oligonucleotide
  Antisense strand to SEQ ID NO: 2216086
auuuauagaccuugcagga

SEQ ID NO: 2216088 - RNA, 19 nt, Artificial Sequence
  Description of Artificial Sequence: Synthetic oligonucleotide
  Sense strand starting at position 2844 of SEQ ID NO: 1883782
cucaguucuugaccaggaa

SEQ ID NO: 2216089 - RNA, 19 nt, Artificial Sequence
  Description of Artificial Sequence: Synthetic oligonucleotide
  Antisense strand to SEQ ID NO: 2216088
uuccuggucaagaacugag

SEQ ID NO: 2216090 - RNA, 19 nt, Artificial Sequence
  Description of Artificial Sequence: Synthetic oligonucleotide
  Sense strand starting at position 1750 of SEQ ID NO: 1883782
ccauguugaguggacaagu

SEQ ID NO: 2216091 - RNA, 19 nt, Artificial Sequence
  Description of Artificial Sequence: Synthetic oligonucleotide
  Antisense strand to SEQ ID NO: 2216090
acuuguccacucaacaugg

SEQ ID NO: 2216092 - RNA, 19 nt, Artificial Sequence
  Description of Artificial Sequence: Synthetic oligonucleotide
  Sense strand starting at position 3600 of SEQ ID NO: 1883782
acuuguauggcagaggagu

SEQ ID NO: 2216093 - RNA, 19 nt, Artificial Sequence
  Description of Artificial Sequence: Synthetic oligonucleotide
  Antisense strand to SEQ ID NO: 2216092
acuccucugccauacaagu

SEQ ID NO: 2216094 - RNA, 19 nt, Artificial Sequence
  Description of Artificial Sequence: Synthetic oligonucleotide
  Sense strand starting at position 768 of SEQ ID NO: 1883782
guaauccuagauugugaaa

SEQ ID NO: 2216095 - RNA, 19 nt, Artificial Sequence
  Description of Artificial Sequence: Synthetic oligonucleotide
  Antisense strand to SEQ ID NO: 2216094
uuucacaaucuaggauuac

SEQ ID NO: 2216096 - RNA, 19 nt, Artificial Sequence
  Description of Artificial Sequence: Synthetic oligonucleotide
  Sense strand starting at position 801 of SEQ ID NO: 1883782
ucuacugaccagugauuga

SEQ ID NO: 2216097 - RNA, 19 nt, Artificial Sequence
  Description of Artificial Sequence: Synthetic oligonucleotide
  Antisense strand to SEQ ID NO: 2216096
ucaaucacuggucaguaga

SEQ ID NO: 2216098 - RNA, 19 nt, Artificial Sequence
  Description of Artificial Sequence: Synthetic oligonucleotide
  Sense strand starting at position 2016 of SEQ ID NO: 1883782
aggaaccauuugcagauaa

SEQ ID NO: 2216099 - RNA, 19 nt, Artificial Sequence
  Description of Artificial Sequence: Synthetic oligonucleotide
  Antisense strand to SEQ ID NO: 2216098
uuaucugcaaaugguuccu

SEQ ID NO: 2216100 - RNA, 19 nt, Artificial Sequence
  Description of Artificial Sequence: Synthetic oligonucleotide
  Sense strand starting at position 2532 of SEQ ID NO: 1883782
ucuggauauaaauguguga

SEQ ID NO: 2216101 - RNA, 19 nt, Artificial Sequence
  Description of Artificial Sequence: Synthetic oligonucleotide
  Antisense strand to SEQ ID NO: 2216100
ucacacauuuauauccaga

SEQ ID NO: 2216102 - RNA, 19 nt, Artificial Sequence
  Description of Artificial Sequence: Synthetic oligonucleotide
  Sense strand starting at position 1748 of SEQ ID NO: 1883782
auccauguugaguggacaa

SEQ ID NO: 2216103 - RNA, 19 nt, Artificial Sequence
  Description of Artificial Sequence: Synthetic oligonucleotide
  Antisense strand to SEQ ID NO: 2216102
uuguccacucaacauggau

SEQ ID NO: 2216104 - RNA, 19 nt, Artificial Sequence
  Description of Artificial Sequence: Synthetic oligonucleotide
  Sense strand starting at position 366 of SEQ ID NO: 1883782
uugaaugaggccuauuguu

SEQ ID NO: 2216105 - RNA, 19 nt, Artificial Sequence
  Description of Artificial Sequence: Synthetic oligonucleotide
  Antisense strand to SEQ ID NO: 2216104
aacaauaggccucauucaa

SEQ ID NO: 2216106 - RNA, 19 nt, Artificial Sequence
  Description of Artificial Sequence: Synthetic oligonucleotide
  Sense strand starting at position 327 of SEQ ID NO: 1883782
uuucucuaguuauugaaag

SEQ ID NO: 2216107 - RNA, 19 nt, Artificial Sequence
  Description of Artificial Sequence: Synthetic oligonucleotide
  Antisense strand to SEQ ID NO: 2216106
cuuucaauaacuagagaaa

SEQ ID NO: 2216108 - RNA, 19 nt, Artificial Sequence
  Description of Artificial Sequence: Synthetic oligonucleotide
  Sense strand starting at position 2758 of SEQ ID NO: 1883782
ggcuccuaacauugaaacu

SEQ ID NO: 2216109 - RNA, 19 nt, Artificial Sequence
  Description of Artificial Sequence: Synthetic oligonucleotide
  Antisense strand to SEQ ID NO: 2216108
aguuucaauguuaggagcc

SEQ ID NO: 2216110 - RNA, 19 nt, Artificial Sequence
  Description of Artificial Sequence: Synthetic oligonucleotide
  Sense strand starting at position 519 of SEQ ID NO: 1883782
agaguaauguuaguggaug

SEQ ID NO: 2216111 - RNA, 19 nt, Artificial Sequence
  Description of Artificial Sequence: Synthetic oligonucleotide
  Antisense strand to SEQ ID NO: 2216110
cauccacuaacauuacucu

SEQ ID NO: 2216112 - RNA, 19 nt, Artificial Sequence
  Description of Artificial Sequence: Synthetic oligonucleotide
  Sense strand starting at position 3982 of SEQ ID NO: 1883783
acaggagaaugucuuuaac

SEQ ID NO: 2216113 - RNA, 19 nt, Artificial Sequence
  Description of Artificial Sequence: Synthetic oligonucleotide
  Antisense strand to SEQ ID NO: 2216112
guuaaagacauucuccugu

SEQ ID NO: 2216114 - RNA, 19 nt, Artificial Sequence
  Description of Artificial Sequence: Synthetic oligonucleotide
  Sense strand starting at position 1266 of SEQ ID NO: 1883783
ccuuguaaagguuacacaa

SEQ ID NO: 2216115 - RNA, 19 nt, Artificial Sequence
  Description of Artificial Sequence: Synthetic oligonucleotide
  Antisense strand to SEQ ID NO: 2216114
uuguguaaccuuuacaagg

SEQ ID NO: 2216116 - RNA, 19 nt, Artificial Sequence
  Description of Artificial Sequence: Synthetic oligonucleotide
  Sense strand starting at position 2615 of SEQ ID NO: 1883783
acugcugaaguccaagaau

SEQ ID NO: 2216117 - RNA, 19 nt, Artificial Sequence
  Description of Artificial Sequence: Synthetic oligonucleotide
  Antisense strand to SEQ ID NO: 2216116
auucuuggacuucagcagu

SEQ ID NO: 2216118 - RNA, 19 nt, Artificial Sequence
  Description of Artificial Sequence: Synthetic oligonucleotide
  Sense strand starting at position 1534 of SEQ ID NO: 1883783
ugggcauaauaauccaaau

SEQ ID NO: 2216119 - RNA, 19 nt, Artificial Sequence
  Description of Artificial Sequence: Synthetic oligonucleotide
  Antisense strand to SEQ ID NO: 2216118
auuuggauuauuaugccca

SEQ ID NO: 2216120 - RNA, 19 nt, Artificial Sequence
  Description of Artificial Sequence: Synthetic oligonucleotide
  Sense strand starting at position 1865 of SEQ ID NO: 1883783
ggcucaguaaaggaaucuu

SEQ ID NO: 2216121 - RNA, 19 nt, Artificial Sequence
  Description of Artificial Sequence: Synthetic oligonucleotide
  Antisense strand to SEQ ID NO: 2216120
aagauuccuuuacugagcc

SEQ ID NO: 2216122 - RNA, 19 nt, Artificial Sequence
  Description of Artificial Sequence: Synthetic oligonucleotide
  Sense strand starting at position 841 of SEQ ID NO: 1883783
agagcauaugcauaaucca

SEQ ID NO: 2216123 - RNA, 19 nt, Artificial Sequence
  Description of Artificial Sequence: Synthetic oligonucleotide
  Antisense strand to SEQ ID NO: 2216122
uggauuaugcauaugcucu

SEQ ID NO: 2216124 - RNA, 19 nt, Artificial Sequence
  Description of Artificial Sequence: Synthetic oligonucleotide
  Sense strand starting at position 3395 of SEQ ID NO: 1883783
guguucuaagcagaagaga

SEQ ID NO: 2216125 - RNA, 19 nt, Artificial Sequence
  Description of Artificial Sequence: Synthetic oligonucleotide
  Antisense strand to SEQ ID NO: 2216124
ucucuucugcuuagaacac

SEQ ID NO: 2216126 - RNA, 19 nt, Artificial Sequence
  Description of Artificial Sequence: Synthetic oligonucleotide
  Sense strand starting at position 3623 of SEQ ID NO: 1883783
ggagcaguuauacaaaggu

SEQ ID NO: 2216127 - RNA, 19 nt, Artificial Sequence
  Description of Artificial Sequence: Synthetic oligonucleotide
  Antisense strand to SEQ ID NO: 2216126
accuuuguauaacugcucc

SEQ ID NO: 2216128 - RNA, 19 nt, Artificial Sequence
  Description of Artificial Sequence: Synthetic oligonucleotide
  Sense strand starting at position 1310 of SEQ ID NO: 1883783
uagauacuguuuccagaag

SEQ ID NO: 2216129 - RNA, 19 nt, Artificial Sequence
  Description of Artificial Sequence: Synthetic oligonucleotide
  Antisense strand to SEQ ID NO: 2216128
cuucuggaaacaguaucua

SEQ ID NO: 2216130 - RNA, 19 nt, Artificial Sequence
  Description of Artificial Sequence: Synthetic oligonucleotide
  Sense strand starting at position 1733 of SEQ ID NO: 1883783
uaauuucugguguguuuga

SEQ ID NO: 2216131 - RNA, 19 nt, Artificial Sequence
  Description of Artificial Sequence: Synthetic oligonucleotide
  Antisense strand to SEQ ID NO: 2216130
ucaaacacaccagaaauua

SEQ ID NO: 2216132 - RNA, 19 nt, Artificial Sequence
  Description of Artificial Sequence: Synthetic oligonucleotide
  Sense strand starting at position 200 of SEQ ID NO: 1883783
augagauaugcuuauuagu

SEQ ID NO: 2216133 - RNA, 19 nt, Artificial Sequence
  Description of Artificial Sequence: Synthetic oligonucleotide
  Antisense strand to SEQ ID NO: 2216132
acuaauaagcauaucucau

SEQ ID NO: 2216134 - RNA, 19 nt, Artificial Sequence
  Description of Artificial Sequence: Synthetic oligonucleotide
  Sense strand starting at position 3301 of SEQ ID NO: 1883783
aagagcguugauuacagau

SEQ ID NO: 2216135 - RNA, 19 nt, Artificial Sequence
  Description of Artificial Sequence: Synthetic oligonucleotide
  Antisense strand to SEQ ID NO: 2216134
aucuguaaucaacgcucuu

SEQ ID NO: 2216136 - RNA, 19 nt, Artificial Sequence
  Description of Artificial Sequence: Synthetic oligonucleotide
  Sense strand starting at position 2624 of SEQ ID NO: 1883783
guccaagaauguuuauaaa

SEQ ID NO: 2216137 - RNA, 19 nt, Artificial Sequence
  Description of Artificial Sequence: Synthetic oligonucleotide
  Antisense strand to SEQ ID NO: 2216136
uuuauaaacauucuuggac

SEQ ID NO: 2216138 - RNA, 19 nt, Artificial Sequence
  Description of Artificial Sequence: Synthetic oligonucleotide
  Sense strand starting at position 2981 of SEQ ID NO: 1883783
uaggucacugcucaggaau

SEQ ID NO: 2216139 - RNA, 19 nt, Artificial Sequence
  Description of Artificial Sequence: Synthetic oligonucleotide
  Antisense strand to SEQ ID NO: 2216138
auuccugagcagugaccua

SEQ ID NO: 2216140 - RNA, 19 nt, Artificial Sequence
  Description of Artificial Sequence: Synthetic oligonucleotide
  Sense strand starting at position 416 of SEQ ID NO: 1883783
agaaaccugucuucucaga

SEQ ID NO: 2216141 - RNA, 19 nt, Artificial Sequence
  Description of Artificial Sequence: Synthetic oligonucleotide
  Antisense strand to SEQ ID NO: 2216140
ucugagaagacagguuucu

SEQ ID NO: 2216142 - RNA, 19 nt, Artificial Sequence
  Description of Artificial Sequence: Synthetic oligonucleotide
  Sense strand starting at position 3737 of SEQ ID NO: 1883783
auacuaguuggguggaaua

SEQ ID NO: 2216143 - RNA, 19 nt, Artificial Sequence
  Description of Artificial Sequence: Synthetic oligonucleotide
  Antisense strand to SEQ ID NO: 2216142
uauuccacccaacuaguau

SEQ ID NO: 2216144 - RNA, 19 nt, Artificial Sequence
  Description of Artificial Sequence: Synthetic oligonucleotide
  Sense strand starting at position 2552 of SEQ ID NO: 1883783
aaaugaguuuaaccugagu

SEQ ID NO: 2216145 - RNA, 19 nt, Artificial Sequence
  Description of Artificial Sequence: Synthetic oligonucleotide
  Antisense strand to SEQ ID NO: 2216144
acucagguuaaacucauuu

SEQ ID NO: 2216146 - RNA, 19 nt, Artificial Sequence
  Description of Artificial Sequence: Synthetic oligonucleotide
  Sense strand starting at position 1857 of SEQ ID NO: 1883783
uucucaauggcucaguaaa

SEQ ID NO: 2216147 - RNA, 19 nt, Artificial Sequence
  Description of Artificial Sequence: Synthetic oligonucleotide
  Antisense strand to SEQ ID NO: 2216146
uuuacugagccauugagaa

SEQ ID NO: 2216148 - RNA, 19 nt, Artificial Sequence
  Description of Artificial Sequence: Synthetic oligonucleotide
  Sense strand starting at position 3314 of SEQ ID NO: 1883783
acagaugucuucucuaagg

SEQ ID NO: 2216149 - RNA, 19 nt, Artificial Sequence
  Description of Artificial Sequence: Synthetic oligonucleotide
  Antisense strand to SEQ ID NO: 2216148
ccuuagagaagacaucugu

SEQ ID NO: 2216150 - RNA, 19 nt, Artificial Sequence
  Description of Artificial Sequence: Synthetic oligonucleotide
  Sense strand starting at position 2621 of SEQ ID NO: 1883783
gaaguccaagaauguuuau

SEQ ID NO: 2216151 - RNA, 19 nt, Artificial Sequence
  Description of Artificial Sequence: Synthetic oligonucleotide
  Antisense strand to SEQ ID NO: 2216150
auaaacauucuuggacuuc

SEQ ID NO: 2216152 - RNA, 19 nt, Artificial Sequence
  Description of Artificial Sequence: Synthetic oligonucleotide
  Sense strand starting at position 2281 of SEQ ID NO: 1883783
caggguucugcucaucaaa

SEQ ID NO: 2216153 - RNA, 19 nt, Artificial Sequence
  Description of Artificial Sequence: Synthetic oligonucleotide
  Antisense strand to SEQ ID NO: 2216152
uuugaugagcagaacccug

SEQ ID NO: 2216154 - RNA, 19 nt, Artificial Sequence
  Description of Artificial Sequence: Synthetic oligonucleotide
  Sense strand starting at position 3601 of SEQ ID NO: 1883783
ucugaaauaugggcagagu

SEQ ID NO: 2216155 - RNA, 19 nt, Artificial Sequence
  Description of Artificial Sequence: Synthetic oligonucleotide
  Antisense strand to SEQ ID NO: 2216154
acucugcccauauuucaga

SEQ ID NO: 2216156 - RNA, 19 nt, Artificial Sequence
  Description of Artificial Sequence: Synthetic oligonucleotide
  Sense strand starting at position 2618 of SEQ ID NO: 1883783
gcugaaguccaagaauguu

SEQ ID NO: 2216157 - RNA, 19 nt, Artificial Sequence
  Description of Artificial Sequence: Synthetic oligonucleotide
  Antisense strand to SEQ ID NO: 2216156
aacauucuuggacuucagc

SEQ ID NO: 2216158 - RNA, 19 nt, Artificial Sequence
  Description of Artificial Sequence: Synthetic oligonucleotide
  Sense strand starting at position 3736 of SEQ ID NO: 1883783
cauacuaguuggguggaau

SEQ ID NO: 2216159 - RNA, 19 nt, Artificial Sequence
  Description of Artificial Sequence: Synthetic oligonucleotide
  Antisense strand to SEQ ID NO: 2216158
auuccacccaacuaguaug

SEQ ID NO: 2216160 - RNA, 19 nt, Artificial Sequence
  Description of Artificial Sequence: Synthetic oligonucleotide
  Sense strand starting at position 611 of SEQ ID NO: 1883783
agaauaacauguuuguauc

SEQ ID NO: 2216161 - RNA, 19 nt, Artificial Sequence
  Description of Artificial Sequence: Synthetic oligonucleotide
  Antisense strand to SEQ ID NO: 2216160
gauacaaacauguuauucu

SEQ ID NO: 2216162 - RNA, 19 nt, Artificial Sequence
  Description of Artificial Sequence: Synthetic oligonucleotide
  Sense strand starting at position 302 of SEQ ID NO: 1883783
ucagcaguucuacauauua

SEQ ID NO: 2216163 - RNA, 19 nt, Artificial Sequence
  Description of Artificial Sequence: Synthetic oligonucleotide
  Antisense strand to SEQ ID NO: 2216162
uaauauguagaacugcuga

SEQ ID NO: 2216164 - RNA, 19 nt, Artificial Sequence
  Description of Artificial Sequence: Synthetic oligonucleotide
  Sense strand starting at position 211 of SEQ ID NO: 1883783
uuauuaguccauuagcaca

SEQ ID NO: 2216165 - RNA, 19 nt, Artificial Sequence
  Description of Artificial Sequence: Synthetic oligonucleotide
  Antisense strand to SEQ ID NO: 2216164
ugugcuaauggacuaauaa

SEQ ID NO: 2216166 - RNA, 19 nt, Artificial Sequence
  Description of Artificial Sequence: Synthetic oligonucleotide
  Sense strand starting at position 1800 of SEQ ID NO: 1883783
gaguauauuuaccagggau

SEQ ID NO: 2216167 - RNA, 19 nt, Artificial Sequence
  Description of Artificial Sequence: Synthetic oligonucleotide
  Antisense strand to SEQ ID NO: 2216166
aucccugguaaauauacuc

SEQ ID NO: 2216168 - RNA, 19 nt, Artificial Sequence
  Description of Artificial Sequence: Synthetic oligonucleotide
  Sense strand starting at position 3762 of SEQ ID NO: 1883783
gaguuugacauggguuuaa

SEQ ID NO: 2216169 - RNA, 19 nt, Artificial Sequence
  Description of Artificial Sequence: Synthetic oligonucleotide
  Antisense strand to SEQ ID NO: 2216168
uuaaacccaugucaaacuc

SEQ ID NO: 2216170 - RNA, 19 nt, Artificial Sequence
  Description of Artificial Sequence: Synthetic oligonucleotide
  Sense strand starting at position 3761 of SEQ ID NO: 1883783
agaguuugacauggguuua

SEQ ID NO: 2216171 - RNA, 19 nt, Artificial Sequence
  Description of Artificial Sequence: Synthetic oligonucleotide
  Antisense strand to SEQ ID NO: 2216170
uaaacccaugucaaacucu

SEQ ID NO: 2216172 - RNA, 19 nt, Artificial Sequence
  Description of Artificial Sequence: Synthetic oligonucleotide
  Sense strand starting at position 974 of SEQ ID NO: 1883783
ccagaugugucacuuaaga

SEQ ID NO: 2216173 - RNA, 19 nt, Artificial Sequence
  Description of Artificial Sequence: Synthetic oligonucleotide
  Antisense strand to SEQ ID NO: 2216172
ucuuaagugacacaucugg

SEQ ID NO: 2216174 - RNA, 19 nt, Artificial Sequence
  Description of Artificial Sequence: Synthetic oligonucleotide
  Sense strand starting at position 1918 of SEQ ID NO: 1883783
ugugaagcacuaugaauua

SEQ ID NO: 2216175 - RNA, 19 nt, Artificial Sequence
  Description of Artificial Sequence: Synthetic oligonucleotide
  Antisense strand to SEQ ID NO: 2216174
uaauucauagugcuucaca

SEQ ID NO: 2216176 - RNA, 19 nt, Artificial Sequence
  Description of Artificial Sequence: Synthetic oligonucleotide
  Sense strand starting at position 3591 of SEQ ID NO: 1883783
aggcaaccugucugaaaua

SEQ ID NO: 2216177 - RNA, 19 nt, Artificial Sequence
  Description of Artificial Sequence: Synthetic oligonucleotide
  Antisense strand to SEQ ID NO: 2216176
uauuucagacagguugccu

SEQ ID NO: 2216178 - RNA, 19 nt, Artificial Sequence
  Description of Artificial Sequence: Synthetic oligonucleotide
  Sense strand starting at position 1340 of SEQ ID NO: 1883783
augaaugcccagugaauac

SEQ ID NO: 2216179 - RNA, 19 nt, Artificial Sequence
  Description of Artificial Sequence: Synthetic oligonucleotide
  Antisense strand to SEQ ID NO: 2216178
guauucacugggcauucau

SEQ ID NO: 2216180 - RNA, 19 nt, Artificial Sequence
  Description of Artificial Sequence: Synthetic oligonucleotide
  Sense strand starting at position 2305 of SEQ ID NO: 1883783
agggcaugguuauuaauau

SEQ ID NO: 2216181 - RNA, 19 nt, Artificial Sequence
  Description of Artificial Sequence: Synthetic oligonucleotide
  Antisense strand to SEQ ID NO: 2216180
auauuaauaaccaugcccu

SEQ ID NO: 2216182 - RNA, 19 nt, Artificial Sequence
  Description of Artificial Sequence: Synthetic oligonucleotide
  Sense strand starting at position 3590 of SEQ ID NO: 1883783
gaggcaaccugucugaaau

SEQ ID NO: 2216183 - RNA, 19 nt, Artificial Sequence
  Description of Artificial Sequence: Synthetic oligonucleotide
  Antisense strand to SEQ ID NO: 2216182
auuucagacagguugccuc

SEQ ID NO: 2216184 - RNA, 19 nt, Artificial Sequence
  Description of Artificial Sequence: Synthetic oligonucleotide
  Sense strand starting at position 1112 of SEQ ID NO: 1883783
uugaaagcuuaaucaguua

SEQ ID NO: 2216185 - RNA, 19 nt, Artificial Sequence
  Description of Artificial Sequence: Synthetic oligonucleotide
  Antisense strand to SEQ ID NO: 2216184
uaacugauuaagcuuucaa

SEQ ID NO: 2216186 - RNA, 19 nt, Artificial Sequence
  Description of Artificial Sequence: Synthetic oligonucleotide
  Sense strand starting at position 2097 of SEQ ID NO: 1883783
ugaagaauaugcucaguuu

SEQ ID NO: 2216187 - RNA, 19 nt, Artificial Sequence
  Description of Artificial Sequence: Synthetic oligonucleotide
  Antisense strand to SEQ ID NO: 2216186
aaacugagcauauucuuca

SEQ ID NO: 2216188 - RNA, 19 nt, Artificial Sequence
  Description of Artificial Sequence: Synthetic oligonucleotide
  Sense strand starting at position 2555 of SEQ ID NO: 1883783
ugaguuuaaccugaguguu

SEQ ID NO: 2216189 - RNA, 19 nt, Artificial Sequence
  Description of Artificial Sequence: Synthetic oligonucleotide
  Antisense strand to SEQ ID NO: 2216188
aacacucagguuaaacuca

SEQ ID NO: 2216190 - RNA, 19 nt, Artificial Sequence
  Description of Artificial Sequence: Synthetic oligonucleotide
  Sense strand starting at position 963 of SEQ ID NO: 1883783
cacuuagguguccagaugu

SEQ ID NO: 2216191 - RNA, 19 nt, Artificial Sequence
  Description of Artificial Sequence: Synthetic oligonucleotide
  Antisense strand to SEQ ID NO: 2216190
acaucuggacaccuaagug

SEQ ID NO: 2216192 - RNA, 19 nt, Artificial Sequence
  Description of Artificial Sequence: Synthetic oligonucleotide
  Sense strand starting at position 3249 of SEQ ID NO: 1883784
agcugcuuuggagaacaaa

SEQ ID NO: 2216193 - RNA, 19 nt, Artificial Sequence
  Description of Artificial Sequence: Synthetic oligonucleotide
  Antisense strand to SEQ ID NO: 2216192
uuuguucuccaaagcagcu

SEQ ID NO: 2216194 - RNA, 19 nt, Artificial Sequence
  Description of Artificial Sequence: Synthetic oligonucleotide
  Sense strand starting at position 3883 of SEQ ID NO: 1883784
gguagaaaccugcaucuga

SEQ ID NO: 2216195 - RNA, 19 nt, Artificial Sequence
  Description of Artificial Sequence: Synthetic oligonucleotide
  Antisense strand to SEQ ID NO: 2216194
ucagaugcagguuucuacc

SEQ ID NO: 2216196 - RNA, 19 nt, Artificial Sequence
  Description of Artificial Sequence: Synthetic oligonucleotide
  Sense strand starting at position 3318 of SEQ ID NO: 1883784
cgucuuugucuccauuuga

SEQ ID NO: 2216197 - RNA, 19 nt, Artificial Sequence
  Description of Artificial Sequence: Synthetic oligonucleotide
  Antisense strand to SEQ ID NO: 2216196
ucaaauggagacaaagacg

SEQ ID NO: 2216198 - RNA, 19 nt, Artificial Sequence
  Description of Artificial Sequence: Synthetic oligonucleotide
  Sense strand starting at position 225 of SEQ ID NO: 1883784
agggcuuaauuauuagaua

SEQ ID NO: 2216199 - RNA, 19 nt, Artificial Sequence
  Description of Artificial Sequence: Synthetic oligonucleotide
  Antisense strand to SEQ ID NO: 2216198
uaucuaauaauuaagcccu

SEQ ID NO: 2216200 - RNA, 19 nt, Artificial Sequence
  Description of Artificial Sequence: Synthetic oligonucleotide
  Sense strand starting at position 3155 of SEQ ID NO: 1883784
ucauuaggauggcuaauaa

SEQ ID NO: 2216201 - RNA, 19 nt, Artificial Sequence
  Description of Artificial Sequence: Synthetic oligonucleotide
  Antisense strand to SEQ ID NO: 2216200
uuauuagccauccuaauga

SEQ ID NO: 2216202 - RNA, 19 nt, Artificial Sequence
  Description of Artificial Sequence: Synthetic oligonucleotide
  Sense strand starting at position 1910 of SEQ ID NO: 1883784
uuucuaucacguuaggaaa

SEQ ID NO: 2216203 - RNA, 19 nt, Artificial Sequence
  Description of Artificial Sequence: Synthetic oligonucleotide
  Antisense strand to SEQ ID NO: 2216202
uuuccuaacgugauagaaa

SEQ ID NO: 2216204 - RNA, 19 nt, Artificial Sequence
  Description of Artificial Sequence: Synthetic oligonucleotide
  Sense strand starting at position 3830 of SEQ ID NO: 1883784
aguggaagagguugugaaa

SEQ ID NO: 2216205 - RNA, 19 nt, Artificial Sequence
  Description of Artificial Sequence: Synthetic oligonucleotide
  Antisense strand to SEQ ID NO: 2216204
uuucacaaccucuuccacu

SEQ ID NO: 2216206 - RNA, 19 nt, Artificial Sequence
  Description of Artificial Sequence: Synthetic oligonucleotide
  Sense strand starting at position 270 of SEQ ID NO: 1883784
aacguuaugcuggaagaac

SEQ ID NO: 2216207 - RNA, 19 nt, Artificial Sequence
  Description of Artificial Sequence: Synthetic oligonucleotide
  Antisense strand to SEQ ID NO: 2216206
guucuuccagcauaacguu

SEQ ID NO: 2216208 - RNA, 19 nt, Artificial Sequence
  Description of Artificial Sequence: Synthetic oligonucleotide
  Sense strand starting at position 555 of SEQ ID NO: 1883784
ggcccauccaaggaaguuu

SEQ ID NO: 2216209 - RNA, 19 nt, Artificial Sequence
  Description of Artificial Sequence: Synthetic oligonucleotide
  Antisense strand to SEQ ID NO: 2216208
aaacuuccuuggaugggcc

SEQ ID NO: 2216210 - RNA, 19 nt, Artificial Sequence
  Description of Artificial Sequence: Synthetic oligonucleotide
  Sense strand starting at position 2627 of SEQ ID NO: 1883784
aggauccuuuccuuuagau

SEQ ID NO: 2216211 - RNA, 19 nt, Artificial Sequence
  Description of Artificial Sequence: Synthetic oligonucleotide
  Antisense strand to SEQ ID NO: 2216210
aucuaaaggaaaggauccu

SEQ ID NO: 2216212 - RNA, 19 nt, Artificial Sequence
  Description of Artificial Sequence: Synthetic oligonucleotide
  Sense strand starting at position 968 of SEQ ID NO: 1883784
ggacuacuucaggguuuga

SEQ ID NO: 2216213 - RNA, 19 nt, Artificial Sequence
  Description of Artificial Sequence: Synthetic oligonucleotide
  Antisense strand to SEQ ID NO: 2216212
ucaaacccugaaguagucc

SEQ ID NO: 2216214 - RNA, 19 nt, Artificial Sequence
  Description of Artificial Sequence: Synthetic oligonucleotide
  Sense strand starting at position 2092 of SEQ ID NO: 1883784
uccugugugagugauaaga

SEQ ID NO: 2216215 - RNA, 19 nt, Artificial Sequence
  Description of Artificial Sequence: Synthetic oligonucleotide
  Antisense strand to SEQ ID NO: 2216214
ucuuaucacucacacagga

SEQ ID NO: 2216216 - RNA, 19 nt, Artificial Sequence
  Description of Artificial Sequence: Synthetic oligonucleotide
  Sense strand starting at position 219 of SEQ ID NO: 1883784
uucuccagggcuuaauuau

SEQ ID NO: 2216217 - RNA, 19 nt, Artificial Sequence
  Description of Artificial Sequence: Synthetic oligonucleotide
  Antisense strand to SEQ ID NO: 2216216
auaauuaagcccuggagaa

SEQ ID NO: 2216218 - RNA, 19 nt, Artificial Sequence
  Description of Artificial Sequence: Synthetic oligonucleotide
  Sense strand starting at position 661 of SEQ ID NO: 1883784
uuccauuuauuggaaauga

SEQ ID NO: 2216219 - RNA, 19 nt, Artificial Sequence
  Description of Artificial Sequence: Synthetic oligonucleotide
  Antisense strand to SEQ ID NO: 2216218
ucauuuccaauaaauggaa

SEQ ID NO: 2216220 - RNA, 19 nt, Artificial Sequence
  Description of Artificial Sequence: Synthetic oligonucleotide
  Sense strand starting at position 2171 of SEQ ID NO: 1883784
uggcuacaugcauaaucua

SEQ ID NO: 2216221 - RNA, 19 nt, Artificial Sequence
  Description of Artificial Sequence: Synthetic oligonucleotide
  Antisense strand to SEQ ID NO: 2216220
uagauuaugcauguagcca

SEQ ID NO: 2216222 - RNA, 19 nt, Artificial Sequence
  Description of Artificial Sequence: Synthetic oligonucleotide
  Sense strand starting at position 608 of SEQ ID NO: 1883784
cugcacagugauuaucuua

SEQ ID NO: 2216223 - RNA, 19 nt, Artificial Sequence
  Description of Artificial Sequence: Synthetic oligonucleotide
  Antisense strand to SEQ ID NO: 2216222
uaagauaaucacugugcag

SEQ ID NO: 2216224 - RNA, 19 nt, Artificial Sequence
  Description of Artificial Sequence: Synthetic oligonucleotide
  Sense strand starting at position 3284 of SEQ ID NO: 1883784
aacaguuguuaaguggaau

SEQ ID NO: 2216225 - RNA, 19 nt, Artificial Sequence
  Description of Artificial Sequence: Synthetic oligonucleotide
  Antisense strand to SEQ ID NO: 2216224
auuccacuuaacaacuguu

SEQ ID NO: 2216226 - RNA, 19 nt, Artificial Sequence
  Description of Artificial Sequence: Synthetic oligonucleotide
  Sense strand starting at position 455 of SEQ ID NO: 1883784
uuaugugcaguuuagaaca

SEQ ID NO: 2216227 - RNA, 19 nt, Artificial Sequence
  Description of Artificial Sequence: Synthetic oligonucleotide
  Antisense strand to SEQ ID NO: 2216226
uguucuaaacugcacauaa

SEQ ID NO: 2216228 - RNA, 19 nt, Artificial Sequence
  Description of Artificial Sequence: Synthetic oligonucleotide
  Sense strand starting at position 1284 of SEQ ID NO: 1883784
ccugguccucuaugaagau

SEQ ID NO: 2216229 - RNA, 19 nt, Artificial Sequence
  Description of Artificial Sequence: Synthetic oligonucleotide
  Antisense strand to SEQ ID NO: 2216228
aucuucauagaggaccagg

SEQ ID NO: 2216230 - RNA, 19 nt, Artificial Sequence
  Description of Artificial Sequence: Synthetic oligonucleotide
  Sense strand starting at position 175 of SEQ ID NO: 1883784
auaacaauguccuuaugua

SEQ ID NO: 2216231 - RNA, 19 nt, Artificial Sequence
  Description of Artificial Sequence: Synthetic oligonucleotide
  Antisense strand to SEQ ID NO: 2216230
uacauaaggacauuguuau

SEQ ID NO: 2216232 - RNA, 19 nt, Artificial Sequence
  Description of Artificial Sequence: Synthetic oligonucleotide
  Sense strand starting at position 1640 of SEQ ID NO: 1883784
aguacaaucucuuucgaaa

SEQ ID NO: 2216233 - RNA, 19 nt, Artificial Sequence
  Description of Artificial Sequence: Synthetic oligonucleotide
  Antisense strand to SEQ ID NO: 2216232
uuucgaaagagauuguacu

SEQ ID NO: 2216234 - RNA, 19 nt, Artificial Sequence
  Description of Artificial Sequence: Synthetic oligonucleotide
  Sense strand starting at position 3384 of SEQ ID NO: 1883784
ugaugaaugucuguuuaau

SEQ ID NO: 2216235 - RNA, 19 nt, Artificial Sequence
  Description of Artificial Sequence: Synthetic oligonucleotide
  Antisense strand to SEQ ID NO: 2216234
auuaaacagacauucauca

SEQ ID NO: 2216236 - RNA, 19 nt, Artificial Sequence
  Description of Artificial Sequence: Synthetic oligonucleotide
  Sense strand starting at position 3368 of SEQ ID NO: 1883784
cucagaauuuccuaaguga

SEQ ID NO: 2216237 - RNA, 19 nt, Artificial Sequence
  Description of Artificial Sequence: Synthetic oligonucleotide
  Antisense strand to SEQ ID NO: 2216236
ucacuuaggaaauucugag

SEQ ID NO: 2216238 - RNA, 19 nt, Artificial Sequence
  Description of Artificial Sequence: Synthetic oligonucleotide
  Sense strand starting at position 269 of SEQ ID NO: 1883784
caacguuaugcuggaagaa

SEQ ID NO: 2216239 - RNA, 19 nt, Artificial Sequence
  Description of Artificial Sequence: Synthetic oligonucleotide
  Antisense strand to SEQ ID NO: 2216238
uucuuccagcauaacguug

SEQ ID NO: 2216240 - RNA, 19 nt, Artificial Sequence
  Description of Artificial Sequence: Synthetic oligonucleotide
  Sense strand starting at position 3664 of SEQ ID NO: 1883784
guguaacccuaacuccaua

SEQ ID NO: 2216241 - RNA, 19 nt, Artificial Sequence
  Description of Artificial Sequence: Synthetic oligonucleotide
  Antisense strand to SEQ ID NO: 2216240
uauggaguuaggguuacac

SEQ ID NO: 2216242 - RNA, 19 nt, Artificial Sequence
  Description of Artificial Sequence: Synthetic oligonucleotide
  Sense strand starting at position 847 of SEQ ID NO: 1883784
gggccuucauggguauuaa

SEQ ID NO: 2216243 - RNA, 19 nt, Artificial Sequence
  Description of Artificial Sequence: Synthetic oligonucleotide
  Antisense strand to SEQ ID NO: 2216242
uuaauacccaugaaggccc

SEQ ID NO: 2216244 - RNA, 19 nt, Artificial Sequence
  Description of Artificial Sequence: Synthetic oligonucleotide
  Sense strand starting at position 1233 of SEQ ID NO: 1883784
acauguguaccaggaugua

SEQ ID NO: 2216245 - RNA, 19 nt, Artificial Sequence
  Description of Artificial Sequence: Synthetic oligonucleotide
  Antisense strand to SEQ ID NO: 2216244
uacauccugguacacaugu

SEQ ID NO: 2216246 - RNA, 19 nt, Artificial Sequence
  Description of Artificial Sequence: Synthetic oligonucleotide
  Sense strand starting at position 3285 of SEQ ID NO: 1883784
acaguuguuaaguggaauc

SEQ ID NO: 2216247 - RNA, 19 nt, Artificial Sequence
  Description of Artificial Sequence: Synthetic oligonucleotide
  Antisense strand to SEQ ID NO: 2216246
gauuccacuuaacaacugu

SEQ ID NO: 2216248 - RNA, 19 nt, Artificial Sequence
  Description of Artificial Sequence: Synthetic oligonucleotide
  Sense strand starting at position 3335 of SEQ ID NO: 1883784
gaagauccuggcuggcaua

SEQ ID NO: 2216249 - RNA, 19 nt, Artificial Sequence
  Description of Artificial Sequence: Synthetic oligonucleotide
  Antisense strand to SEQ ID NO: 2216248
uaugccagccaggaucuuc

SEQ ID NO: 2216250 - RNA, 19 nt, Artificial Sequence
  Description of Artificial Sequence: Synthetic oligonucleotide
  Sense strand starting at position 534 of SEQ ID NO: 1883784
agaguuaagucaccugggu

SEQ ID NO: 2216251 - RNA, 19 nt, Artificial Sequence
  Description of Artificial Sequence: Synthetic oligonucleotide
  Antisense strand to SEQ ID NO: 2216250
acccaggugacuuaacucu

SEQ ID NO: 2216252 - RNA, 19 nt, Artificial Sequence
  Description of Artificial Sequence: Synthetic oligonucleotide
  Sense strand starting at position 573 of SEQ ID NO: 1883784
ugauguuucuacucucaug

SEQ ID NO: 2216253 - RNA, 19 nt, Artificial Sequence
  Description of Artificial Sequence: Synthetic oligonucleotide
  Antisense strand to SEQ ID NO: 2216252
caugagaguagaaacauca

SEQ ID NO: 2216254 - RNA, 19 nt, Artificial Sequence
  Description of Artificial Sequence: Synthetic oligonucleotide
  Sense strand starting at position 2231 of SEQ ID NO: 1883784
aaugcuugguuaucugaau

SEQ ID NO: 2216255 - RNA, 19 nt, Artificial Sequence
  Description of Artificial Sequence: Synthetic oligonucleotide
  Antisense strand to SEQ ID NO: 2216254
auucagauaaccaagcauu

SEQ ID NO: 2216256 - RNA, 19 nt, Artificial Sequence
  Description of Artificial Sequence: Synthetic oligonucleotide
  Sense strand starting at position 567 of SEQ ID NO: 1883784
gaaguuugauguuucuacu

SEQ ID NO: 2216257 - RNA, 19 nt, Artificial Sequence
  Description of Artificial Sequence: Synthetic oligonucleotide
  Antisense strand to SEQ ID NO: 2216256
aguagaaacaucaaacuuc

SEQ ID NO: 2216258 - RNA, 19 nt, Artificial Sequence
  Description of Artificial Sequence: Synthetic oligonucleotide
  Sense strand starting at position 3382 of SEQ ID NO: 1883784
agugaugaaugucuguuua

SEQ ID NO: 2216259 - RNA, 19 nt, Artificial Sequence
  Description of Artificial Sequence: Synthetic oligonucleotide
  Antisense strand to SEQ ID NO: 2216258
uaaacagacauucaucacu

SEQ ID NO: 2216260 - RNA, 19 nt, Artificial Sequence
  Description of Artificial Sequence: Synthetic oligonucleotide
  Sense strand starting at position 3773 of SEQ ID NO: 1883784
cagugauaaugagugucuu

SEQ ID NO: 2216261 - RNA, 19 nt, Artificial Sequence
  Description of Artificial Sequence: Synthetic oligonucleotide
  Antisense strand to SEQ ID NO: 2216260
aagacacucauuaucacug

SEQ ID NO: 2216262 - RNA, 19 nt, Artificial Sequence
  Description of Artificial Sequence: Synthetic oligonucleotide
  Sense strand starting at position 3334 of SEQ ID NO: 1883784
ugaagauccuggcuggcau

SEQ ID NO: 2216263 - RNA, 19 nt, Artificial Sequence
  Description of Artificial Sequence: Synthetic oligonucleotide
  Antisense strand to SEQ ID NO: 2216262
augccagccaggaucuuca

SEQ ID NO: 2216264 - RNA, 19 nt, Artificial Sequence
  Description of Artificial Sequence: Synthetic oligonucleotide
  Sense strand starting at position 994 of SEQ ID NO: 1883784
gcugaaaucuuagcaacuu

SEQ ID NO: 2216265 - RNA, 19 nt, Artificial Sequence
  Description of Artificial Sequence: Synthetic oligonucleotide
  Antisense strand to SEQ ID NO: 2216264
aaguugcuaagauuucagc

SEQ ID NO: 2216266 - RNA, 19 nt, Artificial Sequence
  Description of Artificial Sequence: Synthetic oligonucleotide
  Sense strand starting at position 1765 of SEQ ID NO: 1883784
guguacuugcuacagacuu

SEQ ID NO: 2216267 - RNA, 19 nt, Artificial Sequence
  Description of Artificial Sequence: Synthetic oligonucleotide
  Antisense strand to SEQ ID NO: 2216266
aagucuguagcaaguacac

SEQ ID NO: 2216268 - RNA, 19 nt, Artificial Sequence
  Description of Artificial Sequence: Synthetic oligonucleotide
  Sense strand starting at position 492 of SEQ ID NO: 1883784
agcuguccacaguggauaa

SEQ ID NO: 2216269 - RNA, 19 nt, Artificial Sequence
  Description of Artificial Sequence: Synthetic oligonucleotide
  Antisense strand to SEQ ID NO: 2216268
uuauccacuguggacagcu

SEQ ID NO: 2216270 - RNA, 19 nt, Artificial Sequence
  Description of Artificial Sequence: Synthetic oligonucleotide
  Sense strand starting at position 1066 of SEQ ID NO: 1883784
aguaaagucuggcucaauc

SEQ ID NO: 2216271 - RNA, 19 nt, Artificial Sequence
  Description of Artificial Sequence: Synthetic oligonucleotide
  Antisense strand to SEQ ID NO: 2216270
gauugagccagacuuuacu

SEQ ID NO: 2216272 - RNA, 19 nt, Artificial Sequence
  Description of Artificial Sequence: Synthetic oligonucleotide
  Sense strand starting at position 673 of SEQ ID NO: 1883785
gucucauuccuagaaugau

SEQ ID NO: 2216273 - RNA, 19 nt, Artificial Sequence
  Description of Artificial Sequence: Synthetic oligonucleotide
  Antisense strand to SEQ ID NO: 2216272
aucauucuaggaaugagac

SEQ ID NO: 2216274 - RNA, 19 nt, Artificial Sequence
  Description of Artificial Sequence: Synthetic oligonucleotide
  Sense strand starting at position 1104 of SEQ ID NO: 1883785
gaaauugcucguguuagcu

SEQ ID NO: 2216275 - RNA, 19 nt, Artificial Sequence
  Description of Artificial Sequence: Synthetic oligonucleotide
  Antisense strand to SEQ ID NO: 2216274
agcuaacacgagcaauuuc

SEQ ID NO: 2216276 - RNA, 19 nt, Artificial Sequence
  Description of Artificial Sequence: Synthetic oligonucleotide
  Sense strand starting at position 1894 of SEQ ID NO: 1883785
guuaucggugaauaauaag

SEQ ID NO: 2216277 - RNA, 19 nt, Artificial Sequence
  Description of Artificial Sequence: Synthetic oligonucleotide
  Antisense strand to SEQ ID NO: 2216276
cuuauuauucaccgauaac

SEQ ID NO: 2216278 - RNA, 19 nt, Artificial Sequence
  Description of Artificial Sequence: Synthetic oligonucleotide
  Sense strand starting at position 3102 of SEQ ID NO: 1883785
agggcuuaauuauuagaua

SEQ ID NO: 2216279 - RNA, 19 nt, Artificial Sequence
  Description of Artificial Sequence: Synthetic oligonucleotide
  Antisense strand to SEQ ID NO: 2216278
uaucuaauaauuaagcccu

SEQ ID NO: 2216280 - RNA, 19 nt, Artificial Sequence
  Description of Artificial Sequence: Synthetic oligonucleotide
  Sense strand starting at position 1618 of SEQ ID NO: 1883785
gagucucugcaucacagaa

SEQ ID NO: 2216281 - RNA, 19 nt, Artificial Sequence
  Description of Artificial Sequence: Synthetic oligonucleotide
  Antisense strand to SEQ ID NO: 2216280
uucugugaugcagagacuc

SEQ ID NO: 2216282 - RNA, 19 nt, Artificial Sequence
  Description of Artificial Sequence: Synthetic oligonucleotide
  Sense strand starting at position 2135 of SEQ ID NO: 1883785
aaguuaucuggccauauga

SEQ ID NO: 2216283 - RNA, 19 nt, Artificial Sequence
  Description of Artificial Sequence: Synthetic oligonucleotide
  Antisense strand to SEQ ID NO: 2216282
ucauauggccagauaacuu

SEQ ID NO: 2216284 - RNA, 19 nt, Artificial Sequence
  Description of Artificial Sequence: Synthetic oligonucleotide
  Sense strand starting at position 3147 of SEQ ID NO: 1883785
aacguuaugcuggaagaac

SEQ ID NO: 2216285 - RNA, 19 nt, Artificial Sequence
  Description of Artificial Sequence: Synthetic oligonucleotide
  Antisense strand to SEQ ID NO: 2216284
guucuuccagcauaacguu

SEQ ID NO: 2216286 - RNA, 19 nt, Artificial Sequence
  Description of Artificial Sequence: Synthetic oligonucleotide
  Sense strand starting at position 3432 of SEQ ID NO: 1883785
ggcccauccaaggaaguuu

SEQ ID NO: 2216287 - RNA, 19 nt, Artificial Sequence
  Description of Artificial Sequence: Synthetic oligonucleotide
  Antisense strand to SEQ ID NO: 2216286
aaacuuccuuggaugggcc

SEQ ID NO: 2216288 - RNA, 19 nt, Artificial Sequence
  Description of Artificial Sequence: Synthetic oligonucleotide
  Sense strand starting at position 1891 of SEQ ID NO: 1883785
cagguuaucggugaauaau

SEQ ID NO: 2216289 - RNA, 19 nt, Artificial Sequence
  Description of Artificial Sequence: Synthetic oligonucleotide
  Antisense strand to SEQ ID NO: 2216288
auuauucaccgauaaccug

SEQ ID NO: 2216290 - RNA, 19 nt, Artificial Sequence
  Description of Artificial Sequence: Synthetic oligonucleotide
  Sense strand starting at position 3845 of SEQ ID NO: 1883785
ggacuacuucaggguuuga

SEQ ID NO: 2216291 - RNA, 19 nt, Artificial Sequence
  Description of Artificial Sequence: Synthetic oligonucleotide
  Antisense strand to SEQ ID NO: 2216290
ucaaacccugaaguagucc

SEQ ID NO: 2216292 - RNA, 19 nt, Artificial Sequence
  Description of Artificial Sequence: Synthetic oligonucleotide
  Sense strand starting at position 154 of SEQ ID NO: 1883785
cauguaagguaccuuagaa

SEQ ID NO: 2216293 - RNA, 19 nt, Artificial Sequence
  Description of Artificial Sequence: Synthetic oligonucleotide
  Antisense strand to SEQ ID NO: 2216292
uucuaagguaccuuacaug

SEQ ID NO: 2216294 - RNA, 19 nt, Artificial Sequence
  Description of Artificial Sequence: Synthetic oligonucleotide
  Sense strand starting at position 230 of SEQ ID NO: 1883785
ucccuagaucacgauucuu

SEQ ID NO: 2216295 - RNA, 19 nt, Artificial Sequence
  Description of Artificial Sequence: Synthetic oligonucleotide
  Antisense strand to SEQ ID NO: 2216294
aagaaucgugaucuaggga

SEQ ID NO: 2216296 - RNA, 19 nt, Artificial Sequence
  Description of Artificial Sequence: Synthetic oligonucleotide
  Sense strand starting at position 1110 of SEQ ID NO: 1883785
gcucguguuagcuuuauua

SEQ ID NO: 2216297 - RNA, 19 nt, Artificial Sequence
  Description of Artificial Sequence: Synthetic oligonucleotide
  Antisense strand to SEQ ID NO: 2216296
uaauaaagcuaacacgagc

SEQ ID NO: 2216298 - RNA, 19 nt, Artificial Sequence
  Description of Artificial Sequence: Synthetic oligonucleotide
  Sense strand starting at position 3096 of SEQ ID NO: 1883785
uucuccagggcuuaauuau

SEQ ID NO: 2216299 - RNA, 19 nt, Artificial Sequence
  Description of Artificial Sequence: Synthetic oligonucleotide
  Antisense strand to SEQ ID NO: 2216298
auaauuaagcccuggagaa

SEQ ID NO: 2216300 - RNA, 19 nt, Artificial Sequence
  Description of Artificial Sequence: Synthetic oligonucleotide
  Sense strand starting at position 3538 of SEQ ID NO: 1883785
uuccauuuauuggaaauga

SEQ ID NO: 2216301 - RNA, 19 nt, Artificial Sequence
  Description of Artificial Sequence: Synthetic oligonucleotide
  Antisense strand to SEQ ID NO: 2216300
ucauuuccaauaaauggaa

SEQ ID NO: 2216302 - RNA, 19 nt, Artificial Sequence
  Description of Artificial Sequence: Synthetic oligonucleotide
  Sense strand starting at position 1072 of SEQ ID NO: 1883785
ucacacaaguguuuacaaa

SEQ ID NO: 2216303 - RNA, 19 nt, Artificial Sequence
  Description of Artificial Sequence: Synthetic oligonucleotide
  Antisense strand to SEQ ID NO: 2216302
uuuguaaacacuuguguga

SEQ ID NO: 2216304 - RNA, 19 nt, Artificial Sequence
  Description of Artificial Sequence: Synthetic oligonucleotide
  Sense strand starting at position 1053 of SEQ ID NO: 1883785
guuaauugucuguacaaag

SEQ ID NO: 2216305 - RNA, 19 nt, Artificial Sequence
  Description of Artificial Sequence: Synthetic oligonucleotide
  Antisense strand to SEQ ID NO: 2216304
cuuuguacagacaauuaac

SEQ ID NO: 2216306 - RNA, 19 nt, Artificial Sequence
  Description of Artificial Sequence: Synthetic oligonucleotide
  Sense strand starting at position 1036 of SEQ ID NO: 1883785
gagggugauccugagcagu

SEQ ID NO: 2216307 - RNA, 19 nt, Artificial Sequence
  Description of Artificial Sequence: Synthetic oligonucleotide
  Antisense strand to SEQ ID NO: 2216306
acugcucaggaucacccuc

SEQ ID NO: 2216308 - RNA, 19 nt, Artificial Sequence
  Description of Artificial Sequence: Synthetic oligonucleotide
  Sense strand starting at position 2777 of SEQ ID NO: 1883785
cucuccuguuaacuggaaa

SEQ ID NO: 2216309 - RNA, 19 nt, Artificial Sequence
  Description of Artificial Sequence: Synthetic oligonucleotide
  Antisense strand to SEQ ID NO: 2216308
uuuccaguuaacaggagag

SEQ ID NO: 2216310 - RNA, 19 nt, Artificial Sequence
  Description of Artificial Sequence: Synthetic oligonucleotide
  Sense strand starting at position 1376 of SEQ ID NO: 1883785
ccaguucuuguacauauua

SEQ ID NO: 2216311 - RNA, 19 nt, Artificial Sequence
  Description of Artificial Sequence: Synthetic oligonucleotide
  Antisense strand to SEQ ID NO: 2216310
uaauauguacaagaacugg

SEQ ID NO: 2216312 - RNA, 19 nt, Artificial Sequence
  Description of Artificial Sequence: Synthetic oligonucleotide
  Sense strand starting at position 1039 of SEQ ID NO: 1883785
ggugauccugagcaguuaa

SEQ ID NO: 2216313 - RNA, 19 nt, Artificial Sequence
  Description of Artificial Sequence: Synthetic oligonucleotide
  Antisense strand to SEQ ID NO: 2216312
uuaacugcucaggaucacc

SEQ ID NO: 2216314 - RNA, 19 nt, Artificial Sequence
  Description of Artificial Sequence: Synthetic oligonucleotide
  Sense strand starting at position 3485 of SEQ ID NO: 1883785
cugcacagugauuaucuua

SEQ ID NO: 2216315 - RNA, 19 nt, Artificial Sequence
  Description of Artificial Sequence: Synthetic oligonucleotide
  Antisense strand to SEQ ID NO: 2216314
uaagauaaucacugugcag

SEQ ID NO: 2216316 - RNA, 19 nt, Artificial Sequence
  Description of Artificial Sequence: Synthetic oligonucleotide
  Sense strand starting at position 2231 of SEQ ID NO: 1883785
gaggauguaagccaguagu

SEQ ID NO: 2216317 - RNA, 19 nt, Artificial Sequence
  Description of Artificial Sequence: Synthetic oligonucleotide
  Antisense strand to SEQ ID NO: 2216316
acuacuggcuuacauccuc

SEQ ID NO: 2216318 - RNA, 19 nt, Artificial Sequence
  Description of Artificial Sequence: Synthetic oligonucleotide
  Sense strand starting at position 3332 of SEQ ID NO: 1883785
uuaugugcaguuuagaaca

SEQ ID NO: 2216319 - RNA, 19 nt, Artificial Sequence
  Description of Artificial Sequence: Synthetic oligonucleotide
  Antisense strand to SEQ ID NO: 2216318
uguucuaaacugcacauaa

SEQ ID NO: 2216320 - RNA, 19 nt, Artificial Sequence
  Description of Artificial Sequence: Synthetic oligonucleotide
  Sense strand starting at position 3052 of SEQ ID NO: 1883785
auaacaauguccuuaugua

SEQ ID NO: 2216321 - RNA, 19 nt, Artificial Sequence
  Description of Artificial Sequence: Synthetic oligonucleotide
  Antisense strand to SEQ ID NO: 2216320
uacauaaggacauuguuau

SEQ ID NO: 2216322 - RNA, 19 nt, Artificial Sequence
  Description of Artificial Sequence: Synthetic oligonucleotide
  Sense strand starting at position 2060 of SEQ ID NO: 1883785
guuaaauuaggucauguuc

SEQ ID NO: 2216323 - RNA, 19 nt, Artificial Sequence
  Description of Artificial Sequence: Synthetic oligonucleotide
  Antisense strand to SEQ ID NO: 2216322
gaacaugaccuaauuuaac

SEQ ID NO: 2216324 - RNA, 19 nt, Artificial Sequence
  Description of Artificial Sequence: Synthetic oligonucleotide
  Sense strand starting at position 1890 of SEQ ID NO: 1883785
acagguuaucggugaauaa

SEQ ID NO: 2216325 - RNA, 19 nt, Artificial Sequence
  Description of Artificial Sequence: Synthetic oligonucleotide
  Antisense strand to SEQ ID NO: 2216324
uuauucaccgauaaccugu

SEQ ID NO: 2216326 - RNA, 19 nt, Artificial Sequence
  Description of Artificial Sequence: Synthetic oligonucleotide
  Sense strand starting at position 1780 of SEQ ID NO: 1883785
guuuauaaucacuaacgca

SEQ ID NO: 2216327 - RNA, 19 nt, Artificial Sequence
  Description of Artificial Sequence: Synthetic oligonucleotide
  Antisense strand to SEQ ID NO: 2216326
ugcguuagugauuauaaac

SEQ ID NO: 2216328 - RNA, 19 nt, Artificial Sequence
  Description of Artificial Sequence: Synthetic oligonucleotide
  Sense strand starting at position 2134 of SEQ ID NO: 1883785
aaaguuaucuggccauaug

SEQ ID NO: 2216329 - RNA, 19 nt, Artificial Sequence
  Description of Artificial Sequence: Synthetic oligonucleotide
  Antisense strand to SEQ ID NO: 2216328
cauauggccagauaacuuu

SEQ ID NO: 2216330 - RNA, 19 nt, Artificial Sequence
  Description of Artificial Sequence: Synthetic oligonucleotide
  Sense strand starting at position 344 of SEQ ID NO: 1883785
uguauuacugcucaugauc

SEQ ID NO: 2216331 - RNA, 19 nt, Artificial Sequence
  Description of Artificial Sequence: Synthetic oligonucleotide
  Antisense strand to SEQ ID NO: 2216330
gaucaugagcaguaauaca

SEQ ID NO: 2216332 - RNA, 19 nt, Artificial Sequence
  Description of Artificial Sequence: Synthetic oligonucleotide
  Sense strand starting at position 2145 of SEQ ID NO: 1883785
gccauaugaccuugguaaa

SEQ ID NO: 2216333 - RNA, 19 nt, Artificial Sequence
  Description of Artificial Sequence: Synthetic oligonucleotide
  Antisense strand to SEQ ID NO: 2216332
uuuaccaaggucauauggc

SEQ ID NO: 2216334 - RNA, 19 nt, Artificial Sequence
  Description of Artificial Sequence: Synthetic oligonucleotide
  Sense strand starting at position 3146 of SEQ ID NO: 1883785
caacguuaugcuggaagaa

SEQ ID NO: 2216335 - RNA, 19 nt, Artificial Sequence
  Description of Artificial Sequence: Synthetic oligonucleotide
  Antisense strand to SEQ ID NO: 2216334
uucuuccagcauaacguug

SEQ ID NO: 2216336 - RNA, 19 nt, Artificial Sequence
  Description of Artificial Sequence: Synthetic oligonucleotide
  Sense strand starting at position 3724 of SEQ ID NO: 1883785
gggccuucauggguauuaa

SEQ ID NO: 2216337 - RNA, 19 nt, Artificial Sequence
  Description of Artificial Sequence: Synthetic oligonucleotide
  Antisense strand to SEQ ID NO: 2216336
uuaauacccaugaaggccc

SEQ ID NO: 2216338 - RNA, 19 nt, Artificial Sequence
  Description of Artificial Sequence: Synthetic oligonucleotide
  Sense strand starting at position 2234 of SEQ ID NO: 1883785
gauguaagccaguagucua

SEQ ID NO: 2216339 - RNA, 19 nt, Artificial Sequence
  Description of Artificial Sequence: Synthetic oligonucleotide
  Antisense strand to SEQ ID NO: 2216338
uagacuacuggcuuacauc

SEQ ID NO: 2216340 - RNA, 19 nt, Artificial Sequence
  Description of Artificial Sequence: Synthetic oligonucleotide
  Sense strand starting at position 3411 of SEQ ID NO: 1883785
agaguuaagucaccugggu

SEQ ID NO: 2216341 - RNA, 19 nt, Artificial Sequence
  Description of Artificial Sequence: Synthetic oligonucleotide
  Antisense strand to SEQ ID NO: 2216340
acccaggugacuuaacucu

SEQ ID NO: 2216342 - RNA, 19 nt, Artificial Sequence
  Description of Artificial Sequence: Synthetic oligonucleotide
  Sense strand starting at position 1052 of SEQ ID NO: 1883785
aguuaauugucuguacaaa

SEQ ID NO: 2216343 - RNA, 19 nt, Artificial Sequence
  Description of Artificial Sequence: Synthetic oligonucleotide
  Antisense strand to SEQ ID NO: 2216342
uuuguacagacaauuaacu

SEQ ID NO: 2216344 - RNA, 19 nt, Artificial Sequence
  Description of Artificial Sequence: Synthetic oligonucleotide
  Sense strand starting at position 3450 of SEQ ID NO: 1883785
ugauguuucuacucucaug

SEQ ID NO: 2216345 - RNA, 19 nt, Artificial Sequence
  Description of Artificial Sequence: Synthetic oligonucleotide
  Antisense strand to SEQ ID NO: 2216344
caugagaguagaaacauca

SEQ ID NO: 2216346 - RNA, 19 nt, Artificial Sequence
  Description of Artificial Sequence: Synthetic oligonucleotide
  Sense strand starting at position 3444 of SEQ ID NO: 1883785
gaaguuugauguuucuacu

SEQ ID NO: 2216347 - RNA, 19 nt, Artificial Sequence
  Description of Artificial Sequence: Synthetic oligonucleotide
  Antisense strand to SEQ ID NO: 2216346
aguagaaacaucaaacuuc

SEQ ID NO: 2216348 - RNA, 19 nt, Artificial Sequence
  Description of Artificial Sequence: Synthetic oligonucleotide
  Sense strand starting at position 3871 of SEQ ID NO: 1883785
gcugaaaucuuagcaacuu

SEQ ID NO: 2216349 - RNA, 19 nt, Artificial Sequence
  Description of Artificial Sequence: Synthetic oligonucleotide
  Antisense strand to SEQ ID NO: 2216348
aaguugcuaagauuucagc

SEQ ID NO: 2216350 - RNA, 19 nt, Artificial Sequence
  Description of Artificial Sequence: Synthetic oligonucleotide
  Sense strand starting at position 3369 of SEQ ID NO: 1883785
agcuguccacaguggauaa

SEQ ID NO: 2216351 - RNA, 19 nt, Artificial Sequence
  Description of Artificial Sequence: Synthetic oligonucleotide
  Antisense strand to SEQ ID NO: 2216350
uuauccacuguggacagcu

SEQ ID NO: 2216352 - RNA, 19 nt, Artificial Sequence
  Description of Artificial Sequence: Synthetic oligonucleotide
  Sense strand starting at position 1600 of SEQ ID NO: 1883786
ucauuugugacacguggau

SEQ ID NO: 2216353 - RNA, 19 nt, Artificial Sequence
  Description of Artificial Sequence: Synthetic oligonucleotide
  Antisense strand to SEQ ID NO: 2216352
auccacgugucacaaauga

SEQ ID NO: 2216354 - RNA, 19 nt, Artificial Sequence
  Description of Artificial Sequence: Synthetic oligonucleotide
  Sense strand starting at position 111 of SEQ ID NO: 1883786
gcaauuauuugaguuugug

SEQ ID NO: 2216355 - RNA, 19 nt, Artificial Sequence
  Description of Artificial Sequence: Synthetic oligonucleotide
  Antisense strand to SEQ ID NO: 2216354
cacaaacucaaauaauugc

SEQ ID NO: 2216356 - RNA, 19 nt, Artificial Sequence
  Description of Artificial Sequence: Synthetic oligonucleotide
  Sense strand starting at position 1861 of SEQ ID NO: 1883786
gccuauagucaacaauaug

SEQ ID NO: 2216357 - RNA, 19 nt, Artificial Sequence
  Description of Artificial Sequence: Synthetic oligonucleotide
  Antisense strand to SEQ ID NO: 2216356
cauauuguugacuauaggc

SEQ ID NO: 2216358 - RNA, 19 nt, Artificial Sequence
  Description of Artificial Sequence: Synthetic oligonucleotide
  Sense strand starting at position 3423 of SEQ ID NO: 1883786
uguggugucaaagaugaau

SEQ ID NO: 2216359 - RNA, 19 nt, Artificial Sequence
  Description of Artificial Sequence: Synthetic oligonucleotide
  Antisense strand to SEQ ID NO: 2216358
auucaucuuugacaccaca

SEQ ID NO: 2216360 - RNA, 19 nt, Artificial Sequence
  Description of Artificial Sequence: Synthetic oligonucleotide
  Sense strand starting at position 2440 of SEQ ID NO: 1883786
acacuagcacuuugagaga

SEQ ID NO: 2216361 - RNA, 19 nt, Artificial Sequence
  Description of Artificial Sequence: Synthetic oligonucleotide
  Antisense strand to SEQ ID NO: 2216360
ucucucaaagugcuagugu

SEQ ID NO: 2216362 - RNA, 19 nt, Artificial Sequence
  Description of Artificial Sequence: Synthetic oligonucleotide
  Sense strand starting at position 3283 of SEQ ID NO: 1883786
aauuaaguguggguaaaga

SEQ ID NO: 2216363 - RNA, 19 nt, Artificial Sequence
  Description of Artificial Sequence: Synthetic oligonucleotide
  Antisense strand to SEQ ID NO: 2216362
ucuuuacccacacuuaauu

SEQ ID NO: 2216364 - RNA, 19 nt, Artificial Sequence
  Description of Artificial Sequence: Synthetic oligonucleotide
  Sense strand starting at position 3425 of SEQ ID NO: 1883786
uggugucaaagaugaauau

SEQ ID NO: 2216365 - RNA, 19 nt, Artificial Sequence
  Description of Artificial Sequence: Synthetic oligonucleotide
  Antisense strand to SEQ ID NO: 2216364
auauucaucuuugacacca

SEQ ID NO: 2216366 - RNA, 19 nt, Artificial Sequence
  Description of Artificial Sequence: Synthetic oligonucleotide
  Sense strand starting at position 502 of SEQ ID NO: 1883786
uggauaucuggcaggcguu

SEQ ID NO: 2216367 - RNA, 19 nt, Artificial Sequence
  Description of Artificial Sequence: Synthetic oligonucleotide
  Antisense strand to SEQ ID NO: 2216366
aacgccugccagauaucca

SEQ ID NO: 2216368 - RNA, 19 nt, Artificial Sequence
  Description of Artificial Sequence: Synthetic oligonucleotide
  Sense strand starting at position 3282 of SEQ ID NO: 1883786
aaauuaaguguggguaaag

SEQ ID NO: 2216369 - RNA, 19 nt, Artificial Sequence
  Description of Artificial Sequence: Synthetic oligonucleotide
  Antisense strand to SEQ ID NO: 2216368
cuuuacccacacuuaauuu

SEQ ID NO: 2216370 - RNA, 19 nt, Artificial Sequence
  Description of Artificial Sequence: Synthetic oligonucleotide
  Sense strand starting at position 690 of SEQ ID NO: 1883786
agaauugugcuauaauccu

SEQ ID NO: 2216371 - RNA, 19 nt, Artificial Sequence
  Description of Artificial Sequence: Synthetic oligonucleotide
  Antisense strand to SEQ ID NO: 2216370
aggauuauagcacaauucu

SEQ ID NO: 2216372 - RNA, 19 nt, Artificial Sequence
  Description of Artificial Sequence: Synthetic oligonucleotide
  Sense strand starting at position 914 of SEQ ID NO: 1883786
cacugcaugguguaacaaa

SEQ ID NO: 2216373 - RNA, 19 nt, Artificial Sequence
  Description of Artificial Sequence: Synthetic oligonucleotide
  Antisense strand to SEQ ID NO: 2216372
uuuguuacaccaugcagug

SEQ ID NO: 2216374 - RNA, 19 nt, Artificial Sequence
  Description of Artificial Sequence: Synthetic oligonucleotide
  Sense strand starting at position 857 of SEQ ID NO: 1883786
uuguguuaacauuggaaag

SEQ ID NO: 2216375 - RNA, 19 nt, Artificial Sequence
  Description of Artificial Sequence: Synthetic oligonucleotide
  Antisense strand to SEQ ID NO: 2216374
cuuuccaauguuaacacaa

SEQ ID NO: 2216376 - RNA, 19 nt, Artificial Sequence
  Description of Artificial Sequence: Synthetic oligonucleotide
  Sense strand starting at position 1681 of SEQ ID NO: 1883786
ucuaacuuaucuguggaau

SEQ ID NO: 2216377 - RNA, 19 nt, Artificial Sequence
  Description of Artificial Sequence: Synthetic oligonucleotide
  Antisense strand to SEQ ID NO: 2216376
auuccacagauaaguuaga

SEQ ID NO: 2216378 - RNA, 19 nt, Artificial Sequence
  Description of Artificial Sequence: Synthetic oligonucleotide
  Sense strand starting at position 1927 of SEQ ID NO: 1883786
cuguaauuccagugagagg

SEQ ID NO: 2216379 - RNA, 19 nt, Artificial Sequence
  Description of Artificial Sequence: Synthetic oligonucleotide
  Antisense strand to SEQ ID NO: 2216378
ccucucacuggaauuacag

SEQ ID NO: 2216380 - RNA, 19 nt, Artificial Sequence
  Description of Artificial Sequence: Synthetic oligonucleotide
  Sense strand starting at position 1682 of SEQ ID NO: 1883786
cuaacuuaucuguggaauc

SEQ ID NO: 2216381 - RNA, 19 nt, Artificial Sequence
  Description of Artificial Sequence: Synthetic oligonucleotide
  Antisense strand to SEQ ID NO: 2216380
gauuccacagauaaguuag

SEQ ID NO: 2216382 - RNA, 19 nt, Artificial Sequence
  Description of Artificial Sequence: Synthetic oligonucleotide
  Sense strand starting at position 165 of SEQ ID NO: 1883786
ccucaucauccaggcuaga

SEQ ID NO: 2216383 - RNA, 19 nt, Artificial Sequence
  Description of Artificial Sequence: Synthetic oligonucleotide
  Antisense strand to SEQ ID NO: 2216382
ucuagccuggaugaugagg

SEQ ID NO: 2216384 - RNA, 19 nt, Artificial Sequence
  Description of Artificial Sequence: Synthetic oligonucleotide
  Sense strand starting at position 1249 of SEQ ID NO: 1883786
ggcaaauuagcacagccau

SEQ ID NO: 2216385 - RNA, 19 nt, Artificial Sequence
  Description of Artificial Sequence: Synthetic oligonucleotide
  Antisense strand to SEQ ID NO: 2216384
auggcugugcuaauuugcc

SEQ ID NO: 2216386 - RNA, 19 nt, Artificial Sequence
  Description of Artificial Sequence: Synthetic oligonucleotide
  Sense strand starting at position 192 of SEQ ID NO: 1883786
gcaugaugauggcucaaua

SEQ ID NO: 2216387 - RNA, 19 nt, Artificial Sequence
  Description of Artificial Sequence: Synthetic oligonucleotide
  Antisense strand to SEQ ID NO: 2216386
uauugagccaucaucaugc

SEQ ID NO: 2216388 - RNA, 19 nt, Artificial Sequence
  Description of Artificial Sequence: Synthetic oligonucleotide
  Sense strand starting at position 3507 of SEQ ID NO: 1883786
cugucuugucaucauauac

SEQ ID NO: 2216389 - RNA, 19 nt, Artificial Sequence
  Description of Artificial Sequence: Synthetic oligonucleotide
  Antisense strand to SEQ ID NO: 2216388
guauaugaugacaagacag

SEQ ID NO: 2216390 - RNA, 19 nt, Artificial Sequence
  Description of Artificial Sequence: Synthetic oligonucleotide
  Sense strand starting at position 2726 of SEQ ID NO: 1883786
ucagaugucucugcacaaa

SEQ ID NO: 2216391 - RNA, 19 nt, Artificial Sequence
  Description of Artificial Sequence: Synthetic oligonucleotide
  Antisense strand to SEQ ID NO: 2216390
uuugugcagagacaucuga

SEQ ID NO: 2216392 - RNA, 19 nt, Artificial Sequence
  Description of Artificial Sequence: Synthetic oligonucleotide
  Sense strand starting at position 2780 of SEQ ID NO: 1883786
uuaauaaucccauguugua

SEQ ID NO: 2216393 - RNA, 19 nt, Artificial Sequence
  Description of Artificial Sequence: Synthetic oligonucleotide
  Antisense strand to SEQ ID NO: 2216392
uacaacaugggauuauuaa

SEQ ID NO: 2216394 - RNA, 19 nt, Artificial Sequence
  Description of Artificial Sequence: Synthetic oligonucleotide
  Sense strand starting at position 1664 of SEQ ID NO: 1883786
aggcaaauaccacguaauc

SEQ ID NO: 2216395 - RNA, 19 nt, Artificial Sequence
  Description of Artificial Sequence: Synthetic oligonucleotide
  Antisense strand to SEQ ID NO: 2216394
gauuacgugguauuugccu

SEQ ID NO: 2216396 - RNA, 19 nt, Artificial Sequence
  Description of Artificial Sequence: Synthetic oligonucleotide
  Sense strand starting at position 867 of SEQ ID NO: 1883786
auuggaaagcccugcauau

SEQ ID NO: 2216397 - RNA, 19 nt, Artificial Sequence
  Description of Artificial Sequence: Synthetic oligonucleotide
  Antisense strand to SEQ ID NO: 2216396
auaugcagggcuuuccaau

SEQ ID NO: 2216398 - RNA, 19 nt, Artificial Sequence
  Description of Artificial Sequence: Synthetic oligonucleotide
  Sense strand starting at position 1838 of SEQ ID NO: 1883786
ugugaucuauugcccaaca

SEQ ID NO: 2216399 - RNA, 19 nt, Artificial Sequence
  Description of Artificial Sequence: Synthetic oligonucleotide
  Antisense strand to SEQ ID NO: 2216398
uguugggcaauagaucaca

SEQ ID NO: 2216400 - RNA, 19 nt, Artificial Sequence
  Description of Artificial Sequence: Synthetic oligonucleotide
  Sense strand starting at position 2357 of SEQ ID NO: 1883786
uguaacacucaccgucaaa

SEQ ID NO: 2216401 - RNA, 19 nt, Artificial Sequence
  Description of Artificial Sequence: Synthetic oligonucleotide
  Antisense strand to SEQ ID NO: 2216400
uuugacggugaguguuaca

SEQ ID NO: 2216402 - RNA, 19 nt, Artificial Sequence
  Description of Artificial Sequence: Synthetic oligonucleotide
  Sense strand starting at position 1234 of SEQ ID NO: 1883786
cauuguuagccggaaggca

SEQ ID NO: 2216403 - RNA, 19 nt, Artificial Sequence
  Description of Artificial Sequence: Synthetic oligonucleotide
  Antisense strand to SEQ ID NO: 2216402
ugccuuccggcuaacaaug

SEQ ID NO: 2216404 - RNA, 19 nt, Artificial Sequence
  Description of Artificial Sequence: Synthetic oligonucleotide
  Sense strand starting at position 109 of SEQ ID NO: 1883786
gagcaauuauuugaguuug

SEQ ID NO: 2216405 - RNA, 19 nt, Artificial Sequence
  Description of Artificial Sequence: Synthetic oligonucleotide
  Antisense strand to SEQ ID NO: 2216404
caaacucaaauaauugcuc

SEQ ID NO: 2216406 - RNA, 19 nt, Artificial Sequence
  Description of Artificial Sequence: Synthetic oligonucleotide
  Sense strand starting at position 3499 of SEQ ID NO: 1883786
ggaugaggcugucuuguca

SEQ ID NO: 2216407 - RNA, 19 nt, Artificial Sequence
  Description of Artificial Sequence: Synthetic oligonucleotide
  Antisense strand to SEQ ID NO: 2216406
ugacaagacagccucaucc

SEQ ID NO: 2216408 - RNA, 19 nt, Artificial Sequence
  Description of Artificial Sequence: Synthetic oligonucleotide
  Sense strand starting at position 464 of SEQ ID NO: 1883786
uugaauuacugauagacaa

SEQ ID NO: 2216409 - RNA, 19 nt, Artificial Sequence
  Description of Artificial Sequence: Synthetic oligonucleotide
  Antisense strand to SEQ ID NO: 2216408
uugucuaucaguaauucaa

SEQ ID NO: 2216410 - RNA, 19 nt, Artificial Sequence
  Description of Artificial Sequence: Synthetic oligonucleotide
  Sense strand starting at position 3503 of SEQ ID NO: 1883786
gaggcugucuugucaucau

SEQ ID NO: 2216411 - RNA, 19 nt, Artificial Sequence
  Description of Artificial Sequence: Synthetic oligonucleotide
  Antisense strand to SEQ ID NO: 2216410
augaugacaagacagccuc

SEQ ID NO: 2216412 - RNA, 19 nt, Artificial Sequence
  Description of Artificial Sequence: Synthetic oligonucleotide
  Sense strand starting at position 3506 of SEQ ID NO: 1883786
gcugucuugucaucauaua

SEQ ID NO: 2216413 - RNA, 19 nt, Artificial Sequence
  Description of Artificial Sequence: Synthetic oligonucleotide
  Antisense strand to SEQ ID NO: 2216412
uauaugaugacaagacagc

SEQ ID NO: 2216414 - RNA, 19 nt, Artificial Sequence
  Description of Artificial Sequence: Synthetic oligonucleotide
  Sense strand starting at position 1589 of SEQ ID NO: 1883786
uagaaaggcugucauuugu

SEQ ID NO: 2216415 - RNA, 19 nt, Artificial Sequence
  Description of Artificial Sequence: Synthetic oligonucleotide
  Antisense strand to SEQ ID NO: 2216414
acaaaugacagccuuucua

SEQ ID NO: 2216416 - RNA, 19 nt, Artificial Sequence
  Description of Artificial Sequence: Synthetic oligonucleotide
  Sense strand starting at position 635 of SEQ ID NO: 1883786
auuuaaagauguugcugau

SEQ ID NO: 2216417 - RNA, 19 nt, Artificial Sequence
  Description of Artificial Sequence: Synthetic oligonucleotide
  Antisense strand to SEQ ID NO: 2216416
aucagcaacaucuuuaaau

SEQ ID NO: 2216418 - RNA, 19 nt, Artificial Sequence
  Description of Artificial Sequence: Synthetic oligonucleotide
  Sense strand starting at position 2747 of SEQ ID NO: 1883786
aagauaaagugaugauaug

SEQ ID NO: 2216419 - RNA, 19 nt, Artificial Sequence
  Description of Artificial Sequence: Synthetic oligonucleotide
  Antisense strand to SEQ ID NO: 2216418
cauaucaucacuuuaucuu

SEQ ID NO: 2216420 - RNA, 19 nt, Artificial Sequence
  Description of Artificial Sequence: Synthetic oligonucleotide
  Sense strand starting at position 2334 of SEQ ID NO: 1883786
ggucccugcuggucuuuaa

SEQ ID NO: 2216421 - RNA, 19 nt, Artificial Sequence
  Description of Artificial Sequence: Synthetic oligonucleotide
  Antisense strand to SEQ ID NO: 2216420
uuaaagaccagcagggacc

SEQ ID NO: 2216422 - RNA, 19 nt, Artificial Sequence
  Description of Artificial Sequence: Synthetic oligonucleotide
  Sense strand starting at position 3238 of SEQ ID NO: 1883786
gucuaauaguaucauuugu

SEQ ID NO: 2216423 - RNA, 19 nt, Artificial Sequence
  Description of Artificial Sequence: Synthetic oligonucleotide
  Antisense strand to SEQ ID NO: 2216422
acaaaugauacuauuagac

SEQ ID NO: 2216424 - RNA, 19 nt, Artificial Sequence
  Description of Artificial Sequence: Synthetic oligonucleotide
  Sense strand starting at position 123 of SEQ ID NO: 1883786
guuugugagcuuugguaac

SEQ ID NO: 2216425 - RNA, 19 nt, Artificial Sequence
  Description of Artificial Sequence: Synthetic oligonucleotide
  Antisense strand to SEQ ID NO: 2216424
guuaccaaagcucacaaac

SEQ ID NO: 2216426 - RNA, 19 nt, Artificial Sequence
  Description of Artificial Sequence: Synthetic oligonucleotide
  Sense strand starting at position 503 of SEQ ID NO: 1883786
ggauaucuggcaggcguuu

SEQ ID NO: 2216427 - RNA, 19 nt, Artificial Sequence
  Description of Artificial Sequence: Synthetic oligonucleotide
  Antisense strand to SEQ ID NO: 2216426
aaacgccugccagauaucc

SEQ ID NO: 2216428 - RNA, 19 nt, Artificial Sequence
  Description of Artificial Sequence: Synthetic oligonucleotide
  Sense strand starting at position 117 of SEQ ID NO: 1883786
auuugaguuugugagcuuu

SEQ ID NO: 2216429 - RNA, 19 nt, Artificial Sequence
  Description of Artificial Sequence: Synthetic oligonucleotide
  Antisense strand to SEQ ID NO: 2216428
aaagcucacaaacucaaau

SEQ ID NO: 2216430 - RNA, 19 nt, Artificial Sequence
  Description of Artificial Sequence: Synthetic oligonucleotide
  Sense strand starting at position 2393 of SEQ ID NO: 1883786
uuaagucagugagaucaca

SEQ ID NO: 2216431 - RNA, 19 nt, Artificial Sequence
  Description of Artificial Sequence: Synthetic oligonucleotide
  Antisense strand to SEQ ID NO: 2216430
ugugaucucacugacuuaa

SEQ ID NO: 2216432 - RNA, 19 nt, Artificial Sequence
  Description of Artificial Sequence: Synthetic oligonucleotide
  Sense strand starting at position 3639 of SEQ ID NO: 1883787
agcugcuuuggagaacaaa

SEQ ID NO: 2216433 - RNA, 19 nt, Artificial Sequence
  Description of Artificial Sequence: Synthetic oligonucleotide
  Antisense strand to SEQ ID NO: 2216432
uuuguucuccaaagcagcu

SEQ ID NO: 2216434 - RNA, 19 nt, Artificial Sequence
  Description of Artificial Sequence: Synthetic oligonucleotide
  Sense strand starting at position 3708 of SEQ ID NO: 1883787
cgucuuugucuccauuuga

SEQ ID NO: 2216435 - RNA, 19 nt, Artificial Sequence
  Description of Artificial Sequence: Synthetic oligonucleotide
  Antisense strand to SEQ ID NO: 2216434
ucaaauggagacaaagacg

SEQ ID NO: 2216436 - RNA, 19 nt, Artificial Sequence
  Description of Artificial Sequence: Synthetic oligonucleotide
  Sense strand starting at position 615 of SEQ ID NO: 1883787
agggcuuaauuauuagaua

SEQ ID NO: 2216437 - RNA, 19 nt, Artificial Sequence
  Description of Artificial Sequence: Synthetic oligonucleotide
  Antisense strand to SEQ ID NO: 2216436
uaucuaauaauuaagcccu

SEQ ID NO: 2216438 - RNA, 19 nt, Artificial Sequence
  Description of Artificial Sequence: Synthetic oligonucleotide
  Sense strand starting at position 3545 of SEQ ID NO: 1883787
ucauuaggauggcuaauaa

SEQ ID NO: 2216439 - RNA, 19 nt, Artificial Sequence
  Description of Artificial Sequence: Synthetic oligonucleotide
  Antisense strand to SEQ ID NO: 2216438
uuauuagccauccuaauga

SEQ ID NO: 2216440 - RNA, 19 nt, Artificial Sequence
  Description of Artificial Sequence: Synthetic oligonucleotide
  Sense strand starting at position 2300 of SEQ ID NO: 1883787
uuucuaucacguuaggaaa

SEQ ID NO: 2216441 - RNA, 19 nt, Artificial Sequence
  Description of Artificial Sequence: Synthetic oligonucleotide
  Antisense strand to SEQ ID NO: 2216440
uuuccuaacgugauagaaa

SEQ ID NO: 2216442 - RNA, 19 nt, Artificial Sequence
  Description of Artificial Sequence: Synthetic oligonucleotide
  Sense strand starting at position 660 of SEQ ID NO: 1883787
aacguuaugcuggaagaac

SEQ ID NO: 2216443 - RNA, 19 nt, Artificial Sequence
  Description of Artificial Sequence: Synthetic oligonucleotide
  Antisense strand to SEQ ID NO: 2216442
guucuuccagcauaacguu

SEQ ID NO: 2216444 - RNA, 19 nt, Artificial Sequence
  Description of Artificial Sequence: Synthetic oligonucleotide
  Sense strand starting at position 945 of SEQ ID NO: 1883787
ggcccauccaaggaaguuu

SEQ ID NO: 2216445 - RNA, 19 nt, Artificial Sequence
  Description of Artificial Sequence: Synthetic oligonucleotide
  Antisense strand to SEQ ID NO: 2216444
aaacuuccuuggaugggcc

SEQ ID NO: 2216446 - RNA, 19 nt, Artificial Sequence
  Description of Artificial Sequence: Synthetic oligonucleotide
  Sense strand starting at position 3017 of SEQ ID NO: 1883787
aggauccuuuccuuuagau

SEQ ID NO: 2216447 - RNA, 19 nt, Artificial Sequence
  Description of Artificial Sequence: Synthetic oligonucleotide
  Antisense strand to SEQ ID NO: 2216446
aucuaaaggaaaggauccu

SEQ ID NO: 2216448 - RNA, 19 nt, Artificial Sequence
  Description of Artificial Sequence: Synthetic oligonucleotide
  Sense strand starting at position 1358 of SEQ ID NO: 1883787
ggacuacuucaggguuuga

SEQ ID NO: 2216449 - RNA, 19 nt, Artificial Sequence
  Description of Artificial Sequence: Synthetic oligonucleotide
  Antisense strand to SEQ ID NO: 2216448
ucaaacccugaaguagucc

SEQ ID NO: 2216450 - RNA, 19 nt, Artificial Sequence
  Description of Artificial Sequence: Synthetic oligonucleotide
  Sense strand starting at position 2482 of SEQ ID NO: 1883787
uccugugugagugauaaga

SEQ ID NO: 2216451 - RNA, 19 nt, Artificial Sequence
  Description of Artificial Sequence: Synthetic oligonucleotide
  Antisense strand to SEQ ID NO: 2216450
ucuuaucacucacacagga

SEQ ID NO: 2216452 - RNA, 19 nt, Artificial Sequence
  Description of Artificial Sequence: Synthetic oligonucleotide
  Sense strand starting at position 609 of SEQ ID NO: 1883787
uucuccagggcuuaauuau

SEQ ID NO: 2216453 - RNA, 19 nt, Artificial Sequence
  Description of Artificial Sequence: Synthetic oligonucleotide
  Antisense strand to SEQ ID NO: 2216452
auaauuaagcccuggagaa

SEQ ID NO: 2216454 - RNA, 19 nt, Artificial Sequence
  Description of Artificial Sequence: Synthetic oligonucleotide
  Sense strand starting at position 1051 of SEQ ID NO: 1883787
uuccauuuauuggaaauga

SEQ ID NO: 2216455 - RNA, 19 nt, Artificial Sequence
  Description of Artificial Sequence: Synthetic oligonucleotide
  Antisense strand to SEQ ID NO: 2216454
ucauuuccaauaaauggaa

SEQ ID NO: 2216456 - RNA, 19 nt, Artificial Sequence
  Description of Artificial Sequence: Synthetic oligonucleotide
  Sense strand starting at position 290 of SEQ ID NO: 1883787
cucuccuguuaacuggaaa

SEQ ID NO: 2216457 - RNA, 19 nt, Artificial Sequence
  Description of Artificial Sequence: Synthetic oligonucleotide
  Antisense strand to SEQ ID NO: 2216456
uuuccaguuaacaggagag

SEQ ID NO: 2216458 - RNA, 19 nt, Artificial Sequence
  Description of Artificial Sequence: Synthetic oligonucleotide
  Sense strand starting at position 2561 of SEQ ID NO: 1883787
uggcuacaugcauaaucua

SEQ ID NO: 2216459 - RNA, 19 nt, Artificial Sequence
  Description of Artificial Sequence: Synthetic oligonucleotide
  Antisense strand to SEQ ID NO: 2216458
uagauuaugcauguagcca

SEQ ID NO: 2216460 - RNA, 19 nt, Artificial Sequence
  Description of Artificial Sequence: Synthetic oligonucleotide
  Sense strand starting at position 998 of SEQ ID NO: 1883787
cugcacagugauuaucuua

SEQ ID NO: 2216461 - RNA, 19 nt, Artificial Sequence
  Description of Artificial Sequence: Synthetic oligonucleotide
  Antisense strand to SEQ ID NO: 2216460
uaagauaaucacugugcag

SEQ ID NO: 2216462 - RNA, 19 nt, Artificial Sequence
  Description of Artificial Sequence: Synthetic oligonucleotide
  Sense strand starting at position 3674 of SEQ ID NO: 1883787
aacaguuguuaaguggaau

SEQ ID NO: 2216463 - RNA, 19 nt, Artificial Sequence
  Description of Artificial Sequence: Synthetic oligonucleotide
  Antisense strand to SEQ ID NO: 2216462
auuccacuuaacaacuguu

SEQ ID NO: 2216464 - RNA, 19 nt, Artificial Sequence
  Description of Artificial Sequence: Synthetic oligonucleotide
  Sense strand starting at position 845 of SEQ ID NO: 1883787
uuaugugcaguuuagaaca

SEQ ID NO: 2216465 - RNA, 19 nt, Artificial Sequence
  Description of Artificial Sequence: Synthetic oligonucleotide
  Antisense strand to SEQ ID NO: 2216464
uguucuaaacugcacauaa

SEQ ID NO: 2216466 - RNA, 19 nt, Artificial Sequence
  Description of Artificial Sequence: Synthetic oligonucleotide
  Sense strand starting at position 1674 of SEQ ID NO: 1883787
ccugguccucuaugaagau

SEQ ID NO: 2216467 - RNA, 19 nt, Artificial Sequence
  Description of Artificial Sequence: Synthetic oligonucleotide
  Antisense strand to SEQ ID NO: 2216466
aucuucauagaggaccagg

SEQ ID NO: 2216468 - RNA, 19 nt, Artificial Sequence
  Description of Artificial Sequence: Synthetic oligonucleotide
  Sense strand starting at position 565 of SEQ ID NO: 1883787
auaacaauguccuuaugua

SEQ ID NO: 2216469 - RNA, 19 nt, Artificial Sequence
  Description of Artificial Sequence: Synthetic oligonucleotide
  Antisense strand to SEQ ID NO: 2216468
uacauaaggacauuguuau

SEQ ID NO: 2216470 - RNA, 19 nt, Artificial Sequence
  Description of Artificial Sequence: Synthetic oligonucleotide
  Sense strand starting at position 2030 of SEQ ID NO: 1883787
aguacaaucucuuucgaaa

SEQ ID NO: 2216471 - RNA, 19 nt, Artificial Sequence
  Description of Artificial Sequence: Synthetic oligonucleotide
  Antisense strand to SEQ ID NO: 2216470
uuucgaaagagauuguacu

SEQ ID NO: 2216472 - RNA, 19 nt, Artificial Sequence
  Description of Artificial Sequence: Synthetic oligonucleotide
  Sense strand starting at position 3774 of SEQ ID NO: 1883787
ugaugaaugucuguuuaau

SEQ ID NO: 2216473 - RNA, 19 nt, Artificial Sequence
  Description of Artificial Sequence: Synthetic oligonucleotide
  Antisense strand to SEQ ID NO: 2216472
auuaaacagacauucauca

SEQ ID NO: 2216474 - RNA, 19 nt, Artificial Sequence
  Description of Artificial Sequence: Synthetic oligonucleotide
  Sense strand starting at position 3758 of SEQ ID NO: 1883787
cucagaauuuccuaaguga

SEQ ID NO: 2216475 - RNA, 19 nt, Artificial Sequence
  Description of Artificial Sequence: Synthetic oligonucleotide
  Antisense strand to SEQ ID NO: 2216474
ucacuuaggaaauucugag

SEQ ID NO: 2216476 - RNA, 19 nt, Artificial Sequence
  Description of Artificial Sequence: Synthetic oligonucleotide
  Sense strand starting at position 659 of SEQ ID NO: 1883787
caacguuaugcuggaagaa

SEQ ID NO: 2216477 - RNA, 19 nt, Artificial Sequence
  Description of Artificial Sequence: Synthetic oligonucleotide
  Antisense strand to SEQ ID NO: 2216476
uucuuccagcauaacguug

SEQ ID NO: 2216478 - RNA, 19 nt, Artificial Sequence
  Description of Artificial Sequence: Synthetic oligonucleotide
  Sense strand starting at position 1237 of SEQ ID NO: 1883787
gggccuucauggguauuaa

SEQ ID NO: 2216479 - RNA, 19 nt, Artificial Sequence
  Description of Artificial Sequence: Synthetic oligonucleotide
  Antisense strand to SEQ ID NO: 2216478
uuaauacccaugaaggccc

SEQ ID NO: 2216480 - RNA, 19 nt, Artificial Sequence
  Description of Artificial Sequence: Synthetic oligonucleotide
  Sense strand starting at position 1623 of SEQ ID NO: 1883787
acauguguaccaggaugua

SEQ ID NO: 2216481 - RNA, 19 nt, Artificial Sequence
  Description of Artificial Sequence: Synthetic oligonucleotide
  Antisense strand to SEQ ID NO: 2216480
uacauccugguacacaugu

SEQ ID NO: 2216482 - RNA, 19 nt, Artificial Sequence
  Description of Artificial Sequence: Synthetic oligonucleotide
  Sense strand starting at position 3675 of SEQ ID NO: 1883787
acaguuguuaaguggaauc

SEQ ID NO: 2216483 - RNA, 19 nt, Artificial Sequence
  Description of Artificial Sequence: Synthetic oligonucleotide
  Antisense strand to SEQ ID NO: 2216482
gauuccacuuaacaacugu

SEQ ID NO: 2216484 - RNA, 19 nt, Artificial Sequence
  Description of Artificial Sequence: Synthetic oligonucleotide
  Sense strand starting at position 3725 of SEQ ID NO: 1883787
gaagauccuggcuggcaua

SEQ ID NO: 2216485 - RNA, 19 nt, Artificial Sequence
  Description of Artificial Sequence: Synthetic oligonucleotide
  Antisense strand to SEQ ID NO: 2216484
uaugccagccaggaucuuc

SEQ ID NO: 2216486 - RNA, 19 nt, Artificial Sequence
  Description of Artificial Sequence: Synthetic oligonucleotide
  Sense strand starting at position 924 of SEQ ID NO: 1883787
agaguuaagucaccugggu

SEQ ID NO: 2216487 - RNA, 19 nt, Artificial Sequence
  Description of Artificial Sequence: Synthetic oligonucleotide
  Antisense strand to SEQ ID NO: 2216486
acccaggugacuuaacucu

SEQ ID NO: 2216488 - RNA, 19 nt, Artificial Sequence
  Description of Artificial Sequence: Synthetic oligonucleotide
  Sense strand starting at position 963 of SEQ ID NO: 1883787
ugauguuucuacucucaug

SEQ ID NO: 2216489 - RNA, 19 nt, Artificial Sequence
  Description of Artificial Sequence: Synthetic oligonucleotide
  Antisense strand to SEQ ID NO: 2216488
caugagaguagaaacauca

SEQ ID NO: 2216490 - RNA, 19 nt, Artificial Sequence
  Description of Artificial Sequence: Synthetic oligonucleotide
  Sense strand starting at position 2621 of SEQ ID NO: 1883787
aaugcuugguuaucugaau

SEQ ID NO: 2216491 - RNA, 19 nt, Artificial Sequence
  Description of Artificial Sequence: Synthetic oligonucleotide
  Antisense strand to SEQ ID NO: 2216490
auucagauaaccaagcauu

SEQ ID NO: 2216492 - RNA, 19 nt, Artificial Sequence
  Description of Artificial Sequence: Synthetic oligonucleotide
  Sense strand starting at position 957 of SEQ ID NO: 1883787
gaaguuugauguuucuacu

SEQ ID NO: 2216493 - RNA, 19 nt, Artificial Sequence
  Description of Artificial Sequence: Synthetic oligonucleotide
  Antisense strand to SEQ ID NO: 2216492
aguagaaacaucaaacuuc

SEQ ID NO: 2216494 - RNA, 19 nt, Artificial Sequence
  Description of Artificial Sequence: Synthetic oligonucleotide
  Sense strand starting at position 3772 of SEQ ID NO: 1883787
agugaugaaugucuguuua

SEQ ID NO: 2216495 - RNA, 19 nt, Artificial Sequence
  Description of Artificial Sequence: Synthetic oligonucleotide
  Antisense strand to SEQ ID NO: 2216494
uaaacagacauucaucacu

SEQ ID NO: 2216496 - RNA, 19 nt, Artificial Sequence
  Description of Artificial Sequence: Synthetic oligonucleotide
  Sense strand starting at position 3724 of SEQ ID NO: 1883787
ugaagauccuggcuggcau

SEQ ID NO: 2216497 - RNA, 19 nt, Artificial Sequence
  Description of Artificial Sequence: Synthetic oligonucleotide
  Antisense strand to SEQ ID NO: 2216496
augccagccaggaucuuca

SEQ ID NO: 2216498 - RNA, 19 nt, Artificial Sequence
  Description of Artificial Sequence: Synthetic oligonucleotide
  Sense strand starting at position 1384 of SEQ ID NO: 1883787
gcugaaaucuuagcaacuu

SEQ ID NO: 2216499 - RNA, 19 nt, Artificial Sequence
  Description of Artificial Sequence: Synthetic oligonucleotide
  Antisense strand to SEQ ID NO: 2216498
aaguugcuaagauuucagc

SEQ ID NO: 2216500 - RNA, 19 nt, Artificial Sequence
  Description of Artificial Sequence: Synthetic oligonucleotide
  Sense strand starting at position 2155 of SEQ ID NO: 1883787
guguacuugcuacagacuu

SEQ ID NO: 2216501 - RNA, 19 nt, Artificial Sequence
  Description of Artificial Sequence: Synthetic oligonucleotide
  Antisense strand to SEQ ID NO: 2216500
aagucuguagcaaguacac

SEQ ID NO: 2216502 - RNA, 19 nt, Artificial Sequence
  Description of Artificial Sequence: Synthetic oligonucleotide
  Sense strand starting at position 882 of SEQ ID NO: 1883787
agcuguccacaguggauaa

SEQ ID NO: 2216503 - RNA, 19 nt, Artificial Sequence
  Description of Artificial Sequence: Synthetic oligonucleotide
  Antisense strand to SEQ ID NO: 2216502
uuauccacuguggacagcu

SEQ ID NO: 2216504 - RNA, 19 nt, Artificial Sequence
  Description of Artificial Sequence: Synthetic oligonucleotide
  Sense strand starting at position 1456 of SEQ ID NO: 1883787
aguaaagucuggcucaauc

SEQ ID NO: 2216505 - RNA, 19 nt, Artificial Sequence
  Description of Artificial Sequence: Synthetic oligonucleotide
  Antisense strand to SEQ ID NO: 2216504
gauugagccagacuuuacu

SEQ ID NO: 2216506 - RNA, 19 nt, Artificial Sequence
  Description of Artificial Sequence: Synthetic oligonucleotide
  Sense strand starting at position 3393 of SEQ ID NO: 1883787
ggaucugcauucuuuguaa

SEQ ID NO: 2216507 - RNA, 19 nt, Artificial Sequence
  Description of Artificial Sequence: Synthetic oligonucleotide
  Antisense strand to SEQ ID NO: 2216506
uuacaaagaaugcagaucc

SEQ ID NO: 2216508 - RNA, 19 nt, Artificial Sequence
  Description of Artificial Sequence: Synthetic oligonucleotide
  Sense strand starting at position 1396 of SEQ ID NO: 1883787
gcaacuuaccagugagcaa

SEQ ID NO: 2216509 - RNA, 19 nt, Artificial Sequence
  Description of Artificial Sequence: Synthetic oligonucleotide
  Antisense strand to SEQ ID NO: 2216508
uugcucacugguaaguugc

SEQ ID NO: 2216510 - RNA, 19 nt, Artificial Sequence
  Description of Artificial Sequence: Synthetic oligonucleotide
  Sense strand starting at position 1334 of SEQ ID NO: 1883787
gagugaucccacuguguga

SEQ ID NO: 2216511 - RNA, 19 nt, Artificial Sequence
  Description of Artificial Sequence: Synthetic oligonucleotide
  Antisense strand to SEQ ID NO: 2216510
ucacacagugggaucacuc

SEQ ID NO: 2216512 - RNA, 19 nt, Artificial Sequence
  Description of Artificial Sequence: Synthetic oligonucleotide
  Sense strand starting at position 2775 of SEQ ID NO: 1883788
ggcacaauggcugaggaau

SEQ ID NO: 2216513 - RNA, 19 nt, Artificial Sequence
  Description of Artificial Sequence: Synthetic oligonucleotide
  Antisense strand to SEQ ID NO: 2216512
auuccucagccauugugcc

SEQ ID NO: 2216514 - RNA, 19 nt, Artificial Sequence
  Description of Artificial Sequence: Synthetic oligonucleotide
  Sense strand starting at position 3448 of SEQ ID NO: 1883788
ggaacaacuuggccaagau

SEQ ID NO: 2216515 - RNA, 19 nt, Artificial Sequence
  Description of Artificial Sequence: Synthetic oligonucleotide
  Antisense strand to SEQ ID NO: 2216514
aucuuggccaaguuguucc

SEQ ID NO: 2216516 - RNA, 19 nt, Artificial Sequence
  Description of Artificial Sequence: Synthetic oligonucleotide
  Sense strand starting at position 3426 of SEQ ID NO: 1883788
uugagaugacugggaugua

SEQ ID NO: 2216517 - RNA, 19 nt, Artificial Sequence
  Description of Artificial Sequence: Synthetic oligonucleotide
  Antisense strand to SEQ ID NO: 2216516
uacaucccagucaucucaa

SEQ ID NO: 2216518 - RNA, 19 nt, Artificial Sequence
  Description of Artificial Sequence: Synthetic oligonucleotide
  Sense strand starting at position 2387 of SEQ ID NO: 1883788
auagcaucccuggaguaca

SEQ ID NO: 2216519 - RNA, 19 nt, Artificial Sequence
  Description of Artificial Sequence: Synthetic oligonucleotide
  Antisense strand to SEQ ID NO: 2216518
uguacuccagggaugcuau

SEQ ID NO: 2216520 - RNA, 19 nt, Artificial Sequence
  Description of Artificial Sequence: Synthetic oligonucleotide
  Sense strand starting at position 2951 of SEQ ID NO: 1883788
uggcguccacugcucgaua

SEQ ID NO: 2216521 - RNA, 19 nt, Artificial Sequence
  Description of Artificial Sequence: Synthetic oligonucleotide
  Antisense strand to SEQ ID NO: 2216520
uaucgagcaguggacgcca

SEQ ID NO: 2216522 - RNA, 19 nt, Artificial Sequence
  Description of Artificial Sequence: Synthetic oligonucleotide
  Sense strand starting at position 3640 of SEQ ID NO: 1883788
aagcuagguuacccagaaa

SEQ ID NO: 2216523 - RNA, 19 nt, Artificial Sequence
  Description of Artificial Sequence: Synthetic oligonucleotide
  Antisense strand to SEQ ID NO: 2216522
uuucuggguaaccuagcuu

SEQ ID NO: 2216524 - RNA, 19 nt, Artificial Sequence
  Description of Artificial Sequence: Synthetic oligonucleotide
  Sense strand starting at position 1036 of SEQ ID NO: 1883788
cuuggucuuacuuggaaga

SEQ ID NO: 2216525 - RNA, 19 nt, Artificial Sequence
  Description of Artificial Sequence: Synthetic oligonucleotide
  Antisense strand to SEQ ID NO: 2216524
ucuuccaaguaagaccaag

SEQ ID NO: 2216526 - RNA, 19 nt, Artificial Sequence
  Description of Artificial Sequence: Synthetic oligonucleotide
  Sense strand starting at position 3458 of SEQ ID NO: 1883788
ggccaagaucuaggaguau

SEQ ID NO: 2216527 - RNA, 19 nt, Artificial Sequence
  Description of Artificial Sequence: Synthetic oligonucleotide
  Antisense strand to SEQ ID NO: 2216526
auacuccuagaucuuggcc

SEQ ID NO: 2216528 - RNA, 19 nt, Artificial Sequence
  Description of Artificial Sequence: Synthetic oligonucleotide
  Sense strand starting at position 2333 of SEQ ID NO: 1883788
ucauaaaguuagccagauc

SEQ ID NO: 2216529 - RNA, 19 nt, Artificial Sequence
  Description of Artificial Sequence: Synthetic oligonucleotide
  Antisense strand to SEQ ID NO: 2216528
gaucuggcuaacuuuauga

SEQ ID NO: 2216530 - RNA, 19 nt, Artificial Sequence
  Description of Artificial Sequence: Synthetic oligonucleotide
  Sense strand starting at position 3024 of SEQ ID NO: 1883788
agaagaucgaguggucauc

SEQ ID NO: 2216531 - RNA, 19 nt, Artificial Sequence
  Description of Artificial Sequence: Synthetic oligonucleotide
  Antisense strand to SEQ ID NO: 2216530
gaugaccacucgaucuucu

SEQ ID NO: 2216532 - RNA, 19 nt, Artificial Sequence
  Description of Artificial Sequence: Synthetic oligonucleotide
  Sense strand starting at position 2245 of SEQ ID NO: 1883788
ccaagugagcugugaacca

SEQ ID NO: 2216533 - RNA, 19 nt, Artificial Sequence
  Description of Artificial Sequence: Synthetic oligonucleotide
  Antisense strand to SEQ ID NO: 2216532
ugguucacagcucacuugg

SEQ ID NO: 2216534 - RNA, 19 nt, Artificial Sequence
  Description of Artificial Sequence: Synthetic oligonucleotide
  Sense strand starting at position 3415 of SEQ ID NO: 1883788
ucauucucgcauugagaug

SEQ ID NO: 2216535 - RNA, 19 nt, Artificial Sequence
  Description of Artificial Sequence: Synthetic oligonucleotide
  Antisense strand to SEQ ID NO: 2216534
caucucaaugcgagaauga

SEQ ID NO: 2216536 - RNA, 19 nt, Artificial Sequence
  Description of Artificial Sequence: Synthetic oligonucleotide
  Sense strand starting at position 2313 of SEQ ID NO: 1883788
auauuuggcuuaggagaau

SEQ ID NO: 2216537 - RNA, 19 nt, Artificial Sequence
  Description of Artificial Sequence: Synthetic oligonucleotide
  Antisense strand to SEQ ID NO: 2216536
auucuccuaagccaaauau

SEQ ID NO: 2216538 - RNA, 19 nt, Artificial Sequence
  Description of Artificial Sequence: Synthetic oligonucleotide
  Sense strand starting at position 2098 of SEQ ID NO: 1883788
ggguccugggcuugagagu

SEQ ID NO: 2216539 - RNA, 19 nt, Artificial Sequence
  Description of Artificial Sequence: Synthetic oligonucleotide
  Antisense strand to SEQ ID NO: 2216538
acucucaagcccaggaccc

SEQ ID NO: 2216540 - RNA, 19 nt, Artificial Sequence
  Description of Artificial Sequence: Synthetic oligonucleotide
  Sense strand starting at position 3393 of SEQ ID NO: 1883788
agggcagggucuguuagua

SEQ ID NO: 2216541 - RNA, 19 nt, Artificial Sequence
  Description of Artificial Sequence: Synthetic oligonucleotide
  Antisense strand to SEQ ID NO: 2216540
uacuaacagacccugcccu

SEQ ID NO: 2216542 - RNA, 19 nt, Artificial Sequence
  Description of Artificial Sequence: Synthetic oligonucleotide
  Sense strand starting at position 285 of SEQ ID NO: 1883788
aaaugaccaugugagaaua

SEQ ID NO: 2216543 - RNA, 19 nt, Artificial Sequence
  Description of Artificial Sequence: Synthetic oligonucleotide
  Antisense strand to SEQ ID NO: 2216542
uauucucacauggucauuu

SEQ ID NO: 2216544 - RNA, 19 nt, Artificial Sequence
  Description of Artificial Sequence: Synthetic oligonucleotide
  Sense strand starting at position 3403 of SEQ ID NO: 1883788
cuguuaguauccucauucu

SEQ ID NO: 2216545 - RNA, 19 nt, Artificial Sequence
  Description of Artificial Sequence: Synthetic oligonucleotide
  Antisense strand to SEQ ID NO: 2216544
agaaugaggauacuaacag

SEQ ID NO: 2216546 - RNA, 19 nt, Artificial Sequence
  Description of Artificial Sequence: Synthetic oligonucleotide
  Sense strand starting at position 2348 of SEQ ID NO: 1883788
gaucucgggucucaauuua

SEQ ID NO: 2216547 - RNA, 19 nt, Artificial Sequence
  Description of Artificial Sequence: Synthetic oligonucleotide
  Antisense strand to SEQ ID NO: 2216546
uaaauugagacccgagauc

SEQ ID NO: 2216548 - RNA, 19 nt, Artificial Sequence
  Description of Artificial Sequence: Synthetic oligonucleotide
  Sense strand starting at position 3852 of SEQ ID NO: 1883788
gcauauugcucuuuccaug

SEQ ID NO: 2216549 - RNA, 19 nt, Artificial Sequence
  Description of Artificial Sequence: Synthetic oligonucleotide
  Antisense strand to SEQ ID NO: 2216548
cauggaaagagcaauaugc

SEQ ID NO: 2216550 - RNA, 19 nt, Artificial Sequence
  Description of Artificial Sequence: Synthetic oligonucleotide
  Sense strand starting at position 3250 of SEQ ID NO: 1883788
uccacugucuugcuguaga

SEQ ID NO: 2216551 - RNA, 19 nt, Artificial Sequence
  Description of Artificial Sequence: Synthetic oligonucleotide
  Antisense strand to SEQ ID NO: 2216550
ucuacagcaagacagugga

SEQ ID NO: 2216552 - RNA, 19 nt, Artificial Sequence
  Description of Artificial Sequence: Synthetic oligonucleotide
  Sense strand starting at position 1038 of SEQ ID NO: 1883788
uggucuuacuuggaagaca

SEQ ID NO: 2216553 - RNA, 19 nt, Artificial Sequence
  Description of Artificial Sequence: Synthetic oligonucleotide
  Antisense strand to SEQ ID NO: 2216552
ugucuuccaaguaagacca

SEQ ID NO: 2216554 - RNA, 19 nt, Artificial Sequence
  Description of Artificial Sequence: Synthetic oligonucleotide
  Sense strand starting at position 2243 of SEQ ID NO: 1883788
cgccaagugagcugugaac

SEQ ID NO: 2216555 - RNA, 19 nt, Artificial Sequence
  Description of Artificial Sequence: Synthetic oligonucleotide
  Antisense strand to SEQ ID NO: 2216554
guucacagcucacuuggcg

SEQ ID NO: 2216556 - RNA, 19 nt, Artificial Sequence
  Description of Artificial Sequence: Synthetic oligonucleotide
  Sense strand starting at position 1262 of SEQ ID NO: 1883788
gagcgaagccugugcuaac

SEQ ID NO: 2216557 - RNA, 19 nt, Artificial Sequence
  Description of Artificial Sequence: Synthetic oligonucleotide
  Antisense strand to SEQ ID NO: 2216556
guuagcacaggcuucgcuc

SEQ ID NO: 2216558 - RNA, 19 nt, Artificial Sequence
  Description of Artificial Sequence: Synthetic oligonucleotide
  Sense strand starting at position 3175 of SEQ ID NO: 1883788
acugauuugugucggguga

SEQ ID NO: 2216559 - RNA, 19 nt, Artificial Sequence
  Description of Artificial Sequence: Synthetic oligonucleotide
  Antisense strand to SEQ ID NO: 2216558
ucacccgacacaaaucagu

SEQ ID NO: 2216560 - RNA, 19 nt, Artificial Sequence
  Description of Artificial Sequence: Synthetic oligonucleotide
  Sense strand starting at position 2495 of SEQ ID NO: 1883788
guuucuuucgcccgggagu

SEQ ID NO: 2216561 - RNA, 19 nt, Artificial Sequence
  Description of Artificial Sequence: Synthetic oligonucleotide
  Antisense strand to SEQ ID NO: 2216560
acucccgggcgaaagaaac

SEQ ID NO: 2216562 - RNA, 19 nt, Artificial Sequence
  Description of Artificial Sequence: Synthetic oligonucleotide
  Sense strand starting at position 178 of SEQ ID NO: 1883788
uuccgcuacugcgauuuaa

SEQ ID NO: 2216563 - RNA, 19 nt, Artificial Sequence
  Description of Artificial Sequence: Synthetic oligonucleotide
  Antisense strand to SEQ ID NO: 2216562
uuaaaucgcaguagcggaa

SEQ ID NO: 2216564 - RNA, 19 nt, Artificial Sequence
  Description of Artificial Sequence: Synthetic oligonucleotide
  Sense strand starting at position 3177 of SEQ ID NO: 1883788
ugauuugugucgggugagu

SEQ ID NO: 2216565 - RNA, 19 nt, Artificial Sequence
  Description of Artificial Sequence: Synthetic oligonucleotide
  Antisense strand to SEQ ID NO: 2216564
acucacccgacacaaauca

SEQ ID NO: 2216566 - RNA, 19 nt, Artificial Sequence
  Description of Artificial Sequence: Synthetic oligonucleotide
  Sense strand starting at position 2 of SEQ ID NO: 1883788
gaaccaagcuugugauguc

SEQ ID NO: 2216567 - RNA, 19 nt, Artificial Sequence
  Description of Artificial Sequence: Synthetic oligonucleotide
  Antisense strand to SEQ ID NO: 2216566
gacaucacaagcuugguuc

SEQ ID NO: 2216568 - RNA, 19 nt, Artificial Sequence
  Description of Artificial Sequence: Synthetic oligonucleotide
  Sense strand starting at position 989 of SEQ ID NO: 1883788
cgaccuugcuccuggguaa

SEQ ID NO: 2216569 - RNA, 19 nt, Artificial Sequence
  Description of Artificial Sequence: Synthetic oligonucleotide
  Antisense strand to SEQ ID NO: 2216568
uuacccaggagcaaggucg

SEQ ID NO: 2216570 - RNA, 19 nt, Artificial Sequence
  Description of Artificial Sequence: Synthetic oligonucleotide
  Sense strand starting at position 3908 of SEQ ID NO: 1883788
ggcuguggcuugugcagaa

SEQ ID NO: 2216571 - RNA, 19 nt, Artificial Sequence
  Description of Artificial Sequence: Synthetic oligonucleotide
  Antisense strand to SEQ ID NO: 2216570
uucugcacaagccacagcc

SEQ ID NO: 2216572 - RNA, 19 nt, Artificial Sequence
  Description of Artificial Sequence: Synthetic oligonucleotide
  Sense strand starting at position 1080 of SEQ ID NO: 1883788
gcggguugcucaggucuuu

SEQ ID NO: 2216573 - RNA, 19 nt, Artificial Sequence
  Description of Artificial Sequence: Synthetic oligonucleotide
  Antisense strand to SEQ ID NO: 2216572
aaagaccugagcaacccgc

SEQ ID NO: 2216574 - RNA, 19 nt, Artificial Sequence
  Description of Artificial Sequence: Synthetic oligonucleotide
  Sense strand starting at position 3781 of SEQ ID NO: 1883789
ccuggagauuccuuugaaa

SEQ ID NO: 2216575 - RNA, 19 nt, Artificial Sequence
  Description of Artificial Sequence: Synthetic oligonucleotide
  Antisense strand to SEQ ID NO: 2216574
uuucaaaggaaucuccagg

SEQ ID NO: 2216576 - RNA, 19 nt, Artificial Sequence
  Description of Artificial Sequence: Synthetic oligonucleotide
  Sense strand starting at position 1040 of SEQ ID NO: 1883789
ugguguuucagggaggaug

SEQ ID NO: 2216577 - RNA, 19 nt, Artificial Sequence
  Description of Artificial Sequence: Synthetic oligonucleotide
  Antisense strand to SEQ ID NO: 2216576
cauccucccugaaacacca

SEQ ID NO: 2216578 - RNA, 19 nt, Artificial Sequence
  Description of Artificial Sequence: Synthetic oligonucleotide
  Sense strand starting at position 2674 of SEQ ID NO: 1883789
uaaggauccuagcuaagag

SEQ ID NO: 2216579 - RNA, 19 nt, Artificial Sequence
  Description of Artificial Sequence: Synthetic oligonucleotide
  Antisense strand to SEQ ID NO: 2216578
cucuuagcuaggauccuua

SEQ ID NO: 2216580 - RNA, 19 nt, Artificial Sequence
  Description of Artificial Sequence: Synthetic oligonucleotide
  Sense strand starting at position 3527 of SEQ ID NO: 1883789
cagggaagaguguaguuua

SEQ ID NO: 2216581 - RNA, 19 nt, Artificial Sequence
  Description of Artificial Sequence: Synthetic oligonucleotide
  Antisense strand to SEQ ID NO: 2216580
uaaacuacacucuucccug

SEQ ID NO: 2216582 - RNA, 19 nt, Artificial Sequence
  Description of Artificial Sequence: Synthetic oligonucleotide
  Sense strand starting at position 1304 of SEQ ID NO: 1883789
gagggacguguugaaauca

SEQ ID NO: 2216583 - RNA, 19 nt, Artificial Sequence
  Description of Artificial Sequence: Synthetic oligonucleotide
  Antisense strand to SEQ ID NO: 2216582
ugauuucaacacgucccuc

SEQ ID NO: 2216584 - RNA, 19 nt, Artificial Sequence
  Description of Artificial Sequence: Synthetic oligonucleotide
  Sense strand starting at position 3956 of SEQ ID NO: 1883789
ggaucuaaguucccacaaa

SEQ ID NO: 2216585 - RNA, 19 nt, Artificial Sequence
  Description of Artificial Sequence: Synthetic oligonucleotide
  Antisense strand to SEQ ID NO: 2216584
uuugugggaacuuagaucc

SEQ ID NO: 2216586 - RNA, 19 nt, Artificial Sequence
  Description of Artificial Sequence: Synthetic oligonucleotide
  Sense strand starting at position 227 of SEQ ID NO: 1883789
uuugacaagcucuaugacu

SEQ ID NO: 2216587 - RNA, 19 nt, Artificial Sequence
  Description of Artificial Sequence: Synthetic oligonucleotide
  Antisense strand to SEQ ID NO: 2216586
agucauagagcuugucaaa

SEQ ID NO: 2216588 - RNA, 19 nt, Artificial Sequence
  Description of Artificial Sequence: Synthetic oligonucleotide
  Sense strand starting at position 997 of SEQ ID NO: 1883789
guguguggcagugcugaua

SEQ ID NO: 2216589 - RNA, 19 nt, Artificial Sequence
  Description of Artificial Sequence: Synthetic oligonucleotide
  Antisense strand to SEQ ID NO: 2216588
uaucagcacugccacacac

SEQ ID NO: 2216590 - RNA, 19 nt, Artificial Sequence
  Description of Artificial Sequence: Synthetic oligonucleotide
  Sense strand starting at position 1096 of SEQ ID NO: 1883789
aguggugggucauuuaguu

SEQ ID NO: 2216591 - RNA, 19 nt, Artificial Sequence
  Description of Artificial Sequence: Synthetic oligonucleotide
  Antisense strand to SEQ ID NO: 2216590
aacuaaaugacccaccacu

SEQ ID NO: 2216592 - RNA, 19 nt, Artificial Sequence
  Description of Artificial Sequence: Synthetic oligonucleotide
  Sense strand starting at position 1950 of SEQ ID NO: 1883789
uaaguccuggcugacaaau

SEQ ID NO: 2216593 - RNA, 19 nt, Artificial Sequence
  Description of Artificial Sequence: Synthetic oligonucleotide
  Antisense strand to SEQ ID NO: 2216592
auuugucagccaggacuua

SEQ ID NO: 2216594 - RNA, 19 nt, Artificial Sequence
  Description of Artificial Sequence: Synthetic oligonucleotide
  Sense strand starting at position 2482 of SEQ ID NO: 1883789
gcauuucugcuaugaaagu

SEQ ID NO: 2216595 - RNA, 19 nt, Artificial Sequence
  Description of Artificial Sequence: Synthetic oligonucleotide
  Antisense strand to SEQ ID NO: 2216594
acuuucauagcagaaaugc

SEQ ID NO: 2216596 - RNA, 19 nt, Artificial Sequence
  Description of Artificial Sequence: Synthetic oligonucleotide
  Sense strand starting at position 2984 of SEQ ID NO: 1883789
auuccauuggucuaaguag

SEQ ID NO: 2216597 - RNA, 19 nt, Artificial Sequence
  Description of Artificial Sequence: Synthetic oligonucleotide
  Antisense strand to SEQ ID NO: 2216596
cuacuuagaccaauggaau

SEQ ID NO: 2216598 - RNA, 19 nt, Artificial Sequence
  Description of Artificial Sequence: Synthetic oligonucleotide
  Sense strand starting at position 3935 of SEQ ID NO: 1883789
acccgugaacagggauaua

SEQ ID NO: 2216599 - RNA, 19 nt, Artificial Sequence
  Description of Artificial Sequence: Synthetic oligonucleotide
  Antisense strand to SEQ ID NO: 2216598
uauaucccuguucacgggu

SEQ ID NO: 2216600 - RNA, 19 nt, Artificial Sequence
  Description of Artificial Sequence: Synthetic oligonucleotide
  Sense strand starting at position 2961 of SEQ ID NO: 1883789
augccacagcccuaaagau

SEQ ID NO: 2216601 - RNA, 19 nt, Artificial Sequence
  Description of Artificial Sequence: Synthetic oligonucleotide
  Antisense strand to SEQ ID NO: 2216600
aucuuuagggcuguggcau

SEQ ID NO: 2216602 - RNA, 19 nt, Artificial Sequence
  Description of Artificial Sequence: Synthetic oligonucleotide
  Sense strand starting at position 3530 of SEQ ID NO: 1883789
ggaagaguguaguuuagaa

SEQ ID NO: 2216603 - RNA, 19 nt, Artificial Sequence
  Description of Artificial Sequence: Synthetic oligonucleotide
  Antisense strand to SEQ ID NO: 2216602
uucuaaacuacacucuucc

SEQ ID NO: 2216604 - RNA, 19 nt, Artificial Sequence
  Description of Artificial Sequence: Synthetic oligonucleotide
  Sense strand starting at position 1442 of SEQ ID NO: 1883789
cucauaaaguugucaagag

SEQ ID NO: 2216605 - RNA, 19 nt, Artificial Sequence
  Description of Artificial Sequence: Synthetic oligonucleotide
  Antisense strand to SEQ ID NO: 2216604
cucuugacaacuuuaugag

SEQ ID NO: 2216606 - RNA, 19 nt, Artificial Sequence
  Description of Artificial Sequence: Synthetic oligonucleotide
  Sense strand starting at position 582 of SEQ ID NO: 1883789
gcaagaaaucugggaguug

SEQ ID NO: 2216607 - RNA, 19 nt, Artificial Sequence
  Description of Artificial Sequence: Synthetic oligonucleotide
  Antisense strand to SEQ ID NO: 2216606
caacucccagauuucuugc

SEQ ID NO: 2216608 - RNA, 19 nt, Artificial Sequence
  Description of Artificial Sequence: Synthetic oligonucleotide
  Sense strand starting at position 3532 of SEQ ID NO: 1883789
aagaguguaguuuagaagu

SEQ ID NO: 2216609 - RNA, 19 nt, Artificial Sequence
  Description of Artificial Sequence: Synthetic oligonucleotide
  Antisense strand to SEQ ID NO: 2216608
acuucuaaacuacacucuu

SEQ ID NO: 2216610 - RNA, 19 nt, Artificial Sequence
  Description of Artificial Sequence: Synthetic oligonucleotide
  Sense strand starting at position 1531 of SEQ ID NO: 1883789
aguccauaugcucauauag

SEQ ID NO: 2216611 - RNA, 19 nt, Artificial Sequence
  Description of Artificial Sequence: Synthetic oligonucleotide
  Antisense strand to SEQ ID NO: 2216610
cuauaugagcauauggacu

SEQ ID NO: 2216612 - RNA, 19 nt, Artificial Sequence
  Description of Artificial Sequence: Synthetic oligonucleotide
  Sense strand starting at position 1962 of SEQ ID NO: 1883789
gacaaauucuggguacucu

SEQ ID NO: 2216613 - RNA, 19 nt, Artificial Sequence
  Description of Artificial Sequence: Synthetic oligonucleotide
  Antisense strand to SEQ ID NO: 2216612
agaguacccagaauuuguc

SEQ ID NO: 2216614 - RNA, 19 nt, Artificial Sequence
  Description of Artificial Sequence: Synthetic oligonucleotide
  Sense strand starting at position 1009 of SEQ ID NO: 1883789
gcugauauccuuuaaccug

SEQ ID NO: 2216615 - RNA, 19 nt, Artificial Sequence
  Description of Artificial Sequence: Synthetic oligonucleotide
  Antisense strand to SEQ ID NO: 2216614
cagguuaaaggauaucagc

SEQ ID NO: 2216616 - RNA, 19 nt, Artificial Sequence
  Description of Artificial Sequence: Synthetic oligonucleotide
  Sense strand starting at position 1736 of SEQ ID NO: 1883789
uacuauuuguucccagugu

SEQ ID NO: 2216617 - RNA, 19 nt, Artificial Sequence
  Description of Artificial Sequence: Synthetic oligonucleotide
  Antisense strand to SEQ ID NO: 2216616
acacugggaacaaauagua

SEQ ID NO: 2216618 - RNA, 19 nt, Artificial Sequence
  Description of Artificial Sequence: Synthetic oligonucleotide
  Sense strand starting at position 1250 of SEQ ID NO: 1883789
aguaacuuccaugaguucu

SEQ ID NO: 2216619 - RNA, 19 nt, Artificial Sequence
  Description of Artificial Sequence: Synthetic oligonucleotide
  Antisense strand to SEQ ID NO: 2216618
agaacucauggaaguuacu

SEQ ID NO: 2216620 - RNA, 19 nt, Artificial Sequence
  Description of Artificial Sequence: Synthetic oligonucleotide
  Sense strand starting at position 2233 of SEQ ID NO: 1883789
uuucuauauuuggaacaag

SEQ ID NO: 2216621 - RNA, 19 nt, Artificial Sequence
  Description of Artificial Sequence: Synthetic oligonucleotide
  Antisense strand to SEQ ID NO: 2216620
cuuguuccaaauauagaaa

SEQ ID NO: 2216622 - RNA, 19 nt, Artificial Sequence
  Description of Artificial Sequence: Synthetic oligonucleotide
  Sense strand starting at position 1961 of SEQ ID NO: 1883789
ugacaaauucuggguacuc

SEQ ID NO: 2216623 - RNA, 19 nt, Artificial Sequence
  Description of Artificial Sequence: Synthetic oligonucleotide
  Antisense strand to SEQ ID NO: 2216622
gaguacccagaauuuguca

SEQ ID NO: 2216624 - RNA, 19 nt, Artificial Sequence
  Description of Artificial Sequence: Synthetic oligonucleotide
  Sense strand starting at position 1621 of SEQ ID NO: 1883789
gauauuacaguuggagcaa

SEQ ID NO: 2216625 - RNA, 19 nt, Artificial Sequence
  Description of Artificial Sequence: Synthetic oligonucleotide
  Antisense strand to SEQ ID NO: 2216624
uugcuccaacuguaauauc

SEQ ID NO: 2216626 - RNA, 19 nt, Artificial Sequence
  Description of Artificial Sequence: Synthetic oligonucleotide
  Sense strand starting at position 1740 of SEQ ID NO: 1883789
auuuguucccaguguuacu

SEQ ID NO: 2216627 - RNA, 19 nt, Artificial Sequence
  Description of Artificial Sequence: Synthetic oligonucleotide
  Antisense strand to SEQ ID NO: 2216626
aguaacacugggaacaaau

SEQ ID NO: 2216628 - RNA, 19 nt, Artificial Sequence
  Description of Artificial Sequence: Synthetic oligonucleotide
  Sense strand starting at position 2910 of SEQ ID NO: 1883789
gcagcacaauacuuggaaa

SEQ ID NO: 2216629 - RNA, 19 nt, Artificial Sequence
  Description of Artificial Sequence: Synthetic oligonucleotide
  Antisense strand to SEQ ID NO: 2216628
uuuccaaguauugugcugc

SEQ ID NO: 2216630 - RNA, 19 nt, Artificial Sequence
  Description of Artificial Sequence: Synthetic oligonucleotide
  Sense strand starting at position 580 of SEQ ID NO: 1883789
cugcaagaaaucugggagu

SEQ ID NO: 2216631 - RNA, 19 nt, Artificial Sequence
  Description of Artificial Sequence: Synthetic oligonucleotide
  Antisense strand to SEQ ID NO: 2216630
acucccagauuucuugcag

SEQ ID NO: 2216632 - RNA, 19 nt, Artificial Sequence
  Description of Artificial Sequence: Synthetic oligonucleotide
  Sense strand starting at position 1757 of SEQ ID NO: 1883789
cuuagcaaacuuugacuga

SEQ ID NO: 2216633 - RNA, 19 nt, Artificial Sequence
  Description of Artificial Sequence: Synthetic oligonucleotide
  Antisense strand to SEQ ID NO: 2216632
ucagucaaaguuugcuaag

SEQ ID NO: 2216634 - RNA, 19 nt, Artificial Sequence
  Description of Artificial Sequence: Synthetic oligonucleotide
  Sense strand starting at position 2518 of SEQ ID NO: 1883789
agcugaauccuccauguua

SEQ ID NO: 2216635 - RNA, 19 nt, Artificial Sequence
  Description of Artificial Sequence: Synthetic oligonucleotide
  Antisense strand to SEQ ID NO: 2216634
uaacauggaggauucagcu

SEQ ID NO: 2216636 - RNA, 19 nt, Artificial Sequence
  Description of Artificial Sequence: Synthetic oligonucleotide
  Sense strand starting at position 2492 of SEQ ID NO: 1883789
uaugaaaguugccuuagag

SEQ ID NO: 2216637 - RNA, 19 nt, Artificial Sequence
  Description of Artificial Sequence: Synthetic oligonucleotide
  Antisense strand to SEQ ID NO: 2216636
cucuaaggcaacuuucaua

SEQ ID NO: 2216638 - RNA, 19 nt, Artificial Sequence
  Description of Artificial Sequence: Synthetic oligonucleotide
  Sense strand starting at position 1300 of SEQ ID NO: 1883789
auuagagggacguguugaa

SEQ ID NO: 2216639 - RNA, 19 nt, Artificial Sequence
  Description of Artificial Sequence: Synthetic oligonucleotide
  Antisense strand to SEQ ID NO: 2216638
uucaacacgucccucuaau

SEQ ID NO: 2216640 - RNA, 19 nt, Artificial Sequence
  Description of Artificial Sequence: Synthetic oligonucleotide
  Sense strand starting at position 3651 of SEQ ID NO: 1883789
cugagagcucagcaucauu

SEQ ID NO: 2216641 - RNA, 19 nt, Artificial Sequence
  Description of Artificial Sequence: Synthetic oligonucleotide
  Antisense strand to SEQ ID NO: 2216640
aaugaugcugagcucucag

SEQ ID NO: 2216642 - RNA, 19 nt, Artificial Sequence
  Description of Artificial Sequence: Synthetic oligonucleotide
  Sense strand starting at position 1850 of SEQ ID NO: 1883789
ggaauuauguaguuuacug

SEQ ID NO: 2216643 - RNA, 19 nt, Artificial Sequence
  Description of Artificial Sequence: Synthetic oligonucleotide
  Antisense strand to SEQ ID NO: 2216642
caguaaacuacauaauucc

SEQ ID NO: 2216644 - RNA, 19 nt, Artificial Sequence
  Description of Artificial Sequence: Synthetic oligonucleotide
  Sense strand starting at position 2644 of SEQ ID NO: 1883789
aggcauuguccugaaucuu

SEQ ID NO: 2216645 - RNA, 19 nt, Artificial Sequence
  Description of Artificial Sequence: Synthetic oligonucleotide
  Antisense strand to SEQ ID NO: 2216644
aagauucaggacaaugccu

SEQ ID NO: 2216646 - RNA, 19 nt, Artificial Sequence
  Description of Artificial Sequence: Synthetic oligonucleotide
  Sense strand starting at position 1620 of SEQ ID NO: 1883789
ugauauuacaguuggagca

SEQ ID NO: 2216647 - RNA, 19 nt, Artificial Sequence
  Description of Artificial Sequence: Synthetic oligonucleotide
  Antisense strand to SEQ ID NO: 2216646
ugcuccaacuguaauauca

SEQ ID NO: 2216648 - RNA, 19 nt, Artificial Sequence
  Description of Artificial Sequence: Synthetic oligonucleotide
  Sense strand starting at position 1309 of SEQ ID NO: 1883789
acguguugaaaucacaagu

SEQ ID NO: 2216649 - RNA, 19 nt, Artificial Sequence
  Description of Artificial Sequence: Synthetic oligonucleotide
  Antisense strand to SEQ ID NO: 2216648
acuugugauuucaacacgu

SEQ ID NO: 2216650 - RNA, 19 nt, Artificial Sequence
  Description of Artificial Sequence: Synthetic oligonucleotide
  Sense strand starting at position 3977 of SEQ ID NO: 1883789
ggcacugauuguuugaaga

SEQ ID NO: 2216651 - RNA, 19 nt, Artificial Sequence
  Description of Artificial Sequence: Synthetic oligonucleotide
  Antisense strand to SEQ ID NO: 2216650
ucuucaaacaaucagugcc

SEQ ID NO: 2216652 - RNA, 19 nt, Artificial Sequence
  Description of Artificial Sequence: Synthetic oligonucleotide
  Sense strand starting at position 3670 of SEQ ID NO: 1883789
cgugaaagccguagagucu

SEQ ID NO: 2216653 - RNA, 19 nt, Artificial Sequence
  Description of Artificial Sequence: Synthetic oligonucleotide
  Antisense strand to SEQ ID NO: 2216652
agacucuacggcuuucacg

SEQ ID NO: 2216654 - RNA, 19 nt, Artificial Sequence
  Description of Artificial Sequence: Synthetic oligonucleotide
  Sense strand starting at position 3495 of SEQ ID NO: 1883790
guaauuucgguauagcgaa

SEQ ID NO: 2216655 - RNA, 19 nt, Artificial Sequence
  Description of Artificial Sequence: Synthetic oligonucleotide
  Antisense strand to SEQ ID NO: 2216654
uucgcuauaccgaaauuac

SEQ ID NO: 2216656 - RNA, 19 nt, Artificial Sequence
  Description of Artificial Sequence: Synthetic oligonucleotide
  Sense strand starting at position 2860 of SEQ ID NO: 1883790
ugaaaugaucuuuagccac

SEQ ID NO: 2216657 - RNA, 19 nt, Artificial Sequence
  Description of Artificial Sequence: Synthetic oligonucleotide
  Antisense strand to SEQ ID NO: 2216656
guggcuaaagaucauuuca

SEQ ID NO: 2216658 - RNA, 19 nt, Artificial Sequence
  Description of Artificial Sequence: Synthetic oligonucleotide
  Sense strand starting at position 3554 of SEQ ID NO: 1883790
cuuucuuugcaagagauga

SEQ ID NO: 2216659 - RNA, 19 nt, Artificial Sequence
  Description of Artificial Sequence: Synthetic oligonucleotide
  Antisense strand to SEQ ID NO: 2216658
ucaucucuugcaaagaaag

SEQ ID NO: 2216660 - RNA, 19 nt, Artificial Sequence
  Description of Artificial Sequence: Synthetic oligonucleotide
  Sense strand starting at position 3160 of SEQ ID NO: 1883790
agacguuggcgugcuaaac

SEQ ID NO: 2216661 - RNA, 19 nt, Artificial Sequence
  Description of Artificial Sequence: Synthetic oligonucleotide
  Antisense strand to SEQ ID NO: 2216660
guuuagcacgccaacgucu

SEQ ID NO: 2216662 - RNA, 19 nt, Artificial Sequence
  Description of Artificial Sequence: Synthetic oligonucleotide
  Sense strand starting at position 3351 of SEQ ID NO: 1883790
uuggguagguaauuagaaa

SEQ ID NO: 2216663 - RNA, 19 nt, Artificial Sequence
  Description of Artificial Sequence: Synthetic oligonucleotide
  Antisense strand to SEQ ID NO: 2216662
uuucuaauuaccuacccaa

SEQ ID NO: 2216664 - RNA, 19 nt, Artificial Sequence
  Description of Artificial Sequence: Synthetic oligonucleotide
  Sense strand starting at position 3083 of SEQ ID NO: 1883790
cuaggaugcggcagugauc

SEQ ID NO: 2216665 - RNA, 19 nt, Artificial Sequence
  Description of Artificial Sequence: Synthetic oligonucleotide
  Antisense strand to SEQ ID NO: 2216664
gaucacugccgcauccuag

SEQ ID NO: 2216666 - RNA, 19 nt, Artificial Sequence
  Description of Artificial Sequence: Synthetic oligonucleotide
  Sense strand starting at position 3111 of SEQ ID NO: 1883790
gcuauuuggaagugucauu

SEQ ID NO: 2216667 - RNA, 19 nt, Artificial Sequence
  Description of Artificial Sequence: Synthetic oligonucleotide
  Antisense strand to SEQ ID NO: 2216666
aaugacacuuccaaauagc

SEQ ID NO: 2216668 - RNA, 19 nt, Artificial Sequence
  Description of Artificial Sequence: Synthetic oligonucleotide
  Sense strand starting at position 3705 of SEQ ID NO: 1883790
ggaauagugcuucacugag

SEQ ID NO: 2216669 - RNA, 19 nt, Artificial Sequence
  Description of Artificial Sequence: Synthetic oligonucleotide
  Antisense strand to SEQ ID NO: 2216668
cucagugaagcacuauucc

SEQ ID NO: 2216670 - RNA, 19 nt, Artificial Sequence
  Description of Artificial Sequence: Synthetic oligonucleotide
  Sense strand starting at position 3819 of SEQ ID NO: 1883790
gcauuagauguggaaucug

SEQ ID NO: 2216671 - RNA, 19 nt, Artificial Sequence
  Description of Artificial Sequence: Synthetic oligonucleotide
  Antisense strand to SEQ ID NO: 2216670
cagauuccacaucuaaugc

SEQ ID NO: 2216672 - RNA, 19 nt, Artificial Sequence
  Description of Artificial Sequence: Synthetic oligonucleotide
  Sense strand starting at position 3177 of SEQ ID NO: 1883790
accugagagggcugagauu

SEQ ID NO: 2216673 - RNA, 19 nt, Artificial Sequence
  Description of Artificial Sequence: Synthetic oligonucleotide
  Antisense strand to SEQ ID NO: 2216672
aaucucagcccucucaggu

SEQ ID NO: 2216674 - RNA, 19 nt, Artificial Sequence
  Description of Artificial Sequence: Synthetic oligonucleotide
  Sense strand starting at position 92 of SEQ ID NO: 1883790
augugauguguccaaagag

SEQ ID NO: 2216675 - RNA, 19 nt, Artificial Sequence
  Description of Artificial Sequence: Synthetic oligonucleotide
  Antisense strand to SEQ ID NO: 2216674
cucuuuggacacaucacau

SEQ ID NO: 2216676 - RNA, 19 nt, Artificial Sequence
  Description of Artificial Sequence: Synthetic oligonucleotide
  Sense strand starting at position 2759 of SEQ ID NO: 1883790
cuacguugucauucgcuga

SEQ ID NO: 2216677 - RNA, 19 nt, Artificial Sequence
  Description of Artificial Sequence: Synthetic oligonucleotide
  Antisense strand to SEQ ID NO: 2216676
ucagcgaaugacaacguag

SEQ ID NO: 2216678 - RNA, 19 nt, Artificial Sequence
  Description of Artificial Sequence: Synthetic oligonucleotide
  Sense strand starting at position 1120 of SEQ ID NO: 1883790
uugugugcuccaguucuuu

SEQ ID NO: 2216679 - RNA, 19 nt, Artificial Sequence
  Description of Artificial Sequence: Synthetic oligonucleotide
  Antisense strand to SEQ ID NO: 2216678
aaagaacuggagcacacaa

SEQ ID NO: 2216680 - RNA, 19 nt, Artificial Sequence
  Description of Artificial Sequence: Synthetic oligonucleotide
  Sense strand starting at position 2859 of SEQ ID NO: 1883790
augaaaugaucuuuagcca

SEQ ID NO: 2216681 - RNA, 19 nt, Artificial Sequence
  Description of Artificial Sequence: Synthetic oligonucleotide
  Antisense strand to SEQ ID NO: 2216680
uggcuaaagaucauuucau

SEQ ID NO: 2216682 - RNA, 19 nt, Artificial Sequence
  Description of Artificial Sequence: Synthetic oligonucleotide
  Sense strand starting at position 3011 of SEQ ID NO: 1883790
gaaauugaccucgggaucu

SEQ ID NO: 2216683 - RNA, 19 nt, Artificial Sequence
  Description of Artificial Sequence: Synthetic oligonucleotide
  Antisense strand to SEQ ID NO: 2216682
agaucccgaggucaauuuc

SEQ ID NO: 2216684 - RNA, 19 nt, Artificial Sequence
  Description of Artificial Sequence: Synthetic oligonucleotide
  Sense strand starting at position 3010 of SEQ ID NO: 1883790
ugaaauugaccucgggauc

SEQ ID NO: 2216685 - RNA, 19 nt, Artificial Sequence
  Description of Artificial Sequence: Synthetic oligonucleotide
  Antisense strand to SEQ ID NO: 2216684
gaucccgaggucaauuuca

SEQ ID NO: 2216686 - RNA, 19 nt, Artificial Sequence
  Description of Artificial Sequence: Synthetic oligonucleotide
  Sense strand starting at position 3556 of SEQ ID NO: 1883790
uucuuugcaagagaugagu

SEQ ID NO: 2216687 - RNA, 19 nt, Artificial Sequence
  Description of Artificial Sequence: Synthetic oligonucleotide
  Antisense strand to SEQ ID NO: 2216686
acucaucucuugcaaagaa

SEQ ID NO: 2216688 - RNA, 19 nt, Artificial Sequence
  Description of Artificial Sequence: Synthetic oligonucleotide
  Sense strand starting at position 74 of SEQ ID NO: 1883790
ucguacaaacuguaaauca

SEQ ID NO: 2216689 - RNA, 19 nt, Artificial Sequence
  Description of Artificial Sequence: Synthetic oligonucleotide
  Antisense strand to SEQ ID NO: 2216688
ugauuuacaguuuguacga

SEQ ID NO: 2216690 - RNA, 19 nt, Artificial Sequence
  Description of Artificial Sequence: Synthetic oligonucleotide
  Sense strand starting at position 127 of SEQ ID NO: 1883790
cgucuaucacuagaaucca

SEQ ID NO: 2216691 - RNA, 19 nt, Artificial Sequence
  Description of Artificial Sequence: Synthetic oligonucleotide
  Antisense strand to SEQ ID NO: 2216690
uggauucuagugauagacg

SEQ ID NO: 2216692 - RNA, 19 nt, Artificial Sequence
  Description of Artificial Sequence: Synthetic oligonucleotide
  Sense strand starting at position 606 of SEQ ID NO: 1883790
ucucuucuuccaggagaua

SEQ ID NO: 2216693 - RNA, 19 nt, Artificial Sequence
  Description of Artificial Sequence: Synthetic oligonucleotide
  Antisense strand to SEQ ID NO: 2216692
uaucuccuggaagaagaga

SEQ ID NO: 2216694 - RNA, 19 nt, Artificial Sequence
  Description of Artificial Sequence: Synthetic oligonucleotide
  Sense strand starting at position 3448 of SEQ ID NO: 1883790
gaagauaaauggcuccgau

SEQ ID NO: 2216695 - RNA, 19 nt, Artificial Sequence
  Description of Artificial Sequence: Synthetic oligonucleotide
  Antisense strand to SEQ ID NO: 2216694
aucggagccauuuaucuuc

SEQ ID NO: 2216696 - RNA, 19 nt, Artificial Sequence
  Description of Artificial Sequence: Synthetic oligonucleotide
  Sense strand starting at position 1316 of SEQ ID NO: 1883790
ggacacugaaaucguaauu

SEQ ID NO: 2216697 - RNA, 19 nt, Artificial Sequence
  Description of Artificial Sequence: Synthetic oligonucleotide
  Antisense strand to SEQ ID NO: 2216696
aauuacgauuucagugucc

SEQ ID NO: 2216698 - RNA, 19 nt, Artificial Sequence
  Description of Artificial Sequence: Synthetic oligonucleotide
  Sense strand starting at position 426 of SEQ ID NO: 1883790
gcagaaucagcagauugua

SEQ ID NO: 2216699 - RNA, 19 nt, Artificial Sequence
  Description of Artificial Sequence: Synthetic oligonucleotide
  Antisense strand to SEQ ID NO: 2216698
uacaaucugcugauucugc

SEQ ID NO: 2216700 - RNA, 19 nt, Artificial Sequence
  Description of Artificial Sequence: Synthetic oligonucleotide
  Sense strand starting at position 602 of SEQ ID NO: 1883790
ugauucucuucuuccagga

SEQ ID NO: 2216701 - RNA, 19 nt, Artificial Sequence
  Description of Artificial Sequence: Synthetic oligonucleotide
  Antisense strand to SEQ ID NO: 2216700
uccuggaagaagagaauca

SEQ ID NO: 2216702 - RNA, 19 nt, Artificial Sequence
  Description of Artificial Sequence: Synthetic oligonucleotide
  Sense strand starting at position 3493 of SEQ ID NO: 1883790
guguaauuucgguauagcg

SEQ ID NO: 2216703 - RNA, 19 nt, Artificial Sequence
  Description of Artificial Sequence: Synthetic oligonucleotide
  Antisense strand to SEQ ID NO: 2216702
cgcuauaccgaaauuacac

SEQ ID NO: 2216704 - RNA, 19 nt, Artificial Sequence
  Description of Artificial Sequence: Synthetic oligonucleotide
  Sense strand starting at position 3492 of SEQ ID NO: 1883790
aguguaauuucgguauagc

SEQ ID NO: 2216705 - RNA, 19 nt, Artificial Sequence
  Description of Artificial Sequence: Synthetic oligonucleotide
  Antisense strand to SEQ ID NO: 2216704
gcuauaccgaaauuacacu

SEQ ID NO: 2216706 - RNA, 19 nt, Artificial Sequence
  Description of Artificial Sequence: Synthetic oligonucleotide
  Sense strand starting at position 525 of SEQ ID NO: 1883790
acaggacagucugauauuu

SEQ ID NO: 2216707 - RNA, 19 nt, Artificial Sequence
  Description of Artificial Sequence: Synthetic oligonucleotide
  Antisense strand to SEQ ID NO: 2216706
aaauaucagacuguccugu

SEQ ID NO: 2216708 - RNA, 19 nt, Artificial Sequence
  Description of Artificial Sequence: Synthetic oligonucleotide
  Sense strand starting at position 3862 of SEQ ID NO: 1883790
auauguaugagguagcuuu

SEQ ID NO: 2216709 - RNA, 19 nt, Artificial Sequence
  Description of Artificial Sequence: Synthetic oligonucleotide
  Antisense strand to SEQ ID NO: 2216708
aaagcuaccucauacauau

SEQ ID NO: 2216710 - RNA, 19 nt, Artificial Sequence
  Description of Artificial Sequence: Synthetic oligonucleotide
  Sense strand starting at position 565 of SEQ ID NO: 1883790
aggacuucuuacucuguau

SEQ ID NO: 2216711 - RNA, 19 nt, Artificial Sequence
  Description of Artificial Sequence: Synthetic oligonucleotide
  Antisense strand to SEQ ID NO: 2216710
auacagaguaagaaguccu

SEQ ID NO: 2216712 - RNA, 19 nt, Artificial Sequence
  Description of Artificial Sequence: Synthetic oligonucleotide
  Sense strand starting at position 2206 of SEQ ID NO: 1883790
gccaauuagcgcucggcua

SEQ ID NO: 2216713 - RNA, 19 nt, Artificial Sequence
  Description of Artificial Sequence: Synthetic oligonucleotide
  Antisense strand to SEQ ID NO: 2216712
uagccgagcgcuaauuggc

SEQ ID NO: 2216714 - RNA, 19 nt, Artificial Sequence
  Description of Artificial Sequence: Synthetic oligonucleotide
  Sense strand starting at position 3105 of SEQ ID NO: 1883790
gcuguugcuauuuggaagu

SEQ ID NO: 2216715 - RNA, 19 nt, Artificial Sequence
  Description of Artificial Sequence: Synthetic oligonucleotide
  Antisense strand to SEQ ID NO: 2216714
acuuccaaauagcaacagc

SEQ ID NO: 2216716 - RNA, 19 nt, Artificial Sequence
  Description of Artificial Sequence: Synthetic oligonucleotide
  Sense strand starting at position 1349 of SEQ ID NO: 1883790
cgugucacaaaguauuaua

SEQ ID NO: 2216717 - RNA, 19 nt, Artificial Sequence
  Description of Artificial Sequence: Synthetic oligonucleotide
  Antisense strand to SEQ ID NO: 2216716
uauaauacuuugugacacg

SEQ ID NO: 2216718 - RNA, 19 nt, Artificial Sequence
  Description of Artificial Sequence: Synthetic oligonucleotide
  Sense strand starting at position 1028 of SEQ ID NO: 1883790
guagguucuuagguaaaca

SEQ ID NO: 2216719 - RNA, 19 nt, Artificial Sequence
  Description of Artificial Sequence: Synthetic oligonucleotide
  Antisense strand to SEQ ID NO: 2216718
uguuuaccuaagaaccuac

SEQ ID NO: 2216720 - RNA, 19 nt, Artificial Sequence
  Description of Artificial Sequence: Synthetic oligonucleotide
  Sense strand starting at position 3923 of SEQ ID NO: 1883790
cagaguuguucuuugauag

SEQ ID NO: 2216721 - RNA, 19 nt, Artificial Sequence
  Description of Artificial Sequence: Synthetic oligonucleotide
  Antisense strand to SEQ ID NO: 2216720
cuaucaaagaacaacucug

SEQ ID NO: 2216722 - RNA, 19 nt, Artificial Sequence
  Description of Artificial Sequence: Synthetic oligonucleotide
  Sense strand starting at position 3817 of SEQ ID NO: 1883790
uugcauuagauguggaauc

SEQ ID NO: 2216723 - RNA, 19 nt, Artificial Sequence
  Description of Artificial Sequence: Synthetic oligonucleotide
  Antisense strand to SEQ ID NO: 2216722
gauuccacaucuaaugcaa

SEQ ID NO: 2216724 - RNA, 19 nt, Artificial Sequence
  Description of Artificial Sequence: Synthetic oligonucleotide
  Sense strand starting at position 3930 of SEQ ID NO: 1883790
guucuuugauagcuaaaca

SEQ ID NO: 2216725 - RNA, 19 nt, Artificial Sequence
  Description of Artificial Sequence: Synthetic oligonucleotide
  Antisense strand to SEQ ID NO: 2216724
uguuuagcuaucaaagaac

SEQ ID NO: 2216726 - RNA, 19 nt, Artificial Sequence
  Description of Artificial Sequence: Synthetic oligonucleotide
  Sense strand starting at position 3549 of SEQ ID NO: 1883790
aguaacuuucuuugcaaga

SEQ ID NO: 2216727 - RNA, 19 nt, Artificial Sequence
  Description of Artificial Sequence: Synthetic oligonucleotide
  Antisense strand to SEQ ID NO: 2216726
ucuugcaaagaaaguuacu

SEQ ID NO: 2216728 - RNA, 19 nt, Artificial Sequence
  Description of Artificial Sequence: Synthetic oligonucleotide
  Sense strand starting at position 3550 of SEQ ID NO: 1883790
guaacuuucuuugcaagag

SEQ ID NO: 2216729 - RNA, 19 nt, Artificial Sequence
  Description of Artificial Sequence: Synthetic oligonucleotide
  Antisense strand to SEQ ID NO: 2216728
cucuugcaaagaaaguuac

SEQ ID NO: 2216730 - RNA, 19 nt, Artificial Sequence
  Description of Artificial Sequence: Synthetic oligonucleotide
  Sense strand starting at position 3869 of SEQ ID NO: 1883790
ugagguagcuuucuaaacu

SEQ ID NO: 2216731 - RNA, 19 nt, Artificial Sequence
  Description of Artificial Sequence: Synthetic oligonucleotide
  Antisense strand to SEQ ID NO: 2216730
aguuuagaaagcuaccuca

SEQ ID NO: 2216732 - RNA, 19 nt, Artificial Sequence
  Description of Artificial Sequence: Synthetic oligonucleotide
  Sense strand starting at position 161 of SEQ ID NO: 1883790
cauggaauaucuguguagu

SEQ ID NO: 2216733 - RNA, 19 nt, Artificial Sequence
  Description of Artificial Sequence: Synthetic oligonucleotide
  Antisense strand to SEQ ID NO: 2216732
acuacacagauauuccaug

SEQ ID NO: 2216734 - RNA, 19 nt, Artificial Sequence
  Description of Artificial Sequence: Synthetic oligonucleotide
  Sense strand starting at position 472 of SEQ ID NO: 1883791
uccaaaucugcugaacuga

SEQ ID NO: 2216735 - RNA, 19 nt, Artificial Sequence
  Description of Artificial Sequence: Synthetic oligonucleotide
  Antisense strand to SEQ ID NO: 2216734
ucaguucagcagauuugga

SEQ ID NO: 2216736 - RNA, 19 nt, Artificial Sequence
  Description of Artificial Sequence: Synthetic oligonucleotide
  Sense strand starting at position 447 of SEQ ID NO: 1883791
ugaugaucuccacauccga

SEQ ID NO: 2216737 - RNA, 19 nt, Artificial Sequence
  Description of Artificial Sequence: Synthetic oligonucleotide
  Antisense strand to SEQ ID NO: 2216736
ucggauguggagaucauca

SEQ ID NO: 2216738 - RNA, 19 nt, Artificial Sequence
  Description of Artificial Sequence: Synthetic oligonucleotide
  Sense strand starting at position 1508 of SEQ ID NO: 1883791
cugacagacucuuuccaga

SEQ ID NO: 2216739 - RNA, 19 nt, Artificial Sequence
  Description of Artificial Sequence: Synthetic oligonucleotide
  Antisense strand to SEQ ID NO: 2216738
ucuggaaagagucugucag

SEQ ID NO: 2216740 - RNA, 19 nt, Artificial Sequence
  Description of Artificial Sequence: Synthetic oligonucleotide
  Sense strand starting at position 3624 of SEQ ID NO: 1883791
cuuuacuggccacaagauu

SEQ ID NO: 2216741 - RNA, 19 nt, Artificial Sequence
  Description of Artificial Sequence: Synthetic oligonucleotide
  Antisense strand to SEQ ID NO: 2216740
aaucuuguggccaguaaag

SEQ ID NO: 2216742 - RNA, 19 nt, Artificial Sequence
  Description of Artificial Sequence: Synthetic oligonucleotide
  Sense strand starting at position 2762 of SEQ ID NO: 1883791
ugacuauaucccuagcuag

SEQ ID NO: 2216743 - RNA, 19 nt, Artificial Sequence
  Description of Artificial Sequence: Synthetic oligonucleotide
  Antisense strand to SEQ ID NO: 2216742
cuagcuagggauauaguca

SEQ ID NO: 2216744 - RNA, 19 nt, Artificial Sequence
  Description of Artificial Sequence: Synthetic oligonucleotide
  Sense strand starting at position 3622 of SEQ ID NO: 1883791
uucuuuacuggccacaaga

SEQ ID NO: 2216745 - RNA, 19 nt, Artificial Sequence
  Description of Artificial Sequence: Synthetic oligonucleotide
  Antisense strand to SEQ ID NO: 2216744
ucuuguggccaguaaagaa

SEQ ID NO: 2216746 - RNA, 19 nt, Artificial Sequence
  Description of Artificial Sequence: Synthetic oligonucleotide
  Sense strand starting at position 790 of SEQ ID NO: 1883791
augaaugcacuuuggaaca

SEQ ID NO: 2216747 - RNA, 19 nt, Artificial Sequence
  Description of Artificial Sequence: Synthetic oligonucleotide
  Antisense strand to SEQ ID NO: 2216746
uguuccaaagugcauucau

SEQ ID NO: 2216748 - RNA, 19 nt, Artificial Sequence
  Description of Artificial Sequence: Synthetic oligonucleotide
  Sense strand starting at position 3947 of SEQ ID NO: 1883791
uugggaagcugacuuaaua

SEQ ID NO: 2216749 - RNA, 19 nt, Artificial Sequence
  Description of Artificial Sequence: Synthetic oligonucleotide
  Antisense strand to SEQ ID NO: 2216748
uauuaagucagcuucccaa

SEQ ID NO: 2216750 - RNA, 19 nt, Artificial Sequence
  Description of Artificial Sequence: Synthetic oligonucleotide
  Sense strand starting at position 277 of SEQ ID NO: 1883791
ggucaaguuccacaucaca

SEQ ID NO: 2216751 - RNA, 19 nt, Artificial Sequence
  Description of Artificial Sequence: Synthetic oligonucleotide
  Antisense strand to SEQ ID NO: 2216750
ugugauguggaacuugacc

SEQ ID NO: 2216752 - RNA, 19 nt, Artificial Sequence
  Description of Artificial Sequence: Synthetic oligonucleotide
  Sense strand starting at position 1279 of SEQ ID NO: 1883791
agaagagguuaagucacuu

SEQ ID NO: 2216753 - RNA, 19 nt, Artificial Sequence
  Description of Artificial Sequence: Synthetic oligonucleotide
  Antisense strand to SEQ ID NO: 2216752
aagugacuuaaccucuucu

SEQ ID NO: 2216754 - RNA, 19 nt, Artificial Sequence
  Description of Artificial Sequence: Synthetic oligonucleotide
  Sense strand starting at position 105 of SEQ ID NO: 1883791
auguccaguagucagauaa

SEQ ID NO: 2216755 - RNA, 19 nt, Artificial Sequence
  Description of Artificial Sequence: Synthetic oligonucleotide
  Antisense strand to SEQ ID NO: 2216754
uuaucugacuacuggacau

SEQ ID NO: 2216756 - RNA, 19 nt, Artificial Sequence
  Description of Artificial Sequence: Synthetic oligonucleotide
  Sense strand starting at position 2982 of SEQ ID NO: 1883791
aggagaauuugacauuccu

SEQ ID NO: 2216757 - RNA, 19 nt, Artificial Sequence
  Description of Artificial Sequence: Synthetic oligonucleotide
  Antisense strand to SEQ ID NO: 2216756
aggaaugucaaauucuccu

SEQ ID NO: 2216758 - RNA, 19 nt, Artificial Sequence
  Description of Artificial Sequence: Synthetic oligonucleotide
  Sense strand starting at position 1426 of SEQ ID NO: 1883791
gguacuagggcccaucaua

SEQ ID NO: 2216759 - RNA, 19 nt, Artificial Sequence
  Description of Artificial Sequence: Synthetic oligonucleotide
  Antisense strand to SEQ ID NO: 2216758
uaugaugggcccuaguacc

SEQ ID NO: 2216760 - RNA, 19 nt, Artificial Sequence
  Description of Artificial Sequence: Synthetic oligonucleotide
  Sense strand starting at position 372 of SEQ ID NO: 1883791
agcacuuaaccugaguuau

SEQ ID NO: 2216761 - RNA, 19 nt, Artificial Sequence
  Description of Artificial Sequence: Synthetic oligonucleotide
  Antisense strand to SEQ ID NO: 2216760
auaacucagguuaagugcu

SEQ ID NO: 2216762 - RNA, 19 nt, Artificial Sequence
  Description of Artificial Sequence: Synthetic oligonucleotide
  Sense strand starting at position 396 of SEQ ID NO: 1883791
ccuauaacugcccagugaa

SEQ ID NO: 2216763 - RNA, 19 nt, Artificial Sequence
  Description of Artificial Sequence: Synthetic oligonucleotide
  Antisense strand to SEQ ID NO: 2216762
uucacugggcaguuauagg

SEQ ID NO: 2216764 - RNA, 19 nt, Artificial Sequence
  Description of Artificial Sequence: Synthetic oligonucleotide
  Sense strand starting at position 624 of SEQ ID NO: 1883791
agagaagaguucuuucccu

SEQ ID NO: 2216765 - RNA, 19 nt, Artificial Sequence
  Description of Artificial Sequence: Synthetic oligonucleotide
  Antisense strand to SEQ ID NO: 2216764
agggaaagaacucuucucu

SEQ ID NO: 2216766 - RNA, 19 nt, Artificial Sequence
  Description of Artificial Sequence: Synthetic oligonucleotide
  Sense strand starting at position 399 of SEQ ID NO: 1883791
auaacugcccagugaagga

SEQ ID NO: 2216767 - RNA, 19 nt, Artificial Sequence
  Description of Artificial Sequence: Synthetic oligonucleotide
  Antisense strand to SEQ ID NO: 2216766
uccuucacugggcaguuau

SEQ ID NO: 2216768 - RNA, 19 nt, Artificial Sequence
  Description of Artificial Sequence: Synthetic oligonucleotide
  Sense strand starting at position 2967 of SEQ ID NO: 1883791
guuaauauagacugcagga

SEQ ID NO: 2216769 - RNA, 19 nt, Artificial Sequence
  Description of Artificial Sequence: Synthetic oligonucleotide
  Antisense strand to SEQ ID NO: 2216768
uccugcagucuauauuaac

SEQ ID NO: 2216770 - RNA, 19 nt, Artificial Sequence
  Description of Artificial Sequence: Synthetic oligonucleotide
  Sense strand starting at position 2894 of SEQ ID NO: 1883791
uguguuuacgaugacauaa

SEQ ID NO: 2216771 - RNA, 19 nt, Artificial Sequence
  Description of Artificial Sequence: Synthetic oligonucleotide
  Antisense strand to SEQ ID NO: 2216770
uuaugucaucguaaacaca

SEQ ID NO: 2216772 - RNA, 19 nt, Artificial Sequence
  Description of Artificial Sequence: Synthetic oligonucleotide
  Sense strand starting at position 3832 of SEQ ID NO: 1883791
gugggcuagguauacauau

SEQ ID NO: 2216773 - RNA, 19 nt, Artificial Sequence
  Description of Artificial Sequence: Synthetic oligonucleotide
  Antisense strand to SEQ ID NO: 2216772
auauguauaccuagcccac

SEQ ID NO: 2216774 - RNA, 19 nt, Artificial Sequence
  Description of Artificial Sequence: Synthetic oligonucleotide
  Sense strand starting at position 3414 of SEQ ID NO: 1883791
ugugcuccuccacaaauga

SEQ ID NO: 2216775 - RNA, 19 nt, Artificial Sequence
  Description of Artificial Sequence: Synthetic oligonucleotide
  Antisense strand to SEQ ID NO: 2216774
ucauuuguggaggagcaca

SEQ ID NO: 2216776 - RNA, 19 nt, Artificial Sequence
  Description of Artificial Sequence: Synthetic oligonucleotide
  Sense strand starting at position 565 of SEQ ID NO: 1883791
caugaaggcugggcauaua

SEQ ID NO: 2216777 - RNA, 19 nt, Artificial Sequence
  Description of Artificial Sequence: Synthetic oligonucleotide
  Antisense strand to SEQ ID NO: 2216776
uauaugcccagccuucaug

SEQ ID NO: 2216778 - RNA, 19 nt, Artificial Sequence
  Description of Artificial Sequence: Synthetic oligonucleotide
  Sense strand starting at position 3466 of SEQ ID NO: 1883791
gugugcuccacagauggga

SEQ ID NO: 2216779 - RNA, 19 nt, Artificial Sequence
  Description of Artificial Sequence: Synthetic oligonucleotide
  Antisense strand to SEQ ID NO: 2216778
ucccaucuguggagcacac

SEQ ID NO: 2216780 - RNA, 19 nt, Artificial Sequence
  Description of Artificial Sequence: Synthetic oligonucleotide
  Sense strand starting at position 2804 of SEQ ID NO: 1883791
aaguaucucuaguugggau

SEQ ID NO: 2216781 - RNA, 19 nt, Artificial Sequence
  Description of Artificial Sequence: Synthetic oligonucleotide
  Antisense strand to SEQ ID NO: 2216780
aucccaacuagagauacuu

SEQ ID NO: 2216782 - RNA, 19 nt, Artificial Sequence
  Description of Artificial Sequence: Synthetic oligonucleotide
  Sense strand starting at position 2990 of SEQ ID NO: 1883791
uugacauuccucugaggua

SEQ ID NO: 2216783 - RNA, 19 nt, Artificial Sequence
  Description of Artificial Sequence: Synthetic oligonucleotide
  Antisense strand to SEQ ID NO: 2216782
uaccucagaggaaugucaa

SEQ ID NO: 2216784 - RNA, 19 nt, Artificial Sequence
  Description of Artificial Sequence: Synthetic oligonucleotide
  Sense strand starting at position 1096 of SEQ ID NO: 1883791
cuaggagcuccuuauaguc

SEQ ID NO: 2216785 - RNA, 19 nt, Artificial Sequence
  Description of Artificial Sequence: Synthetic oligonucleotide
  Antisense strand to SEQ ID NO: 2216784
gacuauaaggagcuccuag

SEQ ID NO: 2216786 - RNA, 19 nt, Artificial Sequence
  Description of Artificial Sequence: Synthetic oligonucleotide
  Sense strand starting at position 507 of SEQ ID NO: 1883791
cagaaauguccuggcuaag

SEQ ID NO: 2216787 - RNA, 19 nt, Artificial Sequence
  Description of Artificial Sequence: Synthetic oligonucleotide
  Antisense strand to SEQ ID NO: 2216786
cuuagccaggacauuucug

SEQ ID NO: 2216788 - RNA, 19 nt, Artificial Sequence
  Description of Artificial Sequence: Synthetic oligonucleotide
  Sense strand starting at position 495 of SEQ ID NO: 1883791
guaggucugccucagaaau

SEQ ID NO: 2216789 - RNA, 19 nt, Artificial Sequence
  Description of Artificial Sequence: Synthetic oligonucleotide
  Antisense strand to SEQ ID NO: 2216788
auuucugaggcagaccuac

SEQ ID NO: 2216790 - RNA, 19 nt, Artificial Sequence
  Description of Artificial Sequence: Synthetic oligonucleotide
  Sense strand starting at position 1448 of SEQ ID NO: 1883791
ucucucauuucguuuagca

SEQ ID NO: 2216791 - RNA, 19 nt, Artificial Sequence
  Description of Artificial Sequence: Synthetic oligonucleotide
  Antisense strand to SEQ ID NO: 2216790
ugcuaaacgaaaugagaga

SEQ ID NO: 2216792 - RNA, 19 nt, Artificial Sequence
  Description of Artificial Sequence: Synthetic oligonucleotide
  Sense strand starting at position 3257 of SEQ ID NO: 1883791
agaguaauuugacauaggu

SEQ ID NO: 2216793 - RNA, 19 nt, Artificial Sequence
  Description of Artificial Sequence: Synthetic oligonucleotide
  Antisense strand to SEQ ID NO: 2216792
accuaugucaaauuacucu

SEQ ID NO: 2216794 - RNA, 19 nt, Artificial Sequence
  Description of Artificial Sequence: Synthetic oligonucleotide
  Sense strand starting at position 3354 of SEQ ID NO: 1883791
gucugcgugcggucaugaa

SEQ ID NO: 2216795 - RNA, 19 nt, Artificial Sequence
  Description of Artificial Sequence: Synthetic oligonucleotide
  Antisense strand to SEQ ID NO: 2216794
uucaugaccgcacgcagac

SEQ ID NO: 2216796 - RNA, 19 nt, Artificial Sequence
  Description of Artificial Sequence: Synthetic oligonucleotide
  Sense strand starting at position 104 of SEQ ID NO: 1883791
aauguccaguagucagaua

SEQ ID NO: 2216797 - RNA, 19 nt, Artificial Sequence
  Description of Artificial Sequence: Synthetic oligonucleotide
  Antisense strand to SEQ ID NO: 2216796
uaucugacuacuggacauu

SEQ ID NO: 2216798 - RNA, 19 nt, Artificial Sequence
  Description of Artificial Sequence: Synthetic oligonucleotide
  Sense strand starting at position 3462 of SEQ ID NO: 1883791
ugaggugugcuccacagau

SEQ ID NO: 2216799 - RNA, 19 nt, Artificial Sequence
  Description of Artificial Sequence: Synthetic oligonucleotide
  Antisense strand to SEQ ID NO: 2216798
aucuguggagcacaccuca

SEQ ID NO: 2216800 - RNA, 19 nt, Artificial Sequence
  Description of Artificial Sequence: Synthetic oligonucleotide
  Sense strand starting at position 1558 of SEQ ID NO: 1883791
guguauucugggcagaacu

SEQ ID NO: 2216801 - RNA, 19 nt, Artificial Sequence
  Description of Artificial Sequence: Synthetic oligonucleotide
  Antisense strand to SEQ ID NO: 2216800
aguucugcccagaauacac

SEQ ID NO: 2216802 - RNA, 19 nt, Artificial Sequence
  Description of Artificial Sequence: Synthetic oligonucleotide
  Sense strand starting at position 3386 of SEQ ID NO: 1883791
gugacugguuaaagggaga

SEQ ID NO: 2216803 - RNA, 19 nt, Artificial Sequence
  Description of Artificial Sequence: Synthetic oligonucleotide
  Antisense strand to SEQ ID NO: 2216802
ucucccuuuaaccagucac

SEQ ID NO: 2216804 - RNA, 19 nt, Artificial Sequence
  Description of Artificial Sequence: Synthetic oligonucleotide
  Sense strand starting at position 2883 of SEQ ID NO: 1883791
gauaaugacuuuguguuua

SEQ ID NO: 2216805 - RNA, 19 nt, Artificial Sequence
  Description of Artificial Sequence: Synthetic oligonucleotide
  Antisense strand to SEQ ID NO: 2216804
uaaacacaaagucauuauc

SEQ ID NO: 2216806 - RNA, 19 nt, Artificial Sequence
  Description of Artificial Sequence: Synthetic oligonucleotide
  Sense strand starting at position 3888 of SEQ ID NO: 1883791
gggagaugugcucaccugu

SEQ ID NO: 2216807 - RNA, 19 nt, Artificial Sequence
  Description of Artificial Sequence: Synthetic oligonucleotide
  Antisense strand to SEQ ID NO: 2216806
acaggugagcacaucuccc

SEQ ID NO: 2216808 - RNA, 19 nt, Artificial Sequence
  Description of Artificial Sequence: Synthetic oligonucleotide
  Sense strand starting at position 3826 of SEQ ID NO: 1883791
guaugagugggcuagguau

SEQ ID NO: 2216809 - RNA, 19 nt, Artificial Sequence
  Description of Artificial Sequence: Synthetic oligonucleotide
  Antisense strand to SEQ ID NO: 2216808
auaccuagcccacucauac

SEQ ID NO: 2216810 - RNA, 19 nt, Artificial Sequence
  Description of Artificial Sequence: Synthetic oligonucleotide
  Sense strand starting at position 564 of SEQ ID NO: 1883791
ucaugaaggcugggcauau

SEQ ID NO: 2216811 - RNA, 19 nt, Artificial Sequence
  Description of Artificial Sequence: Synthetic oligonucleotide
  Antisense strand to SEQ ID NO: 2216810
auaugcccagccuucauga

SEQ ID NO: 2216812 - RNA, 19 nt, Artificial Sequence
  Description of Artificial Sequence: Synthetic oligonucleotide
  Sense strand starting at position 2808 of SEQ ID NO: 1883791
aucucuaguugggauuuaa

SEQ ID NO: 2216813 - RNA, 19 nt, Artificial Sequence
  Description of Artificial Sequence: Synthetic oligonucleotide
  Antisense strand to SEQ ID NO: 2216812
uuaaaucccaacuagagau

SEQ ID NO: 2216814 - RNA, 19 nt, Artificial Sequence
  Description of Artificial Sequence: Synthetic oligonucleotide
  Sense strand starting at position 655 of SEQ ID NO: 1883792
uuagaaugcugauugaaga

SEQ ID NO: 2216815 - RNA, 19 nt, Artificial Sequence
  Description of Artificial Sequence: Synthetic oligonucleotide
  Antisense strand to SEQ ID NO: 2216814
ucuucaaucagcauucuaa

SEQ ID NO: 2216816 - RNA, 19 nt, Artificial Sequence
  Description of Artificial Sequence: Synthetic oligonucleotide
  Sense strand starting at position 3155 of SEQ ID NO: 1883792
ucaucagaccgugacaaau

SEQ ID NO: 2216817 - RNA, 19 nt, Artificial Sequence
  Description of Artificial Sequence: Synthetic oligonucleotide
  Antisense strand to SEQ ID NO: 2216816
auuugucacggucugauga

SEQ ID NO: 2216818 - RNA, 19 nt, Artificial Sequence
  Description of Artificial Sequence: Synthetic oligonucleotide
  Sense strand starting at position 3514 of SEQ ID NO: 1883792
gcauauggucuuuaagaaa

SEQ ID NO: 2216819 - RNA, 19 nt, Artificial Sequence
  Description of Artificial Sequence: Synthetic oligonucleotide
  Antisense strand to SEQ ID NO: 2216818
uuucuuaaagaccauaugc

SEQ ID NO: 2216820 - RNA, 19 nt, Artificial Sequence
  Description of Artificial Sequence: Synthetic oligonucleotide
  Sense strand starting at position 3057 of SEQ ID NO: 1883792
agugaauauaacuguagag

SEQ ID NO: 2216821 - RNA, 19 nt, Artificial Sequence
  Description of Artificial Sequence: Synthetic oligonucleotide
  Antisense strand to SEQ ID NO: 2216820
cucuacaguuauauucacu

SEQ ID NO: 2216822 - RNA, 19 nt, Artificial Sequence
  Description of Artificial Sequence: Synthetic oligonucleotide
  Sense strand starting at position 3004 of SEQ ID NO: 1883792
uggguaauacuuggaauua

SEQ ID NO: 2216823 - RNA, 19 nt, Artificial Sequence
  Description of Artificial Sequence: Synthetic oligonucleotide
  Antisense strand to SEQ ID NO: 2216822
uaauuccaaguauuaccca

SEQ ID NO: 2216824 - RNA, 19 nt, Artificial Sequence
  Description of Artificial Sequence: Synthetic oligonucleotide
  Sense strand starting at position 1979 of SEQ ID NO: 1883792
gguuguuuacauuagagau

SEQ ID NO: 2216825 - RNA, 19 nt, Artificial Sequence
  Description of Artificial Sequence: Synthetic oligonucleotide
  Antisense strand to SEQ ID NO: 2216824
aucucuaauguaaacaacc

SEQ ID NO: 2216826 - RNA, 19 nt, Artificial Sequence
  Description of Artificial Sequence: Synthetic oligonucleotide
  Sense strand starting at position 1997 of SEQ ID NO: 1883792
uguguaugaacaugaggaa

SEQ ID NO: 2216827 - RNA, 19 nt, Artificial Sequence
  Description of Artificial Sequence: Synthetic oligonucleotide
  Antisense strand to SEQ ID NO: 2216826
uuccucauguucauacaca

SEQ ID NO: 2216828 - RNA, 19 nt, Artificial Sequence
  Description of Artificial Sequence: Synthetic oligonucleotide
  Sense strand starting at position 3056 of SEQ ID NO: 1883792
uagugaauauaacuguaga

SEQ ID NO: 2216829 - RNA, 19 nt, Artificial Sequence
  Description of Artificial Sequence: Synthetic oligonucleotide
  Antisense strand to SEQ ID NO: 2216828
ucuacaguuauauucacua

SEQ ID NO: 2216830 - RNA, 19 nt, Artificial Sequence
  Description of Artificial Sequence: Synthetic oligonucleotide
  Sense strand starting at position 1445 of SEQ ID NO: 1883792
guucuugauuauuucugca

SEQ ID NO: 2216831 - RNA, 19 nt, Artificial Sequence
  Description of Artificial Sequence: Synthetic oligonucleotide
  Antisense strand to SEQ ID NO: 2216830
ugcagaaauaaucaagaac

SEQ ID NO: 2216832 - RNA, 19 nt, Artificial Sequence
  Description of Artificial Sequence: Synthetic oligonucleotide
  Sense strand starting at position 1987 of SEQ ID NO: 1883792
acauuagagauguguauga

SEQ ID NO: 2216833 - RNA, 19 nt, Artificial Sequence
  Description of Artificial Sequence: Synthetic oligonucleotide
  Antisense strand to SEQ ID NO: 2216832
ucauacacaucucuaaugu

SEQ ID NO: 2216834 - RNA, 19 nt, Artificial Sequence
  Description of Artificial Sequence: Synthetic oligonucleotide
  Sense strand starting at position 1991 of SEQ ID NO: 1883792
uagagauguguaugaacau

SEQ ID NO: 2216835 - RNA, 19 nt, Artificial Sequence
  Description of Artificial Sequence: Synthetic oligonucleotide
  Antisense strand to SEQ ID NO: 2216834
auguucauacacaucucua

SEQ ID NO: 2216836 - RNA, 19 nt, Artificial Sequence
  Description of Artificial Sequence: Synthetic oligonucleotide
  Sense strand starting at position 2769 of SEQ ID NO: 1883792
cuuugugauauaggagauu

SEQ ID NO: 2216837 - RNA, 19 nt, Artificial Sequence
  Description of Artificial Sequence: Synthetic oligonucleotide
  Antisense strand to SEQ ID NO: 2216836
aaucuccuauaucacaaag

SEQ ID NO: 2216838 - RNA, 19 nt, Artificial Sequence
  Description of Artificial Sequence: Synthetic oligonucleotide
  Sense strand starting at position 145 of SEQ ID NO: 1883792
cagaaaggucucuggaccu

SEQ ID NO: 2216839 - RNA, 19 nt, Artificial Sequence
  Description of Artificial Sequence: Synthetic oligonucleotide
  Antisense strand to SEQ ID NO: 2216838
agguccagagaccuuucug

SEQ ID NO: 2216840 - RNA, 19 nt, Artificial Sequence
  Description of Artificial Sequence: Synthetic oligonucleotide
  Sense strand starting at position 3003 of SEQ ID NO: 1883792
cuggguaauacuuggaauu

SEQ ID NO: 2216841 - RNA, 19 nt, Artificial Sequence
  Description of Artificial Sequence: Synthetic oligonucleotide
  Antisense strand to SEQ ID NO: 2216840
aauuccaaguauuacccag

SEQ ID NO: 2216842 - RNA, 19 nt, Artificial Sequence
  Description of Artificial Sequence: Synthetic oligonucleotide
  Sense strand starting at position 3804 of SEQ ID NO: 1883792
gcaggaauaauguggaauu

SEQ ID NO: 2216843 - RNA, 19 nt, Artificial Sequence
  Description of Artificial Sequence: Synthetic oligonucleotide
  Antisense strand to SEQ ID NO: 2216842
aauuccacauuauuccugc

SEQ ID NO: 2216844 - RNA, 19 nt, Artificial Sequence
  Description of Artificial Sequence: Synthetic oligonucleotide
  Sense strand starting at position 1511 of SEQ ID NO: 1883792
ugccauaugccgucaagcu

SEQ ID NO: 2216845 - RNA, 19 nt, Artificial Sequence
  Description of Artificial Sequence: Synthetic oligonucleotide
  Antisense strand to SEQ ID NO: 2216844
agcuugacggcauauggca

SEQ ID NO: 2216846 - RNA, 19 nt, Artificial Sequence
  Description of Artificial Sequence: Synthetic oligonucleotide
  Sense strand starting at position 1752 of SEQ ID NO: 1883792
guugcauuggucguggcaa

SEQ ID NO: 2216847 - RNA, 19 nt, Artificial Sequence
  Description of Artificial Sequence: Synthetic oligonucleotide
  Antisense strand to SEQ ID NO: 2216846
uugccacgaccaaugcaac

SEQ ID NO: 2216848 - RNA, 19 nt, Artificial Sequence
  Description of Artificial Sequence: Synthetic oligonucleotide
  Sense strand starting at position 2781 of SEQ ID NO: 1883792
ggagauuuauguucguguu

SEQ ID NO: 2216849 - RNA, 19 nt, Artificial Sequence
  Description of Artificial Sequence: Synthetic oligonucleotide
  Antisense strand to SEQ ID NO: 2216848
aacacgaacauaaaucucc

SEQ ID NO: 2216850 - RNA, 19 nt, Artificial Sequence
  Description of Artificial Sequence: Synthetic oligonucleotide
  Sense strand starting at position 3419 of SEQ ID NO: 1883792
cugugaagucauugaggag

SEQ ID NO: 2216851 - RNA, 19 nt, Artificial Sequence
  Description of Artificial Sequence: Synthetic oligonucleotide
  Antisense strand to SEQ ID NO: 2216850
cuccucaaugacuucacag

SEQ ID NO: 2216852 - RNA, 19 nt, Artificial Sequence
  Description of Artificial Sequence: Synthetic oligonucleotide
  Sense strand starting at position 3258 of SEQ ID NO: 1883792
uagagccuagagugauuaa

SEQ ID NO: 2216853 - RNA, 19 nt, Artificial Sequence
  Description of Artificial Sequence: Synthetic oligonucleotide
  Antisense strand to SEQ ID NO: 2216852
uuaaucacucuaggcucua

SEQ ID NO: 2216854 - RNA, 19 nt, Artificial Sequence
  Description of Artificial Sequence: Synthetic oligonucleotide
  Sense strand starting at position 3513 of SEQ ID NO: 1883792
agcauauggucuuuaagaa

SEQ ID NO: 2216855 - RNA, 19 nt, Artificial Sequence
  Description of Artificial Sequence: Synthetic oligonucleotide
  Antisense strand to SEQ ID NO: 2216854
uucuuaaagaccauaugcu

SEQ ID NO: 2216856 - RNA, 19 nt, Artificial Sequence
  Description of Artificial Sequence: Synthetic oligonucleotide
  Sense strand starting at position 1983 of SEQ ID NO: 1883792
guuuacauuagagaugugu

SEQ ID NO: 2216857 - RNA, 19 nt, Artificial Sequence
  Description of Artificial Sequence: Synthetic oligonucleotide
  Antisense strand to SEQ ID NO: 2216856
acacaucucuaauguaaac

SEQ ID NO: 2216858 - RNA, 19 nt, Artificial Sequence
  Description of Artificial Sequence: Synthetic oligonucleotide
  Sense strand starting at position 1702 of SEQ ID NO: 1883792
uguguugcccaugaggaaa

SEQ ID NO: 2216859 - RNA, 19 nt, Artificial Sequence
  Description of Artificial Sequence: Synthetic oligonucleotide
  Antisense strand to SEQ ID NO: 2216858
uuuccucaugggcaacaca

SEQ ID NO: 2216860 - RNA, 19 nt, Artificial Sequence
  Description of Artificial Sequence: Synthetic oligonucleotide
  Sense strand starting at position 3796 of SEQ ID NO: 1883792
ugguguuugcaggaauaau

SEQ ID NO: 2216861 - RNA, 19 nt, Artificial Sequence
  Description of Artificial Sequence: Synthetic oligonucleotide
  Antisense strand to SEQ ID NO: 2216860
auuauuccugcaaacacca

SEQ ID NO: 2216862 - RNA, 19 nt, Artificial Sequence
  Description of Artificial Sequence: Synthetic oligonucleotide
  Sense strand starting at position 3154 of SEQ ID NO: 1883792
cucaucagaccgugacaaa

SEQ ID NO: 2216863 - RNA, 19 nt, Artificial Sequence
  Description of Artificial Sequence: Synthetic oligonucleotide
  Antisense strand to SEQ ID NO: 2216862
uuugucacggucugaugag

SEQ ID NO: 2216864 - RNA, 19 nt, Artificial Sequence
  Description of Artificial Sequence: Synthetic oligonucleotide
  Sense strand starting at position 2782 of SEQ ID NO: 1883792
gagauuuauguucguguuu

SEQ ID NO: 2216865 - RNA, 19 nt, Artificial Sequence
  Description of Artificial Sequence: Synthetic oligonucleotide
  Antisense strand to SEQ ID NO: 2216864
aaacacgaacauaaaucuc

SEQ ID NO: 2216866 - RNA, 19 nt, Artificial Sequence
  Description of Artificial Sequence: Synthetic oligonucleotide
  Sense strand starting at position 3408 of SEQ ID NO: 1883792
aggaauccuggcugugaag

SEQ ID NO: 2216867 - RNA, 19 nt, Artificial Sequence
  Description of Artificial Sequence: Synthetic oligonucleotide
  Antisense strand to SEQ ID NO: 2216866
cuucacagccaggauuccu

SEQ ID NO: 2216868 - RNA, 19 nt, Artificial Sequence
  Description of Artificial Sequence: Synthetic oligonucleotide
  Sense strand starting at position 1441 of SEQ ID NO: 1883792
cguuguucuugauuauuuc

SEQ ID NO: 2216869 - RNA, 19 nt, Artificial Sequence
  Description of Artificial Sequence: Synthetic oligonucleotide
  Antisense strand to SEQ ID NO: 2216868
gaaauaaucaagaacaacg

SEQ ID NO: 2216870 - RNA, 19 nt, Artificial Sequence
  Description of Artificial Sequence: Synthetic oligonucleotide
  Sense strand starting at position 1559 of SEQ ID NO: 1883792
ggaguuuggaauugugauu

SEQ ID NO: 2216871 - RNA, 19 nt, Artificial Sequence
  Description of Artificial Sequence: Synthetic oligonucleotide
  Antisense strand to SEQ ID NO: 2216870
aaucacaauuccaaacucc

SEQ ID NO: 2216872 - RNA, 19 nt, Artificial Sequence
  Description of Artificial Sequence: Synthetic oligonucleotide
  Sense strand starting at position 757 of SEQ ID NO: 1883792
uugcguguucucuuuguca

SEQ ID NO: 2216873 - RNA, 19 nt, Artificial Sequence
  Description of Artificial Sequence: Synthetic oligonucleotide
  Antisense strand to SEQ ID NO: 2216872
ugacaaagagaacacgcaa

SEQ ID NO: 2216874 - RNA, 19 nt, Artificial Sequence
  Description of Artificial Sequence: Synthetic oligonucleotide
  Sense strand starting at position 3152 of SEQ ID NO: 1883792
gacucaucagaccgugaca

SEQ ID NO: 2216875 - RNA, 19 nt, Artificial Sequence
  Description of Artificial Sequence: Synthetic oligonucleotide
  Antisense strand to SEQ ID NO: 2216874
ugucacggucugaugaguc

SEQ ID NO: 2216876 - RNA, 19 nt, Artificial Sequence
  Description of Artificial Sequence: Synthetic oligonucleotide
  Sense strand starting at position 2783 of SEQ ID NO: 1883792
agauuuauguucguguuuc

SEQ ID NO: 2216877 - RNA, 19 nt, Artificial Sequence
  Description of Artificial Sequence: Synthetic oligonucleotide
  Antisense strand to SEQ ID NO: 2216876
gaaacacgaacauaaaucu

SEQ ID NO: 2216878 - RNA, 19 nt, Artificial Sequence
  Description of Artificial Sequence: Synthetic oligonucleotide
  Sense strand starting at position 3407 of SEQ ID NO: 1883792
caggaauccuggcugugaa

SEQ ID NO: 2216879 - RNA, 19 nt, Artificial Sequence
  Description of Artificial Sequence: Synthetic oligonucleotide
  Antisense strand to SEQ ID NO: 2216878
uucacagccaggauuccug

SEQ ID NO: 2216880 - RNA, 19 nt, Artificial Sequence
  Description of Artificial Sequence: Synthetic oligonucleotide
  Sense strand starting at position 3161 of SEQ ID NO: 1883792
gaccgugacaaaugauagu

SEQ ID NO: 2216881 - RNA, 19 nt, Artificial Sequence
  Description of Artificial Sequence: Synthetic oligonucleotide
  Antisense strand to SEQ ID NO: 2216880
acuaucauuugucacgguc

SEQ ID NO: 2216882 - RNA, 19 nt, Artificial Sequence
  Description of Artificial Sequence: Synthetic oligonucleotide
  Sense strand starting at position 303 of SEQ ID NO: 1883792
auagcaaaggcguacauua

SEQ ID NO: 2216883 - RNA, 19 nt, Artificial Sequence
  Description of Artificial Sequence: Synthetic oligonucleotide
  Antisense strand to SEQ ID NO: 2216882
uaauguacgccuuugcuau

SEQ ID NO: 2216884 - RNA, 19 nt, Artificial Sequence
  Description of Artificial Sequence: Synthetic oligonucleotide
  Sense strand starting at position 1372 of SEQ ID NO: 1883792
uucccauugccuggaauga

SEQ ID NO: 2216885 - RNA, 19 nt, Artificial Sequence
  Description of Artificial Sequence: Synthetic oligonucleotide
  Antisense strand to SEQ ID NO: 2216884
ucauuccaggcaaugggaa

SEQ ID NO: 2216886 - RNA, 19 nt, Artificial Sequence
  Description of Artificial Sequence: Synthetic oligonucleotide
  Sense strand starting at position 3490 of SEQ ID NO: 1883792
cuuccagggugauccgaua

SEQ ID NO: 2216887 - RNA, 19 nt, Artificial Sequence
  Description of Artificial Sequence: Synthetic oligonucleotide
  Antisense strand to SEQ ID NO: 2216886
uaucggaucacccuggaag

SEQ ID NO: 2216888 - RNA, 19 nt, Artificial Sequence
  Description of Artificial Sequence: Synthetic oligonucleotide
  Sense strand starting at position 1266 of SEQ ID NO: 1883792
auaguaauuguguaagucu

SEQ ID NO: 2216889 - RNA, 19 nt, Artificial Sequence
  Description of Artificial Sequence: Synthetic oligonucleotide
  Antisense strand to SEQ ID NO: 2216888
agacuuacacaauuacuau

SEQ ID NO: 2216890 - RNA, 19 nt, Artificial Sequence
  Description of Artificial Sequence: Synthetic oligonucleotide
  Sense strand starting at position 1417 of SEQ ID NO: 1883792
ggcccacuguaaucuaaac

SEQ ID NO: 2216891 - RNA, 19 nt, Artificial Sequence
  Description of Artificial Sequence: Synthetic oligonucleotide
  Antisense strand to SEQ ID NO: 2216890
guuuagauuacagugggcc

SEQ ID NO: 2216892 - RNA, 19 nt, Artificial Sequence
  Description of Artificial Sequence: Synthetic oligonucleotide
  Sense strand starting at position 3805 of SEQ ID NO: 1883792
caggaauaauguggaauuu

SEQ ID NO: 2216893 - RNA, 19 nt, Artificial Sequence
  Description of Artificial Sequence: Synthetic oligonucleotide
  Antisense strand to SEQ ID NO: 2216892
aaauuccacauuauuccug

SEQ ID NO: 2216894 - RNA, 19 nt, Artificial Sequence
  Description of Artificial Sequence: Synthetic oligonucleotide
  Sense strand starting at position 485 of SEQ ID NO: 1883793
uaacaaaggcucugaugga

SEQ ID NO: 2216895 - RNA, 19 nt, Artificial Sequence
  Description of Artificial Sequence: Synthetic oligonucleotide
  Antisense strand to SEQ ID NO: 2216894
uccaucagagccuuuguua

SEQ ID NO: 2216896 - RNA, 19 nt, Artificial Sequence
  Description of Artificial Sequence: Synthetic oligonucleotide
  Sense strand starting at position 3691 of SEQ ID NO: 1883793
agacuauucuaggucacaa

SEQ ID NO: 2216897 - RNA, 19 nt, Artificial Sequence
  Description of Artificial Sequence: Synthetic oligonucleotide
  Antisense strand to SEQ ID NO: 2216896
uugugaccuagaauagucu

SEQ ID NO: 2216898 - RNA, 19 nt, Artificial Sequence
  Description of Artificial Sequence: Synthetic oligonucleotide
  Sense strand starting at position 3867 of SEQ ID NO: 1883793
cugucuuauuuccugucaa

SEQ ID NO: 2216899 - RNA, 19 nt, Artificial Sequence
  Description of Artificial Sequence: Synthetic oligonucleotide
  Antisense strand to SEQ ID NO: 2216898
uugacaggaaauaagacag

SEQ ID NO: 2216900 - RNA, 19 nt, Artificial Sequence
  Description of Artificial Sequence: Synthetic oligonucleotide
  Sense strand starting at position 3678 of SEQ ID NO: 1883793
uggcauacccucuagacua

SEQ ID NO: 2216901 - RNA, 19 nt, Artificial Sequence
  Description of Artificial Sequence: Synthetic oligonucleotide
  Antisense strand to SEQ ID NO: 2216900
uagucuagaggguaugcca

SEQ ID NO: 2216902 - RNA, 19 nt, Artificial Sequence
  Description of Artificial Sequence: Synthetic oligonucleotide
  Sense strand starting at position 690 of SEQ ID NO: 1883793
cucucuugagcuuagaaau

SEQ ID NO: 2216903 - RNA, 19 nt, Artificial Sequence
  Description of Artificial Sequence: Synthetic oligonucleotide
  Antisense strand to SEQ ID NO: 2216902
auuucuaagcucaagagag

SEQ ID NO: 2216904 - RNA, 19 nt, Artificial Sequence
  Description of Artificial Sequence: Synthetic oligonucleotide
  Sense strand starting at position 621 of SEQ ID NO: 1883793
acagaaaggcugugauuaa

SEQ ID NO: 2216905 - RNA, 19 nt, Artificial Sequence
  Description of Artificial Sequence: Synthetic oligonucleotide
  Antisense strand to SEQ ID NO: 2216904
uuaaucacagccuuucugu

SEQ ID NO: 2216906 - RNA, 19 nt, Artificial Sequence
  Description of Artificial Sequence: Synthetic oligonucleotide
  Sense strand starting at position 3087 of SEQ ID NO: 1883793
gaggguuaaacuuguggga

SEQ ID NO: 2216907 - RNA, 19 nt, Artificial Sequence
  Description of Artificial Sequence: Synthetic oligonucleotide
  Antisense strand to SEQ ID NO: 2216906
ucccacaaguuuaacccuc

SEQ ID NO: 2216908 - RNA, 19 nt, Artificial Sequence
  Description of Artificial Sequence: Synthetic oligonucleotide
  Sense strand starting at position 3151 of SEQ ID NO: 1883793
ggaaauggaagcuguuaua

SEQ ID NO: 2216909 - RNA, 19 nt, Artificial Sequence
  Description of Artificial Sequence: Synthetic oligonucleotide
  Antisense strand to SEQ ID NO: 2216908
uauaacagcuuccauuucc

SEQ ID NO: 2216910 - RNA, 19 nt, Artificial Sequence
  Description of Artificial Sequence: Synthetic oligonucleotide
  Sense strand starting at position 410 of SEQ ID NO: 1883793
ggcagagugcucuaagaaa

SEQ ID NO: 2216911 - RNA, 19 nt, Artificial Sequence
  Description of Artificial Sequence: Synthetic oligonucleotide
  Antisense strand to SEQ ID NO: 2216910
uuucuuagagcacucugcc

SEQ ID NO: 2216912 - RNA, 19 nt, Artificial Sequence
  Description of Artificial Sequence: Synthetic oligonucleotide
  Sense strand starting at position 3768 of SEQ ID NO: 1883793
gggauugauccugggcaau

SEQ ID NO: 2216913 - RNA, 19 nt, Artificial Sequence
  Description of Artificial Sequence: Synthetic oligonucleotide
  Antisense strand to SEQ ID NO: 2216912
auugcccaggaucaauccc

SEQ ID NO: 2216914 - RNA, 19 nt, Artificial Sequence
  Description of Artificial Sequence: Synthetic oligonucleotide
  Sense strand starting at position 3078 of SEQ ID NO: 1883793
augcucugagaggguuaaa

SEQ ID NO: 2216915 - RNA, 19 nt, Artificial Sequence
  Description of Artificial Sequence: Synthetic oligonucleotide
  Antisense strand to SEQ ID NO: 2216914
uuuaacccucucagagcau

SEQ ID NO: 2216916 - RNA, 19 nt, Artificial Sequence
  Description of Artificial Sequence: Synthetic oligonucleotide
  Sense strand starting at position 718 of SEQ ID NO: 1883793
augagauucuugucaacuc

SEQ ID NO: 2216917 - RNA, 19 nt, Artificial Sequence
  Description of Artificial Sequence: Synthetic oligonucleotide
  Antisense strand to SEQ ID NO: 2216916
gaguugacaagaaucucau

SEQ ID NO: 2216918 - RNA, 19 nt, Artificial Sequence
  Description of Artificial Sequence: Synthetic oligonucleotide
  Sense strand starting at position 3077 of SEQ ID NO: 1883793
gaugcucugagaggguuaa

SEQ ID NO: 2216919 - RNA, 19 nt, Artificial Sequence
  Description of Artificial Sequence: Synthetic oligonucleotide
  Antisense strand to SEQ ID NO: 2216918
uuaacccucucagagcauc

SEQ ID NO: 2216920 - RNA, 19 nt, Artificial Sequence
  Description of Artificial Sequence: Synthetic oligonucleotide
  Sense strand starting at position 3046 of SEQ ID NO: 1883793
aguugagcaacguaauaau

SEQ ID NO: 2216921 - RNA, 19 nt, Artificial Sequence
  Description of Artificial Sequence: Synthetic oligonucleotide
  Antisense strand to SEQ ID NO: 2216920
auuauuacguugcucaacu

SEQ ID NO: 2216922 - RNA, 19 nt, Artificial Sequence
  Description of Artificial Sequence: Synthetic oligonucleotide
  Sense strand starting at position 3588 of SEQ ID NO: 1883793
ucuaaauguguugaaagcu

SEQ ID NO: 2216923 - RNA, 19 nt, Artificial Sequence
  Description of Artificial Sequence: Synthetic oligonucleotide
  Antisense strand to SEQ ID NO: 2216922
agcuuucaacacauuuaga

SEQ ID NO: 2216924 - RNA, 19 nt, Artificial Sequence
  Description of Artificial Sequence: Synthetic oligonucleotide
  Sense strand starting at position 3091 of SEQ ID NO: 1883793
guuaaacuugugggacauu

SEQ ID NO: 2216925 - RNA, 19 nt, Artificial Sequence
  Description of Artificial Sequence: Synthetic oligonucleotide
  Antisense strand to SEQ ID NO: 2216924
aaugucccacaaguuuaac

SEQ ID NO: 2216926 - RNA, 19 nt, Artificial Sequence
  Description of Artificial Sequence: Synthetic oligonucleotide
  Sense strand starting at position 3686 of SEQ ID NO: 1883793
ccucuagacuauucuaggu

SEQ ID NO: 2216927 - RNA, 19 nt, Artificial Sequence
  Description of Artificial Sequence: Synthetic oligonucleotide
  Antisense strand to SEQ ID NO: 2216926
accuagaauagucuagagg

SEQ ID NO: 2216928 - RNA, 19 nt, Artificial Sequence
  Description of Artificial Sequence: Synthetic oligonucleotide
  Sense strand starting at position 3561 of SEQ ID NO: 1883793
cacagaaggugcuuaaagu

SEQ ID NO: 2216929 - RNA, 19 nt, Artificial Sequence
  Description of Artificial Sequence: Synthetic oligonucleotide
  Antisense strand to SEQ ID NO: 2216928
acuuuaagcaccuucugug

SEQ ID NO: 2216930 - RNA, 19 nt, Artificial Sequence
  Description of Artificial Sequence: Synthetic oligonucleotide
  Sense strand starting at position 295 of SEQ ID NO: 1883793
cacguaagucucuacggaa

SEQ ID NO: 2216931 - RNA, 19 nt, Artificial Sequence
  Description of Artificial Sequence: Synthetic oligonucleotide
  Antisense strand to SEQ ID NO: 2216930
uuccguagagacuuacgug

SEQ ID NO: 2216932 - RNA, 19 nt, Artificial Sequence
  Description of Artificial Sequence: Synthetic oligonucleotide
  Sense strand starting at position 680 of SEQ ID NO: 1883793
ggcacauauucucucuuga

SEQ ID NO: 2216933 - RNA, 19 nt, Artificial Sequence
  Description of Artificial Sequence: Synthetic oligonucleotide
  Antisense strand to SEQ ID NO: 2216932
ucaagagagaauaugugcc

SEQ ID NO: 2216934 - RNA, 19 nt, Artificial Sequence
  Description of Artificial Sequence: Synthetic oligonucleotide
  Sense strand starting at position 687 of SEQ ID NO: 1883793
auucucucuugagcuuaga

SEQ ID NO: 2216935 - RNA, 19 nt, Artificial Sequence
  Description of Artificial Sequence: Synthetic oligonucleotide
  Antisense strand to SEQ ID NO: 2216934
ucuaagcucaagagagaau

SEQ ID NO: 2216936 - RNA, 19 nt, Artificial Sequence
  Description of Artificial Sequence: Synthetic oligonucleotide
  Sense strand starting at position 2148 of SEQ ID NO: 1883793
agaaucuugcucugucaag

SEQ ID NO: 2216937 - RNA, 19 nt, Artificial Sequence
  Description of Artificial Sequence: Synthetic oligonucleotide
  Antisense strand to SEQ ID NO: 2216936
cuugacagagcaagauucu

SEQ ID NO: 2216938 - RNA, 19 nt, Artificial Sequence
  Description of Artificial Sequence: Synthetic oligonucleotide
  Sense strand starting at position 2077 of SEQ ID NO: 1883793
gcgcgggcuccggauuuaa

SEQ ID NO: 2216939 - RNA, 19 nt, Artificial Sequence
  Description of Artificial Sequence: Synthetic oligonucleotide
  Antisense strand to SEQ ID NO: 2216938
uuaaauccggagcccgcgc

SEQ ID NO: 2216940 - RNA, 19 nt, Artificial Sequence
  Description of Artificial Sequence: Synthetic oligonucleotide
  Sense strand starting at position 3044 of SEQ ID NO: 1883793
gaaguugagcaacguaaua

SEQ ID NO: 2216941 - RNA, 19 nt, Artificial Sequence
  Description of Artificial Sequence: Synthetic oligonucleotide
  Antisense strand to SEQ ID NO: 2216940
uauuacguugcucaacuuc

SEQ ID NO: 2216942 - RNA, 19 nt, Artificial Sequence
  Description of Artificial Sequence: Synthetic oligonucleotide
  Sense strand starting at position 2756 of SEQ ID NO: 1883793
agccauugguccucaaauc

SEQ ID NO: 2216943 - RNA, 19 nt, Artificial Sequence
  Description of Artificial Sequence: Synthetic oligonucleotide
  Antisense strand to SEQ ID NO: 2216942
gauuugaggaccaauggcu

SEQ ID NO: 2216944 - RNA, 19 nt, Artificial Sequence
  Description of Artificial Sequence: Synthetic oligonucleotide
  Sense strand starting at position 3101 of SEQ ID NO: 1883793
ugggacauugcacgucaga

SEQ ID NO: 2216945 - RNA, 19 nt, Artificial Sequence
  Description of Artificial Sequence: Synthetic oligonucleotide
  Antisense strand to SEQ ID NO: 2216944
ucugacgugcaauguccca

SEQ ID NO: 2216946 - RNA, 19 nt, Artificial Sequence
  Description of Artificial Sequence: Synthetic oligonucleotide
  Sense strand starting at position 3585 of SEQ ID NO: 1883793
ugcucuaaauguguugaaa

SEQ ID NO: 2216947 - RNA, 19 nt, Artificial Sequence
  Description of Artificial Sequence: Synthetic oligonucleotide
  Antisense strand to SEQ ID NO: 2216946
uuucaacacauuuagagca

SEQ ID NO: 2216948 - RNA, 19 nt, Artificial Sequence
  Description of Artificial Sequence: Synthetic oligonucleotide
  Sense strand starting at position 926 of SEQ ID NO: 1883793
agaugccauccuugugauc

SEQ ID NO: 2216949 - RNA, 19 nt, Artificial Sequence
  Description of Artificial Sequence: Synthetic oligonucleotide
  Antisense strand to SEQ ID NO: 2216948
gaucacaaggauggcaucu

SEQ ID NO: 2216950 - RNA, 19 nt, Artificial Sequence
  Description of Artificial Sequence: Synthetic oligonucleotide
  Sense strand starting at position 3596 of SEQ ID NO: 1883793
uguugaaagcuacgguaga

SEQ ID NO: 2216951 - RNA, 19 nt, Artificial Sequence
  Description of Artificial Sequence: Synthetic oligonucleotide
  Antisense strand to SEQ ID NO: 2216950
ucuaccguagcuuucaaca

SEQ ID NO: 2216952 - RNA, 19 nt, Artificial Sequence
  Description of Artificial Sequence: Synthetic oligonucleotide
  Sense strand starting at position 1035 of SEQ ID NO: 1883793
aaggaagugacgugucuuu

SEQ ID NO: 2216953 - RNA, 19 nt, Artificial Sequence
  Description of Artificial Sequence: Synthetic oligonucleotide
  Antisense strand to SEQ ID NO: 2216952
aaagacacgucacuuccuu

SEQ ID NO: 2216954 - RNA, 19 nt, Artificial Sequence
  Description of Artificial Sequence: Synthetic oligonucleotide
  Sense strand starting at position 3594 of SEQ ID NO: 1883793
uguguugaaagcuacggua

SEQ ID NO: 2216955 - RNA, 19 nt, Artificial Sequence
  Description of Artificial Sequence: Synthetic oligonucleotide
  Antisense strand to SEQ ID NO: 2216954
uaccguagcuuucaacaca

SEQ ID NO: 2216956 - RNA, 19 nt, Artificial Sequence
  Description of Artificial Sequence: Synthetic oligonucleotide
  Sense strand starting at position 1040 of SEQ ID NO: 1883793
agugacgugucuuuaaaca

SEQ ID NO: 2216957 - RNA, 19 nt, Artificial Sequence
  Description of Artificial Sequence: Synthetic oligonucleotide
  Antisense strand to SEQ ID NO: 2216956
uguuuaaagacacgucacu

SEQ ID NO: 2216958 - RNA, 19 nt, Artificial Sequence
  Description of Artificial Sequence: Synthetic oligonucleotide
  Sense strand starting at position 408 of SEQ ID NO: 1883793
acggcagagugcucuaaga

SEQ ID NO: 2216959 - RNA, 19 nt, Artificial Sequence
  Description of Artificial Sequence: Synthetic oligonucleotide
  Antisense strand to SEQ ID NO: 2216958
ucuuagagcacucugccgu

SEQ ID NO: 2216960 - RNA, 19 nt, Artificial Sequence
  Description of Artificial Sequence: Synthetic oligonucleotide
  Sense strand starting at position 2949 of SEQ ID NO: 1883793
uggagcuaucuccgaggca

SEQ ID NO: 2216961 - RNA, 19 nt, Artificial Sequence
  Description of Artificial Sequence: Synthetic oligonucleotide
  Antisense strand to SEQ ID NO: 2216960
ugccucggagauagcucca

SEQ ID NO: 2216962 - RNA, 19 nt, Artificial Sequence
  Description of Artificial Sequence: Synthetic oligonucleotide
  Sense strand starting at position 294 of SEQ ID NO: 1883793
ucacguaagucucuacgga

SEQ ID NO: 2216963 - RNA, 19 nt, Artificial Sequence
  Description of Artificial Sequence: Synthetic oligonucleotide
  Antisense strand to SEQ ID NO: 2216962
uccguagagacuuacguga

SEQ ID NO: 2216964 - RNA, 19 nt, Artificial Sequence
  Description of Artificial Sequence: Synthetic oligonucleotide
  Sense strand starting at position 2994 of SEQ ID NO: 1883793
guggguagagccuguuaac

SEQ ID NO: 2216965 - RNA, 19 nt, Artificial Sequence
  Description of Artificial Sequence: Synthetic oligonucleotide
  Antisense strand to SEQ ID NO: 2216964
guuaacaggcucuacccac

SEQ ID NO: 2216966 - RNA, 19 nt, Artificial Sequence
  Description of Artificial Sequence: Synthetic oligonucleotide
  Sense strand starting at position 993 of SEQ ID NO: 1883793
ccgcacaguccucaguuua

SEQ ID NO: 2216967 - RNA, 19 nt, Artificial Sequence
  Description of Artificial Sequence: Synthetic oligonucleotide
  Antisense strand to SEQ ID NO: 2216966
uaaacugaggacugugcgg

SEQ ID NO: 2216968 - RNA, 19 nt, Artificial Sequence
  Description of Artificial Sequence: Synthetic oligonucleotide
  Sense strand starting at position 880 of SEQ ID NO: 1883793
ugagcuuccucugccuaua

SEQ ID NO: 2216969 - RNA, 19 nt, Artificial Sequence
  Description of Artificial Sequence: Synthetic oligonucleotide
  Antisense strand to SEQ ID NO: 2216968
uauaggcagaggaagcuca

SEQ ID NO: 2216970 - RNA, 19 nt, Artificial Sequence
  Description of Artificial Sequence: Synthetic oligonucleotide
  Sense strand starting at position 3576 of SEQ ID NO: 1883793
aaguguguuugcucuaaau

SEQ ID NO: 2216971 - RNA, 19 nt, Artificial Sequence
  Description of Artificial Sequence: Synthetic oligonucleotide
  Antisense strand to SEQ ID NO: 2216970
auuuagagcaaacacacuu

SEQ ID NO: 2216972 - RNA, 19 nt, Artificial Sequence
  Description of Artificial Sequence: Synthetic oligonucleotide
  Sense strand starting at position 3574 of SEQ ID NO: 1883793
uaaaguguguuugcucuaa

SEQ ID NO: 2216973 - RNA, 19 nt, Artificial Sequence
  Description of Artificial Sequence: Synthetic oligonucleotide
  Antisense strand to SEQ ID NO: 2216972
uuagagcaaacacacuuua

SEQ ID NO: 2216974 - RNA, 19 nt, Artificial Sequence
  Description of Artificial Sequence: Synthetic oligonucleotide
  Sense strand starting at position 3296 of SEQ ID NO: 1883794
cgggaagauuucuccguuc

SEQ ID NO: 2216975 - RNA, 19 nt, Artificial Sequence
  Description of Artificial Sequence: Synthetic oligonucleotide
  Antisense strand to SEQ ID NO: 2216974
gaacggagaaaucuucccg

SEQ ID NO: 2216976 - RNA, 19 nt, Artificial Sequence
  Description of Artificial Sequence: Synthetic oligonucleotide
  Sense strand starting at position 2495 of SEQ ID NO: 1883794
ggacccacucugcauugau

SEQ ID NO: 2216977 - RNA, 19 nt, Artificial Sequence
  Description of Artificial Sequence: Synthetic oligonucleotide
  Antisense strand to SEQ ID NO: 2216976
aucaaugcagagugggucc

SEQ ID NO: 2216978 - RNA, 19 nt, Artificial Sequence
  Description of Artificial Sequence: Synthetic oligonucleotide
  Sense strand starting at position 3683 of SEQ ID NO: 1883794
uugguugugaaucauugau

SEQ ID NO: 2216979 - RNA, 19 nt, Artificial Sequence
  Description of Artificial Sequence: Synthetic oligonucleotide
  Antisense strand to SEQ ID NO: 2216978
aucaaugauucacaaccaa

SEQ ID NO: 2216980 - RNA, 19 nt, Artificial Sequence
  Description of Artificial Sequence: Synthetic oligonucleotide
  Sense strand starting at position 1392 of SEQ ID NO: 1883794
auggguggcccagauucua

SEQ ID NO: 2216981 - RNA, 19 nt, Artificial Sequence
  Description of Artificial Sequence: Synthetic oligonucleotide
  Antisense strand to SEQ ID NO: 2216980
uagaaucugggccacccau

SEQ ID NO: 2216982 - RNA, 19 nt, Artificial Sequence
  Description of Artificial Sequence: Synthetic oligonucleotide
  Sense strand starting at position 3729 of SEQ ID NO: 1883794
uggcucaauccuugaagaa

SEQ ID NO: 2216983 - RNA, 19 nt, Artificial Sequence
  Description of Artificial Sequence: Synthetic oligonucleotide
  Antisense strand to SEQ ID NO: 2216982
uucuucaaggauugagcca

SEQ ID NO: 2216984 - RNA, 19 nt, Artificial Sequence
  Description of Artificial Sequence: Synthetic oligonucleotide
  Sense strand starting at position 2744 of SEQ ID NO: 1883794
guuaaauacaagugguaga

SEQ ID NO: 2216985 - RNA, 19 nt, Artificial Sequence
  Description of Artificial Sequence: Synthetic oligonucleotide
  Antisense strand to SEQ ID NO: 2216984
ucuaccacuuguauuuaac

SEQ ID NO: 2216986 - RNA, 19 nt, Artificial Sequence
  Description of Artificial Sequence: Synthetic oligonucleotide
  Sense strand starting at position 561 of SEQ ID NO: 1883794
ucggauuccugaucccaaa

SEQ ID NO: 2216987 - RNA, 19 nt, Artificial Sequence
  Description of Artificial Sequence: Synthetic oligonucleotide
  Antisense strand to SEQ ID NO: 2216986
uuugggaucaggaauccga

SEQ ID NO: 2216988 - RNA, 19 nt, Artificial Sequence
  Description of Artificial Sequence: Synthetic oligonucleotide
  Sense strand starting at position 3728 of SEQ ID NO: 1883794
cuggcucaauccuugaaga

SEQ ID NO: 2216989 - RNA, 19 nt, Artificial Sequence
  Description of Artificial Sequence: Synthetic oligonucleotide
  Antisense strand to SEQ ID NO: 2216988
ucuucaaggauugagccag

SEQ ID NO: 2216990 - RNA, 19 nt, Artificial Sequence
  Description of Artificial Sequence: Synthetic oligonucleotide
  Sense strand starting at position 689 of SEQ ID NO: 1883794
ccaucucuacuguggacaa

SEQ ID NO: 2216991 - RNA, 19 nt, Artificial Sequence
  Description of Artificial Sequence: Synthetic oligonucleotide
  Antisense strand to SEQ ID NO: 2216990
uuguccacaguagagaugg

SEQ ID NO: 2216992 - RNA, 19 nt, Artificial Sequence
  Description of Artificial Sequence: Synthetic oligonucleotide
  Sense strand starting at position 1121 of SEQ ID NO: 1883794
gggugacucuucccaacac

SEQ ID NO: 2216993 - RNA, 19 nt, Artificial Sequence
  Description of Artificial Sequence: Synthetic oligonucleotide
  Antisense strand to SEQ ID NO: 2216992
guguugggaagagucaccc

SEQ ID NO: 2216994 - RNA, 19 nt, Artificial Sequence
  Description of Artificial Sequence: Synthetic oligonucleotide
  Sense strand starting at position 2391 of SEQ ID NO: 1883794
cucccugcugagcagaaau

SEQ ID NO: 2216995 - RNA, 19 nt, Artificial Sequence
  Description of Artificial Sequence: Synthetic oligonucleotide
  Antisense strand to SEQ ID NO: 2216994
auuucugcucagcagggag

SEQ ID NO: 2216996 - RNA, 19 nt, Artificial Sequence
  Description of Artificial Sequence: Synthetic oligonucleotide
  Sense strand starting at position 2402 of SEQ ID NO: 1883794
gcagaaauggacugggcuu

SEQ ID NO: 2216997 - RNA, 19 nt, Artificial Sequence
  Description of Artificial Sequence: Synthetic oligonucleotide
  Antisense strand to SEQ ID NO: 2216996
aagcccaguccauuucugc

SEQ ID NO: 2216998 - RNA, 19 nt, Artificial Sequence
  Description of Artificial Sequence: Synthetic oligonucleotide
  Sense strand starting at position 2571 of SEQ ID NO: 1883794
gugguucaaggucaguaua

SEQ ID NO: 2216999 - RNA, 19 nt, Artificial Sequence
  Description of Artificial Sequence: Synthetic oligonucleotide
  Antisense strand to SEQ ID NO: 2216998
uauacugaccuugaaccac

SEQ ID NO: 2217000 - RNA, 19 nt, Artificial Sequence
  Description of Artificial Sequence: Synthetic oligonucleotide
  Sense strand starting at position 2664 of SEQ ID NO: 1883794
cugugcuguccucagaaca

SEQ ID NO: 2217001 - RNA, 19 nt, Artificial Sequence
  Description of Artificial Sequence: Synthetic oligonucleotide
  Antisense strand to SEQ ID NO: 2217000
uguucugaggacagcacag

SEQ ID NO: 2217002 - RNA, 19 nt, Artificial Sequence
  Description of Artificial Sequence: Synthetic oligonucleotide
  Sense strand starting at position 301 of SEQ ID NO: 1883794
gcccucauucccggagaga

SEQ ID NO: 2217003 - RNA, 19 nt, Artificial Sequence
  Description of Artificial Sequence: Synthetic oligonucleotide
  Antisense strand to SEQ ID NO: 2217002
ucucuccgggaaugagggc

SEQ ID NO: 2217004 - RNA, 19 nt, Artificial Sequence
  Description of Artificial Sequence: Synthetic oligonucleotide
  Sense strand starting at position 2310 of SEQ ID NO: 1883794
cggaauucuuccucccuca

SEQ ID NO: 2217005 - RNA, 19 nt, Artificial Sequence
  Description of Artificial Sequence: Synthetic oligonucleotide
  Antisense strand to SEQ ID NO: 2217004
ugagggaggaagaauuccg

SEQ ID NO: 2217006 - RNA, 19 nt, Artificial Sequence
  Description of Artificial Sequence: Synthetic oligonucleotide
  Sense strand starting at position 2682 of SEQ ID NO: 1883794
acgugaucucucuggauug

SEQ ID NO: 2217007 - RNA, 19 nt, Artificial Sequence
  Description of Artificial Sequence: Synthetic oligonucleotide
  Antisense strand to SEQ ID NO: 2217006
caauccagagagaucacgu

SEQ ID NO: 2217008 - RNA, 19 nt, Artificial Sequence
  Description of Artificial Sequence: Synthetic oligonucleotide
  Sense strand starting at position 3675 of SEQ ID NO: 1883794
uucauugguugguugugaa

SEQ ID NO: 2217009 - RNA, 19 nt, Artificial Sequence
  Description of Artificial Sequence: Synthetic oligonucleotide
  Antisense strand to SEQ ID NO: 2217008
uucacaaccaaccaaugaa

SEQ ID NO: 2217010 - RNA, 19 nt, Artificial Sequence
  Description of Artificial Sequence: Synthetic oligonucleotide
  Sense strand starting at position 633 of SEQ ID NO: 1883794
cggauuccucaauguguca

SEQ ID NO: 2217011 - RNA, 19 nt, Artificial Sequence
  Description of Artificial Sequence: Synthetic oligonucleotide
  Antisense strand to SEQ ID NO: 2217010
ugacacauugaggaauccg

SEQ ID NO: 2217012 - RNA, 19 nt, Artificial Sequence
  Description of Artificial Sequence: Synthetic oligonucleotide
  Sense strand starting at position 2028 of SEQ ID NO: 1883794
ucgagauguucuuuauagc

SEQ ID NO: 2217013 - RNA, 19 nt, Artificial Sequence
  Description of Artificial Sequence: Synthetic oligonucleotide
  Antisense strand to SEQ ID NO: 2217012
gcuauaaagaacaucucga

SEQ ID NO: 2217014 - RNA, 19 nt, Artificial Sequence
  Description of Artificial Sequence: Synthetic oligonucleotide
  Sense strand starting at position 3103 of SEQ ID NO: 1883794
acccucaagugcuugcuaa

SEQ ID NO: 2217015 - RNA, 19 nt, Artificial Sequence
  Description of Artificial Sequence: Synthetic oligonucleotide
  Antisense strand to SEQ ID NO: 2217014
uuagcaagcacuugagggu

SEQ ID NO: 2217016 - RNA, 19 nt, Artificial Sequence
  Description of Artificial Sequence: Synthetic oligonucleotide
  Sense strand starting at position 3104 of SEQ ID NO: 1883794
cccucaagugcuugcuaaa

SEQ ID NO: 2217017 - RNA, 19 nt, Artificial Sequence
  Description of Artificial Sequence: Synthetic oligonucleotide
  Antisense strand to SEQ ID NO: 2217016
uuuagcaagcacuugaggg

SEQ ID NO: 2217018 - RNA, 19 nt, Artificial Sequence
  Description of Artificial Sequence: Synthetic oligonucleotide
  Sense strand starting at position 2560 of SEQ ID NO: 1883794
ggcacuauugugugguuca

SEQ ID NO: 2217019 - RNA, 19 nt, Artificial Sequence
  Description of Artificial Sequence: Synthetic oligonucleotide
  Antisense strand to SEQ ID NO: 2217018
ugaaccacacaauagugcc

SEQ ID NO: 2217020 - RNA, 19 nt, Artificial Sequence
  Description of Artificial Sequence: Synthetic oligonucleotide
  Sense strand starting at position 3203 of SEQ ID NO: 1883794
gcaagugcugccgagcaga

SEQ ID NO: 2217021 - RNA, 19 nt, Artificial Sequence
  Description of Artificial Sequence: Synthetic oligonucleotide
  Antisense strand to SEQ ID NO: 2217020
ucugcucggcagcacuugc

SEQ ID NO: 2217022 - RNA, 19 nt, Artificial Sequence
  Description of Artificial Sequence: Synthetic oligonucleotide
  Sense strand starting at position 1720 of SEQ ID NO: 1883794
gccgugucugcuggaggaa

SEQ ID NO: 2217023 - RNA, 19 nt, Artificial Sequence
  Description of Artificial Sequence: Synthetic oligonucleotide
  Antisense strand to SEQ ID NO: 2217022
uuccuccagcagacacggc

SEQ ID NO: 2217024 - RNA, 19 nt, Artificial Sequence
  Description of Artificial Sequence: Synthetic oligonucleotide
  Sense strand starting at position 1722 of SEQ ID NO: 1883794
cgugucugcuggaggaaca

SEQ ID NO: 2217025 - RNA, 19 nt, Artificial Sequence
  Description of Artificial Sequence: Synthetic oligonucleotide
  Antisense strand to SEQ ID NO: 2217024
uguuccuccagcagacacg

SEQ ID NO: 2217026 - RNA, 19 nt, Artificial Sequence
  Description of Artificial Sequence: Synthetic oligonucleotide
  Sense strand starting at position 346 of SEQ ID NO: 1883794
ucaggaauguuucaguggu

SEQ ID NO: 2217027 - RNA, 19 nt, Artificial Sequence
  Description of Artificial Sequence: Synthetic oligonucleotide
  Antisense strand to SEQ ID NO: 2217026
accacugaaacauuccuga

SEQ ID NO: 2217028 - RNA, 19 nt, Artificial Sequence
  Description of Artificial Sequence: Synthetic oligonucleotide
  Sense strand starting at position 3107 of SEQ ID NO: 1883794
ucaagugcuugcuaaauaa

SEQ ID NO: 2217029 - RNA, 19 nt, Artificial Sequence
  Description of Artificial Sequence: Synthetic oligonucleotide
  Antisense strand to SEQ ID NO: 2217028
uuauuuagcaagcacuuga

SEQ ID NO: 2217030 - RNA, 19 nt, Artificial Sequence
  Description of Artificial Sequence: Synthetic oligonucleotide
  Sense strand starting at position 3679 of SEQ ID NO: 1883794
uugguugguugugaaucau

SEQ ID NO: 2217031 - RNA, 19 nt, Artificial Sequence
  Description of Artificial Sequence: Synthetic oligonucleotide
  Antisense strand to SEQ ID NO: 2217030
augauucacaaccaaccaa

SEQ ID NO: 2217032 - RNA, 19 nt, Artificial Sequence
  Description of Artificial Sequence: Synthetic oligonucleotide
  Sense strand starting at position 1495 of SEQ ID NO: 1883794
gcaccuuaguuagagcuca

SEQ ID NO: 2217033 - RNA, 19 nt, Artificial Sequence
  Description of Artificial Sequence: Synthetic oligonucleotide
  Antisense strand to SEQ ID NO: 2217032
ugagcucuaacuaaggugc

SEQ ID NO: 2217034 - RNA, 19 nt, Artificial Sequence
  Description of Artificial Sequence: Synthetic oligonucleotide
  Sense strand starting at position 3678 of SEQ ID NO: 1883794
auugguugguugugaauca

SEQ ID NO: 2217035 - RNA, 19 nt, Artificial Sequence
  Description of Artificial Sequence: Synthetic oligonucleotide
  Antisense strand to SEQ ID NO: 2217034
ugauucacaaccaaccaau

SEQ ID NO: 2217036 - RNA, 19 nt, Artificial Sequence
  Description of Artificial Sequence: Synthetic oligonucleotide
  Sense strand starting at position 2683 of SEQ ID NO: 1883794
cgugaucucucuggauugu

SEQ ID NO: 2217037 - RNA, 19 nt, Artificial Sequence
  Description of Artificial Sequence: Synthetic oligonucleotide
  Antisense strand to SEQ ID NO: 2217036
acaauccagagagaucacg

SEQ ID NO: 2217038 - RNA, 19 nt, Artificial Sequence
  Description of Artificial Sequence: Synthetic oligonucleotide
  Sense strand starting at position 1473 of SEQ ID NO: 1883795
ggcuguguuccugcaccuu

SEQ ID NO: 2217039 - RNA, 19 nt, Artificial Sequence
  Description of Artificial Sequence: Synthetic oligonucleotide
  Antisense strand to SEQ ID NO: 2217038
aaggugcaggaacacagcc

SEQ ID NO: 2217040 - RNA, 19 nt, Artificial Sequence
  Description of Artificial Sequence: Synthetic oligonucleotide
  Sense strand starting at position 2489 of SEQ ID NO: 1883795
ggacccacucugcauugau

SEQ ID NO: 2217041 - RNA, 19 nt, Artificial Sequence
  Description of Artificial Sequence: Synthetic oligonucleotide
  Antisense strand to SEQ ID NO: 2217040
aucaaugcagagugggucc

SEQ ID NO: 2217042 - RNA, 19 nt, Artificial Sequence
  Description of Artificial Sequence: Synthetic oligonucleotide
  Sense strand starting at position 1382 of SEQ ID NO: 1883795
auggguggcccagauucua

SEQ ID NO: 2217043 - RNA, 19 nt, Artificial Sequence
  Description of Artificial Sequence: Synthetic oligonucleotide
  Antisense strand to SEQ ID NO: 2217042
uagaaucugggccacccau

SEQ ID NO: 2217044 - RNA, 19 nt, Artificial Sequence
  Description of Artificial Sequence: Synthetic oligonucleotide
  Sense strand starting at position 3395 of SEQ ID NO: 1883795
uggcucaauccuugaagaa

SEQ ID NO: 2217045 - RNA, 19 nt, Artificial Sequence
  Description of Artificial Sequence: Synthetic oligonucleotide
  Antisense strand to SEQ ID NO: 2217044
uucuucaaggauugagcca

SEQ ID NO: 2217046 - RNA, 19 nt, Artificial Sequence
  Description of Artificial Sequence: Synthetic oligonucleotide
  Sense strand starting at position 3977 of SEQ ID NO: 1883795
cgaugaaucucaguuaagg

SEQ ID NO: 2217047 - RNA, 19 nt, Artificial Sequence
  Description of Artificial Sequence: Synthetic oligonucleotide
  Antisense strand to SEQ ID NO: 2217046
ccuuaacugagauucaucg

SEQ ID NO: 2217048 - RNA, 19 nt, Artificial Sequence
  Description of Artificial Sequence: Synthetic oligonucleotide
  Sense strand starting at position 3394 of SEQ ID NO: 1883795
cuggcucaauccuugaaga

SEQ ID NO: 2217049 - RNA, 19 nt, Artificial Sequence
  Description of Artificial Sequence: Synthetic oligonucleotide
  Antisense strand to SEQ ID NO: 2217048
ucuucaaggauugagccag

SEQ ID NO: 2217050 - RNA, 19 nt, Artificial Sequence
  Description of Artificial Sequence: Synthetic oligonucleotide
  Sense strand starting at position 1111 of SEQ ID NO: 1883795
gggugacucuucccaacac

SEQ ID NO: 2217051 - RNA, 19 nt, Artificial Sequence
  Description of Artificial Sequence: Synthetic oligonucleotide
  Antisense strand to SEQ ID NO: 2217050
guguugggaagagucaccc

SEQ ID NO: 2217052 - RNA, 19 nt, Artificial Sequence
  Description of Artificial Sequence: Synthetic oligonucleotide
  Sense strand starting at position 2385 of SEQ ID NO: 1883795
cucccugcugagcagaaau

SEQ ID NO: 2217053 - RNA, 19 nt, Artificial Sequence
  Description of Artificial Sequence: Synthetic oligonucleotide
  Antisense strand to SEQ ID NO: 2217052
auuucugcucagcagggag

SEQ ID NO: 2217054 - RNA, 19 nt, Artificial Sequence
  Description of Artificial Sequence: Synthetic oligonucleotide
  Sense strand starting at position 1301 of SEQ ID NO: 1883795
ccggaaaguccuuaucgac

SEQ ID NO: 2217055 - RNA, 19 nt, Artificial Sequence
  Description of Artificial Sequence: Synthetic oligonucleotide
  Antisense strand to SEQ ID NO: 2217054
gucgauaaggacuuuccgg

SEQ ID NO: 2217056 - RNA, 19 nt, Artificial Sequence
  Description of Artificial Sequence: Synthetic oligonucleotide
  Sense strand starting at position 3968 of SEQ ID NO: 1883795
gggagcuuacgaugaaucu

SEQ ID NO: 2217057 - RNA, 19 nt, Artificial Sequence
  Description of Artificial Sequence: Synthetic oligonucleotide
  Antisense strand to SEQ ID NO: 2217056
agauucaucguaagcuccc

SEQ ID NO: 2217058 - RNA, 19 nt, Artificial Sequence
  Description of Artificial Sequence: Synthetic oligonucleotide
  Sense strand starting at position 3355 of SEQ ID NO: 1883795
gugaaucauugaucuaagc

SEQ ID NO: 2217059 - RNA, 19 nt, Artificial Sequence
  Description of Artificial Sequence: Synthetic oligonucleotide
  Antisense strand to SEQ ID NO: 2217058
gcuuagaucaaugauucac

SEQ ID NO: 2217060 - RNA, 19 nt, Artificial Sequence
  Description of Artificial Sequence: Synthetic oligonucleotide
  Sense strand starting at position 2396 of SEQ ID NO: 1883795
gcagaaauggacugggcuu

SEQ ID NO: 2217061 - RNA, 19 nt, Artificial Sequence
  Description of Artificial Sequence: Synthetic oligonucleotide
  Antisense strand to SEQ ID NO: 2217060
aagcccaguccauuucugc

SEQ ID NO: 2217062 - RNA, 19 nt, Artificial Sequence
  Description of Artificial Sequence: Synthetic oligonucleotide
  Sense strand starting at position 3336 of SEQ ID NO: 1883795
cguauuucauugguuguuu

SEQ ID NO: 2217063 - RNA, 19 nt, Artificial Sequence
  Description of Artificial Sequence: Synthetic oligonucleotide
  Antisense strand to SEQ ID NO: 2217062
aaacaaccaaugaaauacg

SEQ ID NO: 2217064 - RNA, 19 nt, Artificial Sequence
  Description of Artificial Sequence: Synthetic oligonucleotide
  Sense strand starting at position 3558 of SEQ ID NO: 1883795
uuuagauacugguuggguu

SEQ ID NO: 2217065 - RNA, 19 nt, Artificial Sequence
  Description of Artificial Sequence: Synthetic oligonucleotide
  Antisense strand to SEQ ID NO: 2217064
aacccaaccaguaucuaaa

SEQ ID NO: 2217066 - RNA, 19 nt, Artificial Sequence
  Description of Artificial Sequence: Synthetic oligonucleotide
  Sense strand starting at position 3334 of SEQ ID NO: 1883795
cucguauuucauugguugu

SEQ ID NO: 2217067 - RNA, 19 nt, Artificial Sequence
  Description of Artificial Sequence: Synthetic oligonucleotide
  Antisense strand to SEQ ID NO: 2217066
acaaccaaugaaauacgag

SEQ ID NO: 2217068 - RNA, 19 nt, Artificial Sequence
  Description of Artificial Sequence: Synthetic oligonucleotide
  Sense strand starting at position 2959 of SEQ ID NO: 1883795
cugcauuucccaggugugu

SEQ ID NO: 2217069 - RNA, 19 nt, Artificial Sequence
  Description of Artificial Sequence: Synthetic oligonucleotide
  Antisense strand to SEQ ID NO: 2217068
acacaccugggaaaugcag

SEQ ID NO: 2217070 - RNA, 19 nt, Artificial Sequence
  Description of Artificial Sequence: Synthetic oligonucleotide
  Sense strand starting at position 2658 of SEQ ID NO: 1883795
cugugcuguccucagaaca

SEQ ID NO: 2217071 - RNA, 19 nt, Artificial Sequence
  Description of Artificial Sequence: Synthetic oligonucleotide
  Antisense strand to SEQ ID NO: 2217070
uguucugaggacagcacag

SEQ ID NO: 2217072 - RNA, 19 nt, Artificial Sequence
  Description of Artificial Sequence: Synthetic oligonucleotide
  Sense strand starting at position 1300 of SEQ ID NO: 1883795
uccggaaaguccuuaucga

SEQ ID NO: 2217073 - RNA, 19 nt, Artificial Sequence
  Description of Artificial Sequence: Synthetic oligonucleotide
  Antisense strand to SEQ ID NO: 2217072
ucgauaaggacuuuccgga

SEQ ID NO: 2217074 - RNA, 19 nt, Artificial Sequence
  Description of Artificial Sequence: Synthetic oligonucleotide
  Sense strand starting at position 2725 of SEQ ID NO: 1883795
cgaccaucucccuguuaga

SEQ ID NO: 2217075 - RNA, 19 nt, Artificial Sequence
  Description of Artificial Sequence: Synthetic oligonucleotide
  Antisense strand to SEQ ID NO: 2217074
ucuaacagggagauggucg

SEQ ID NO: 2217076 - RNA, 19 nt, Artificial Sequence
  Description of Artificial Sequence: Synthetic oligonucleotide
  Sense strand starting at position 2567 of SEQ ID NO: 1883795
ggcucagggucaguuuaua

SEQ ID NO: 2217077 - RNA, 19 nt, Artificial Sequence
  Description of Artificial Sequence: Synthetic oligonucleotide
  Antisense strand to SEQ ID NO: 2217076
uauaaacugacccugagcc

SEQ ID NO: 2217078 - RNA, 19 nt, Artificial Sequence
  Description of Artificial Sequence: Synthetic oligonucleotide
  Sense strand starting at position 3289 of SEQ ID NO: 1883795
gaagguuucucuguucucu

SEQ ID NO: 2217079 - RNA, 19 nt, Artificial Sequence
  Description of Artificial Sequence: Synthetic oligonucleotide
  Antisense strand to SEQ ID NO: 2217078
agagaacagagaaaccuuc

SEQ ID NO: 2217080 - RNA, 19 nt, Artificial Sequence
  Description of Artificial Sequence: Synthetic oligonucleotide
  Sense strand starting at position 1335 of SEQ ID NO: 1883795
guaccaggucccugugauc

SEQ ID NO: 2217081 - RNA, 19 nt, Artificial Sequence
  Description of Artificial Sequence: Synthetic oligonucleotide
  Antisense strand to SEQ ID NO: 2217080
gaucacagggaccugguac

SEQ ID NO: 2217082 - RNA, 19 nt, Artificial Sequence
  Description of Artificial Sequence: Synthetic oligonucleotide
  Sense strand starting at position 153 of SEQ ID NO: 1883795
gggaauguuucagcgguca

SEQ ID NO: 2217083 - RNA, 19 nt, Artificial Sequence
  Description of Artificial Sequence: Synthetic oligonucleotide
  Antisense strand to SEQ ID NO: 2217082
ugaccgcugaaacauuccc

SEQ ID NO: 2217084 - RNA, 19 nt, Artificial Sequence
  Description of Artificial Sequence: Synthetic oligonucleotide
  Sense strand starting at position 2018 of SEQ ID NO: 1883795
ucgagauguucuuuauagc

SEQ ID NO: 2217085 - RNA, 19 nt, Artificial Sequence
  Description of Artificial Sequence: Synthetic oligonucleotide
  Antisense strand to SEQ ID NO: 2217084
gcuauaaagaacaucucga

SEQ ID NO: 2217086 - RNA, 19 nt, Artificial Sequence
  Description of Artificial Sequence: Synthetic oligonucleotide
  Sense strand starting at position 3484 of SEQ ID NO: 1883795
gggugcucuccaggagucu

SEQ ID NO: 2217087 - RNA, 19 nt, Artificial Sequence
  Description of Artificial Sequence: Synthetic oligonucleotide
  Antisense strand to SEQ ID NO: 2217086
agacuccuggagagcaccc

SEQ ID NO: 2217088 - RNA, 19 nt, Artificial Sequence
  Description of Artificial Sequence: Synthetic oligonucleotide
  Sense strand starting at position 2676 of SEQ ID NO: 1883795
acgcgaucucucuggauug

SEQ ID NO: 2217089 - RNA, 19 nt, Artificial Sequence
  Description of Artificial Sequence: Synthetic oligonucleotide
  Antisense strand to SEQ ID NO: 2217088
caauccagagagaucgcgu

SEQ ID NO: 2217090 - RNA, 19 nt, Artificial Sequence
  Description of Artificial Sequence: Synthetic oligonucleotide
  Sense strand starting at position 3818 of SEQ ID NO: 1883795
ugcuaauuccuaggugcuu

SEQ ID NO: 2217091 - RNA, 19 nt, Artificial Sequence
  Description of Artificial Sequence: Synthetic oligonucleotide
  Antisense strand to SEQ ID NO: 2217090
aagcaccuaggaauuagca

SEQ ID NO: 2217092 - RNA, 19 nt, Artificial Sequence
  Description of Artificial Sequence: Synthetic oligonucleotide
  Sense strand starting at position 2554 of SEQ ID NO: 1883795
ggcacuauuguguggcuca

SEQ ID NO: 2217093 - RNA, 19 nt, Artificial Sequence
  Description of Artificial Sequence: Synthetic oligonucleotide
  Antisense strand to SEQ ID NO: 2217092
ugagccacacaauagugcc

SEQ ID NO: 2217094 - RNA, 19 nt, Artificial Sequence
  Description of Artificial Sequence: Synthetic oligonucleotide
  Sense strand starting at position 3174 of SEQ ID NO: 1883795
gcaagugcugccgagcaga

SEQ ID NO: 2217095 - RNA, 19 nt, Artificial Sequence
  Description of Artificial Sequence: Synthetic oligonucleotide
  Antisense strand to SEQ ID NO: 2217094
ucugcucggcagcacuugc

SEQ ID NO: 2217096 - RNA, 19 nt, Artificial Sequence
  Description of Artificial Sequence: Synthetic oligonucleotide
  Sense strand starting at position 1710 of SEQ ID NO: 1883795
gccgugucugcuggaggaa

SEQ ID NO: 2217097 - RNA, 19 nt, Artificial Sequence
  Description of Artificial Sequence: Synthetic oligonucleotide
  Antisense strand to SEQ ID NO: 2217096
uuccuccagcagacacggc

SEQ ID NO: 2217098 - RNA, 19 nt, Artificial Sequence
  Description of Artificial Sequence: Synthetic oligonucleotide
  Sense strand starting at position 1712 of SEQ ID NO: 1883795
cgugucugcuggaggaaca

SEQ ID NO: 2217099 - RNA, 19 nt, Artificial Sequence
  Description of Artificial Sequence: Synthetic oligonucleotide
  Antisense strand to SEQ ID NO: 2217098
uguuccuccagcagacacg

SEQ ID NO: 2217100 - RNA, 19 nt, Artificial Sequence
  Description of Artificial Sequence: Synthetic oligonucleotide
  Sense strand starting at position 3975 of SEQ ID NO: 1883795
uacgaugaaucucaguuaa

SEQ ID NO: 2217101 - RNA, 19 nt, Artificial Sequence
  Description of Artificial Sequence: Synthetic oligonucleotide
  Antisense strand to SEQ ID NO: 2217100
uuaacugagauucaucgua

SEQ ID NO: 2217102 - RNA, 19 nt, Artificial Sequence
  Description of Artificial Sequence: Synthetic oligonucleotide
  Sense strand starting at position 3783 of SEQ ID NO: 1883795
cuuugaaucucacagugau

SEQ ID NO: 2217103 - RNA, 19 nt, Artificial Sequence
  Description of Artificial Sequence: Synthetic oligonucleotide
  Antisense strand to SEQ ID NO: 2217102
aucacugugagauucaaag

SEQ ID NO: 2217104 - RNA, 19 nt, Artificial Sequence
  Description of Artificial Sequence: Synthetic oligonucleotide
  Sense strand starting at position 9 of SEQ ID NO: 1883795
ggugcuggucuuugcagua

SEQ ID NO: 2217105 - RNA, 19 nt, Artificial Sequence
  Description of Artificial Sequence: Synthetic oligonucleotide
  Antisense strand to SEQ ID NO: 2217104
uacugcaaagaccagcacc

SEQ ID NO: 2217106 - RNA, 19 nt, Artificial Sequence
  Description of Artificial Sequence: Synthetic oligonucleotide
  Sense strand starting at position 3493 of SEQ ID NO: 1883795
ccaggagucucccaucauc

SEQ ID NO: 2217107 - RNA, 19 nt, Artificial Sequence
  Description of Artificial Sequence: Synthetic oligonucleotide
  Antisense strand to SEQ ID NO: 2217106
gaugaugggagacuccugg

SEQ ID NO: 2217108 - RNA, 19 nt, Artificial Sequence
  Description of Artificial Sequence: Synthetic oligonucleotide
  Sense strand starting at position 3298 of SEQ ID NO: 1883795
ucuguucucuguguuuguu

SEQ ID NO: 2217109 - RNA, 19 nt, Artificial Sequence
  Description of Artificial Sequence: Synthetic oligonucleotide
  Antisense strand to SEQ ID NO: 2217108
aacaaacacagagaacaga

SEQ ID NO: 2217110 - RNA, 19 nt, Artificial Sequence
  Description of Artificial Sequence: Synthetic oligonucleotide
  Sense strand starting at position 3966 of SEQ ID NO: 1883795
gugggagcuuacgaugaau

SEQ ID NO: 2217111 - RNA, 19 nt, Artificial Sequence
  Description of Artificial Sequence: Synthetic oligonucleotide
  Antisense strand to SEQ ID NO: 2217110
auucaucguaagcucccac

SEQ ID NO: 2217112 - RNA, 19 nt, Artificial Sequence
  Description of Artificial Sequence: Synthetic oligonucleotide
  Sense strand starting at position 3345 of SEQ ID NO: 1883795
uugguuguuugugaaucau

SEQ ID NO: 2217113 - RNA, 19 nt, Artificial Sequence
  Description of Artificial Sequence: Synthetic oligonucleotide
  Antisense strand to SEQ ID NO: 2217112
augauucacaaacaaccaa

SEQ ID NO: 2217114 - RNA, 19 nt, Artificial Sequence
  Description of Artificial Sequence: Synthetic oligonucleotide
  Sense strand starting at position 1485 of SEQ ID NO: 1883795
gcaccuuaguuagagcuca

SEQ ID NO: 2217115 - RNA, 19 nt, Artificial Sequence
  Description of Artificial Sequence: Synthetic oligonucleotide
  Antisense strand to SEQ ID NO: 2217114
ugagcucuaacuaaggugc

SEQ ID NO: 2217116 - RNA, 19 nt, Artificial Sequence
  Description of Artificial Sequence: Synthetic oligonucleotide
  Sense strand starting at position 3344 of SEQ ID NO: 1883795
auugguuguuugugaauca

SEQ ID NO: 2217117 - RNA, 19 nt, Artificial Sequence
  Description of Artificial Sequence: Synthetic oligonucleotide
  Antisense strand to SEQ ID NO: 2217116
ugauucacaaacaaccaau

SEQ ID NO: 2217118 - RNA, 19 nt, Artificial Sequence
  Description of Artificial Sequence: Synthetic oligonucleotide
  Sense strand starting at position 3749 of SEQ ID NO: 1883796
augauaaagggcugucaua

SEQ ID NO: 2217119 - RNA, 19 nt, Artificial Sequence
  Description of Artificial Sequence: Synthetic oligonucleotide
  Antisense strand to SEQ ID NO: 2217118
uaugacagcccuuuaucau

SEQ ID NO: 2217120 - RNA, 19 nt, Artificial Sequence
  Description of Artificial Sequence: Synthetic oligonucleotide
  Sense strand starting at position 3939 of SEQ ID NO: 1883796
ggagcuaaagcauauguca

SEQ ID NO: 2217121 - RNA, 19 nt, Artificial Sequence
  Description of Artificial Sequence: Synthetic oligonucleotide
  Antisense strand to SEQ ID NO: 2217120
ugacauaugcuuuagcucc

SEQ ID NO: 2217122 - RNA, 19 nt, Artificial Sequence
  Description of Artificial Sequence: Synthetic oligonucleotide
  Sense strand starting at position 3954 of SEQ ID NO: 1883796
gucacucuugguuauauau

SEQ ID NO: 2217123 - RNA, 19 nt, Artificial Sequence
  Description of Artificial Sequence: Synthetic oligonucleotide
  Antisense strand to SEQ ID NO: 2217122
auauauaaccaagagugac

SEQ ID NO: 2217124 - RNA, 19 nt, Artificial Sequence
  Description of Artificial Sequence: Synthetic oligonucleotide
  Sense strand starting at position 3952 of SEQ ID NO: 1883796
augucacucuugguuauau

SEQ ID NO: 2217125 - RNA, 19 nt, Artificial Sequence
  Description of Artificial Sequence: Synthetic oligonucleotide
  Antisense strand to SEQ ID NO: 2217124
auauaaccaagagugacau

SEQ ID NO: 2217126 - RNA, 19 nt, Artificial Sequence
  Description of Artificial Sequence: Synthetic oligonucleotide
  Sense strand starting at position 3738 of SEQ ID NO: 1883796
uguguugcggaaugauaaa

SEQ ID NO: 2217127 - RNA, 19 nt, Artificial Sequence
  Description of Artificial Sequence: Synthetic oligonucleotide
  Antisense strand to SEQ ID NO: 2217126
uuuaucauuccgcaacaca

SEQ ID NO: 2217128 - RNA, 19 nt, Artificial Sequence
  Description of Artificial Sequence: Synthetic oligonucleotide
  Sense strand starting at position 3735 of SEQ ID NO: 1883796
uuguguguugcggaaugau

SEQ ID NO: 2217129 - RNA, 19 nt, Artificial Sequence
  Description of Artificial Sequence: Synthetic oligonucleotide
  Antisense strand to SEQ ID NO: 2217128
aucauuccgcaacacacaa

SEQ ID NO: 2217130 - RNA, 19 nt, Artificial Sequence
  Description of Artificial Sequence: Synthetic oligonucleotide
  Sense strand starting at position 3950 of SEQ ID NO: 1883796
auaugucacucuugguuau

SEQ ID NO: 2217131 - RNA, 19 nt, Artificial Sequence
  Description of Artificial Sequence: Synthetic oligonucleotide
  Antisense strand to SEQ ID NO: 2217130
auaaccaagagugacauau

SEQ ID NO: 2217132 - RNA, 19 nt, Artificial Sequence
  Description of Artificial Sequence: Synthetic oligonucleotide
  Sense strand starting at position 3120 of SEQ ID NO: 1883797
ugagcagauuucgccacaa

SEQ ID NO: 2217133 - RNA, 19 nt, Artificial Sequence
  Description of Artificial Sequence: Synthetic oligonucleotide
  Antisense strand to SEQ ID NO: 2217132
uuguggcgaaaucugcuca

SEQ ID NO: 2217134 - RNA, 19 nt, Artificial Sequence
  Description of Artificial Sequence: Synthetic oligonucleotide
  Sense strand starting at position 1387 of SEQ ID NO: 1883797
uuagacagucucuacgaaa

SEQ ID NO: 2217135 - RNA, 19 nt, Artificial Sequence
  Description of Artificial Sequence: Synthetic oligonucleotide
  Antisense strand to SEQ ID NO: 2217134
uuucguagagacugucuaa

SEQ ID NO: 2217136 - RNA, 19 nt, Artificial Sequence
  Description of Artificial Sequence: Synthetic oligonucleotide
  Sense strand starting at position 872 of SEQ ID NO: 1883797
ggcguguaugcaucggaca

SEQ ID NO: 2217137 - RNA, 19 nt, Artificial Sequence
  Description of Artificial Sequence: Synthetic oligonucleotide
  Antisense strand to SEQ ID NO: 2217136
uguccgaugcauacacgcc

SEQ ID NO: 2217138 - RNA, 19 nt, Artificial Sequence
  Description of Artificial Sequence: Synthetic oligonucleotide
  Sense strand starting at position 841 of SEQ ID NO: 1883797
ggaguuugccuagagacac

SEQ ID NO: 2217139 - RNA, 19 nt, Artificial Sequence
  Description of Artificial Sequence: Synthetic oligonucleotide
  Antisense strand to SEQ ID NO: 2217138
gugucucuaggcaaacucc

SEQ ID NO: 2217140 - RNA, 19 nt, Artificial Sequence
  Description of Artificial Sequence: Synthetic oligonucleotide
  Sense strand starting at position 3886 of SEQ ID NO: 1883797
gagaguuugcguguguauu

SEQ ID NO: 2217141 - RNA, 19 nt, Artificial Sequence
  Description of Artificial Sequence: Synthetic oligonucleotide
  Antisense strand to SEQ ID NO: 2217140
aauacacacgcaaacucuc

SEQ ID NO: 2217142 - RNA, 19 nt, Artificial Sequence
  Description of Artificial Sequence: Synthetic oligonucleotide
  Sense strand starting at position 2611 of SEQ ID NO: 1883797
agaacaucucaguaguuuc

SEQ ID NO: 2217143 - RNA, 19 nt, Artificial Sequence
  Description of Artificial Sequence: Synthetic oligonucleotide
  Antisense strand to SEQ ID NO: 2217142
gaaacuacugagauguucu

SEQ ID NO: 2217144 - RNA, 19 nt, Artificial Sequence
  Description of Artificial Sequence: Synthetic oligonucleotide
  Sense strand starting at position 1318 of SEQ ID NO: 1883797
cacagauauuuggacugau

SEQ ID NO: 2217145 - RNA, 19 nt, Artificial Sequence
  Description of Artificial Sequence: Synthetic oligonucleotide
  Antisense strand to SEQ ID NO: 2217144
aucaguccaaauaucugug

SEQ ID NO: 2217146 - RNA, 19 nt, Artificial Sequence
  Description of Artificial Sequence: Synthetic oligonucleotide
  Sense strand starting at position 3063 of SEQ ID NO: 1883797
agccuagagcucgaggaaa

SEQ ID NO: 2217147 - RNA, 19 nt, Artificial Sequence
  Description of Artificial Sequence: Synthetic oligonucleotide
  Antisense strand to SEQ ID NO: 2217146
uuuccucgagcucuaggcu

SEQ ID NO: 2217148 - RNA, 19 nt, Artificial Sequence
  Description of Artificial Sequence: Synthetic oligonucleotide
  Sense strand starting at position 667 of SEQ ID NO: 1883797
ggagaccuguuuguacaaa

SEQ ID NO: 2217149 - RNA, 19 nt, Artificial Sequence
  Description of Artificial Sequence: Synthetic oligonucleotide
  Antisense strand to SEQ ID NO: 2217148
uuuguacaaacaggucucc

SEQ ID NO: 2217150 - RNA, 19 nt, Artificial Sequence
  Description of Artificial Sequence: Synthetic oligonucleotide
  Sense strand starting at position 431 of SEQ ID NO: 1883797
gcugaaugcccagacuaug

SEQ ID NO: 2217151 - RNA, 19 nt, Artificial Sequence
  Description of Artificial Sequence: Synthetic oligonucleotide
  Antisense strand to SEQ ID NO: 2217150
cauagucugggcauucagc

SEQ ID NO: 2217152 - RNA, 19 nt, Artificial Sequence
  Description of Artificial Sequence: Synthetic oligonucleotide
  Sense strand starting at position 666 of SEQ ID NO: 1883797
aggagaccuguuuguacaa

SEQ ID NO: 2217153 - RNA, 19 nt, Artificial Sequence
  Description of Artificial Sequence: Synthetic oligonucleotide
  Antisense strand to SEQ ID NO: 2217152
uuguacaaacaggucuccu

SEQ ID NO: 2217154 - RNA, 19 nt, Artificial Sequence
  Description of Artificial Sequence: Synthetic oligonucleotide
  Sense strand starting at position 838 of SEQ ID NO: 1883797
cuaggaguuugccuagaga

SEQ ID NO: 2217155 - RNA, 19 nt, Artificial Sequence
  Description of Artificial Sequence: Synthetic oligonucleotide
  Antisense strand to SEQ ID NO: 2217154
ucucuaggcaaacuccuag

SEQ ID NO: 2217156 - RNA, 19 nt, Artificial Sequence
  Description of Artificial Sequence: Synthetic oligonucleotide
  Sense strand starting at position 2546 of SEQ ID NO: 1883797
gagguuaagcugugaaaua

SEQ ID NO: 2217157 - RNA, 19 nt, Artificial Sequence
  Description of Artificial Sequence: Synthetic oligonucleotide
  Antisense strand to SEQ ID NO: 2217156
uauuucacagcuuaaccuc

SEQ ID NO: 2217158 - RNA, 19 nt, Artificial Sequence
  Description of Artificial Sequence: Synthetic oligonucleotide
  Sense strand starting at position 1713 of SEQ ID NO: 1883797
gcugaucacugagcugaaa

SEQ ID NO: 2217159 - RNA, 19 nt, Artificial Sequence
  Description of Artificial Sequence: Synthetic oligonucleotide
  Antisense strand to SEQ ID NO: 2217158
uuucagcucagugaucagc

SEQ ID NO: 2217160 - RNA, 19 nt, Artificial Sequence
  Description of Artificial Sequence: Synthetic oligonucleotide
  Sense strand starting at position 254 of SEQ ID NO: 1883797
uggccuagugagugaaaga

SEQ ID NO: 2217161 - RNA, 19 nt, Artificial Sequence
  Description of Artificial Sequence: Synthetic oligonucleotide
  Antisense strand to SEQ ID NO: 2217160
ucuuucacucacuaggcca

SEQ ID NO: 2217162 - RNA, 19 nt, Artificial Sequence
  Description of Artificial Sequence: Synthetic oligonucleotide
  Sense strand starting at position 1765 of SEQ ID NO: 1883797
ggcaccgugaaaugauuaa

SEQ ID NO: 2217163 - RNA, 19 nt, Artificial Sequence
  Description of Artificial Sequence: Synthetic oligonucleotide
  Antisense strand to SEQ ID NO: 2217162
uuaaucauuucacggugcc

SEQ ID NO: 2217164 - RNA, 19 nt, Artificial Sequence
  Description of Artificial Sequence: Synthetic oligonucleotide
  Sense strand starting at position 137 of SEQ ID NO: 1883797
ugcucuuaggcuuguauuu

SEQ ID NO: 2217165 - RNA, 19 nt, Artificial Sequence
  Description of Artificial Sequence: Synthetic oligonucleotide
  Antisense strand to SEQ ID NO: 2217164
aaauacaagccuaagagca

SEQ ID NO: 2217166 - RNA, 19 nt, Artificial Sequence
  Description of Artificial Sequence: Synthetic oligonucleotide
  Sense strand starting at position 2981 of SEQ ID NO: 1883797
gagagugaaucguccucag

SEQ ID NO: 2217167 - RNA, 19 nt, Artificial Sequence
  Description of Artificial Sequence: Synthetic oligonucleotide
  Antisense strand to SEQ ID NO: 2217166
cugaggacgauucacucuc

SEQ ID NO: 2217168 - RNA, 19 nt, Artificial Sequence
  Description of Artificial Sequence: Synthetic oligonucleotide
  Sense strand starting at position 565 of SEQ ID NO: 1883797
aggcuugucuaggugaaag

SEQ ID NO: 2217169 - RNA, 19 nt, Artificial Sequence
  Description of Artificial Sequence: Synthetic oligonucleotide
  Antisense strand to SEQ ID NO: 2217168
cuuucaccuagacaagccu

SEQ ID NO: 2217170 - RNA, 19 nt, Artificial Sequence
  Description of Artificial Sequence: Synthetic oligonucleotide
  Sense strand starting at position 3062 of SEQ ID NO: 1883797
gagccuagagcucgaggaa

SEQ ID NO: 2217171 - RNA, 19 nt, Artificial Sequence
  Description of Artificial Sequence: Synthetic oligonucleotide
  Antisense strand to SEQ ID NO: 2217170
uuccucgagcucuaggcuc

SEQ ID NO: 2217172 - RNA, 19 nt, Artificial Sequence
  Description of Artificial Sequence: Synthetic oligonucleotide
  Sense strand starting at position 1002 of SEQ ID NO: 1883797
ucagauauuuccgaauuac

SEQ ID NO: 2217173 - RNA, 19 nt, Artificial Sequence
  Description of Artificial Sequence: Synthetic oligonucleotide
  Antisense strand to SEQ ID NO: 2217172
guaauucggaaauaucuga

SEQ ID NO: 2217174 - RNA, 19 nt, Artificial Sequence
  Description of Artificial Sequence: Synthetic oligonucleotide
  Sense strand starting at position 1386 of SEQ ID NO: 1883797
guuagacagucucuacgaa

SEQ ID NO: 2217175 - RNA, 19 nt, Artificial Sequence
  Description of Artificial Sequence: Synthetic oligonucleotide
  Antisense strand to SEQ ID NO: 2217174
uucguagagacugucuaac

SEQ ID NO: 2217176 - RNA, 19 nt, Artificial Sequence
  Description of Artificial Sequence: Synthetic oligonucleotide
  Sense strand starting at position 564 of SEQ ID NO: 1883797
gaggcuugucuaggugaaa

SEQ ID NO: 2217177 - RNA, 19 nt, Artificial Sequence
  Description of Artificial Sequence: Synthetic oligonucleotide
  Antisense strand to SEQ ID NO: 2217176
uuucaccuagacaagccuc

SEQ ID NO: 2217178 - RNA, 19 nt, Artificial Sequence
  Description of Artificial Sequence: Synthetic oligonucleotide
  Sense strand starting at position 2988 of SEQ ID NO: 1883797
aaucguccucagcaagagu

SEQ ID NO: 2217179 - RNA, 19 nt, Artificial Sequence
  Description of Artificial Sequence: Synthetic oligonucleotide
  Antisense strand to SEQ ID NO: 2217178
acucuugcugaggacgauu

SEQ ID NO: 2217180 - RNA, 19 nt, Artificial Sequence
  Description of Artificial Sequence: Synthetic oligonucleotide
  Sense strand starting at position 2985 of SEQ ID NO: 1883797
gugaaucguccucagcaag

SEQ ID NO: 2217181 - RNA, 19 nt, Artificial Sequence
  Description of Artificial Sequence: Synthetic oligonucleotide
  Antisense strand to SEQ ID NO: 2217180
cuugcugaggacgauucac

SEQ ID NO: 2217182 - RNA, 19 nt, Artificial Sequence
  Description of Artificial Sequence: Synthetic oligonucleotide
  Sense strand starting at position 242 of SEQ ID NO: 1883797
ggaguuacacaguggccua

SEQ ID NO: 2217183 - RNA, 19 nt, Artificial Sequence
  Description of Artificial Sequence: Synthetic oligonucleotide
  Antisense strand to SEQ ID NO: 2217182
uaggccacuguguaacucc

SEQ ID NO: 2217184 - RNA, 19 nt, Artificial Sequence
  Description of Artificial Sequence: Synthetic oligonucleotide
  Sense strand starting at position 2487 of SEQ ID NO: 1883797
ccagucuucuagucccaga

SEQ ID NO: 2217185 - RNA, 19 nt, Artificial Sequence
  Description of Artificial Sequence: Synthetic oligonucleotide
  Antisense strand to SEQ ID NO: 2217184
ucugggacuagaagacugg

SEQ ID NO: 2217186 - RNA, 19 nt, Artificial Sequence
  Description of Artificial Sequence: Synthetic oligonucleotide
  Sense strand starting at position 1518 of SEQ ID NO: 1883797
guccgaggagucggauaau

SEQ ID NO: 2217187 - RNA, 19 nt, Artificial Sequence
  Description of Artificial Sequence: Synthetic oligonucleotide
  Antisense strand to SEQ ID NO: 2217186
auuauccgacuccucggac

SEQ ID NO: 2217188 - RNA, 19 nt, Artificial Sequence
  Description of Artificial Sequence: Synthetic oligonucleotide
  Sense strand starting at position 829 of SEQ ID NO: 1883797
gacccacgucuaggaguuu

SEQ ID NO: 2217189 - RNA, 19 nt, Artificial Sequence
  Description of Artificial Sequence: Synthetic oligonucleotide
  Antisense strand to SEQ ID NO: 2217188
aaacuccuagacguggguc

SEQ ID NO: 2217190 - RNA, 19 nt, Artificial Sequence
  Description of Artificial Sequence: Synthetic oligonucleotide
  Sense strand starting at position 2259 of SEQ ID NO: 1883797
gaaauuaacugcucggcca

SEQ ID NO: 2217191 - RNA, 19 nt, Artificial Sequence
  Description of Artificial Sequence: Synthetic oligonucleotide
  Antisense strand to SEQ ID NO: 2217190
uggccgagcaguuaauuuc

SEQ ID NO: 2217192 - RNA, 19 nt, Artificial Sequence
  Description of Artificial Sequence: Synthetic oligonucleotide
  Sense strand starting at position 3887 of SEQ ID NO: 1883797
agaguuugcguguguauuu

SEQ ID NO: 2217193 - RNA, 19 nt, Artificial Sequence
  Description of Artificial Sequence: Synthetic oligonucleotide
  Antisense strand to SEQ ID NO: 2217192
aaauacacacgcaaacucu

SEQ ID NO: 2217194 - RNA, 19 nt, Artificial Sequence
  Description of Artificial Sequence: Synthetic oligonucleotide
  Sense strand starting at position 2196 of SEQ ID NO: 1883797
gugacaucuccaugugcaa

SEQ ID NO: 2217195 - RNA, 19 nt, Artificial Sequence
  Description of Artificial Sequence: Synthetic oligonucleotide
  Antisense strand to SEQ ID NO: 2217194
uugcacauggagaugucac

SEQ ID NO: 2217196 - RNA, 19 nt, Artificial Sequence
  Description of Artificial Sequence: Synthetic oligonucleotide
  Sense strand starting at position 220 of SEQ ID NO: 1883797
gggccaagagaguguuugu

SEQ ID NO: 2217197 - RNA, 19 nt, Artificial Sequence
  Description of Artificial Sequence: Synthetic oligonucleotide
  Antisense strand to SEQ ID NO: 2217196
acaaacacucucuuggccc

SEQ ID NO: 2217198 - RNA, 19 nt, Artificial Sequence
  Description of Artificial Sequence: Synthetic oligonucleotide
  Sense strand starting at position 3140 of SEQ ID NO: 1883797
cggaaauguggcuguggau

SEQ ID NO: 2217199 - RNA, 19 nt, Artificial Sequence
  Description of Artificial Sequence: Synthetic oligonucleotide
  Antisense strand to SEQ ID NO: 2217198
auccacagccacauuuccg

SEQ ID NO: 2217200 - RNA, 19 nt, Artificial Sequence
  Description of Artificial Sequence: Synthetic oligonucleotide
  Sense strand starting at position 1807 of SEQ ID NO: 1883797
gugagaucauguccuguuc

SEQ ID NO: 2217201 - RNA, 19 nt, Artificial Sequence
  Description of Artificial Sequence: Synthetic oligonucleotide
  Antisense strand to SEQ ID NO: 2217200
gaacaggacaugaucucac

SEQ ID NO: 2217202 - RNA, 19 nt, Artificial Sequence
  Description of Artificial Sequence: Synthetic oligonucleotide
  Sense strand starting at position 1792 of SEQ ID NO: 1883797
agagcuucucgccauguga

SEQ ID NO: 2217203 - RNA, 19 nt, Artificial Sequence
  Description of Artificial Sequence: Synthetic oligonucleotide
  Antisense strand to SEQ ID NO: 2217202
ucacauggcgagaagcucu

SEQ ID NO: 2217204 - RNA, 19 nt, Artificial Sequence
  Description of Artificial Sequence: Synthetic oligonucleotide
  Sense strand starting at position 3690 of SEQ ID NO: 1883797
cgcgguguuuagauguguu

SEQ ID NO: 2217205 - RNA, 19 nt, Artificial Sequence
  Description of Artificial Sequence: Synthetic oligonucleotide
  Antisense strand to SEQ ID NO: 2217204
aacacaucuaaacaccgcg

SEQ ID NO: 2217206 - RNA, 19 nt, Artificial Sequence
  Description of Artificial Sequence: Synthetic oligonucleotide
  Sense strand starting at position 1001 of SEQ ID NO: 1883797
cucagauauuuccgaauua

SEQ ID NO: 2217207 - RNA, 19 nt, Artificial Sequence
  Description of Artificial Sequence: Synthetic oligonucleotide
  Antisense strand to SEQ ID NO: 2217206
uaauucggaaauaucugag

SEQ ID NO: 2217208 - RNA, 19 nt, Artificial Sequence
  Description of Artificial Sequence: Synthetic oligonucleotide
  Sense strand starting at position 2984 of SEQ ID NO: 1883797
agugaaucguccucagcaa

SEQ ID NO: 2217209 - RNA, 19 nt, Artificial Sequence
  Description of Artificial Sequence: Synthetic oligonucleotide
  Antisense strand to SEQ ID NO: 2217208
uugcugaggacgauucacu

SEQ ID NO: 2217210 - RNA, 19 nt, Artificial Sequence
  Description of Artificial Sequence: Synthetic oligonucleotide
  Sense strand starting at position 1772 of SEQ ID NO: 1883797
ugaaaugauuaaggaacua

SEQ ID NO: 2217211 - RNA, 19 nt, Artificial Sequence
  Description of Artificial Sequence: Synthetic oligonucleotide
  Antisense strand to SEQ ID NO: 2217210
uaguuccuuaaucauuuca

SEQ ID NO: 2217212 - RNA, 19 nt, Artificial Sequence
  Description of Artificial Sequence: Synthetic oligonucleotide
  Sense strand starting at position 3853 of SEQ ID NO: 1883798
uugagcucacccuagauga

SEQ ID NO: 2217213 - RNA, 19 nt, Artificial Sequence
  Description of Artificial Sequence: Synthetic oligonucleotide
  Antisense strand to SEQ ID NO: 2217212
ucaucuagggugagcucaa

SEQ ID NO: 2217214 - RNA, 19 nt, Artificial Sequence
  Description of Artificial Sequence: Synthetic oligonucleotide
  Sense strand starting at position 3823 of SEQ ID NO: 1883798
cugcaauguguguucccga

SEQ ID NO: 2217215 - RNA, 19 nt, Artificial Sequence
  Description of Artificial Sequence: Synthetic oligonucleotide
  Antisense strand to SEQ ID NO: 2217214
ucgggaacacacauugcag

SEQ ID NO: 2217216 - RNA, 19 nt, Artificial Sequence
  Description of Artificial Sequence: Synthetic oligonucleotide
  Sense strand starting at position 3378 of SEQ ID NO: 1883798
accugacugccauagacuu

SEQ ID NO: 2217217 - RNA, 19 nt, Artificial Sequence
  Description of Artificial Sequence: Synthetic oligonucleotide
  Antisense strand to SEQ ID NO: 2217216
aagucuauggcagucaggu

SEQ ID NO: 2217218 - RNA, 19 nt, Artificial Sequence
  Description of Artificial Sequence: Synthetic oligonucleotide
  Sense strand starting at position 843 of SEQ ID NO: 1883798
uggcgccuuccuuuaaguu

SEQ ID NO: 2217219 - RNA, 19 nt, Artificial Sequence
  Description of Artificial Sequence: Synthetic oligonucleotide
  Antisense strand to SEQ ID NO: 2217218
aacuuaaaggaaggcgcca

SEQ ID NO: 2217220 - RNA, 19 nt, Artificial Sequence
  Description of Artificial Sequence: Synthetic oligonucleotide
  Sense strand starting at position 1391 of SEQ ID NO: 1883798
gguuuaaaucccugggagg

SEQ ID NO: 2217221 - RNA, 19 nt, Artificial Sequence
  Description of Artificial Sequence: Synthetic oligonucleotide
  Antisense strand to SEQ ID NO: 2217220
ccucccagggauuuaaacc

SEQ ID NO: 2217222 - RNA, 19 nt, Artificial Sequence
  Description of Artificial Sequence: Synthetic oligonucleotide
  Sense strand starting at position 3534 of SEQ ID NO: 1883798
cagcguuugcuauucgaug

SEQ ID NO: 2217223 - RNA, 19 nt, Artificial Sequence
  Description of Artificial Sequence: Synthetic oligonucleotide
  Antisense strand to SEQ ID NO: 2217222
caucgaauagcaaacgcug

SEQ ID NO: 2217224 - RNA, 19 nt, Artificial Sequence
  Description of Artificial Sequence: Synthetic oligonucleotide
  Sense strand starting at position 3855 of SEQ ID NO: 1883798
gagcucacccuagaugagu

SEQ ID NO: 2217225 - RNA, 19 nt, Artificial Sequence
  Description of Artificial Sequence: Synthetic oligonucleotide
  Antisense strand to SEQ ID NO: 2217224
acucaucuagggugagcuc

SEQ ID NO: 2217226 - RNA, 19 nt, Artificial Sequence
  Description of Artificial Sequence: Synthetic oligonucleotide
  Sense strand starting at position 815 of SEQ ID NO: 1883798
agguauuagcaucaccuau

SEQ ID NO: 2217227 - RNA, 19 nt, Artificial Sequence
  Description of Artificial Sequence: Synthetic oligonucleotide
  Antisense strand to SEQ ID NO: 2217226
auaggugaugcuaauaccu

SEQ ID NO: 2217228 - RNA, 19 nt, Artificial Sequence
  Description of Artificial Sequence: Synthetic oligonucleotide
  Sense strand starting at position 1557 of SEQ ID NO: 1883798
gccggcuuucggagaaagu

SEQ ID NO: 2217229 - RNA, 19 nt, Artificial Sequence
  Description of Artificial Sequence: Synthetic oligonucleotide
  Antisense strand to SEQ ID NO: 2217228
acuuucuccgaaagccggc

SEQ ID NO: 2217230 - RNA, 19 nt, Artificial Sequence
  Description of Artificial Sequence: Synthetic oligonucleotide
  Sense strand starting at position 3785 of SEQ ID NO: 1883798
acuugagauugcucuuaag

SEQ ID NO: 2217231 - RNA, 19 nt, Artificial Sequence
  Description of Artificial Sequence: Synthetic oligonucleotide
  Antisense strand to SEQ ID NO: 2217230
cuuaagagcaaucucaagu

SEQ ID NO: 2217232 - RNA, 19 nt, Artificial Sequence
  Description of Artificial Sequence: Synthetic oligonucleotide
  Sense strand starting at position 3928 of SEQ ID NO: 1883798
gcugucuuaccugaaacca

SEQ ID NO: 2217233 - RNA, 19 nt, Artificial Sequence
  Description of Artificial Sequence: Synthetic oligonucleotide
  Antisense strand to SEQ ID NO: 2217232
ugguuucagguaagacagc

SEQ ID NO: 2217234 - RNA, 19 nt, Artificial Sequence
  Description of Artificial Sequence: Synthetic oligonucleotide
  Sense strand starting at position 3163 of SEQ ID NO: 1883798
aagaaagggucgucccaau

SEQ ID NO: 2217235 - RNA, 19 nt, Artificial Sequence
  Description of Artificial Sequence: Synthetic oligonucleotide
  Antisense strand to SEQ ID NO: 2217234
auugggacgacccuuucuu

SEQ ID NO: 2217236 - RNA, 19 nt, Artificial Sequence
  Description of Artificial Sequence: Synthetic oligonucleotide
  Sense strand starting at position 3826 of SEQ ID NO: 1883798
caauguguguucccgauuu

SEQ ID NO: 2217237 - RNA, 19 nt, Artificial Sequence
  Description of Artificial Sequence: Synthetic oligonucleotide
  Antisense strand to SEQ ID NO: 2217236
aaaucgggaacacacauug

SEQ ID NO: 2217238 - RNA, 19 nt, Artificial Sequence
  Description of Artificial Sequence: Synthetic oligonucleotide
  Sense strand starting at position 3782 of SEQ ID NO: 1883798
gagacuugagauugcucuu

SEQ ID NO: 2217239 - RNA, 19 nt, Artificial Sequence
  Description of Artificial Sequence: Synthetic oligonucleotide
  Antisense strand to SEQ ID NO: 2217238
aagagcaaucucaagucuc

SEQ ID NO: 2217240 - RNA, 19 nt, Artificial Sequence
  Description of Artificial Sequence: Synthetic oligonucleotide
  Sense strand starting at position 3386 of SEQ ID NO: 1883798
gccauagacuuuccauuga

SEQ ID NO: 2217241 - RNA, 19 nt, Artificial Sequence
  Description of Artificial Sequence: Synthetic oligonucleotide
  Antisense strand to SEQ ID NO: 2217240
ucaauggaaagucuauggc

SEQ ID NO: 2217242 - RNA, 19 nt, Artificial Sequence
  Description of Artificial Sequence: Synthetic oligonucleotide
  Sense strand starting at position 3346 of SEQ ID NO: 1883798
ggucucacauacuugaagu

SEQ ID NO: 2217243 - RNA, 19 nt, Artificial Sequence
  Description of Artificial Sequence: Synthetic oligonucleotide
  Antisense strand to SEQ ID NO: 2217242
acuucaaguaugugagacc

SEQ ID NO: 2217244 - RNA, 19 nt, Artificial Sequence
  Description of Artificial Sequence: Synthetic oligonucleotide
  Sense strand starting at position 3597 of SEQ ID NO: 1883798
agauacguuuguuuaggaa

SEQ ID NO: 2217245 - RNA, 19 nt, Artificial Sequence
  Description of Artificial Sequence: Synthetic oligonucleotide
  Antisense strand to SEQ ID NO: 2217244
uuccuaaacaaacguaucu

SEQ ID NO: 2217246 - RNA, 19 nt, Artificial Sequence
  Description of Artificial Sequence: Synthetic oligonucleotide
  Sense strand starting at position 3596 of SEQ ID NO: 1883798
aagauacguuuguuuagga

SEQ ID NO: 2217247 - RNA, 19 nt, Artificial Sequence
  Description of Artificial Sequence: Synthetic oligonucleotide
  Antisense strand to SEQ ID NO: 2217246
uccuaaacaaacguaucuu

SEQ ID NO: 2217248 - RNA, 19 nt, Artificial Sequence
  Description of Artificial Sequence: Synthetic oligonucleotide
  Sense strand starting at position 3594 of SEQ ID NO: 1883798
caaagauacguuuguuuag

SEQ ID NO: 2217249 - RNA, 19 nt, Artificial Sequence
  Description of Artificial Sequence: Synthetic oligonucleotide
  Antisense strand to SEQ ID NO: 2217248
cuaaacaaacguaucuuug

SEQ ID NO: 2217250 - RNA, 19 nt, Artificial Sequence
  Description of Artificial Sequence: Synthetic oligonucleotide
  Sense strand starting at position 3545 of SEQ ID NO: 1883798
auucgaugccuccagaugu

SEQ ID NO: 2217251 - RNA, 19 nt, Artificial Sequence
  Description of Artificial Sequence: Synthetic oligonucleotide
  Antisense strand to SEQ ID NO: 2217250
acaucuggaggcaucgaau

SEQ ID NO: 2217252 - RNA, 19 nt, Artificial Sequence
  Description of Artificial Sequence: Synthetic oligonucleotide
  Sense strand starting at position 3864 of SEQ ID NO: 1883798
cuagaugaguccuuugguu

SEQ ID NO: 2217253 - RNA, 19 nt, Artificial Sequence
  Description of Artificial Sequence: Synthetic oligonucleotide
  Antisense strand to SEQ ID NO: 2217252
aaccaaaggacucaucuag

SEQ ID NO: 2217254 - RNA, 19 nt, Artificial Sequence
  Description of Artificial Sequence: Synthetic oligonucleotide
  Sense strand starting at position 303 of SEQ ID NO: 1883798
gcuuaagacugucuaagua

SEQ ID NO: 2217255 - RNA, 19 nt, Artificial Sequence
  Description of Artificial Sequence: Synthetic oligonucleotide
  Antisense strand to SEQ ID NO: 2217254
uacuuagacagucuuaagc

SEQ ID NO: 2217256 - RNA, 19 nt, Artificial Sequence
  Description of Artificial Sequence: Synthetic oligonucleotide
  Sense strand starting at position 1558 of SEQ ID NO: 1883798
ccggcuuucggagaaaguu

SEQ ID NO: 2217257 - RNA, 19 nt, Artificial Sequence
  Description of Artificial Sequence: Synthetic oligonucleotide
  Antisense strand to SEQ ID NO: 2217256
aacuuucuccgaaagccgg

SEQ ID NO: 2217258 - RNA, 19 nt, Artificial Sequence
  Description of Artificial Sequence: Synthetic oligonucleotide
  Sense strand starting at position 3979 of SEQ ID NO: 1883798
cuuacucugcaggguuuaa

SEQ ID NO: 2217259 - RNA, 19 nt, Artificial Sequence
  Description of Artificial Sequence: Synthetic oligonucleotide
  Antisense strand to SEQ ID NO: 2217258
uuaaacccugcagaguaag

SEQ ID NO: 2217260 - RNA, 19 nt, Artificial Sequence
  Description of Artificial Sequence: Synthetic oligonucleotide
  Sense strand starting at position 175 of SEQ ID NO: 1883798
aucguaugugucuacacau

SEQ ID NO: 2217261 - RNA, 19 nt, Artificial Sequence
  Description of Artificial Sequence: Synthetic oligonucleotide
  Antisense strand to SEQ ID NO: 2217260
auguguagacacauacgau

SEQ ID NO: 2217262 - RNA, 19 nt, Artificial Sequence
  Description of Artificial Sequence: Synthetic oligonucleotide
  Sense strand starting at position 3357 of SEQ ID NO: 1883798
cuugaagucugagcugagu

SEQ ID NO: 2217263 - RNA, 19 nt, Artificial Sequence
  Description of Artificial Sequence: Synthetic oligonucleotide
  Antisense strand to SEQ ID NO: 2217262
acucagcucagacuucaag

SEQ ID NO: 2217264 - RNA, 19 nt, Artificial Sequence
  Description of Artificial Sequence: Synthetic oligonucleotide
  Sense strand starting at position 202 of SEQ ID NO: 1883798
uuccucgauucucuaaagu

SEQ ID NO: 2217265 - RNA, 19 nt, Artificial Sequence
  Description of Artificial Sequence: Synthetic oligonucleotide
  Antisense strand to SEQ ID NO: 2217264
acuuuagagaaucgaggaa

SEQ ID NO: 2217266 - RNA, 19 nt, Artificial Sequence
  Description of Artificial Sequence: Synthetic oligonucleotide
  Sense strand starting at position 165 of SEQ ID NO: 1883798
gauguaauacaucguaugu

SEQ ID NO: 2217267 - RNA, 19 nt, Artificial Sequence
  Description of Artificial Sequence: Synthetic oligonucleotide
  Antisense strand to SEQ ID NO: 2217266
acauacgauguauuacauc

SEQ ID NO: 2217268 - RNA, 19 nt, Artificial Sequence
  Description of Artificial Sequence: Synthetic oligonucleotide
  Sense strand starting at position 170 of SEQ ID NO: 1883798
aauacaucguaugugucua

SEQ ID NO: 2217269 - RNA, 19 nt, Artificial Sequence
  Description of Artificial Sequence: Synthetic oligonucleotide
  Antisense strand to SEQ ID NO: 2217268
uagacacauacgauguauu

SEQ ID NO: 2217270 - RNA, 19 nt, Artificial Sequence
  Description of Artificial Sequence: Synthetic oligonucleotide
  Sense strand starting at position 1170 of SEQ ID NO: 1883798
gugacagcucggcaaaguu

SEQ ID NO: 2217271 - RNA, 19 nt, Artificial Sequence
  Description of Artificial Sequence: Synthetic oligonucleotide
  Antisense strand to SEQ ID NO: 2217270
aacuuugccgagcugucac

SEQ ID NO: 2217272 - RNA, 19 nt, Artificial Sequence
  Description of Artificial Sequence: Synthetic oligonucleotide
  Sense strand starting at position 3409 of SEQ ID NO: 1883798
ggaaaugugucagagagaa

SEQ ID NO: 2217273 - RNA, 19 nt, Artificial Sequence
  Description of Artificial Sequence: Synthetic oligonucleotide
  Antisense strand to SEQ ID NO: 2217272
uucucucugacacauuucc

SEQ ID NO: 2217274 - RNA, 19 nt, Artificial Sequence
  Description of Artificial Sequence: Synthetic oligonucleotide
  Sense strand starting at position 3921 of SEQ ID NO: 1883798
ucaguaagcugucuuaccu

SEQ ID NO: 2217275 - RNA, 19 nt, Artificial Sequence
  Description of Artificial Sequence: Synthetic oligonucleotide
  Antisense strand to SEQ ID NO: 2217274
agguaagacagcuuacuga

SEQ ID NO: 2217276 - RNA, 19 nt, Artificial Sequence
  Description of Artificial Sequence: Synthetic oligonucleotide
  Sense strand starting at position 174 of SEQ ID NO: 1883798
caucguaugugucuacaca

SEQ ID NO: 2217277 - RNA, 19 nt, Artificial Sequence
  Description of Artificial Sequence: Synthetic oligonucleotide
  Antisense strand to SEQ ID NO: 2217276
uguguagacacauacgaug

SEQ ID NO: 2217278 - RNA, 19 nt, Artificial Sequence
  Description of Artificial Sequence: Synthetic oligonucleotide
  Sense strand starting at position 844 of SEQ ID NO: 1883798
ggcgccuuccuuuaaguua

SEQ ID NO: 2217279 - RNA, 19 nt, Artificial Sequence
  Description of Artificial Sequence: Synthetic oligonucleotide
  Antisense strand to SEQ ID NO: 2217278
uaacuuaaaggaaggcgcc

SEQ ID NO: 2217280 - RNA, 19 nt, Artificial Sequence
  Description of Artificial Sequence: Synthetic oligonucleotide
  Sense strand starting at position 1169 of SEQ ID NO: 1883798
ggugacagcucggcaaagu

SEQ ID NO: 2217281 - RNA, 19 nt, Artificial Sequence
  Description of Artificial Sequence: Synthetic oligonucleotide
  Antisense strand to SEQ ID NO: 2217280
acuuugccgagcugucacc

SEQ ID NO: 2217282 - RNA, 19 nt, Artificial Sequence
  Description of Artificial Sequence: Synthetic oligonucleotide
  Sense strand starting at position 1662 of SEQ ID NO: 1883798
gaugcuuaaugagacgaca

SEQ ID NO: 2217283 - RNA, 19 nt, Artificial Sequence
  Description of Artificial Sequence: Synthetic oligonucleotide
  Antisense strand to SEQ ID NO: 2217282
ugucgucucauuaagcauc

SEQ ID NO: 2217284 - RNA, 19 nt, Artificial Sequence
  Description of Artificial Sequence: Synthetic oligonucleotide
  Sense strand starting at position 3656 of SEQ ID NO: 1883798
gucauuuaauguugguaac

SEQ ID NO: 2217285 - RNA, 19 nt, Artificial Sequence
  Description of Artificial Sequence: Synthetic oligonucleotide
  Antisense strand to SEQ ID NO: 2217284
guuaccaacauuaaaugac

SEQ ID NO: 2217286 - RNA, 19 nt, Artificial Sequence
  Description of Artificial Sequence: Synthetic oligonucleotide
  Sense strand starting at position 3736 of SEQ ID NO: 1883798
acugaaggcucacauuauu

SEQ ID NO: 2217287 - RNA, 19 nt, Artificial Sequence
  Description of Artificial Sequence: Synthetic oligonucleotide
  Antisense strand to SEQ ID NO: 2217286
aauaaugugagccuucagu

SEQ ID NO: 2217288 - RNA, 19 nt, Artificial Sequence
  Description of Artificial Sequence: Synthetic oligonucleotide
  Sense strand starting at position 3824 of SEQ ID NO: 1883798
ugcaauguguguucccgau

SEQ ID NO: 2217289 - RNA, 19 nt, Artificial Sequence
  Description of Artificial Sequence: Synthetic oligonucleotide
  Antisense strand to SEQ ID NO: 2217288
aucgggaacacacauugca

SEQ ID NO: 2217290 - RNA, 19 nt, Artificial Sequence
  Description of Artificial Sequence: Synthetic oligonucleotide
  Sense strand starting at position 822 of SEQ ID NO: 1883798
agcaucaccuauggaauaa

SEQ ID NO: 2217291 - RNA, 19 nt, Artificial Sequence
  Description of Artificial Sequence: Synthetic oligonucleotide
  Antisense strand to SEQ ID NO: 2217290
uuauuccauaggugaugcu

SEQ ID NO: 2217292 - RNA, 19 nt, Artificial Sequence
  Description of Artificial Sequence: Synthetic oligonucleotide
  Sense strand starting at position 213 of SEQ ID NO: 1883799
gcauuuacuuugguauauu

SEQ ID NO: 2217293 - RNA, 19 nt, Artificial Sequence
  Description of Artificial Sequence: Synthetic oligonucleotide
  Antisense strand to SEQ ID NO: 2217292
aauauaccaaaguaaaugc

SEQ ID NO: 2217294 - RNA, 19 nt, Artificial Sequence
  Description of Artificial Sequence: Synthetic oligonucleotide
  Sense strand starting at position 1212 of SEQ ID NO: 1883799
gcuccuccucuuguguuua

SEQ ID NO: 2217295 - RNA, 19 nt, Artificial Sequence
  Description of Artificial Sequence: Synthetic oligonucleotide
  Antisense strand to SEQ ID NO: 2217294
uaaacacaagaggaggagc

SEQ ID NO: 2217296 - RNA, 19 nt, Artificial Sequence
  Description of Artificial Sequence: Synthetic oligonucleotide
  Sense strand starting at position 1552 of SEQ ID NO: 1883799
gguuacaguagugaugaaa

SEQ ID NO: 2217297 - RNA, 19 nt, Artificial Sequence
  Description of Artificial Sequence: Synthetic oligonucleotide
  Antisense strand to SEQ ID NO: 2217296
uuucaucacuacuguaacc

SEQ ID NO: 2217298 - RNA, 19 nt, Artificial Sequence
  Description of Artificial Sequence: Synthetic oligonucleotide
  Sense strand starting at position 3917 of SEQ ID NO: 1883799
aaaugaacauguguggaau

SEQ ID NO: 2217299 - RNA, 19 nt, Artificial Sequence
  Description of Artificial Sequence: Synthetic oligonucleotide
  Antisense strand to SEQ ID NO: 2217298
auuccacacauguucauuu

SEQ ID NO: 2217300 - RNA, 19 nt, Artificial Sequence
  Description of Artificial Sequence: Synthetic oligonucleotide
  Sense strand starting at position 211 of SEQ ID NO: 1883799
uugcauuuacuuugguaua

SEQ ID NO: 2217301 - RNA, 19 nt, Artificial Sequence
  Description of Artificial Sequence: Synthetic oligonucleotide
  Antisense strand to SEQ ID NO: 2217300
uauaccaaaguaaaugcaa

SEQ ID NO: 2217302 - RNA, 19 nt, Artificial Sequence
  Description of Artificial Sequence: Synthetic oligonucleotide
  Sense strand starting at position 1021 of SEQ ID NO: 1883799
ucaucaagaucacuaguga

SEQ ID NO: 2217303 - RNA, 19 nt, Artificial Sequence
  Description of Artificial Sequence: Synthetic oligonucleotide
  Antisense strand to SEQ ID NO: 2217302
ucacuagugaucuugauga

SEQ ID NO: 2217304 - RNA, 19 nt, Artificial Sequence
  Description of Artificial Sequence: Synthetic oligonucleotide
  Sense strand starting at position 3713 of SEQ ID NO: 1883799
ucauguggucguguaugua

SEQ ID NO: 2217305 - RNA, 19 nt, Artificial Sequence
  Description of Artificial Sequence: Synthetic oligonucleotide
  Antisense strand to SEQ ID NO: 2217304
uacauacacgaccacauga

SEQ ID NO: 2217306 - RNA, 19 nt, Artificial Sequence
  Description of Artificial Sequence: Synthetic oligonucleotide
  Sense strand starting at position 2310 of SEQ ID NO: 1883799
acaggaguuguucagaagu

SEQ ID NO: 2217307 - RNA, 19 nt, Artificial Sequence
  Description of Artificial Sequence: Synthetic oligonucleotide
  Antisense strand to SEQ ID NO: 2217306
acuucugaacaacuccugu

SEQ ID NO: 2217308 - RNA, 19 nt, Artificial Sequence
  Description of Artificial Sequence: Synthetic oligonucleotide
  Sense strand starting at position 974 of SEQ ID NO: 1883799
aguugaauccagggaggua

SEQ ID NO: 2217309 - RNA, 19 nt, Artificial Sequence
  Description of Artificial Sequence: Synthetic oligonucleotide
  Antisense strand to SEQ ID NO: 2217308
uaccucccuggauucaacu

SEQ ID NO: 2217310 - RNA, 19 nt, Artificial Sequence
  Description of Artificial Sequence: Synthetic oligonucleotide
  Sense strand starting at position 45 of SEQ ID NO: 1883799
uccagugaccauuaguaac

SEQ ID NO: 2217311 - RNA, 19 nt, Artificial Sequence
  Description of Artificial Sequence: Synthetic oligonucleotide
  Antisense strand to SEQ ID NO: 2217310
guuacuaauggucacugga

SEQ ID NO: 2217312 - RNA, 19 nt, Artificial Sequence
  Description of Artificial Sequence: Synthetic oligonucleotide
  Sense strand starting at position 2326 of SEQ ID NO: 1883799
aguauuugcucugugaauc

SEQ ID NO: 2217313 - RNA, 19 nt, Artificial Sequence
  Description of Artificial Sequence: Synthetic oligonucleotide
  Antisense strand to SEQ ID NO: 2217312
gauucacagagcaaauacu

SEQ ID NO: 2217314 - RNA, 19 nt, Artificial Sequence
  Description of Artificial Sequence: Synthetic oligonucleotide
  Sense strand starting at position 2280 of SEQ ID NO: 1883799
aucacuggugccuagaaca

SEQ ID NO: 2217315 - RNA, 19 nt, Artificial Sequence
  Description of Artificial Sequence: Synthetic oligonucleotide
  Antisense strand to SEQ ID NO: 2217314
uguucuaggcaccagugau

SEQ ID NO: 2217316 - RNA, 19 nt, Artificial Sequence
  Description of Artificial Sequence: Synthetic oligonucleotide
  Sense strand starting at position 2327 of SEQ ID NO: 1883799
guauuugcucugugaauca

SEQ ID NO: 2217317 - RNA, 19 nt, Artificial Sequence
  Description of Artificial Sequence: Synthetic oligonucleotide
  Antisense strand to SEQ ID NO: 2217316
ugauucacagagcaaauac

SEQ ID NO: 2217318 - RNA, 19 nt, Artificial Sequence
  Description of Artificial Sequence: Synthetic oligonucleotide
  Sense strand starting at position 1402 of SEQ ID NO: 1883799
ucuaauggguaucucaaau

SEQ ID NO: 2217319 - RNA, 19 nt, Artificial Sequence
  Description of Artificial Sequence: Synthetic oligonucleotide
  Antisense strand to SEQ ID NO: 2217318
auuugagauacccauuaga

SEQ ID NO: 2217320 - RNA, 19 nt, Artificial Sequence
  Description of Artificial Sequence: Synthetic oligonucleotide
  Sense strand starting at position 3231 of SEQ ID NO: 1883799
accaguaauugacuugacu

SEQ ID NO: 2217321 - RNA, 19 nt, Artificial Sequence
  Description of Artificial Sequence: Synthetic oligonucleotide
  Antisense strand to SEQ ID NO: 2217320
agucaagucaauuacuggu

SEQ ID NO: 2217322 - RNA, 19 nt, Artificial Sequence
  Description of Artificial Sequence: Synthetic oligonucleotide
  Sense strand starting at position 594 of SEQ ID NO: 1883799
cuuagagguuaucuaaacu

SEQ ID NO: 2217323 - RNA, 19 nt, Artificial Sequence
  Description of Artificial Sequence: Synthetic oligonucleotide
  Antisense strand to SEQ ID NO: 2217322
aguuuagauaaccucuaag

SEQ ID NO: 2217324 - RNA, 19 nt, Artificial Sequence
  Description of Artificial Sequence: Synthetic oligonucleotide
  Sense strand starting at position 3565 of SEQ ID NO: 1883799
uugcucugccugggauuua

SEQ ID NO: 2217325 - RNA, 19 nt, Artificial Sequence
  Description of Artificial Sequence: Synthetic oligonucleotide
  Antisense strand to SEQ ID NO: 2217324
uaaaucccaggcagagcaa

SEQ ID NO: 2217326 - RNA, 19 nt, Artificial Sequence
  Description of Artificial Sequence: Synthetic oligonucleotide
  Sense strand starting at position 3564 of SEQ ID NO: 1883799
auugcucugccugggauuu

SEQ ID NO: 2217327 - RNA, 19 nt, Artificial Sequence
  Description of Artificial Sequence: Synthetic oligonucleotide
  Antisense strand to SEQ ID NO: 2217326
aaaucccaggcagagcaau

SEQ ID NO: 2217328 - RNA, 19 nt, Artificial Sequence
  Description of Artificial Sequence: Synthetic oligonucleotide
  Sense strand starting at position 3925 of SEQ ID NO: 1883799
auguguggaaucuauagua

SEQ ID NO: 2217329 - RNA, 19 nt, Artificial Sequence
  Description of Artificial Sequence: Synthetic oligonucleotide
  Antisense strand to SEQ ID NO: 2217328
uacuauagauuccacacau

SEQ ID NO: 2217330 - RNA, 19 nt, Artificial Sequence
  Description of Artificial Sequence: Synthetic oligonucleotide
  Sense strand starting at position 3614 of SEQ ID NO: 1883799
guuuguuuggauuaagauu

SEQ ID NO: 2217331 - RNA, 19 nt, Artificial Sequence
  Description of Artificial Sequence: Synthetic oligonucleotide
  Antisense strand to SEQ ID NO: 2217330
aaucuuaauccaaacaaac

SEQ ID NO: 2217332 - RNA, 19 nt, Artificial Sequence
  Description of Artificial Sequence: Synthetic oligonucleotide
  Sense strand starting at position 1493 of SEQ ID NO: 1883799
guuagucagcaacauuaaa

SEQ ID NO: 2217333 - RNA, 19 nt, Artificial Sequence
  Description of Artificial Sequence: Synthetic oligonucleotide
  Antisense strand to SEQ ID NO: 2217332
uuuaauguugcugacuaac

SEQ ID NO: 2217334 - RNA, 19 nt, Artificial Sequence
  Description of Artificial Sequence: Synthetic oligonucleotide
  Sense strand starting at position 533 of SEQ ID NO: 1883799
cuggccucuaacgagauau

SEQ ID NO: 2217335 - RNA, 19 nt, Artificial Sequence
  Description of Artificial Sequence: Synthetic oligonucleotide
  Antisense strand to SEQ ID NO: 2217334
auaucucguuagaggccag

SEQ ID NO: 2217336 - RNA, 19 nt, Artificial Sequence
  Description of Artificial Sequence: Synthetic oligonucleotide
  Sense strand starting at position 2364 of SEQ ID NO: 1883799
ugugaaugagguuauuggu

SEQ ID NO: 2217337 - RNA, 19 nt, Artificial Sequence
  Description of Artificial Sequence: Synthetic oligonucleotide
  Antisense strand to SEQ ID NO: 2217336
accaauaaccucauucaca

SEQ ID NO: 2217338 - RNA, 19 nt, Artificial Sequence
  Description of Artificial Sequence: Synthetic oligonucleotide
  Sense strand starting at position 588 of SEQ ID NO: 1883799
cuggaucuuagagguuauc

SEQ ID NO: 2217339 - RNA, 19 nt, Artificial Sequence
  Description of Artificial Sequence: Synthetic oligonucleotide
  Antisense strand to SEQ ID NO: 2217338
gauaaccucuaagauccag

SEQ ID NO: 2217340 - RNA, 19 nt, Artificial Sequence
  Description of Artificial Sequence: Synthetic oligonucleotide
  Sense strand starting at position 3971 of SEQ ID NO: 1883799
gggccucuuccagaaaguu

SEQ ID NO: 2217341 - RNA, 19 nt, Artificial Sequence
  Description of Artificial Sequence: Synthetic oligonucleotide
  Antisense strand to SEQ ID NO: 2217340
aacuuucuggaagaggccc

SEQ ID NO: 2217342 - RNA, 19 nt, Artificial Sequence
  Description of Artificial Sequence: Synthetic oligonucleotide
  Sense strand starting at position 3188 of SEQ ID NO: 1883799
ggauguggcaacugaaauu

SEQ ID NO: 2217343 - RNA, 19 nt, Artificial Sequence
  Description of Artificial Sequence: Synthetic oligonucleotide
  Antisense strand to SEQ ID NO: 2217342
aauuucaguugccacaucc

SEQ ID NO: 2217344 - RNA, 19 nt, Artificial Sequence
  Description of Artificial Sequence: Synthetic oligonucleotide
  Sense strand starting at position 2241 of SEQ ID NO: 1883799
ccaugagagcagugacaug

SEQ ID NO: 2217345 - RNA, 19 nt, Artificial Sequence
  Description of Artificial Sequence: Synthetic oligonucleotide
  Antisense strand to SEQ ID NO: 2217344
caugucacugcucucaugg

SEQ ID NO: 2217346 - RNA, 19 nt, Artificial Sequence
  Description of Artificial Sequence: Synthetic oligonucleotide
  Sense strand starting at position 2776 of SEQ ID NO: 1883799
aucucucaguccucagaga

SEQ ID NO: 2217347 - RNA, 19 nt, Artificial Sequence
  Description of Artificial Sequence: Synthetic oligonucleotide
  Antisense strand to SEQ ID NO: 2217346
ucucugaggacugagagau

SEQ ID NO: 2217348 - RNA, 19 nt, Artificial Sequence
  Description of Artificial Sequence: Synthetic oligonucleotide
  Sense strand starting at position 2359 of SEQ ID NO: 1883799
ugcauugugaaugagguua

SEQ ID NO: 2217349 - RNA, 19 nt, Artificial Sequence
  Description of Artificial Sequence: Synthetic oligonucleotide
  Antisense strand to SEQ ID NO: 2217348
uaaccucauucacaaugca

SEQ ID NO: 2217350 - RNA, 19 nt, Artificial Sequence
  Description of Artificial Sequence: Synthetic oligonucleotide
  Sense strand starting at position 1490 of SEQ ID NO: 1883799
auaguuagucagcaacauu

SEQ ID NO: 2217351 - RNA, 19 nt, Artificial Sequence
  Description of Artificial Sequence: Synthetic oligonucleotide
  Antisense strand to SEQ ID NO: 2217350
aauguugcugacuaacuau

SEQ ID NO: 2217352 - RNA, 19 nt, Artificial Sequence
  Description of Artificial Sequence: Synthetic oligonucleotide
  Sense strand starting at position 3622 of SEQ ID NO: 1883799
ggauuaagauugccaaguu

SEQ ID NO: 2217353 - RNA, 19 nt, Artificial Sequence
  Description of Artificial Sequence: Synthetic oligonucleotide
  Antisense strand to SEQ ID NO: 2217352
aacuuggcaaucuuaaucc

SEQ ID NO: 2217354 - RNA, 19 nt, Artificial Sequence
  Description of Artificial Sequence: Synthetic oligonucleotide
  Sense strand starting at position 2332 of SEQ ID NO: 1883799
ugcucugugaaucaacgaa

SEQ ID NO: 2217355 - RNA, 19 nt, Artificial Sequence
  Description of Artificial Sequence: Synthetic oligonucleotide
  Antisense strand to SEQ ID NO: 2217354
uucguugauucacagagca

SEQ ID NO: 2217356 - RNA, 19 nt, Artificial Sequence
  Description of Artificial Sequence: Synthetic oligonucleotide
  Sense strand starting at position 2462 of SEQ ID NO: 1883799
ugaagucuuguccaaaugu

SEQ ID NO: 2217357 - RNA, 19 nt, Artificial Sequence
  Description of Artificial Sequence: Synthetic oligonucleotide
  Antisense strand to SEQ ID NO: 2217356
acauuuggacaagacuuca

SEQ ID NO: 2217358 - RNA, 19 nt, Artificial Sequence
  Description of Artificial Sequence: Synthetic oligonucleotide
  Sense strand starting at position 1295 of SEQ ID NO: 1883799
acucuaagugguuauaugu

SEQ ID NO: 2217359 - RNA, 19 nt, Artificial Sequence
  Description of Artificial Sequence: Synthetic oligonucleotide
  Antisense strand to SEQ ID NO: 2217358
acauauaaccacuuagagu

SEQ ID NO: 2217360 - RNA, 19 nt, Artificial Sequence
  Description of Artificial Sequence: Synthetic oligonucleotide
  Sense strand starting at position 222 of SEQ ID NO: 1883799
uugguauauuucuaaagag

SEQ ID NO: 2217361 - RNA, 19 nt, Artificial Sequence
  Description of Artificial Sequence: Synthetic oligonucleotide
  Antisense strand to SEQ ID NO: 2217360
cucuuuagaaauauaccaa

SEQ ID NO: 2217362 - RNA, 19 nt, Artificial Sequence
  Description of Artificial Sequence: Synthetic oligonucleotide
  Sense strand starting at position 1875 of SEQ ID NO: 1883799
ccuacagaccucuguauca

SEQ ID NO: 2217363 - RNA, 19 nt, Artificial Sequence
  Description of Artificial Sequence: Synthetic oligonucleotide
  Antisense strand to SEQ ID NO: 2217362
ugauacagaggucuguagg

SEQ ID NO: 2217364 - RNA, 19 nt, Artificial Sequence
  Description of Artificial Sequence: Synthetic oligonucleotide
  Sense strand starting at position 3899 of SEQ ID NO: 1883799
cucucagaguuuguuaaga

SEQ ID NO: 2217365 - RNA, 19 nt, Artificial Sequence
  Description of Artificial Sequence: Synthetic oligonucleotide
  Antisense strand to SEQ ID NO: 2217364
ucuuaacaaacucugagag

SEQ ID NO: 2217366 - RNA, 19 nt, Artificial Sequence
  Description of Artificial Sequence: Synthetic oligonucleotide
  Sense strand starting at position 1294 of SEQ ID NO: 1883799
cacucuaagugguuauaug

SEQ ID NO: 2217367 - RNA, 19 nt, Artificial Sequence
  Description of Artificial Sequence: Synthetic oligonucleotide
  Antisense strand to SEQ ID NO: 2217366
cauauaaccacuuagagug

SEQ ID NO: 2217368 - RNA, 19 nt, Artificial Sequence
  Description of Artificial Sequence: Synthetic oligonucleotide
  Sense strand starting at position 687 of SEQ ID NO: 1883799
agugacuguggauguauga

SEQ ID NO: 2217369 - RNA, 19 nt, Artificial Sequence
  Description of Artificial Sequence: Synthetic oligonucleotide
  Antisense strand to SEQ ID NO: 2217368
ucauacauccacagucacu

SEQ ID NO: 2217370 - RNA, 19 nt, Artificial Sequence
  Description of Artificial Sequence: Synthetic oligonucleotide
  Sense strand starting at position 1487 of SEQ ID NO: 1883799
aguauaguuagucagcaac

SEQ ID NO: 2217371 - RNA, 19 nt, Artificial Sequence
  Description of Artificial Sequence: Synthetic oligonucleotide
  Antisense strand to SEQ ID NO: 2217370
guugcugacuaacuauacu

SEQ ID NO: 2217372 - RNA, 19 nt, Artificial Sequence
  Description of Artificial Sequence: Synthetic oligonucleotide
  Sense strand starting at position 2111 of SEQ ID NO: 1883800
gucuccuaaccucaguaua

SEQ ID NO: 2217373 - RNA, 19 nt, Artificial Sequence
  Description of Artificial Sequence: Synthetic oligonucleotide
  Antisense strand to SEQ ID NO: 2217372
uauacugagguuaggagac

SEQ ID NO: 2217374 - RNA, 19 nt, Artificial Sequence
  Description of Artificial Sequence: Synthetic oligonucleotide
  Sense strand starting at position 2486 of SEQ ID NO: 1883800
aggugaguuauccagggcu

SEQ ID NO: 2217375 - RNA, 19 nt, Artificial Sequence
  Description of Artificial Sequence: Synthetic oligonucleotide
  Antisense strand to SEQ ID NO: 2217374
agcccuggauaacucaccu

SEQ ID NO: 2217376 - RNA, 19 nt, Artificial Sequence
  Description of Artificial Sequence: Synthetic oligonucleotide
  Sense strand starting at position 336 of SEQ ID NO: 1883800
agauguaauuacguuaaac

SEQ ID NO: 2217377 - RNA, 19 nt, Artificial Sequence
  Description of Artificial Sequence: Synthetic oligonucleotide
  Antisense strand to SEQ ID NO: 2217376
guuuaacguaauuacaucu

SEQ ID NO: 2217378 - RNA, 19 nt, Artificial Sequence
  Description of Artificial Sequence: Synthetic oligonucleotide
  Sense strand starting at position 3744 of SEQ ID NO: 1883800
aggagucaccugugguaug

SEQ ID NO: 2217379 - RNA, 19 nt, Artificial Sequence
  Description of Artificial Sequence: Synthetic oligonucleotide
  Antisense strand to SEQ ID NO: 2217378
cauaccacaggugacuccu

SEQ ID NO: 2217380 - RNA, 19 nt, Artificial Sequence
  Description of Artificial Sequence: Synthetic oligonucleotide
  Sense strand starting at position 2426 of SEQ ID NO: 1883800
gcgguugguggugaaauca

SEQ ID NO: 2217381 - RNA, 19 nt, Artificial Sequence
  Description of Artificial Sequence: Synthetic oligonucleotide
  Antisense strand to SEQ ID NO: 2217380
ugauuucaccaccaaccgc

SEQ ID NO: 2217382 - RNA, 19 nt, Artificial Sequence
  Description of Artificial Sequence: Synthetic oligonucleotide
  Sense strand starting at position 3171 of SEQ ID NO: 1883800
gaguucuucucuucccgga

SEQ ID NO: 2217383 - RNA, 19 nt, Artificial Sequence
  Description of Artificial Sequence: Synthetic oligonucleotide
  Antisense strand to SEQ ID NO: 2217382
uccgggaagagaagaacuc

SEQ ID NO: 2217384 - RNA, 19 nt, Artificial Sequence
  Description of Artificial Sequence: Synthetic oligonucleotide
  Sense strand starting at position 2755 of SEQ ID NO: 1883800
gcggguuggguggaguuau

SEQ ID NO: 2217385 - RNA, 19 nt, Artificial Sequence
  Description of Artificial Sequence: Synthetic oligonucleotide
  Antisense strand to SEQ ID NO: 2217384
auaacuccacccaacccgc

SEQ ID NO: 2217386 - RNA, 19 nt, Artificial Sequence
  Description of Artificial Sequence: Synthetic oligonucleotide
  Sense strand starting at position 3029 of SEQ ID NO: 1883800
gugcuaucccaggguuaca

SEQ ID NO: 2217387 - RNA, 19 nt, Artificial Sequence
  Description of Artificial Sequence: Synthetic oligonucleotide
  Antisense strand to SEQ ID NO: 2217386
uguaacccugggauagcac

SEQ ID NO: 2217388 - RNA, 19 nt, Artificial Sequence
  Description of Artificial Sequence: Synthetic oligonucleotide
  Sense strand starting at position 2489 of SEQ ID NO: 1883800
ugaguuauccagggcugca

SEQ ID NO: 2217389 - RNA, 19 nt, Artificial Sequence
  Description of Artificial Sequence: Synthetic oligonucleotide
  Antisense strand to SEQ ID NO: 2217388
ugcagcccuggauaacuca

SEQ ID NO: 2217390 - RNA, 19 nt, Artificial Sequence
  Description of Artificial Sequence: Synthetic oligonucleotide
  Sense strand starting at position 3596 of SEQ ID NO: 1883800
gggugugagugccuuuaau

SEQ ID NO: 2217391 - RNA, 19 nt, Artificial Sequence
  Description of Artificial Sequence: Synthetic oligonucleotide
  Antisense strand to SEQ ID NO: 2217390
auuaaaggcacucacaccc

SEQ ID NO: 2217392 - RNA, 19 nt, Artificial Sequence
  Description of Artificial Sequence: Synthetic oligonucleotide
  Sense strand starting at position 3210 of SEQ ID NO: 1883800
ucucuucgugcucaugcaa

SEQ ID NO: 2217393 - RNA, 19 nt, Artificial Sequence
  Description of Artificial Sequence: Synthetic oligonucleotide
  Antisense strand to SEQ ID NO: 2217392
uugcaugagcacgaagaga

SEQ ID NO: 2217394 - RNA, 19 nt, Artificial Sequence
  Description of Artificial Sequence: Synthetic oligonucleotide
  Sense strand starting at position 3205 of SEQ ID NO: 1883800
ggugaucucuucgugcuca

SEQ ID NO: 2217395 - RNA, 19 nt, Artificial Sequence
  Description of Artificial Sequence: Synthetic oligonucleotide
  Antisense strand to SEQ ID NO: 2217394
ugagcacgaagagaucacc

SEQ ID NO: 2217396 - RNA, 19 nt, Artificial Sequence
  Description of Artificial Sequence: Synthetic oligonucleotide
  Sense strand starting at position 50 of SEQ ID NO: 1883800
cgcguuuacggucaacuca

SEQ ID NO: 2217397 - RNA, 19 nt, Artificial Sequence
  Description of Artificial Sequence: Synthetic oligonucleotide
  Antisense strand to SEQ ID NO: 2217396
ugaguugaccguaaacgcg

SEQ ID NO: 2217398 - RNA, 19 nt, Artificial Sequence
  Description of Artificial Sequence: Synthetic oligonucleotide
  Sense strand starting at position 3204 of SEQ ID NO: 1883800
gggugaucucuucgugcuc

SEQ ID NO: 2217399 - RNA, 19 nt, Artificial Sequence
  Description of Artificial Sequence: Synthetic oligonucleotide
  Antisense strand to SEQ ID NO: 2217398
gagcacgaagagaucaccc

SEQ ID NO: 2217400 - RNA, 19 nt, Artificial Sequence
  Description of Artificial Sequence: Synthetic oligonucleotide
  Sense strand starting at position 2153 of SEQ ID NO: 1883800
cgucauuucuggcacuuau

SEQ ID NO: 2217401 - RNA, 19 nt, Artificial Sequence
  Description of Artificial Sequence: Synthetic oligonucleotide
  Antisense strand to SEQ ID NO: 2217400
auaagugccagaaaugacg

SEQ ID NO: 2217402 - RNA, 19 nt, Artificial Sequence
  Description of Artificial Sequence: Synthetic oligonucleotide
  Sense strand starting at position 2468 of SEQ ID NO: 1883800
guagaaaugugguagggua

SEQ ID NO: 2217403 - RNA, 19 nt, Artificial Sequence
  Description of Artificial Sequence: Synthetic oligonucleotide
  Antisense strand to SEQ ID NO: 2217402
uacccuaccacauuucuac

SEQ ID NO: 2217404 - RNA, 19 nt, Artificial Sequence
  Description of Artificial Sequence: Synthetic oligonucleotide
  Sense strand starting at position 3602 of SEQ ID NO: 1883800
gagugccuuuaaugaaaug

SEQ ID NO: 2217405 - RNA, 19 nt, Artificial Sequence
  Description of Artificial Sequence: Synthetic oligonucleotide
  Antisense strand to SEQ ID NO: 2217404
cauuucauuaaaggcacuc

SEQ ID NO: 2217406 - RNA, 19 nt, Artificial Sequence
  Description of Artificial Sequence: Synthetic oligonucleotide
  Sense strand starting at position 2151 of SEQ ID NO: 1883800
cgcgucauuucuggcacuu

SEQ ID NO: 2217407 - RNA, 19 nt, Artificial Sequence
  Description of Artificial Sequence: Synthetic oligonucleotide
  Antisense strand to SEQ ID NO: 2217406
aagugccagaaaugacgcg

SEQ ID NO: 2217408 - RNA, 19 nt, Artificial Sequence
  Description of Artificial Sequence: Synthetic oligonucleotide
  Sense strand starting at position 3790 of SEQ ID NO: 1883800
cagcuugccucaugagguu

SEQ ID NO: 2217409 - RNA, 19 nt, Artificial Sequence
  Description of Artificial Sequence: Synthetic oligonucleotide
  Antisense strand to SEQ ID NO: 2217408
aaccucaugaggcaagcug

SEQ ID NO: 2217410 - RNA, 19 nt, Artificial Sequence
  Description of Artificial Sequence: Synthetic oligonucleotide
  Sense strand starting at position 2425 of SEQ ID NO: 1883800
ugcgguugguggugaaauc

SEQ ID NO: 2217411 - RNA, 19 nt, Artificial Sequence
  Description of Artificial Sequence: Synthetic oligonucleotide
  Antisense strand to SEQ ID NO: 2217410
gauuucaccaccaaccgca

SEQ ID NO: 2217412 - RNA, 19 nt, Artificial Sequence
  Description of Artificial Sequence: Synthetic oligonucleotide
  Sense strand starting at position 2150 of SEQ ID NO: 1883800
gcgcgucauuucuggcacu

SEQ ID NO: 2217413 - RNA, 19 nt, Artificial Sequence
  Description of Artificial Sequence: Synthetic oligonucleotide
  Antisense strand to SEQ ID NO: 2217412
agugccagaaaugacgcgc

SEQ ID NO: 2217414 - RNA, 19 nt, Artificial Sequence
  Description of Artificial Sequence: Synthetic oligonucleotide
  Sense strand starting at position 3206 of SEQ ID NO: 1883800
gugaucucuucgugcucau

SEQ ID NO: 2217415 - RNA, 19 nt, Artificial Sequence
  Description of Artificial Sequence: Synthetic oligonucleotide
  Antisense strand to SEQ ID NO: 2217414
augagcacgaagagaucac

SEQ ID NO: 2217416 - RNA, 19 nt, Artificial Sequence
  Description of Artificial Sequence: Synthetic oligonucleotide
  Sense strand starting at position 1265 of SEQ ID NO: 1883801
ucguuaccuguccuauguu

SEQ ID NO: 2217417 - RNA, 19 nt, Artificial Sequence
  Description of Artificial Sequence: Synthetic oligonucleotide
  Antisense strand to SEQ ID NO: 2217416
aacauaggacagguaacga

SEQ ID NO: 2217418 - RNA, 19 nt, Artificial Sequence
  Description of Artificial Sequence: Synthetic oligonucleotide
  Sense strand starting at position 917 of SEQ ID NO: 1883801
cugagacugccucagauua

SEQ ID NO: 2217419 - RNA, 19 nt, Artificial Sequence
  Description of Artificial Sequence: Synthetic oligonucleotide
  Antisense strand to SEQ ID NO: 2217418
uaaucugaggcagucucag

SEQ ID NO: 2217420 - RNA, 19 nt, Artificial Sequence
  Description of Artificial Sequence: Synthetic oligonucleotide
  Sense strand starting at position 3448 of SEQ ID NO: 1883801
aauacuguagaguaaaugu

SEQ ID NO: 2217421 - RNA, 19 nt, Artificial Sequence
  Description of Artificial Sequence: Synthetic oligonucleotide
  Antisense strand to SEQ ID NO: 2217420
acauuuacucuacaguauu

SEQ ID NO: 2217422 - RNA, 19 nt, Artificial Sequence
  Description of Artificial Sequence: Synthetic oligonucleotide
  Sense strand starting at position 403 of SEQ ID NO: 1883801
gggcauuucucccuagcag

SEQ ID NO: 2217423 - RNA, 19 nt, Artificial Sequence
  Description of Artificial Sequence: Synthetic oligonucleotide
  Antisense strand to SEQ ID NO: 2217422
cugcuagggagaaaugccc

SEQ ID NO: 2217424 - RNA, 19 nt, Artificial Sequence
  Description of Artificial Sequence: Synthetic oligonucleotide
  Sense strand starting at position 3443 of SEQ ID NO: 1883801
cucugaauacuguagagua

SEQ ID NO: 2217425 - RNA, 19 nt, Artificial Sequence
  Description of Artificial Sequence: Synthetic oligonucleotide
  Antisense strand to SEQ ID NO: 2217424
uacucuacaguauucagag

SEQ ID NO: 2217426 - RNA, 19 nt, Artificial Sequence
  Description of Artificial Sequence: Synthetic oligonucleotide
  Sense strand starting at position 3126 of SEQ ID NO: 1883801
ucugaaagauaccugcaga

SEQ ID NO: 2217427 - RNA, 19 nt, Artificial Sequence
  Description of Artificial Sequence: Synthetic oligonucleotide
  Antisense strand to SEQ ID NO: 2217426
ucugcagguaucuuucaga

SEQ ID NO: 2217428 - RNA, 19 nt, Artificial Sequence
  Description of Artificial Sequence: Synthetic oligonucleotide
  Sense strand starting at position 3466 of SEQ ID NO: 1883801
ugguuuauuauugaaggua

SEQ ID NO: 2217429 - RNA, 19 nt, Artificial Sequence
  Description of Artificial Sequence: Synthetic oligonucleotide
  Antisense strand to SEQ ID NO: 2217428
uaccuucaauaauaaacca

SEQ ID NO: 2217430 - RNA, 19 nt, Artificial Sequence
  Description of Artificial Sequence: Synthetic oligonucleotide
  Sense strand starting at position 3169 of SEQ ID NO: 1883801
agcauagcauuugacauuu

SEQ ID NO: 2217431 - RNA, 19 nt, Artificial Sequence
  Description of Artificial Sequence: Synthetic oligonucleotide
  Antisense strand to SEQ ID NO: 2217430
aaaugucaaaugcuaugcu

SEQ ID NO: 2217432 - RNA, 19 nt, Artificial Sequence
  Description of Artificial Sequence: Synthetic oligonucleotide
  Sense strand starting at position 2936 of SEQ ID NO: 1883801
gauuuacugugacaagaaa

SEQ ID NO: 2217433 - RNA, 19 nt, Artificial Sequence
  Description of Artificial Sequence: Synthetic oligonucleotide
  Antisense strand to SEQ ID NO: 2217432
uuucuugucacaguaaauc

SEQ ID NO: 2217434 - RNA, 19 nt, Artificial Sequence
  Description of Artificial Sequence: Synthetic oligonucleotide
  Sense strand starting at position 3253 of SEQ ID NO: 1883801
cccacauuauagcugaaga

SEQ ID NO: 2217435 - RNA, 19 nt, Artificial Sequence
  Description of Artificial Sequence: Synthetic oligonucleotide
  Antisense strand to SEQ ID NO: 2217434
ucuucagcuauaauguggg

SEQ ID NO: 2217436 - RNA, 19 nt, Artificial Sequence
  Description of Artificial Sequence: Synthetic oligonucleotide
  Sense strand starting at position 3071 of SEQ ID NO: 1883801
guuugagauuaauuaacuc

SEQ ID NO: 2217437 - RNA, 19 nt, Artificial Sequence
  Description of Artificial Sequence: Synthetic oligonucleotide
  Antisense strand to SEQ ID NO: 2217436
gaguuaauuaaucucaaac

SEQ ID NO: 2217438 - RNA, 19 nt, Artificial Sequence
  Description of Artificial Sequence: Synthetic oligonucleotide
  Sense strand starting at position 3475 of SEQ ID NO: 1883801
auugaagguauguauguau

SEQ ID NO: 2217439 - RNA, 19 nt, Artificial Sequence
  Description of Artificial Sequence: Synthetic oligonucleotide
  Antisense strand to SEQ ID NO: 2217438
auacauacauaccuucaau

SEQ ID NO: 2217440 - RNA, 19 nt, Artificial Sequence
  Description of Artificial Sequence: Synthetic oligonucleotide
  Sense strand starting at position 3300 of SEQ ID NO: 1883801
ugcagaaguguauguauuu

SEQ ID NO: 2217441 - RNA, 19 nt, Artificial Sequence
  Description of Artificial Sequence: Synthetic oligonucleotide
  Antisense strand to SEQ ID NO: 2217440
aaauacauacacuucugca

SEQ ID NO: 2217442 - RNA, 19 nt, Artificial Sequence
  Description of Artificial Sequence: Synthetic oligonucleotide
  Sense strand starting at position 2291 of SEQ ID NO: 1883801
auuaaccgcccugaagauu

SEQ ID NO: 2217443 - RNA, 19 nt, Artificial Sequence
  Description of Artificial Sequence: Synthetic oligonucleotide
  Antisense strand to SEQ ID NO: 2217442
aaucuucagggcgguuaau

SEQ ID NO: 2217444 - RNA, 19 nt, Artificial Sequence
  Description of Artificial Sequence: Synthetic oligonucleotide
  Sense strand starting at position 2613 of SEQ ID NO: 1883801
gaauauuuggugugcuagu

SEQ ID NO: 2217445 - RNA, 19 nt, Artificial Sequence
  Description of Artificial Sequence: Synthetic oligonucleotide
  Antisense strand to SEQ ID NO: 2217444
acuagcacaccaaauauuc

SEQ ID NO: 2217446 - RNA, 19 nt, Artificial Sequence
  Description of Artificial Sequence: Synthetic oligonucleotide
  Sense strand starting at position 2115 of SEQ ID NO: 1883801
cggguucgcccagcuguaa

SEQ ID NO: 2217447 - RNA, 19 nt, Artificial Sequence
  Description of Artificial Sequence: Synthetic oligonucleotide
  Antisense strand to SEQ ID NO: 2217446
uuacagcugggcgaacccg

SEQ ID NO: 2217448 - RNA, 19 nt, Artificial Sequence
  Description of Artificial Sequence: Synthetic oligonucleotide
  Sense strand starting at position 383 of SEQ ID NO: 1883801
auagcaucaccuuaguuua

SEQ ID NO: 2217449 - RNA, 19 nt, Artificial Sequence
  Description of Artificial Sequence: Synthetic oligonucleotide
  Antisense strand to SEQ ID NO: 2217448
uaaacuaaggugaugcuau

SEQ ID NO: 2217450 - RNA, 19 nt, Artificial Sequence
  Description of Artificial Sequence: Synthetic oligonucleotide
  Sense strand starting at position 1985 of SEQ ID NO: 1883801
uccugcucugcauaaauga

SEQ ID NO: 2217451 - RNA, 19 nt, Artificial Sequence
  Description of Artificial Sequence: Synthetic oligonucleotide
  Antisense strand to SEQ ID NO: 2217450
ucauuuaugcagagcagga

SEQ ID NO: 2217452 - RNA, 19 nt, Artificial Sequence
  Description of Artificial Sequence: Synthetic oligonucleotide
  Sense strand starting at position 2138 of SEQ ID NO: 1883801
caggguuccgggcaguaaa

SEQ ID NO: 2217453 - RNA, 19 nt, Artificial Sequence
  Description of Artificial Sequence: Synthetic oligonucleotide
  Antisense strand to SEQ ID NO: 2217452
uuuacugcccggaacccug

SEQ ID NO: 2217454 - RNA, 19 nt, Artificial Sequence
  Description of Artificial Sequence: Synthetic oligonucleotide
  Sense strand starting at position 2367 of SEQ ID NO: 1883801
gugucaauugccgaacaaa

SEQ ID NO: 2217455 - RNA, 19 nt, Artificial Sequence
  Description of Artificial Sequence: Synthetic oligonucleotide
  Antisense strand to SEQ ID NO: 2217454
uuuguucggcaauugacac

SEQ ID NO: 2217456 - RNA, 19 nt, Artificial Sequence
  Description of Artificial Sequence: Synthetic oligonucleotide
  Sense strand starting at position 3474 of SEQ ID NO: 1883801
uauugaagguauguaugua

SEQ ID NO: 2217457 - RNA, 19 nt, Artificial Sequence
  Description of Artificial Sequence: Synthetic oligonucleotide
  Antisense strand to SEQ ID NO: 2217456
uacauacauaccuucaaua

SEQ ID NO: 2217458 - RNA, 19 nt, Artificial Sequence
  Description of Artificial Sequence: Synthetic oligonucleotide
  Sense strand starting at position 791 of SEQ ID NO: 1883801
acuucuuucugggcuaaau

SEQ ID NO: 2217459 - RNA, 19 nt, Artificial Sequence
  Description of Artificial Sequence: Synthetic oligonucleotide
  Antisense strand to SEQ ID NO: 2217458
auuuagcccagaaagaagu

SEQ ID NO: 2217460 - RNA, 19 nt, Artificial Sequence
  Description of Artificial Sequence: Synthetic oligonucleotide
  Sense strand starting at position 2934 of SEQ ID NO: 1883801
gugauuuacugugacaaga

SEQ ID NO: 2217461 - RNA, 19 nt, Artificial Sequence
  Description of Artificial Sequence: Synthetic oligonucleotide
  Antisense strand to SEQ ID NO: 2217460
ucuugucacaguaaaucac

SEQ ID NO: 2217462 - RNA, 19 nt, Artificial Sequence
  Description of Artificial Sequence: Synthetic oligonucleotide
  Sense strand starting at position 2494 of SEQ ID NO: 1883801
cuccuagaauuggcucgaa

SEQ ID NO: 2217463 - RNA, 19 nt, Artificial Sequence
  Description of Artificial Sequence: Synthetic oligonucleotide
  Antisense strand to SEQ ID NO: 2217462
uucgagccaauucuaggag

SEQ ID NO: 2217464 - RNA, 19 nt, Artificial Sequence
  Description of Artificial Sequence: Synthetic oligonucleotide
  Sense strand starting at position 2736 of SEQ ID NO: 1883801
agcacaguccuguaacagu

SEQ ID NO: 2217465 - RNA, 19 nt, Artificial Sequence
  Description of Artificial Sequence: Synthetic oligonucleotide
  Antisense strand to SEQ ID NO: 2217464
acuguuacaggacugugcu

SEQ ID NO: 2217466 - RNA, 19 nt, Artificial Sequence
  Description of Artificial Sequence: Synthetic oligonucleotide
  Sense strand starting at position 3383 of SEQ ID NO: 1883801
ugugcuguacacuggagaa

SEQ ID NO: 2217467 - RNA, 19 nt, Artificial Sequence
  Description of Artificial Sequence: Synthetic oligonucleotide
  Antisense strand to SEQ ID NO: 2217466
uucuccaguguacagcaca

SEQ ID NO: 2217468 - RNA, 19 nt, Artificial Sequence
  Description of Artificial Sequence: Synthetic oligonucleotide
  Sense strand starting at position 3195 of SEQ ID NO: 1883801
uguauaagguaugcuauau

SEQ ID NO: 2217469 - RNA, 19 nt, Artificial Sequence
  Description of Artificial Sequence: Synthetic oligonucleotide
  Antisense strand to SEQ ID NO: 2217468
auauagcauaccuuauaca

SEQ ID NO: 2217470 - RNA, 19 nt, Artificial Sequence
  Description of Artificial Sequence: Synthetic oligonucleotide
  Sense strand starting at position 2782 of SEQ ID NO: 1883801
agaggaaguucagaugaga

SEQ ID NO: 2217471 - RNA, 19 nt, Artificial Sequence
  Description of Artificial Sequence: Synthetic oligonucleotide
  Antisense strand to SEQ ID NO: 2217470
ucucaucugaacuuccucu

SEQ ID NO: 2217472 - RNA, 19 nt, Artificial Sequence
  Description of Artificial Sequence: Synthetic oligonucleotide
  Sense strand starting at position 3194 of SEQ ID NO: 1883801
uuguauaagguaugcuaua

SEQ ID NO: 2217473 - RNA, 19 nt, Artificial Sequence
  Description of Artificial Sequence: Synthetic oligonucleotide
  Antisense strand to SEQ ID NO: 2217472
uauagcauaccuuauacaa

SEQ ID NO: 2217474 - RNA, 19 nt, Artificial Sequence
  Description of Artificial Sequence: Synthetic oligonucleotide
  Sense strand starting at position 3366 of SEQ ID NO: 1883801
uagcaugugcaaugaauug

SEQ ID NO: 2217475 - RNA, 19 nt, Artificial Sequence
  Description of Artificial Sequence: Synthetic oligonucleotide
  Antisense strand to SEQ ID NO: 2217474
caauucauugcacaugcua

SEQ ID NO: 2217476 - RNA, 19 nt, Artificial Sequence
  Description of Artificial Sequence: Synthetic oligonucleotide
  Sense strand starting at position 2497 of SEQ ID NO: 1883801
cuagaauuggcucgaaagc

SEQ ID NO: 2217477 - RNA, 19 nt, Artificial Sequence
  Description of Artificial Sequence: Synthetic oligonucleotide
  Antisense strand to SEQ ID NO: 2217476
gcuuucgagccaauucuag

SEQ ID NO: 2217478 - RNA, 19 nt, Artificial Sequence
  Description of Artificial Sequence: Synthetic oligonucleotide
  Sense strand starting at position 418 of SEQ ID NO: 1883801
gcaggagagcucugccaaa

SEQ ID NO: 2217479 - RNA, 19 nt, Artificial Sequence
  Description of Artificial Sequence: Synthetic oligonucleotide
  Antisense strand to SEQ ID NO: 2217478
uuuggcagagcucuccugc

SEQ ID NO: 2217480 - RNA, 19 nt, Artificial Sequence
  Description of Artificial Sequence: Synthetic oligonucleotide
  Sense strand starting at position 14 of SEQ ID NO: 1883801
cucagaaacuguccguacu

SEQ ID NO: 2217481 - RNA, 19 nt, Artificial Sequence
  Description of Artificial Sequence: Synthetic oligonucleotide
  Antisense strand to SEQ ID NO: 2217480
aguacggacaguuucugag

SEQ ID NO: 2217482 - RNA, 19 nt, Artificial Sequence
  Description of Artificial Sequence: Synthetic oligonucleotide
  Sense strand starting at position 2534 of SEQ ID NO: 1883801
acuuucgaaaucugcgaua

SEQ ID NO: 2217483 - RNA, 19 nt, Artificial Sequence
  Description of Artificial Sequence: Synthetic oligonucleotide
  Antisense strand to SEQ ID NO: 2217482
uaucgcagauuucgaaagu

SEQ ID NO: 2217484 - RNA, 19 nt, Artificial Sequence
  Description of Artificial Sequence: Synthetic oligonucleotide
  Sense strand starting at position 3298 of SEQ ID NO: 1883801
ugugcagaaguguauguau

SEQ ID NO: 2217485 - RNA, 19 nt, Artificial Sequence
  Description of Artificial Sequence: Synthetic oligonucleotide
  Antisense strand to SEQ ID NO: 2217484
auacauacacuucugcaca

SEQ ID NO: 2217486 - RNA, 19 nt, Artificial Sequence
  Description of Artificial Sequence: Synthetic oligonucleotide
  Sense strand starting at position 1268 of SEQ ID NO: 1883801
uuaccuguccuauguugau

SEQ ID NO: 2217487 - RNA, 19 nt, Artificial Sequence
  Description of Artificial Sequence: Synthetic oligonucleotide
  Antisense strand to SEQ ID NO: 2217486
aucaacauaggacagguaa

SEQ ID NO: 2217488 - RNA, 19 nt, Artificial Sequence
  Description of Artificial Sequence: Synthetic oligonucleotide
  Sense strand starting at position 768 of SEQ ID NO: 1883801
gagguucucucgcccaaga

SEQ ID NO: 2217489 - RNA, 19 nt, Artificial Sequence
  Description of Artificial Sequence: Synthetic oligonucleotide
  Antisense strand to SEQ ID NO: 2217488
ucuugggcgagagaaccuc

SEQ ID NO: 2217490 - RNA, 19 nt, Artificial Sequence
  Description of Artificial Sequence: Synthetic oligonucleotide
  Sense strand starting at position 2355 of SEQ ID NO: 1883801
gaggucacuuacgugucaa

SEQ ID NO: 2217491 - RNA, 19 nt, Artificial Sequence
  Description of Artificial Sequence: Synthetic oligonucleotide
  Antisense strand to SEQ ID NO: 2217490
uugacacguaagugaccuc

SEQ ID NO: 2217492 - RNA, 19 nt, Artificial Sequence
  Description of Artificial Sequence: Synthetic oligonucleotide
  Sense strand starting at position 2536 of SEQ ID NO: 1883801
uuucgaaaucugcgauacu

SEQ ID NO: 2217493 - RNA, 19 nt, Artificial Sequence
  Description of Artificial Sequence: Synthetic oligonucleotide
  Antisense strand to SEQ ID NO: 2217492
aguaucgcagauuucgaaa

SEQ ID NO: 2217494 - RNA, 19 nt, Artificial Sequence
  Description of Artificial Sequence: Synthetic oligonucleotide
  Sense strand starting at position 3695 of SEQ ID NO: 1883801
aggguuggcuggucucgaa

SEQ ID NO: 2217495 - RNA, 19 nt, Artificial Sequence
  Description of Artificial Sequence: Synthetic oligonucleotide
  Antisense strand to SEQ ID NO: 2217494
uucgagaccagccaacccu

SEQ ID NO: 2217496 - RNA, 19 nt, Artificial Sequence
  Description of Artificial Sequence: Synthetic oligonucleotide
  Sense strand starting at position 2976 of SEQ ID NO: 1883802
gacaaugaugcuggauaua

SEQ ID NO: 2217497 - RNA, 19 nt, Artificial Sequence
  Description of Artificial Sequence: Synthetic oligonucleotide
  Antisense strand to SEQ ID NO: 2217496
uauauccagcaucauuguc

SEQ ID NO: 2217498 - RNA, 19 nt, Artificial Sequence
  Description of Artificial Sequence: Synthetic oligonucleotide
  Sense strand starting at position 3661 of SEQ ID NO: 1883802
ucaggagaaagguggucua

SEQ ID NO: 2217499 - RNA, 19 nt, Artificial Sequence
  Description of Artificial Sequence: Synthetic oligonucleotide
  Antisense strand to SEQ ID NO: 2217498
uagaccaccuuucuccuga

SEQ ID NO: 2217500 - RNA, 19 nt, Artificial Sequence
  Description of Artificial Sequence: Synthetic oligonucleotide
  Sense strand starting at position 3331 of SEQ ID NO: 1883802
augggucuucuaugacaaa

SEQ ID NO: 2217501 - RNA, 19 nt, Artificial Sequence
  Description of Artificial Sequence: Synthetic oligonucleotide
  Antisense strand to SEQ ID NO: 2217500
uuugucauagaagacccau

SEQ ID NO: 2217502 - RNA, 19 nt, Artificial Sequence
  Description of Artificial Sequence: Synthetic oligonucleotide
  Sense strand starting at position 3705 of SEQ ID NO: 1883802
auuggucuugaaugauuga

SEQ ID NO: 2217503 - RNA, 19 nt, Artificial Sequence
  Description of Artificial Sequence: Synthetic oligonucleotide
  Antisense strand to SEQ ID NO: 2217502
ucaaucauucaagaccaau

SEQ ID NO: 2217504 - RNA, 19 nt, Artificial Sequence
  Description of Artificial Sequence: Synthetic oligonucleotide
  Sense strand starting at position 3193 of SEQ ID NO: 1883802
agaaacauggccuguccaa

SEQ ID NO: 2217505 - RNA, 19 nt, Artificial Sequence
  Description of Artificial Sequence: Synthetic oligonucleotide
  Antisense strand to SEQ ID NO: 2217504
uuggacaggccauguuucu

SEQ ID NO: 2217506 - RNA, 19 nt, Artificial Sequence
  Description of Artificial Sequence: Synthetic oligonucleotide
  Sense strand starting at position 3158 of SEQ ID NO: 1883802
auacuucuucccgagccaa

SEQ ID NO: 2217507 - RNA, 19 nt, Artificial Sequence
  Description of Artificial Sequence: Synthetic oligonucleotide
  Antisense strand to SEQ ID NO: 2217506
uuggcucgggaagaaguau

SEQ ID NO: 2217508 - RNA, 19 nt, Artificial Sequence
  Description of Artificial Sequence: Synthetic oligonucleotide
  Sense strand starting at position 2728 of SEQ ID NO: 1883802
ugaacaauucccuggcauu

SEQ ID NO: 2217509 - RNA, 19 nt, Artificial Sequence
  Description of Artificial Sequence: Synthetic oligonucleotide
  Antisense strand to SEQ ID NO: 2217508
aaugccagggaauuguuca

SEQ ID NO: 2217510 - RNA, 19 nt, Artificial Sequence
  Description of Artificial Sequence: Synthetic oligonucleotide
  Sense strand starting at position 2678 of SEQ ID NO: 1883802
aagugucuugcagauguau

SEQ ID NO: 2217511 - RNA, 19 nt, Artificial Sequence
  Description of Artificial Sequence: Synthetic oligonucleotide
  Antisense strand to SEQ ID NO: 2217510
auacaucugcaagacacuu

SEQ ID NO: 2217512 - RNA, 19 nt, Artificial Sequence
  Description of Artificial Sequence: Synthetic oligonucleotide
  Sense strand starting at position 139 of SEQ ID NO: 1883802
guacccaggucuccuuuaa

SEQ ID NO: 2217513 - RNA, 19 nt, Artificial Sequence
  Description of Artificial Sequence: Synthetic oligonucleotide
  Antisense strand to SEQ ID NO: 2217512
uuaaaggagaccuggguac

SEQ ID NO: 2217514 - RNA, 19 nt, Artificial Sequence
  Description of Artificial Sequence: Synthetic oligonucleotide
  Sense strand starting at position 2332 of SEQ ID NO: 1883802
uuuggcauuugacaacauu

SEQ ID NO: 2217515 - RNA, 19 nt, Artificial Sequence
  Description of Artificial Sequence: Synthetic oligonucleotide
  Antisense strand to SEQ ID NO: 2217514
aauguugucaaaugccaaa

SEQ ID NO: 2217516 - RNA, 19 nt, Artificial Sequence
  Description of Artificial Sequence: Synthetic oligonucleotide
  Sense strand starting at position 3824 of SEQ ID NO: 1883802
auuggauacucauaagcag

SEQ ID NO: 2217517 - RNA, 19 nt, Artificial Sequence
  Description of Artificial Sequence: Synthetic oligonucleotide
  Antisense strand to SEQ ID NO: 2217516
cugcuuaugaguauccaau

SEQ ID NO: 2217518 - RNA, 19 nt, Artificial Sequence
  Description of Artificial Sequence: Synthetic oligonucleotide
  Sense strand starting at position 275 of SEQ ID NO: 1883802
gccuauuucuaaggcagga

SEQ ID NO: 2217519 - RNA, 19 nt, Artificial Sequence
  Description of Artificial Sequence: Synthetic oligonucleotide
  Antisense strand to SEQ ID NO: 2217518
uccugccuuagaaauaggc

SEQ ID NO: 2217520 - RNA, 19 nt, Artificial Sequence
  Description of Artificial Sequence: Synthetic oligonucleotide
  Sense strand starting at position 3332 of SEQ ID NO: 1883802
ugggucuucuaugacaaac

SEQ ID NO: 2217521 - RNA, 19 nt, Artificial Sequence
  Description of Artificial Sequence: Synthetic oligonucleotide
  Antisense strand to SEQ ID NO: 2217520
guuugucauagaagaccca

SEQ ID NO: 2217522 - RNA, 19 nt, Artificial Sequence
  Description of Artificial Sequence: Synthetic oligonucleotide
  Sense strand starting at position 3016 of SEQ ID NO: 1883802
cuccucacuugggauugau

SEQ ID NO: 2217523 - RNA, 19 nt, Artificial Sequence
  Description of Artificial Sequence: Synthetic oligonucleotide
  Antisense strand to SEQ ID NO: 2217522
aucaaucccaagugaggag

SEQ ID NO: 2217524 - RNA, 19 nt, Artificial Sequence
  Description of Artificial Sequence: Synthetic oligonucleotide
  Sense strand starting at position 3002 of SEQ ID NO: 1883802
ugauuuaucucuggcuccu

SEQ ID NO: 2217525 - RNA, 19 nt, Artificial Sequence
  Description of Artificial Sequence: Synthetic oligonucleotide
  Antisense strand to SEQ ID NO: 2217524
aggagccagagauaaauca

SEQ ID NO: 2217526 - RNA, 19 nt, Artificial Sequence
  Description of Artificial Sequence: Synthetic oligonucleotide
  Sense strand starting at position 2975 of SEQ ID NO: 1883802
agacaaugaugcuggauau

SEQ ID NO: 2217527 - RNA, 19 nt, Artificial Sequence
  Description of Artificial Sequence: Synthetic oligonucleotide
  Antisense strand to SEQ ID NO: 2217526
auauccagcaucauugucu

SEQ ID NO: 2217528 - RNA, 19 nt, Artificial Sequence
  Description of Artificial Sequence: Synthetic oligonucleotide
  Sense strand starting at position 3814 of SEQ ID NO: 1883802
uugauauccuauuggauac

SEQ ID NO: 2217529 - RNA, 19 nt, Artificial Sequence
  Description of Artificial Sequence: Synthetic oligonucleotide
  Antisense strand to SEQ ID NO: 2217528
guauccaauaggauaucaa

SEQ ID NO: 2217530 - RNA, 19 nt, Artificial Sequence
  Description of Artificial Sequence: Synthetic oligonucleotide
  Sense strand starting at position 2674 of SEQ ID NO: 1883802
aggaaagugucuugcagau

SEQ ID NO: 2217531 - RNA, 19 nt, Artificial Sequence
  Description of Artificial Sequence: Synthetic oligonucleotide
  Antisense strand to SEQ ID NO: 2217530
aucugcaagacacuuuccu

SEQ ID NO: 2217532 - RNA, 19 nt, Artificial Sequence
  Description of Artificial Sequence: Synthetic oligonucleotide
  Sense strand starting at position 2676 of SEQ ID NO: 1883802
gaaagugucuugcagaugu

SEQ ID NO: 2217533 - RNA, 19 nt, Artificial Sequence
  Description of Artificial Sequence: Synthetic oligonucleotide
  Antisense strand to SEQ ID NO: 2217532
acaucugcaagacacuuuc

SEQ ID NO: 2217534 - RNA, 19 nt, Artificial Sequence
  Description of Artificial Sequence: Synthetic oligonucleotide
  Sense strand starting at position 1892 of SEQ ID NO: 1883802
ccauauuguucccaacgca

SEQ ID NO: 2217535 - RNA, 19 nt, Artificial Sequence
  Description of Artificial Sequence: Synthetic oligonucleotide
  Antisense strand to SEQ ID NO: 2217534
ugcguugggaacaauaugg

SEQ ID NO: 2217536 - RNA, 19 nt, Artificial Sequence
  Description of Artificial Sequence: Synthetic oligonucleotide
  Sense strand starting at position 3341 of SEQ ID NO: 1883803
uucuuuggaggcugaagaa

SEQ ID NO: 2217537 - RNA, 19 nt, Artificial Sequence
  Description of Artificial Sequence: Synthetic oligonucleotide
  Antisense strand to SEQ ID NO: 2217536
uucuucagccuccaaagaa

SEQ ID NO: 2217538 - RNA, 19 nt, Artificial Sequence
  Description of Artificial Sequence: Synthetic oligonucleotide
  Sense strand starting at position 496 of SEQ ID NO: 1883803
cgauguuucccacauauaa

SEQ ID NO: 2217539 - RNA, 19 nt, Artificial Sequence
  Description of Artificial Sequence: Synthetic oligonucleotide
  Antisense strand to SEQ ID NO: 2217538
uuauaugugggaaacaucg

SEQ ID NO: 2217540 - RNA, 19 nt, Artificial Sequence
  Description of Artificial Sequence: Synthetic oligonucleotide
  Sense strand starting at position 751 of SEQ ID NO: 1883803
caugaaauguugucaaaug

SEQ ID NO: 2217541 - RNA, 19 nt, Artificial Sequence
  Description of Artificial Sequence: Synthetic oligonucleotide
  Antisense strand to SEQ ID NO: 2217540
cauuugacaacauuucaug

SEQ ID NO: 2217542 - RNA, 19 nt, Artificial Sequence
  Description of Artificial Sequence: Synthetic oligonucleotide
  Sense strand starting at position 1688 of SEQ ID NO: 1883803
ggauaaaguugggcaggua

SEQ ID NO: 2217543 - RNA, 19 nt, Artificial Sequence
  Description of Artificial Sequence: Synthetic oligonucleotide
  Antisense strand to SEQ ID NO: 2217542
uaccugcccaacuuuaucc

SEQ ID NO: 2217544 - RNA, 19 nt, Artificial Sequence
  Description of Artificial Sequence: Synthetic oligonucleotide
  Sense strand starting at position 2806 of SEQ ID NO: 1883803
gaaacaggcuuguccuaca

SEQ ID NO: 2217545 - RNA, 19 nt, Artificial Sequence
  Description of Artificial Sequence: Synthetic oligonucleotide
  Antisense strand to SEQ ID NO: 2217544
uguaggacaagccuguuuc

SEQ ID NO: 2217546 - RNA, 19 nt, Artificial Sequence
  Description of Artificial Sequence: Synthetic oligonucleotide
  Sense strand starting at position 2804 of SEQ ID NO: 1883803
uagaaacaggcuuguccua

SEQ ID NO: 2217547 - RNA, 19 nt, Artificial Sequence
  Description of Artificial Sequence: Synthetic oligonucleotide
  Antisense strand to SEQ ID NO: 2217546
uaggacaagccuguuucua

SEQ ID NO: 2217548 - RNA, 19 nt, Artificial Sequence
  Description of Artificial Sequence: Synthetic oligonucleotide
  Sense strand starting at position 2811 of SEQ ID NO: 1883803
aggcuuguccuacacugua

SEQ ID NO: 2217549 - RNA, 19 nt, Artificial Sequence
  Description of Artificial Sequence: Synthetic oligonucleotide
  Antisense strand to SEQ ID NO: 2217548
uacaguguaggacaagccu

SEQ ID NO: 2217550 - RNA, 19 nt, Artificial Sequence
  Description of Artificial Sequence: Synthetic oligonucleotide
  Sense strand starting at position 693 of SEQ ID NO: 1883803
uaccgaguucgugggagaa

SEQ ID NO: 2217551 - RNA, 19 nt, Artificial Sequence
  Description of Artificial Sequence: Synthetic oligonucleotide
  Antisense strand to SEQ ID NO: 2217550
uucucccacgaacucggua

SEQ ID NO: 2217552 - RNA, 19 nt, Artificial Sequence
  Description of Artificial Sequence: Synthetic oligonucleotide
  Sense strand starting at position 1675 of SEQ ID NO: 1883803
gacagcacgcucuggauaa

SEQ ID NO: 2217553 - RNA, 19 nt, Artificial Sequence
  Description of Artificial Sequence: Synthetic oligonucleotide
  Antisense strand to SEQ ID NO: 2217552
uuauccagagcgugcuguc

SEQ ID NO: 2217554 - RNA, 19 nt, Artificial Sequence
  Description of Artificial Sequence: Synthetic oligonucleotide
  Sense strand starting at position 1679 of SEQ ID NO: 1883803
gcacgcucuggauaaaguu

SEQ ID NO: 2217555 - RNA, 19 nt, Artificial Sequence
  Description of Artificial Sequence: Synthetic oligonucleotide
  Antisense strand to SEQ ID NO: 2217554
aacuuuauccagagcgugc

SEQ ID NO: 2217556 - RNA, 19 nt, Artificial Sequence
  Description of Artificial Sequence: Synthetic oligonucleotide
  Sense strand starting at position 2043 of SEQ ID NO: 1883803
ucugccuuccuguaaaguu

SEQ ID NO: 2217557 - RNA, 19 nt, Artificial Sequence
  Description of Artificial Sequence: Synthetic oligonucleotide
  Antisense strand to SEQ ID NO: 2217556
aacuuuacaggaaggcaga

SEQ ID NO: 2217558 - RNA, 19 nt, Artificial Sequence
  Description of Artificial Sequence: Synthetic oligonucleotide
  Sense strand starting at position 2272 of SEQ ID NO: 1883803
gcgagacuuugggcagagu

SEQ ID NO: 2217559 - RNA, 19 nt, Artificial Sequence
  Description of Artificial Sequence: Synthetic oligonucleotide
  Antisense strand to SEQ ID NO: 2217558
acucugcccaaagucucgc

SEQ ID NO: 2217560 - RNA, 19 nt, Artificial Sequence
  Description of Artificial Sequence: Synthetic oligonucleotide
  Sense strand starting at position 2963 of SEQ ID NO: 1883803
cuagguuccuuugcaugua

SEQ ID NO: 2217561 - RNA, 19 nt, Artificial Sequence
  Description of Artificial Sequence: Synthetic oligonucleotide
  Antisense strand to SEQ ID NO: 2217560
uacaugcaaaggaaccuag

SEQ ID NO: 2217562 - RNA, 19 nt, Artificial Sequence
  Description of Artificial Sequence: Synthetic oligonucleotide
  Sense strand starting at position 2040 of SEQ ID NO: 1883803
gcuucugccuuccuguaaa

SEQ ID NO: 2217563 - RNA, 19 nt, Artificial Sequence
  Description of Artificial Sequence: Synthetic oligonucleotide
  Antisense strand to SEQ ID NO: 2217562
uuuacaggaaggcagaagc

SEQ ID NO: 2217564 - RNA, 19 nt, Artificial Sequence
  Description of Artificial Sequence: Synthetic oligonucleotide
  Sense strand starting at position 2960 of SEQ ID NO: 1883803
gugcuagguuccuuugcau

SEQ ID NO: 2217565 - RNA, 19 nt, Artificial Sequence
  Description of Artificial Sequence: Synthetic oligonucleotide
  Antisense strand to SEQ ID NO: 2217564
augcaaaggaaccuagcac

SEQ ID NO: 2217566 - RNA, 19 nt, Artificial Sequence
  Description of Artificial Sequence: Synthetic oligonucleotide
  Sense strand starting at position 494 of SEQ ID NO: 1883803
gacgauguuucccacauau

SEQ ID NO: 2217567 - RNA, 19 nt, Artificial Sequence
  Description of Artificial Sequence: Synthetic oligonucleotide
  Antisense strand to SEQ ID NO: 2217566
auaugugggaaacaucguc

SEQ ID NO: 2217568 - RNA, 19 nt, Artificial Sequence
  Description of Artificial Sequence: Synthetic oligonucleotide
  Sense strand starting at position 3899 of SEQ ID NO: 1883803
aaagaauaguguggccagu

SEQ ID NO: 2217569 - RNA, 19 nt, Artificial Sequence
  Description of Artificial Sequence: Synthetic oligonucleotide
  Antisense strand to SEQ ID NO: 2217568
acuggccacacuauucuuu

SEQ ID NO: 2217570 - RNA, 19 nt, Artificial Sequence
  Description of Artificial Sequence: Synthetic oligonucleotide
  Sense strand starting at position 1676 of SEQ ID NO: 1883803
acagcacgcucuggauaaa

SEQ ID NO: 2217571 - RNA, 19 nt, Artificial Sequence
  Description of Artificial Sequence: Synthetic oligonucleotide
  Antisense strand to SEQ ID NO: 2217570
uuuauccagagcgugcugu

SEQ ID NO: 2217572 - RNA, 19 nt, Artificial Sequence
  Description of Artificial Sequence: Synthetic oligonucleotide
  Sense strand starting at position 692 of SEQ ID NO: 1883803
cuaccgaguucgugggaga

SEQ ID NO: 2217573 - RNA, 19 nt, Artificial Sequence
  Description of Artificial Sequence: Synthetic oligonucleotide
  Antisense strand to SEQ ID NO: 2217572
ucucccacgaacucgguag

SEQ ID NO: 2217574 - RNA, 19 nt, Artificial Sequence
  Description of Artificial Sequence: Synthetic oligonucleotide
  Sense strand starting at position 980 of SEQ ID NO: 1883803
gccugcucuugccaaauau

SEQ ID NO: 2217575 - RNA, 19 nt, Artificial Sequence
  Description of Artificial Sequence: Synthetic oligonucleotide
  Antisense strand to SEQ ID NO: 2217574
auauuuggcaagagcaggc

SEQ ID NO: 2217576 - RNA, 19 nt, Artificial Sequence
  Description of Artificial Sequence: Synthetic oligonucleotide
  Sense strand starting at position 977 of SEQ ID NO: 1883803
agggccugcucuugccaaa

SEQ ID NO: 2217577 - RNA, 19 nt, Artificial Sequence
  Description of Artificial Sequence: Synthetic oligonucleotide
  Antisense strand to SEQ ID NO: 2217576
uuuggcaagagcaggcccu

SEQ ID NO: 2217578 - RNA, 19 nt, Artificial Sequence
  Description of Artificial Sequence: Synthetic oligonucleotide
  Sense strand starting at position 165 of SEQ ID NO: 1883804
gcagaaugaaaggguacau

SEQ ID NO: 2217579 - RNA, 19 nt, Artificial Sequence
  Description of Artificial Sequence: Synthetic oligonucleotide
  Antisense strand to SEQ ID NO: 2217578
auguacccuuucauucugc

SEQ ID NO: 2217580 - RNA, 19 nt, Artificial Sequence
  Description of Artificial Sequence: Synthetic oligonucleotide
  Sense strand starting at position 3720 of SEQ ID NO: 1883804
uuggucucgaaugauugaa

SEQ ID NO: 2217581 - RNA, 19 nt, Artificial Sequence
  Description of Artificial Sequence: Synthetic oligonucleotide
  Antisense strand to SEQ ID NO: 2217580
uucaaucauucgagaccaa

SEQ ID NO: 2217582 - RNA, 19 nt, Artificial Sequence
  Description of Artificial Sequence: Synthetic oligonucleotide
  Sense strand starting at position 3033 of SEQ ID NO: 1883804
cucaguugggauugaugaa

SEQ ID NO: 2217583 - RNA, 19 nt, Artificial Sequence
  Description of Artificial Sequence: Synthetic oligonucleotide
  Antisense strand to SEQ ID NO: 2217582
uucaucaaucccaacugag

SEQ ID NO: 2217584 - RNA, 19 nt, Artificial Sequence
  Description of Artificial Sequence: Synthetic oligonucleotide
  Sense strand starting at position 3345 of SEQ ID NO: 1883804
augggucuuccaugacaaa

SEQ ID NO: 2217585 - RNA, 19 nt, Artificial Sequence
  Description of Artificial Sequence: Synthetic oligonucleotide
  Antisense strand to SEQ ID NO: 2217584
uuugucauggaagacccau

SEQ ID NO: 2217586 - RNA, 19 nt, Artificial Sequence
  Description of Artificial Sequence: Synthetic oligonucleotide
  Sense strand starting at position 2602 of SEQ ID NO: 1883804
cugaauuguaugugggaaa

SEQ ID NO: 2217587 - RNA, 19 nt, Artificial Sequence
  Description of Artificial Sequence: Synthetic oligonucleotide
  Antisense strand to SEQ ID NO: 2217586
uuucccacauacaauucag

SEQ ID NO: 2217588 - RNA, 19 nt, Artificial Sequence
  Description of Artificial Sequence: Synthetic oligonucleotide
  Sense strand starting at position 2134 of SEQ ID NO: 1883804
agaguaggcccugaagguu

SEQ ID NO: 2217589 - RNA, 19 nt, Artificial Sequence
  Description of Artificial Sequence: Synthetic oligonucleotide
  Antisense strand to SEQ ID NO: 2217588
aaccuucagggccuacucu

SEQ ID NO: 2217590 - RNA, 19 nt, Artificial Sequence
  Description of Artificial Sequence: Synthetic oligonucleotide
  Sense strand starting at position 2601 of SEQ ID NO: 1883804
ucugaauuguaugugggaa

SEQ ID NO: 2217591 - RNA, 19 nt, Artificial Sequence
  Description of Artificial Sequence: Synthetic oligonucleotide
  Antisense strand to SEQ ID NO: 2217590
uucccacauacaauucaga

SEQ ID NO: 2217592 - RNA, 19 nt, Artificial Sequence
  Description of Artificial Sequence: Synthetic oligonucleotide
  Sense strand starting at position 3207 of SEQ ID NO: 1883804
agaaacauggccuguccaa

SEQ ID NO: 2217593 - RNA, 19 nt, Artificial Sequence
  Description of Artificial Sequence: Synthetic oligonucleotide
  Antisense strand to SEQ ID NO: 2217592
uuggacaggccauguuucu

SEQ ID NO: 2217594 - RNA, 19 nt, Artificial Sequence
  Description of Artificial Sequence: Synthetic oligonucleotide
  Sense strand starting at position 3228 of SEQ ID NO: 1883804
cuuguugugggucaggaua

SEQ ID NO: 2217595 - RNA, 19 nt, Artificial Sequence
  Description of Artificial Sequence: Synthetic oligonucleotide
  Antisense strand to SEQ ID NO: 2217594
uauccugacccacaacaag

SEQ ID NO: 2217596 - RNA, 19 nt, Artificial Sequence
  Description of Artificial Sequence: Synthetic oligonucleotide
  Sense strand starting at position 3719 of SEQ ID NO: 1883804
auuggucucgaaugauuga

SEQ ID NO: 2217597 - RNA, 19 nt, Artificial Sequence
  Description of Artificial Sequence: Synthetic oligonucleotide
  Antisense strand to SEQ ID NO: 2217596
ucaaucauucgagaccaau

SEQ ID NO: 2217598 - RNA, 19 nt, Artificial Sequence
  Description of Artificial Sequence: Synthetic oligonucleotide
  Sense strand starting at position 2600 of SEQ ID NO: 1883804
cucugaauuguauguggga

SEQ ID NO: 2217599 - RNA, 19 nt, Artificial Sequence
  Description of Artificial Sequence: Synthetic oligonucleotide
  Antisense strand to SEQ ID NO: 2217598
ucccacauacaauucagag

SEQ ID NO: 2217600 - RNA, 19 nt, Artificial Sequence
  Description of Artificial Sequence: Synthetic oligonucleotide
  Sense strand starting at position 2133 of SEQ ID NO: 1883804
aagaguaggcccugaaggu

SEQ ID NO: 2217601 - RNA, 19 nt, Artificial Sequence
  Description of Artificial Sequence: Synthetic oligonucleotide
  Antisense strand to SEQ ID NO: 2217600
accuucagggccuacucuu

SEQ ID NO: 2217602 - RNA, 19 nt, Artificial Sequence
  Description of Artificial Sequence: Synthetic oligonucleotide
  Sense strand starting at position 3768 of SEQ ID NO: 1883804
uuggcauccugaguuagac

SEQ ID NO: 2217603 - RNA, 19 nt, Artificial Sequence
  Description of Artificial Sequence: Synthetic oligonucleotide
  Antisense strand to SEQ ID NO: 2217602
gucuaacucaggaugccaa

SEQ ID NO: 2217604 - RNA, 19 nt, Artificial Sequence
  Description of Artificial Sequence: Synthetic oligonucleotide
  Sense strand starting at position 3118 of SEQ ID NO: 1883804
guuccuguggagugaugga

SEQ ID NO: 2217605 - RNA, 19 nt, Artificial Sequence
  Description of Artificial Sequence: Synthetic oligonucleotide
  Antisense strand to SEQ ID NO: 2217604
uccaucacuccacaggaac

SEQ ID NO: 2217606 - RNA, 19 nt, Artificial Sequence
  Description of Artificial Sequence: Synthetic oligonucleotide
  Sense strand starting at position 2120 of SEQ ID NO: 1883804
ugacauauuuggcaagagu

SEQ ID NO: 2217607 - RNA, 19 nt, Artificial Sequence
  Description of Artificial Sequence: Synthetic oligonucleotide
  Antisense strand to SEQ ID NO: 2217606
acucuugccaaauauguca

SEQ ID NO: 2217608 - RNA, 19 nt, Artificial Sequence
  Description of Artificial Sequence: Synthetic oligonucleotide
  Sense strand starting at position 2347 of SEQ ID NO: 1883804
uuugacauuuggcaacauu

SEQ ID NO: 2217609 - RNA, 19 nt, Artificial Sequence
  Description of Artificial Sequence: Synthetic oligonucleotide
  Antisense strand to SEQ ID NO: 2217608
aauguugccaaaugucaaa

SEQ ID NO: 2217610 - RNA, 19 nt, Artificial Sequence
  Description of Artificial Sequence: Synthetic oligonucleotide
  Sense strand starting at position 2596 of SEQ ID NO: 1883804
gggucucugaauuguaugu

SEQ ID NO: 2217611 - RNA, 19 nt, Artificial Sequence
  Description of Artificial Sequence: Synthetic oligonucleotide
  Antisense strand to SEQ ID NO: 2217610
acauacaauucagagaccc

SEQ ID NO: 2217612 - RNA, 19 nt, Artificial Sequence
  Description of Artificial Sequence: Synthetic oligonucleotide
  Sense strand starting at position 389 of SEQ ID NO: 1883804
cgagaagaauagggaaaua

SEQ ID NO: 2217613 - RNA, 19 nt, Artificial Sequence
  Description of Artificial Sequence: Synthetic oligonucleotide
  Antisense strand to SEQ ID NO: 2217612
uauuucccuauucuucucg

SEQ ID NO: 2217614 - RNA, 19 nt, Artificial Sequence
  Description of Artificial Sequence: Synthetic oligonucleotide
  Sense strand starting at position 340 of SEQ ID NO: 1883804
ggccaagccuguuucuaag

SEQ ID NO: 2217615 - RNA, 19 nt, Artificial Sequence
  Description of Artificial Sequence: Synthetic oligonucleotide
  Antisense strand to SEQ ID NO: 2217614
cuuagaaacaggcuuggcc

SEQ ID NO: 2217616 - RNA, 19 nt, Artificial Sequence
  Description of Artificial Sequence: Synthetic oligonucleotide
  Sense strand starting at position 2605 of SEQ ID NO: 1883804
aauuguaugugggaaacau

SEQ ID NO: 2217617 - RNA, 19 nt, Artificial Sequence
  Description of Artificial Sequence: Synthetic oligonucleotide
  Antisense strand to SEQ ID NO: 2217616
auguuucccacauacaauu

SEQ ID NO: 2217618 - RNA, 19 nt, Artificial Sequence
  Description of Artificial Sequence: Synthetic oligonucleotide
  Sense strand starting at position 3498 of SEQ ID NO: 1883804
agcaucgacucuuaaauaa

SEQ ID NO: 2217619 - RNA, 19 nt, Artificial Sequence
  Description of Artificial Sequence: Synthetic oligonucleotide
  Antisense strand to SEQ ID NO: 2217618
uuauuuaagagucgaugcu

SEQ ID NO: 2217620 - RNA, 19 nt, Artificial Sequence
  Description of Artificial Sequence: Synthetic oligonucleotide
  Sense strand starting at position 3030 of SEQ ID NO: 1883804
cuccucaguugggauugau

SEQ ID NO: 2217621 - RNA, 19 nt, Artificial Sequence
  Description of Artificial Sequence: Synthetic oligonucleotide
  Antisense strand to SEQ ID NO: 2217620
aucaaucccaacugaggag

SEQ ID NO: 2217622 - RNA, 19 nt, Artificial Sequence
  Description of Artificial Sequence: Synthetic oligonucleotide
  Sense strand starting at position 2050 of SEQ ID NO: 1883804
aguggugucucagaacaca

SEQ ID NO: 2217623 - RNA, 19 nt, Artificial Sequence
  Description of Artificial Sequence: Synthetic oligonucleotide
  Antisense strand to SEQ ID NO: 2217622
uguguucugagacaccacu

SEQ ID NO: 2217624 - RNA, 19 nt, Artificial Sequence
  Description of Artificial Sequence: Synthetic oligonucleotide
  Sense strand starting at position 2603 of SEQ ID NO: 1883804
ugaauuguaugugggaaac

SEQ ID NO: 2217625 - RNA, 19 nt, Artificial Sequence
  Description of Artificial Sequence: Synthetic oligonucleotide
  Antisense strand to SEQ ID NO: 2217624
guuucccacauacaauuca

SEQ ID NO: 2217626 - RNA, 19 nt, Artificial Sequence
  Description of Artificial Sequence: Synthetic oligonucleotide
  Sense strand starting at position 3230 of SEQ ID NO: 1883804
uguugugggucaggauauu

SEQ ID NO: 2217627 - RNA, 19 nt, Artificial Sequence
  Description of Artificial Sequence: Synthetic oligonucleotide
  Antisense strand to SEQ ID NO: 2217626
aauauccugacccacaaca

SEQ ID NO: 2217628 - RNA, 19 nt, Artificial Sequence
  Description of Artificial Sequence: Synthetic oligonucleotide
  Sense strand starting at position 3223 of SEQ ID NO: 1883804
caauacuuguuguggguca

SEQ ID NO: 2217629 - RNA, 19 nt, Artificial Sequence
  Description of Artificial Sequence: Synthetic oligonucleotide
  Antisense strand to SEQ ID NO: 2217628
ugacccacaacaaguauug

SEQ ID NO: 2217630 - RNA, 19 nt, Artificial Sequence
  Description of Artificial Sequence: Synthetic oligonucleotide
  Sense strand starting at position 532 of SEQ ID NO: 1883804
ucgaguggguccuguugga

SEQ ID NO: 2217631 - RNA, 19 nt, Artificial Sequence
  Description of Artificial Sequence: Synthetic oligonucleotide
  Antisense strand to SEQ ID NO: 2217630
uccaacaggacccacucga

SEQ ID NO: 2217632 - RNA, 19 nt, Artificial Sequence
  Description of Artificial Sequence: Synthetic oligonucleotide
  Sense strand starting at position 3114 of SEQ ID NO: 1883804
ggcuguuccuguggaguga

SEQ ID NO: 2217633 - RNA, 19 nt, Artificial Sequence
  Description of Artificial Sequence: Synthetic oligonucleotide
  Antisense strand to SEQ ID NO: 2217632
ucacuccacaggaacagcc

SEQ ID NO: 2217634 - RNA, 19 nt, Artificial Sequence
  Description of Artificial Sequence: Synthetic oligonucleotide
  Sense strand starting at position 401 of SEQ ID NO: 1883804
ggaaauacgugucgucugu

SEQ ID NO: 2217635 - RNA, 19 nt, Artificial Sequence
  Description of Artificial Sequence: Synthetic oligonucleotide
  Antisense strand to SEQ ID NO: 2217634
acagacgacacguauuucc

SEQ ID NO: 2217636 - RNA, 19 nt, Artificial Sequence
  Description of Artificial Sequence: Synthetic oligonucleotide
  Sense strand starting at position 201 of SEQ ID NO: 1883805
ggaccugagaguuggacau

SEQ ID NO: 2217637 - RNA, 19 nt, Artificial Sequence
  Description of Artificial Sequence: Synthetic oligonucleotide
  Antisense strand to SEQ ID NO: 2217636
auguccaacucucaggucc

SEQ ID NO: 2217638 - RNA, 19 nt, Artificial Sequence
  Description of Artificial Sequence: Synthetic oligonucleotide
  Sense strand starting at position 1469 of SEQ ID NO: 1883805
gagaaccucuaugugaauu

SEQ ID NO: 2217639 - RNA, 19 nt, Artificial Sequence
  Description of Artificial Sequence: Synthetic oligonucleotide
  Antisense strand to SEQ ID NO: 2217638
aauucacauagagguucuc

SEQ ID NO: 2217640 - RNA, 19 nt, Artificial Sequence
  Description of Artificial Sequence: Synthetic oligonucleotide
  Sense strand starting at position 1468 of SEQ ID NO: 1883805
ugagaaccucuaugugaau

SEQ ID NO: 2217641 - RNA, 19 nt, Artificial Sequence
  Description of Artificial Sequence: Synthetic oligonucleotide
  Antisense strand to SEQ ID NO: 2217640
auucacauagagguucuca

SEQ ID NO: 2217642 - RNA, 19 nt, Artificial Sequence
  Description of Artificial Sequence: Synthetic oligonucleotide
  Sense strand starting at position 1363 of SEQ ID NO: 1883805
acugacucugacugugaaa

SEQ ID NO: 2217643 - RNA, 19 nt, Artificial Sequence
  Description of Artificial Sequence: Synthetic oligonucleotide
  Antisense strand to SEQ ID NO: 2217642
uuucacagucagagucagu

SEQ ID NO: 2217644 - RNA, 19 nt, Artificial Sequence
  Description of Artificial Sequence: Synthetic oligonucleotide
  Sense strand starting at position 739 of SEQ ID NO: 1883805
gcauuaaugcaggaaaggu

SEQ ID NO: 2217645 - RNA, 19 nt, Artificial Sequence
  Description of Artificial Sequence: Synthetic oligonucleotide
  Antisense strand to SEQ ID NO: 2217644
accuuuccugcauuaaugc

SEQ ID NO: 2217646 - RNA, 19 nt, Artificial Sequence
  Description of Artificial Sequence: Synthetic oligonucleotide
  Sense strand starting at position 2626 of SEQ ID NO: 1883805
gaguaauaagcgcaauaaa

SEQ ID NO: 2217647 - RNA, 19 nt, Artificial Sequence
  Description of Artificial Sequence: Synthetic oligonucleotide
  Antisense strand to SEQ ID NO: 2217646
uuuauugcgcuuauuacuc

SEQ ID NO: 2217648 - RNA, 19 nt, Artificial Sequence
  Description of Artificial Sequence: Synthetic oligonucleotide
  Sense strand starting at position 1362 of SEQ ID NO: 1883805
cacugacucugacugugaa

SEQ ID NO: 2217649 - RNA, 19 nt, Artificial Sequence
  Description of Artificial Sequence: Synthetic oligonucleotide
  Antisense strand to SEQ ID NO: 2217648
uucacagucagagucagug

SEQ ID NO: 2217650 - RNA, 19 nt, Artificial Sequence
  Description of Artificial Sequence: Synthetic oligonucleotide
  Sense strand starting at position 3767 of SEQ ID NO: 1883805
cucugagaugccuaucauc

SEQ ID NO: 2217651 - RNA, 19 nt, Artificial Sequence
  Description of Artificial Sequence: Synthetic oligonucleotide
  Antisense strand to SEQ ID NO: 2217650
gaugauaggcaucucagag

SEQ ID NO: 2217652 - RNA, 19 nt, Artificial Sequence
  Description of Artificial Sequence: Synthetic oligonucleotide
  Sense strand starting at position 2599 of SEQ ID NO: 1883805
aaggaacuccguugauaac

SEQ ID NO: 2217653 - RNA, 19 nt, Artificial Sequence
  Description of Artificial Sequence: Synthetic oligonucleotide
  Antisense strand to SEQ ID NO: 2217652
guuaucaacggaguuccuu

SEQ ID NO: 2217654 - RNA, 19 nt, Artificial Sequence
  Description of Artificial Sequence: Synthetic oligonucleotide
  Sense strand starting at position 465 of SEQ ID NO: 1883805
gaauaaugguuucuguaag

SEQ ID NO: 2217655 - RNA, 19 nt, Artificial Sequence
  Description of Artificial Sequence: Synthetic oligonucleotide
  Antisense strand to SEQ ID NO: 2217654
cuuacagaaaccauuauuc

SEQ ID NO: 2217656 - RNA, 19 nt, Artificial Sequence
  Description of Artificial Sequence: Synthetic oligonucleotide
  Sense strand starting at position 462 of SEQ ID NO: 1883805
ggagaauaaugguuucugu

SEQ ID NO: 2217657 - RNA, 19 nt, Artificial Sequence
  Description of Artificial Sequence: Synthetic oligonucleotide
  Antisense strand to SEQ ID NO: 2217656
acagaaaccauuauucucc

SEQ ID NO: 2217658 - RNA, 19 nt, Artificial Sequence
  Description of Artificial Sequence: Synthetic oligonucleotide
  Sense strand starting at position 820 of SEQ ID NO: 1883805
aagcccauuugagagauga

SEQ ID NO: 2217659 - RNA, 19 nt, Artificial Sequence
  Description of Artificial Sequence: Synthetic oligonucleotide
  Antisense strand to SEQ ID NO: 2217658
ucaucucucaaaugggcuu

SEQ ID NO: 2217660 - RNA, 19 nt, Artificial Sequence
  Description of Artificial Sequence: Synthetic oligonucleotide
  Sense strand starting at position 535 of SEQ ID NO: 1883805
gccuaucauggucauccaa

SEQ ID NO: 2217661 - RNA, 19 nt, Artificial Sequence
  Description of Artificial Sequence: Synthetic oligonucleotide
  Antisense strand to SEQ ID NO: 2217660
uuggaugaccaugauaggc

SEQ ID NO: 2217662 - RNA, 19 nt, Artificial Sequence
  Description of Artificial Sequence: Synthetic oligonucleotide
  Sense strand starting at position 2713 of SEQ ID NO: 1883805
cguuauucccgacaccaaa

SEQ ID NO: 2217663 - RNA, 19 nt, Artificial Sequence
  Description of Artificial Sequence: Synthetic oligonucleotide
  Antisense strand to SEQ ID NO: 2217662
uuuggugucgggaauaacg

SEQ ID NO: 2217664 - RNA, 19 nt, Artificial Sequence
  Description of Artificial Sequence: Synthetic oligonucleotide
  Sense strand starting at position 608 of SEQ ID NO: 1883805
ucaggugagcuccagguua

SEQ ID NO: 2217665 - RNA, 19 nt, Artificial Sequence
  Description of Artificial Sequence: Synthetic oligonucleotide
  Antisense strand to SEQ ID NO: 2217664
uaaccuggagcucaccuga

SEQ ID NO: 2217666 - RNA, 19 nt, Artificial Sequence
  Description of Artificial Sequence: Synthetic oligonucleotide
  Sense strand starting at position 2521 of SEQ ID NO: 1883805
acccgcagauauuccaaua

SEQ ID NO: 2217667 - RNA, 19 nt, Artificial Sequence
  Description of Artificial Sequence: Synthetic oligonucleotide
  Antisense strand to SEQ ID NO: 2217666
uauuggaauaucugcgggu

SEQ ID NO: 2217668 - RNA, 19 nt, Artificial Sequence
  Description of Artificial Sequence: Synthetic oligonucleotide
  Sense strand starting at position 3863 of SEQ ID NO: 1883805
ggauuaaacccauggcugu

SEQ ID NO: 2217669 - RNA, 19 nt, Artificial Sequence
  Description of Artificial Sequence: Synthetic oligonucleotide
  Antisense strand to SEQ ID NO: 2217668
acagccauggguuuaaucc

SEQ ID NO: 2217670 - RNA, 19 nt, Artificial Sequence
  Description of Artificial Sequence: Synthetic oligonucleotide
  Sense strand starting at position 610 of SEQ ID NO: 1883805
aggugagcuccagguuaaa

SEQ ID NO: 2217671 - RNA, 19 nt, Artificial Sequence
  Description of Artificial Sequence: Synthetic oligonucleotide
  Antisense strand to SEQ ID NO: 2217670
uuuaaccuggagcucaccu

SEQ ID NO: 2217672 - RNA, 19 nt, Artificial Sequence
  Description of Artificial Sequence: Synthetic oligonucleotide
  Sense strand starting at position 796 of SEQ ID NO: 1883805
gcucaugggccugaaguua

SEQ ID NO: 2217673 - RNA, 19 nt, Artificial Sequence
  Description of Artificial Sequence: Synthetic oligonucleotide
  Antisense strand to SEQ ID NO: 2217672
uaacuucaggcccaugagc

SEQ ID NO: 2217674 - RNA, 19 nt, Artificial Sequence
  Description of Artificial Sequence: Synthetic oligonucleotide
  Sense strand starting at position 3864 of SEQ ID NO: 1883805
gauuaaacccauggcuguu

SEQ ID NO: 2217675 - RNA, 19 nt, Artificial Sequence
  Description of Artificial Sequence: Synthetic oligonucleotide
  Antisense strand to SEQ ID NO: 2217674
aacagccauggguuuaauc

SEQ ID NO: 2217676 - RNA, 19 nt, Artificial Sequence
  Description of Artificial Sequence: Synthetic oligonucleotide
  Sense strand starting at position 434 of SEQ ID NO: 1883805
gggaaacguuugccuugga

SEQ ID NO: 2217677 - RNA, 19 nt, Artificial Sequence
  Description of Artificial Sequence: Synthetic oligonucleotide
  Antisense strand to SEQ ID NO: 2217676
uccaaggcaaacguuuccc

SEQ ID NO: 2217678 - RNA, 19 nt, Artificial Sequence
  Description of Artificial Sequence: Synthetic oligonucleotide
  Sense strand starting at position 845 of SEQ ID NO: 1883805
ucaagcuuugcccaaguua

SEQ ID NO: 2217679 - RNA, 19 nt, Artificial Sequence
  Description of Artificial Sequence: Synthetic oligonucleotide
  Antisense strand to SEQ ID NO: 2217678
uaacuugggcaaagcuuga

SEQ ID NO: 2217680 - RNA, 19 nt, Artificial Sequence
  Description of Artificial Sequence: Synthetic oligonucleotide
  Sense strand starting at position 534 of SEQ ID NO: 1883805
ggccuaucauggucaucca

SEQ ID NO: 2217681 - RNA, 19 nt, Artificial Sequence
  Description of Artificial Sequence: Synthetic oligonucleotide
  Antisense strand to SEQ ID NO: 2217680
uggaugaccaugauaggcc

SEQ ID NO: 2217682 - RNA, 19 nt, Artificial Sequence
  Description of Artificial Sequence: Synthetic oligonucleotide
  Sense strand starting at position 3870 of SEQ ID NO: 1883805
acccauggcuguuugacau

SEQ ID NO: 2217683 - RNA, 19 nt, Artificial Sequence
  Description of Artificial Sequence: Synthetic oligonucleotide
  Antisense strand to SEQ ID NO: 2217682
augucaaacagccaugggu

SEQ ID NO: 2217684 - RNA, 19 nt, Artificial Sequence
  Description of Artificial Sequence: Synthetic oligonucleotide
  Sense strand starting at position 2711 of SEQ ID NO: 1883805
cccguuauucccgacacca

SEQ ID NO: 2217685 - RNA, 19 nt, Artificial Sequence
  Description of Artificial Sequence: Synthetic oligonucleotide
  Antisense strand to SEQ ID NO: 2217684
uggugucgggaauaacggg

SEQ ID NO: 2217686 - RNA, 19 nt, Artificial Sequence
  Description of Artificial Sequence: Synthetic oligonucleotide
  Sense strand starting at position 3577 of SEQ ID NO: 1883805
augucuucccuaggcagau

SEQ ID NO: 2217687 - RNA, 19 nt, Artificial Sequence
  Description of Artificial Sequence: Synthetic oligonucleotide
  Antisense strand to SEQ ID NO: 2217686
aucugccuagggaagacau

SEQ ID NO: 2217688 - RNA, 19 nt, Artificial Sequence
  Description of Artificial Sequence: Synthetic oligonucleotide
  Sense strand starting at position 437 of SEQ ID NO: 1883805
aaacguuugccuuggagac

SEQ ID NO: 2217689 - RNA, 19 nt, Artificial Sequence
  Description of Artificial Sequence: Synthetic oligonucleotide
  Antisense strand to SEQ ID NO: 2217688
gucuccaaggcaaacguuu

SEQ ID NO: 2217690 - RNA, 19 nt, Artificial Sequence
  Description of Artificial Sequence: Synthetic oligonucleotide
  Sense strand starting at position 1045 of SEQ ID NO: 1883805
caaagacucuugccgcaga

SEQ ID NO: 2217691 - RNA, 19 nt, Artificial Sequence
  Description of Artificial Sequence: Synthetic oligonucleotide
  Antisense strand to SEQ ID NO: 2217690
ucugcggcaagagucuuug

SEQ ID NO: 2217692 - RNA, 19 nt, Artificial Sequence
  Description of Artificial Sequence: Synthetic oligonucleotide
  Sense strand starting at position 1651 of SEQ ID NO: 1883805
ccucguuuccuacaaagcu

SEQ ID NO: 2217693 - RNA, 19 nt, Artificial Sequence
  Description of Artificial Sequence: Synthetic oligonucleotide
  Antisense strand to SEQ ID NO: 2217692
agcuuuguaggaaacgagg

SEQ ID NO: 2217694 - RNA, 19 nt, Artificial Sequence
  Description of Artificial Sequence: Synthetic oligonucleotide
  Sense strand starting at position 631 of SEQ ID NO: 1883805
gcagauuccuugguccacu

SEQ ID NO: 2217695 - RNA, 19 nt, Artificial Sequence
  Description of Artificial Sequence: Synthetic oligonucleotide
  Antisense strand to SEQ ID NO: 2217694
aguggaccaaggaaucugc

SEQ ID NO: 2217696 - RNA, 19 nt, Artificial Sequence
  Description of Artificial Sequence: Synthetic oligonucleotide
  Sense strand starting at position 438 of SEQ ID NO: 1883805
aacguuugccuuggagacu

SEQ ID NO: 2217697 - RNA, 19 nt, Artificial Sequence
  Description of Artificial Sequence: Synthetic oligonucleotide
  Antisense strand to SEQ ID NO: 2217696
agucuccaaggcaaacguu

SEQ ID NO: 2217698 - RNA, 19 nt, Artificial Sequence
  Description of Artificial Sequence: Synthetic oligonucleotide
  Sense strand starting at position 716 of SEQ ID NO: 1883805
gcccauaggcguugagaaa

SEQ ID NO: 2217699 - RNA, 19 nt, Artificial Sequence
  Description of Artificial Sequence: Synthetic oligonucleotide
  Antisense strand to SEQ ID NO: 2217698
uuucucaacgccuaugggc

SEQ ID NO: 2217700 - RNA, 19 nt, Artificial Sequence
  Description of Artificial Sequence: Synthetic oligonucleotide
  Sense strand starting at position 795 of SEQ ID NO: 1883805
agcucaugggccugaaguu

SEQ ID NO: 2217701 - RNA, 19 nt, Artificial Sequence
  Description of Artificial Sequence: Synthetic oligonucleotide
  Antisense strand to SEQ ID NO: 2217700
aacuucaggcccaugagcu

SEQ ID NO: 2217702 - RNA, 19 nt, Artificial Sequence
  Description of Artificial Sequence: Synthetic oligonucleotide
  Sense strand starting at position 288 of SEQ ID NO: 1883805
ggugaaauggcuugcccua

SEQ ID NO: 2217703 - RNA, 19 nt, Artificial Sequence
  Description of Artificial Sequence: Synthetic oligonucleotide
  Antisense strand to SEQ ID NO: 2217702
uagggcaagccauuucacc

SEQ ID NO: 2217704 - RNA, 19 nt, Artificial Sequence
  Description of Artificial Sequence: Synthetic oligonucleotide
  Sense strand starting at position 695 of SEQ ID NO: 1883805
acaagcauccugugcaacu

SEQ ID NO: 2217705 - RNA, 19 nt, Artificial Sequence
  Description of Artificial Sequence: Synthetic oligonucleotide
  Antisense strand to SEQ ID NO: 2217704
aguugcacaggaugcuugu

SEQ ID NO: 2217706 - RNA, 19 nt, Artificial Sequence
  Description of Artificial Sequence: Synthetic oligonucleotide
  Sense strand starting at position 3824 of SEQ ID NO: 1883805
gguuaagucccuugcuuag

SEQ ID NO: 2217707 - RNA, 19 nt, Artificial Sequence
  Description of Artificial Sequence: Synthetic oligonucleotide
  Antisense strand to SEQ ID NO: 2217706
cuaagcaagggacuuaacc

SEQ ID NO: 2217708 - RNA, 19 nt, Artificial Sequence
  Description of Artificial Sequence: Synthetic oligonucleotide
  Sense strand starting at position 274 of SEQ ID NO: 1883805
acagauaagucacagguga

SEQ ID NO: 2217709 - RNA, 19 nt, Artificial Sequence
  Description of Artificial Sequence: Synthetic oligonucleotide
  Antisense strand to SEQ ID NO: 2217708
ucaccugugacuuaucugu

SEQ ID NO: 2217710 - RNA, 19 nt, Artificial Sequence
  Description of Artificial Sequence: Synthetic oligonucleotide
  Sense strand starting at position 203 of SEQ ID NO: 1883805
accugagaguuggacauau

SEQ ID NO: 2217711 - RNA, 19 nt, Artificial Sequence
  Description of Artificial Sequence: Synthetic oligonucleotide
  Antisense strand to SEQ ID NO: 2217710
auauguccaacucucaggu

SEQ ID NO: 2217712 - RNA, 19 nt, Artificial Sequence
  Description of Artificial Sequence: Synthetic oligonucleotide
  Sense strand starting at position 1823 of SEQ ID NO: 1883805
uccuguucccgaggccuua

SEQ ID NO: 2217713 - RNA, 19 nt, Artificial Sequence
  Description of Artificial Sequence: Synthetic oligonucleotide
  Antisense strand to SEQ ID NO: 2217712
uaaggccucgggaacagga

SEQ ID NO: 2217714 - RNA, 19 nt, Artificial Sequence
  Description of Artificial Sequence: Synthetic oligonucleotide
  Sense strand starting at position 3784 of SEQ ID NO: 1883805
ucauuaccauucgaaagau

SEQ ID NO: 2217715 - RNA, 19 nt, Artificial Sequence
  Description of Artificial Sequence: Synthetic oligonucleotide
  Antisense strand to SEQ ID NO: 2217714
aucuuucgaaugguaauga

SEQ ID NO: 2217716 - RNA, 19 nt, Artificial Sequence
  Description of Artificial Sequence: Synthetic oligonucleotide
  Sense strand starting at position 52 of SEQ ID NO: 1883806
ggaccauaggccuggagaa

SEQ ID NO: 2217717 - RNA, 19 nt, Artificial Sequence
  Description of Artificial Sequence: Synthetic oligonucleotide
  Antisense strand to SEQ ID NO: 2217716
uucuccaggccuauggucc

SEQ ID NO: 2217718 - RNA, 19 nt, Artificial Sequence
  Description of Artificial Sequence: Synthetic oligonucleotide
  Sense strand starting at position 2682 of SEQ ID NO: 1883806
ugcauaucggccugaagac

SEQ ID NO: 2217719 - RNA, 19 nt, Artificial Sequence
  Description of Artificial Sequence: Synthetic oligonucleotide
  Antisense strand to SEQ ID NO: 2217718
gucuucaggccgauaugca

SEQ ID NO: 2217720 - RNA, 19 nt, Artificial Sequence
  Description of Artificial Sequence: Synthetic oligonucleotide
  Sense strand starting at position 794 of SEQ ID NO: 1883806
guagauguccgcugggaug

SEQ ID NO: 2217721 - RNA, 19 nt, Artificial Sequence
  Description of Artificial Sequence: Synthetic oligonucleotide
  Antisense strand to SEQ ID NO: 2217720
caucccagcggacaucuac

SEQ ID NO: 2217722 - RNA, 19 nt, Artificial Sequence
  Description of Artificial Sequence: Synthetic oligonucleotide
  Sense strand starting at position 2934 of SEQ ID NO: 1883806
gcguguuuaaagugacaga

SEQ ID NO: 2217723 - RNA, 19 nt, Artificial Sequence
  Description of Artificial Sequence: Synthetic oligonucleotide
  Antisense strand to SEQ ID NO: 2217722
ucugucacuuuaaacacgc

SEQ ID NO: 2217724 - RNA, 19 nt, Artificial Sequence
  Description of Artificial Sequence: Synthetic oligonucleotide
  Sense strand starting at position 2932 of SEQ ID NO: 1883806
gggcguguuuaaagugaca

SEQ ID NO: 2217725 - RNA, 19 nt, Artificial Sequence
  Description of Artificial Sequence: Synthetic oligonucleotide
  Antisense strand to SEQ ID NO: 2217724
ugucacuuuaaacacgccc

SEQ ID NO: 2217726 - RNA, 19 nt, Artificial Sequence
  Description of Artificial Sequence: Synthetic oligonucleotide
  Sense strand starting at position 2061 of SEQ ID NO: 1883806
ggaaauuauuccgguccag

SEQ ID NO: 2217727 - RNA, 19 nt, Artificial Sequence
  Description of Artificial Sequence: Synthetic oligonucleotide
  Antisense strand to SEQ ID NO: 2217726
cuggaccggaauaauuucc

SEQ ID NO: 2217728 - RNA, 19 nt, Artificial Sequence
  Description of Artificial Sequence: Synthetic oligonucleotide
  Sense strand starting at position 2060 of SEQ ID NO: 1883806
uggaaauuauuccggucca

SEQ ID NO: 2217729 - RNA, 19 nt, Artificial Sequence
  Description of Artificial Sequence: Synthetic oligonucleotide
  Antisense strand to SEQ ID NO: 2217728
uggaccggaauaauuucca

SEQ ID NO: 2217730 - RNA, 19 nt, Artificial Sequence
  Description of Artificial Sequence: Synthetic oligonucleotide
  Sense strand starting at position 2592 of SEQ ID NO: 1883807
auggcuucuacgcuguuau

SEQ ID NO: 2217731 - RNA, 19 nt, Artificial Sequence
  Description of Artificial Sequence: Synthetic oligonucleotide
  Antisense strand to SEQ ID NO: 2217730
auaacagcguagaagccau

SEQ ID NO: 2217732 - RNA, 19 nt, Artificial Sequence
  Description of Artificial Sequence: Synthetic oligonucleotide
  Sense strand starting at position 421 of SEQ ID NO: 1883807
ugaggaguuccagauguua

SEQ ID NO: 2217733 - RNA, 19 nt, Artificial Sequence
  Description of Artificial Sequence: Synthetic oligonucleotide
  Antisense strand to SEQ ID NO: 2217732
uaacaucuggaacuccuca

SEQ ID NO: 2217734 - RNA, 19 nt, Artificial Sequence
  Description of Artificial Sequence: Synthetic oligonucleotide
  Sense strand starting at position 380 of SEQ ID NO: 1883807
gaaaguuucuagguaaagg

SEQ ID NO: 2217735 - RNA, 19 nt, Artificial Sequence
  Description of Artificial Sequence: Synthetic oligonucleotide
  Antisense strand to SEQ ID NO: 2217734
ccuuuaccuagaaacuuuc

SEQ ID NO: 2217736 - RNA, 19 nt, Artificial Sequence
  Description of Artificial Sequence: Synthetic oligonucleotide
  Sense strand starting at position 1092 of SEQ ID NO: 1883807
aguaaaguuguugacauac

SEQ ID NO: 2217737 - RNA, 19 nt, Artificial Sequence
  Description of Artificial Sequence: Synthetic oligonucleotide
  Antisense strand to SEQ ID NO: 2217736
guaugucaacaacuuuacu

SEQ ID NO: 2217738 - RNA, 19 nt, Artificial Sequence
  Description of Artificial Sequence: Synthetic oligonucleotide
  Sense strand starting at position 3855 of SEQ ID NO: 1883807
agauacuguugaucauauu

SEQ ID NO: 2217739 - RNA, 19 nt, Artificial Sequence
  Description of Artificial Sequence: Synthetic oligonucleotide
  Antisense strand to SEQ ID NO: 2217738
aauaugaucaacaguaucu

SEQ ID NO: 2217740 - RNA, 19 nt, Artificial Sequence
  Description of Artificial Sequence: Synthetic oligonucleotide
  Sense strand starting at position 620 of SEQ ID NO: 1883807
guccuuuguacugagauag

SEQ ID NO: 2217741 - RNA, 19 nt, Artificial Sequence
  Description of Artificial Sequence: Synthetic oligonucleotide
  Antisense strand to SEQ ID NO: 2217740
cuaucucaguacaaaggac

SEQ ID NO: 2217742 - RNA, 19 nt, Artificial Sequence
  Description of Artificial Sequence: Synthetic oligonucleotide
  Sense strand starting at position 3025 of SEQ ID NO: 1883807
gguuaugugacauaggcaa

SEQ ID NO: 2217743 - RNA, 19 nt, Artificial Sequence
  Description of Artificial Sequence: Synthetic oligonucleotide
  Antisense strand to SEQ ID NO: 2217742
uugccuaugucacauaacc

SEQ ID NO: 2217744 - RNA, 19 nt, Artificial Sequence
  Description of Artificial Sequence: Synthetic oligonucleotide
  Sense strand starting at position 1475 of SEQ ID NO: 1883807
augucccuucgacaaauau

SEQ ID NO: 2217745 - RNA, 19 nt, Artificial Sequence
  Description of Artificial Sequence: Synthetic oligonucleotide
  Antisense strand to SEQ ID NO: 2217744
auauuugucgaagggacau

SEQ ID NO: 2217746 - RNA, 19 nt, Artificial Sequence
  Description of Artificial Sequence: Synthetic oligonucleotide
  Sense strand starting at position 1456 of SEQ ID NO: 1883807
acgcguuucccuuucgaua

SEQ ID NO: 2217747 - RNA, 19 nt, Artificial Sequence
  Description of Artificial Sequence: Synthetic oligonucleotide
  Antisense strand to SEQ ID NO: 2217746
uaucgaaagggaaacgcgu

SEQ ID NO: 2217748 - RNA, 19 nt, Artificial Sequence
  Description of Artificial Sequence: Synthetic oligonucleotide
  Sense strand starting at position 1457 of SEQ ID NO: 1883807
cgcguuucccuuucgauaa

SEQ ID NO: 2217749 - RNA, 19 nt, Artificial Sequence
  Description of Artificial Sequence: Synthetic oligonucleotide
  Antisense strand to SEQ ID NO: 2217748
uuaucgaaagggaaacgcg

SEQ ID NO: 2217750 - RNA, 19 nt, Artificial Sequence
  Description of Artificial Sequence: Synthetic oligonucleotide
  Sense strand starting at position 3936 of SEQ ID NO: 1883807
aguacuuacuuagcaagaa

SEQ ID NO: 2217751 - RNA, 19 nt, Artificial Sequence
  Description of Artificial Sequence: Synthetic oligonucleotide
  Antisense strand to SEQ ID NO: 2217750
uucuugcuaaguaaguacu

SEQ ID NO: 2217752 - RNA, 19 nt, Artificial Sequence
  Description of Artificial Sequence: Synthetic oligonucleotide
  Sense strand starting at position 908 of SEQ ID NO: 1883807
agcaaaugcugauuacaag

SEQ ID NO: 2217753 - RNA, 19 nt, Artificial Sequence
  Description of Artificial Sequence: Synthetic oligonucleotide
  Antisense strand to SEQ ID NO: 2217752
cuuguaaucagcauuugcu

SEQ ID NO: 2217754 - RNA, 19 nt, Artificial Sequence
  Description of Artificial Sequence: Synthetic oligonucleotide
  Sense strand starting at position 2408 of SEQ ID NO: 1883807
agaggaucugucgagccua

SEQ ID NO: 2217755 - RNA, 19 nt, Artificial Sequence
  Description of Artificial Sequence: Synthetic oligonucleotide
  Antisense strand to SEQ ID NO: 2217754
uaggcucgacagauccucu

SEQ ID NO: 2217756 - RNA, 19 nt, Artificial Sequence
  Description of Artificial Sequence: Synthetic oligonucleotide
  Sense strand starting at position 376 of SEQ ID NO: 1883807
accugaaaguuucuaggua

SEQ ID NO: 2217757 - RNA, 19 nt, Artificial Sequence
  Description of Artificial Sequence: Synthetic oligonucleotide
  Antisense strand to SEQ ID NO: 2217756
uaccuagaaacuuucaggu

SEQ ID NO: 2217758 - RNA, 19 nt, Artificial Sequence
  Description of Artificial Sequence: Synthetic oligonucleotide
  Sense strand starting at position 909 of SEQ ID NO: 1883807
gcaaaugcugauuacaagu

SEQ ID NO: 2217759 - RNA, 19 nt, Artificial Sequence
  Description of Artificial Sequence: Synthetic oligonucleotide
  Antisense strand to SEQ ID NO: 2217758
acuuguaaucagcauuugc

SEQ ID NO: 2217760 - RNA, 19 nt, Artificial Sequence
  Description of Artificial Sequence: Synthetic oligonucleotide
  Sense strand starting at position 1546 of SEQ ID NO: 1883807
cuaaaucuguuggcaggaa

SEQ ID NO: 2217761 - RNA, 19 nt, Artificial Sequence
  Description of Artificial Sequence: Synthetic oligonucleotide
  Antisense strand to SEQ ID NO: 2217760
uuccugccaacagauuuag

SEQ ID NO: 2217762 - RNA, 19 nt, Artificial Sequence
  Description of Artificial Sequence: Synthetic oligonucleotide
  Sense strand starting at position 1090 of SEQ ID NO: 1883807
gaaguaaaguuguugacau

SEQ ID NO: 2217763 - RNA, 19 nt, Artificial Sequence
  Description of Artificial Sequence: Synthetic oligonucleotide
  Antisense strand to SEQ ID NO: 2217762
augucaacaacuuuacuuc

SEQ ID NO: 2217764 - RNA, 19 nt, Artificial Sequence
  Description of Artificial Sequence: Synthetic oligonucleotide
  Sense strand starting at position 1054 of SEQ ID NO: 1883807
agagcuuauguguaaacuu

SEQ ID NO: 2217765 - RNA, 19 nt, Artificial Sequence
  Description of Artificial Sequence: Synthetic oligonucleotide
  Antisense strand to SEQ ID NO: 2217764
aaguuuacacauaagcucu

SEQ ID NO: 2217766 - RNA, 19 nt, Artificial Sequence
  Description of Artificial Sequence: Synthetic oligonucleotide
  Sense strand starting at position 14 of SEQ ID NO: 1883807
cugccaaagcuaugaaaca

SEQ ID NO: 2217767 - RNA, 19 nt, Artificial Sequence
  Description of Artificial Sequence: Synthetic oligonucleotide
  Antisense strand to SEQ ID NO: 2217766
uguuucauagcuuuggcag

SEQ ID NO: 2217768 - RNA, 19 nt, Artificial Sequence
  Description of Artificial Sequence: Synthetic oligonucleotide
  Sense strand starting at position 716 of SEQ ID NO: 1883807
uagggaggguaugcuuauu

SEQ ID NO: 2217769 - RNA, 19 nt, Artificial Sequence
  Description of Artificial Sequence: Synthetic oligonucleotide
  Antisense strand to SEQ ID NO: 2217768
aauaagcauacccucccua

SEQ ID NO: 2217770 - RNA, 19 nt, Artificial Sequence
  Description of Artificial Sequence: Synthetic oligonucleotide
  Sense strand starting at position 3455 of SEQ ID NO: 1883807
uggaguuguaacuguagga

SEQ ID NO: 2217771 - RNA, 19 nt, Artificial Sequence
  Description of Artificial Sequence: Synthetic oligonucleotide
  Antisense strand to SEQ ID NO: 2217770
uccuacaguuacaacucca

SEQ ID NO: 2217772 - RNA, 19 nt, Artificial Sequence
  Description of Artificial Sequence: Synthetic oligonucleotide
  Sense strand starting at position 1208 of SEQ ID NO: 1883807
gguggacugcuugauguca

SEQ ID NO: 2217773 - RNA, 19 nt, Artificial Sequence
  Description of Artificial Sequence: Synthetic oligonucleotide
  Antisense strand to SEQ ID NO: 2217772
ugacaucaagcaguccacc

SEQ ID NO: 2217774 - RNA, 19 nt, Artificial Sequence
  Description of Artificial Sequence: Synthetic oligonucleotide
  Sense strand starting at position 3171 of SEQ ID NO: 1883807
acgagauuauuugagcaga

SEQ ID NO: 2217775 - RNA, 19 nt, Artificial Sequence
  Description of Artificial Sequence: Synthetic oligonucleotide
  Antisense strand to SEQ ID NO: 2217774
ucugcucaaauaaucucgu

SEQ ID NO: 2217776 - RNA, 19 nt, Artificial Sequence
  Description of Artificial Sequence: Synthetic oligonucleotide
  Sense strand starting at position 721 of SEQ ID NO: 1883807
aggguaugcuuauuaaucu

SEQ ID NO: 2217777 - RNA, 19 nt, Artificial Sequence
  Description of Artificial Sequence: Synthetic oligonucleotide
  Antisense strand to SEQ ID NO: 2217776
agauuaauaagcauacccu

SEQ ID NO: 2217778 - RNA, 19 nt, Artificial Sequence
  Description of Artificial Sequence: Synthetic oligonucleotide
  Sense strand starting at position 1103 of SEQ ID NO: 1883807
ugacauacuucucuuguuu

SEQ ID NO: 2217779 - RNA, 19 nt, Artificial Sequence
  Description of Artificial Sequence: Synthetic oligonucleotide
  Antisense strand to SEQ ID NO: 2217778
aaacaagagaaguauguca

SEQ ID NO: 2217780 - RNA, 19 nt, Artificial Sequence
  Description of Artificial Sequence: Synthetic oligonucleotide
  Sense strand starting at position 2326 of SEQ ID NO: 1883807
ggcguuaguccucagaaua

SEQ ID NO: 2217781 - RNA, 19 nt, Artificial Sequence
  Description of Artificial Sequence: Synthetic oligonucleotide
  Antisense strand to SEQ ID NO: 2217780
uauucugaggacuaacgcc

SEQ ID NO: 2217782 - RNA, 19 nt, Artificial Sequence
  Description of Artificial Sequence: Synthetic oligonucleotide
  Sense strand starting at position 1053 of SEQ ID NO: 1883807
cagagcuuauguguaaacu

SEQ ID NO: 2217783 - RNA, 19 nt, Artificial Sequence
  Description of Artificial Sequence: Synthetic oligonucleotide
  Antisense strand to SEQ ID NO: 2217782
aguuuacacauaagcucug

SEQ ID NO: 2217784 - RNA, 19 nt, Artificial Sequence
  Description of Artificial Sequence: Synthetic oligonucleotide
  Sense strand starting at position 114 of SEQ ID NO: 1883807
ggaguuaagccuggccaau

SEQ ID NO: 2217785 - RNA, 19 nt, Artificial Sequence
  Description of Artificial Sequence: Synthetic oligonucleotide
  Antisense strand to SEQ ID NO: 2217784
auuggccaggcuuaacucc

SEQ ID NO: 2217786 - RNA, 19 nt, Artificial Sequence
  Description of Artificial Sequence: Synthetic oligonucleotide
  Sense strand starting at position 783 of SEQ ID NO: 1883807
auucauaccgguuguggau

SEQ ID NO: 2217787 - RNA, 19 nt, Artificial Sequence
  Description of Artificial Sequence: Synthetic oligonucleotide
  Antisense strand to SEQ ID NO: 2217786
auccacaaccgguaugaau

SEQ ID NO: 2217788 - RNA, 19 nt, Artificial Sequence
  Description of Artificial Sequence: Synthetic oligonucleotide
  Sense strand starting at position 116 of SEQ ID NO: 1883807
aguuaagccuggccaauau

SEQ ID NO: 2217789 - RNA, 19 nt, Artificial Sequence
  Description of Artificial Sequence: Synthetic oligonucleotide
  Antisense strand to SEQ ID NO: 2217788
auauuggccaggcuuaacu

SEQ ID NO: 2217790 - RNA, 19 nt, Artificial Sequence
  Description of Artificial Sequence: Synthetic oligonucleotide
  Sense strand starting at position 1122 of SEQ ID NO: 1883807
cuccgaguaucuguuaaca

SEQ ID NO: 2217791 - RNA, 19 nt, Artificial Sequence
  Description of Artificial Sequence: Synthetic oligonucleotide
  Antisense strand to SEQ ID NO: 2217790
uguuaacagauacucggag

SEQ ID NO: 2217792 - RNA, 19 nt, Artificial Sequence
  Description of Artificial Sequence: Synthetic oligonucleotide
  Sense strand starting at position 1469 of SEQ ID NO: 1883807
ucgauaaugucccuucgac

SEQ ID NO: 2217793 - RNA, 19 nt, Artificial Sequence
  Description of Artificial Sequence: Synthetic oligonucleotide
  Antisense strand to SEQ ID NO: 2217792
gucgaagggacauuaucga

SEQ ID NO: 2217794 - RNA, 19 nt, Artificial Sequence
  Description of Artificial Sequence: Synthetic oligonucleotide
  Sense strand starting at position 1117 of SEQ ID NO: 1883807
uguuucuccgaguaucugu

SEQ ID NO: 2217795 - RNA, 19 nt, Artificial Sequence
  Description of Artificial Sequence: Synthetic oligonucleotide
  Antisense strand to SEQ ID NO: 2217794
acagauacucggagaaaca

SEQ ID NO: 2217796 - RNA, 19 nt, Artificial Sequence
  Description of Artificial Sequence: Synthetic oligonucleotide
  Sense strand starting at position 943 of SEQ ID NO: 1883807
gugagcucccuguagucuu

SEQ ID NO: 2217797 - RNA, 19 nt, Artificial Sequence
  Description of Artificial Sequence: Synthetic oligonucleotide
  Antisense strand to SEQ ID NO: 2217796
aagacuacagggagcucac

SEQ ID NO: 2217798 - RNA, 19 nt, Artificial Sequence
  Description of Artificial Sequence: Synthetic oligonucleotide
  Sense strand starting at position 1112 of SEQ ID NO: 1883807
ucucuuguuucuccgagua

SEQ ID NO: 2217799 - RNA, 19 nt, Artificial Sequence
  Description of Artificial Sequence: Synthetic oligonucleotide
  Antisense strand to SEQ ID NO: 2217798
uacucggagaaacaagaga

SEQ ID NO: 2217800 - RNA, 19 nt, Artificial Sequence
  Description of Artificial Sequence: Synthetic oligonucleotide
  Sense strand starting at position 941 of SEQ ID NO: 1883807
gggugagcucccuguaguc

SEQ ID NO: 2217801 - RNA, 19 nt, Artificial Sequence
  Description of Artificial Sequence: Synthetic oligonucleotide
  Antisense strand to SEQ ID NO: 2217800
gacuacagggagcucaccc

SEQ ID NO: 2217802 - RNA, 19 nt, Artificial Sequence
  Description of Artificial Sequence: Synthetic oligonucleotide
  Sense strand starting at position 3097 of SEQ ID NO: 1883807
cugagucccaguuguguuu

SEQ ID NO: 2217803 - RNA, 19 nt, Artificial Sequence
  Description of Artificial Sequence: Synthetic oligonucleotide
  Antisense strand to SEQ ID NO: 2217802
aaacacaacugggacucag

SEQ ID NO: 2217804 - RNA, 19 nt, Artificial Sequence
  Description of Artificial Sequence: Synthetic oligonucleotide
  Sense strand starting at position 2325 of SEQ ID NO: 1883807
cggcguuaguccucagaau

SEQ ID NO: 2217805 - RNA, 19 nt, Artificial Sequence
  Description of Artificial Sequence: Synthetic oligonucleotide
  Antisense strand to SEQ ID NO: 2217804
auucugaggacuaacgccg

SEQ ID NO: 2217806 - RNA, 19 nt, Artificial Sequence
  Description of Artificial Sequence: Synthetic oligonucleotide
  Sense strand starting at position 1547 of SEQ ID NO: 1883807
uaaaucuguuggcaggaaa

SEQ ID NO: 2217807 - RNA, 19 nt, Artificial Sequence
  Description of Artificial Sequence: Synthetic oligonucleotide
  Antisense strand to SEQ ID NO: 2217806
uuuccugccaacagauuua

SEQ ID NO: 2217808 - RNA, 19 nt, Artificial Sequence
  Description of Artificial Sequence: Synthetic oligonucleotide
  Sense strand starting at position 3468 of SEQ ID NO: 1883807
guaggaagcucucagagac

SEQ ID NO: 2217809 - RNA, 19 nt, Artificial Sequence
  Description of Artificial Sequence: Synthetic oligonucleotide
  Antisense strand to SEQ ID NO: 2217808
gucucugagagcuuccuac

SEQ ID NO: 2217810 - RNA, 19 nt, Artificial Sequence
  Description of Artificial Sequence: Synthetic oligonucleotide
  Sense strand starting at position 3721 of SEQ ID NO: 1883808
uuaugaaacuguuuagaac

SEQ ID NO: 2217811 - RNA, 19 nt, Artificial Sequence
  Description of Artificial Sequence: Synthetic oligonucleotide
  Antisense strand to SEQ ID NO: 2217810
guucuaaacaguuucauaa

SEQ ID NO: 2217812 - RNA, 19 nt, Artificial Sequence
  Description of Artificial Sequence: Synthetic oligonucleotide
  Sense strand starting at position 1163 of SEQ ID NO: 1883808
uggugugacagggauaagu

SEQ ID NO: 2217813 - RNA, 19 nt, Artificial Sequence
  Description of Artificial Sequence: Synthetic oligonucleotide
  Antisense strand to SEQ ID NO: 2217812
acuuaucccugucacacca

SEQ ID NO: 2217814 - RNA, 19 nt, Artificial Sequence
  Description of Artificial Sequence: Synthetic oligonucleotide
  Sense strand starting at position 901 of SEQ ID NO: 1883808
uucuaugugguuuagaaga

SEQ ID NO: 2217815 - RNA, 19 nt, Artificial Sequence
  Description of Artificial Sequence: Synthetic oligonucleotide
  Antisense strand to SEQ ID NO: 2217814
ucuucuaaaccacauagaa

SEQ ID NO: 2217816 - RNA, 19 nt, Artificial Sequence
  Description of Artificial Sequence: Synthetic oligonucleotide
  Sense strand starting at position 224 of SEQ ID NO: 1883808
ugcucuuccgagucuguuu

SEQ ID NO: 2217817 - RNA, 19 nt, Artificial Sequence
  Description of Artificial Sequence: Synthetic oligonucleotide
  Antisense strand to SEQ ID NO: 2217816
aaacagacucggaagagca

SEQ ID NO: 2217818 - RNA, 19 nt, Artificial Sequence
  Description of Artificial Sequence: Synthetic oligonucleotide
  Sense strand starting at position 1044 of SEQ ID NO: 1883808
guuguuagcacugagagaa

SEQ ID NO: 2217819 - RNA, 19 nt, Artificial Sequence
  Description of Artificial Sequence: Synthetic oligonucleotide
  Antisense strand to SEQ ID NO: 2217818
uucucucagugcuaacaac

SEQ ID NO: 2217820 - RNA, 19 nt, Artificial Sequence
  Description of Artificial Sequence: Synthetic oligonucleotide
  Sense strand starting at position 1258 of SEQ ID NO: 1883808
ggcagaggacugugaacau

SEQ ID NO: 2217821 - RNA, 19 nt, Artificial Sequence
  Description of Artificial Sequence: Synthetic oligonucleotide
  Antisense strand to SEQ ID NO: 2217820
auguucacaguccucugcc

SEQ ID NO: 2217822 - RNA, 19 nt, Artificial Sequence
  Description of Artificial Sequence: Synthetic oligonucleotide
  Sense strand starting at position 1161 of SEQ ID NO: 1883808
uuuggugugacagggauaa

SEQ ID NO: 2217823 - RNA, 19 nt, Artificial Sequence
  Description of Artificial Sequence: Synthetic oligonucleotide
  Antisense strand to SEQ ID NO: 2217822
uuaucccugucacaccaaa

SEQ ID NO: 2217824 - RNA, 19 nt, Artificial Sequence
  Description of Artificial Sequence: Synthetic oligonucleotide
  Sense strand starting at position 3964 of SEQ ID NO: 1883808
ugcaguccuacuuagggau

SEQ ID NO: 2217825 - RNA, 19 nt, Artificial Sequence
  Description of Artificial Sequence: Synthetic oligonucleotide
  Antisense strand to SEQ ID NO: 2217824
aucccuaaguaggacugca

SEQ ID NO: 2217826 - RNA, 19 nt, Artificial Sequence
  Description of Artificial Sequence: Synthetic oligonucleotide
  Sense strand starting at position 1926 of SEQ ID NO: 1883808
ucgggaaccuucucaccaa

SEQ ID NO: 2217827 - RNA, 19 nt, Artificial Sequence
  Description of Artificial Sequence: Synthetic oligonucleotide
  Antisense strand to SEQ ID NO: 2217826
uuggugagaagguucccga

SEQ ID NO: 2217828 - RNA, 19 nt, Artificial Sequence
  Description of Artificial Sequence: Synthetic oligonucleotide
  Sense strand starting at position 3730 of SEQ ID NO: 1883808
uguuuagaacagggaguuu

SEQ ID NO: 2217829 - RNA, 19 nt, Artificial Sequence
  Description of Artificial Sequence: Synthetic oligonucleotide
  Antisense strand to SEQ ID NO: 2217828
aaacucccuguucuaaaca

SEQ ID NO: 2217830 - RNA, 19 nt, Artificial Sequence
  Description of Artificial Sequence: Synthetic oligonucleotide
  Sense strand starting at position 890 of SEQ ID NO: 1883808
ggaugaccaucuucuaugu

SEQ ID NO: 2217831 - RNA, 19 nt, Artificial Sequence
  Description of Artificial Sequence: Synthetic oligonucleotide
  Antisense strand to SEQ ID NO: 2217830
acauagaagauggucaucc

SEQ ID NO: 2217832 - RNA, 19 nt, Artificial Sequence
  Description of Artificial Sequence: Synthetic oligonucleotide
  Sense strand starting at position 1172 of SEQ ID NO: 1883808
agggauaaguccuucccuu

SEQ ID NO: 2217833 - RNA, 19 nt, Artificial Sequence
  Description of Artificial Sequence: Synthetic oligonucleotide
  Antisense strand to SEQ ID NO: 2217832
aagggaaggacuuaucccu

SEQ ID NO: 2217834 - RNA, 19 nt, Artificial Sequence
  Description of Artificial Sequence: Synthetic oligonucleotide
  Sense strand starting at position 3857 of SEQ ID NO: 1883808
uaaggugguaguuagugau

SEQ ID NO: 2217835 - RNA, 19 nt, Artificial Sequence
  Description of Artificial Sequence: Synthetic oligonucleotide
  Antisense strand to SEQ ID NO: 2217834
aucacuaacuaccaccuua

SEQ ID NO: 2217836 - RNA, 19 nt, Artificial Sequence
  Description of Artificial Sequence: Synthetic oligonucleotide
  Sense strand starting at position 824 of SEQ ID NO: 1883808
gcuggcuuacuggacuuaa

SEQ ID NO: 2217837 - RNA, 19 nt, Artificial Sequence
  Description of Artificial Sequence: Synthetic oligonucleotide
  Antisense strand to SEQ ID NO: 2217836
uuaaguccaguaagccagc

SEQ ID NO: 2217838 - RNA, 19 nt, Artificial Sequence
  Description of Artificial Sequence: Synthetic oligonucleotide
  Sense strand starting at position 1559 of SEQ ID NO: 1883808
cuugaugauccuggugauc

SEQ ID NO: 2217839 - RNA, 19 nt, Artificial Sequence
  Description of Artificial Sequence: Synthetic oligonucleotide
  Antisense strand to SEQ ID NO: 2217838
gaucaccaggaucaucaag

SEQ ID NO: 2217840 - RNA, 19 nt, Artificial Sequence
  Description of Artificial Sequence: Synthetic oligonucleotide
  Sense strand starting at position 3480 of SEQ ID NO: 1883808
ggaacuccgcuuggauaga

SEQ ID NO: 2217841 - RNA, 19 nt, Artificial Sequence
  Description of Artificial Sequence: Synthetic oligonucleotide
  Antisense strand to SEQ ID NO: 2217840
ucuauccaagcggaguucc

SEQ ID NO: 2217842 - RNA, 19 nt, Artificial Sequence
  Description of Artificial Sequence: Synthetic oligonucleotide
  Sense strand starting at position 3697 of SEQ ID NO: 1883808
cugauaguuuaucuuugau

SEQ ID NO: 2217843 - RNA, 19 nt, Artificial Sequence
  Description of Artificial Sequence: Synthetic oligonucleotide
  Antisense strand to SEQ ID NO: 2217842
aucaaagauaaacuaucag

SEQ ID NO: 2217844 - RNA, 19 nt, Artificial Sequence
  Description of Artificial Sequence: Synthetic oligonucleotide
  Sense strand starting at position 3294 of SEQ ID NO: 1883808
ccagccucccacugagaau

SEQ ID NO: 2217845 - RNA, 19 nt, Artificial Sequence
  Description of Artificial Sequence: Synthetic oligonucleotide
  Antisense strand to SEQ ID NO: 2217844
auucucagugggaggcugg

SEQ ID NO: 2217846 - RNA, 19 nt, Artificial Sequence
  Description of Artificial Sequence: Synthetic oligonucleotide
  Sense strand starting at position 2499 of SEQ ID NO: 1883808
ugaagaaugcaacgucaca

SEQ ID NO: 2217847 - RNA, 19 nt, Artificial Sequence
  Description of Artificial Sequence: Synthetic oligonucleotide
  Antisense strand to SEQ ID NO: 2217846
ugugacguugcauucuuca

SEQ ID NO: 2217848 - RNA, 19 nt, Artificial Sequence
  Description of Artificial Sequence: Synthetic oligonucleotide
  Sense strand starting at position 3375 of SEQ ID NO: 1883808
ucgauagaagccugauuau

SEQ ID NO: 2217849 - RNA, 19 nt, Artificial Sequence
  Description of Artificial Sequence: Synthetic oligonucleotide
  Antisense strand to SEQ ID NO: 2217848
auaaucaggcuucuaucga

SEQ ID NO: 2217850 - RNA, 19 nt, Artificial Sequence
  Description of Artificial Sequence: Synthetic oligonucleotide
  Sense strand starting at position 3554 of SEQ ID NO: 1883808
uggaauugggcucaguguu

SEQ ID NO: 2217851 - RNA, 19 nt, Artificial Sequence
  Description of Artificial Sequence: Synthetic oligonucleotide
  Antisense strand to SEQ ID NO: 2217850
aacacugagcccaauucca

SEQ ID NO: 2217852 - RNA, 19 nt, Artificial Sequence
  Description of Artificial Sequence: Synthetic oligonucleotide
  Sense strand starting at position 3739 of SEQ ID NO: 1883808
cagggaguuuguuuauuac

SEQ ID NO: 2217853 - RNA, 19 nt, Artificial Sequence
  Description of Artificial Sequence: Synthetic oligonucleotide
  Antisense strand to SEQ ID NO: 2217852
guaauaaacaaacucccug

SEQ ID NO: 2217854 - RNA, 19 nt, Artificial Sequence
  Description of Artificial Sequence: Synthetic oligonucleotide
  Sense strand starting at position 300 of SEQ ID NO: 1883808
gccuauaugcuguaaggac

SEQ ID NO: 2217855 - RNA, 19 nt, Artificial Sequence
  Description of Artificial Sequence: Synthetic oligonucleotide
  Antisense strand to SEQ ID NO: 2217854
guccuuacagcauauaggc

SEQ ID NO: 2217856 - RNA, 19 nt, Artificial Sequence
  Description of Artificial Sequence: Synthetic oligonucleotide
  Sense strand starting at position 1043 of SEQ ID NO: 1883808
aguuguuagcacugagaga

SEQ ID NO: 2217857 - RNA, 19 nt, Artificial Sequence
  Description of Artificial Sequence: Synthetic oligonucleotide
  Antisense strand to SEQ ID NO: 2217856
ucucucagugcuaacaacu

SEQ ID NO: 2217858 - RNA, 19 nt, Artificial Sequence
  Description of Artificial Sequence: Synthetic oligonucleotide
  Sense strand starting at position 899 of SEQ ID NO: 1883808
ucuucuaugugguuuagaa

SEQ ID NO: 2217859 - RNA, 19 nt, Artificial Sequence
  Description of Artificial Sequence: Synthetic oligonucleotide
  Antisense strand to SEQ ID NO: 2217858
uucuaaaccacauagaaga

SEQ ID NO: 2217860 - RNA, 19 nt, Artificial Sequence
  Description of Artificial Sequence: Synthetic oligonucleotide
  Sense strand starting at position 3696 of SEQ ID NO: 1883808
gcugauaguuuaucuuuga

SEQ ID NO: 2217861 - RNA, 19 nt, Artificial Sequence
  Description of Artificial Sequence: Synthetic oligonucleotide
  Antisense strand to SEQ ID NO: 2217860
ucaaagauaaacuaucagc

SEQ ID NO: 2217862 - RNA, 19 nt, Artificial Sequence
  Description of Artificial Sequence: Synthetic oligonucleotide
  Sense strand starting at position 894 of SEQ ID NO: 1883808
gaccaucuucuaugugguu

SEQ ID NO: 2217863 - RNA, 19 nt, Artificial Sequence
  Description of Artificial Sequence: Synthetic oligonucleotide
  Antisense strand to SEQ ID NO: 2217862
aaccacauagaagaugguc

SEQ ID NO: 2217864 - RNA, 19 nt, Artificial Sequence
  Description of Artificial Sequence: Synthetic oligonucleotide
  Sense strand starting at position 40 of SEQ ID NO: 1883808
agacuacucugcccagcau

SEQ ID NO: 2217865 - RNA, 19 nt, Artificial Sequence
  Description of Artificial Sequence: Synthetic oligonucleotide
  Antisense strand to SEQ ID NO: 2217864
augcugggcagaguagucu

SEQ ID NO: 2217866 - RNA, 19 nt, Artificial Sequence
  Description of Artificial Sequence: Synthetic oligonucleotide
  Sense strand starting at position 3671 of SEQ ID NO: 1883808
aguaauaggccaggugcaa

SEQ ID NO: 2217867 - RNA, 19 nt, Artificial Sequence
  Description of Artificial Sequence: Synthetic oligonucleotide
  Antisense strand to SEQ ID NO: 2217866
uugcaccuggccuauuacu

SEQ ID NO: 2217868 - RNA, 19 nt, Artificial Sequence
  Description of Artificial Sequence: Synthetic oligonucleotide
  Sense strand starting at position 919 of SEQ ID NO: 1883808
acaagaggcucguuaccuu

SEQ ID NO: 2217869 - RNA, 19 nt, Artificial Sequence
  Description of Artificial Sequence: Synthetic oligonucleotide
  Antisense strand to SEQ ID NO: 2217868
aagguaacgagccucuugu

SEQ ID NO: 2217870 - RNA, 19 nt, Artificial Sequence
  Description of Artificial Sequence: Synthetic oligonucleotide
  Sense strand starting at position 3742 of SEQ ID NO: 1883808
ggaguuuguuuauuacugu

SEQ ID NO: 2217871 - RNA, 19 nt, Artificial Sequence
  Description of Artificial Sequence: Synthetic oligonucleotide
  Antisense strand to SEQ ID NO: 2217870
acaguaauaaacaaacucc

SEQ ID NO: 2217872 - RNA, 19 nt, Artificial Sequence
  Description of Artificial Sequence: Synthetic oligonucleotide
  Sense strand starting at position 3683 of SEQ ID NO: 1883808
ggugcaaucccaggcugau

SEQ ID NO: 2217873 - RNA, 19 nt, Artificial Sequence
  Description of Artificial Sequence: Synthetic oligonucleotide
  Antisense strand to SEQ ID NO: 2217872
aucagccugggauugcacc

SEQ ID NO: 2217874 - RNA, 19 nt, Artificial Sequence
  Description of Artificial Sequence: Synthetic oligonucleotide
  Sense strand starting at position 3381 of SEQ ID NO: 1883808
gaagccugauuauagagaa

SEQ ID NO: 2217875 - RNA, 19 nt, Artificial Sequence
  Description of Artificial Sequence: Synthetic oligonucleotide
  Antisense strand to SEQ ID NO: 2217874
uucucuauaaucaggcuuc

SEQ ID NO: 2217876 - RNA, 19 nt, Artificial Sequence
  Description of Artificial Sequence: Synthetic oligonucleotide
  Sense strand starting at position 3864 of SEQ ID NO: 1883808
guaguuagugauugccuaa

SEQ ID NO: 2217877 - RNA, 19 nt, Artificial Sequence
  Description of Artificial Sequence: Synthetic oligonucleotide
  Antisense strand to SEQ ID NO: 2217876
uuaggcaaucacuaacuac

SEQ ID NO: 2217878 - RNA, 19 nt, Artificial Sequence
  Description of Artificial Sequence: Synthetic oligonucleotide
  Sense strand starting at position 3863 of SEQ ID NO: 1883808
gguaguuagugauugccua

SEQ ID NO: 2217879 - RNA, 19 nt, Artificial Sequence
  Description of Artificial Sequence: Synthetic oligonucleotide
  Antisense strand to SEQ ID NO: 2217878
uaggcaaucacuaacuacc

SEQ ID NO: 2217880 - RNA, 19 nt, Artificial Sequence
  Description of Artificial Sequence: Synthetic oligonucleotide
  Sense strand starting at position 3562 of SEQ ID NO: 1883808
ggcucaguguugucaagua

SEQ ID NO: 2217881 - RNA, 19 nt, Artificial Sequence
  Description of Artificial Sequence: Synthetic oligonucleotide
  Antisense strand to SEQ ID NO: 2217880
uacuugacaacacugagcc

SEQ ID NO: 2217882 - RNA, 19 nt, Artificial Sequence
  Description of Artificial Sequence: Synthetic oligonucleotide
  Sense strand starting at position 3417 of SEQ ID NO: 1883808
agcaaaugcuaugauaaau

SEQ ID NO: 2217883 - RNA, 19 nt, Artificial Sequence
  Description of Artificial Sequence: Synthetic oligonucleotide
  Antisense strand to SEQ ID NO: 2217882
auuuaucauagcauuugcu

SEQ ID NO: 2217884 - RNA, 19 nt, Artificial Sequence
  Description of Artificial Sequence: Synthetic oligonucleotide
  Sense strand starting at position 903 of SEQ ID NO: 1883808
cuaugugguuuagaagaca

SEQ ID NO: 2217885 - RNA, 19 nt, Artificial Sequence
  Description of Artificial Sequence: Synthetic oligonucleotide
  Antisense strand to SEQ ID NO: 2217884
ugucuucuaaaccacauag

SEQ ID NO: 2217886 - RNA, 19 nt, Artificial Sequence
  Description of Artificial Sequence: Synthetic oligonucleotide
  Sense strand starting at position 3297 of SEQ ID NO: 1883808
gccucccacugagaauuaa

SEQ ID NO: 2217887 - RNA, 19 nt, Artificial Sequence
  Description of Artificial Sequence: Synthetic oligonucleotide
  Antisense strand to SEQ ID NO: 2217886
uuaauucucagugggaggc

SEQ ID NO: 2217888 - RNA, 19 nt, Artificial Sequence
  Description of Artificial Sequence: Synthetic oligonucleotide
  Sense strand starting at position 3481 of SEQ ID NO: 1883808
gaacuccgcuuggauagaa

SEQ ID NO: 2217889 - RNA, 19 nt, Artificial Sequence
  Description of Artificial Sequence: Synthetic oligonucleotide
  Antisense strand to SEQ ID NO: 2217888
uucuauccaagcggaguuc

SEQ ID NO: 2217890 - RNA, 19 nt, Artificial Sequence
  Description of Artificial Sequence: Synthetic oligonucleotide
  Sense strand starting at position 3336 of SEQ ID NO: 1883809
ggacaucaugaguagguuu

SEQ ID NO: 2217891 - RNA, 19 nt, Artificial Sequence
  Description of Artificial Sequence: Synthetic oligonucleotide
  Antisense strand to SEQ ID NO: 2217890
aaaccuacucaugaugucc

SEQ ID NO: 2217892 - RNA, 19 nt, Artificial Sequence
  Description of Artificial Sequence: Synthetic oligonucleotide
  Sense strand starting at position 3698 of SEQ ID NO: 1883809
cacugaacaugguugagau

SEQ ID NO: 2217893 - RNA, 19 nt, Artificial Sequence
  Description of Artificial Sequence: Synthetic oligonucleotide
  Antisense strand to SEQ ID NO: 2217892
aucucaaccauguucagug

SEQ ID NO: 2217894 - RNA, 19 nt, Artificial Sequence
  Description of Artificial Sequence: Synthetic oligonucleotide
  Sense strand starting at position 1892 of SEQ ID NO: 1883809
gaacuacaucuaggguuua

SEQ ID NO: 2217895 - RNA, 19 nt, Artificial Sequence
  Description of Artificial Sequence: Synthetic oligonucleotide
  Antisense strand to SEQ ID NO: 2217894
uaaacccuagauguaguuc

SEQ ID NO: 2217896 - RNA, 19 nt, Artificial Sequence
  Description of Artificial Sequence: Synthetic oligonucleotide
  Sense strand starting at position 3094 of SEQ ID NO: 1883809
ggucuacaaacguagauau

SEQ ID NO: 2217897 - RNA, 19 nt, Artificial Sequence
  Description of Artificial Sequence: Synthetic oligonucleotide
  Antisense strand to SEQ ID NO: 2217896
auaucuacguuuguagacc

SEQ ID NO: 2217898 - RNA, 19 nt, Artificial Sequence
  Description of Artificial Sequence: Synthetic oligonucleotide
  Sense strand starting at position 3335 of SEQ ID NO: 1883809
aggacaucaugaguagguu

SEQ ID NO: 2217899 - RNA, 19 nt, Artificial Sequence
  Description of Artificial Sequence: Synthetic oligonucleotide
  Antisense strand to SEQ ID NO: 2217898
aaccuacucaugauguccu

SEQ ID NO: 2217900 - RNA, 19 nt, Artificial Sequence
  Description of Artificial Sequence: Synthetic oligonucleotide
  Sense strand starting at position 336 of SEQ ID NO: 1883809
gauugagacuccucaguca

SEQ ID NO: 2217901 - RNA, 19 nt, Artificial Sequence
  Description of Artificial Sequence: Synthetic oligonucleotide
  Antisense strand to SEQ ID NO: 2217900
ugacugaggagucucaauc

SEQ ID NO: 2217902 - RNA, 19 nt, Artificial Sequence
  Description of Artificial Sequence: Synthetic oligonucleotide
  Sense strand starting at position 1579 of SEQ ID NO: 1883809
auaaucacagccugggauu

SEQ ID NO: 2217903 - RNA, 19 nt, Artificial Sequence
  Description of Artificial Sequence: Synthetic oligonucleotide
  Antisense strand to SEQ ID NO: 2217902
aaucccaggcugugauuau

SEQ ID NO: 2217904 - RNA, 19 nt, Artificial Sequence
  Description of Artificial Sequence: Synthetic oligonucleotide
  Sense strand starting at position 576 of SEQ ID NO: 1883809
gggacugugcaauaccuuu

SEQ ID NO: 2217905 - RNA, 19 nt, Artificial Sequence
  Description of Artificial Sequence: Synthetic oligonucleotide
  Antisense strand to SEQ ID NO: 2217904
aaagguauugcacaguccc

SEQ ID NO: 2217906 - RNA, 19 nt, Artificial Sequence
  Description of Artificial Sequence: Synthetic oligonucleotide
  Sense strand starting at position 2475 of SEQ ID NO: 1883809
uggccaucucugcaaggga

SEQ ID NO: 2217907 - RNA, 19 nt, Artificial Sequence
  Description of Artificial Sequence: Synthetic oligonucleotide
  Antisense strand to SEQ ID NO: 2217906
ucccuugcagagauggcca

SEQ ID NO: 2217908 - RNA, 19 nt, Artificial Sequence
  Description of Artificial Sequence: Synthetic oligonucleotide
  Sense strand starting at position 3104 of SEQ ID NO: 1883809
cguagauauaaauauacgu

SEQ ID NO: 2217909 - RNA, 19 nt, Artificial Sequence
  Description of Artificial Sequence: Synthetic oligonucleotide
  Antisense strand to SEQ ID NO: 2217908
acguauauuuauaucuacg

SEQ ID NO: 2217910 - RNA, 19 nt, Artificial Sequence
  Description of Artificial Sequence: Synthetic oligonucleotide
  Sense strand starting at position 3547 of SEQ ID NO: 1883809
cagaaaccuccucgugaga

SEQ ID NO: 2217911 - RNA, 19 nt, Artificial Sequence
  Description of Artificial Sequence: Synthetic oligonucleotide
  Antisense strand to SEQ ID NO: 2217910
ucucacgaggagguuucug

SEQ ID NO: 2217912 - RNA, 19 nt, Artificial Sequence
  Description of Artificial Sequence: Synthetic oligonucleotide
  Sense strand starting at position 3983 of SEQ ID NO: 1883809
gguuuagagguguaaaugu

SEQ ID NO: 2217913 - RNA, 19 nt, Artificial Sequence
  Description of Artificial Sequence: Synthetic oligonucleotide
  Antisense strand to SEQ ID NO: 2217912
acauuuacaccucuaaacc

SEQ ID NO: 2217914 - RNA, 19 nt, Artificial Sequence
  Description of Artificial Sequence: Synthetic oligonucleotide
  Sense strand starting at position 1668 of SEQ ID NO: 1883809
ugugaaacuuacucccgaa

SEQ ID NO: 2217915 - RNA, 19 nt, Artificial Sequence
  Description of Artificial Sequence: Synthetic oligonucleotide
  Antisense strand to SEQ ID NO: 2217914
uucgggaguaaguuucaca

SEQ ID NO: 2217916 - RNA, 19 nt, Artificial Sequence
  Description of Artificial Sequence: Synthetic oligonucleotide
  Sense strand starting at position 2127 of SEQ ID NO: 1883809
uuggaaugggagugcuuua

SEQ ID NO: 2217917 - RNA, 19 nt, Artificial Sequence
  Description of Artificial Sequence: Synthetic oligonucleotide
  Antisense strand to SEQ ID NO: 2217916
uaaagcacucccauuccaa

SEQ ID NO: 2217918 - RNA, 19 nt, Artificial Sequence
  Description of Artificial Sequence: Synthetic oligonucleotide
  Sense strand starting at position 1692 of SEQ ID NO: 1883809
ucaccugaugccgagcaaa

SEQ ID NO: 2217919 - RNA, 19 nt, Artificial Sequence
  Description of Artificial Sequence: Synthetic oligonucleotide
  Antisense strand to SEQ ID NO: 2217918
uuugcucggcaucagguga

SEQ ID NO: 2217920 - RNA, 19 nt, Artificial Sequence
  Description of Artificial Sequence: Synthetic oligonucleotide
  Sense strand starting at position 713 of SEQ ID NO: 1883809
ugcucuugauccuuuagaa

SEQ ID NO: 2217921 - RNA, 19 nt, Artificial Sequence
  Description of Artificial Sequence: Synthetic oligonucleotide
  Antisense strand to SEQ ID NO: 2217920
uucuaaaggaucaagagca

SEQ ID NO: 2217922 - RNA, 19 nt, Artificial Sequence
  Description of Artificial Sequence: Synthetic oligonucleotide
  Sense strand starting at position 3653 of SEQ ID NO: 1883809
gucuuaucagcuuaucauu

SEQ ID NO: 2217923 - RNA, 19 nt, Artificial Sequence
  Description of Artificial Sequence: Synthetic oligonucleotide
  Antisense strand to SEQ ID NO: 2217922
aaugauaagcugauaagac

SEQ ID NO: 2217924 - RNA, 19 nt, Artificial Sequence
  Description of Artificial Sequence: Synthetic oligonucleotide
  Sense strand starting at position 1509 of SEQ ID NO: 1883809
uggcuuugucaccaagggu

SEQ ID NO: 2217925 - RNA, 19 nt, Artificial Sequence
  Description of Artificial Sequence: Synthetic oligonucleotide
  Antisense strand to SEQ ID NO: 2217924
acccuuggugacaaagcca

SEQ ID NO: 2217926 - RNA, 19 nt, Artificial Sequence
  Description of Artificial Sequence: Synthetic oligonucleotide
  Sense strand starting at position 537 of SEQ ID NO: 1883809
guucucagauggcucugaa

SEQ ID NO: 2217927 - RNA, 19 nt, Artificial Sequence
  Description of Artificial Sequence: Synthetic oligonucleotide
  Antisense strand to SEQ ID NO: 2217926
uucagagccaucugagaac

SEQ ID NO: 2217928 - RNA, 19 nt, Artificial Sequence
  Description of Artificial Sequence: Synthetic oligonucleotide
  Sense strand starting at position 3378 of SEQ ID NO: 1883809
uguaaugccuuuccaagac

SEQ ID NO: 2217929 - RNA, 19 nt, Artificial Sequence
  Description of Artificial Sequence: Synthetic oligonucleotide
  Antisense strand to SEQ ID NO: 2217928
gucuuggaaaggcauuaca

SEQ ID NO: 2217930 - RNA, 19 nt, Artificial Sequence
  Description of Artificial Sequence: Synthetic oligonucleotide
  Sense strand starting at position 3783 of SEQ ID NO: 1883809
cuagcagaguuucugaagu

SEQ ID NO: 2217931 - RNA, 19 nt, Artificial Sequence
  Description of Artificial Sequence: Synthetic oligonucleotide
  Antisense strand to SEQ ID NO: 2217930
acuucagaaacucugcuag

SEQ ID NO: 2217932 - RNA, 19 nt, Artificial Sequence
  Description of Artificial Sequence: Synthetic oligonucleotide
  Sense strand starting at position 3546 of SEQ ID NO: 1883809
gcagaaaccuccucgugag

SEQ ID NO: 2217933 - RNA, 19 nt, Artificial Sequence
  Description of Artificial Sequence: Synthetic oligonucleotide
  Antisense strand to SEQ ID NO: 2217932
cucacgaggagguuucugc

SEQ ID NO: 2217934 - RNA, 19 nt, Artificial Sequence
  Description of Artificial Sequence: Synthetic oligonucleotide
  Sense strand starting at position 1468 of SEQ ID NO: 1883809
gauugugucagauguccug

SEQ ID NO: 2217935 - RNA, 19 nt, Artificial Sequence
  Description of Artificial Sequence: Synthetic oligonucleotide
  Antisense strand to SEQ ID NO: 2217934
caggacaucugacacaauc

SEQ ID NO: 2217936 - RNA, 19 nt, Artificial Sequence
  Description of Artificial Sequence: Synthetic oligonucleotide
  Sense strand starting at position 2657 of SEQ ID NO: 1883809
gugucaugauccgucaaag

SEQ ID NO: 2217937 - RNA, 19 nt, Artificial Sequence
  Description of Artificial Sequence: Synthetic oligonucleotide
  Antisense strand to SEQ ID NO: 2217936
cuuugacggaucaugacac

SEQ ID NO: 2217938 - RNA, 19 nt, Artificial Sequence
  Description of Artificial Sequence: Synthetic oligonucleotide
  Sense strand starting at position 3702 of SEQ ID NO: 1883809
gaacaugguugagauaaca

SEQ ID NO: 2217939 - RNA, 19 nt, Artificial Sequence
  Description of Artificial Sequence: Synthetic oligonucleotide
  Antisense strand to SEQ ID NO: 2217938
uguuaucucaaccauguuc

SEQ ID NO: 2217940 - RNA, 19 nt, Artificial Sequence
  Description of Artificial Sequence: Synthetic oligonucleotide
  Sense strand starting at position 3641 of SEQ ID NO: 1883809
uuguauagcuaagucuuau

SEQ ID NO: 2217941 - RNA, 19 nt, Artificial Sequence
  Description of Artificial Sequence: Synthetic oligonucleotide
  Antisense strand to SEQ ID NO: 2217940
auaagacuuagcuauacaa

SEQ ID NO: 2217942 - RNA, 19 nt, Artificial Sequence
  Description of Artificial Sequence: Synthetic oligonucleotide
  Sense strand starting at position 2656 of SEQ ID NO: 1883809
ggugucaugauccgucaaa

SEQ ID NO: 2217943 - RNA, 19 nt, Artificial Sequence
  Description of Artificial Sequence: Synthetic oligonucleotide
  Antisense strand to SEQ ID NO: 2217942
uuugacggaucaugacacc

SEQ ID NO: 2217944 - RNA, 19 nt, Artificial Sequence
  Description of Artificial Sequence: Synthetic oligonucleotide
  Sense strand starting at position 1939 of SEQ ID NO: 1883809
gccuuucaggagugugacu

SEQ ID NO: 2217945 - RNA, 19 nt, Artificial Sequence
  Description of Artificial Sequence: Synthetic oligonucleotide
  Antisense strand to SEQ ID NO: 2217944
agucacacuccugaaaggc

SEQ ID NO: 2217946 - RNA, 19 nt, Artificial Sequence
  Description of Artificial Sequence: Synthetic oligonucleotide
  Sense strand starting at position 1960 of SEQ ID NO: 1883809
gcaaccucuuugguuguaa

SEQ ID NO: 2217947 - RNA, 19 nt, Artificial Sequence
  Description of Artificial Sequence: Synthetic oligonucleotide
  Antisense strand to SEQ ID NO: 2217946
uuacaaccaaagagguugc

SEQ ID NO: 2217948 - RNA, 19 nt, Artificial Sequence
  Description of Artificial Sequence: Synthetic oligonucleotide
  Sense strand starting at position 612 of SEQ ID NO: 1883809
agaguucucccuugaccgu

SEQ ID NO: 2217949 - RNA, 19 nt, Artificial Sequence
  Description of Artificial Sequence: Synthetic oligonucleotide
  Antisense strand to SEQ ID NO: 2217948
acggucaagggagaacucu

SEQ ID NO: 2217950 - RNA, 19 nt, Artificial Sequence
  Description of Artificial Sequence: Synthetic oligonucleotide
  Sense strand starting at position 3647 of SEQ ID NO: 1883809
agcuaagucuuaucagcuu

SEQ ID NO: 2217951 - RNA, 19 nt, Artificial Sequence
  Description of Artificial Sequence: Synthetic oligonucleotide
  Antisense strand to SEQ ID NO: 2217950
aagcugauaagacuuagcu

SEQ ID NO: 2217952 - RNA, 19 nt, Artificial Sequence
  Description of Artificial Sequence: Synthetic oligonucleotide
  Sense strand starting at position 704 of SEQ ID NO: 1883809
uucccagucugcucuugau

SEQ ID NO: 2217953 - RNA, 19 nt, Artificial Sequence
  Description of Artificial Sequence: Synthetic oligonucleotide
  Antisense strand to SEQ ID NO: 2217952
aucaagagcagacugggaa

SEQ ID NO: 2217954 - RNA, 19 nt, Artificial Sequence
  Description of Artificial Sequence: Synthetic oligonucleotide
  Sense strand starting at position 502 of SEQ ID NO: 1883809
guccucugucuauggcaau

SEQ ID NO: 2217955 - RNA, 19 nt, Artificial Sequence
  Description of Artificial Sequence: Synthetic oligonucleotide
  Antisense strand to SEQ ID NO: 2217954
auugccauagacagaggac

SEQ ID NO: 2217956 - RNA, 19 nt, Artificial Sequence
  Description of Artificial Sequence: Synthetic oligonucleotide
  Sense strand starting at position 541 of SEQ ID NO: 1883809
ucagauggcucugaagaaa

SEQ ID NO: 2217957 - RNA, 19 nt, Artificial Sequence
  Description of Artificial Sequence: Synthetic oligonucleotide
  Antisense strand to SEQ ID NO: 2217956
uuucuucagagccaucuga

SEQ ID NO: 2217958 - RNA, 19 nt, Artificial Sequence
  Description of Artificial Sequence: Synthetic oligonucleotide
  Sense strand starting at position 496 of SEQ ID NO: 1883809
agcuguguccucugucuau

SEQ ID NO: 2217959 - RNA, 19 nt, Artificial Sequence
  Description of Artificial Sequence: Synthetic oligonucleotide
  Antisense strand to SEQ ID NO: 2217958
auagacagaggacacagcu

SEQ ID NO: 2217960 - RNA, 19 nt, Artificial Sequence
  Description of Artificial Sequence: Synthetic oligonucleotide
  Sense strand starting at position 1737 of SEQ ID NO: 1883809
ugcgguagcuguaaguaga

SEQ ID NO: 2217961 - RNA, 19 nt, Artificial Sequence
  Description of Artificial Sequence: Synthetic oligonucleotide
  Antisense strand to SEQ ID NO: 2217960
ucuacuuacagcuaccgca

SEQ ID NO: 2217962 - RNA, 19 nt, Artificial Sequence
  Description of Artificial Sequence: Synthetic oligonucleotide
  Sense strand starting at position 3785 of SEQ ID NO: 1883809
agcagaguuucugaaguaa

SEQ ID NO: 2217963 - RNA, 19 nt, Artificial Sequence
  Description of Artificial Sequence: Synthetic oligonucleotide
  Antisense strand to SEQ ID NO: 2217962
uuacuucagaaacucugcu

SEQ ID NO: 2217964 - RNA, 19 nt, Artificial Sequence
  Description of Artificial Sequence: Synthetic oligonucleotide
  Sense strand starting at position 3421 of SEQ ID NO: 1883809
ucuucuuucugccaaagga

SEQ ID NO: 2217965 - RNA, 19 nt, Artificial Sequence
  Description of Artificial Sequence: Synthetic oligonucleotide
  Antisense strand to SEQ ID NO: 2217964
uccuuuggcagaaagaaga

SEQ ID NO: 2217966 - RNA, 19 nt, Artificial Sequence
  Description of Artificial Sequence: Synthetic oligonucleotide
  Sense strand starting at position 1464 of SEQ ID NO: 1883809
cugggauugugucagaugu

SEQ ID NO: 2217967 - RNA, 19 nt, Artificial Sequence
  Description of Artificial Sequence: Synthetic oligonucleotide
  Antisense strand to SEQ ID NO: 2217966
acaucugacacaaucccag

SEQ ID NO: 2217968 - RNA, 19 nt, Artificial Sequence
  Description of Artificial Sequence: Synthetic oligonucleotide
  Sense strand starting at position 1659 of SEQ ID NO: 1883809
gucuucuguugugaaacuu

SEQ ID NO: 2217969 - RNA, 19 nt, Artificial Sequence
  Description of Artificial Sequence: Synthetic oligonucleotide
  Antisense strand to SEQ ID NO: 2217968
aaguuucacaacagaagac

SEQ ID NO: 2217970 - RNA, 19 nt, Artificial Sequence
  Description of Artificial Sequence: Synthetic oligonucleotide
  Sense strand starting at position 58 of SEQ ID NO: 1883810
aauagacucucagugauga

SEQ ID NO: 2217971 - RNA, 19 nt, Artificial Sequence
  Description of Artificial Sequence: Synthetic oligonucleotide
  Antisense strand to SEQ ID NO: 2217970
ucaucacugagagucuauu

SEQ ID NO: 2217972 - RNA, 19 nt, Artificial Sequence
  Description of Artificial Sequence: Synthetic oligonucleotide
  Sense strand starting at position 3403 of SEQ ID NO: 1883810
guauguggacauggaaaga

SEQ ID NO: 2217973 - RNA, 19 nt, Artificial Sequence
  Description of Artificial Sequence: Synthetic oligonucleotide
  Antisense strand to SEQ ID NO: 2217972
ucuuuccauguccacauac

SEQ ID NO: 2217974 - RNA, 19 nt, Artificial Sequence
  Description of Artificial Sequence: Synthetic oligonucleotide
  Sense strand starting at position 482 of SEQ ID NO: 1883810
uaaugaaucugggugauug

SEQ ID NO: 2217975 - RNA, 19 nt, Artificial Sequence
  Description of Artificial Sequence: Synthetic oligonucleotide
  Antisense strand to SEQ ID NO: 2217974
caaucacccagauucauua

SEQ ID NO: 2217976 - RNA, 19 nt, Artificial Sequence
  Description of Artificial Sequence: Synthetic oligonucleotide
  Sense strand starting at position 235 of SEQ ID NO: 1883810
gcuuaagaguggcugauuu

SEQ ID NO: 2217977 - RNA, 19 nt, Artificial Sequence
  Description of Artificial Sequence: Synthetic oligonucleotide
  Antisense strand to SEQ ID NO: 2217976
aaaucagccacucuuaagc

SEQ ID NO: 2217978 - RNA, 19 nt, Artificial Sequence
  Description of Artificial Sequence: Synthetic oligonucleotide
  Sense strand starting at position 1042 of SEQ ID NO: 1883810
agauguauuuggccugguu

SEQ ID NO: 2217979 - RNA, 19 nt, Artificial Sequence
  Description of Artificial Sequence: Synthetic oligonucleotide
  Antisense strand to SEQ ID NO: 2217978
aaccaggccaaauacaucu

SEQ ID NO: 2217980 - RNA, 19 nt, Artificial Sequence
  Description of Artificial Sequence: Synthetic oligonucleotide
  Sense strand starting at position 433 of SEQ ID NO: 1883810
ggccuuccugagggagaaa

SEQ ID NO: 2217981 - RNA, 19 nt, Artificial Sequence
  Description of Artificial Sequence: Synthetic oligonucleotide
  Antisense strand to SEQ ID NO: 2217980
uuucucccucaggaaggcc

SEQ ID NO: 2217982 - RNA, 19 nt, Artificial Sequence
  Description of Artificial Sequence: Synthetic oligonucleotide
  Sense strand starting at position 3376 of SEQ ID NO: 1883810
aaguuauugagguagaugu

SEQ ID NO: 2217983 - RNA, 19 nt, Artificial Sequence
  Description of Artificial Sequence: Synthetic oligonucleotide
  Antisense strand to SEQ ID NO: 2217982
acaucuaccucaauaacuu

SEQ ID NO: 2217984 - RNA, 19 nt, Artificial Sequence
  Description of Artificial Sequence: Synthetic oligonucleotide
  Sense strand starting at position 2604 of SEQ ID NO: 1883810
aggagcauuccacaucucu

SEQ ID NO: 2217985 - RNA, 19 nt, Artificial Sequence
  Description of Artificial Sequence: Synthetic oligonucleotide
  Antisense strand to SEQ ID NO: 2217984
agagauguggaaugcuccu

SEQ ID NO: 2217986 - RNA, 19 nt, Artificial Sequence
  Description of Artificial Sequence: Synthetic oligonucleotide
  Sense strand starting at position 2356 of SEQ ID NO: 1883810
uggacaugagagugguuga

SEQ ID NO: 2217987 - RNA, 19 nt, Artificial Sequence
  Description of Artificial Sequence: Synthetic oligonucleotide
  Antisense strand to SEQ ID NO: 2217986
ucaaccacucucaugucca

SEQ ID NO: 2217988 - RNA, 19 nt, Artificial Sequence
  Description of Artificial Sequence: Synthetic oligonucleotide
  Sense strand starting at position 1033 of SEQ ID NO: 1883810
guucccuguagauguauuu

SEQ ID NO: 2217989 - RNA, 19 nt, Artificial Sequence
  Description of Artificial Sequence: Synthetic oligonucleotide
  Antisense strand to SEQ ID NO: 2217988
aaauacaucuacagggaac

SEQ ID NO: 2217990 - RNA, 19 nt, Artificial Sequence
  Description of Artificial Sequence: Synthetic oligonucleotide
  Sense strand starting at position 89 of SEQ ID NO: 1883810
acuugaguagcucauuaau

SEQ ID NO: 2217991 - RNA, 19 nt, Artificial Sequence
  Description of Artificial Sequence: Synthetic oligonucleotide
  Antisense strand to SEQ ID NO: 2217990
auuaaugagcuacucaagu

SEQ ID NO: 2217992 - RNA, 19 nt, Artificial Sequence
  Description of Artificial Sequence: Synthetic oligonucleotide
  Sense strand starting at position 2286 of SEQ ID NO: 1883810
ccugcuuaacgagaaccau

SEQ ID NO: 2217993 - RNA, 19 nt, Artificial Sequence
  Description of Artificial Sequence: Synthetic oligonucleotide
  Antisense strand to SEQ ID NO: 2217992
augguucucguuaagcagg

SEQ ID NO: 2217994 - RNA, 19 nt, Artificial Sequence
  Description of Artificial Sequence: Synthetic oligonucleotide
  Sense strand starting at position 820 of SEQ ID NO: 1883810
aaagaugggucaucuccuu

SEQ ID NO: 2217995 - RNA, 19 nt, Artificial Sequence
  Description of Artificial Sequence: Synthetic oligonucleotide
  Antisense strand to SEQ ID NO: 2217994
aaggagaugacccaucuuu

SEQ ID NO: 2217996 - RNA, 19 nt, Artificial Sequence
  Description of Artificial Sequence: Synthetic oligonucleotide
  Sense strand starting at position 3378 of SEQ ID NO: 1883810
guuauugagguagauguau

SEQ ID NO: 2217997 - RNA, 19 nt, Artificial Sequence
  Description of Artificial Sequence: Synthetic oligonucleotide
  Antisense strand to SEQ ID NO: 2217996
auacaucuaccucaauaac

SEQ ID NO: 2217998 - RNA, 19 nt, Artificial Sequence
  Description of Artificial Sequence: Synthetic oligonucleotide
  Sense strand starting at position 179 of SEQ ID NO: 1883810
ucauuagcucuagggaaau

SEQ ID NO: 2217999 - RNA, 19 nt, Artificial Sequence
  Description of Artificial Sequence: Synthetic oligonucleotide
  Antisense strand to SEQ ID NO: 2217998
auuucccuagagcuaauga

SEQ ID NO: 2218000 - RNA, 19 nt, Artificial Sequence
  Description of Artificial Sequence: Synthetic oligonucleotide
  Sense strand starting at position 2849 of SEQ ID NO: 1883810
ucaaaccuucccgagaugu

SEQ ID NO: 2218001 - RNA, 19 nt, Artificial Sequence
  Description of Artificial Sequence: Synthetic oligonucleotide
  Antisense strand to SEQ ID NO: 2218000
acaucucgggaagguuuga

SEQ ID NO: 2218002 - RNA, 19 nt, Artificial Sequence
  Description of Artificial Sequence: Synthetic oligonucleotide
  Sense strand starting at position 2941 of SEQ ID NO: 1883810
ugcagagggcugcagaaau

SEQ ID NO: 2218003 - RNA, 19 nt, Artificial Sequence
  Description of Artificial Sequence: Synthetic oligonucleotide
  Antisense strand to SEQ ID NO: 2218002
auuucugcagcccucugca

SEQ ID NO: 2218004 - RNA, 19 nt, Artificial Sequence
  Description of Artificial Sequence: Synthetic oligonucleotide
  Sense strand starting at position 3871 of SEQ ID NO: 1883810
ugcaaauaucugcaaaggu

SEQ ID NO: 2218005 - RNA, 19 nt, Artificial Sequence
  Description of Artificial Sequence: Synthetic oligonucleotide
  Antisense strand to SEQ ID NO: 2218004
accuuugcagauauuugca

SEQ ID NO: 2218006 - RNA, 19 nt, Artificial Sequence
  Description of Artificial Sequence: Synthetic oligonucleotide
  Sense strand starting at position 3362 of SEQ ID NO: 1883810
cugugcaguuauuuaaguu

SEQ ID NO: 2218007 - RNA, 19 nt, Artificial Sequence
  Description of Artificial Sequence: Synthetic oligonucleotide
  Antisense strand to SEQ ID NO: 2218006
aacuuaaauaacugcacag

SEQ ID NO: 2218008 - RNA, 19 nt, Artificial Sequence
  Description of Artificial Sequence: Synthetic oligonucleotide
  Sense strand starting at position 3413 of SEQ ID NO: 1883810
auggaaagaucucuguguu

SEQ ID NO: 2218009 - RNA, 19 nt, Artificial Sequence
  Description of Artificial Sequence: Synthetic oligonucleotide
  Antisense strand to SEQ ID NO: 2218008
aacacagagaucuuuccau

SEQ ID NO: 2218010 - RNA, 19 nt, Artificial Sequence
  Description of Artificial Sequence: Synthetic oligonucleotide
  Sense strand starting at position 396 of SEQ ID NO: 1883810
ucaguuauacccugaccca

SEQ ID NO: 2218011 - RNA, 19 nt, Artificial Sequence
  Description of Artificial Sequence: Synthetic oligonucleotide
  Antisense strand to SEQ ID NO: 2218010
ugggucaggguauaacuga

SEQ ID NO: 2218012 - RNA, 19 nt, Artificial Sequence
  Description of Artificial Sequence: Synthetic oligonucleotide
  Sense strand starting at position 353 of SEQ ID NO: 1883810
ucagcaaaguggucaaaca

SEQ ID NO: 2218013 - RNA, 19 nt, Artificial Sequence
  Description of Artificial Sequence: Synthetic oligonucleotide
  Antisense strand to SEQ ID NO: 2218012
uguuugaccacuuugcuga

SEQ ID NO: 2218014 - RNA, 19 nt, Artificial Sequence
  Description of Artificial Sequence: Synthetic oligonucleotide
  Sense strand starting at position 363 of SEQ ID NO: 1883810
ggucaaacauaugcuugau

SEQ ID NO: 2218015 - RNA, 19 nt, Artificial Sequence
  Description of Artificial Sequence: Synthetic oligonucleotide
  Antisense strand to SEQ ID NO: 2218014
aucaagcauauguuugacc

SEQ ID NO: 2218016 - RNA, 19 nt, Artificial Sequence
  Description of Artificial Sequence: Synthetic oligonucleotide
  Sense strand starting at position 3749 of SEQ ID NO: 1883810
cucuguguuguugaaugaa

SEQ ID NO: 2218017 - RNA, 19 nt, Artificial Sequence
  Description of Artificial Sequence: Synthetic oligonucleotide
  Antisense strand to SEQ ID NO: 2218016
uucauucaacaacacagag

SEQ ID NO: 2218018 - RNA, 19 nt, Artificial Sequence
  Description of Artificial Sequence: Synthetic oligonucleotide
  Sense strand starting at position 3414 of SEQ ID NO: 1883810
uggaaagaucucuguguuu

SEQ ID NO: 2218019 - RNA, 19 nt, Artificial Sequence
  Description of Artificial Sequence: Synthetic oligonucleotide
  Antisense strand to SEQ ID NO: 2218018
aaacacagagaucuuucca

SEQ ID NO: 2218020 - RNA, 19 nt, Artificial Sequence
  Description of Artificial Sequence: Synthetic oligonucleotide
  Sense strand starting at position 2409 of SEQ ID NO: 1883810
gguggaaaguagccgaaau

SEQ ID NO: 2218021 - RNA, 19 nt, Artificial Sequence
  Description of Artificial Sequence: Synthetic oligonucleotide
  Antisense strand to SEQ ID NO: 2218020
auuucggcuacuuuccacc

SEQ ID NO: 2218022 - RNA, 19 nt, Artificial Sequence
  Description of Artificial Sequence: Synthetic oligonucleotide
  Sense strand starting at position 1029 of SEQ ID NO: 1883810
auugguucccuguagaugu

SEQ ID NO: 2218023 - RNA, 19 nt, Artificial Sequence
  Description of Artificial Sequence: Synthetic oligonucleotide
  Antisense strand to SEQ ID NO: 2218022
acaucuacagggaaccaau

SEQ ID NO: 2218024 - RNA, 19 nt, Artificial Sequence
  Description of Artificial Sequence: Synthetic oligonucleotide
  Sense strand starting at position 611 of SEQ ID NO: 1883810
ugauucugggugugauuac

SEQ ID NO: 2218025 - RNA, 19 nt, Artificial Sequence
  Description of Artificial Sequence: Synthetic oligonucleotide
  Antisense strand to SEQ ID NO: 2218024
guaaucacacccagaauca

SEQ ID NO: 2218026 - RNA, 19 nt, Artificial Sequence
  Description of Artificial Sequence: Synthetic oligonucleotide
  Sense strand starting at position 286 of SEQ ID NO: 1883810
aagcaucggcaauauugua

SEQ ID NO: 2218027 - RNA, 19 nt, Artificial Sequence
  Description of Artificial Sequence: Synthetic oligonucleotide
  Antisense strand to SEQ ID NO: 2218026
uacaauauugccgaugcuu

SEQ ID NO: 2218028 - RNA, 19 nt, Artificial Sequence
  Description of Artificial Sequence: Synthetic oligonucleotide
  Sense strand starting at position 741 of SEQ ID NO: 1883810
gggaaauccuguccuuagc

SEQ ID NO: 2218029 - RNA, 19 nt, Artificial Sequence
  Description of Artificial Sequence: Synthetic oligonucleotide
  Antisense strand to SEQ ID NO: 2218028
gcuaaggacaggauuuccc

SEQ ID NO: 2218030 - RNA, 19 nt, Artificial Sequence
  Description of Artificial Sequence: Synthetic oligonucleotide
  Sense strand starting at position 2981 of SEQ ID NO: 1883810
aaagguguuccuggguaug

SEQ ID NO: 2218031 - RNA, 19 nt, Artificial Sequence
  Description of Artificial Sequence: Synthetic oligonucleotide
  Antisense strand to SEQ ID NO: 2218030
cauacccaggaacaccuuu

SEQ ID NO: 2218032 - RNA, 19 nt, Artificial Sequence
  Description of Artificial Sequence: Synthetic oligonucleotide
  Sense strand starting at position 369 of SEQ ID NO: 1883810
acauaugcuugauuauguu

SEQ ID NO: 2218033 - RNA, 19 nt, Artificial Sequence
  Description of Artificial Sequence: Synthetic oligonucleotide
  Antisense strand to SEQ ID NO: 2218032
aacauaaucaagcauaugu

SEQ ID NO: 2218034 - RNA, 19 nt, Artificial Sequence
  Description of Artificial Sequence: Synthetic oligonucleotide
  Sense strand starting at position 2410 of SEQ ID NO: 1883810
guggaaaguagccgaaauu

SEQ ID NO: 2218035 - RNA, 19 nt, Artificial Sequence
  Description of Artificial Sequence: Synthetic oligonucleotide
  Antisense strand to SEQ ID NO: 2218034
aauuucggcuacuuuccac

SEQ ID NO: 2218036 - RNA, 19 nt, Artificial Sequence
  Description of Artificial Sequence: Synthetic oligonucleotide
  Sense strand starting at position 640 of SEQ ID NO: 1883810
gaaggcguuuaucucuaaa

SEQ ID NO: 2218037 - RNA, 19 nt, Artificial Sequence
  Description of Artificial Sequence: Synthetic oligonucleotide
  Antisense strand to SEQ ID NO: 2218036
uuuagagauaaacgccuuc

SEQ ID NO: 2218038 - RNA, 19 nt, Artificial Sequence
  Description of Artificial Sequence: Synthetic oligonucleotide
  Sense strand starting at position 1026 of SEQ ID NO: 1883810
cccauugguucccuguaga

SEQ ID NO: 2218039 - RNA, 19 nt, Artificial Sequence
  Description of Artificial Sequence: Synthetic oligonucleotide
  Antisense strand to SEQ ID NO: 2218038
ucuacagggaaccaauggg

SEQ ID NO: 2218040 - RNA, 19 nt, Artificial Sequence
  Description of Artificial Sequence: Synthetic oligonucleotide
  Sense strand starting at position 871 of SEQ ID NO: 1883810
ucuccaguugcuuggaaua

SEQ ID NO: 2218041 - RNA, 19 nt, Artificial Sequence
  Description of Artificial Sequence: Synthetic oligonucleotide
  Antisense strand to SEQ ID NO: 2218040
uauuccaagcaacuggaga

SEQ ID NO: 2218042 - RNA, 19 nt, Artificial Sequence
  Description of Artificial Sequence: Synthetic oligonucleotide
  Sense strand starting at position 3106 of SEQ ID NO: 1883810
cuuuaucaggccugugaau

SEQ ID NO: 2218043 - RNA, 19 nt, Artificial Sequence
  Description of Artificial Sequence: Synthetic oligonucleotide
  Antisense strand to SEQ ID NO: 2218042
auucacaggccugauaaag

SEQ ID NO: 2218044 - RNA, 19 nt, Artificial Sequence
  Description of Artificial Sequence: Synthetic oligonucleotide
  Sense strand starting at position 608 of SEQ ID NO: 1883810
uggugauucugggugugau

SEQ ID NO: 2218045 - RNA, 19 nt, Artificial Sequence
  Description of Artificial Sequence: Synthetic oligonucleotide
  Antisense strand to SEQ ID NO: 2218044
aucacacccagaaucacca

SEQ ID NO: 2218046 - RNA, 19 nt, Artificial Sequence
  Description of Artificial Sequence: Synthetic oligonucleotide
  Sense strand starting at position 2419 of SEQ ID NO: 1883810
agccgaaauuugcagagaa

SEQ ID NO: 2218047 - RNA, 19 nt, Artificial Sequence
  Description of Artificial Sequence: Synthetic oligonucleotide
  Antisense strand to SEQ ID NO: 2218046
uucucugcaaauuucggcu

SEQ ID NO: 2218048 - RNA, 19 nt, Artificial Sequence
  Description of Artificial Sequence: Synthetic oligonucleotide
  Sense strand starting at position 609 of SEQ ID NO: 1883810
ggugauucugggugugauu

SEQ ID NO: 2218049 - RNA, 19 nt, Artificial Sequence
  Description of Artificial Sequence: Synthetic oligonucleotide
  Antisense strand to SEQ ID NO: 2218048
aaucacacccagaaucacc

SEQ ID NO: 2218050 - RNA, 19 nt, Artificial Sequence
  Description of Artificial Sequence: Synthetic oligonucleotide
  Sense strand starting at position 242 of SEQ ID NO: 1883811
uuuauuugcuuugucaaga

SEQ ID NO: 2218051 - RNA, 19 nt, Artificial Sequence
  Description of Artificial Sequence: Synthetic oligonucleotide
  Antisense strand to SEQ ID NO: 2218050
ucuugacaaagcaaauaaa

SEQ ID NO: 2218052 - RNA, 19 nt, Artificial Sequence
  Description of Artificial Sequence: Synthetic oligonucleotide
  Sense strand starting at position 243 of SEQ ID NO: 1883811
uuauuugcuuugucaagau

SEQ ID NO: 2218053 - RNA, 19 nt, Artificial Sequence
  Description of Artificial Sequence: Synthetic oligonucleotide
  Antisense strand to SEQ ID NO: 2218052
aucuugacaaagcaaauaa

SEQ ID NO: 2218054 - RNA, 19 nt, Artificial Sequence
  Description of Artificial Sequence: Synthetic oligonucleotide
  Sense strand starting at position 3748 of SEQ ID NO: 1883811
uuucuauaggguuacuaau

SEQ ID NO: 2218055 - RNA, 19 nt, Artificial Sequence
  Description of Artificial Sequence: Synthetic oligonucleotide
  Antisense strand to SEQ ID NO: 2218054
auuaguaacccuauagaaa

SEQ ID NO: 2218056 - RNA, 19 nt, Artificial Sequence
  Description of Artificial Sequence: Synthetic oligonucleotide
  Sense strand starting at position 2228 of SEQ ID NO: 1883811
uagguaucaccauauaggu

SEQ ID NO: 2218057 - RNA, 19 nt, Artificial Sequence
  Description of Artificial Sequence: Synthetic oligonucleotide
  Antisense strand to SEQ ID NO: 2218056
accuauauggugauaccua

SEQ ID NO: 2218058 - RNA, 19 nt, Artificial Sequence
  Description of Artificial Sequence: Synthetic oligonucleotide
  Sense strand starting at position 2886 of SEQ ID NO: 1883811
cguuaaucaggaugagaaa

SEQ ID NO: 2218059 - RNA, 19 nt, Artificial Sequence
  Description of Artificial Sequence: Synthetic oligonucleotide
  Antisense strand to SEQ ID NO: 2218058
uuucucauccugauuaacg

SEQ ID NO: 2218060 - RNA, 19 nt, Artificial Sequence
  Description of Artificial Sequence: Synthetic oligonucleotide
  Sense strand starting at position 3317 of SEQ ID NO: 1883811
auuuaaauaucugauggga

SEQ ID NO: 2218061 - RNA, 19 nt, Artificial Sequence
  Description of Artificial Sequence: Synthetic oligonucleotide
  Antisense strand to SEQ ID NO: 2218060
ucccaucagauauuuaaau

SEQ ID NO: 2218062 - RNA, 19 nt, Artificial Sequence
  Description of Artificial Sequence: Synthetic oligonucleotide
  Sense strand starting at position 608 of SEQ ID NO: 1883811
gccacugaacauuggaaua

SEQ ID NO: 2218063 - RNA, 19 nt, Artificial Sequence
  Description of Artificial Sequence: Synthetic oligonucleotide
  Antisense strand to SEQ ID NO: 2218062
uauuccaauguucaguggc

SEQ ID NO: 2218064 - RNA, 19 nt, Artificial Sequence
  Description of Artificial Sequence: Synthetic oligonucleotide
  Sense strand starting at position 241 of SEQ ID NO: 1883811
cuuuauuugcuuugucaag

SEQ ID NO: 2218065 - RNA, 19 nt, Artificial Sequence
  Description of Artificial Sequence: Synthetic oligonucleotide
  Antisense strand to SEQ ID NO: 2218064
cuugacaaagcaaauaaag

SEQ ID NO: 2218066 - RNA, 19 nt, Artificial Sequence
  Description of Artificial Sequence: Synthetic oligonucleotide
  Sense strand starting at position 1105 of SEQ ID NO: 1883811
caagucuuucugcaggaaa

SEQ ID NO: 2218067 - RNA, 19 nt, Artificial Sequence
  Description of Artificial Sequence: Synthetic oligonucleotide
  Antisense strand to SEQ ID NO: 2218066
uuuccugcagaaagacuug

SEQ ID NO: 2218068 - RNA, 19 nt, Artificial Sequence
  Description of Artificial Sequence: Synthetic oligonucleotide
  Sense strand starting at position 149 of SEQ ID NO: 1883811
acugcuagccucuggauuu

SEQ ID NO: 2218069 - RNA, 19 nt, Artificial Sequence
  Description of Artificial Sequence: Synthetic oligonucleotide
  Antisense strand to SEQ ID NO: 2218068
aaauccagaggcuagcagu

SEQ ID NO: 2218070 - RNA, 19 nt, Artificial Sequence
  Description of Artificial Sequence: Synthetic oligonucleotide
  Sense strand starting at position 3368 of SEQ ID NO: 1883811
ucucuaugacauggaguga

SEQ ID NO: 2218071 - RNA, 19 nt, Artificial Sequence
  Description of Artificial Sequence: Synthetic oligonucleotide
  Antisense strand to SEQ ID NO: 2218070
ucacuccaugucauagaga

SEQ ID NO: 2218072 - RNA, 19 nt, Artificial Sequence
  Description of Artificial Sequence: Synthetic oligonucleotide
  Sense strand starting at position 2884 of SEQ ID NO: 1883811
gccguuaaucaggaugaga

SEQ ID NO: 2218073 - RNA, 19 nt, Artificial Sequence
  Description of Artificial Sequence: Synthetic oligonucleotide
  Antisense strand to SEQ ID NO: 2218072
ucucauccugauuaacggc

SEQ ID NO: 2218074 - RNA, 19 nt, Artificial Sequence
  Description of Artificial Sequence: Synthetic oligonucleotide
  Sense strand starting at position 2139 of SEQ ID NO: 1883811
ugcagcuuuaucguauguu

SEQ ID NO: 2218075 - RNA, 19 nt, Artificial Sequence
  Description of Artificial Sequence: Synthetic oligonucleotide
  Antisense strand to SEQ ID NO: 2218074
aacauacgauaaagcugca

SEQ ID NO: 2218076 - RNA, 19 nt, Artificial Sequence
  Description of Artificial Sequence: Synthetic oligonucleotide
  Sense strand starting at position 986 of SEQ ID NO: 1883811
auuagauuuggcgguguca

SEQ ID NO: 2218077 - RNA, 19 nt, Artificial Sequence
  Description of Artificial Sequence: Synthetic oligonucleotide
  Antisense strand to SEQ ID NO: 2218076
ugacaccgccaaaucuaau

SEQ ID NO: 2218078 - RNA, 19 nt, Artificial Sequence
  Description of Artificial Sequence: Synthetic oligonucleotide
  Sense strand starting at position 988 of SEQ ID NO: 1883811
uagauuuggcggugucaua

SEQ ID NO: 2218079 - RNA, 19 nt, Artificial Sequence
  Description of Artificial Sequence: Synthetic oligonucleotide
  Antisense strand to SEQ ID NO: 2218078
uaugacaccgccaaaucua

SEQ ID NO: 2218080 - RNA, 19 nt, Artificial Sequence
  Description of Artificial Sequence: Synthetic oligonucleotide
  Sense strand starting at position 2094 of SEQ ID NO: 1883811
guaaucuauguugaucuua

SEQ ID NO: 2218081 - RNA, 19 nt, Artificial Sequence
  Description of Artificial Sequence: Synthetic oligonucleotide
  Antisense strand to SEQ ID NO: 2218080
uaagaucaacauagauuac

SEQ ID NO: 2218082 - RNA, 19 nt, Artificial Sequence
  Description of Artificial Sequence: Synthetic oligonucleotide
  Sense strand starting at position 2358 of SEQ ID NO: 1883811
cuccaugaucauggaaugu

SEQ ID NO: 2218083 - RNA, 19 nt, Artificial Sequence
  Description of Artificial Sequence: Synthetic oligonucleotide
  Antisense strand to SEQ ID NO: 2218082
acauuccaugaucauggag

SEQ ID NO: 2218084 - RNA, 19 nt, Artificial Sequence
  Description of Artificial Sequence: Synthetic oligonucleotide
  Sense strand starting at position 87 of SEQ ID NO: 1883811
gugucagaauaucuauaau

SEQ ID NO: 2218085 - RNA, 19 nt, Artificial Sequence
  Description of Artificial Sequence: Synthetic oligonucleotide
  Antisense strand to SEQ ID NO: 2218084
auuauagauauucugacac

SEQ ID NO: 2218086 - RNA, 19 nt, Artificial Sequence
  Description of Artificial Sequence: Synthetic oligonucleotide
  Sense strand starting at position 1478 of SEQ ID NO: 1883811
gacgaauaauccuccgaac

SEQ ID NO: 2218087 - RNA, 19 nt, Artificial Sequence
  Description of Artificial Sequence: Synthetic oligonucleotide
  Antisense strand to SEQ ID NO: 2218086
guucggaggauuauucguc

SEQ ID NO: 2218088 - RNA, 19 nt, Artificial Sequence
  Description of Artificial Sequence: Synthetic oligonucleotide
  Sense strand starting at position 30 of SEQ ID NO: 1883811
guaauuuguguaugcugau

SEQ ID NO: 2218089 - RNA, 19 nt, Artificial Sequence
  Description of Artificial Sequence: Synthetic oligonucleotide
  Antisense strand to SEQ ID NO: 2218088
aucagcauacacaaauuac

SEQ ID NO: 2218090 - RNA, 19 nt, Artificial Sequence
  Description of Artificial Sequence: Synthetic oligonucleotide
  Sense strand starting at position 382 of SEQ ID NO: 1883811
cugguccugguaugaagaa

SEQ ID NO: 2218091 - RNA, 19 nt, Artificial Sequence
  Description of Artificial Sequence: Synthetic oligonucleotide
  Antisense strand to SEQ ID NO: 2218090
uucuucauaccaggaccag

SEQ ID NO: 2218092 - RNA, 19 nt, Artificial Sequence
  Description of Artificial Sequence: Synthetic oligonucleotide
  Sense strand starting at position 657 of SEQ ID NO: 1883811
gccacuggucuauaaucca

SEQ ID NO: 2218093 - RNA, 19 nt, Artificial Sequence
  Description of Artificial Sequence: Synthetic oligonucleotide
  Antisense strand to SEQ ID NO: 2218092
uggauuauagaccaguggc

SEQ ID NO: 2218094 - RNA, 19 nt, Artificial Sequence
  Description of Artificial Sequence: Synthetic oligonucleotide
  Sense strand starting at position 862 of SEQ ID NO: 1883811
agugaauugcugcaacaug

SEQ ID NO: 2218095 - RNA, 19 nt, Artificial Sequence
  Description of Artificial Sequence: Synthetic oligonucleotide
  Antisense strand to SEQ ID NO: 2218094
cauguugcagcaauucacu

SEQ ID NO: 2218096 - RNA, 19 nt, Artificial Sequence
  Description of Artificial Sequence: Synthetic oligonucleotide
  Sense strand starting at position 282 of SEQ ID NO: 1883811
acuagauacuccuugucau

SEQ ID NO: 2218097 - RNA, 19 nt, Artificial Sequence
  Description of Artificial Sequence: Synthetic oligonucleotide
  Antisense strand to SEQ ID NO: 2218096
augacaaggaguaucuagu

SEQ ID NO: 2218098 - RNA, 19 nt, Artificial Sequence
  Description of Artificial Sequence: Synthetic oligonucleotide
  Sense strand starting at position 285 of SEQ ID NO: 1883811
agauacuccuugucauuau

SEQ ID NO: 2218099 - RNA, 19 nt, Artificial Sequence
  Description of Artificial Sequence: Synthetic oligonucleotide
  Antisense strand to SEQ ID NO: 2218098
auaaugacaaggaguaucu

SEQ ID NO: 2218100 - RNA, 19 nt, Artificial Sequence
  Description of Artificial Sequence: Synthetic oligonucleotide
  Sense strand starting at position 2576 of SEQ ID NO: 1883811
ccugacaucuugcuaaaug

SEQ ID NO: 2218101 - RNA, 19 nt, Artificial Sequence
  Description of Artificial Sequence: Synthetic oligonucleotide
  Antisense strand to SEQ ID NO: 2218100
cauuuagcaagaugucagg

SEQ ID NO: 2218102 - RNA, 19 nt, Artificial Sequence
  Description of Artificial Sequence: Synthetic oligonucleotide
  Sense strand starting at position 1293 of SEQ ID NO: 1883811
ggcucugcaggauggaaau

SEQ ID NO: 2218103 - RNA, 19 nt, Artificial Sequence
  Description of Artificial Sequence: Synthetic oligonucleotide
  Antisense strand to SEQ ID NO: 2218102
auuuccauccugcagagcc

SEQ ID NO: 2218104 - RNA, 19 nt, Artificial Sequence
  Description of Artificial Sequence: Synthetic oligonucleotide
  Sense strand starting at position 239 of SEQ ID NO: 1883811
gucuuuauuugcuuuguca

SEQ ID NO: 2218105 - RNA, 19 nt, Artificial Sequence
  Description of Artificial Sequence: Synthetic oligonucleotide
  Antisense strand to SEQ ID NO: 2218104
ugacaaagcaaauaaagac

SEQ ID NO: 2218106 - RNA, 19 nt, Artificial Sequence
  Description of Artificial Sequence: Synthetic oligonucleotide
  Sense strand starting at position 3754 of SEQ ID NO: 1883811
uaggguuacuaauuguauu

SEQ ID NO: 2218107 - RNA, 19 nt, Artificial Sequence
  Description of Artificial Sequence: Synthetic oligonucleotide
  Antisense strand to SEQ ID NO: 2218106
aauacaauuaguaacccua

SEQ ID NO: 2218108 - RNA, 19 nt, Artificial Sequence
  Description of Artificial Sequence: Synthetic oligonucleotide
  Sense strand starting at position 2351 of SEQ ID NO: 1883811
cugaguccuccaugaucau

SEQ ID NO: 2218109 - RNA, 19 nt, Artificial Sequence
  Description of Artificial Sequence: Synthetic oligonucleotide
  Antisense strand to SEQ ID NO: 2218108
augaucauggaggacucag

SEQ ID NO: 2218110 - RNA, 19 nt, Artificial Sequence
  Description of Artificial Sequence: Synthetic oligonucleotide
  Sense strand starting at position 247 of SEQ ID NO: 1883811
uugcuuugucaagaucauu

SEQ ID NO: 2218111 - RNA, 19 nt, Artificial Sequence
  Description of Artificial Sequence: Synthetic oligonucleotide
  Antisense strand to SEQ ID NO: 2218110
aaugaucuugacaaagcaa

SEQ ID NO: 2218112 - RNA, 19 nt, Artificial Sequence
  Description of Artificial Sequence: Synthetic oligonucleotide
  Sense strand starting at position 27 of SEQ ID NO: 1883811
uuuguaauuuguguaugcu

SEQ ID NO: 2218113 - RNA, 19 nt, Artificial Sequence
  Description of Artificial Sequence: Synthetic oligonucleotide
  Antisense strand to SEQ ID NO: 2218112
agcauacacaaauuacaaa

SEQ ID NO: 2218114 - RNA, 19 nt, Artificial Sequence
  Description of Artificial Sequence: Synthetic oligonucleotide
  Sense strand starting at position 1167 of SEQ ID NO: 1883811
ucgaauccauccucuugau

SEQ ID NO: 2218115 - RNA, 19 nt, Artificial Sequence
  Description of Artificial Sequence: Synthetic oligonucleotide
  Antisense strand to SEQ ID NO: 2218114
aucaagaggauggauucga

SEQ ID NO: 2218116 - RNA, 19 nt, Artificial Sequence
  Description of Artificial Sequence: Synthetic oligonucleotide
  Sense strand starting at position 975 of SEQ ID NO: 1883811
gcaacucuguaauuagauu

SEQ ID NO: 2218117 - RNA, 19 nt, Artificial Sequence
  Description of Artificial Sequence: Synthetic oligonucleotide
  Antisense strand to SEQ ID NO: 2218116
aaucuaauuacagaguugc

SEQ ID NO: 2218118 - RNA, 19 nt, Artificial Sequence
  Description of Artificial Sequence: Synthetic oligonucleotide
  Sense strand starting at position 283 of SEQ ID NO: 1883811
cuagauacuccuugucauu

SEQ ID NO: 2218119 - RNA, 19 nt, Artificial Sequence
  Description of Artificial Sequence: Synthetic oligonucleotide
  Antisense strand to SEQ ID NO: 2218118
aaugacaaggaguaucuag

SEQ ID NO: 2218120 - RNA, 19 nt, Artificial Sequence
  Description of Artificial Sequence: Synthetic oligonucleotide
  Sense strand starting at position 3022 of SEQ ID NO: 1883811
gguauauuacguuaguuga

SEQ ID NO: 2218121 - RNA, 19 nt, Artificial Sequence
  Description of Artificial Sequence: Synthetic oligonucleotide
  Antisense strand to SEQ ID NO: 2218120
ucaacuaacguaauauacc

SEQ ID NO: 2218122 - RNA, 19 nt, Artificial Sequence
  Description of Artificial Sequence: Synthetic oligonucleotide
  Sense strand starting at position 1104 of SEQ ID NO: 1883811
ucaagucuuucugcaggaa

SEQ ID NO: 2218123 - RNA, 19 nt, Artificial Sequence
  Description of Artificial Sequence: Synthetic oligonucleotide
  Antisense strand to SEQ ID NO: 2218122
uuccugcagaaagacuuga

SEQ ID NO: 2218124 - RNA, 19 nt, Artificial Sequence
  Description of Artificial Sequence: Synthetic oligonucleotide
  Sense strand starting at position 894 of SEQ ID NO: 1883811
cuuagccauuggucaagau

SEQ ID NO: 2218125 - RNA, 19 nt, Artificial Sequence
  Description of Artificial Sequence: Synthetic oligonucleotide
  Antisense strand to SEQ ID NO: 2218124
aucuugaccaauggcuaag

SEQ ID NO: 2218126 - RNA, 19 nt, Artificial Sequence
  Description of Artificial Sequence: Synthetic oligonucleotide
  Sense strand starting at position 1022 of SEQ ID NO: 1883811
aagauuguguaucuuguaa

SEQ ID NO: 2218127 - RNA, 19 nt, Artificial Sequence
  Description of Artificial Sequence: Synthetic oligonucleotide
  Antisense strand to SEQ ID NO: 2218126
uuacaagauacacaaucuu

SEQ ID NO: 2218128 - RNA, 19 nt, Artificial Sequence
  Description of Artificial Sequence: Synthetic oligonucleotide
  Sense strand starting at position 2607 of SEQ ID NO: 1883811
auagaaguuucuucguaga

SEQ ID NO: 2218129 - RNA, 19 nt, Artificial Sequence
  Description of Artificial Sequence: Synthetic oligonucleotide
  Antisense strand to SEQ ID NO: 2218128
ucuacgaagaaacuucuau

SEQ ID NO: 2218130 - RNA, 19 nt, Artificial Sequence
  Description of Artificial Sequence: Synthetic oligonucleotide
  Sense strand starting at position 2680 of SEQ ID NO: 1883812
cgacuuagacuugaccuau

SEQ ID NO: 2218131 - RNA, 19 nt, Artificial Sequence
  Description of Artificial Sequence: Synthetic oligonucleotide
  Antisense strand to SEQ ID NO: 2218130
auaggucaagucuaagucg

SEQ ID NO: 2218132 - RNA, 19 nt, Artificial Sequence
  Description of Artificial Sequence: Synthetic oligonucleotide
  Sense strand starting at position 3205 of SEQ ID NO: 1883812
caagaugauguuugaaacu

SEQ ID NO: 2218133 - RNA, 19 nt, Artificial Sequence
  Description of Artificial Sequence: Synthetic oligonucleotide
  Antisense strand to SEQ ID NO: 2218132
aguuucaaacaucaucuug

SEQ ID NO: 2218134 - RNA, 19 nt, Artificial Sequence
  Description of Artificial Sequence: Synthetic oligonucleotide
  Sense strand starting at position 953 of SEQ ID NO: 1883812
ccugauuaacggcaugaaa

SEQ ID NO: 2218135 - RNA, 19 nt, Artificial Sequence
  Description of Artificial Sequence: Synthetic oligonucleotide
  Antisense strand to SEQ ID NO: 2218134
uuucaugccguuaaucagg

SEQ ID NO: 2218136 - RNA, 19 nt, Artificial Sequence
  Description of Artificial Sequence: Synthetic oligonucleotide
  Sense strand starting at position 1214 of SEQ ID NO: 1883812
uccugugaaaucuacgaag

SEQ ID NO: 2218137 - RNA, 19 nt, Artificial Sequence
  Description of Artificial Sequence: Synthetic oligonucleotide
  Antisense strand to SEQ ID NO: 2218136
cuucguagauuucacagga

SEQ ID NO: 2218138 - RNA, 19 nt, Artificial Sequence
  Description of Artificial Sequence: Synthetic oligonucleotide
  Sense strand starting at position 2746 of SEQ ID NO: 1883812
aggcguauacaggaacaau

SEQ ID NO: 2218139 - RNA, 19 nt, Artificial Sequence
  Description of Artificial Sequence: Synthetic oligonucleotide
  Antisense strand to SEQ ID NO: 2218138
auuguuccuguauacgccu

SEQ ID NO: 2218140 - RNA, 19 nt, Artificial Sequence
  Description of Artificial Sequence: Synthetic oligonucleotide
  Sense strand starting at position 3369 of SEQ ID NO: 1883812
gugauaucaaaguagaguu

SEQ ID NO: 2218141 - RNA, 19 nt, Artificial Sequence
  Description of Artificial Sequence: Synthetic oligonucleotide
  Antisense strand to SEQ ID NO: 2218140
aacucuacuuugauaucac

SEQ ID NO: 2218142 - RNA, 19 nt, Artificial Sequence
  Description of Artificial Sequence: Synthetic oligonucleotide
  Sense strand starting at position 3274 of SEQ ID NO: 1883812
gcuaaaggugaagauguau

SEQ ID NO: 2218143 - RNA, 19 nt, Artificial Sequence
  Description of Artificial Sequence: Synthetic oligonucleotide
  Antisense strand to SEQ ID NO: 2218142
auacaucuucaccuuuagc

SEQ ID NO: 2218144 - RNA, 19 nt, Artificial Sequence
  Description of Artificial Sequence: Synthetic oligonucleotide
  Sense strand starting at position 3496 of SEQ ID NO: 1883812
aagucuaugugaucaagaa

SEQ ID NO: 2218145 - RNA, 19 nt, Artificial Sequence
  Description of Artificial Sequence: Synthetic oligonucleotide
  Antisense strand to SEQ ID NO: 2218144
uucuugaucacauagacuu

SEQ ID NO: 2218146 - RNA, 19 nt, Artificial Sequence
  Description of Artificial Sequence: Synthetic oligonucleotide
  Sense strand starting at position 3133 of SEQ ID NO: 1883812
gcgcuauguguauuacuau

SEQ ID NO: 2218147 - RNA, 19 nt, Artificial Sequence
  Description of Artificial Sequence: Synthetic oligonucleotide
  Antisense strand to SEQ ID NO: 2218146
auaguaauacacauagcgc

SEQ ID NO: 2218148 - RNA, 19 nt, Artificial Sequence
  Description of Artificial Sequence: Synthetic oligonucleotide
  Sense strand starting at position 3516 of SEQ ID NO: 1883812
uugauagcauuugcaguau

SEQ ID NO: 2218149 - RNA, 19 nt, Artificial Sequence
  Description of Artificial Sequence: Synthetic oligonucleotide
  Antisense strand to SEQ ID NO: 2218148
auacugcaaaugcuaucaa

SEQ ID NO: 2218150 - RNA, 19 nt, Artificial Sequence
  Description of Artificial Sequence: Synthetic oligonucleotide
  Sense strand starting at position 3707 of SEQ ID NO: 1883812
ucuguaacaccagauguua

SEQ ID NO: 2218151 - RNA, 19 nt, Artificial Sequence
  Description of Artificial Sequence: Synthetic oligonucleotide
  Antisense strand to SEQ ID NO: 2218150
uaacaucugguguuacaga

SEQ ID NO: 2218152 - RNA, 19 nt, Artificial Sequence
  Description of Artificial Sequence: Synthetic oligonucleotide
  Sense strand starting at position 1270 of SEQ ID NO: 1883812
caggauacaguauguauaa

SEQ ID NO: 2218153 - RNA, 19 nt, Artificial Sequence
  Description of Artificial Sequence: Synthetic oligonucleotide
  Antisense strand to SEQ ID NO: 2218152
uuauacauacuguauccug

SEQ ID NO: 2218154 - RNA, 19 nt, Artificial Sequence
  Description of Artificial Sequence: Synthetic oligonucleotide
  Sense strand starting at position 1216 of SEQ ID NO: 1883812
cugugaaaucuacgaagaa

SEQ ID NO: 2218155 - RNA, 19 nt, Artificial Sequence
  Description of Artificial Sequence: Synthetic oligonucleotide
  Antisense strand to SEQ ID NO: 2218154
uucuucguagauuucacag

SEQ ID NO: 2218156 - RNA, 19 nt, Artificial Sequence
  Description of Artificial Sequence: Synthetic oligonucleotide
  Sense strand starting at position 2822 of SEQ ID NO: 1883812
aaucuuugugcugaaagac

SEQ ID NO: 2218157 - RNA, 19 nt, Artificial Sequence
  Description of Artificial Sequence: Synthetic oligonucleotide
  Antisense strand to SEQ ID NO: 2218156
gucuuucagcacaaagauu

SEQ ID NO: 2218158 - RNA, 19 nt, Artificial Sequence
  Description of Artificial Sequence: Synthetic oligonucleotide
  Sense strand starting at position 3259 of SEQ ID NO: 1883812
guuuguggucugccagcua

SEQ ID NO: 2218159 - RNA, 19 nt, Artificial Sequence
  Description of Artificial Sequence: Synthetic oligonucleotide
  Antisense strand to SEQ ID NO: 2218158
uagcuggcagaccacaaac

SEQ ID NO: 2218160 - RNA, 19 nt, Artificial Sequence
  Description of Artificial Sequence: Synthetic oligonucleotide
  Sense strand starting at position 3214 of SEQ ID NO: 1883812
guuugaaacuauuccaaug

SEQ ID NO: 2218161 - RNA, 19 nt, Artificial Sequence
  Description of Artificial Sequence: Synthetic oligonucleotide
  Antisense strand to SEQ ID NO: 2218160
cauuggaauaguuucaaac

SEQ ID NO: 2218162 - RNA, 19 nt, Artificial Sequence
  Description of Artificial Sequence: Synthetic oligonucleotide
  Sense strand starting at position 785 of SEQ ID NO: 1883812
ggaagauuggcuugacauc

SEQ ID NO: 2218163 - RNA, 19 nt, Artificial Sequence
  Description of Artificial Sequence: Synthetic oligonucleotide
  Antisense strand to SEQ ID NO: 2218162
gaugucaagccaaucuucc

SEQ ID NO: 2218164 - RNA, 19 nt, Artificial Sequence
  Description of Artificial Sequence: Synthetic oligonucleotide
  Sense strand starting at position 1697 of SEQ ID NO: 1883812
acgauaaagcugcaauaau

SEQ ID NO: 2218165 - RNA, 19 nt, Artificial Sequence
  Description of Artificial Sequence: Synthetic oligonucleotide
  Antisense strand to SEQ ID NO: 2218164
auuauugcagcuuuaucgu

SEQ ID NO: 2218166 - RNA, 19 nt, Artificial Sequence
  Description of Artificial Sequence: Synthetic oligonucleotide
  Sense strand starting at position 1610 of SEQ ID NO: 1883812
uggugauaccuaggacuug

SEQ ID NO: 2218167 - RNA, 19 nt, Artificial Sequence
  Description of Artificial Sequence: Synthetic oligonucleotide
  Antisense strand to SEQ ID NO: 2218166
caaguccuagguaucacca

SEQ ID NO: 2218168 - RNA, 19 nt, Artificial Sequence
  Description of Artificial Sequence: Synthetic oligonucleotide
  Sense strand starting at position 1174 of SEQ ID NO: 1883812
augauccuguauguaagaa

SEQ ID NO: 2218169 - RNA, 19 nt, Artificial Sequence
  Description of Artificial Sequence: Synthetic oligonucleotide
  Antisense strand to SEQ ID NO: 2218168
uucuuacauacaggaucau

SEQ ID NO: 2218170 - RNA, 19 nt, Artificial Sequence
  Description of Artificial Sequence: Synthetic oligonucleotide
  Sense strand starting at position 2634 of SEQ ID NO: 1883812
aagagaucguuagcagaaa

SEQ ID NO: 2218171 - RNA, 19 nt, Artificial Sequence
  Description of Artificial Sequence: Synthetic oligonucleotide
  Antisense strand to SEQ ID NO: 2218170
uuucugcuaacgaucucuu

SEQ ID NO: 2218172 - RNA, 19 nt, Artificial Sequence
  Description of Artificial Sequence: Synthetic oligonucleotide
  Sense strand starting at position 449 of SEQ ID NO: 1883812
ugagcaauaguuuaucacu

SEQ ID NO: 2218173 - RNA, 19 nt, Artificial Sequence
  Description of Artificial Sequence: Synthetic oligonucleotide
  Antisense strand to SEQ ID NO: 2218172
agugauaaacuauugcuca

SEQ ID NO: 2218174 - RNA, 19 nt, Artificial Sequence
  Description of Artificial Sequence: Synthetic oligonucleotide
  Sense strand starting at position 444 of SEQ ID NO: 1883812
acaugugagcaauaguuua

SEQ ID NO: 2218175 - RNA, 19 nt, Artificial Sequence
  Description of Artificial Sequence: Synthetic oligonucleotide
  Antisense strand to SEQ ID NO: 2218174
uaaacuauugcucacaugu

SEQ ID NO: 2218176 - RNA, 19 nt, Artificial Sequence
  Description of Artificial Sequence: Synthetic oligonucleotide
  Sense strand starting at position 3492 of SEQ ID NO: 1883812
auggaagucuaugugauca

SEQ ID NO: 2218177 - RNA, 19 nt, Artificial Sequence
  Description of Artificial Sequence: Synthetic oligonucleotide
  Antisense strand to SEQ ID NO: 2218176
ugaucacauagacuuccau

SEQ ID NO: 2218178 - RNA, 19 nt, Artificial Sequence
  Description of Artificial Sequence: Synthetic oligonucleotide
  Sense strand starting at position 3910 of SEQ ID NO: 1883812
auaggacauugugucagau

SEQ ID NO: 2218179 - RNA, 19 nt, Artificial Sequence
  Description of Artificial Sequence: Synthetic oligonucleotide
  Antisense strand to SEQ ID NO: 2218178
aucugacacaauguccuau

SEQ ID NO: 2218180 - RNA, 19 nt, Artificial Sequence
  Description of Artificial Sequence: Synthetic oligonucleotide
  Sense strand starting at position 3491 of SEQ ID NO: 1883812
aauggaagucuaugugauc

SEQ ID NO: 2218181 - RNA, 19 nt, Artificial Sequence
  Description of Artificial Sequence: Synthetic oligonucleotide
  Antisense strand to SEQ ID NO: 2218180
gaucacauagacuuccauu

SEQ ID NO: 2218182 - RNA, 19 nt, Artificial Sequence
  Description of Artificial Sequence: Synthetic oligonucleotide
  Sense strand starting at position 2347 of SEQ ID NO: 1883812
gcagccguucggaggauua

SEQ ID NO: 2218183 - RNA, 19 nt, Artificial Sequence
  Description of Artificial Sequence: Synthetic oligonucleotide
  Antisense strand to SEQ ID NO: 2218182
uaauccuccgaacggcugc

SEQ ID NO: 2218184 - RNA, 19 nt, Artificial Sequence
  Description of Artificial Sequence: Synthetic oligonucleotide
  Sense strand starting at position 783 of SEQ ID NO: 1883812
guggaagauuggcuugaca

SEQ ID NO: 2218185 - RNA, 19 nt, Artificial Sequence
  Description of Artificial Sequence: Synthetic oligonucleotide
  Antisense strand to SEQ ID NO: 2218184
ugucaagccaaucuuccac

SEQ ID NO: 2218186 - RNA, 19 nt, Artificial Sequence
  Description of Artificial Sequence: Synthetic oligonucleotide
  Sense strand starting at position 457 of SEQ ID NO: 1883812
aguuuaucacuccauguca

SEQ ID NO: 2218187 - RNA, 19 nt, Artificial Sequence
  Description of Artificial Sequence: Synthetic oligonucleotide
  Antisense strand to SEQ ID NO: 2218186
ugacauggagugauaaacu

SEQ ID NO: 2218188 - RNA, 19 nt, Artificial Sequence
  Description of Artificial Sequence: Synthetic oligonucleotide
  Sense strand starting at position 2709 of SEQ ID NO: 1883812
acauuauugcuaugggauu

SEQ ID NO: 2218189 - RNA, 19 nt, Artificial Sequence
  Description of Artificial Sequence: Synthetic oligonucleotide
  Antisense strand to SEQ ID NO: 2218188
aaucccauagcaauaaugu

SEQ ID NO: 2218190 - RNA, 19 nt, Artificial Sequence
  Description of Artificial Sequence: Synthetic oligonucleotide
  Sense strand starting at position 2851 of SEQ ID NO: 1883812
cgccaaaucuaauuacaga

SEQ ID NO: 2218191 - RNA, 19 nt, Artificial Sequence
  Description of Artificial Sequence: Synthetic oligonucleotide
  Antisense strand to SEQ ID NO: 2218190
ucuguaauuagauuuggcg

SEQ ID NO: 2218192 - RNA, 19 nt, Artificial Sequence
  Description of Artificial Sequence: Synthetic oligonucleotide
  Sense strand starting at position 1173 of SEQ ID NO: 1883812
caugauccuguauguaaga

SEQ ID NO: 2218193 - RNA, 19 nt, Artificial Sequence
  Description of Artificial Sequence: Synthetic oligonucleotide
  Antisense strand to SEQ ID NO: 2218192
ucuuacauacaggaucaug

SEQ ID NO: 2218194 - RNA, 19 nt, Artificial Sequence
  Description of Artificial Sequence: Synthetic oligonucleotide
  Sense strand starting at position 3677 of SEQ ID NO: 1883812
ccgucaaauccagaggcua

SEQ ID NO: 2218195 - RNA, 19 nt, Artificial Sequence
  Description of Artificial Sequence: Synthetic oligonucleotide
  Antisense strand to SEQ ID NO: 2218194
uagccucuggauuugacgg

SEQ ID NO: 2218196 - RNA, 19 nt, Artificial Sequence
  Description of Artificial Sequence: Synthetic oligonucleotide
  Sense strand starting at position 3109 of SEQ ID NO: 1883812
gggaguaacuauucccagu

SEQ ID NO: 2218197 - RNA, 19 nt, Artificial Sequence
  Description of Artificial Sequence: Synthetic oligonucleotide
  Antisense strand to SEQ ID NO: 2218196
acugggaauaguuacuccc

SEQ ID NO: 2218198 - RNA, 19 nt, Artificial Sequence
  Description of Artificial Sequence: Synthetic oligonucleotide
  Sense strand starting at position 2839 of SEQ ID NO: 1883812
acauuaugacaccgccaaa

SEQ ID NO: 2218199 - RNA, 19 nt, Artificial Sequence
  Description of Artificial Sequence: Synthetic oligonucleotide
  Antisense strand to SEQ ID NO: 2218198
uuuggcggugucauaaugu

SEQ ID NO: 2218200 - RNA, 19 nt, Artificial Sequence
  Description of Artificial Sequence: Synthetic oligonucleotide
  Sense strand starting at position 2735 of SEQ ID NO: 1883812
gaaagacuugaaggcguau

SEQ ID NO: 2218201 - RNA, 19 nt, Artificial Sequence
  Description of Artificial Sequence: Synthetic oligonucleotide
  Antisense strand to SEQ ID NO: 2218200
auacgccuucaagucuuuc

SEQ ID NO: 2218202 - RNA, 19 nt, Artificial Sequence
  Description of Artificial Sequence: Synthetic oligonucleotide
  Sense strand starting at position 855 of SEQ ID NO: 1883812
auuaucucaguguaugcaa

SEQ ID NO: 2218203 - RNA, 19 nt, Artificial Sequence
  Description of Artificial Sequence: Synthetic oligonucleotide
  Antisense strand to SEQ ID NO: 2218202
uugcauacacugagauaau

SEQ ID NO: 2218204 - RNA, 19 nt, Artificial Sequence
  Description of Artificial Sequence: Synthetic oligonucleotide
  Sense strand starting at position 772 of SEQ ID NO: 1883812
uuauccugccaguggaaga

SEQ ID NO: 2218205 - RNA, 19 nt, Artificial Sequence
  Description of Artificial Sequence: Synthetic oligonucleotide
  Antisense strand to SEQ ID NO: 2218204
ucuuccacuggcaggauaa

SEQ ID NO: 2218206 - RNA, 19 nt, Artificial Sequence
  Description of Artificial Sequence: Synthetic oligonucleotide
  Sense strand starting at position 3139 of SEQ ID NO: 1883812
uguguauuacuauagcuac

SEQ ID NO: 2218207 - RNA, 19 nt, Artificial Sequence
  Description of Artificial Sequence: Synthetic oligonucleotide
  Antisense strand to SEQ ID NO: 2218206
guagcuauaguaauacaca

SEQ ID NO: 2218208 - RNA, 19 nt, Artificial Sequence
  Description of Artificial Sequence: Synthetic oligonucleotide
  Sense strand starting at position 3709 of SEQ ID NO: 1883812
uguaacaccagauguuagu

SEQ ID NO: 2218209 - RNA, 19 nt, Artificial Sequence
  Description of Artificial Sequence: Synthetic oligonucleotide
  Antisense strand to SEQ ID NO: 2218208
acuaacaucugguguuaca

SEQ ID NO: 2218210 - RNA, 19 nt, Artificial Sequence
  Description of Artificial Sequence: Synthetic oligonucleotide
  Sense strand starting at position 3912 of SEQ ID NO: 1883813
ucuauuguauuggucuaaa

SEQ ID NO: 2218211 - RNA, 19 nt, Artificial Sequence
  Description of Artificial Sequence: Synthetic oligonucleotide
  Antisense strand to SEQ ID NO: 2218210
uuuagaccaauacaauaga

SEQ ID NO: 2218212 - RNA, 19 nt, Artificial Sequence
  Description of Artificial Sequence: Synthetic oligonucleotide
  Sense strand starting at position 1326 of SEQ ID NO: 1883813
guuacuaaguuuguauuga

SEQ ID NO: 2218213 - RNA, 19 nt, Artificial Sequence
  Description of Artificial Sequence: Synthetic oligonucleotide
  Antisense strand to SEQ ID NO: 2218212
ucaauacaaacuuaguaac

SEQ ID NO: 2218214 - RNA, 19 nt, Artificial Sequence
  Description of Artificial Sequence: Synthetic oligonucleotide
  Sense strand starting at position 1481 of SEQ ID NO: 1883813
gucauacuuugggugucau

SEQ ID NO: 2218215 - RNA, 19 nt, Artificial Sequence
  Description of Artificial Sequence: Synthetic oligonucleotide
  Antisense strand to SEQ ID NO: 2218214
augacacccaaaguaugac

SEQ ID NO: 2218216 - RNA, 19 nt, Artificial Sequence
  Description of Artificial Sequence: Synthetic oligonucleotide
  Sense strand starting at position 3140 of SEQ ID NO: 1883813
cuguguguuucugugagga

SEQ ID NO: 2218217 - RNA, 19 nt, Artificial Sequence
  Description of Artificial Sequence: Synthetic oligonucleotide
  Antisense strand to SEQ ID NO: 2218216
uccucacagaaacacacag

SEQ ID NO: 2218218 - RNA, 19 nt, Artificial Sequence
  Description of Artificial Sequence: Synthetic oligonucleotide
  Sense strand starting at position 1318 of SEQ ID NO: 1883813
cuagguucguuacuaaguu

SEQ ID NO: 2218219 - RNA, 19 nt, Artificial Sequence
  Description of Artificial Sequence: Synthetic oligonucleotide
  Antisense strand to SEQ ID NO: 2218218
aacuuaguaacgaaccuag

SEQ ID NO: 2218220 - RNA, 19 nt, Artificial Sequence
  Description of Artificial Sequence: Synthetic oligonucleotide
  Sense strand starting at position 1322 of SEQ ID NO: 1883813
guucguuacuaaguuugua

SEQ ID NO: 2218221 - RNA, 19 nt, Artificial Sequence
  Description of Artificial Sequence: Synthetic oligonucleotide
  Antisense strand to SEQ ID NO: 2218220
uacaaacuuaguaacgaac

SEQ ID NO: 2218222 - RNA, 19 nt, Artificial Sequence
  Description of Artificial Sequence: Synthetic oligonucleotide
  Sense strand starting at position 3142 of SEQ ID NO: 1883813
guguguuucugugaggaac

SEQ ID NO: 2218223 - RNA, 19 nt, Artificial Sequence
  Description of Artificial Sequence: Synthetic oligonucleotide
  Antisense strand to SEQ ID NO: 2218222
guuccucacagaaacacac

SEQ ID NO: 2218224 - RNA, 19 nt, Artificial Sequence
  Description of Artificial Sequence: Synthetic oligonucleotide
  Sense strand starting at position 3144 of SEQ ID NO: 1883813
guguuucugugaggaacca

SEQ ID NO: 2218225 - RNA, 19 nt, Artificial Sequence
  Description of Artificial Sequence: Synthetic oligonucleotide
  Antisense strand to SEQ ID NO: 2218224
ugguuccucacagaaacac

SEQ ID NO: 2218226 - RNA, 19 nt, Artificial Sequence
  Description of Artificial Sequence: Synthetic oligonucleotide
  Sense strand starting at position 1319 of SEQ ID NO: 1883813
uagguucguuacuaaguuu

SEQ ID NO: 2218227 - RNA, 19 nt, Artificial Sequence
  Description of Artificial Sequence: Synthetic oligonucleotide
  Antisense strand to SEQ ID NO: 2218226
aaacuuaguaacgaaccua

SEQ ID NO: 2218228 - RNA, 19 nt, Artificial Sequence
  Description of Artificial Sequence: Synthetic oligonucleotide
  Sense strand starting at position 1480 of SEQ ID NO: 1883813
ugucauacuuuggguguca

SEQ ID NO: 2218229 - RNA, 19 nt, Artificial Sequence
  Description of Artificial Sequence: Synthetic oligonucleotide
  Antisense strand to SEQ ID NO: 2218228
ugacacccaaaguaugaca

SEQ ID NO: 2218230 - RNA, 19 nt, Artificial Sequence
  Description of Artificial Sequence: Synthetic oligonucleotide
  Sense strand starting at position 2237 of SEQ ID NO: 1883814
ucgcgugggcgaaaucaga

SEQ ID NO: 2218231 - RNA, 19 nt, Artificial Sequence
  Description of Artificial Sequence: Synthetic oligonucleotide
  Antisense strand to SEQ ID NO: 2218230
ucugauuucgcccacgcga

SEQ ID NO: 2218232 - RNA, 19 nt, Artificial Sequence
  Description of Artificial Sequence: Synthetic oligonucleotide
  Sense strand starting at position 2244 of SEQ ID NO: 1883814
ggcgaaaucagagacacgu

SEQ ID NO: 2218233 - RNA, 19 nt, Artificial Sequence
  Description of Artificial Sequence: Synthetic oligonucleotide
  Antisense strand to SEQ ID NO: 2218232
acgugucucugauuucgcc

SEQ ID NO: 2218234 - RNA, 19 nt, Artificial Sequence
  Description of Artificial Sequence: Synthetic oligonucleotide
  Sense strand starting at position 3265 of SEQ ID NO: 1883814
gccuacuaccuggaauugu

SEQ ID NO: 2218235 - RNA, 19 nt, Artificial Sequence
  Description of Artificial Sequence: Synthetic oligonucleotide
  Antisense strand to SEQ ID NO: 2218234
acaauuccagguaguaggc

SEQ ID NO: 2218236 - RNA, 19 nt, Artificial Sequence
  Description of Artificial Sequence: Synthetic oligonucleotide
  Sense strand starting at position 2248 of SEQ ID NO: 1883814
aaaucagagacacgugguu

SEQ ID NO: 2218237 - RNA, 19 nt, Artificial Sequence
  Description of Artificial Sequence: Synthetic oligonucleotide
  Antisense strand to SEQ ID NO: 2218236
aaccacgugucucugauuu

SEQ ID NO: 2218238 - RNA, 19 nt, Artificial Sequence
  Description of Artificial Sequence: Synthetic oligonucleotide
  Sense strand starting at position 2253 of SEQ ID NO: 1883814
agagacacgugguuuccaa

SEQ ID NO: 2218239 - RNA, 19 nt, Artificial Sequence
  Description of Artificial Sequence: Synthetic oligonucleotide
  Antisense strand to SEQ ID NO: 2218238
uuggaaaccacgugucucu

SEQ ID NO: 2218240 - RNA, 19 nt, Artificial Sequence
  Description of Artificial Sequence: Synthetic oligonucleotide
  Sense strand starting at position 2193 of SEQ ID NO: 1883814
gccauccucucccuggaaa

SEQ ID NO: 2218241 - RNA, 19 nt, Artificial Sequence
  Description of Artificial Sequence: Synthetic oligonucleotide
  Antisense strand to SEQ ID NO: 2218240
uuuccagggagaggauggc

SEQ ID NO: 2218242 - RNA, 19 nt, Artificial Sequence
  Description of Artificial Sequence: Synthetic oligonucleotide
  Sense strand starting at position 2297 of SEQ ID NO: 1883814
uaugguucgggucacagua

SEQ ID NO: 2218243 - RNA, 19 nt, Artificial Sequence
  Description of Artificial Sequence: Synthetic oligonucleotide
  Antisense strand to SEQ ID NO: 2218242
uacugugacccgaaccaua

SEQ ID NO: 2218244 - RNA, 19 nt, Artificial Sequence
  Description of Artificial Sequence: Synthetic oligonucleotide
  Sense strand starting at position 3200 of SEQ ID NO: 1883814
agugacuuggucugaaguc

SEQ ID NO: 2218245 - RNA, 19 nt, Artificial Sequence
  Description of Artificial Sequence: Synthetic oligonucleotide
  Antisense strand to SEQ ID NO: 2218244
gacuucagaccaagucacu

SEQ ID NO: 2218246 - RNA, 19 nt, Artificial Sequence
  Description of Artificial Sequence: Synthetic oligonucleotide
  Sense strand starting at position 3280 of SEQ ID NO: 1883814
uuguucgaguucucauaaa

SEQ ID NO: 2218247 - RNA, 19 nt, Artificial Sequence
  Description of Artificial Sequence: Synthetic oligonucleotide
  Antisense strand to SEQ ID NO: 2218246
uuuaugagaacucgaacaa

SEQ ID NO: 2218248 - RNA, 19 nt, Artificial Sequence
  Description of Artificial Sequence: Synthetic oligonucleotide
  Sense strand starting at position 3273 of SEQ ID NO: 1883814
ccuggaauuguucgaguuc

SEQ ID NO: 2218249 - RNA, 19 nt, Artificial Sequence
  Description of Artificial Sequence: Synthetic oligonucleotide
  Antisense strand to SEQ ID NO: 2218248
gaacucgaacaauuccagg

SEQ ID NO: 2218250 - RNA, 19 nt, Artificial Sequence
  Description of Artificial Sequence: Synthetic oligonucleotide
  Sense strand starting at position 3197 of SEQ ID NO: 1883814
gcgagugacuuggucugaa

SEQ ID NO: 2218251 - RNA, 19 nt, Artificial Sequence
  Description of Artificial Sequence: Synthetic oligonucleotide
  Antisense strand to SEQ ID NO: 2218250
uucagaccaagucacucgc

SEQ ID NO: 2218252 - RNA, 19 nt, Artificial Sequence
  Description of Artificial Sequence: Synthetic oligonucleotide
  Sense strand starting at position 3196 of SEQ ID NO: 1883814
ggcgagugacuuggucuga

SEQ ID NO: 2218253 - RNA, 19 nt, Artificial Sequence
  Description of Artificial Sequence: Synthetic oligonucleotide
  Antisense strand to SEQ ID NO: 2218252
ucagaccaagucacucgcc

SEQ ID NO: 2218254 - RNA, 19 nt, Artificial Sequence
  Description of Artificial Sequence: Synthetic oligonucleotide
  Sense strand starting at position 2469 of SEQ ID NO: 1883814
ugggcaaguacguguuaca

SEQ ID NO: 2218255 - RNA, 19 nt, Artificial Sequence
  Description of Artificial Sequence: Synthetic oligonucleotide
  Antisense strand to SEQ ID NO: 2218254
uguaacacguacuugccca

SEQ ID NO: 2218256 - RNA, 19 nt, Artificial Sequence
  Description of Artificial Sequence: Synthetic oligonucleotide
  Sense strand starting at position 3201 of SEQ ID NO: 1883814
gugacuuggucugaagucu

SEQ ID NO: 2218257 - RNA, 19 nt, Artificial Sequence
  Description of Artificial Sequence: Synthetic oligonucleotide
  Antisense strand to SEQ ID NO: 2218256
agacuucagaccaagucac

SEQ ID NO: 2218258 - RNA, 19 nt, Artificial Sequence
  Description of Artificial Sequence: Synthetic oligonucleotide
  Sense strand starting at position 3274 of SEQ ID NO: 1883814
cuggaauuguucgaguucu

SEQ ID NO: 2218259 - RNA, 19 nt, Artificial Sequence
  Description of Artificial Sequence: Synthetic oligonucleotide
  Antisense strand to SEQ ID NO: 2218258
agaacucgaacaauuccag

SEQ ID NO: 2218260 - RNA, 19 nt, Artificial Sequence
  Description of Artificial Sequence: Synthetic oligonucleotide
  Sense strand starting at position 3360 of SEQ ID NO: 1883814
gagacagggucucgcauua

SEQ ID NO: 2218261 - RNA, 19 nt, Artificial Sequence
  Description of Artificial Sequence: Synthetic oligonucleotide
  Antisense strand to SEQ ID NO: 2218260
uaaugcgagacccugucuc

SEQ ID NO: 2218262 - RNA, 19 nt, Artificial Sequence
  Description of Artificial Sequence: Synthetic oligonucleotide
  Sense strand starting at position 2472 of SEQ ID NO: 1883814
gcaaguacguguuacagac

SEQ ID NO: 2218263 - RNA, 19 nt, Artificial Sequence
  Description of Artificial Sequence: Synthetic oligonucleotide
  Antisense strand to SEQ ID NO: 2218262
gucuguaacacguacuugc

SEQ ID NO: 2218264 - RNA, 19 nt, Artificial Sequence
  Description of Artificial Sequence: Synthetic oligonucleotide
  Sense strand starting at position 344 of SEQ ID NO: 1883815
auuggaauugucuaucuua

SEQ ID NO: 2218265 - RNA, 19 nt, Artificial Sequence
  Description of Artificial Sequence: Synthetic oligonucleotide
  Antisense strand to SEQ ID NO: 2218264
uaagauagacaauuccaau

SEQ ID NO: 2218266 - RNA, 19 nt, Artificial Sequence
  Description of Artificial Sequence: Synthetic oligonucleotide
  Sense strand starting at position 334 of SEQ ID NO: 1883815
aagugacuacauuggaauu

SEQ ID NO: 2218267 - RNA, 19 nt, Artificial Sequence
  Description of Artificial Sequence: Synthetic oligonucleotide
  Antisense strand to SEQ ID NO: 2218266
aauuccaauguagucacuu

SEQ ID NO: 2218268 - RNA, 19 nt, Artificial Sequence
  Description of Artificial Sequence: Synthetic oligonucleotide
  Sense strand starting at position 2790 of SEQ ID NO: 1883815
ccuuuaaaugaacgaugga

SEQ ID NO: 2218269 - RNA, 19 nt, Artificial Sequence
  Description of Artificial Sequence: Synthetic oligonucleotide
  Antisense strand to SEQ ID NO: 2218268
uccaucguucauuuaaagg

SEQ ID NO: 2218270 - RNA, 19 nt, Artificial Sequence
  Description of Artificial Sequence: Synthetic oligonucleotide
  Sense strand starting at position 2925 of SEQ ID NO: 1883815
ucaaaugaggcucauguga

SEQ ID NO: 2218271 - RNA, 19 nt, Artificial Sequence
  Description of Artificial Sequence: Synthetic oligonucleotide
  Antisense strand to SEQ ID NO: 2218270
ucacaugagccucauuuga

SEQ ID NO: 2218272 - RNA, 19 nt, Artificial Sequence
  Description of Artificial Sequence: Synthetic oligonucleotide
  Sense strand starting at position 2555 of SEQ ID NO: 1883815
ugucauuggacagaaugca

SEQ ID NO: 2218273 - RNA, 19 nt, Artificial Sequence
  Description of Artificial Sequence: Synthetic oligonucleotide
  Antisense strand to SEQ ID NO: 2218272
ugcauucuguccaaugaca

SEQ ID NO: 2218274 - RNA, 19 nt, Artificial Sequence
  Description of Artificial Sequence: Synthetic oligonucleotide
  Sense strand starting at position 3533 of SEQ ID NO: 1883815
guccaaucagggugcauuu

SEQ ID NO: 2218275 - RNA, 19 nt, Artificial Sequence
  Description of Artificial Sequence: Synthetic oligonucleotide
  Antisense strand to SEQ ID NO: 2218274
aaaugcacccugauuggac

SEQ ID NO: 2218276 - RNA, 19 nt, Artificial Sequence
  Description of Artificial Sequence: Synthetic oligonucleotide
  Sense strand starting at position 1422 of SEQ ID NO: 1883815
cuuugcugugcugcuauaa

SEQ ID NO: 2218277 - RNA, 19 nt, Artificial Sequence
  Description of Artificial Sequence: Synthetic oligonucleotide
  Antisense strand to SEQ ID NO: 2218276
uuauagcagcacagcaaag

SEQ ID NO: 2218278 - RNA, 19 nt, Artificial Sequence
  Description of Artificial Sequence: Synthetic oligonucleotide
  Sense strand starting at position 2261 of SEQ ID NO: 1883815
gcuguauuggacuaugaag

SEQ ID NO: 2218279 - RNA, 19 nt, Artificial Sequence
  Description of Artificial Sequence: Synthetic oligonucleotide
  Antisense strand to SEQ ID NO: 2218278
cuucauaguccaauacagc

SEQ ID NO: 2218280 - RNA, 19 nt, Artificial Sequence
  Description of Artificial Sequence: Synthetic oligonucleotide
  Sense strand starting at position 3218 of SEQ ID NO: 1883815
ccugcuuuguauuucuaga

SEQ ID NO: 2218281 - RNA, 19 nt, Artificial Sequence
  Description of Artificial Sequence: Synthetic oligonucleotide
  Antisense strand to SEQ ID NO: 2218280
ucuagaaauacaaagcagg

SEQ ID NO: 2218282 - RNA, 19 nt, Artificial Sequence
  Description of Artificial Sequence: Synthetic oligonucleotide
  Sense strand starting at position 81 of SEQ ID NO: 1883815
ggagcugagauuggaucau

SEQ ID NO: 2218283 - RNA, 19 nt, Artificial Sequence
  Description of Artificial Sequence: Synthetic oligonucleotide
  Antisense strand to SEQ ID NO: 2218282
augauccaaucucagcucc

SEQ ID NO: 2218284 - RNA, 19 nt, Artificial Sequence
  Description of Artificial Sequence: Synthetic oligonucleotide
  Sense strand starting at position 1797 of SEQ ID NO: 1883815
acuucuuaccuggagcaau

SEQ ID NO: 2218285 - RNA, 19 nt, Artificial Sequence
  Description of Artificial Sequence: Synthetic oligonucleotide
  Antisense strand to SEQ ID NO: 2218284
auugcuccagguaagaagu

SEQ ID NO: 2218286 - RNA, 19 nt, Artificial Sequence
  Description of Artificial Sequence: Synthetic oligonucleotide
  Sense strand starting at position 3688 of SEQ ID NO: 1883815
acccaaugacuaugguuga

SEQ ID NO: 2218287 - RNA, 19 nt, Artificial Sequence
  Description of Artificial Sequence: Synthetic oligonucleotide
  Antisense strand to SEQ ID NO: 2218286
ucaaccauagucauugggu

SEQ ID NO: 2218288 - RNA, 19 nt, Artificial Sequence
  Description of Artificial Sequence: Synthetic oligonucleotide
  Sense strand starting at position 347 of SEQ ID NO: 1883815
ggaauugucuaucuuaagg

SEQ ID NO: 2218289 - RNA, 19 nt, Artificial Sequence
  Description of Artificial Sequence: Synthetic oligonucleotide
  Antisense strand to SEQ ID NO: 2218288
ccuuaagauagacaauucc

SEQ ID NO: 2218290 - RNA, 19 nt, Artificial Sequence
  Description of Artificial Sequence: Synthetic oligonucleotide
  Sense strand starting at position 2404 of SEQ ID NO: 1883815
ggcugauaaugugcuauuu

SEQ ID NO: 2218291 - RNA, 19 nt, Artificial Sequence
  Description of Artificial Sequence: Synthetic oligonucleotide
  Antisense strand to SEQ ID NO: 2218290
aaauagcacauuaucagcc

SEQ ID NO: 2218292 - RNA, 19 nt, Artificial Sequence
  Description of Artificial Sequence: Synthetic oligonucleotide
  Sense strand starting at position 328 of SEQ ID NO: 1883815
gguggaaagugacuacauu

SEQ ID NO: 2218293 - RNA, 19 nt, Artificial Sequence
  Description of Artificial Sequence: Synthetic oligonucleotide
  Antisense strand to SEQ ID NO: 2218292
aauguagucacuuuccacc

SEQ ID NO: 2218294 - RNA, 19 nt, Artificial Sequence
  Description of Artificial Sequence: Synthetic oligonucleotide
  Sense strand starting at position 93 of SEQ ID NO: 1883815
ggaucauauuggguuucag

SEQ ID NO: 2218295 - RNA, 19 nt, Artificial Sequence
  Description of Artificial Sequence: Synthetic oligonucleotide
  Antisense strand to SEQ ID NO: 2218294
cugaaacccaauaugaucc

SEQ ID NO: 2218296 - RNA, 19 nt, Artificial Sequence
  Description of Artificial Sequence: Synthetic oligonucleotide
  Sense strand starting at position 3980 of SEQ ID NO: 1883815
gguuaaauauauccuauug

SEQ ID NO: 2218297 - RNA, 19 nt, Artificial Sequence
  Description of Artificial Sequence: Synthetic oligonucleotide
  Antisense strand to SEQ ID NO: 2218296
caauaggauauauuuaacc

SEQ ID NO: 2218298 - RNA, 19 nt, Artificial Sequence
  Description of Artificial Sequence: Synthetic oligonucleotide
  Sense strand starting at position 2948 of SEQ ID NO: 1883815
ggaacugaaugccuacauu

SEQ ID NO: 2218299 - RNA, 19 nt, Artificial Sequence
  Description of Artificial Sequence: Synthetic oligonucleotide
  Antisense strand to SEQ ID NO: 2218298
aauguaggcauucaguucc

SEQ ID NO: 2218300 - RNA, 19 nt, Artificial Sequence
  Description of Artificial Sequence: Synthetic oligonucleotide
  Sense strand starting at position 2230 of SEQ ID NO: 1883815
gaauguaaauaguccuaug

SEQ ID NO: 2218301 - RNA, 19 nt, Artificial Sequence
  Description of Artificial Sequence: Synthetic oligonucleotide
  Antisense strand to SEQ ID NO: 2218300
cauaggacuauuuacauuc

SEQ ID NO: 2218302 - RNA, 19 nt, Artificial Sequence
  Description of Artificial Sequence: Synthetic oligonucleotide
  Sense strand starting at position 2734 of SEQ ID NO: 1883815
acaugaauucugugugaaa

SEQ ID NO: 2218303 - RNA, 19 nt, Artificial Sequence
  Description of Artificial Sequence: Synthetic oligonucleotide
  Antisense strand to SEQ ID NO: 2218302
uuucacacagaauucaugu

SEQ ID NO: 2218304 - RNA, 19 nt, Artificial Sequence
  Description of Artificial Sequence: Synthetic oligonucleotide
  Sense strand starting at position 1461 of SEQ ID NO: 1883815
ugacucauccgcuaagaug

SEQ ID NO: 2218305 - RNA, 19 nt, Artificial Sequence
  Description of Artificial Sequence: Synthetic oligonucleotide
  Antisense strand to SEQ ID NO: 2218304
caucuuagcggaugaguca

SEQ ID NO: 2218306 - RNA, 19 nt, Artificial Sequence
  Description of Artificial Sequence: Synthetic oligonucleotide
  Sense strand starting at position 302 of SEQ ID NO: 1883815
ggagaauggugguuacgag

SEQ ID NO: 2218307 - RNA, 19 nt, Artificial Sequence
  Description of Artificial Sequence: Synthetic oligonucleotide
  Antisense strand to SEQ ID NO: 2218306
cucguaaccaccauucucc

SEQ ID NO: 2218308 - RNA, 19 nt, Artificial Sequence
  Description of Artificial Sequence: Synthetic oligonucleotide
  Sense strand starting at position 2121 of SEQ ID NO: 1883815
caagaagacucauugugca

SEQ ID NO: 2218309 - RNA, 19 nt, Artificial Sequence
  Description of Artificial Sequence: Synthetic oligonucleotide
  Antisense strand to SEQ ID NO: 2218308
ugcacaaugagucuucuug

SEQ ID NO: 2218310 - RNA, 19 nt, Artificial Sequence
  Description of Artificial Sequence: Synthetic oligonucleotide
  Sense strand starting at position 2126 of SEQ ID NO: 1883815
agacucauugugcaaugua

SEQ ID NO: 2218311 - RNA, 19 nt, Artificial Sequence
  Description of Artificial Sequence: Synthetic oligonucleotide
  Antisense strand to SEQ ID NO: 2218310
uacauugcacaaugagucu

SEQ ID NO: 2218312 - RNA, 19 nt, Artificial Sequence
  Description of Artificial Sequence: Synthetic oligonucleotide
  Sense strand starting at position 2135 of SEQ ID NO: 1883815
gugcaauguauaggaacaa

SEQ ID NO: 2218313 - RNA, 19 nt, Artificial Sequence
  Description of Artificial Sequence: Synthetic oligonucleotide
  Antisense strand to SEQ ID NO: 2218312
uuguuccuauacauugcac

SEQ ID NO: 2218314 - RNA, 19 nt, Artificial Sequence
  Description of Artificial Sequence: Synthetic oligonucleotide
  Sense strand starting at position 2827 of SEQ ID NO: 1883815
augagugcugcugacaaca

SEQ ID NO: 2218315 - RNA, 19 nt, Artificial Sequence
  Description of Artificial Sequence: Synthetic oligonucleotide
  Antisense strand to SEQ ID NO: 2218314
uguugucagcagcacucau

SEQ ID NO: 2218316 - RNA, 19 nt, Artificial Sequence
  Description of Artificial Sequence: Synthetic oligonucleotide
  Sense strand starting at position 2014 of SEQ ID NO: 1883815
aaggaagccugccuuugaa

SEQ ID NO: 2218317 - RNA, 19 nt, Artificial Sequence
  Description of Artificial Sequence: Synthetic oligonucleotide
  Antisense strand to SEQ ID NO: 2218316
uucaaaggcaggcuuccuu

SEQ ID NO: 2218318 - RNA, 19 nt, Artificial Sequence
  Description of Artificial Sequence: Synthetic oligonucleotide
  Sense strand starting at position 3938 of SEQ ID NO: 1883815
uucugaacucccugguaac

SEQ ID NO: 2218319 - RNA, 19 nt, Artificial Sequence
  Description of Artificial Sequence: Synthetic oligonucleotide
  Antisense strand to SEQ ID NO: 2218318
guuaccagggaguucagaa

SEQ ID NO: 2218320 - RNA, 19 nt, Artificial Sequence
  Description of Artificial Sequence: Synthetic oligonucleotide
  Sense strand starting at position 2235 of SEQ ID NO: 1883815
uaaauaguccuauggagcu

SEQ ID NO: 2218321 - RNA, 19 nt, Artificial Sequence
  Description of Artificial Sequence: Synthetic oligonucleotide
  Antisense strand to SEQ ID NO: 2218320
agcuccauaggacuauuua

SEQ ID NO: 2218322 - RNA, 19 nt, Artificial Sequence
  Description of Artificial Sequence: Synthetic oligonucleotide
  Sense strand starting at position 231 of SEQ ID NO: 1883815
guagaaugguaugcagauc

SEQ ID NO: 2218323 - RNA, 19 nt, Artificial Sequence
  Description of Artificial Sequence: Synthetic oligonucleotide
  Antisense strand to SEQ ID NO: 2218322
gaucugcauaccauucuac

SEQ ID NO: 2218324 - RNA, 19 nt, Artificial Sequence
  Description of Artificial Sequence: Synthetic oligonucleotide
  Sense strand starting at position 2550 of SEQ ID NO: 1883815
cugcaugucauuggacaga

SEQ ID NO: 2218325 - RNA, 19 nt, Artificial Sequence
  Description of Artificial Sequence: Synthetic oligonucleotide
  Antisense strand to SEQ ID NO: 2218324
ucuguccaaugacaugcag

SEQ ID NO: 2218326 - RNA, 19 nt, Artificial Sequence
  Description of Artificial Sequence: Synthetic oligonucleotide
  Sense strand starting at position 3717 of SEQ ID NO: 1883815
guugauccuuuacuaucau

SEQ ID NO: 2218327 - RNA, 19 nt, Artificial Sequence
  Description of Artificial Sequence: Synthetic oligonucleotide
  Antisense strand to SEQ ID NO: 2218326
augauaguaaaggaucaac

SEQ ID NO: 2218328 - RNA, 19 nt, Artificial Sequence
  Description of Artificial Sequence: Synthetic oligonucleotide
  Sense strand starting at position 1049 of SEQ ID NO: 1883815
agaaguuaugcaggcauga

SEQ ID NO: 2218329 - RNA, 19 nt, Artificial Sequence
  Description of Artificial Sequence: Synthetic oligonucleotide
  Antisense strand to SEQ ID NO: 2218328
ucaugccugcauaacuucu

SEQ ID NO: 2218330 - RNA, 19 nt, Artificial Sequence
  Description of Artificial Sequence: Synthetic oligonucleotide
  Sense strand starting at position 1638 of SEQ ID NO: 1883815
cgauuucucugacagaaug

SEQ ID NO: 2218331 - RNA, 19 nt, Artificial Sequence
  Description of Artificial Sequence: Synthetic oligonucleotide
  Antisense strand to SEQ ID NO: 2218330
cauucugucagagaaaucg

SEQ ID NO: 2218332 - RNA, 19 nt, Artificial Sequence
  Description of Artificial Sequence: Synthetic oligonucleotide
  Sense strand starting at position 230 of SEQ ID NO: 1883815
uguagaaugguaugcagau

SEQ ID NO: 2218333 - RNA, 19 nt, Artificial Sequence
  Description of Artificial Sequence: Synthetic oligonucleotide
  Antisense strand to SEQ ID NO: 2218332
aucugcauaccauucuaca

SEQ ID NO: 2218334 - RNA, 19 nt, Artificial Sequence
  Description of Artificial Sequence: Synthetic oligonucleotide
  Sense strand starting at position 3213 of SEQ ID NO: 1883815
gcacuccugcuuuguauuu

SEQ ID NO: 2218335 - RNA, 19 nt, Artificial Sequence
  Description of Artificial Sequence: Synthetic oligonucleotide
  Antisense strand to SEQ ID NO: 2218334
aaauacaaagcaggagugc

SEQ ID NO: 2218336 - RNA, 19 nt, Artificial Sequence
  Description of Artificial Sequence: Synthetic oligonucleotide
  Sense strand starting at position 3703 of SEQ ID NO: 1883815
uugauuuccuaacaguuga

SEQ ID NO: 2218337 - RNA, 19 nt, Artificial Sequence
  Description of Artificial Sequence: Synthetic oligonucleotide
  Antisense strand to SEQ ID NO: 2218336
ucaacuguuaggaaaucaa

SEQ ID NO: 2218338 - RNA, 19 nt, Artificial Sequence
  Description of Artificial Sequence: Synthetic oligonucleotide
  Sense strand starting at position 1636 of SEQ ID NO: 1883815
uccgauuucucugacagaa

SEQ ID NO: 2218339 - RNA, 19 nt, Artificial Sequence
  Description of Artificial Sequence: Synthetic oligonucleotide
  Antisense strand to SEQ ID NO: 2218338
uucugucagagaaaucgga

SEQ ID NO: 2218340 - RNA, 19 nt, Artificial Sequence
  Description of Artificial Sequence: Synthetic oligonucleotide
  Sense strand starting at position 2804 of SEQ ID NO: 1883815
auggaauaaacguguuagu

SEQ ID NO: 2218341 - RNA, 19 nt, Artificial Sequence
  Description of Artificial Sequence: Synthetic oligonucleotide
  Antisense strand to SEQ ID NO: 2218340
acuaacacguuuauuccau

SEQ ID NO: 2218342 - RNA, 19 nt, Artificial Sequence
  Description of Artificial Sequence: Synthetic oligonucleotide
  Sense strand starting at position 1459 of SEQ ID NO: 1883815
agugacucauccgcuaaga

SEQ ID NO: 2218343 - RNA, 19 nt, Artificial Sequence
  Description of Artificial Sequence: Synthetic oligonucleotide
  Antisense strand to SEQ ID NO: 2218342
ucuuagcggaugagucacu

SEQ ID NO: 2218344 - RNA, 19 nt, Artificial Sequence
  Description of Artificial Sequence: Synthetic oligonucleotide
  Sense strand starting at position 2954 of SEQ ID NO: 1883816
gggaaucugguguacuuaa

SEQ ID NO: 2218345 - RNA, 19 nt, Artificial Sequence
  Description of Artificial Sequence: Synthetic oligonucleotide
  Antisense strand to SEQ ID NO: 2218344
uuaaguacaccagauuccc

SEQ ID NO: 2218346 - RNA, 19 nt, Artificial Sequence
  Description of Artificial Sequence: Synthetic oligonucleotide
  Sense strand starting at position 103 of SEQ ID NO: 1883816
aggcuugcacaagaauuga

SEQ ID NO: 2218347 - RNA, 19 nt, Artificial Sequence
  Description of Artificial Sequence: Synthetic oligonucleotide
  Antisense strand to SEQ ID NO: 2218346
ucaauucuugugcaagccu

SEQ ID NO: 2218348 - RNA, 19 nt, Artificial Sequence
  Description of Artificial Sequence: Synthetic oligonucleotide
  Sense strand starting at position 229 of SEQ ID NO: 1883816
cuaaacuucguuuagagag

SEQ ID NO: 2218349 - RNA, 19 nt, Artificial Sequence
  Description of Artificial Sequence: Synthetic oligonucleotide
  Antisense strand to SEQ ID NO: 2218348
cucucuaaacgaaguuuag

SEQ ID NO: 2218350 - RNA, 19 nt, Artificial Sequence
  Description of Artificial Sequence: Synthetic oligonucleotide
  Sense strand starting at position 3434 of SEQ ID NO: 1883816
gggcucguucuccuuguau

SEQ ID NO: 2218351 - RNA, 19 nt, Artificial Sequence
  Description of Artificial Sequence: Synthetic oligonucleotide
  Antisense strand to SEQ ID NO: 2218350
auacaaggagaacgagccc

SEQ ID NO: 2218352 - RNA, 19 nt, Artificial Sequence
  Description of Artificial Sequence: Synthetic oligonucleotide
  Sense strand starting at position 386 of SEQ ID NO: 1883816
cuggaucauuaagucaaau

SEQ ID NO: 2218353 - RNA, 19 nt, Artificial Sequence
  Description of Artificial Sequence: Synthetic oligonucleotide
  Antisense strand to SEQ ID NO: 2218352
auuugacuuaaugauccag

SEQ ID NO: 2218354 - RNA, 19 nt, Artificial Sequence
  Description of Artificial Sequence: Synthetic oligonucleotide
  Sense strand starting at position 3503 of SEQ ID NO: 1883816
agugacuuaacagagugua

SEQ ID NO: 2218355 - RNA, 19 nt, Artificial Sequence
  Description of Artificial Sequence: Synthetic oligonucleotide
  Antisense strand to SEQ ID NO: 2218354
uacacucuguuaagucacu

SEQ ID NO: 2218356 - RNA, 19 nt, Artificial Sequence
  Description of Artificial Sequence: Synthetic oligonucleotide
  Sense strand starting at position 1481 of SEQ ID NO: 1883816
agagaagccuuuccaauga

SEQ ID NO: 2218357 - RNA, 19 nt, Artificial Sequence
  Description of Artificial Sequence: Synthetic oligonucleotide
  Antisense strand to SEQ ID NO: 2218356
ucauuggaaaggcuucucu

SEQ ID NO: 2218358 - RNA, 19 nt, Artificial Sequence
  Description of Artificial Sequence: Synthetic oligonucleotide
  Sense strand starting at position 1065 of SEQ ID NO: 1883816
ucucuuaggagaugaguga

SEQ ID NO: 2218359 - RNA, 19 nt, Artificial Sequence
  Description of Artificial Sequence: Synthetic oligonucleotide
  Antisense strand to SEQ ID NO: 2218358
ucacucaucuccuaagaga

SEQ ID NO: 2218360 - RNA, 19 nt, Artificial Sequence
  Description of Artificial Sequence: Synthetic oligonucleotide
  Sense strand starting at position 3597 of SEQ ID NO: 1883816
gcuacaaauguggacuuua

SEQ ID NO: 2218361 - RNA, 19 nt, Artificial Sequence
  Description of Artificial Sequence: Synthetic oligonucleotide
  Antisense strand to SEQ ID NO: 2218360
uaaaguccacauuuguagc

SEQ ID NO: 2218362 - RNA, 19 nt, Artificial Sequence
  Description of Artificial Sequence: Synthetic oligonucleotide
  Sense strand starting at position 446 of SEQ ID NO: 1883816
ggagucugcagggauaagu

SEQ ID NO: 2218363 - RNA, 19 nt, Artificial Sequence
  Description of Artificial Sequence: Synthetic oligonucleotide
  Antisense strand to SEQ ID NO: 2218362
acuuaucccugcagacucc

SEQ ID NO: 2218364 - RNA, 19 nt, Artificial Sequence
  Description of Artificial Sequence: Synthetic oligonucleotide
  Sense strand starting at position 3498 of SEQ ID NO: 1883816
gugccagugacuuaacaga

SEQ ID NO: 2218365 - RNA, 19 nt, Artificial Sequence
  Description of Artificial Sequence: Synthetic oligonucleotide
  Antisense strand to SEQ ID NO: 2218364
ucuguuaagucacuggcac

SEQ ID NO: 2218366 - RNA, 19 nt, Artificial Sequence
  Description of Artificial Sequence: Synthetic oligonucleotide
  Sense strand starting at position 227 of SEQ ID NO: 1883816
aacuaaacuucguuuagag

SEQ ID NO: 2218367 - RNA, 19 nt, Artificial Sequence
  Description of Artificial Sequence: Synthetic oligonucleotide
  Antisense strand to SEQ ID NO: 2218366
cucuaaacgaaguuuaguu

SEQ ID NO: 2218368 - RNA, 19 nt, Artificial Sequence
  Description of Artificial Sequence: Synthetic oligonucleotide
  Sense strand starting at position 700 of SEQ ID NO: 1883816
gguuguguggaugaagagu

SEQ ID NO: 2218369 - RNA, 19 nt, Artificial Sequence
  Description of Artificial Sequence: Synthetic oligonucleotide
  Antisense strand to SEQ ID NO: 2218368
acucuucauccacacaacc

SEQ ID NO: 2218370 - RNA, 19 nt, Artificial Sequence
  Description of Artificial Sequence: Synthetic oligonucleotide
  Sense strand starting at position 3549 of SEQ ID NO: 1883816
cuaguaacugcuuaugacu

SEQ ID NO: 2218371 - RNA, 19 nt, Artificial Sequence
  Description of Artificial Sequence: Synthetic oligonucleotide
  Antisense strand to SEQ ID NO: 2218370
agucauaagcaguuacuag

SEQ ID NO: 2218372 - RNA, 19 nt, Artificial Sequence
  Description of Artificial Sequence: Synthetic oligonucleotide
  Sense strand starting at position 1287 of SEQ ID NO: 1883816
gucagugguccagauucag

SEQ ID NO: 2218373 - RNA, 19 nt, Artificial Sequence
  Description of Artificial Sequence: Synthetic oligonucleotide
  Antisense strand to SEQ ID NO: 2218372
cugaaucuggaccacugac

SEQ ID NO: 2218374 - RNA, 19 nt, Artificial Sequence
  Description of Artificial Sequence: Synthetic oligonucleotide
  Sense strand starting at position 1285 of SEQ ID NO: 1883816
gggucagugguccagauuc

SEQ ID NO: 2218375 - RNA, 19 nt, Artificial Sequence
  Description of Artificial Sequence: Synthetic oligonucleotide
  Antisense strand to SEQ ID NO: 2218374
gaaucuggaccacugaccc

SEQ ID NO: 2218376 - RNA, 19 nt, Artificial Sequence
  Description of Artificial Sequence: Synthetic oligonucleotide
  Sense strand starting at position 3941 of SEQ ID NO: 1883816
ccgugucugacuuauggaa

SEQ ID NO: 2218377 - RNA, 19 nt, Artificial Sequence
  Description of Artificial Sequence: Synthetic oligonucleotide
  Antisense strand to SEQ ID NO: 2218376
uuccauaagucagacacgg

SEQ ID NO: 2218378 - RNA, 19 nt, Artificial Sequence
  Description of Artificial Sequence: Synthetic oligonucleotide
  Sense strand starting at position 86 of SEQ ID NO: 1883816
ggguaaaccucguuugaag

SEQ ID NO: 2218379 - RNA, 19 nt, Artificial Sequence
  Description of Artificial Sequence: Synthetic oligonucleotide
  Antisense strand to SEQ ID NO: 2218378
cuucaaacgagguuuaccc

SEQ ID NO: 2218380 - RNA, 19 nt, Artificial Sequence
  Description of Artificial Sequence: Synthetic oligonucleotide
  Sense strand starting at position 3259 of SEQ ID NO: 1883816
uccagauaguaguuccauu

SEQ ID NO: 2218381 - RNA, 19 nt, Artificial Sequence
  Description of Artificial Sequence: Synthetic oligonucleotide
  Antisense strand to SEQ ID NO: 2218380
aauggaacuacuaucugga

SEQ ID NO: 2218382 - RNA, 19 nt, Artificial Sequence
  Description of Artificial Sequence: Synthetic oligonucleotide
  Sense strand starting at position 84 of SEQ ID NO: 1883816
gaggguaaaccucguuuga

SEQ ID NO: 2218383 - RNA, 19 nt, Artificial Sequence
  Description of Artificial Sequence: Synthetic oligonucleotide
  Antisense strand to SEQ ID NO: 2218382
ucaaacgagguuuacccuc

SEQ ID NO: 2218384 - RNA, 19 nt, Artificial Sequence
  Description of Artificial Sequence: Synthetic oligonucleotide
  Sense strand starting at position 3569 of SEQ ID NO: 1883816
gaaauagguuugcuguuaa

SEQ ID NO: 2218385 - RNA, 19 nt, Artificial Sequence
  Description of Artificial Sequence: Synthetic oligonucleotide
  Antisense strand to SEQ ID NO: 2218384
uuaacagcaaaccuauuuc

SEQ ID NO: 2218386 - RNA, 19 nt, Artificial Sequence
  Description of Artificial Sequence: Synthetic oligonucleotide
  Sense strand starting at position 3506 of SEQ ID NO: 1883816
gacuuaacagaguguagcu

SEQ ID NO: 2218387 - RNA, 19 nt, Artificial Sequence
  Description of Artificial Sequence: Synthetic oligonucleotide
  Antisense strand to SEQ ID NO: 2218386
agcuacacucuguuaaguc

SEQ ID NO: 2218388 - RNA, 19 nt, Artificial Sequence
  Description of Artificial Sequence: Synthetic oligonucleotide
  Sense strand starting at position 377 of SEQ ID NO: 1883816
gucagcaugcuggaucauu

SEQ ID NO: 2218389 - RNA, 19 nt, Artificial Sequence
  Description of Artificial Sequence: Synthetic oligonucleotide
  Antisense strand to SEQ ID NO: 2218388
aaugauccagcaugcugac

SEQ ID NO: 2218390 - RNA, 19 nt, Artificial Sequence
  Description of Artificial Sequence: Synthetic oligonucleotide
  Sense strand starting at position 3105 of SEQ ID NO: 1883816
uuauguggguguguagaaa

SEQ ID NO: 2218391 - RNA, 19 nt, Artificial Sequence
  Description of Artificial Sequence: Synthetic oligonucleotide
  Antisense strand to SEQ ID NO: 2218390
uuucuacacacccacauaa

SEQ ID NO: 2218392 - RNA, 19 nt, Artificial Sequence
  Description of Artificial Sequence: Synthetic oligonucleotide
  Sense strand starting at position 3568 of SEQ ID NO: 1883816
ugaaauagguuugcuguua

SEQ ID NO: 2218393 - RNA, 19 nt, Artificial Sequence
  Description of Artificial Sequence: Synthetic oligonucleotide
  Antisense strand to SEQ ID NO: 2218392
uaacagcaaaccuauuuca

SEQ ID NO: 2218394 - RNA, 19 nt, Artificial Sequence
  Description of Artificial Sequence: Synthetic oligonucleotide
  Sense strand starting at position 403 of SEQ ID NO: 1883816
aucuaagggugucuguuua

SEQ ID NO: 2218395 - RNA, 19 nt, Artificial Sequence
  Description of Artificial Sequence: Synthetic oligonucleotide
  Antisense strand to SEQ ID NO: 2218394
uaaacagacacccuuagau

SEQ ID NO: 2218396 - RNA, 19 nt, Artificial Sequence
  Description of Artificial Sequence: Synthetic oligonucleotide
  Sense strand starting at position 3609 of SEQ ID NO: 1883816
gacuuuauccuuuggugua

SEQ ID NO: 2218397 - RNA, 19 nt, Artificial Sequence
  Description of Artificial Sequence: Synthetic oligonucleotide
  Antisense strand to SEQ ID NO: 2218396
uacaccaaaggauaaaguc

SEQ ID NO: 2218398 - RNA, 19 nt, Artificial Sequence
  Description of Artificial Sequence: Synthetic oligonucleotide
  Sense strand starting at position 1413 of SEQ ID NO: 1883816
acagcaauuccgugggauc

SEQ ID NO: 2218399 - RNA, 19 nt, Artificial Sequence
  Description of Artificial Sequence: Synthetic oligonucleotide
  Antisense strand to SEQ ID NO: 2218398
gaucccacggaauugcugu

SEQ ID NO: 2218400 - RNA, 19 nt, Artificial Sequence
  Description of Artificial Sequence: Synthetic oligonucleotide
  Sense strand starting at position 2913 of SEQ ID NO: 1883816
agaccuucccguggcagaa

SEQ ID NO: 2218401 - RNA, 19 nt, Artificial Sequence
  Description of Artificial Sequence: Synthetic oligonucleotide
  Antisense strand to SEQ ID NO: 2218400
uucugccacgggaaggucu

SEQ ID NO: 2218402 - RNA, 19 nt, Artificial Sequence
  Description of Artificial Sequence: Synthetic oligonucleotide
  Sense strand starting at position 2912 of SEQ ID NO: 1883816
gagaccuucccguggcaga

SEQ ID NO: 2218403 - RNA, 19 nt, Artificial Sequence
  Description of Artificial Sequence: Synthetic oligonucleotide
  Antisense strand to SEQ ID NO: 2218402
ucugccacgggaaggucuc

SEQ ID NO: 2218404 - RNA, 19 nt, Artificial Sequence
  Description of Artificial Sequence: Synthetic oligonucleotide
  Sense strand starting at position 1056 of SEQ ID NO: 1883816
gggugugcaucucuuagga

SEQ ID NO: 2218405 - RNA, 19 nt, Artificial Sequence
  Description of Artificial Sequence: Synthetic oligonucleotide
  Antisense strand to SEQ ID NO: 2218404
uccuaagagaugcacaccc

SEQ ID NO: 2218406 - RNA, 19 nt, Artificial Sequence
  Description of Artificial Sequence: Synthetic oligonucleotide
  Sense strand starting at position 963 of SEQ ID NO: 1883816
aagcacgcucccuauagua

SEQ ID NO: 2218407 - RNA, 19 nt, Artificial Sequence
  Description of Artificial Sequence: Synthetic oligonucleotide
  Antisense strand to SEQ ID NO: 2218406
uacuauagggagcgugcuu

SEQ ID NO: 2218408 - RNA, 19 nt, Artificial Sequence
  Description of Artificial Sequence: Synthetic oligonucleotide
  Sense strand starting at position 735 of SEQ ID NO: 1883816
ggaugcuugucuagggaag

SEQ ID NO: 2218409 - RNA, 19 nt, Artificial Sequence
  Description of Artificial Sequence: Synthetic oligonucleotide
  Antisense strand to SEQ ID NO: 2218408
cuucccuagacaagcaucc

SEQ ID NO: 2218410 - RNA, 19 nt, Artificial Sequence
  Description of Artificial Sequence: Synthetic oligonucleotide
  Sense strand starting at position 2928 of SEQ ID NO: 1883816
agaaucaaagcucguaguu

SEQ ID NO: 2218411 - RNA, 19 nt, Artificial Sequence
  Description of Artificial Sequence: Synthetic oligonucleotide
  Antisense strand to SEQ ID NO: 2218410
aacuacgagcuuugauucu

SEQ ID NO: 2218412 - RNA, 19 nt, Artificial Sequence
  Description of Artificial Sequence: Synthetic oligonucleotide
  Sense strand starting at position 1283 of SEQ ID NO: 1883816
gugggucagugguccagau

SEQ ID NO: 2218413 - RNA, 19 nt, Artificial Sequence
  Description of Artificial Sequence: Synthetic oligonucleotide
  Antisense strand to SEQ ID NO: 2218412
aucuggaccacugacccac

SEQ ID NO: 2218414 - RNA, 19 nt, Artificial Sequence
  Description of Artificial Sequence: Synthetic oligonucleotide
  Sense strand starting at position 3436 of SEQ ID NO: 1883816
gcucguucuccuuguauuu

SEQ ID NO: 2218415 - RNA, 19 nt, Artificial Sequence
  Description of Artificial Sequence: Synthetic oligonucleotide
  Antisense strand to SEQ ID NO: 2218414
aaauacaaggagaacgagc

SEQ ID NO: 2218416 - RNA, 19 nt, Artificial Sequence
  Description of Artificial Sequence: Synthetic oligonucleotide
  Sense strand starting at position 407 of SEQ ID NO: 1883816
aagggugucuguuuaccuu

SEQ ID NO: 2218417 - RNA, 19 nt, Artificial Sequence
  Description of Artificial Sequence: Synthetic oligonucleotide
  Antisense strand to SEQ ID NO: 2218416
aagguaaacagacacccuu

SEQ ID NO: 2218418 - RNA, 19 nt, Artificial Sequence
  Description of Artificial Sequence: Synthetic oligonucleotide
  Sense strand starting at position 3567 of SEQ ID NO: 1883816
uugaaauagguuugcuguu

SEQ ID NO: 2218419 - RNA, 19 nt, Artificial Sequence
  Description of Artificial Sequence: Synthetic oligonucleotide
  Antisense strand to SEQ ID NO: 2218418
aacagcaaaccuauuucaa

SEQ ID NO: 2218420 - RNA, 19 nt, Artificial Sequence
  Description of Artificial Sequence: Synthetic oligonucleotide
  Sense strand starting at position 976 of SEQ ID NO: 1883816
auaguauuaucacugcugu

SEQ ID NO: 2218421 - RNA, 19 nt, Artificial Sequence
  Description of Artificial Sequence: Synthetic oligonucleotide
  Antisense strand to SEQ ID NO: 2218420
acagcagugauaauacuau

SEQ ID NO: 2218422 - RNA, 19 nt, Artificial Sequence
  Description of Artificial Sequence: Synthetic oligonucleotide
  Sense strand starting at position 2585 of SEQ ID NO: 1883816
ucacuucucgccugaaacc

SEQ ID NO: 2218423 - RNA, 19 nt, Artificial Sequence
  Description of Artificial Sequence: Synthetic oligonucleotide
  Antisense strand to SEQ ID NO: 2218422
gguuucaggcgagaaguga

SEQ ID NO: 2218424 - RNA, 19 nt, Artificial Sequence
  Description of Artificial Sequence: Synthetic oligonucleotide
  Sense strand starting at position 1086 of SEQ ID NO: 1883817
augcucuguguugcauauu

SEQ ID NO: 2218425 - RNA, 19 nt, Artificial Sequence
  Description of Artificial Sequence: Synthetic oligonucleotide
  Antisense strand to SEQ ID NO: 2218424
aauaugcaacacagagcau

SEQ ID NO: 2218426 - RNA, 19 nt, Artificial Sequence
  Description of Artificial Sequence: Synthetic oligonucleotide
  Sense strand starting at position 3019 of SEQ ID NO: 1883817
ucgauaugggaucaguaug

SEQ ID NO: 2218427 - RNA, 19 nt, Artificial Sequence
  Description of Artificial Sequence: Synthetic oligonucleotide
  Antisense strand to SEQ ID NO: 2218426
cauacugaucccauaucga

SEQ ID NO: 2218428 - RNA, 19 nt, Artificial Sequence
  Description of Artificial Sequence: Synthetic oligonucleotide
  Sense strand starting at position 958 of SEQ ID NO: 1883817
agugacauuucugcgauua

SEQ ID NO: 2218429 - RNA, 19 nt, Artificial Sequence
  Description of Artificial Sequence: Synthetic oligonucleotide
  Antisense strand to SEQ ID NO: 2218428
uaaucgcagaaaugucacu

SEQ ID NO: 2218430 - RNA, 19 nt, Artificial Sequence
  Description of Artificial Sequence: Synthetic oligonucleotide
  Sense strand starting at position 1069 of SEQ ID NO: 1883817
accagaugguaccuggaau

SEQ ID NO: 2218431 - RNA, 19 nt, Artificial Sequence
  Description of Artificial Sequence: Synthetic oligonucleotide
  Antisense strand to SEQ ID NO: 2218430
auuccagguaccaucuggu

SEQ ID NO: 2218432 - RNA, 19 nt, Artificial Sequence
  Description of Artificial Sequence: Synthetic oligonucleotide
  Sense strand starting at position 160 of SEQ ID NO: 1883817
ggucacguugucuuugcaa

SEQ ID NO: 2218433 - RNA, 19 nt, Artificial Sequence
  Description of Artificial Sequence: Synthetic oligonucleotide
  Antisense strand to SEQ ID NO: 2218432
uugcaaagacaacgugacc

SEQ ID NO: 2218434 - RNA, 19 nt, Artificial Sequence
  Description of Artificial Sequence: Synthetic oligonucleotide
  Sense strand starting at position 3130 of SEQ ID NO: 1883817
aagggugguuaucuagaaa

SEQ ID NO: 2218435 - RNA, 19 nt, Artificial Sequence
  Description of Artificial Sequence: Synthetic oligonucleotide
  Antisense strand to SEQ ID NO: 2218434
uuucuagauaaccacccuu

SEQ ID NO: 2218436 - RNA, 19 nt, Artificial Sequence
  Description of Artificial Sequence: Synthetic oligonucleotide
  Sense strand starting at position 573 of SEQ ID NO: 1883817
gagagaauaugagucaguc

SEQ ID NO: 2218437 - RNA, 19 nt, Artificial Sequence
  Description of Artificial Sequence: Synthetic oligonucleotide
  Antisense strand to SEQ ID NO: 2218436
gacugacucauauucucuc

SEQ ID NO: 2218438 - RNA, 19 nt, Artificial Sequence
  Description of Artificial Sequence: Synthetic oligonucleotide
  Sense strand starting at position 959 of SEQ ID NO: 1883817
gugacauuucugcgauuag

SEQ ID NO: 2218439 - RNA, 19 nt, Artificial Sequence
  Description of Artificial Sequence: Synthetic oligonucleotide
  Antisense strand to SEQ ID NO: 2218438
cuaaucgcagaaaugucac

SEQ ID NO: 2218440 - RNA, 19 nt, Artificial Sequence
  Description of Artificial Sequence: Synthetic oligonucleotide
  Sense strand starting at position 971 of SEQ ID NO: 1883817
cgauuagaucauugacaua

SEQ ID NO: 2218441 - RNA, 19 nt, Artificial Sequence
  Description of Artificial Sequence: Synthetic oligonucleotide
  Antisense strand to SEQ ID NO: 2218440
uaugucaaugaucuaaucg

SEQ ID NO: 2218442 - RNA, 19 nt, Artificial Sequence
  Description of Artificial Sequence: Synthetic oligonucleotide
  Sense strand starting at position 363 of SEQ ID NO: 1883817
guauguaaugacugaggga

SEQ ID NO: 2218443 - RNA, 19 nt, Artificial Sequence
  Description of Artificial Sequence: Synthetic oligonucleotide
  Antisense strand to SEQ ID NO: 2218442
ucccucagucauuacauac

SEQ ID NO: 2218444 - RNA, 19 nt, Artificial Sequence
  Description of Artificial Sequence: Synthetic oligonucleotide
  Sense strand starting at position 2712 of SEQ ID NO: 1883817
gccuguguggaauagaaag

SEQ ID NO: 2218445 - RNA, 19 nt, Artificial Sequence
  Description of Artificial Sequence: Synthetic oligonucleotide
  Antisense strand to SEQ ID NO: 2218444
cuuucuauuccacacaggc

SEQ ID NO: 2218446 - RNA, 19 nt, Artificial Sequence
  Description of Artificial Sequence: Synthetic oligonucleotide
  Sense strand starting at position 3008 of SEQ ID NO: 1883817
cuuagaagacuucgauaug

SEQ ID NO: 2218447 - RNA, 19 nt, Artificial Sequence
  Description of Artificial Sequence: Synthetic oligonucleotide
  Antisense strand to SEQ ID NO: 2218446
cauaucgaagucuucuaag

SEQ ID NO: 2218448 - RNA, 19 nt, Artificial Sequence
  Description of Artificial Sequence: Synthetic oligonucleotide
  Sense strand starting at position 300 of SEQ ID NO: 1883817
uauuauugugacuagcaag

SEQ ID NO: 2218449 - RNA, 19 nt, Artificial Sequence
  Description of Artificial Sequence: Synthetic oligonucleotide
  Antisense strand to SEQ ID NO: 2218448
cuugcuagucacaauaaua

SEQ ID NO: 2218450 - RNA, 19 nt, Artificial Sequence
  Description of Artificial Sequence: Synthetic oligonucleotide
  Sense strand starting at position 1181 of SEQ ID NO: 1883817
gagcauuuguugccuauag

SEQ ID NO: 2218451 - RNA, 19 nt, Artificial Sequence
  Description of Artificial Sequence: Synthetic oligonucleotide
  Antisense strand to SEQ ID NO: 2218450
cuauaggcaacaaaugcuc

SEQ ID NO: 2218452 - RNA, 19 nt, Artificial Sequence
  Description of Artificial Sequence: Synthetic oligonucleotide
  Sense strand starting at position 1202 of SEQ ID NO: 1883817
guaugcucugaugagacau

SEQ ID NO: 2218453 - RNA, 19 nt, Artificial Sequence
  Description of Artificial Sequence: Synthetic oligonucleotide
  Antisense strand to SEQ ID NO: 2218452
augucucaucagagcauac

SEQ ID NO: 2218454 - RNA, 19 nt, Artificial Sequence
  Description of Artificial Sequence: Synthetic oligonucleotide
  Sense strand starting at position 3315 of SEQ ID NO: 1883817
guuaauaaggaugguuuga

SEQ ID NO: 2218455 - RNA, 19 nt, Artificial Sequence
  Description of Artificial Sequence: Synthetic oligonucleotide
  Antisense strand to SEQ ID NO: 2218454
ucaaaccauccuuauuaac

SEQ ID NO: 2218456 - RNA, 19 nt, Artificial Sequence
  Description of Artificial Sequence: Synthetic oligonucleotide
  Sense strand starting at position 577 of SEQ ID NO: 1883817
gaauaugagucagucauca

SEQ ID NO: 2218457 - RNA, 19 nt, Artificial Sequence
  Description of Artificial Sequence: Synthetic oligonucleotide
  Antisense strand to SEQ ID NO: 2218456
ugaugacugacucauauuc

SEQ ID NO: 2218458 - RNA, 19 nt, Artificial Sequence
  Description of Artificial Sequence: Synthetic oligonucleotide
  Sense strand starting at position 921 of SEQ ID NO: 1883817
accuauagugacuaagcuu

SEQ ID NO: 2218459 - RNA, 19 nt, Artificial Sequence
  Description of Artificial Sequence: Synthetic oligonucleotide
  Antisense strand to SEQ ID NO: 2218458
aagcuuagucacuauaggu

SEQ ID NO: 2218460 - RNA, 19 nt, Artificial Sequence
  Description of Artificial Sequence: Synthetic oligonucleotide
  Sense strand starting at position 951 of SEQ ID NO: 1883817
gggagaaagugacauuucu

SEQ ID NO: 2218461 - RNA, 19 nt, Artificial Sequence
  Description of Artificial Sequence: Synthetic oligonucleotide
  Antisense strand to SEQ ID NO: 2218460
agaaaugucacuuucuccc

SEQ ID NO: 2218462 - RNA, 19 nt, Artificial Sequence
  Description of Artificial Sequence: Synthetic oligonucleotide
  Sense strand starting at position 388 of SEQ ID NO: 1883817
gaaacagagcggcaucauu

SEQ ID NO: 2218463 - RNA, 19 nt, Artificial Sequence
  Description of Artificial Sequence: Synthetic oligonucleotide
  Antisense strand to SEQ ID NO: 2218462
aaugaugccgcucuguuuc

SEQ ID NO: 2218464 - RNA, 19 nt, Artificial Sequence
  Description of Artificial Sequence: Synthetic oligonucleotide
  Sense strand starting at position 3430 of SEQ ID NO: 1883817
ugaacuuaauuuggagaga

SEQ ID NO: 2218465 - RNA, 19 nt, Artificial Sequence
  Description of Artificial Sequence: Synthetic oligonucleotide
  Antisense strand to SEQ ID NO: 2218464
ucucuccaaauuaaguuca

SEQ ID NO: 2218466 - RNA, 19 nt, Artificial Sequence
  Description of Artificial Sequence: Synthetic oligonucleotide
  Sense strand starting at position 532 of SEQ ID NO: 1883817
guguguauuugugcagaaa

SEQ ID NO: 2218467 - RNA, 19 nt, Artificial Sequence
  Description of Artificial Sequence: Synthetic oligonucleotide
  Antisense strand to SEQ ID NO: 2218466
uuucugcacaaauacacac

SEQ ID NO: 2218468 - RNA, 19 nt, Artificial Sequence
  Description of Artificial Sequence: Synthetic oligonucleotide
  Sense strand starting at position 2739 of SEQ ID NO: 1883817
uuauuugacugguaggaaa

SEQ ID NO: 2218469 - RNA, 19 nt, Artificial Sequence
  Description of Artificial Sequence: Synthetic oligonucleotide
  Antisense strand to SEQ ID NO: 2218468
uuuccuaccagucaaauaa

SEQ ID NO: 2218470 - RNA, 19 nt, Artificial Sequence
  Description of Artificial Sequence: Synthetic oligonucleotide
  Sense strand starting at position 523 of SEQ ID NO: 1883817
gagugagugguguguauuu

SEQ ID NO: 2218471 - RNA, 19 nt, Artificial Sequence
  Description of Artificial Sequence: Synthetic oligonucleotide
  Antisense strand to SEQ ID NO: 2218470
aaauacacaccacucacuc

SEQ ID NO: 2218472 - RNA, 19 nt, Artificial Sequence
  Description of Artificial Sequence: Synthetic oligonucleotide
  Sense strand starting at position 3106 of SEQ ID NO: 1883817
aaacauugguugguucuaa

SEQ ID NO: 2218473 - RNA, 19 nt, Artificial Sequence
  Description of Artificial Sequence: Synthetic oligonucleotide
  Antisense strand to SEQ ID NO: 2218472
uuagaaccaaccaauguuu

SEQ ID NO: 2218474 - RNA, 19 nt, Artificial Sequence
  Description of Artificial Sequence: Synthetic oligonucleotide
  Sense strand starting at position 525 of SEQ ID NO: 1883817
gugagugguguguauuugu

SEQ ID NO: 2218475 - RNA, 19 nt, Artificial Sequence
  Description of Artificial Sequence: Synthetic oligonucleotide
  Antisense strand to SEQ ID NO: 2218474
acaaauacacaccacucac

SEQ ID NO: 2218476 - RNA, 19 nt, Artificial Sequence
  Description of Artificial Sequence: Synthetic oligonucleotide
  Sense strand starting at position 3379 of SEQ ID NO: 1883817
agauaauaauuggaggaaa

SEQ ID NO: 2218477 - RNA, 19 nt, Artificial Sequence
  Description of Artificial Sequence: Synthetic oligonucleotide
  Antisense strand to SEQ ID NO: 2218476
uuuccuccaauuauuaucu

SEQ ID NO: 2218478 - RNA, 19 nt, Artificial Sequence
  Description of Artificial Sequence: Synthetic oligonucleotide
  Sense strand starting at position 1183 of SEQ ID NO: 1883817
gcauuuguugccuauagcu

SEQ ID NO: 2218479 - RNA, 19 nt, Artificial Sequence
  Description of Artificial Sequence: Synthetic oligonucleotide
  Antisense strand to SEQ ID NO: 2218478
agcuauaggcaacaaaugc

SEQ ID NO: 2218480 - RNA, 19 nt, Artificial Sequence
  Description of Artificial Sequence: Synthetic oligonucleotide
  Sense strand starting at position 347 of SEQ ID NO: 1883817
cauuaaguacaguagugua

SEQ ID NO: 2218481 - RNA, 19 nt, Artificial Sequence
  Description of Artificial Sequence: Synthetic oligonucleotide
  Antisense strand to SEQ ID NO: 2218480
uacacuacuguacuuaaug

SEQ ID NO: 2218482 - RNA, 19 nt, Artificial Sequence
  Description of Artificial Sequence: Synthetic oligonucleotide
  Sense strand starting at position 299 of SEQ ID NO: 1883817
auauuauugugacuagcaa

SEQ ID NO: 2218483 - RNA, 19 nt, Artificial Sequence
  Description of Artificial Sequence: Synthetic oligonucleotide
  Antisense strand to SEQ ID NO: 2218482
uugcuagucacaauaauau

SEQ ID NO: 2218484 - RNA, 19 nt, Artificial Sequence
  Description of Artificial Sequence: Synthetic oligonucleotide
  Sense strand starting at position 581 of SEQ ID NO: 1883817
augagucagucaucaucau

SEQ ID NO: 2218485 - RNA, 19 nt, Artificial Sequence
  Description of Artificial Sequence: Synthetic oligonucleotide
  Antisense strand to SEQ ID NO: 2218484
augaugaugacugacucau

SEQ ID NO: 2218486 - RNA, 19 nt, Artificial Sequence
  Description of Artificial Sequence: Synthetic oligonucleotide
  Sense strand starting at position 970 of SEQ ID NO: 1883817
gcgauuagaucauugacau

SEQ ID NO: 2218487 - RNA, 19 nt, Artificial Sequence
  Description of Artificial Sequence: Synthetic oligonucleotide
  Antisense strand to SEQ ID NO: 2218486
augucaaugaucuaaucgc

SEQ ID NO: 2218488 - RNA, 19 nt, Artificial Sequence
  Description of Artificial Sequence: Synthetic oligonucleotide
  Sense strand starting at position 530 of SEQ ID NO: 1883817
ugguguguauuugugcaga

SEQ ID NO: 2218489 - RNA, 19 nt, Artificial Sequence
  Description of Artificial Sequence: Synthetic oligonucleotide
  Antisense strand to SEQ ID NO: 2218488
ucugcacaaauacacacca

SEQ ID NO: 2218490 - RNA, 19 nt, Artificial Sequence
  Description of Artificial Sequence: Synthetic oligonucleotide
  Sense strand starting at position 3105 of SEQ ID NO: 1883817
uaaacauugguugguucua

SEQ ID NO: 2218491 - RNA, 19 nt, Artificial Sequence
  Description of Artificial Sequence: Synthetic oligonucleotide
  Antisense strand to SEQ ID NO: 2218490
uagaaccaaccaauguuua

SEQ ID NO: 2218492 - RNA, 19 nt, Artificial Sequence
  Description of Artificial Sequence: Synthetic oligonucleotide
  Sense strand starting at position 352 of SEQ ID NO: 1883817
aguacaguaguguauguaa

SEQ ID NO: 2218493 - RNA, 19 nt, Artificial Sequence
  Description of Artificial Sequence: Synthetic oligonucleotide
  Antisense strand to SEQ ID NO: 2218492
uuacauacacuacuguacu

SEQ ID NO: 2218494 - RNA, 19 nt, Artificial Sequence
  Description of Artificial Sequence: Synthetic oligonucleotide
  Sense strand starting at position 2710 of SEQ ID NO: 1883817
gggccuguguggaauagaa

SEQ ID NO: 2218495 - RNA, 19 nt, Artificial Sequence
  Description of Artificial Sequence: Synthetic oligonucleotide
  Antisense strand to SEQ ID NO: 2218494
uucuauuccacacaggccc

SEQ ID NO: 2218496 - RNA, 19 nt, Artificial Sequence
  Description of Artificial Sequence: Synthetic oligonucleotide
  Sense strand starting at position 3552 of SEQ ID NO: 1883817
gucuccuaaggcugaauau

SEQ ID NO: 2218497 - RNA, 19 nt, Artificial Sequence
  Description of Artificial Sequence: Synthetic oligonucleotide
  Antisense strand to SEQ ID NO: 2218496
auauucagccuuaggagac

SEQ ID NO: 2218498 - RNA, 19 nt, Artificial Sequence
  Description of Artificial Sequence: Synthetic oligonucleotide
  Sense strand starting at position 355 of SEQ ID NO: 1883817
acaguaguguauguaauga

SEQ ID NO: 2218499 - RNA, 19 nt, Artificial Sequence
  Description of Artificial Sequence: Synthetic oligonucleotide
  Antisense strand to SEQ ID NO: 2218498
ucauuacauacacuacugu

SEQ ID NO: 2218500 - RNA, 19 nt, Artificial Sequence
  Description of Artificial Sequence: Synthetic oligonucleotide
  Sense strand starting at position 1043 of SEQ ID NO: 1883817
cuucuacagugcuuacaga

SEQ ID NO: 2218501 - RNA, 19 nt, Artificial Sequence
  Description of Artificial Sequence: Synthetic oligonucleotide
  Antisense strand to SEQ ID NO: 2218500
ucuguaagcacuguagaag

SEQ ID NO: 2218502 - RNA, 19 nt, Artificial Sequence
  Description of Artificial Sequence: Synthetic oligonucleotide
  Sense strand starting at position 3308 of SEQ ID NO: 1883817
agggaaaguuaauaaggau

SEQ ID NO: 2218503 - RNA, 19 nt, Artificial Sequence
  Description of Artificial Sequence: Synthetic oligonucleotide
  Antisense strand to SEQ ID NO: 2218502
auccuuauuaacuuucccu

SEQ ID NO: 2218504 - RNA, 19 nt, Artificial Sequence
  Description of Artificial Sequence: Synthetic oligonucleotide
  Sense strand starting at position 3356 of SEQ ID NO: 1883818
gucugagagacugacuguu

SEQ ID NO: 2218505 - RNA, 19 nt, Artificial Sequence
  Description of Artificial Sequence: Synthetic oligonucleotide
  Antisense strand to SEQ ID NO: 2218504
aacagucagucucucagac

SEQ ID NO: 2218506 - RNA, 19 nt, Artificial Sequence
  Description of Artificial Sequence: Synthetic oligonucleotide
  Sense strand starting at position 3358 of SEQ ID NO: 1883818
cugagagacugacuguuau

SEQ ID NO: 2218507 - RNA, 19 nt, Artificial Sequence
  Description of Artificial Sequence: Synthetic oligonucleotide
  Antisense strand to SEQ ID NO: 2218506
auaacagucagucucucag

SEQ ID NO: 2218508 - RNA, 19 nt, Artificial Sequence
  Description of Artificial Sequence: Synthetic oligonucleotide
  Sense strand starting at position 3806 of SEQ ID NO: 1883818
aaagauuaggguugcaacu

SEQ ID NO: 2218509 - RNA, 19 nt, Artificial Sequence
  Description of Artificial Sequence: Synthetic oligonucleotide
  Antisense strand to SEQ ID NO: 2218508
aguugcaacccuaaucuuu

SEQ ID NO: 2218510 - RNA, 19 nt, Artificial Sequence
  Description of Artificial Sequence: Synthetic oligonucleotide
  Sense strand starting at position 2532 of SEQ ID NO: 1883818
uagggaggaguuugucuuu

SEQ ID NO: 2218511 - RNA, 19 nt, Artificial Sequence
  Description of Artificial Sequence: Synthetic oligonucleotide
  Antisense strand to SEQ ID NO: 2218510
aaagacaaacuccucccua

SEQ ID NO: 2218512 - RNA, 19 nt, Artificial Sequence
  Description of Artificial Sequence: Synthetic oligonucleotide
  Sense strand starting at position 3086 of SEQ ID NO: 1883818
ucaugucaguaugucaauu

SEQ ID NO: 2218513 - RNA, 19 nt, Artificial Sequence
  Description of Artificial Sequence: Synthetic oligonucleotide
  Antisense strand to SEQ ID NO: 2218512
aauugacauacugacauga

SEQ ID NO: 2218514 - RNA, 19 nt, Artificial Sequence
  Description of Artificial Sequence: Synthetic oligonucleotide
  Sense strand starting at position 3364 of SEQ ID NO: 1883818
gacugacuguuaugauuuc

SEQ ID NO: 2218515 - RNA, 19 nt, Artificial Sequence
  Description of Artificial Sequence: Synthetic oligonucleotide
  Antisense strand to SEQ ID NO: 2218514
gaaaucauaacagucaguc

SEQ ID NO: 2218516 - RNA, 19 nt, Artificial Sequence
  Description of Artificial Sequence: Synthetic oligonucleotide
  Sense strand starting at position 3362 of SEQ ID NO: 1883818
gagacugacuguuaugauu

SEQ ID NO: 2218517 - RNA, 19 nt, Artificial Sequence
  Description of Artificial Sequence: Synthetic oligonucleotide
  Antisense strand to SEQ ID NO: 2218516
aaucauaacagucagucuc

SEQ ID NO: 2218518 - RNA, 19 nt, Artificial Sequence
  Description of Artificial Sequence: Synthetic oligonucleotide
  Sense strand starting at position 3507 of SEQ ID NO: 1883818
ucuauuacguccgcuugau

SEQ ID NO: 2218519 - RNA, 19 nt, Artificial Sequence
  Description of Artificial Sequence: Synthetic oligonucleotide
  Antisense strand to SEQ ID NO: 2218518
aucaagcggacguaauaga

SEQ ID NO: 2218520 - RNA, 19 nt, Artificial Sequence
  Description of Artificial Sequence: Synthetic oligonucleotide
  Sense strand starting at position 3506 of SEQ ID NO: 1883818
gucuauuacguccgcuuga

SEQ ID NO: 2218521 - RNA, 19 nt, Artificial Sequence
  Description of Artificial Sequence: Synthetic oligonucleotide
  Antisense strand to SEQ ID NO: 2218520
ucaagcggacguaauagac

SEQ ID NO: 2218522 - RNA, 19 nt, Artificial Sequence
  Description of Artificial Sequence: Synthetic oligonucleotide
  Sense strand starting at position 2338 of SEQ ID NO: 1883818
agccuugcauccuaaggau

SEQ ID NO: 2218523 - RNA, 19 nt, Artificial Sequence
  Description of Artificial Sequence: Synthetic oligonucleotide
  Antisense strand to SEQ ID NO: 2218522
auccuuaggaugcaaggcu

SEQ ID NO: 2218524 - RNA, 19 nt, Artificial Sequence
  Description of Artificial Sequence: Synthetic oligonucleotide
  Sense strand starting at position 1534 of SEQ ID NO: 1883819
gguuacauuugucuuucca

SEQ ID NO: 2218525 - RNA, 19 nt, Artificial Sequence
  Description of Artificial Sequence: Synthetic oligonucleotide
  Antisense strand to SEQ ID NO: 2218524
uggaaagacaaauguaacc

SEQ ID NO: 2218526 - RNA, 19 nt, Artificial Sequence
  Description of Artificial Sequence: Synthetic oligonucleotide
  Sense strand starting at position 3857 of SEQ ID NO: 1883819
augaaccuucugugaagaa

SEQ ID NO: 2218527 - RNA, 19 nt, Artificial Sequence
  Description of Artificial Sequence: Synthetic oligonucleotide
  Antisense strand to SEQ ID NO: 2218526
uucuucacagaagguucau

SEQ ID NO: 2218528 - RNA, 19 nt, Artificial Sequence
  Description of Artificial Sequence: Synthetic oligonucleotide
  Sense strand starting at position 491 of SEQ ID NO: 1883819
ucuuaccuccugggagaaa

SEQ ID NO: 2218529 - RNA, 19 nt, Artificial Sequence
  Description of Artificial Sequence: Synthetic oligonucleotide
  Antisense strand to SEQ ID NO: 2218528
uuucucccaggagguaaga

SEQ ID NO: 2218530 - RNA, 19 nt, Artificial Sequence
  Description of Artificial Sequence: Synthetic oligonucleotide
  Sense strand starting at position 3498 of SEQ ID NO: 1883819
ugaggaagugaugguuaag

SEQ ID NO: 2218531 - RNA, 19 nt, Artificial Sequence
  Description of Artificial Sequence: Synthetic oligonucleotide
  Antisense strand to SEQ ID NO: 2218530
cuuaaccaucacuuccuca

SEQ ID NO: 2218532 - RNA, 19 nt, Artificial Sequence
  Description of Artificial Sequence: Synthetic oligonucleotide
  Sense strand starting at position 3405 of SEQ ID NO: 1883819
aagugcuaugaugaaguaa

SEQ ID NO: 2218533 - RNA, 19 nt, Artificial Sequence
  Description of Artificial Sequence: Synthetic oligonucleotide
  Antisense strand to SEQ ID NO: 2218532
uuacuucaucauagcacuu

SEQ ID NO: 2218534 - RNA, 19 nt, Artificial Sequence
  Description of Artificial Sequence: Synthetic oligonucleotide
  Sense strand starting at position 2574 of SEQ ID NO: 1883819
aguauugucauuuacguuu

SEQ ID NO: 2218535 - RNA, 19 nt, Artificial Sequence
  Description of Artificial Sequence: Synthetic oligonucleotide
  Antisense strand to SEQ ID NO: 2218534
aaacguaaaugacaauacu

SEQ ID NO: 2218536 - RNA, 19 nt, Artificial Sequence
  Description of Artificial Sequence: Synthetic oligonucleotide
  Sense strand starting at position 3507 of SEQ ID NO: 1883819
gaugguuaagcugaaaucu

SEQ ID NO: 2218537 - RNA, 19 nt, Artificial Sequence
  Description of Artificial Sequence: Synthetic oligonucleotide
  Antisense strand to SEQ ID NO: 2218536
agauuucagcuuaaccauc

SEQ ID NO: 2218538 - RNA, 19 nt, Artificial Sequence
  Description of Artificial Sequence: Synthetic oligonucleotide
  Sense strand starting at position 1476 of SEQ ID NO: 1883819
aaaugcuuugcguuugcaa

SEQ ID NO: 2218539 - RNA, 19 nt, Artificial Sequence
  Description of Artificial Sequence: Synthetic oligonucleotide
  Antisense strand to SEQ ID NO: 2218538
uugcaaacgcaaagcauuu

SEQ ID NO: 2218540 - RNA, 19 nt, Artificial Sequence
  Description of Artificial Sequence: Synthetic oligonucleotide
  Sense strand starting at position 44 of SEQ ID NO: 1883819
aguuauuucuuucugagcu

SEQ ID NO: 2218541 - RNA, 19 nt, Artificial Sequence
  Description of Artificial Sequence: Synthetic oligonucleotide
  Antisense strand to SEQ ID NO: 2218540
agcucagaaagaaauaacu

SEQ ID NO: 2218542 - RNA, 19 nt, Artificial Sequence
  Description of Artificial Sequence: Synthetic oligonucleotide
  Sense strand starting at position 1338 of SEQ ID NO: 1883819
uuccuagaauggguacaau

SEQ ID NO: 2218543 - RNA, 19 nt, Artificial Sequence
  Description of Artificial Sequence: Synthetic oligonucleotide
  Antisense strand to SEQ ID NO: 2218542
auuguacccauucuaggaa

SEQ ID NO: 2218544 - RNA, 19 nt, Artificial Sequence
  Description of Artificial Sequence: Synthetic oligonucleotide
  Sense strand starting at position 1561 of SEQ ID NO: 1883819
gcaauaacucuggaagcca

SEQ ID NO: 2218545 - RNA, 19 nt, Artificial Sequence
  Description of Artificial Sequence: Synthetic oligonucleotide
  Antisense strand to SEQ ID NO: 2218544
uggcuuccagaguuauugc

SEQ ID NO: 2218546 - RNA, 19 nt, Artificial Sequence
  Description of Artificial Sequence: Synthetic oligonucleotide
  Sense strand starting at position 3886 of SEQ ID NO: 1883819
guuugagacccucaacuuu

SEQ ID NO: 2218547 - RNA, 19 nt, Artificial Sequence
  Description of Artificial Sequence: Synthetic oligonucleotide
  Antisense strand to SEQ ID NO: 2218546
aaaguugagggucucaaac

SEQ ID NO: 2218548 - RNA, 19 nt, Artificial Sequence
  Description of Artificial Sequence: Synthetic oligonucleotide
  Sense strand starting at position 490 of SEQ ID NO: 1883819
uucuuaccuccugggagaa

SEQ ID NO: 2218549 - RNA, 19 nt, Artificial Sequence
  Description of Artificial Sequence: Synthetic oligonucleotide
  Antisense strand to SEQ ID NO: 2218548
uucucccaggagguaagaa

SEQ ID NO: 2218550 - RNA, 19 nt, Artificial Sequence
  Description of Artificial Sequence: Synthetic oligonucleotide
  Sense strand starting at position 2602 of SEQ ID NO: 1883819
gacggaaguccugagaguu

SEQ ID NO: 2218551 - RNA, 19 nt, Artificial Sequence
  Description of Artificial Sequence: Synthetic oligonucleotide
  Antisense strand to SEQ ID NO: 2218550
aacucucaggacuuccguc

SEQ ID NO: 2218552 - RNA, 19 nt, Artificial Sequence
  Description of Artificial Sequence: Synthetic oligonucleotide
  Sense strand starting at position 2737 of SEQ ID NO: 1883819
aaagcuuuauaguuggaaa

SEQ ID NO: 2218553 - RNA, 19 nt, Artificial Sequence
  Description of Artificial Sequence: Synthetic oligonucleotide
  Antisense strand to SEQ ID NO: 2218552
uuuccaacuauaaagcuuu

SEQ ID NO: 2218554 - RNA, 19 nt, Artificial Sequence
  Description of Artificial Sequence: Synthetic oligonucleotide
  Sense strand starting at position 1477 of SEQ ID NO: 1883819
aaugcuuugcguuugcaau

SEQ ID NO: 2218555 - RNA, 19 nt, Artificial Sequence
  Description of Artificial Sequence: Synthetic oligonucleotide
  Antisense strand to SEQ ID NO: 2218554
auugcaaacgcaaagcauu

SEQ ID NO: 2218556 - RNA, 19 nt, Artificial Sequence
  Description of Artificial Sequence: Synthetic oligonucleotide
  Sense strand starting at position 3877 of SEQ ID NO: 1883819
agggaaaucguuugagacc

SEQ ID NO: 2218557 - RNA, 19 nt, Artificial Sequence
  Description of Artificial Sequence: Synthetic oligonucleotide
  Antisense strand to SEQ ID NO: 2218556
ggucucaaacgauuucccu

SEQ ID NO: 2218558 - RNA, 19 nt, Artificial Sequence
  Description of Artificial Sequence: Synthetic oligonucleotide
  Sense strand starting at position 2572 of SEQ ID NO: 1883819
auaguauugucauuuacgu

SEQ ID NO: 2218559 - RNA, 19 nt, Artificial Sequence
  Description of Artificial Sequence: Synthetic oligonucleotide
  Antisense strand to SEQ ID NO: 2218558
acguaaaugacaauacuau

SEQ ID NO: 2218560 - RNA, 19 nt, Artificial Sequence
  Description of Artificial Sequence: Synthetic oligonucleotide
  Sense strand starting at position 3691 of SEQ ID NO: 1883819
accaguuaagaugguacau

SEQ ID NO: 2218561 - RNA, 19 nt, Artificial Sequence
  Description of Artificial Sequence: Synthetic oligonucleotide
  Antisense strand to SEQ ID NO: 2218560
auguaccaucuuaacuggu

SEQ ID NO: 2218562 - RNA, 19 nt, Artificial Sequence
  Description of Artificial Sequence: Synthetic oligonucleotide
  Sense strand starting at position 2732 of SEQ ID NO: 1883819
uuuggaaagcuuuauaguu

SEQ ID NO: 2218563 - RNA, 19 nt, Artificial Sequence
  Description of Artificial Sequence: Synthetic oligonucleotide
  Antisense strand to SEQ ID NO: 2218562
aacuauaaagcuuuccaaa

SEQ ID NO: 2218564 - RNA, 19 nt, Artificial Sequence
  Description of Artificial Sequence: Synthetic oligonucleotide
  Sense strand starting at position 2739 of SEQ ID NO: 1883819
agcuuuauaguuggaaaga

SEQ ID NO: 2218565 - RNA, 19 nt, Artificial Sequence
  Description of Artificial Sequence: Synthetic oligonucleotide
  Antisense strand to SEQ ID NO: 2218564
ucuuuccaacuauaaagcu

SEQ ID NO: 2218566 - RNA, 19 nt, Artificial Sequence
  Description of Artificial Sequence: Synthetic oligonucleotide
  Sense strand starting at position 3427 of SEQ ID NO: 1883819
gugcuaugaaagcagacua

SEQ ID NO: 2218567 - RNA, 19 nt, Artificial Sequence
  Description of Artificial Sequence: Synthetic oligonucleotide
  Antisense strand to SEQ ID NO: 2218566
uagucugcuuucauagcac

SEQ ID NO: 2218568 - RNA, 19 nt, Artificial Sequence
  Description of Artificial Sequence: Synthetic oligonucleotide
  Sense strand starting at position 2656 of SEQ ID NO: 1883819
gaaccaagacucggaguuu

SEQ ID NO: 2218569 - RNA, 19 nt, Artificial Sequence
  Description of Artificial Sequence: Synthetic oligonucleotide
  Antisense strand to SEQ ID NO: 2218568
aaacuccgagucuugguuc

SEQ ID NO: 2218570 - RNA, 19 nt, Artificial Sequence
  Description of Artificial Sequence: Synthetic oligonucleotide
  Sense strand starting at position 652 of SEQ ID NO: 1883819
gagucagagcagugaacaa

SEQ ID NO: 2218571 - RNA, 19 nt, Artificial Sequence
  Description of Artificial Sequence: Synthetic oligonucleotide
  Antisense strand to SEQ ID NO: 2218570
uuguucacugcucugacuc

SEQ ID NO: 2218572 - RNA, 19 nt, Artificial Sequence
  Description of Artificial Sequence: Synthetic oligonucleotide
  Sense strand starting at position 3189 of SEQ ID NO: 1883819
cugguuuacccuggauaag

SEQ ID NO: 2218573 - RNA, 19 nt, Artificial Sequence
  Description of Artificial Sequence: Synthetic oligonucleotide
  Antisense strand to SEQ ID NO: 2218572
cuuauccaggguaaaccag

SEQ ID NO: 2218574 - RNA, 19 nt, Artificial Sequence
  Description of Artificial Sequence: Synthetic oligonucleotide
  Sense strand starting at position 1674 of SEQ ID NO: 1883819
gauuucuggcugcgaauuc

SEQ ID NO: 2218575 - RNA, 19 nt, Artificial Sequence
  Description of Artificial Sequence: Synthetic oligonucleotide
  Antisense strand to SEQ ID NO: 2218574
gaauucgcagccagaaauc

SEQ ID NO: 2218576 - RNA, 19 nt, Artificial Sequence
  Description of Artificial Sequence: Synthetic oligonucleotide
  Sense strand starting at position 3777 of SEQ ID NO: 1883819
aguauacagcugcauugaa

SEQ ID NO: 2218577 - RNA, 19 nt, Artificial Sequence
  Description of Artificial Sequence: Synthetic oligonucleotide
  Antisense strand to SEQ ID NO: 2218576
uucaaugcagcuguauacu

SEQ ID NO: 2218578 - RNA, 19 nt, Artificial Sequence
  Description of Artificial Sequence: Synthetic oligonucleotide
  Sense strand starting at position 2868 of SEQ ID NO: 1883819
gaauacgugugauuaugaa

SEQ ID NO: 2218579 - RNA, 19 nt, Artificial Sequence
  Description of Artificial Sequence: Synthetic oligonucleotide
  Antisense strand to SEQ ID NO: 2218578
uucauaaucacacguauuc

SEQ ID NO: 2218580 - RNA, 19 nt, Artificial Sequence
  Description of Artificial Sequence: Synthetic oligonucleotide
  Sense strand starting at position 3752 of SEQ ID NO: 1883819
cauagaagugcuuauguua

SEQ ID NO: 2218581 - RNA, 19 nt, Artificial Sequence
  Description of Artificial Sequence: Synthetic oligonucleotide
  Antisense strand to SEQ ID NO: 2218580
uaacauaagcacuucuaug

SEQ ID NO: 2218582 - RNA, 19 nt, Artificial Sequence
  Description of Artificial Sequence: Synthetic oligonucleotide
  Sense strand starting at position 321 of SEQ ID NO: 1883819
cacagcagucccuagguaa

SEQ ID NO: 2218583 - RNA, 19 nt, Artificial Sequence
  Description of Artificial Sequence: Synthetic oligonucleotide
  Antisense strand to SEQ ID NO: 2218582
uuaccuagggacugcugug

SEQ ID NO: 2218584 - RNA, 19 nt, Artificial Sequence
  Description of Artificial Sequence: Synthetic oligonucleotide
  Sense strand starting at position 1702 of SEQ ID NO: 1883819
aagggucauuacucggauu

SEQ ID NO: 2218585 - RNA, 19 nt, Artificial Sequence
  Description of Artificial Sequence: Synthetic oligonucleotide
  Antisense strand to SEQ ID NO: 2218584
aauccgaguaaugacccuu

SEQ ID NO: 2218586 - RNA, 19 nt, Artificial Sequence
  Description of Artificial Sequence: Synthetic oligonucleotide
  Sense strand starting at position 3188 of SEQ ID NO: 1883819
ucugguuuacccuggauaa

SEQ ID NO: 2218587 - RNA, 19 nt, Artificial Sequence
  Description of Artificial Sequence: Synthetic oligonucleotide
  Antisense strand to SEQ ID NO: 2218586
uuauccaggguaaaccaga

SEQ ID NO: 2218588 - RNA, 19 nt, Artificial Sequence
  Description of Artificial Sequence: Synthetic oligonucleotide
  Sense strand starting at position 3504 of SEQ ID NO: 1883819
agugaugguuaagcugaaa

SEQ ID NO: 2218589 - RNA, 19 nt, Artificial Sequence
  Description of Artificial Sequence: Synthetic oligonucleotide
  Antisense strand to SEQ ID NO: 2218588
uuucagcuuaaccaucacu

SEQ ID NO: 2218590 - RNA, 19 nt, Artificial Sequence
  Description of Artificial Sequence: Synthetic oligonucleotide
  Sense strand starting at position 3663 of SEQ ID NO: 1883819
uggugauuaucacucuuua

SEQ ID NO: 2218591 - RNA, 19 nt, Artificial Sequence
  Description of Artificial Sequence: Synthetic oligonucleotide
  Antisense strand to SEQ ID NO: 2218590
uaaagagugauaaucacca

SEQ ID NO: 2218592 - RNA, 19 nt, Artificial Sequence
  Description of Artificial Sequence: Synthetic oligonucleotide
  Sense strand starting at position 2831 of SEQ ID NO: 1883819
ucacaagucagugguagag

SEQ ID NO: 2218593 - RNA, 19 nt, Artificial Sequence
  Description of Artificial Sequence: Synthetic oligonucleotide
  Antisense strand to SEQ ID NO: 2218592
cucuaccacugacuuguga

SEQ ID NO: 2218594 - RNA, 19 nt, Artificial Sequence
  Description of Artificial Sequence: Synthetic oligonucleotide
  Sense strand starting at position 306 of SEQ ID NO: 1883819
cccuguaaagucuagcaca

SEQ ID NO: 2218595 - RNA, 19 nt, Artificial Sequence
  Description of Artificial Sequence: Synthetic oligonucleotide
  Antisense strand to SEQ ID NO: 2218594
ugugcuagacuuuacaggg

SEQ ID NO: 2218596 - RNA, 19 nt, Artificial Sequence
  Description of Artificial Sequence: Synthetic oligonucleotide
  Sense strand starting at position 332 of SEQ ID NO: 1883819
cuagguaauuguuuauuga

SEQ ID NO: 2218597 - RNA, 19 nt, Artificial Sequence
  Description of Artificial Sequence: Synthetic oligonucleotide
  Antisense strand to SEQ ID NO: 2218596
ucaauaaacaauuaccuag

SEQ ID NO: 2218598 - RNA, 19 nt, Artificial Sequence
  Description of Artificial Sequence: Synthetic oligonucleotide
  Sense strand starting at position 176 of SEQ ID NO: 1883819
ugugucagaguucagaagu

SEQ ID NO: 2218599 - RNA, 19 nt, Artificial Sequence
  Description of Artificial Sequence: Synthetic oligonucleotide
  Antisense strand to SEQ ID NO: 2218598
acuucugaacucugacaca

SEQ ID NO: 2218600 - RNA, 19 nt, Artificial Sequence
  Description of Artificial Sequence: Synthetic oligonucleotide
  Sense strand starting at position 2909 of SEQ ID NO: 1883819
gugauaagguaggcauacu

SEQ ID NO: 2218601 - RNA, 19 nt, Artificial Sequence
  Description of Artificial Sequence: Synthetic oligonucleotide
  Antisense strand to SEQ ID NO: 2218600
aguaugccuaccuuaucac

SEQ ID NO: 2218602 - RNA, 19 nt, Artificial Sequence
  Description of Artificial Sequence: Synthetic oligonucleotide
  Sense strand starting at position 1671 of SEQ ID NO: 1883819
cccgauuucuggcugcgaa

SEQ ID NO: 2218603 - RNA, 19 nt, Artificial Sequence
  Description of Artificial Sequence: Synthetic oligonucleotide
  Antisense strand to SEQ ID NO: 2218602
uucgcagccagaaaucggg

SEQ ID NO: 2218604 - RNA, 19 nt, Artificial Sequence
  Description of Artificial Sequence: Synthetic oligonucleotide
  Sense strand starting at position 644 of SEQ ID NO: 1883820
gcaaucuuagaugaucuau

SEQ ID NO: 2218605 - RNA, 19 nt, Artificial Sequence
  Description of Artificial Sequence: Synthetic oligonucleotide
  Antisense strand to SEQ ID NO: 2218604
auagaucaucuaagauugc

SEQ ID NO: 2218606 - RNA, 19 nt, Artificial Sequence
  Description of Artificial Sequence: Synthetic oligonucleotide
  Sense strand starting at position 705 of SEQ ID NO: 1883820
gauggaaguguccaccuca

SEQ ID NO: 2218607 - RNA, 19 nt, Artificial Sequence
  Description of Artificial Sequence: Synthetic oligonucleotide
  Antisense strand to SEQ ID NO: 2218606
ugagguggacacuuccauc

SEQ ID NO: 2218608 - RNA, 19 nt, Artificial Sequence
  Description of Artificial Sequence: Synthetic oligonucleotide
  Sense strand starting at position 545 of SEQ ID NO: 1883820
gcaggcaaccucuacagaa

SEQ ID NO: 2218609 - RNA, 19 nt, Artificial Sequence
  Description of Artificial Sequence: Synthetic oligonucleotide
  Antisense strand to SEQ ID NO: 2218608
uucuguagagguugccugc

SEQ ID NO: 2218610 - RNA, 19 nt, Artificial Sequence
  Description of Artificial Sequence: Synthetic oligonucleotide
  Sense strand starting at position 3326 of SEQ ID NO: 1883820
ggaaaucgucagcacauaa

SEQ ID NO: 2218611 - RNA, 19 nt, Artificial Sequence
  Description of Artificial Sequence: Synthetic oligonucleotide
  Antisense strand to SEQ ID NO: 2218610
uuaugugcugacgauuucc

SEQ ID NO: 2218612 - RNA, 19 nt, Artificial Sequence
  Description of Artificial Sequence: Synthetic oligonucleotide
  Sense strand starting at position 3596 of SEQ ID NO: 1883820
cagauauggcacugagauu

SEQ ID NO: 2218613 - RNA, 19 nt, Artificial Sequence
  Description of Artificial Sequence: Synthetic oligonucleotide
  Antisense strand to SEQ ID NO: 2218612
aaucucagugccauaucug

SEQ ID NO: 2218614 - RNA, 19 nt, Artificial Sequence
  Description of Artificial Sequence: Synthetic oligonucleotide
  Sense strand starting at position 160 of SEQ ID NO: 1883820
gaacuuacucguuacugag

SEQ ID NO: 2218615 - RNA, 19 nt, Artificial Sequence
  Description of Artificial Sequence: Synthetic oligonucleotide
  Antisense strand to SEQ ID NO: 2218614
cucaguaacgaguaaguuc

SEQ ID NO: 2218616 - RNA, 19 nt, Artificial Sequence
  Description of Artificial Sequence: Synthetic oligonucleotide
  Sense strand starting at position 2679 of SEQ ID NO: 1883820
uaggucaaggauugaucuu

SEQ ID NO: 2218617 - RNA, 19 nt, Artificial Sequence
  Description of Artificial Sequence: Synthetic oligonucleotide
  Antisense strand to SEQ ID NO: 2218616
aagaucaauccuugaccua

SEQ ID NO: 2218618 - RNA, 19 nt, Artificial Sequence
  Description of Artificial Sequence: Synthetic oligonucleotide
  Sense strand starting at position 1287 of SEQ ID NO: 1883820
gguacaaggguuuaucuuu

SEQ ID NO: 2218619 - RNA, 19 nt, Artificial Sequence
  Description of Artificial Sequence: Synthetic oligonucleotide
  Antisense strand to SEQ ID NO: 2218618
aaagauaaacccuuguacc

SEQ ID NO: 2218620 - RNA, 19 nt, Artificial Sequence
  Description of Artificial Sequence: Synthetic oligonucleotide
  Sense strand starting at position 497 of SEQ ID NO: 1883820
gugguaagaauguaugagu

SEQ ID NO: 2218621 - RNA, 19 nt, Artificial Sequence
  Description of Artificial Sequence: Synthetic oligonucleotide
  Antisense strand to SEQ ID NO: 2218620
acucauacauucuuaccac

SEQ ID NO: 2218622 - RNA, 19 nt, Artificial Sequence
  Description of Artificial Sequence: Synthetic oligonucleotide
  Sense strand starting at position 976 of SEQ ID NO: 1883820
gcgauuucggcuuacuacu

SEQ ID NO: 2218623 - RNA, 19 nt, Artificial Sequence
  Description of Artificial Sequence: Synthetic oligonucleotide
  Antisense strand to SEQ ID NO: 2218622
aguaguaagccgaaaucgc

SEQ ID NO: 2218624 - RNA, 19 nt, Artificial Sequence
  Description of Artificial Sequence: Synthetic oligonucleotide
  Sense strand starting at position 525 of SEQ ID NO: 1883820
ggaagagugucuaggagag

SEQ ID NO: 2218625 - RNA, 19 nt, Artificial Sequence
  Description of Artificial Sequence: Synthetic oligonucleotide
  Antisense strand to SEQ ID NO: 2218624
cucuccuagacacucuucc

SEQ ID NO: 2218626 - RNA, 19 nt, Artificial Sequence
  Description of Artificial Sequence: Synthetic oligonucleotide
  Sense strand starting at position 3323 of SEQ ID NO: 1883820
uuuggaaaucgucagcaca

SEQ ID NO: 2218627 - RNA, 19 nt, Artificial Sequence
  Description of Artificial Sequence: Synthetic oligonucleotide
  Antisense strand to SEQ ID NO: 2218626
ugugcugacgauuuccaaa

SEQ ID NO: 2218628 - RNA, 19 nt, Artificial Sequence
  Description of Artificial Sequence: Synthetic oligonucleotide
  Sense strand starting at position 3356 of SEQ ID NO: 1883820
acaugaaccuggguuaguu

SEQ ID NO: 2218629 - RNA, 19 nt, Artificial Sequence
  Description of Artificial Sequence: Synthetic oligonucleotide
  Antisense strand to SEQ ID NO: 2218628
aacuaacccagguucaugu

SEQ ID NO: 2218630 - RNA, 19 nt, Artificial Sequence
  Description of Artificial Sequence: Synthetic oligonucleotide
  Sense strand starting at position 692 of SEQ ID NO: 1883820
guacaauagcgaugaugga

SEQ ID NO: 2218631 - RNA, 19 nt, Artificial Sequence
  Description of Artificial Sequence: Synthetic oligonucleotide
  Antisense strand to SEQ ID NO: 2218630
uccaucaucgcuauuguac

SEQ ID NO: 2218632 - RNA, 19 nt, Artificial Sequence
  Description of Artificial Sequence: Synthetic oligonucleotide
  Sense strand starting at position 159 of SEQ ID NO: 1883820
agaacuuacucguuacuga

SEQ ID NO: 2218633 - RNA, 19 nt, Artificial Sequence
  Description of Artificial Sequence: Synthetic oligonucleotide
  Antisense strand to SEQ ID NO: 2218632
ucaguaacgaguaaguucu

SEQ ID NO: 2218634 - RNA, 19 nt, Artificial Sequence
  Description of Artificial Sequence: Synthetic oligonucleotide
  Sense strand starting at position 906 of SEQ ID NO: 1883820
caguguguucuuucguugu

SEQ ID NO: 2218635 - RNA, 19 nt, Artificial Sequence
  Description of Artificial Sequence: Synthetic oligonucleotide
  Antisense strand to SEQ ID NO: 2218634
acaacgaaagaacacacug

SEQ ID NO: 2218636 - RNA, 19 nt, Artificial Sequence
  Description of Artificial Sequence: Synthetic oligonucleotide
  Sense strand starting at position 686 of SEQ ID NO: 1883820
ucaucuguacaauagcgau

SEQ ID NO: 2218637 - RNA, 19 nt, Artificial Sequence
  Description of Artificial Sequence: Synthetic oligonucleotide
  Antisense strand to SEQ ID NO: 2218636
aucgcuauuguacagauga

SEQ ID NO: 2218638 - RNA, 19 nt, Artificial Sequence
  Description of Artificial Sequence: Synthetic oligonucleotide
  Sense strand starting at position 2675 of SEQ ID NO: 1883820
cgguuaggucaaggauuga

SEQ ID NO: 2218639 - RNA, 19 nt, Artificial Sequence
  Description of Artificial Sequence: Synthetic oligonucleotide
  Antisense strand to SEQ ID NO: 2218638
ucaauccuugaccuaaccg

SEQ ID NO: 2218640 - RNA, 19 nt, Artificial Sequence
  Description of Artificial Sequence: Synthetic oligonucleotide
  Sense strand starting at position 3304 of SEQ ID NO: 1883820
gucagugcuggagauguaa

SEQ ID NO: 2218641 - RNA, 19 nt, Artificial Sequence
  Description of Artificial Sequence: Synthetic oligonucleotide
  Antisense strand to SEQ ID NO: 2218640
uuacaucuccagcacugac

SEQ ID NO: 2218642 - RNA, 19 nt, Artificial Sequence
  Description of Artificial Sequence: Synthetic oligonucleotide
  Sense strand starting at position 3325 of SEQ ID NO: 1883820
uggaaaucgucagcacaua

SEQ ID NO: 2218643 - RNA, 19 nt, Artificial Sequence
  Description of Artificial Sequence: Synthetic oligonucleotide
  Antisense strand to SEQ ID NO: 2218642
uaugugcugacgauuucca

SEQ ID NO: 2218644 - RNA, 19 nt, Artificial Sequence
  Description of Artificial Sequence: Synthetic oligonucleotide
  Sense strand starting at position 3215 of SEQ ID NO: 1883820
cacacuugcugaguuugaa

SEQ ID NO: 2218645 - RNA, 19 nt, Artificial Sequence
  Description of Artificial Sequence: Synthetic oligonucleotide
  Antisense strand to SEQ ID NO: 2218644
uucaaacucagcaagugug

SEQ ID NO: 2218646 - RNA, 19 nt, Artificial Sequence
  Description of Artificial Sequence: Synthetic oligonucleotide
  Sense strand starting at position 3302 of SEQ ID NO: 1883820
gggucagugcuggagaugu

SEQ ID NO: 2218647 - RNA, 19 nt, Artificial Sequence
  Description of Artificial Sequence: Synthetic oligonucleotide
  Antisense strand to SEQ ID NO: 2218646
acaucuccagcacugaccc

SEQ ID NO: 2218648 - RNA, 19 nt, Artificial Sequence
  Description of Artificial Sequence: Synthetic oligonucleotide
  Sense strand starting at position 3306 of SEQ ID NO: 1883820
cagugcuggagauguaauu

SEQ ID NO: 2218649 - RNA, 19 nt, Artificial Sequence
  Description of Artificial Sequence: Synthetic oligonucleotide
  Antisense strand to SEQ ID NO: 2218648
aauuacaucuccagcacug

SEQ ID NO: 2218650 - RNA, 19 nt, Artificial Sequence
  Description of Artificial Sequence: Synthetic oligonucleotide
  Sense strand starting at position 1376 of SEQ ID NO: 1883820
aggccaccuuucuugugaa

SEQ ID NO: 2218651 - RNA, 19 nt, Artificial Sequence
  Description of Artificial Sequence: Synthetic oligonucleotide
  Antisense strand to SEQ ID NO: 2218650
uucacaagaaagguggccu

SEQ ID NO: 2218652 - RNA, 19 nt, Artificial Sequence
  Description of Artificial Sequence: Synthetic oligonucleotide
  Sense strand starting at position 156 of SEQ ID NO: 1883820
gugagaacuuacucguuac

SEQ ID NO: 2218653 - RNA, 19 nt, Artificial Sequence
  Description of Artificial Sequence: Synthetic oligonucleotide
  Antisense strand to SEQ ID NO: 2218652
guaacgaguaaguucucac

SEQ ID NO: 2218654 - RNA, 19 nt, Artificial Sequence
  Description of Artificial Sequence: Synthetic oligonucleotide
  Sense strand starting at position 2592 of SEQ ID NO: 1883820
cgguaaucagaacgcaaca

SEQ ID NO: 2218655 - RNA, 19 nt, Artificial Sequence
  Description of Artificial Sequence: Synthetic oligonucleotide
  Antisense strand to SEQ ID NO: 2218654
uguugcguucugauuaccg

SEQ ID NO: 2218656 - RNA, 19 nt, Artificial Sequence
  Description of Artificial Sequence: Synthetic oligonucleotide
  Sense strand starting at position 3056 of SEQ ID NO: 1883820
auuugaugugcguguguaa

SEQ ID NO: 2218657 - RNA, 19 nt, Artificial Sequence
  Description of Artificial Sequence: Synthetic oligonucleotide
  Antisense strand to SEQ ID NO: 2218656
uuacacacgcacaucaaau

SEQ ID NO: 2218658 - RNA, 19 nt, Artificial Sequence
  Description of Artificial Sequence: Synthetic oligonucleotide
  Sense strand starting at position 3607 of SEQ ID NO: 1883820
cugagauugucagcaaguc

SEQ ID NO: 2218659 - RNA, 19 nt, Artificial Sequence
  Description of Artificial Sequence: Synthetic oligonucleotide
  Antisense strand to SEQ ID NO: 2218658
gacuugcugacaaucucag

SEQ ID NO: 2218660 - RNA, 19 nt, Artificial Sequence
  Description of Artificial Sequence: Synthetic oligonucleotide
  Sense strand starting at position 3052 of SEQ ID NO: 1883820
guagauuugaugugcgugu

SEQ ID NO: 2218661 - RNA, 19 nt, Artificial Sequence
  Description of Artificial Sequence: Synthetic oligonucleotide
  Antisense strand to SEQ ID NO: 2218660
acacgcacaucaaaucuac

SEQ ID NO: 2218662 - RNA, 19 nt, Artificial Sequence
  Description of Artificial Sequence: Synthetic oligonucleotide
  Sense strand starting at position 386 of SEQ ID NO: 1883820
ggauuacacgugugggcua

SEQ ID NO: 2218663 - RNA, 19 nt, Artificial Sequence
  Description of Artificial Sequence: Synthetic oligonucleotide
  Antisense strand to SEQ ID NO: 2218662
uagcccacacguguaaucc

SEQ ID NO: 2218664 - RNA, 19 nt, Artificial Sequence
  Description of Artificial Sequence: Synthetic oligonucleotide
  Sense strand starting at position 42 of SEQ ID NO: 1883820
gcuucccaucaugguguaa

SEQ ID NO: 2218665 - RNA, 19 nt, Artificial Sequence
  Description of Artificial Sequence: Synthetic oligonucleotide
  Antisense strand to SEQ ID NO: 2218664
uuacaccaugaugggaagc

SEQ ID NO: 2218666 - RNA, 19 nt, Artificial Sequence
  Description of Artificial Sequence: Synthetic oligonucleotide
  Sense strand starting at position 2674 of SEQ ID NO: 1883820
ccgguuaggucaaggauug

SEQ ID NO: 2218667 - RNA, 19 nt, Artificial Sequence
  Description of Artificial Sequence: Synthetic oligonucleotide
  Antisense strand to SEQ ID NO: 2218666
caauccuugaccuaaccgg

SEQ ID NO: 2218668 - RNA, 19 nt, Artificial Sequence
  Description of Artificial Sequence: Synthetic oligonucleotide
  Sense strand starting at position 2764 of SEQ ID NO: 1883820
acuucuuuauuuggaagca

SEQ ID NO: 2218669 - RNA, 19 nt, Artificial Sequence
  Description of Artificial Sequence: Synthetic oligonucleotide
  Antisense strand to SEQ ID NO: 2218668
ugcuuccaaauaaagaagu

SEQ ID NO: 2218670 - RNA, 19 nt, Artificial Sequence
  Description of Artificial Sequence: Synthetic oligonucleotide
  Sense strand starting at position 2058 of SEQ ID NO: 1883820
ggucaucgaccucgaguuu

SEQ ID NO: 2218671 - RNA, 19 nt, Artificial Sequence
  Description of Artificial Sequence: Synthetic oligonucleotide
  Antisense strand to SEQ ID NO: 2218670
aaacucgaggucgaugacc

SEQ ID NO: 2218672 - RNA, 19 nt, Artificial Sequence
  Description of Artificial Sequence: Synthetic oligonucleotide
  Sense strand starting at position 450 of SEQ ID NO: 1883820
gagcuaugauccuaacagg

SEQ ID NO: 2218673 - RNA, 19 nt, Artificial Sequence
  Description of Artificial Sequence: Synthetic oligonucleotide
  Antisense strand to SEQ ID NO: 2218672
ccuguuaggaucauagcuc

SEQ ID NO: 2218674 - RNA, 19 nt, Artificial Sequence
  Description of Artificial Sequence: Synthetic oligonucleotide
  Sense strand starting at position 148 of SEQ ID NO: 1883820
ccagcagagugagaacuua

SEQ ID NO: 2218675 - RNA, 19 nt, Artificial Sequence
  Description of Artificial Sequence: Synthetic oligonucleotide
  Antisense strand to SEQ ID NO: 2218674
uaaguucucacucugcugg

SEQ ID NO: 2218676 - RNA, 19 nt, Artificial Sequence
  Description of Artificial Sequence: Synthetic oligonucleotide
  Sense strand starting at position 814 of SEQ ID NO: 1883820
ccguaagugucgcuagaac

SEQ ID NO: 2218677 - RNA, 19 nt, Artificial Sequence
  Description of Artificial Sequence: Synthetic oligonucleotide
  Antisense strand to SEQ ID NO: 2218676
guucuagcgacacuuacgg

SEQ ID NO: 2218678 - RNA, 19 nt, Artificial Sequence
  Description of Artificial Sequence: Synthetic oligonucleotide
  Sense strand starting at position 3605 of SEQ ID NO: 1883820
cacugagauugucagcaag

SEQ ID NO: 2218679 - RNA, 19 nt, Artificial Sequence
  Description of Artificial Sequence: Synthetic oligonucleotide
  Antisense strand to SEQ ID NO: 2218678
cuugcugacaaucucagug

SEQ ID NO: 2218680 - RNA, 19 nt, Artificial Sequence
  Description of Artificial Sequence: Synthetic oligonucleotide
  Sense strand starting at position 3102 of SEQ ID NO: 1883820
aagugaggcuccuaggauu

SEQ ID NO: 2218681 - RNA, 19 nt, Artificial Sequence
  Description of Artificial Sequence: Synthetic oligonucleotide
  Antisense strand to SEQ ID NO: 2218680
aauccuaggagccucacuu

SEQ ID NO: 2218682 - RNA, 19 nt, Artificial Sequence
  Description of Artificial Sequence: Synthetic oligonucleotide
  Sense strand starting at position 3503 of SEQ ID NO: 1883820
ggaugugaguggcaucaga

SEQ ID NO: 2218683 - RNA, 19 nt, Artificial Sequence
  Description of Artificial Sequence: Synthetic oligonucleotide
  Antisense strand to SEQ ID NO: 2218682
ucugaugccacucacaucc

SEQ ID NO: 2218684 - RNA, 19 nt, Artificial Sequence
  Description of Artificial Sequence: Synthetic oligonucleotide
  Sense strand starting at position 2712 of SEQ ID NO: 1883821
uuagaaucagcuuaucuag

SEQ ID NO: 2218685 - RNA, 19 nt, Artificial Sequence
  Description of Artificial Sequence: Synthetic oligonucleotide
  Antisense strand to SEQ ID NO: 2218684
cuagauaagcugauucuaa

SEQ ID NO: 2218686 - RNA, 19 nt, Artificial Sequence
  Description of Artificial Sequence: Synthetic oligonucleotide
  Sense strand starting at position 2846 of SEQ ID NO: 1883821
aggauacuucuccaguuac

SEQ ID NO: 2218687 - RNA, 19 nt, Artificial Sequence
  Description of Artificial Sequence: Synthetic oligonucleotide
  Antisense strand to SEQ ID NO: 2218686
guaacuggagaaguauccu

SEQ ID NO: 2218688 - RNA, 19 nt, Artificial Sequence
  Description of Artificial Sequence: Synthetic oligonucleotide
  Sense strand starting at position 1047 of SEQ ID NO: 1883821
agugcauagauagauguaa

SEQ ID NO: 2218689 - RNA, 19 nt, Artificial Sequence
  Description of Artificial Sequence: Synthetic oligonucleotide
  Antisense strand to SEQ ID NO: 2218688
uuacaucuaucuaugcacu

SEQ ID NO: 2218690 - RNA, 19 nt, Artificial Sequence
  Description of Artificial Sequence: Synthetic oligonucleotide
  Sense strand starting at position 2193 of SEQ ID NO: 1883821
cuuauuaaagaugguugga

SEQ ID NO: 2218691 - RNA, 19 nt, Artificial Sequence
  Description of Artificial Sequence: Synthetic oligonucleotide
  Antisense strand to SEQ ID NO: 2218690
uccaaccaucuuuaauaag

SEQ ID NO: 2218692 - RNA, 19 nt, Artificial Sequence
  Description of Artificial Sequence: Synthetic oligonucleotide
  Sense strand starting at position 3481 of SEQ ID NO: 1883821
uuguuagcauuucuuauca

SEQ ID NO: 2218693 - RNA, 19 nt, Artificial Sequence
  Description of Artificial Sequence: Synthetic oligonucleotide
  Antisense strand to SEQ ID NO: 2218692
ugauaagaaaugcuaacaa

SEQ ID NO: 2218694 - RNA, 19 nt, Artificial Sequence
  Description of Artificial Sequence: Synthetic oligonucleotide
  Sense strand starting at position 3872 of SEQ ID NO: 1883821
ggcuuuauuuguucuauca

SEQ ID NO: 2218695 - RNA, 19 nt, Artificial Sequence
  Description of Artificial Sequence: Synthetic oligonucleotide
  Antisense strand to SEQ ID NO: 2218694
ugauagaacaaauaaagcc

SEQ ID NO: 2218696 - RNA, 19 nt, Artificial Sequence
  Description of Artificial Sequence: Synthetic oligonucleotide
  Sense strand starting at position 3871 of SEQ ID NO: 1883821
aggcuuuauuuguucuauc

SEQ ID NO: 2218697 - RNA, 19 nt, Artificial Sequence
  Description of Artificial Sequence: Synthetic oligonucleotide
  Antisense strand to SEQ ID NO: 2218696
gauagaacaaauaaagccu

SEQ ID NO: 2218698 - RNA, 19 nt, Artificial Sequence
  Description of Artificial Sequence: Synthetic oligonucleotide
  Sense strand starting at position 1140 of SEQ ID NO: 1883821
ggagcuaaugcuuaauuaa

SEQ ID NO: 2218699 - RNA, 19 nt, Artificial Sequence
  Description of Artificial Sequence: Synthetic oligonucleotide
  Antisense strand to SEQ ID NO: 2218698
uuaauuaagcauuagcucc

SEQ ID NO: 2218700 - RNA, 19 nt, Artificial Sequence
  Description of Artificial Sequence: Synthetic oligonucleotide
  Sense strand starting at position 1049 of SEQ ID NO: 1883821
ugcauagauagauguaaga

SEQ ID NO: 2218701 - RNA, 19 nt, Artificial Sequence
  Description of Artificial Sequence: Synthetic oligonucleotide
  Antisense strand to SEQ ID NO: 2218700
ucuuacaucuaucuaugca

SEQ ID NO: 2218702 - RNA, 19 nt, Artificial Sequence
  Description of Artificial Sequence: Synthetic oligonucleotide
  Sense strand starting at position 207 of SEQ ID NO: 1883821
cauugucaaguugaaguaa

SEQ ID NO: 2218703 - RNA, 19 nt, Artificial Sequence
  Description of Artificial Sequence: Synthetic oligonucleotide
  Antisense strand to SEQ ID NO: 2218702
uuacuucaacuugacaaug

SEQ ID NO: 2218704 - RNA, 19 nt, Artificial Sequence
  Description of Artificial Sequence: Synthetic oligonucleotide
  Sense strand starting at position 87 of SEQ ID NO: 1883821
guagacuucuaucucaaga

SEQ ID NO: 2218705 - RNA, 19 nt, Artificial Sequence
  Description of Artificial Sequence: Synthetic oligonucleotide
  Antisense strand to SEQ ID NO: 2218704
ucuugagauagaagucuac

SEQ ID NO: 2218706 - RNA, 19 nt, Artificial Sequence
  Description of Artificial Sequence: Synthetic oligonucleotide
  Sense strand starting at position 1089 of SEQ ID NO: 1883821
gaaagagacuggucuuggu

SEQ ID NO: 2218707 - RNA, 19 nt, Artificial Sequence
  Description of Artificial Sequence: Synthetic oligonucleotide
  Antisense strand to SEQ ID NO: 2218706
accaagaccagucucuuuc

SEQ ID NO: 2218708 - RNA, 19 nt, Artificial Sequence
  Description of Artificial Sequence: Synthetic oligonucleotide
  Sense strand starting at position 1162 of SEQ ID NO: 1883821
cuacucugggccuaacauu

SEQ ID NO: 2218709 - RNA, 19 nt, Artificial Sequence
  Description of Artificial Sequence: Synthetic oligonucleotide
  Antisense strand to SEQ ID NO: 2218708
aauguuaggcccagaguag

SEQ ID NO: 2218710 - RNA, 19 nt, Artificial Sequence
  Description of Artificial Sequence: Synthetic oligonucleotide
  Sense strand starting at position 3363 of SEQ ID NO: 1883821
ucuuauauucccgggaaga

SEQ ID NO: 2218711 - RNA, 19 nt, Artificial Sequence
  Description of Artificial Sequence: Synthetic oligonucleotide
  Antisense strand to SEQ ID NO: 2218710
ucuucccgggaauauaaga

SEQ ID NO: 2218712 - RNA, 19 nt, Artificial Sequence
  Description of Artificial Sequence: Synthetic oligonucleotide
  Sense strand starting at position 3364 of SEQ ID NO: 1883821
cuuauauucccgggaagau

SEQ ID NO: 2218713 - RNA, 19 nt, Artificial Sequence
  Description of Artificial Sequence: Synthetic oligonucleotide
  Antisense strand to SEQ ID NO: 2218712
aucuucccgggaauauaag

SEQ ID NO: 2218714 - RNA, 19 nt, Artificial Sequence
  Description of Artificial Sequence: Synthetic oligonucleotide
  Sense strand starting at position 2609 of SEQ ID NO: 1883821
augccauacucauuggaua

SEQ ID NO: 2218715 - RNA, 19 nt, Artificial Sequence
  Description of Artificial Sequence: Synthetic oligonucleotide
  Antisense strand to SEQ ID NO: 2218714
uauccaaugaguauggcau

SEQ ID NO: 2218716 - RNA, 19 nt, Artificial Sequence
  Description of Artificial Sequence: Synthetic oligonucleotide
  Sense strand starting at position 2844 of SEQ ID NO: 1883821
auaggauacuucuccaguu

SEQ ID NO: 2218717 - RNA, 19 nt, Artificial Sequence
  Description of Artificial Sequence: Synthetic oligonucleotide
  Antisense strand to SEQ ID NO: 2218716
aacuggagaaguauccuau

SEQ ID NO: 2218718 - RNA, 19 nt, Artificial Sequence
  Description of Artificial Sequence: Synthetic oligonucleotide
  Sense strand starting at position 2598 of SEQ ID NO: 1883821
auacucauuggaugccaua

SEQ ID NO: 2218719 - RNA, 19 nt, Artificial Sequence
  Description of Artificial Sequence: Synthetic oligonucleotide
  Antisense strand to SEQ ID NO: 2218718
uauggcauccaaugaguau

SEQ ID NO: 2218720 - RNA, 19 nt, Artificial Sequence
  Description of Artificial Sequence: Synthetic oligonucleotide
  Sense strand starting at position 1093 of SEQ ID NO: 1883821
gagacuggucuugguuaaa

SEQ ID NO: 2218721 - RNA, 19 nt, Artificial Sequence
  Description of Artificial Sequence: Synthetic oligonucleotide
  Antisense strand to SEQ ID NO: 2218720
uuuaaccaagaccagucuc

SEQ ID NO: 2218722 - RNA, 19 nt, Artificial Sequence
  Description of Artificial Sequence: Synthetic oligonucleotide
  Sense strand starting at position 2593 of SEQ ID NO: 1883821
ugucuauacucauuggaug

SEQ ID NO: 2218723 - RNA, 19 nt, Artificial Sequence
  Description of Artificial Sequence: Synthetic oligonucleotide
  Antisense strand to SEQ ID NO: 2218722
cauccaaugaguauagaca

SEQ ID NO: 2218724 - RNA, 19 nt, Artificial Sequence
  Description of Artificial Sequence: Synthetic oligonucleotide
  Sense strand starting at position 1329 of SEQ ID NO: 1883821
auuccaagccgagauguau

SEQ ID NO: 2218725 - RNA, 19 nt, Artificial Sequence
  Description of Artificial Sequence: Synthetic oligonucleotide
  Antisense strand to SEQ ID NO: 2218724
auacaucucggcuuggaau

SEQ ID NO: 2218726 - RNA, 19 nt, Artificial Sequence
  Description of Artificial Sequence: Synthetic oligonucleotide
  Sense strand starting at position 271 of SEQ ID NO: 1883821
gcuccuccgaaagauagua

SEQ ID NO: 2218727 - RNA, 19 nt, Artificial Sequence
  Description of Artificial Sequence: Synthetic oligonucleotide
  Antisense strand to SEQ ID NO: 2218726
uacuaucuuucggaggagc

SEQ ID NO: 2218728 - RNA, 19 nt, Artificial Sequence
  Description of Artificial Sequence: Synthetic oligonucleotide
  Sense strand starting at position 1544 of SEQ ID NO: 1883821
aucaaaucuucggcuaaag

SEQ ID NO: 2218729 - RNA, 19 nt, Artificial Sequence
  Description of Artificial Sequence: Synthetic oligonucleotide
  Antisense strand to SEQ ID NO: 2218728
cuuuagccgaagauuugau

SEQ ID NO: 2218730 - RNA, 19 nt, Artificial Sequence
  Description of Artificial Sequence: Synthetic oligonucleotide
  Sense strand starting at position 1139 of SEQ ID NO: 1883821
aggagcuaaugcuuaauua

SEQ ID NO: 2218731 - RNA, 19 nt, Artificial Sequence
  Description of Artificial Sequence: Synthetic oligonucleotide
  Antisense strand to SEQ ID NO: 2218730
uaauuaagcauuagcuccu

SEQ ID NO: 2218732 - RNA, 19 nt, Artificial Sequence
  Description of Artificial Sequence: Synthetic oligonucleotide
  Sense strand starting at position 1541 of SEQ ID NO: 1883821
ggaaucaaaucuucggcua

SEQ ID NO: 2218733 - RNA, 19 nt, Artificial Sequence
  Description of Artificial Sequence: Synthetic oligonucleotide
  Antisense strand to SEQ ID NO: 2218732
uagccgaagauuugauucc

SEQ ID NO: 2218734 - RNA, 19 nt, Artificial Sequence
  Description of Artificial Sequence: Synthetic oligonucleotide
  Sense strand starting at position 2610 of SEQ ID NO: 1883821
ugccauacucauuggauau

SEQ ID NO: 2218735 - RNA, 19 nt, Artificial Sequence
  Description of Artificial Sequence: Synthetic oligonucleotide
  Antisense strand to SEQ ID NO: 2218734
auauccaaugaguauggca

SEQ ID NO: 2218736 - RNA, 19 nt, Artificial Sequence
  Description of Artificial Sequence: Synthetic oligonucleotide
  Sense strand starting at position 3603 of SEQ ID NO: 1883821
aaaucaucuggguggguuu

SEQ ID NO: 2218737 - RNA, 19 nt, Artificial Sequence
  Description of Artificial Sequence: Synthetic oligonucleotide
  Antisense strand to SEQ ID NO: 2218736
aaacccacccagaugauuu

SEQ ID NO: 2218738 - RNA, 19 nt, Artificial Sequence
  Description of Artificial Sequence: Synthetic oligonucleotide
  Sense strand starting at position 105 of SEQ ID NO: 1883821
auucuuguccuugagucau

SEQ ID NO: 2218739 - RNA, 19 nt, Artificial Sequence
  Description of Artificial Sequence: Synthetic oligonucleotide
  Antisense strand to SEQ ID NO: 2218738
augacucaaggacaagaau

SEQ ID NO: 2218740 - RNA, 19 nt, Artificial Sequence
  Description of Artificial Sequence: Synthetic oligonucleotide
  Sense strand starting at position 2459 of SEQ ID NO: 1883821
auaucucuuugauccaguu

SEQ ID NO: 2218741 - RNA, 19 nt, Artificial Sequence
  Description of Artificial Sequence: Synthetic oligonucleotide
  Antisense strand to SEQ ID NO: 2218740
aacuggaucaaagagauau

SEQ ID NO: 2218742 - RNA, 19 nt, Artificial Sequence
  Description of Artificial Sequence: Synthetic oligonucleotide
  Sense strand starting at position 2651 of SEQ ID NO: 1883821
uguuaugcaucuuuaagaa

SEQ ID NO: 2218743 - RNA, 19 nt, Artificial Sequence
  Description of Artificial Sequence: Synthetic oligonucleotide
  Antisense strand to SEQ ID NO: 2218742
uucuuaaagaugcauaaca

SEQ ID NO: 2218744 - RNA, 19 nt, Artificial Sequence
  Description of Artificial Sequence: Synthetic oligonucleotide
  Sense strand starting at position 2714 of SEQ ID NO: 1883821
agaaucagcuuaucuaguu

SEQ ID NO: 2218745 - RNA, 19 nt, Artificial Sequence
  Description of Artificial Sequence: Synthetic oligonucleotide
  Antisense strand to SEQ ID NO: 2218744
aacuagauaagcugauucu

SEQ ID NO: 2218746 - RNA, 19 nt, Artificial Sequence
  Description of Artificial Sequence: Synthetic oligonucleotide
  Sense strand starting at position 5 of SEQ ID NO: 1883821
agaaauagcuauguuccuu

SEQ ID NO: 2218747 - RNA, 19 nt, Artificial Sequence
  Description of Artificial Sequence: Synthetic oligonucleotide
  Antisense strand to SEQ ID NO: 2218746
aaggaacauagcuauuucu

SEQ ID NO: 2218748 - RNA, 19 nt, Artificial Sequence
  Description of Artificial Sequence: Synthetic oligonucleotide
  Sense strand starting at position 2016 of SEQ ID NO: 1883821
ucagguucuuuauuguaaa

SEQ ID NO: 2218749 - RNA, 19 nt, Artificial Sequence
  Description of Artificial Sequence: Synthetic oligonucleotide
  Antisense strand to SEQ ID NO: 2218748
uuuacaauaaagaaccuga

SEQ ID NO: 2218750 - RNA, 19 nt, Artificial Sequence
  Description of Artificial Sequence: Synthetic oligonucleotide
  Sense strand starting at position 1231 of SEQ ID NO: 1883821
gguaguauauauucccacu

SEQ ID NO: 2218751 - RNA, 19 nt, Artificial Sequence
  Description of Artificial Sequence: Synthetic oligonucleotide
  Antisense strand to SEQ ID NO: 2218750
agugggaauauauacuacc

SEQ ID NO: 2218752 - RNA, 19 nt, Artificial Sequence
  Description of Artificial Sequence: Synthetic oligonucleotide
  Sense strand starting at position 1077 of SEQ ID NO: 1883821
ggaauugacucagaaagag

SEQ ID NO: 2218753 - RNA, 19 nt, Artificial Sequence
  Description of Artificial Sequence: Synthetic oligonucleotide
  Antisense strand to SEQ ID NO: 2218752
cucuuucugagucaauucc

SEQ ID NO: 2218754 - RNA, 19 nt, Artificial Sequence
  Description of Artificial Sequence: Synthetic oligonucleotide
  Sense strand starting at position 2587 of SEQ ID NO: 1883821
ccuguuugucuauacucau

SEQ ID NO: 2218755 - RNA, 19 nt, Artificial Sequence
  Description of Artificial Sequence: Synthetic oligonucleotide
  Antisense strand to SEQ ID NO: 2218754
augaguauagacaaacagg

SEQ ID NO: 2218756 - RNA, 19 nt, Artificial Sequence
  Description of Artificial Sequence: Synthetic oligonucleotide
  Sense strand starting at position 3920 of SEQ ID NO: 1883821
gcugauccucucuauugua

SEQ ID NO: 2218757 - RNA, 19 nt, Artificial Sequence
  Description of Artificial Sequence: Synthetic oligonucleotide
  Antisense strand to SEQ ID NO: 2218756
uacaauagagaggaucagc

SEQ ID NO: 2218758 - RNA, 19 nt, Artificial Sequence
  Description of Artificial Sequence: Synthetic oligonucleotide
  Sense strand starting at position 1265 of SEQ ID NO: 1883821
augagccucugauugguua

SEQ ID NO: 2218759 - RNA, 19 nt, Artificial Sequence
  Description of Artificial Sequence: Synthetic oligonucleotide
  Antisense strand to SEQ ID NO: 2218758
uaaccaaucagaggcucau

SEQ ID NO: 2218760 - RNA, 19 nt, Artificial Sequence
  Description of Artificial Sequence: Synthetic oligonucleotide
  Sense strand starting at position 2468 of SEQ ID NO: 1883821
ugauccaguuccuucuauu

SEQ ID NO: 2218761 - RNA, 19 nt, Artificial Sequence
  Description of Artificial Sequence: Synthetic oligonucleotide
  Antisense strand to SEQ ID NO: 2218760
aauagaaggaacuggauca

SEQ ID NO: 2218762 - RNA, 19 nt, Artificial Sequence
  Description of Artificial Sequence: Synthetic oligonucleotide
  Sense strand starting at position 264 of SEQ ID NO: 1883821
ccugauagcuccuccgaaa

SEQ ID NO: 2218763 - RNA, 19 nt, Artificial Sequence
  Description of Artificial Sequence: Synthetic oligonucleotide
  Antisense strand to SEQ ID NO: 2218762
uuucggaggagcuaucagg

SEQ ID NO: 2218764 - RNA, 19 nt, Artificial Sequence
  Description of Artificial Sequence: Synthetic oligonucleotide
  Sense strand starting at position 3394 of SEQ ID NO: 1883822
gaguacagucugggagaaa

SEQ ID NO: 2218765 - RNA, 19 nt, Artificial Sequence
  Description of Artificial Sequence: Synthetic oligonucleotide
  Antisense strand to SEQ ID NO: 2218764
uuucucccagacuguacuc

SEQ ID NO: 2218766 - RNA, 19 nt, Artificial Sequence
  Description of Artificial Sequence: Synthetic oligonucleotide
  Sense strand starting at position 3755 of SEQ ID NO: 1883822
uccaguaagcacuauggaa

SEQ ID NO: 2218767 - RNA, 19 nt, Artificial Sequence
  Description of Artificial Sequence: Synthetic oligonucleotide
  Antisense strand to SEQ ID NO: 2218766
uuccauagugcuuacugga

SEQ ID NO: 2218768 - RNA, 19 nt, Artificial Sequence
  Description of Artificial Sequence: Synthetic oligonucleotide
  Sense strand starting at position 2914 of SEQ ID NO: 1883822
gagcguguggugaacugua

SEQ ID NO: 2218769 - RNA, 19 nt, Artificial Sequence
  Description of Artificial Sequence: Synthetic oligonucleotide
  Antisense strand to SEQ ID NO: 2218768
uacaguucaccacacgcuc

SEQ ID NO: 2218770 - RNA, 19 nt, Artificial Sequence
  Description of Artificial Sequence: Synthetic oligonucleotide
  Sense strand starting at position 2919 of SEQ ID NO: 1883822
uguggugaacuguaaauaa

SEQ ID NO: 2218771 - RNA, 19 nt, Artificial Sequence
  Description of Artificial Sequence: Synthetic oligonucleotide
  Antisense strand to SEQ ID NO: 2218770
uuauuuacaguucaccaca

SEQ ID NO: 2218772 - RNA, 19 nt, Artificial Sequence
  Description of Artificial Sequence: Synthetic oligonucleotide
  Sense strand starting at position 1177 of SEQ ID NO: 1883822
aucauagcucuugaaguaa

SEQ ID NO: 2218773 - RNA, 19 nt, Artificial Sequence
  Description of Artificial Sequence: Synthetic oligonucleotide
  Antisense strand to SEQ ID NO: 2218772
uuacuucaagagcuaugau

SEQ ID NO: 2218774 - RNA, 19 nt, Artificial Sequence
  Description of Artificial Sequence: Synthetic oligonucleotide
  Sense strand starting at position 220 of SEQ ID NO: 1883822
ugauuaguagcauacuuaa

SEQ ID NO: 2218775 - RNA, 19 nt, Artificial Sequence
  Description of Artificial Sequence: Synthetic oligonucleotide
  Antisense strand to SEQ ID NO: 2218774
uuaaguaugcuacuaauca

SEQ ID NO: 2218776 - RNA, 19 nt, Artificial Sequence
  Description of Artificial Sequence: Synthetic oligonucleotide
  Sense strand starting at position 123 of SEQ ID NO: 1883822
uggugaagucauggaagac

SEQ ID NO: 2218777 - RNA, 19 nt, Artificial Sequence
  Description of Artificial Sequence: Synthetic oligonucleotide
  Antisense strand to SEQ ID NO: 2218776
gucuuccaugacuucacca

SEQ ID NO: 2218778 - RNA, 19 nt, Artificial Sequence
  Description of Artificial Sequence: Synthetic oligonucleotide
  Sense strand starting at position 2071 of SEQ ID NO: 1883822
guugguggcgugagauuaa

SEQ ID NO: 2218779 - RNA, 19 nt, Artificial Sequence
  Description of Artificial Sequence: Synthetic oligonucleotide
  Antisense strand to SEQ ID NO: 2218778
uuaaucucacgccaccaac

SEQ ID NO: 2218780 - RNA, 19 nt, Artificial Sequence
  Description of Artificial Sequence: Synthetic oligonucleotide
  Sense strand starting at position 3720 of SEQ ID NO: 1883822
ggcugucaccuugaggaga

SEQ ID NO: 2218781 - RNA, 19 nt, Artificial Sequence
  Description of Artificial Sequence: Synthetic oligonucleotide
  Antisense strand to SEQ ID NO: 2218780
ucuccucaaggugacagcc

SEQ ID NO: 2218782 - RNA, 19 nt, Artificial Sequence
  Description of Artificial Sequence: Synthetic oligonucleotide
  Sense strand starting at position 3638 of SEQ ID NO: 1883822
acuguaaagacugacguua

SEQ ID NO: 2218783 - RNA, 19 nt, Artificial Sequence
  Description of Artificial Sequence: Synthetic oligonucleotide
  Antisense strand to SEQ ID NO: 2218782
uaacgucagucuuuacagu

SEQ ID NO: 2218784 - RNA, 19 nt, Artificial Sequence
  Description of Artificial Sequence: Synthetic oligonucleotide
  Sense strand starting at position 2896 of SEQ ID NO: 1883822
ggagguaacggaugugaag

SEQ ID NO: 2218785 - RNA, 19 nt, Artificial Sequence
  Description of Artificial Sequence: Synthetic oligonucleotide
  Antisense strand to SEQ ID NO: 2218784
cuucacauccguuaccucc

SEQ ID NO: 2218786 - RNA, 19 nt, Artificial Sequence
  Description of Artificial Sequence: Synthetic oligonucleotide
  Sense strand starting at position 2103 of SEQ ID NO: 1883822
gggcauaacuuucuaagac

SEQ ID NO: 2218787 - RNA, 19 nt, Artificial Sequence
  Description of Artificial Sequence: Synthetic oligonucleotide
  Antisense strand to SEQ ID NO: 2218786
gucuuagaaaguuaugccc

SEQ ID NO: 2218788 - RNA, 19 nt, Artificial Sequence
  Description of Artificial Sequence: Synthetic oligonucleotide
  Sense strand starting at position 3382 of SEQ ID NO: 1883822
guucuuggaccugaguaca

SEQ ID NO: 2218789 - RNA, 19 nt, Artificial Sequence
  Description of Artificial Sequence: Synthetic oligonucleotide
  Antisense strand to SEQ ID NO: 2218788
uguacucagguccaagaac

SEQ ID NO: 2218790 - RNA, 19 nt, Artificial Sequence
  Description of Artificial Sequence: Synthetic oligonucleotide
  Sense strand starting at position 3155 of SEQ ID NO: 1883822
ccugaaauguaaguugaca

SEQ ID NO: 2218791 - RNA, 19 nt, Artificial Sequence
  Description of Artificial Sequence: Synthetic oligonucleotide
  Antisense strand to SEQ ID NO: 2218790
ugucaacuuacauuucagg

SEQ ID NO: 2218792 - RNA, 19 nt, Artificial Sequence
  Description of Artificial Sequence: Synthetic oligonucleotide
  Sense strand starting at position 3392 of SEQ ID NO: 1883822
cugaguacagucugggaga

SEQ ID NO: 2218793 - RNA, 19 nt, Artificial Sequence
  Description of Artificial Sequence: Synthetic oligonucleotide
  Antisense strand to SEQ ID NO: 2218792
ucucccagacuguacucag

SEQ ID NO: 2218794 - RNA, 19 nt, Artificial Sequence
  Description of Artificial Sequence: Synthetic oligonucleotide
  Sense strand starting at position 1538 of SEQ ID NO: 1883822
gacugaucgcuugacacca

SEQ ID NO: 2218795 - RNA, 19 nt, Artificial Sequence
  Description of Artificial Sequence: Synthetic oligonucleotide
  Antisense strand to SEQ ID NO: 2218794
uggugucaagcgaucaguc

SEQ ID NO: 2218796 - RNA, 19 nt, Artificial Sequence
  Description of Artificial Sequence: Synthetic oligonucleotide
  Sense strand starting at position 3497 of SEQ ID NO: 1883822
aaaucagugcugggaacau

SEQ ID NO: 2218797 - RNA, 19 nt, Artificial Sequence
  Description of Artificial Sequence: Synthetic oligonucleotide
  Antisense strand to SEQ ID NO: 2218796
auguucccagcacugauuu

SEQ ID NO: 2218798 - RNA, 19 nt, Artificial Sequence
  Description of Artificial Sequence: Synthetic oligonucleotide
  Sense strand starting at position 3496 of SEQ ID NO: 1883822
caaaucagugcugggaaca

SEQ ID NO: 2218799 - RNA, 19 nt, Artificial Sequence
  Description of Artificial Sequence: Synthetic oligonucleotide
  Antisense strand to SEQ ID NO: 2218798
uguucccagcacugauuug

SEQ ID NO: 2218800 - RNA, 19 nt, Artificial Sequence
  Description of Artificial Sequence: Synthetic oligonucleotide
  Sense strand starting at position 940 of SEQ ID NO: 1883822
cagggagagucaguguaau

SEQ ID NO: 2218801 - RNA, 19 nt, Artificial Sequence
  Description of Artificial Sequence: Synthetic oligonucleotide
  Antisense strand to SEQ ID NO: 2218800
auuacacugacucucccug

SEQ ID NO: 2218802 - RNA, 19 nt, Artificial Sequence
  Description of Artificial Sequence: Synthetic oligonucleotide
  Sense strand starting at position 83 of SEQ ID NO: 1883822
cauggaaggcucuguggaa

SEQ ID NO: 2218803 - RNA, 19 nt, Artificial Sequence
  Description of Artificial Sequence: Synthetic oligonucleotide
  Antisense strand to SEQ ID NO: 2218802
uuccacagagccuuccaug

SEQ ID NO: 2218804 - RNA, 19 nt, Artificial Sequence
  Description of Artificial Sequence: Synthetic oligonucleotide
  Sense strand starting at position 3551 of SEQ ID NO: 1883822
ggagaauuguauucuccuc

SEQ ID NO: 2218805 - RNA, 19 nt, Artificial Sequence
  Description of Artificial Sequence: Synthetic oligonucleotide
  Antisense strand to SEQ ID NO: 2218804
gaggagaauacaauucucc

SEQ ID NO: 2218806 - RNA, 19 nt, Artificial Sequence
  Description of Artificial Sequence: Synthetic oligonucleotide
  Sense strand starting at position 30 of SEQ ID NO: 1883822
gggagcucuugaucuaacu

SEQ ID NO: 2218807 - RNA, 19 nt, Artificial Sequence
  Description of Artificial Sequence: Synthetic oligonucleotide
  Antisense strand to SEQ ID NO: 2218806
aguuagaucaagagcuccc

SEQ ID NO: 2218808 - RNA, 19 nt, Artificial Sequence
  Description of Artificial Sequence: Synthetic oligonucleotide
  Sense strand starting at position 812 of SEQ ID NO: 1883822
gugaaauagcggcacuaaa

SEQ ID NO: 2218809 - RNA, 19 nt, Artificial Sequence
  Description of Artificial Sequence: Synthetic oligonucleotide
  Antisense strand to SEQ ID NO: 2218808
uuuagugccgcuauuucac

SEQ ID NO: 2218810 - RNA, 19 nt, Artificial Sequence
  Description of Artificial Sequence: Synthetic oligonucleotide
  Sense strand starting at position 3157 of SEQ ID NO: 1883822
ugaaauguaaguugacagu

SEQ ID NO: 2218811 - RNA, 19 nt, Artificial Sequence
  Description of Artificial Sequence: Synthetic oligonucleotide
  Antisense strand to SEQ ID NO: 2218810
acugucaacuuacauuuca

SEQ ID NO: 2218812 - RNA, 19 nt, Artificial Sequence
  Description of Artificial Sequence: Synthetic oligonucleotide
  Sense strand starting at position 211 of SEQ ID NO: 1883822
ccucuuaccugauuaguag

SEQ ID NO: 2218813 - RNA, 19 nt, Artificial Sequence
  Description of Artificial Sequence: Synthetic oligonucleotide
  Antisense strand to SEQ ID NO: 2218812
cuacuaaucagguaagagg

SEQ ID NO: 2218814 - RNA, 19 nt, Artificial Sequence
  Description of Artificial Sequence: Synthetic oligonucleotide
  Sense strand starting at position 1147 of SEQ ID NO: 1883822
cgguucuaacuugagugau

SEQ ID NO: 2218815 - RNA, 19 nt, Artificial Sequence
  Description of Artificial Sequence: Synthetic oligonucleotide
  Antisense strand to SEQ ID NO: 2218814
aucacucaaguuagaaccg

SEQ ID NO: 2218816 - RNA, 19 nt, Artificial Sequence
  Description of Artificial Sequence: Synthetic oligonucleotide
  Sense strand starting at position 256 of SEQ ID NO: 1883822
ugccucauucuuugaaaga

SEQ ID NO: 2218817 - RNA, 19 nt, Artificial Sequence
  Description of Artificial Sequence: Synthetic oligonucleotide
  Antisense strand to SEQ ID NO: 2218816
ucuuucaaagaaugaggca

SEQ ID NO: 2218818 - RNA, 19 nt, Artificial Sequence
  Description of Artificial Sequence: Synthetic oligonucleotide
  Sense strand starting at position 3372 of SEQ ID NO: 1883822
aguaaauucuguucuugga

SEQ ID NO: 2218819 - RNA, 19 nt, Artificial Sequence
  Description of Artificial Sequence: Synthetic oligonucleotide
  Antisense strand to SEQ ID NO: 2218818
uccaagaacagaauuuacu

SEQ ID NO: 2218820 - RNA, 19 nt, Artificial Sequence
  Description of Artificial Sequence: Synthetic oligonucleotide
  Sense strand starting at position 155 of SEQ ID NO: 1883822
ggcuguucgacagaaggua

SEQ ID NO: 2218821 - RNA, 19 nt, Artificial Sequence
  Description of Artificial Sequence: Synthetic oligonucleotide
  Antisense strand to SEQ ID NO: 2218820
uaccuucugucgaacagcc

SEQ ID NO: 2218822 - RNA, 19 nt, Artificial Sequence
  Description of Artificial Sequence: Synthetic oligonucleotide
  Sense strand starting at position 3462 of SEQ ID NO: 1883822
cugaguucacugugggaug

SEQ ID NO: 2218823 - RNA, 19 nt, Artificial Sequence
  Description of Artificial Sequence: Synthetic oligonucleotide
  Antisense strand to SEQ ID NO: 2218822
caucccacagugaacucag

SEQ ID NO: 2218824 - RNA, 19 nt, Artificial Sequence
  Description of Artificial Sequence: Synthetic oligonucleotide
  Sense strand starting at position 1189 of SEQ ID NO: 1883822
gaaguaagugcuuaucuuc

SEQ ID NO: 2218825 - RNA, 19 nt, Artificial Sequence
  Description of Artificial Sequence: Synthetic oligonucleotide
  Antisense strand to SEQ ID NO: 2218824
gaagauaagcacuuacuuc

SEQ ID NO: 2218826 - RNA, 19 nt, Artificial Sequence
  Description of Artificial Sequence: Synthetic oligonucleotide
  Sense strand starting at position 962 of SEQ ID NO: 1883822
aacugucuggcuuacagua

SEQ ID NO: 2218827 - RNA, 19 nt, Artificial Sequence
  Description of Artificial Sequence: Synthetic oligonucleotide
  Antisense strand to SEQ ID NO: 2218826
uacuguaagccagacaguu

SEQ ID NO: 2218828 - RNA, 19 nt, Artificial Sequence
  Description of Artificial Sequence: Synthetic oligonucleotide
  Sense strand starting at position 3447 of SEQ ID NO: 1883822
aggcauuccaguugacuga

SEQ ID NO: 2218829 - RNA, 19 nt, Artificial Sequence
  Description of Artificial Sequence: Synthetic oligonucleotide
  Antisense strand to SEQ ID NO: 2218828
ucagucaacuggaaugccu

SEQ ID NO: 2218830 - RNA, 19 nt, Artificial Sequence
  Description of Artificial Sequence: Synthetic oligonucleotide
  Sense strand starting at position 3637 of SEQ ID NO: 1883822
gacuguaaagacugacguu

SEQ ID NO: 2218831 - RNA, 19 nt, Artificial Sequence
  Description of Artificial Sequence: Synthetic oligonucleotide
  Antisense strand to SEQ ID NO: 2218830
aacgucagucuuuacaguc

SEQ ID NO: 2218832 - RNA, 19 nt, Artificial Sequence
  Description of Artificial Sequence: Synthetic oligonucleotide
  Sense strand starting at position 3587 of SEQ ID NO: 1883822
gcacuacguguucaggaaa

SEQ ID NO: 2218833 - RNA, 19 nt, Artificial Sequence
  Description of Artificial Sequence: Synthetic oligonucleotide
  Antisense strand to SEQ ID NO: 2218832
uuuccugaacacguagugc

SEQ ID NO: 2218834 - RNA, 19 nt, Artificial Sequence
  Description of Artificial Sequence: Synthetic oligonucleotide
  Sense strand starting at position 1950 of SEQ ID NO: 1883822
ggaacagaguccucagugu

SEQ ID NO: 2218835 - RNA, 19 nt, Artificial Sequence
  Description of Artificial Sequence: Synthetic oligonucleotide
  Antisense strand to SEQ ID NO: 2218834
acacugaggacucuguucc

SEQ ID NO: 2218836 - RNA, 19 nt, Artificial Sequence
  Description of Artificial Sequence: Synthetic oligonucleotide
  Sense strand starting at position 255 of SEQ ID NO: 1883822
uugccucauucuuugaaag

SEQ ID NO: 2218837 - RNA, 19 nt, Artificial Sequence
  Description of Artificial Sequence: Synthetic oligonucleotide
  Antisense strand to SEQ ID NO: 2218836
cuuucaaagaaugaggcaa

SEQ ID NO: 2218838 - RNA, 19 nt, Artificial Sequence
  Description of Artificial Sequence: Synthetic oligonucleotide
  Sense strand starting at position 1963 of SEQ ID NO: 1883822
caguguguagccuaggaua

SEQ ID NO: 2218839 - RNA, 19 nt, Artificial Sequence
  Description of Artificial Sequence: Synthetic oligonucleotide
  Antisense strand to SEQ ID NO: 2218838
uauccuaggcuacacacug

SEQ ID NO: 2218840 - RNA, 19 nt, Artificial Sequence
  Description of Artificial Sequence: Synthetic oligonucleotide
  Sense strand starting at position 209 of SEQ ID NO: 1883822
ugccucuuaccugauuagu

SEQ ID NO: 2218841 - RNA, 19 nt, Artificial Sequence
  Description of Artificial Sequence: Synthetic oligonucleotide
  Antisense strand to SEQ ID NO: 2218840
acuaaucagguaagaggca

SEQ ID NO: 2218842 - RNA, 19 nt, Artificial Sequence
  Description of Artificial Sequence: Synthetic oligonucleotide
  Sense strand starting at position 1329 of SEQ ID NO: 1883822
agugaaugguggcuacuau

SEQ ID NO: 2218843 - RNA, 19 nt, Artificial Sequence
  Description of Artificial Sequence: Synthetic oligonucleotide
  Antisense strand to SEQ ID NO: 2218842
auaguagccaccauucacu

SEQ ID NO: 2218844 - RNA, 19 nt, Artificial Sequence
  Description of Artificial Sequence: Synthetic oligonucleotide
  Sense strand starting at position 2675 of SEQ ID NO: 1883823
auuacauggcuuuauuaag

SEQ ID NO: 2218845 - RNA, 19 nt, Artificial Sequence
  Description of Artificial Sequence: Synthetic oligonucleotide
  Antisense strand to SEQ ID NO: 2218844
cuuaauaaagccauguaau

SEQ ID NO: 2218846 - RNA, 19 nt, Artificial Sequence
  Description of Artificial Sequence: Synthetic oligonucleotide
  Sense strand starting at position 1510 of SEQ ID NO: 1883823
agcauuguugcaguagcua

SEQ ID NO: 2218847 - RNA, 19 nt, Artificial Sequence
  Description of Artificial Sequence: Synthetic oligonucleotide
  Antisense strand to SEQ ID NO: 2218846
uagcuacugcaacaaugcu

SEQ ID NO: 2218848 - RNA, 19 nt, Artificial Sequence
  Description of Artificial Sequence: Synthetic oligonucleotide
  Sense strand starting at position 2143 of SEQ ID NO: 1883823
uuuauauuccuagaaguug

SEQ ID NO: 2218849 - RNA, 19 nt, Artificial Sequence
  Description of Artificial Sequence: Synthetic oligonucleotide
  Antisense strand to SEQ ID NO: 2218848
caacuucuaggaauauaaa

SEQ ID NO: 2218850 - RNA, 19 nt, Artificial Sequence
  Description of Artificial Sequence: Synthetic oligonucleotide
  Sense strand starting at position 514 of SEQ ID NO: 1883823
uguagcaaccuggauugaa

SEQ ID NO: 2218851 - RNA, 19 nt, Artificial Sequence
  Description of Artificial Sequence: Synthetic oligonucleotide
  Antisense strand to SEQ ID NO: 2218850
uucaauccagguugcuaca

SEQ ID NO: 2218852 - RNA, 19 nt, Artificial Sequence
  Description of Artificial Sequence: Synthetic oligonucleotide
  Sense strand starting at position 888 of SEQ ID NO: 1883823
auuauuuagugcucuuacu

SEQ ID NO: 2218853 - RNA, 19 nt, Artificial Sequence
  Description of Artificial Sequence: Synthetic oligonucleotide
  Antisense strand to SEQ ID NO: 2218852
aguaagagcacuaaauaau

SEQ ID NO: 2218854 - RNA, 19 nt, Artificial Sequence
  Description of Artificial Sequence: Synthetic oligonucleotide
  Sense strand starting at position 2961 of SEQ ID NO: 1883823
auaguauggcaugaaggua

SEQ ID NO: 2218855 - RNA, 19 nt, Artificial Sequence
  Description of Artificial Sequence: Synthetic oligonucleotide
  Antisense strand to SEQ ID NO: 2218854
uaccuucaugccauacuau

SEQ ID NO: 2218856 - RNA, 19 nt, Artificial Sequence
  Description of Artificial Sequence: Synthetic oligonucleotide
  Sense strand starting at position 3630 of SEQ ID NO: 1883823
acaugaauguaucuggauu

SEQ ID NO: 2218857 - RNA, 19 nt, Artificial Sequence
  Description of Artificial Sequence: Synthetic oligonucleotide
  Antisense strand to SEQ ID NO: 2218856
aauccagauacauucaugu

SEQ ID NO: 2218858 - RNA, 19 nt, Artificial Sequence
  Description of Artificial Sequence: Synthetic oligonucleotide
  Sense strand starting at position 970 of SEQ ID NO: 1883823
agaagaaugcauugcagaa

SEQ ID NO: 2218859 - RNA, 19 nt, Artificial Sequence
  Description of Artificial Sequence: Synthetic oligonucleotide
  Antisense strand to SEQ ID NO: 2218858
uucugcaaugcauucuucu

SEQ ID NO: 2218860 - RNA, 19 nt, Artificial Sequence
  Description of Artificial Sequence: Synthetic oligonucleotide
  Sense strand starting at position 1459 of SEQ ID NO: 1883823
uuugacauagcuuaagagu

SEQ ID NO: 2218861 - RNA, 19 nt, Artificial Sequence
  Description of Artificial Sequence: Synthetic oligonucleotide
  Antisense strand to SEQ ID NO: 2218860
acucuuaagcuaugucaaa

SEQ ID NO: 2218862 - RNA, 19 nt, Artificial Sequence
  Description of Artificial Sequence: Synthetic oligonucleotide
  Sense strand starting at position 1519 of SEQ ID NO: 1883823
gcaguagcuauggaaauaa

SEQ ID NO: 2218863 - RNA, 19 nt, Artificial Sequence
  Description of Artificial Sequence: Synthetic oligonucleotide
  Antisense strand to SEQ ID NO: 2218862
uuauuuccauagcuacugc

SEQ ID NO: 2218864 - RNA, 19 nt, Artificial Sequence
  Description of Artificial Sequence: Synthetic oligonucleotide
  Sense strand starting at position 3253 of SEQ ID NO: 1883823
uguugugaaaugcacaaga

SEQ ID NO: 2218865 - RNA, 19 nt, Artificial Sequence
  Description of Artificial Sequence: Synthetic oligonucleotide
  Antisense strand to SEQ ID NO: 2218864
ucuugugcauuucacaaca

SEQ ID NO: 2218866 - RNA, 19 nt, Artificial Sequence
  Description of Artificial Sequence: Synthetic oligonucleotide
  Sense strand starting at position 3572 of SEQ ID NO: 1883823
aagaacuuguagguuuaau

SEQ ID NO: 2218867 - RNA, 19 nt, Artificial Sequence
  Description of Artificial Sequence: Synthetic oligonucleotide
  Antisense strand to SEQ ID NO: 2218866
auuaaaccuacaaguucuu

SEQ ID NO: 2218868 - RNA, 19 nt, Artificial Sequence
  Description of Artificial Sequence: Synthetic oligonucleotide
  Sense strand starting at position 741 of SEQ ID NO: 1883823
accagaauuucggaaauca

SEQ ID NO: 2218869 - RNA, 19 nt, Artificial Sequence
  Description of Artificial Sequence: Synthetic oligonucleotide
  Antisense strand to SEQ ID NO: 2218868
ugauuuccgaaauucuggu

SEQ ID NO: 2218870 - RNA, 19 nt, Artificial Sequence
  Description of Artificial Sequence: Synthetic oligonucleotide
  Sense strand starting at position 2883 of SEQ ID NO: 1883823
ggaaauaaguaauuguagu

SEQ ID NO: 2218871 - RNA, 19 nt, Artificial Sequence
  Description of Artificial Sequence: Synthetic oligonucleotide
  Antisense strand to SEQ ID NO: 2218870
acuacaauuacuuauuucc

SEQ ID NO: 2218872 - RNA, 19 nt, Artificial Sequence
  Description of Artificial Sequence: Synthetic oligonucleotide
  Sense strand starting at position 3571 of SEQ ID NO: 1883823
uaagaacuuguagguuuaa

SEQ ID NO: 2218873 - RNA, 19 nt, Artificial Sequence
  Description of Artificial Sequence: Synthetic oligonucleotide
  Antisense strand to SEQ ID NO: 2218872
uuaaaccuacaaguucuua

SEQ ID NO: 2218874 - RNA, 19 nt, Artificial Sequence
  Description of Artificial Sequence: Synthetic oligonucleotide
  Sense strand starting at position 2364 of SEQ ID NO: 1883823
gagacaguucuuuaugcca

SEQ ID NO: 2218875 - RNA, 19 nt, Artificial Sequence
  Description of Artificial Sequence: Synthetic oligonucleotide
  Antisense strand to SEQ ID NO: 2218874
uggcauaaagaacugucuc

SEQ ID NO: 2218876 - RNA, 19 nt, Artificial Sequence
  Description of Artificial Sequence: Synthetic oligonucleotide
  Sense strand starting at position 3622 of SEQ ID NO: 1883823
uuaguuguacaugaaugua

SEQ ID NO: 2218877 - RNA, 19 nt, Artificial Sequence
  Description of Artificial Sequence: Synthetic oligonucleotide
  Antisense strand to SEQ ID NO: 2218876
uacauucauguacaacuaa

SEQ ID NO: 2218878 - RNA, 19 nt, Artificial Sequence
  Description of Artificial Sequence: Synthetic oligonucleotide
  Sense strand starting at position 3071 of SEQ ID NO: 1883823
augugaauggcauacugua

SEQ ID NO: 2218879 - RNA, 19 nt, Artificial Sequence
  Description of Artificial Sequence: Synthetic oligonucleotide
  Antisense strand to SEQ ID NO: 2218878
uacaguaugccauucacau

SEQ ID NO: 2218880 - RNA, 19 nt, Artificial Sequence
  Description of Artificial Sequence: Synthetic oligonucleotide
  Sense strand starting at position 2502 of SEQ ID NO: 1883823
gugcuuaugauguaaagac

SEQ ID NO: 2218881 - RNA, 19 nt, Artificial Sequence
  Description of Artificial Sequence: Synthetic oligonucleotide
  Antisense strand to SEQ ID NO: 2218880
gucuuuacaucauaagcac

SEQ ID NO: 2218882 - RNA, 19 nt, Artificial Sequence
  Description of Artificial Sequence: Synthetic oligonucleotide
  Sense strand starting at position 2910 of SEQ ID NO: 1883823
uuuaauugccuuggaauaa

SEQ ID NO: 2218883 - RNA, 19 nt, Artificial Sequence
  Description of Artificial Sequence: Synthetic oligonucleotide
  Antisense strand to SEQ ID NO: 2218882
uuauuccaaggcaauuaaa

SEQ ID NO: 2218884 - RNA, 19 nt, Artificial Sequence
  Description of Artificial Sequence: Synthetic oligonucleotide
  Sense strand starting at position 415 of SEQ ID NO: 1883823
agcucagaugcccaucaau

SEQ ID NO: 2218885 - RNA, 19 nt, Artificial Sequence
  Description of Artificial Sequence: Synthetic oligonucleotide
  Antisense strand to SEQ ID NO: 2218884
auugaugggcaucugagcu

SEQ ID NO: 2218886 - RNA, 19 nt, Artificial Sequence
  Description of Artificial Sequence: Synthetic oligonucleotide
  Sense strand starting at position 2475 of SEQ ID NO: 1883823
ugguaagacuagcugaauu

SEQ ID NO: 2218887 - RNA, 19 nt, Artificial Sequence
  Description of Artificial Sequence: Synthetic oligonucleotide
  Antisense strand to SEQ ID NO: 2218886
aauucagcuagucuuacca

SEQ ID NO: 2218888 - RNA, 19 nt, Artificial Sequence
  Description of Artificial Sequence: Synthetic oligonucleotide
  Sense strand starting at position 1019 of SEQ ID NO: 1883823
ucagucagugucuacacaa

SEQ ID NO: 2218889 - RNA, 19 nt, Artificial Sequence
  Description of Artificial Sequence: Synthetic oligonucleotide
  Antisense strand to SEQ ID NO: 2218888
uuguguagacacugacuga

SEQ ID NO: 2218890 - RNA, 19 nt, Artificial Sequence
  Description of Artificial Sequence: Synthetic oligonucleotide
  Sense strand starting at position 373 of SEQ ID NO: 1883823
uguugauagcaguacaauu

SEQ ID NO: 2218891 - RNA, 19 nt, Artificial Sequence
  Description of Artificial Sequence: Synthetic oligonucleotide
  Antisense strand to SEQ ID NO: 2218890
aauuguacugcuaucaaca

SEQ ID NO: 2218892 - RNA, 19 nt, Artificial Sequence
  Description of Artificial Sequence: Synthetic oligonucleotide
  Sense strand starting at position 2960 of SEQ ID NO: 1883823
aauaguauggcaugaaggu

SEQ ID NO: 2218893 - RNA, 19 nt, Artificial Sequence
  Description of Artificial Sequence: Synthetic oligonucleotide
  Antisense strand to SEQ ID NO: 2218892
accuucaugccauacuauu

SEQ ID NO: 2218894 - RNA, 19 nt, Artificial Sequence
  Description of Artificial Sequence: Synthetic oligonucleotide
  Sense strand starting at position 2293 of SEQ ID NO: 1883823
uugucuguccuuuaaacau

SEQ ID NO: 2218895 - RNA, 19 nt, Artificial Sequence
  Description of Artificial Sequence: Synthetic oligonucleotide
  Antisense strand to SEQ ID NO: 2218894
auguuuaaaggacagacaa

SEQ ID NO: 2218896 - RNA, 19 nt, Artificial Sequence
  Description of Artificial Sequence: Synthetic oligonucleotide
  Sense strand starting at position 1638 of SEQ ID NO: 1883823
aaauaauugcaagguaguu

SEQ ID NO: 2218897 - RNA, 19 nt, Artificial Sequence
  Description of Artificial Sequence: Synthetic oligonucleotide
  Antisense strand to SEQ ID NO: 2218896
aacuaccuugcaauuauuu

SEQ ID NO: 2218898 - RNA, 19 nt, Artificial Sequence
  Description of Artificial Sequence: Synthetic oligonucleotide
  Sense strand starting at position 3066 of SEQ ID NO: 1883823
auuccaugugaauggcaua

SEQ ID NO: 2218899 - RNA, 19 nt, Artificial Sequence
  Description of Artificial Sequence: Synthetic oligonucleotide
  Antisense strand to SEQ ID NO: 2218898
uaugccauucacauggaau

SEQ ID NO: 2218900 - RNA, 19 nt, Artificial Sequence
  Description of Artificial Sequence: Synthetic oligonucleotide
  Sense strand starting at position 3235 of SEQ ID NO: 1883823
ucauuaugugauuagcagu

SEQ ID NO: 2218901 - RNA, 19 nt, Artificial Sequence
  Description of Artificial Sequence: Synthetic oligonucleotide
  Antisense strand to SEQ ID NO: 2218900
acugcuaaucacauaauga

SEQ ID NO: 2218902 - RNA, 19 nt, Artificial Sequence
  Description of Artificial Sequence: Synthetic oligonucleotide
  Sense strand starting at position 3117 of SEQ ID NO: 1883823
ucuuuaguaggugagcuau

SEQ ID NO: 2218903 - RNA, 19 nt, Artificial Sequence
  Description of Artificial Sequence: Synthetic oligonucleotide
  Antisense strand to SEQ ID NO: 2218902
auagcucaccuacuaaaga

SEQ ID NO: 2218904 - RNA, 19 nt, Artificial Sequence
  Description of Artificial Sequence: Synthetic oligonucleotide
  Sense strand starting at position 1371 of SEQ ID NO: 1883823
aaggcucuuuaucugugaa

SEQ ID NO: 2218905 - RNA, 19 nt, Artificial Sequence
  Description of Artificial Sequence: Synthetic oligonucleotide
  Antisense strand to SEQ ID NO: 2218904
uucacagauaaagagccuu

SEQ ID NO: 2218906 - RNA, 19 nt, Artificial Sequence
  Description of Artificial Sequence: Synthetic oligonucleotide
  Sense strand starting at position 3128 of SEQ ID NO: 1883823
ugagcuauucucugaauuc

SEQ ID NO: 2218907 - RNA, 19 nt, Artificial Sequence
  Description of Artificial Sequence: Synthetic oligonucleotide
  Antisense strand to SEQ ID NO: 2218906
gaauucagagaauagcuca

SEQ ID NO: 2218908 - RNA, 19 nt, Artificial Sequence
  Description of Artificial Sequence: Synthetic oligonucleotide
  Sense strand starting at position 2086 of SEQ ID NO: 1883823
gucacagaguauguuuaua

SEQ ID NO: 2218909 - RNA, 19 nt, Artificial Sequence
  Description of Artificial Sequence: Synthetic oligonucleotide
  Antisense strand to SEQ ID NO: 2218908
uauaaacauacucugugac

SEQ ID NO: 2218910 - RNA, 19 nt, Artificial Sequence
  Description of Artificial Sequence: Synthetic oligonucleotide
  Sense strand starting at position 3621 of SEQ ID NO: 1883823
auuaguuguacaugaaugu

SEQ ID NO: 2218911 - RNA, 19 nt, Artificial Sequence
  Description of Artificial Sequence: Synthetic oligonucleotide
  Antisense strand to SEQ ID NO: 2218910
acauucauguacaacuaau

SEQ ID NO: 2218912 - RNA, 19 nt, Artificial Sequence
  Description of Artificial Sequence: Synthetic oligonucleotide
  Sense strand starting at position 2098 of SEQ ID NO: 1883823
guuuauaaugaguggcaua

SEQ ID NO: 2218913 - RNA, 19 nt, Artificial Sequence
  Description of Artificial Sequence: Synthetic oligonucleotide
  Antisense strand to SEQ ID NO: 2218912
uaugccacucauuauaaac

SEQ ID NO: 2218914 - RNA, 19 nt, Artificial Sequence
  Description of Artificial Sequence: Synthetic oligonucleotide
  Sense strand starting at position 1805 of SEQ ID NO: 1883823
guuauauauugauugccau

SEQ ID NO: 2218915 - RNA, 19 nt, Artificial Sequence
  Description of Artificial Sequence: Synthetic oligonucleotide
  Antisense strand to SEQ ID NO: 2218914
auggcaaucaauauauaac

SEQ ID NO: 2218916 - RNA, 19 nt, Artificial Sequence
  Description of Artificial Sequence: Synthetic oligonucleotide
  Sense strand starting at position 3533 of SEQ ID NO: 1883823
ccauuacgguauguauaca

SEQ ID NO: 2218917 - RNA, 19 nt, Artificial Sequence
  Description of Artificial Sequence: Synthetic oligonucleotide
  Antisense strand to SEQ ID NO: 2218916
uguauacauaccguaaugg

SEQ ID NO: 2218918 - RNA, 19 nt, Artificial Sequence
  Description of Artificial Sequence: Synthetic oligonucleotide
  Sense strand starting at position 3127 of SEQ ID NO: 1883823
gugagcuauucucugaauu

SEQ ID NO: 2218919 - RNA, 19 nt, Artificial Sequence
  Description of Artificial Sequence: Synthetic oligonucleotide
  Antisense strand to SEQ ID NO: 2218918
aauucagagaauagcucac

SEQ ID NO: 2218920 - RNA, 19 nt, Artificial Sequence
  Description of Artificial Sequence: Synthetic oligonucleotide
  Sense strand starting at position 1014 of SEQ ID NO: 1883823
ucagaucagucagugucua

SEQ ID NO: 2218921 - RNA, 19 nt, Artificial Sequence
  Description of Artificial Sequence: Synthetic oligonucleotide
  Antisense strand to SEQ ID NO: 2218920
uagacacugacugaucuga

SEQ ID NO: 2218922 - RNA, 19 nt, Artificial Sequence
  Description of Artificial Sequence: Synthetic oligonucleotide
  Sense strand starting at position 2097 of SEQ ID NO: 1883823
uguuuauaaugaguggcau

SEQ ID NO: 2218923 - RNA, 19 nt, Artificial Sequence
  Description of Artificial Sequence: Synthetic oligonucleotide
  Antisense strand to SEQ ID NO: 2218922
augccacucauuauaaaca

SEQ ID NO: 2218924 - RNA, 19 nt, Artificial Sequence
  Description of Artificial Sequence: Synthetic oligonucleotide
  Sense strand starting at position 3193 of SEQ ID NO: 1883824
guguuuccaguugugcaua

SEQ ID NO: 2218925 - RNA, 19 nt, Artificial Sequence
  Description of Artificial Sequence: Synthetic oligonucleotide
  Antisense strand to SEQ ID NO: 2218924
uaugcacaacuggaaacac

SEQ ID NO: 2218926 - RNA, 19 nt, Artificial Sequence
  Description of Artificial Sequence: Synthetic oligonucleotide
  Sense strand starting at position 1303 of SEQ ID NO: 1883824
ggcccugaacguuugcgau

SEQ ID NO: 2218927 - RNA, 19 nt, Artificial Sequence
  Description of Artificial Sequence: Synthetic oligonucleotide
  Antisense strand to SEQ ID NO: 2218926
aucgcaaacguucagggcc

SEQ ID NO: 2218928 - RNA, 19 nt, Artificial Sequence
  Description of Artificial Sequence: Synthetic oligonucleotide
  Sense strand starting at position 1514 of SEQ ID NO: 1883824
ccgugucccaaggaaagaa

SEQ ID NO: 2218929 - RNA, 19 nt, Artificial Sequence
  Description of Artificial Sequence: Synthetic oligonucleotide
  Antisense strand to SEQ ID NO: 2218928
uucuuuccuugggacacgg

SEQ ID NO: 2218930 - RNA, 19 nt, Artificial Sequence
  Description of Artificial Sequence: Synthetic oligonucleotide
  Sense strand starting at position 200 of SEQ ID NO: 1883824
acuccuuagguugagcaaa

SEQ ID NO: 2218931 - RNA, 19 nt, Artificial Sequence
  Description of Artificial Sequence: Synthetic oligonucleotide
  Antisense strand to SEQ ID NO: 2218930
uuugcucaaccuaaggagu

SEQ ID NO: 2218932 - RNA, 19 nt, Artificial Sequence
  Description of Artificial Sequence: Synthetic oligonucleotide
  Sense strand starting at position 139 of SEQ ID NO: 1883824
ucgagcugugaacaaugaa

SEQ ID NO: 2218933 - RNA, 19 nt, Artificial Sequence
  Description of Artificial Sequence: Synthetic oligonucleotide
  Antisense strand to SEQ ID NO: 2218932
uucauuguucacagcucga

SEQ ID NO: 2218934 - RNA, 19 nt, Artificial Sequence
  Description of Artificial Sequence: Synthetic oligonucleotide
  Sense strand starting at position 133 of SEQ ID NO: 1883824
acgauuucgagcugugaac

SEQ ID NO: 2218935 - RNA, 19 nt, Artificial Sequence
  Description of Artificial Sequence: Synthetic oligonucleotide
  Antisense strand to SEQ ID NO: 2218934
guucacagcucgaaaucgu

SEQ ID NO: 2218936 - RNA, 19 nt, Artificial Sequence
  Description of Artificial Sequence: Synthetic oligonucleotide
  Sense strand starting at position 3340 of SEQ ID NO: 1883824
aggucuucuccagaagguu

SEQ ID NO: 2218937 - RNA, 19 nt, Artificial Sequence
  Description of Artificial Sequence: Synthetic oligonucleotide
  Antisense strand to SEQ ID NO: 2218936
aaccuucuggagaagaccu

SEQ ID NO: 2218938 - RNA, 19 nt, Artificial Sequence
  Description of Artificial Sequence: Synthetic oligonucleotide
  Sense strand starting at position 1827 of SEQ ID NO: 1883824
gaauaagacuccgucugaa

SEQ ID NO: 2218939 - RNA, 19 nt, Artificial Sequence
  Description of Artificial Sequence: Synthetic oligonucleotide
  Antisense strand to SEQ ID NO: 2218938
uucagacggagucuuauuc

SEQ ID NO: 2218940 - RNA, 19 nt, Artificial Sequence
  Description of Artificial Sequence: Synthetic oligonucleotide
  Sense strand starting at position 1830 of SEQ ID NO: 1883824
uaagacuccgucugaagaa

SEQ ID NO: 2218941 - RNA, 19 nt, Artificial Sequence
  Description of Artificial Sequence: Synthetic oligonucleotide
  Antisense strand to SEQ ID NO: 2218940
uucuucagacggagucuua

SEQ ID NO: 2218942 - RNA, 19 nt, Artificial Sequence
  Description of Artificial Sequence: Synthetic oligonucleotide
  Sense strand starting at position 1826 of SEQ ID NO: 1883824
agaauaagacuccgucuga

SEQ ID NO: 2218943 - RNA, 19 nt, Artificial Sequence
  Description of Artificial Sequence: Synthetic oligonucleotide
  Antisense strand to SEQ ID NO: 2218942
ucagacggagucuuauucu

SEQ ID NO: 2218944 - RNA, 19 nt, Artificial Sequence
  Description of Artificial Sequence: Synthetic oligonucleotide
  Sense strand starting at position 1266 of SEQ ID NO: 1883824
caauguugagcggaaacuu

SEQ ID NO: 2218945 - RNA, 19 nt, Artificial Sequence
  Description of Artificial Sequence: Synthetic oligonucleotide
  Antisense strand to SEQ ID NO: 2218944
aaguuuccgcucaacauug

SEQ ID NO: 2218946 - RNA, 19 nt, Artificial Sequence
  Description of Artificial Sequence: Synthetic oligonucleotide
  Sense strand starting at position 3191 of SEQ ID NO: 1883824
guguguuuccaguugugca

SEQ ID NO: 2218947 - RNA, 19 nt, Artificial Sequence
  Description of Artificial Sequence: Synthetic oligonucleotide
  Antisense strand to SEQ ID NO: 2218946
ugcacaacuggaaacacac

SEQ ID NO: 2218948 - RNA, 19 nt, Artificial Sequence
  Description of Artificial Sequence: Synthetic oligonucleotide
  Sense strand starting at position 1263 of SEQ ID NO: 1883824
aaucaauguugagcggaaa

SEQ ID NO: 2218949 - RNA, 19 nt, Artificial Sequence
  Description of Artificial Sequence: Synthetic oligonucleotide
  Antisense strand to SEQ ID NO: 2218948
uuuccgcucaacauugauu

SEQ ID NO: 2218950 - RNA, 19 nt, Artificial Sequence
  Description of Artificial Sequence: Synthetic oligonucleotide
  Sense strand starting at position 2351 of SEQ ID NO: 1883824
aagaacugucuacggaagu

SEQ ID NO: 2218951 - RNA, 19 nt, Artificial Sequence
  Description of Artificial Sequence: Synthetic oligonucleotide
  Antisense strand to SEQ ID NO: 2218950
acuuccguagacaguucuu

SEQ ID NO: 2218952 - RNA, 19 nt, Artificial Sequence
  Description of Artificial Sequence: Synthetic oligonucleotide
  Sense strand starting at position 725 of SEQ ID NO: 1883824
uggcacaucuucuccagaa

SEQ ID NO: 2218953 - RNA, 19 nt, Artificial Sequence
  Description of Artificial Sequence: Synthetic oligonucleotide
  Antisense strand to SEQ ID NO: 2218952
uucuggagaagaugugcca

SEQ ID NO: 2218954 - RNA, 19 nt, Artificial Sequence
  Description of Artificial Sequence: Synthetic oligonucleotide
  Sense strand starting at position 726 of SEQ ID NO: 1883824
ggcacaucuucuccagaac

SEQ ID NO: 2218955 - RNA, 19 nt, Artificial Sequence
  Description of Artificial Sequence: Synthetic oligonucleotide
  Antisense strand to SEQ ID NO: 2218954
guucuggagaagaugugcc

SEQ ID NO: 2218956 - RNA, 19 nt, Artificial Sequence
  Description of Artificial Sequence: Synthetic oligonucleotide
  Sense strand starting at position 3246 of SEQ ID NO: 1883824
aaggcagguccuuaaguuu

SEQ ID NO: 2218957 - RNA, 19 nt, Artificial Sequence
  Description of Artificial Sequence: Synthetic oligonucleotide
  Antisense strand to SEQ ID NO: 2218956
aaacuuaaggaccugccuu

SEQ ID NO: 2218958 - RNA, 19 nt, Artificial Sequence
  Description of Artificial Sequence: Synthetic oligonucleotide
  Sense strand starting at position 199 of SEQ ID NO: 1883824
gacuccuuagguugagcaa

SEQ ID NO: 2218959 - RNA, 19 nt, Artificial Sequence
  Description of Artificial Sequence: Synthetic oligonucleotide
  Antisense strand to SEQ ID NO: 2218958
uugcucaaccuaaggaguc

SEQ ID NO: 2218960 - RNA, 19 nt, Artificial Sequence
  Description of Artificial Sequence: Synthetic oligonucleotide
  Sense strand starting at position 3040 of SEQ ID NO: 1883824
cgugaauauguguauacac

SEQ ID NO: 2218961 - RNA, 19 nt, Artificial Sequence
  Description of Artificial Sequence: Synthetic oligonucleotide
  Antisense strand to SEQ ID NO: 2218960
guguauacacauauucacg

SEQ ID NO: 2218962 - RNA, 19 nt, Artificial Sequence
  Description of Artificial Sequence: Synthetic oligonucleotide
  Sense strand starting at position 2624 of SEQ ID NO: 1883824
agguuacaacgucaguauu

SEQ ID NO: 2218963 - RNA, 19 nt, Artificial Sequence
  Description of Artificial Sequence: Synthetic oligonucleotide
  Antisense strand to SEQ ID NO: 2218962
aauacugacguuguaaccu

SEQ ID NO: 2218964 - RNA, 19 nt, Artificial Sequence
  Description of Artificial Sequence: Synthetic oligonucleotide
  Sense strand starting at position 3359 of SEQ ID NO: 1883824
cagggcaagcucuggauua

SEQ ID NO: 2218965 - RNA, 19 nt, Artificial Sequence
  Description of Artificial Sequence: Synthetic oligonucleotide
  Antisense strand to SEQ ID NO: 2218964
uaauccagagcuugcccug

SEQ ID NO: 2218966 - RNA, 19 nt, Artificial Sequence
  Description of Artificial Sequence: Synthetic oligonucleotide
  Sense strand starting at position 1277 of SEQ ID NO: 1883824
ggaaacuuccgucaggcuu

SEQ ID NO: 2218967 - RNA, 19 nt, Artificial Sequence
  Description of Artificial Sequence: Synthetic oligonucleotide
  Antisense strand to SEQ ID NO: 2218966
aagccugacggaaguuucc

SEQ ID NO: 2218968 - RNA, 19 nt, Artificial Sequence
  Description of Artificial Sequence: Synthetic oligonucleotide
  Sense strand starting at position 3198 of SEQ ID NO: 1883824
uccaguugugcauauuaau

SEQ ID NO: 2218969 - RNA, 19 nt, Artificial Sequence
  Description of Artificial Sequence: Synthetic oligonucleotide
  Antisense strand to SEQ ID NO: 2218968
auuaauaugcacaacugga

SEQ ID NO: 2218970 - RNA, 19 nt, Artificial Sequence
  Description of Artificial Sequence: Synthetic oligonucleotide
  Sense strand starting at position 2255 of SEQ ID NO: 1883824
ccgagcguccuucagagaa

SEQ ID NO: 2218971 - RNA, 19 nt, Artificial Sequence
  Description of Artificial Sequence: Synthetic oligonucleotide
  Antisense strand to SEQ ID NO: 2218970
uucucugaaggacgcucgg

SEQ ID NO: 2218972 - RNA, 19 nt, Artificial Sequence
  Description of Artificial Sequence: Synthetic oligonucleotide
  Sense strand starting at position 3818 of SEQ ID NO: 1883824
gaggcuuaccagugguaac

SEQ ID NO: 2218973 - RNA, 19 nt, Artificial Sequence
  Description of Artificial Sequence: Synthetic oligonucleotide
  Antisense strand to SEQ ID NO: 2218972
guuaccacugguaagccuc

SEQ ID NO: 2218974 - RNA, 19 nt, Artificial Sequence
  Description of Artificial Sequence: Synthetic oligonucleotide
  Sense strand starting at position 3039 of SEQ ID NO: 1883824
acgugaauauguguauaca

SEQ ID NO: 2218975 - RNA, 19 nt, Artificial Sequence
  Description of Artificial Sequence: Synthetic oligonucleotide
  Antisense strand to SEQ ID NO: 2218974
uguauacacauauucacgu

SEQ ID NO: 2218976 - RNA, 19 nt, Artificial Sequence
  Description of Artificial Sequence: Synthetic oligonucleotide
  Sense strand starting at position 3037 of SEQ ID NO: 1883824
acacgugaauauguguaua

SEQ ID NO: 2218977 - RNA, 19 nt, Artificial Sequence
  Description of Artificial Sequence: Synthetic oligonucleotide
  Antisense strand to SEQ ID NO: 2218976
uauacacauauucacgugu

SEQ ID NO: 2218978 - RNA, 19 nt, Artificial Sequence
  Description of Artificial Sequence: Synthetic oligonucleotide
  Sense strand starting at position 3196 of SEQ ID NO: 1883824
uuuccaguugugcauauua

SEQ ID NO: 2218979 - RNA, 19 nt, Artificial Sequence
  Description of Artificial Sequence: Synthetic oligonucleotide
  Antisense strand to SEQ ID NO: 2218978
uaauaugcacaacuggaaa

SEQ ID NO: 2218980 - RNA, 19 nt, Artificial Sequence
  Description of Artificial Sequence: Synthetic oligonucleotide
  Sense strand starting at position 3245 of SEQ ID NO: 1883824
uaaggcagguccuuaaguu

SEQ ID NO: 2218981 - RNA, 19 nt, Artificial Sequence
  Description of Artificial Sequence: Synthetic oligonucleotide
  Antisense strand to SEQ ID NO: 2218980
aacuuaaggaccugccuua

SEQ ID NO: 2218982 - RNA, 19 nt, Artificial Sequence
  Description of Artificial Sequence: Synthetic oligonucleotide
  Sense strand starting at position 3712 of SEQ ID NO: 1883824
uguggucaggccugggaau

SEQ ID NO: 2218983 - RNA, 19 nt, Artificial Sequence
  Description of Artificial Sequence: Synthetic oligonucleotide
  Antisense strand to SEQ ID NO: 2218982
auucccaggccugaccaca

SEQ ID NO: 2218984 - RNA, 19 nt, Artificial Sequence
  Description of Artificial Sequence: Synthetic oligonucleotide
  Sense strand starting at position 3253 of SEQ ID NO: 1883824
guccuuaaguuuccuuaau

SEQ ID NO: 2218985 - RNA, 19 nt, Artificial Sequence
  Description of Artificial Sequence: Synthetic oligonucleotide
  Antisense strand to SEQ ID NO: 2218984
auuaaggaaacuuaaggac

SEQ ID NO: 2218986 - RNA, 19 nt, Artificial Sequence
  Description of Artificial Sequence: Synthetic oligonucleotide
  Sense strand starting at position 193 of SEQ ID NO: 1883824
ugcuuagacuccuuagguu

SEQ ID NO: 2218987 - RNA, 19 nt, Artificial Sequence
  Description of Artificial Sequence: Synthetic oligonucleotide
  Antisense strand to SEQ ID NO: 2218986
aaccuaaggagucuaagca

SEQ ID NO: 2218988 - RNA, 19 nt, Artificial Sequence
  Description of Artificial Sequence: Synthetic oligonucleotide
  Sense strand starting at position 2892 of SEQ ID NO: 1883824
caugcacguguccauacau

SEQ ID NO: 2218989 - RNA, 19 nt, Artificial Sequence
  Description of Artificial Sequence: Synthetic oligonucleotide
  Antisense strand to SEQ ID NO: 2218988
auguauggacacgugcaug

SEQ ID NO: 2218990 - RNA, 19 nt, Artificial Sequence
  Description of Artificial Sequence: Synthetic oligonucleotide
  Sense strand starting at position 2072 of SEQ ID NO: 1883824
uucgcuauccauggaggua

SEQ ID NO: 2218991 - RNA, 19 nt, Artificial Sequence
  Description of Artificial Sequence: Synthetic oligonucleotide
  Antisense strand to SEQ ID NO: 2218990
uaccuccauggauagcgaa

SEQ ID NO: 2218992 - RNA, 19 nt, Artificial Sequence
  Description of Artificial Sequence: Synthetic oligonucleotide
  Sense strand starting at position 2924 of SEQ ID NO: 1883824
uccuuacacguauguacau

SEQ ID NO: 2218993 - RNA, 19 nt, Artificial Sequence
  Description of Artificial Sequence: Synthetic oligonucleotide
  Antisense strand to SEQ ID NO: 2218992
auguacauacguguaagga

SEQ ID NO: 2218994 - RNA, 19 nt, Artificial Sequence
  Description of Artificial Sequence: Synthetic oligonucleotide
  Sense strand starting at position 3030 of SEQ ID NO: 1883824
cguuuacacacgugaauau

SEQ ID NO: 2218995 - RNA, 19 nt, Artificial Sequence
  Description of Artificial Sequence: Synthetic oligonucleotide
  Antisense strand to SEQ ID NO: 2218994
auauucacguguguaaacg

SEQ ID NO: 2218996 - RNA, 19 nt, Artificial Sequence
  Description of Artificial Sequence: Synthetic oligonucleotide
  Sense strand starting at position 2378 of SEQ ID NO: 1883824
gguaacgaaucagagaaca

SEQ ID NO: 2218997 - RNA, 19 nt, Artificial Sequence
  Description of Artificial Sequence: Synthetic oligonucleotide
  Antisense strand to SEQ ID NO: 2218996
uguucucugauucguuacc

SEQ ID NO: 2218998 - RNA, 19 nt, Artificial Sequence
  Description of Artificial Sequence: Synthetic oligonucleotide
  Sense strand starting at position 2065 of SEQ ID NO: 1883824
cuucuuguucgcuauccau

SEQ ID NO: 2218999 - RNA, 19 nt, Artificial Sequence
  Description of Artificial Sequence: Synthetic oligonucleotide
  Antisense strand to SEQ ID NO: 2218998
auggauagcgaacaagaag

SEQ ID NO: 2219000 - RNA, 19 nt, Artificial Sequence
  Description of Artificial Sequence: Synthetic oligonucleotide
  Sense strand starting at position 2987 of SEQ ID NO: 1883824
acacgagucacacgugcaa

SEQ ID NO: 2219001 - RNA, 19 nt, Artificial Sequence
  Description of Artificial Sequence: Synthetic oligonucleotide
  Antisense strand to SEQ ID NO: 2219000
uugcacgugugacucgugu

SEQ ID NO: 2219002 - RNA, 19 nt, Artificial Sequence
  Description of Artificial Sequence: Synthetic oligonucleotide
  Sense strand starting at position 2071 of SEQ ID NO: 1883824
guucgcuauccauggaggu

SEQ ID NO: 2219003 - RNA, 19 nt, Artificial Sequence
  Description of Artificial Sequence: Synthetic oligonucleotide
  Antisense strand to SEQ ID NO: 2219002
accuccauggauagcgaac

SEQ ID NO: 2219004 - RNA, 19 nt, Artificial Sequence
  Description of Artificial Sequence: Synthetic oligonucleotide
  Sense strand starting at position 2128 of SEQ ID NO: 1883825
gagaaaguucuggaggcuu

SEQ ID NO: 2219005 - RNA, 19 nt, Artificial Sequence
  Description of Artificial Sequence: Synthetic oligonucleotide
  Antisense strand to SEQ ID NO: 2219004
aagccuccagaacuuucuc

SEQ ID NO: 2219006 - RNA, 19 nt, Artificial Sequence
  Description of Artificial Sequence: Synthetic oligonucleotide
  Sense strand starting at position 3851 of SEQ ID NO: 1883825
ugaacuugagagugaacuu

SEQ ID NO: 2219007 - RNA, 19 nt, Artificial Sequence
  Description of Artificial Sequence: Synthetic oligonucleotide
  Antisense strand to SEQ ID NO: 2219006
aaguucacucucaaguuca

SEQ ID NO: 2219008 - RNA, 19 nt, Artificial Sequence
  Description of Artificial Sequence: Synthetic oligonucleotide
  Sense strand starting at position 1768 of SEQ ID NO: 1883825
gagggaugccucuggacag

SEQ ID NO: 2219009 - RNA, 19 nt, Artificial Sequence
  Description of Artificial Sequence: Synthetic oligonucleotide
  Antisense strand to SEQ ID NO: 2219008
cuguccagaggcaucccuc

SEQ ID NO: 2219010 - RNA, 19 nt, Artificial Sequence
  Description of Artificial Sequence: Synthetic oligonucleotide
  Sense strand starting at position 3845 of SEQ ID NO: 1883825
gggaguugaacuugagagu

SEQ ID NO: 2219011 - RNA, 19 nt, Artificial Sequence
  Description of Artificial Sequence: Synthetic oligonucleotide
  Antisense strand to SEQ ID NO: 2219010
acucucaaguucaacuccc

SEQ ID NO: 2219012 - RNA, 19 nt, Artificial Sequence
  Description of Artificial Sequence: Synthetic oligonucleotide
  Sense strand starting at position 3790 of SEQ ID NO: 1883825
uccguaagaaugggauuga

SEQ ID NO: 2219013 - RNA, 19 nt, Artificial Sequence
  Description of Artificial Sequence: Synthetic oligonucleotide
  Antisense strand to SEQ ID NO: 2219012
ucaaucccauucuuacgga

SEQ ID NO: 2219014 - RNA, 19 nt, Artificial Sequence
  Description of Artificial Sequence: Synthetic oligonucleotide
  Sense strand starting at position 2489 of SEQ ID NO: 1883825
ggcggguguccgcuugaca

SEQ ID NO: 2219015 - RNA, 19 nt, Artificial Sequence
  Description of Artificial Sequence: Synthetic oligonucleotide
  Antisense strand to SEQ ID NO: 2219014
ugucaagcggacacccgcc

SEQ ID NO: 2219016 - RNA, 19 nt, Artificial Sequence
  Description of Artificial Sequence: Synthetic oligonucleotide
  Sense strand starting at position 328 of SEQ ID NO: 1883825
accgaaguuuacccaaaua

SEQ ID NO: 2219017 - RNA, 19 nt, Artificial Sequence
  Description of Artificial Sequence: Synthetic oligonucleotide
  Antisense strand to SEQ ID NO: 2219016
uauuuggguaaacuucggu

SEQ ID NO: 2219018 - RNA, 19 nt, Artificial Sequence
  Description of Artificial Sequence: Synthetic oligonucleotide
  Sense strand starting at position 3839 of SEQ ID NO: 1883825
ggaguugggaguugaacuu

SEQ ID NO: 2219019 - RNA, 19 nt, Artificial Sequence
  Description of Artificial Sequence: Synthetic oligonucleotide
  Antisense strand to SEQ ID NO: 2219018
aaguucaacucccaacucc

SEQ ID NO: 2219020 - RNA, 19 nt, Artificial Sequence
  Description of Artificial Sequence: Synthetic oligonucleotide
  Sense strand starting at position 327 of SEQ ID NO: 1883825
gaccgaaguuuacccaaau

SEQ ID NO: 2219021 - RNA, 19 nt, Artificial Sequence
  Description of Artificial Sequence: Synthetic oligonucleotide
  Antisense strand to SEQ ID NO: 2219020
auuuggguaaacuucgguc

SEQ ID NO: 2219022 - RNA, 19 nt, Artificial Sequence
  Description of Artificial Sequence: Synthetic oligonucleotide
  Sense strand starting at position 2162 of SEQ ID NO: 1883825
cucacagucggagagucau

SEQ ID NO: 2219023 - RNA, 19 nt, Artificial Sequence
  Description of Artificial Sequence: Synthetic oligonucleotide
  Antisense strand to SEQ ID NO: 2219022
augacucuccgacugugag

SEQ ID NO: 2219024 - RNA, 19 nt, Artificial Sequence
  Description of Artificial Sequence: Synthetic oligonucleotide
  Sense strand starting at position 3519 of SEQ ID NO: 1883825
ucaugcucaccuugagaaa

SEQ ID NO: 2219025 - RNA, 19 nt, Artificial Sequence
  Description of Artificial Sequence: Synthetic oligonucleotide
  Antisense strand to SEQ ID NO: 2219024
uuucucaaggugagcauga

SEQ ID NO: 2219026 - RNA, 19 nt, Artificial Sequence
  Description of Artificial Sequence: Synthetic oligonucleotide
  Sense strand starting at position 2490 of SEQ ID NO: 1883825
gcggguguccgcuugacau

SEQ ID NO: 2219027 - RNA, 19 nt, Artificial Sequence
  Description of Artificial Sequence: Synthetic oligonucleotide
  Antisense strand to SEQ ID NO: 2219026
augucaagcggacacccgc

SEQ ID NO: 2219028 - RNA, 19 nt, Artificial Sequence
  Description of Artificial Sequence: Synthetic oligonucleotide
  Sense strand starting at position 3119 of SEQ ID NO: 1883825
agagaaccuuggcuuagua

SEQ ID NO: 2219029 - RNA, 19 nt, Artificial Sequence
  Description of Artificial Sequence: Synthetic oligonucleotide
  Antisense strand to SEQ ID NO: 2219028
uacuaagccaagguucucu

SEQ ID NO: 2219030 - RNA, 19 nt, Artificial Sequence
  Description of Artificial Sequence: Synthetic oligonucleotide
  Sense strand starting at position 254 of SEQ ID NO: 1883825
aagugaugaaaguggguuu

SEQ ID NO: 2219031 - RNA, 19 nt, Artificial Sequence
  Description of Artificial Sequence: Synthetic oligonucleotide
  Antisense strand to SEQ ID NO: 2219030
aaacccacuuucaucacuu

SEQ ID NO: 2219032 - RNA, 19 nt, Artificial Sequence
  Description of Artificial Sequence: Synthetic oligonucleotide
  Sense strand starting at position 3116 of SEQ ID NO: 1883825
aguagagaaccuuggcuua

SEQ ID NO: 2219033 - RNA, 19 nt, Artificial Sequence
  Description of Artificial Sequence: Synthetic oligonucleotide
  Antisense strand to SEQ ID NO: 2219032
uaagccaagguucucuacu

SEQ ID NO: 2219034 - RNA, 19 nt, Artificial Sequence
  Description of Artificial Sequence: Synthetic oligonucleotide
  Sense strand starting at position 3118 of SEQ ID NO: 1883825
uagagaaccuuggcuuagu

SEQ ID NO: 2219035 - RNA, 19 nt, Artificial Sequence
  Description of Artificial Sequence: Synthetic oligonucleotide
  Antisense strand to SEQ ID NO: 2219034
acuaagccaagguucucua

SEQ ID NO: 2219036 - RNA, 19 nt, Artificial Sequence
  Description of Artificial Sequence: Synthetic oligonucleotide
  Sense strand starting at position 217 of SEQ ID NO: 1883825
cagcuacuuccaugggacu

SEQ ID NO: 2219037 - RNA, 19 nt, Artificial Sequence
  Description of Artificial Sequence: Synthetic oligonucleotide
  Antisense strand to SEQ ID NO: 2219036
agucccauggaaguagcug

SEQ ID NO: 2219038 - RNA, 19 nt, Artificial Sequence
  Description of Artificial Sequence: Synthetic oligonucleotide
  Sense strand starting at position 3425 of SEQ ID NO: 1883825
gaaggagcaguuugcagau

SEQ ID NO: 2219039 - RNA, 19 nt, Artificial Sequence
  Description of Artificial Sequence: Synthetic oligonucleotide
  Antisense strand to SEQ ID NO: 2219038
aucugcaaacugcuccuuc

SEQ ID NO: 2219040 - RNA, 19 nt, Artificial Sequence
  Description of Artificial Sequence: Synthetic oligonucleotide
  Sense strand starting at position 3782 of SEQ ID NO: 1883825
gaggcuguuccguaagaau

SEQ ID NO: 2219041 - RNA, 19 nt, Artificial Sequence
  Description of Artificial Sequence: Synthetic oligonucleotide
  Antisense strand to SEQ ID NO: 2219040
auucuuacggaacagccuc

SEQ ID NO: 2219042 - RNA, 19 nt, Artificial Sequence
  Description of Artificial Sequence: Synthetic oligonucleotide
  Sense strand starting at position 1613 of SEQ ID NO: 1883825
gaugucuuucgggaguucu

SEQ ID NO: 2219043 - RNA, 19 nt, Artificial Sequence
  Description of Artificial Sequence: Synthetic oligonucleotide
  Antisense strand to SEQ ID NO: 2219042
agaacucccgaaagacauc

SEQ ID NO: 2219044 - RNA, 19 nt, Artificial Sequence
  Description of Artificial Sequence: Synthetic oligonucleotide
  Sense strand starting at position 261 of SEQ ID NO: 1883825
gaaaguggguuugcauuau

SEQ ID NO: 2219045 - RNA, 19 nt, Artificial Sequence
  Description of Artificial Sequence: Synthetic oligonucleotide
  Antisense strand to SEQ ID NO: 2219044
auaaugcaaacccacuuuc

SEQ ID NO: 2219046 - RNA, 19 nt, Artificial Sequence
  Description of Artificial Sequence: Synthetic oligonucleotide
  Sense strand starting at position 265 of SEQ ID NO: 1883825
guggguuugcauuauucua

SEQ ID NO: 2219047 - RNA, 19 nt, Artificial Sequence
  Description of Artificial Sequence: Synthetic oligonucleotide
  Antisense strand to SEQ ID NO: 2219046
uagaauaaugcaaacccac

SEQ ID NO: 2219048 - RNA, 19 nt, Artificial Sequence
  Description of Artificial Sequence: Synthetic oligonucleotide
  Sense strand starting at position 3781 of SEQ ID NO: 1883825
agaggcuguuccguaagaa

SEQ ID NO: 2219049 - RNA, 19 nt, Artificial Sequence
  Description of Artificial Sequence: Synthetic oligonucleotide
  Antisense strand to SEQ ID NO: 2219048
uucuuacggaacagccucu

SEQ ID NO: 2219050 - RNA, 19 nt, Artificial Sequence
  Description of Artificial Sequence: Synthetic oligonucleotide
  Sense strand starting at position 1683 of SEQ ID NO: 1883825
ucuuaccaguccuugaguu

SEQ ID NO: 2219051 - RNA, 19 nt, Artificial Sequence
  Description of Artificial Sequence: Synthetic oligonucleotide
  Antisense strand to SEQ ID NO: 2219050
aacucaaggacugguaaga

SEQ ID NO: 2219052 - RNA, 19 nt, Artificial Sequence
  Description of Artificial Sequence: Synthetic oligonucleotide
  Sense strand starting at position 3778 of SEQ ID NO: 1883825
augagaggcuguuccguaa

SEQ ID NO: 2219053 - RNA, 19 nt, Artificial Sequence
  Description of Artificial Sequence: Synthetic oligonucleotide
  Antisense strand to SEQ ID NO: 2219052
uuacggaacagccucucau

SEQ ID NO: 2219054 - RNA, 19 nt, Artificial Sequence
  Description of Artificial Sequence: Synthetic oligonucleotide
  Sense strand starting at position 3438 of SEQ ID NO: 1883825
gcagaugacuguccugguu

SEQ ID NO: 2219055 - RNA, 19 nt, Artificial Sequence
  Description of Artificial Sequence: Synthetic oligonucleotide
  Antisense strand to SEQ ID NO: 2219054
aaccaggacagucaucugc

SEQ ID NO: 2219056 - RNA, 19 nt, Artificial Sequence
  Description of Artificial Sequence: Synthetic oligonucleotide
  Sense strand starting at position 3397 of SEQ ID NO: 1883825
uggguuguagcuugaucua

SEQ ID NO: 2219057 - RNA, 19 nt, Artificial Sequence
  Description of Artificial Sequence: Synthetic oligonucleotide
  Antisense strand to SEQ ID NO: 2219056
uagaucaagcuacaaccca

SEQ ID NO: 2219058 - RNA, 19 nt, Artificial Sequence
  Description of Artificial Sequence: Synthetic oligonucleotide
  Sense strand starting at position 3066 of SEQ ID NO: 1883825
acgcuccacugucuaaauu

SEQ ID NO: 2219059 - RNA, 19 nt, Artificial Sequence
  Description of Artificial Sequence: Synthetic oligonucleotide
  Antisense strand to SEQ ID NO: 2219058
aauuuagacaguggagcgu

SEQ ID NO: 2219060 - RNA, 19 nt, Artificial Sequence
  Description of Artificial Sequence: Synthetic oligonucleotide
  Sense strand starting at position 3720 of SEQ ID NO: 1883825
ccuagugucuuuccuuacu

SEQ ID NO: 2219061 - RNA, 19 nt, Artificial Sequence
  Description of Artificial Sequence: Synthetic oligonucleotide
  Antisense strand to SEQ ID NO: 2219060
aguaaggaaagacacuagg

SEQ ID NO: 2219062 - RNA, 19 nt, Artificial Sequence
  Description of Artificial Sequence: Synthetic oligonucleotide
  Sense strand starting at position 3264 of SEQ ID NO: 1883825
cccuguggcuggguucaua

SEQ ID NO: 2219063 - RNA, 19 nt, Artificial Sequence
  Description of Artificial Sequence: Synthetic oligonucleotide
  Antisense strand to SEQ ID NO: 2219062
uaugaacccagccacaggg

SEQ ID NO: 2219064 - RNA, 19 nt, Artificial Sequence
  Description of Artificial Sequence: Synthetic oligonucleotide
  Sense strand starting at position 3280 of SEQ ID NO: 1883825
auacuuucugaacgucgua

SEQ ID NO: 2219065 - RNA, 19 nt, Artificial Sequence
  Description of Artificial Sequence: Synthetic oligonucleotide
  Antisense strand to SEQ ID NO: 2219064
uacgacguucagaaaguau

SEQ ID NO: 2219066 - RNA, 19 nt, Artificial Sequence
  Description of Artificial Sequence: Synthetic oligonucleotide
  Sense strand starting at position 3860 of SEQ ID NO: 1883825
gagugaacuugagaaguga

SEQ ID NO: 2219067 - RNA, 19 nt, Artificial Sequence
  Description of Artificial Sequence: Synthetic oligonucleotide
  Antisense strand to SEQ ID NO: 2219066
ucacuucucaaguucacuc

SEQ ID NO: 2219068 - RNA, 19 nt, Artificial Sequence
  Description of Artificial Sequence: Synthetic oligonucleotide
  Sense strand starting at position 3431 of SEQ ID NO: 1883825
gcaguuugcagaugacugu

SEQ ID NO: 2219069 - RNA, 19 nt, Artificial Sequence
  Description of Artificial Sequence: Synthetic oligonucleotide
  Antisense strand to SEQ ID NO: 2219068
acagucaucugcaaacugc

SEQ ID NO: 2219070 - RNA, 19 nt, Artificial Sequence
  Description of Artificial Sequence: Synthetic oligonucleotide
  Sense strand starting at position 3848 of SEQ ID NO: 1883825
aguugaacuugagagugaa

SEQ ID NO: 2219071 - RNA, 19 nt, Artificial Sequence
  Description of Artificial Sequence: Synthetic oligonucleotide
  Antisense strand to SEQ ID NO: 2219070
uucacucucaaguucaacu

SEQ ID NO: 2219072 - RNA, 19 nt, Artificial Sequence
  Description of Artificial Sequence: Synthetic oligonucleotide
  Sense strand starting at position 3400 of SEQ ID NO: 1883825
guuguagcuugaucuagca

SEQ ID NO: 2219073 - RNA, 19 nt, Artificial Sequence
  Description of Artificial Sequence: Synthetic oligonucleotide
  Antisense strand to SEQ ID NO: 2219072
ugcuagaucaagcuacaac

SEQ ID NO: 2219074 - RNA, 19 nt, Artificial Sequence
  Description of Artificial Sequence: Synthetic oligonucleotide
  Sense strand starting at position 340 of SEQ ID NO: 1883825
ccaaauagcgcucggcaaa

SEQ ID NO: 2219075 - RNA, 19 nt, Artificial Sequence
  Description of Artificial Sequence: Synthetic oligonucleotide
  Antisense strand to SEQ ID NO: 2219074
uuugccgagcgcuauuugg

SEQ ID NO: 2219076 - RNA, 19 nt, Artificial Sequence
  Description of Artificial Sequence: Synthetic oligonucleotide
  Sense strand starting at position 2589 of SEQ ID NO: 1883825
ucucuauccuucgcacgua

SEQ ID NO: 2219077 - RNA, 19 nt, Artificial Sequence
  Description of Artificial Sequence: Synthetic oligonucleotide
  Antisense strand to SEQ ID NO: 2219076
uacgugcgaaggauagaga

SEQ ID NO: 2219078 - RNA, 19 nt, Artificial Sequence
  Description of Artificial Sequence: Synthetic oligonucleotide
  Sense strand starting at position 2127 of SEQ ID NO: 1883825
ugagaaaguucuggaggcu

SEQ ID NO: 2219079 - RNA, 19 nt, Artificial Sequence
  Description of Artificial Sequence: Synthetic oligonucleotide
  Antisense strand to SEQ ID NO: 2219078
agccuccagaacuuucuca

SEQ ID NO: 2219080 - RNA, 19 nt, Artificial Sequence
  Description of Artificial Sequence: Synthetic oligonucleotide
  Sense strand starting at position 3412 of SEQ ID NO: 1883825
ucuagcaucuccugaagga

SEQ ID NO: 2219081 - RNA, 19 nt, Artificial Sequence
  Description of Artificial Sequence: Synthetic oligonucleotide
  Antisense strand to SEQ ID NO: 2219080
uccuucaggagaugcuaga

SEQ ID NO: 2219082 - RNA, 19 nt, Artificial Sequence
  Description of Artificial Sequence: Synthetic oligonucleotide
  Sense strand starting at position 3285 of SEQ ID NO: 1883825
uucugaacgucguaaacua

SEQ ID NO: 2219083 - RNA, 19 nt, Artificial Sequence
  Description of Artificial Sequence: Synthetic oligonucleotide
  Antisense strand to SEQ ID NO: 2219082
uaguuuacgacguucagaa

SEQ ID NO: 2219084 - RNA, 19 nt, Artificial Sequence
  Description of Artificial Sequence: Synthetic oligonucleotide
  Sense strand starting at position 2436 of SEQ ID NO: 1883826
ucuuuagucuuauuuguga

SEQ ID NO: 2219085 - RNA, 19 nt, Artificial Sequence
  Description of Artificial Sequence: Synthetic oligonucleotide
  Antisense strand to SEQ ID NO: 2219084
ucacaaauaagacuaaaga

SEQ ID NO: 2219086 - RNA, 19 nt, Artificial Sequence
  Description of Artificial Sequence: Synthetic oligonucleotide
  Sense strand starting at position 260 of SEQ ID NO: 1883826
uugggagagacuugguaac

SEQ ID NO: 2219087 - RNA, 19 nt, Artificial Sequence
  Description of Artificial Sequence: Synthetic oligonucleotide
  Antisense strand to SEQ ID NO: 2219086
guuaccaagucucucccaa

SEQ ID NO: 2219088 - RNA, 19 nt, Artificial Sequence
  Description of Artificial Sequence: Synthetic oligonucleotide
  Sense strand starting at position 3195 of SEQ ID NO: 1883826
cccauaugacuugacaugu

SEQ ID NO: 2219089 - RNA, 19 nt, Artificial Sequence
  Description of Artificial Sequence: Synthetic oligonucleotide
  Antisense strand to SEQ ID NO: 2219088
acaugucaagucauauggg

SEQ ID NO: 2219090 - RNA, 19 nt, Artificial Sequence
  Description of Artificial Sequence: Synthetic oligonucleotide
  Sense strand starting at position 2759 of SEQ ID NO: 1883826
ugcuuugaucaacagauug

SEQ ID NO: 2219091 - RNA, 19 nt, Artificial Sequence
  Description of Artificial Sequence: Synthetic oligonucleotide
  Antisense strand to SEQ ID NO: 2219090
caaucuguugaucaaagca

SEQ ID NO: 2219092 - RNA, 19 nt, Artificial Sequence
  Description of Artificial Sequence: Synthetic oligonucleotide
  Sense strand starting at position 41 of SEQ ID NO: 1883826
ugaacaaugguuuaguuua

SEQ ID NO: 2219093 - RNA, 19 nt, Artificial Sequence
  Description of Artificial Sequence: Synthetic oligonucleotide
  Antisense strand to SEQ ID NO: 2219092
uaaacuaaaccauuguuca

SEQ ID NO: 2219094 - RNA, 19 nt, Artificial Sequence
  Description of Artificial Sequence: Synthetic oligonucleotide
  Sense strand starting at position 2025 of SEQ ID NO: 1883826
gauuaaauauaagugagca

SEQ ID NO: 2219095 - RNA, 19 nt, Artificial Sequence
  Description of Artificial Sequence: Synthetic oligonucleotide
  Antisense strand to SEQ ID NO: 2219094
ugcucacuuauauuuaauc

SEQ ID NO: 2219096 - RNA, 19 nt, Artificial Sequence
  Description of Artificial Sequence: Synthetic oligonucleotide
  Sense strand starting at position 295 of SEQ ID NO: 1883826
gugugaacguugaugucag

SEQ ID NO: 2219097 - RNA, 19 nt, Artificial Sequence
  Description of Artificial Sequence: Synthetic oligonucleotide
  Antisense strand to SEQ ID NO: 2219096
cugacaucaacguucacac

SEQ ID NO: 2219098 - RNA, 19 nt, Artificial Sequence
  Description of Artificial Sequence: Synthetic oligonucleotide
  Sense strand starting at position 2256 of SEQ ID NO: 1883826
uuucccucacgauauauga

SEQ ID NO: 2219099 - RNA, 19 nt, Artificial Sequence
  Description of Artificial Sequence: Synthetic oligonucleotide
  Antisense strand to SEQ ID NO: 2219098
ucauauaucgugagggaaa

SEQ ID NO: 2219100 - RNA, 19 nt, Artificial Sequence
  Description of Artificial Sequence: Synthetic oligonucleotide
  Sense strand starting at position 54 of SEQ ID NO: 1883826
aguuuagacugauccuaag

SEQ ID NO: 2219101 - RNA, 19 nt, Artificial Sequence
  Description of Artificial Sequence: Synthetic oligonucleotide
  Antisense strand to SEQ ID NO: 2219100
cuuaggaucagucuaaacu

SEQ ID NO: 2219102 - RNA, 19 nt, Artificial Sequence
  Description of Artificial Sequence: Synthetic oligonucleotide
  Sense strand starting at position 2804 of SEQ ID NO: 1883826
acaacucuuggaggguuua

SEQ ID NO: 2219103 - RNA, 19 nt, Artificial Sequence
  Description of Artificial Sequence: Synthetic oligonucleotide
  Antisense strand to SEQ ID NO: 2219102
uaaacccuccaagaguugu

SEQ ID NO: 2219104 - RNA, 19 nt, Artificial Sequence
  Description of Artificial Sequence: Synthetic oligonucleotide
  Sense strand starting at position 185 of SEQ ID NO: 1883826
gagaauagaguuggcuaca

SEQ ID NO: 2219105 - RNA, 19 nt, Artificial Sequence
  Description of Artificial Sequence: Synthetic oligonucleotide
  Antisense strand to SEQ ID NO: 2219104
uguagccaacucuauucuc

SEQ ID NO: 2219106 - RNA, 19 nt, Artificial Sequence
  Description of Artificial Sequence: Synthetic oligonucleotide
  Sense strand starting at position 43 of SEQ ID NO: 1883826
aacaaugguuuaguuuaga

SEQ ID NO: 2219107 - RNA, 19 nt, Artificial Sequence
  Description of Artificial Sequence: Synthetic oligonucleotide
  Antisense strand to SEQ ID NO: 2219106
ucuaaacuaaaccauuguu

SEQ ID NO: 2219108 - RNA, 19 nt, Artificial Sequence
  Description of Artificial Sequence: Synthetic oligonucleotide
  Sense strand starting at position 184 of SEQ ID NO: 1883826
ggagaauagaguuggcuac

SEQ ID NO: 2219109 - RNA, 19 nt, Artificial Sequence
  Description of Artificial Sequence: Synthetic oligonucleotide
  Antisense strand to SEQ ID NO: 2219108
guagccaacucuauucucc

SEQ ID NO: 2219110 - RNA, 19 nt, Artificial Sequence
  Description of Artificial Sequence: Synthetic oligonucleotide
  Sense strand starting at position 2756 of SEQ ID NO: 1883826
gucugcuuugaucaacaga

SEQ ID NO: 2219111 - RNA, 19 nt, Artificial Sequence
  Description of Artificial Sequence: Synthetic oligonucleotide
  Antisense strand to SEQ ID NO: 2219110
ucuguugaucaaagcagac

SEQ ID NO: 2219112 - RNA, 19 nt, Artificial Sequence
  Description of Artificial Sequence: Synthetic oligonucleotide
  Sense strand starting at position 2805 of SEQ ID NO: 1883826
caacucuuggaggguuuau

SEQ ID NO: 2219113 - RNA, 19 nt, Artificial Sequence
  Description of Artificial Sequence: Synthetic oligonucleotide
  Antisense strand to SEQ ID NO: 2219112
auaaacccuccaagaguug

SEQ ID NO: 2219114 - RNA, 19 nt, Artificial Sequence
  Description of Artificial Sequence: Synthetic oligonucleotide
  Sense strand starting at position 2776 of SEQ ID NO: 1883826
ugaguacuugaugggaguu

SEQ ID NO: 2219115 - RNA, 19 nt, Artificial Sequence
  Description of Artificial Sequence: Synthetic oligonucleotide
  Antisense strand to SEQ ID NO: 2219114
aacucccaucaaguacuca

SEQ ID NO: 2219116 - RNA, 19 nt, Artificial Sequence
  Description of Artificial Sequence: Synthetic oligonucleotide
  Sense strand starting at position 3619 of SEQ ID NO: 1883826
ccgugucuugcuuugucau

SEQ ID NO: 2219117 - RNA, 19 nt, Artificial Sequence
  Description of Artificial Sequence: Synthetic oligonucleotide
  Antisense strand to SEQ ID NO: 2219116
augacaaagcaagacacgg

SEQ ID NO: 2219118 - RNA, 19 nt, Artificial Sequence
  Description of Artificial Sequence: Synthetic oligonucleotide
  Sense strand starting at position 36 of SEQ ID NO: 1883826
aucugugaacaaugguuua

SEQ ID NO: 2219119 - RNA, 19 nt, Artificial Sequence
  Description of Artificial Sequence: Synthetic oligonucleotide
  Antisense strand to SEQ ID NO: 2219118
uaaaccauuguucacagau

SEQ ID NO: 2219120 - RNA, 19 nt, Artificial Sequence
  Description of Artificial Sequence: Synthetic oligonucleotide
  Sense strand starting at position 128 of SEQ ID NO: 1883826
agguuauagcagcacgaaa

SEQ ID NO: 2219121 - RNA, 19 nt, Artificial Sequence
  Description of Artificial Sequence: Synthetic oligonucleotide
  Antisense strand to SEQ ID NO: 2219120
uuucgugcugcuauaaccu

SEQ ID NO: 2219122 - RNA, 19 nt, Artificial Sequence
  Description of Artificial Sequence: Synthetic oligonucleotide
  Sense strand starting at position 11 of SEQ ID NO: 1883826
ggagcugaggagugugaua

SEQ ID NO: 2219123 - RNA, 19 nt, Artificial Sequence
  Description of Artificial Sequence: Synthetic oligonucleotide
  Antisense strand to SEQ ID NO: 2219122
uaucacacuccucagcucc

SEQ ID NO: 2219124 - RNA, 19 nt, Artificial Sequence
  Description of Artificial Sequence: Synthetic oligonucleotide
  Sense strand starting at position 2562 of SEQ ID NO: 1883826
uuagaauacuuccuugguu

SEQ ID NO: 2219125 - RNA, 19 nt, Artificial Sequence
  Description of Artificial Sequence: Synthetic oligonucleotide
  Antisense strand to SEQ ID NO: 2219124
aaccaaggaaguauucuaa

SEQ ID NO: 2219126 - RNA, 19 nt, Artificial Sequence
  Description of Artificial Sequence: Synthetic oligonucleotide
  Sense strand starting at position 51 of SEQ ID NO: 1883826
uuuaguuuagacugauccu

SEQ ID NO: 2219127 - RNA, 19 nt, Artificial Sequence
  Description of Artificial Sequence: Synthetic oligonucleotide
  Antisense strand to SEQ ID NO: 2219126
aggaucagucuaaacuaaa

SEQ ID NO: 2219128 - RNA, 19 nt, Artificial Sequence
  Description of Artificial Sequence: Synthetic oligonucleotide
  Sense strand starting at position 3205 of SEQ ID NO: 1883826
uugacauguaaaugguagu

SEQ ID NO: 2219129 - RNA, 19 nt, Artificial Sequence
  Description of Artificial Sequence: Synthetic oligonucleotide
  Antisense strand to SEQ ID NO: 2219128
acuaccauuuacaugucaa

SEQ ID NO: 2219130 - RNA, 19 nt, Artificial Sequence
  Description of Artificial Sequence: Synthetic oligonucleotide
  Sense strand starting at position 3206 of SEQ ID NO: 1883826
ugacauguaaaugguaguu

SEQ ID NO: 2219131 - RNA, 19 nt, Artificial Sequence
  Description of Artificial Sequence: Synthetic oligonucleotide
  Antisense strand to SEQ ID NO: 2219130
aacuaccauuuacauguca

SEQ ID NO: 2219132 - RNA, 19 nt, Artificial Sequence
  Description of Artificial Sequence: Synthetic oligonucleotide
  Sense strand starting at position 108 of SEQ ID NO: 1883826
ugaucagauuggcauuuga

SEQ ID NO: 2219133 - RNA, 19 nt, Artificial Sequence
  Description of Artificial Sequence: Synthetic oligonucleotide
  Antisense strand to SEQ ID NO: 2219132
ucaaaugccaaucugauca

SEQ ID NO: 2219134 - RNA, 19 nt, Artificial Sequence
  Description of Artificial Sequence: Synthetic oligonucleotide
  Sense strand starting at position 2631 of SEQ ID NO: 1883826
ugagaaugcuagguagcau

SEQ ID NO: 2219135 - RNA, 19 nt, Artificial Sequence
  Description of Artificial Sequence: Synthetic oligonucleotide
  Antisense strand to SEQ ID NO: 2219134
augcuaccuagcauucuca

SEQ ID NO: 2219136 - RNA, 19 nt, Artificial Sequence
  Description of Artificial Sequence: Synthetic oligonucleotide
  Sense strand starting at position 39 of SEQ ID NO: 1883826
ugugaacaaugguuuaguu

SEQ ID NO: 2219137 - RNA, 19 nt, Artificial Sequence
  Description of Artificial Sequence: Synthetic oligonucleotide
  Antisense strand to SEQ ID NO: 2219136
aacuaaaccauuguucaca

SEQ ID NO: 2219138 - RNA, 19 nt, Artificial Sequence
  Description of Artificial Sequence: Synthetic oligonucleotide
  Sense strand starting at position 290 of SEQ ID NO: 1883826
ggaaggugugaacguugau

SEQ ID NO: 2219139 - RNA, 19 nt, Artificial Sequence
  Description of Artificial Sequence: Synthetic oligonucleotide
  Antisense strand to SEQ ID NO: 2219138
aucaacguucacaccuucc

SEQ ID NO: 2219140 - RNA, 19 nt, Artificial Sequence
  Description of Artificial Sequence: Synthetic oligonucleotide
  Sense strand starting at position 2450 of SEQ ID NO: 1883826
ugugauccuucuuucuaca

SEQ ID NO: 2219141 - RNA, 19 nt, Artificial Sequence
  Description of Artificial Sequence: Synthetic oligonucleotide
  Antisense strand to SEQ ID NO: 2219140
uguagaaagaaggaucaca

SEQ ID NO: 2219142 - RNA, 19 nt, Artificial Sequence
  Description of Artificial Sequence: Synthetic oligonucleotide
  Sense strand starting at position 2630 of SEQ ID NO: 1883826
cugagaaugcuagguagca

SEQ ID NO: 2219143 - RNA, 19 nt, Artificial Sequence
  Description of Artificial Sequence: Synthetic oligonucleotide
  Antisense strand to SEQ ID NO: 2219142
ugcuaccuagcauucucag

SEQ ID NO: 2219144 - RNA, 19 nt, Artificial Sequence
  Description of Artificial Sequence: Synthetic oligonucleotide
  Sense strand starting at position 3237 of SEQ ID NO: 1883826
gccugacugcuccaucuua

SEQ ID NO: 2219145 - RNA, 19 nt, Artificial Sequence
  Description of Artificial Sequence: Synthetic oligonucleotide
  Antisense strand to SEQ ID NO: 2219144
uaagauggagcagucaggc

SEQ ID NO: 2219146 - RNA, 19 nt, Artificial Sequence
  Description of Artificial Sequence: Synthetic oligonucleotide
  Sense strand starting at position 2585 of SEQ ID NO: 1883826
gcaguaaguuuggcaaaga

SEQ ID NO: 2219147 - RNA, 19 nt, Artificial Sequence
  Description of Artificial Sequence: Synthetic oligonucleotide
  Antisense strand to SEQ ID NO: 2219146
ucuuugccaaacuuacugc

SEQ ID NO: 2219148 - RNA, 19 nt, Artificial Sequence
  Description of Artificial Sequence: Synthetic oligonucleotide
  Sense strand starting at position 60 of SEQ ID NO: 1883826
gacugauccuaagacagag

SEQ ID NO: 2219149 - RNA, 19 nt, Artificial Sequence
  Description of Artificial Sequence: Synthetic oligonucleotide
  Antisense strand to SEQ ID NO: 2219148
cucugucuuaggaucaguc

SEQ ID NO: 2219150 - RNA, 19 nt, Artificial Sequence
  Description of Artificial Sequence: Synthetic oligonucleotide
  Sense strand starting at position 2449 of SEQ ID NO: 1883826
uugugauccuucuuucuac

SEQ ID NO: 2219151 - RNA, 19 nt, Artificial Sequence
  Description of Artificial Sequence: Synthetic oligonucleotide
  Antisense strand to SEQ ID NO: 2219150
guagaaagaaggaucacaa

SEQ ID NO: 2219152 - RNA, 19 nt, Artificial Sequence
  Description of Artificial Sequence: Synthetic oligonucleotide
  Sense strand starting at position 2512 of SEQ ID NO: 1883826
gcugaaaggaugugcaagu

SEQ ID NO: 2219153 - RNA, 19 nt, Artificial Sequence
  Description of Artificial Sequence: Synthetic oligonucleotide
  Antisense strand to SEQ ID NO: 2219152
acuugcacauccuuucagc

SEQ ID NO: 2219154 - RNA, 19 nt, Artificial Sequence
  Description of Artificial Sequence: Synthetic oligonucleotide
  Sense strand starting at position 450 of SEQ ID NO: 1883826
aggacaguaucauacagaa

SEQ ID NO: 2219155 - RNA, 19 nt, Artificial Sequence
  Description of Artificial Sequence: Synthetic oligonucleotide
  Antisense strand to SEQ ID NO: 2219154
uucuguaugauacuguccu

SEQ ID NO: 2219156 - RNA, 19 nt, Artificial Sequence
  Description of Artificial Sequence: Synthetic oligonucleotide
  Sense strand starting at position 555 of SEQ ID NO: 1883826
ucuguuuacugucuccaua

SEQ ID NO: 2219157 - RNA, 19 nt, Artificial Sequence
  Description of Artificial Sequence: Synthetic oligonucleotide
  Antisense strand to SEQ ID NO: 2219156
uauggagacaguaaacaga

SEQ ID NO: 2219158 - RNA, 19 nt, Artificial Sequence
  Description of Artificial Sequence: Synthetic oligonucleotide
  Sense strand starting at position 30 of SEQ ID NO: 1883826
gggagaaucugugaacaau

SEQ ID NO: 2219159 - RNA, 19 nt, Artificial Sequence
  Description of Artificial Sequence: Synthetic oligonucleotide
  Antisense strand to SEQ ID NO: 2219158
auuguucacagauucuccc

SEQ ID NO: 2219160 - RNA, 19 nt, Artificial Sequence
  Description of Artificial Sequence: Synthetic oligonucleotide
  Sense strand starting at position 57 of SEQ ID NO: 1883826
uuagacugauccuaagaca

SEQ ID NO: 2219161 - RNA, 19 nt, Artificial Sequence
  Description of Artificial Sequence: Synthetic oligonucleotide
  Antisense strand to SEQ ID NO: 2219160
ugucuuaggaucagucuaa

SEQ ID NO: 2219162 - RNA, 19 nt, Artificial Sequence
  Description of Artificial Sequence: Synthetic oligonucleotide
  Sense strand starting at position 2425 of SEQ ID NO: 1883826
guucuacuuucucuuuagu

SEQ ID NO: 2219163 - RNA, 19 nt, Artificial Sequence
  Description of Artificial Sequence: Synthetic oligonucleotide
  Antisense strand to SEQ ID NO: 2219162
acuaaagagaaaguagaac

SEQ ID NO: 2219164 - RNA, 19 nt, Artificial Sequence
  Description of Artificial Sequence: Synthetic oligonucleotide
  Sense strand starting at position 3012 of SEQ ID NO: 1883827
gccaacuuccuggaacuaa

SEQ ID NO: 2219165 - RNA, 19 nt, Artificial Sequence
  Description of Artificial Sequence: Synthetic oligonucleotide
  Antisense strand to SEQ ID NO: 2219164
uuaguuccaggaaguuggc

SEQ ID NO: 2219166 - RNA, 19 nt, Artificial Sequence
  Description of Artificial Sequence: Synthetic oligonucleotide
  Sense strand starting at position 2585 of SEQ ID NO: 1883827
agaggucugacucacaguu

SEQ ID NO: 2219167 - RNA, 19 nt, Artificial Sequence
  Description of Artificial Sequence: Synthetic oligonucleotide
  Antisense strand to SEQ ID NO: 2219166
aacugugagucagaccucu

SEQ ID NO: 2219168 - RNA, 19 nt, Artificial Sequence
  Description of Artificial Sequence: Synthetic oligonucleotide
  Sense strand starting at position 3564 of SEQ ID NO: 1883827
gugacaguuccauaauuac

SEQ ID NO: 2219169 - RNA, 19 nt, Artificial Sequence
  Description of Artificial Sequence: Synthetic oligonucleotide
  Antisense strand to SEQ ID NO: 2219168
guaauuauggaacugucac

SEQ ID NO: 2219170 - RNA, 19 nt, Artificial Sequence
  Description of Artificial Sequence: Synthetic oligonucleotide
  Sense strand starting at position 2526 of SEQ ID NO: 1883827
ugggaaacccacuguauua

SEQ ID NO: 2219171 - RNA, 19 nt, Artificial Sequence
  Description of Artificial Sequence: Synthetic oligonucleotide
  Antisense strand to SEQ ID NO: 2219170
uaauacaguggguuuccca

SEQ ID NO: 2219172 - RNA, 19 nt, Artificial Sequence
  Description of Artificial Sequence: Synthetic oligonucleotide
  Sense strand starting at position 567 of SEQ ID NO: 1883827
acugcuuaauaucuaagga

SEQ ID NO: 2219173 - RNA, 19 nt, Artificial Sequence
  Description of Artificial Sequence: Synthetic oligonucleotide
  Antisense strand to SEQ ID NO: 2219172
uccuuagauauuaagcagu

SEQ ID NO: 2219174 - RNA, 19 nt, Artificial Sequence
  Description of Artificial Sequence: Synthetic oligonucleotide
  Sense strand starting at position 3146 of SEQ ID NO: 1883827
ucuaacuuugcauagaagu

SEQ ID NO: 2219175 - RNA, 19 nt, Artificial Sequence
  Description of Artificial Sequence: Synthetic oligonucleotide
  Antisense strand to SEQ ID NO: 2219174
acuucuaugcaaaguuaga

SEQ ID NO: 2219176 - RNA, 19 nt, Artificial Sequence
  Description of Artificial Sequence: Synthetic oligonucleotide
  Sense strand starting at position 765 of SEQ ID NO: 1883827
acuaaaucugcucagguca

SEQ ID NO: 2219177 - RNA, 19 nt, Artificial Sequence
  Description of Artificial Sequence: Synthetic oligonucleotide
  Antisense strand to SEQ ID NO: 2219176
ugaccugagcagauuuagu

SEQ ID NO: 2219178 - RNA, 19 nt, Artificial Sequence
  Description of Artificial Sequence: Synthetic oligonucleotide
  Sense strand starting at position 3143 of SEQ ID NO: 1883827
gagucuaacuuugcauaga

SEQ ID NO: 2219179 - RNA, 19 nt, Artificial Sequence
  Description of Artificial Sequence: Synthetic oligonucleotide
  Antisense strand to SEQ ID NO: 2219178
ucuaugcaaaguuagacuc

SEQ ID NO: 2219180 - RNA, 19 nt, Artificial Sequence
  Description of Artificial Sequence: Synthetic oligonucleotide
  Sense strand starting at position 3011 of SEQ ID NO: 1883827
ugccaacuuccuggaacua

SEQ ID NO: 2219181 - RNA, 19 nt, Artificial Sequence
  Description of Artificial Sequence: Synthetic oligonucleotide
  Antisense strand to SEQ ID NO: 2219180
uaguuccaggaaguuggca

SEQ ID NO: 2219182 - RNA, 19 nt, Artificial Sequence
  Description of Artificial Sequence: Synthetic oligonucleotide
  Sense strand starting at position 520 of SEQ ID NO: 1883827
cagguauacuguuuggauc

SEQ ID NO: 2219183 - RNA, 19 nt, Artificial Sequence
  Description of Artificial Sequence: Synthetic oligonucleotide
  Antisense strand to SEQ ID NO: 2219182
gauccaaacaguauaccug

SEQ ID NO: 2219184 - RNA, 19 nt, Artificial Sequence
  Description of Artificial Sequence: Synthetic oligonucleotide
  Sense strand starting at position 3848 of SEQ ID NO: 1883827
cuaggaucuugguuaggca

SEQ ID NO: 2219185 - RNA, 19 nt, Artificial Sequence
  Description of Artificial Sequence: Synthetic oligonucleotide
  Antisense strand to SEQ ID NO: 2219184
ugccuaaccaagauccuag

SEQ ID NO: 2219186 - RNA, 19 nt, Artificial Sequence
  Description of Artificial Sequence: Synthetic oligonucleotide
  Sense strand starting at position 899 of SEQ ID NO: 1883827
auccuugccugacucagau

SEQ ID NO: 2219187 - RNA, 19 nt, Artificial Sequence
  Description of Artificial Sequence: Synthetic oligonucleotide
  Antisense strand to SEQ ID NO: 2219186
aucugagucaggcaaggau

SEQ ID NO: 2219188 - RNA, 19 nt, Artificial Sequence
  Description of Artificial Sequence: Synthetic oligonucleotide
  Sense strand starting at position 521 of SEQ ID NO: 1883827
agguauacuguuuggaucu

SEQ ID NO: 2219189 - RNA, 19 nt, Artificial Sequence
  Description of Artificial Sequence: Synthetic oligonucleotide
  Antisense strand to SEQ ID NO: 2219188
agauccaaacaguauaccu

SEQ ID NO: 2219190 - RNA, 19 nt, Artificial Sequence
  Description of Artificial Sequence: Synthetic oligonucleotide
  Sense strand starting at position 2057 of SEQ ID NO: 1883827
gagcuuucccgcuaaggga

SEQ ID NO: 2219191 - RNA, 19 nt, Artificial Sequence
  Description of Artificial Sequence: Synthetic oligonucleotide
  Antisense strand to SEQ ID NO: 2219190
ucccuuagcgggaaagcuc

SEQ ID NO: 2219192 - RNA, 19 nt, Artificial Sequence
  Description of Artificial Sequence: Synthetic oligonucleotide
  Sense strand starting at position 865 of SEQ ID NO: 1883827
guucuuuaucacggacacu

SEQ ID NO: 2219193 - RNA, 19 nt, Artificial Sequence
  Description of Artificial Sequence: Synthetic oligonucleotide
  Antisense strand to SEQ ID NO: 2219192
aguguccgugauaaagaac

SEQ ID NO: 2219194 - RNA, 19 nt, Artificial Sequence
  Description of Artificial Sequence: Synthetic oligonucleotide
  Sense strand starting at position 2505 of SEQ ID NO: 1883827
caggcaguccugcaaaugu

SEQ ID NO: 2219195 - RNA, 19 nt, Artificial Sequence
  Description of Artificial Sequence: Synthetic oligonucleotide
  Antisense strand to SEQ ID NO: 2219194
acauuugcaggacugccug

SEQ ID NO: 2219196 - RNA, 19 nt, Artificial Sequence
  Description of Artificial Sequence: Synthetic oligonucleotide
  Sense strand starting at position 896 of SEQ ID NO: 1883827
guaauccuugccugacuca

SEQ ID NO: 2219197 - RNA, 19 nt, Artificial Sequence
  Description of Artificial Sequence: Synthetic oligonucleotide
  Antisense strand to SEQ ID NO: 2219196
ugagucaggcaaggauuac

SEQ ID NO: 2219198 - RNA, 19 nt, Artificial Sequence
  Description of Artificial Sequence: Synthetic oligonucleotide
  Sense strand starting at position 3602 of SEQ ID NO: 1883827
ggauaauucggcugggcca

SEQ ID NO: 2219199 - RNA, 19 nt, Artificial Sequence
  Description of Artificial Sequence: Synthetic oligonucleotide
  Antisense strand to SEQ ID NO: 2219198
uggcccagccgaauuaucc

SEQ ID NO: 2219200 - RNA, 19 nt, Artificial Sequence
  Description of Artificial Sequence: Synthetic oligonucleotide
  Sense strand starting at position 894 of SEQ ID NO: 1883827
ugguaauccuugccugacu

SEQ ID NO: 2219201 - RNA, 19 nt, Artificial Sequence
  Description of Artificial Sequence: Synthetic oligonucleotide
  Antisense strand to SEQ ID NO: 2219200
agucaggcaaggauuacca

SEQ ID NO: 2219202 - RNA, 19 nt, Artificial Sequence
  Description of Artificial Sequence: Synthetic oligonucleotide
  Sense strand starting at position 892 of SEQ ID NO: 1883827
agugguaauccuugccuga

SEQ ID NO: 2219203 - RNA, 19 nt, Artificial Sequence
  Description of Artificial Sequence: Synthetic oligonucleotide
  Antisense strand to SEQ ID NO: 2219202
ucaggcaaggauuaccacu

SEQ ID NO: 2219204 - RNA, 19 nt, Artificial Sequence
  Description of Artificial Sequence: Synthetic oligonucleotide
  Sense strand starting at position 817 of SEQ ID NO: 1883827
cccuuuguccuuuguaaau

SEQ ID NO: 2219205 - RNA, 19 nt, Artificial Sequence
  Description of Artificial Sequence: Synthetic oligonucleotide
  Antisense strand to SEQ ID NO: 2219204
auuuacaaaggacaaaggg

SEQ ID NO: 2219206 - RNA, 19 nt, Artificial Sequence
  Description of Artificial Sequence: Synthetic oligonucleotide
  Sense strand starting at position 500 of SEQ ID NO: 1883827
gggcauaacuaacagaaua

SEQ ID NO: 2219207 - RNA, 19 nt, Artificial Sequence
  Description of Artificial Sequence: Synthetic oligonucleotide
  Antisense strand to SEQ ID NO: 2219206
uauucuguuaguuaugccc

SEQ ID NO: 2219208 - RNA, 19 nt, Artificial Sequence
  Description of Artificial Sequence: Synthetic oligonucleotide
  Sense strand starting at position 861 of SEQ ID NO: 1883827
cuguguucuuuaucacgga

SEQ ID NO: 2219209 - RNA, 19 nt, Artificial Sequence
  Description of Artificial Sequence: Synthetic oligonucleotide
  Antisense strand to SEQ ID NO: 2219208
uccgugauaaagaacacag

SEQ ID NO: 2219210 - RNA, 19 nt, Artificial Sequence
  Description of Artificial Sequence: Synthetic oligonucleotide
  Sense strand starting at position 857 of SEQ ID NO: 1883827
aggccuguguucuuuauca

SEQ ID NO: 2219211 - RNA, 19 nt, Artificial Sequence
  Description of Artificial Sequence: Synthetic oligonucleotide
  Antisense strand to SEQ ID NO: 2219210
ugauaaagaacacaggccu

SEQ ID NO: 2219212 - RNA, 19 nt, Artificial Sequence
  Description of Artificial Sequence: Synthetic oligonucleotide
  Sense strand starting at position 855 of SEQ ID NO: 1883827
uaaggccuguguucuuuau

SEQ ID NO: 2219213 - RNA, 19 nt, Artificial Sequence
  Description of Artificial Sequence: Synthetic oligonucleotide
  Antisense strand to SEQ ID NO: 2219212
auaaagaacacaggccuua

SEQ ID NO: 2219214 - RNA, 19 nt, Artificial Sequence
  Description of Artificial Sequence: Synthetic oligonucleotide
  Sense strand starting at position 815 of SEQ ID NO: 1883827
ggcccuuuguccuuuguaa

SEQ ID NO: 2219215 - RNA, 19 nt, Artificial Sequence
  Description of Artificial Sequence: Synthetic oligonucleotide
  Antisense strand to SEQ ID NO: 2219214
uuacaaaggacaaagggcc

SEQ ID NO: 2219216 - RNA, 19 nt, Artificial Sequence
  Description of Artificial Sequence: Synthetic oligonucleotide
  Sense strand starting at position 3232 of SEQ ID NO: 1883827
gugugcgaccuuuguaacu

SEQ ID NO: 2219217 - RNA, 19 nt, Artificial Sequence
  Description of Artificial Sequence: Synthetic oligonucleotide
  Antisense strand to SEQ ID NO: 2219216
aguuacaaaggucgcacac

SEQ ID NO: 2219218 - RNA, 19 nt, Artificial Sequence
  Description of Artificial Sequence: Synthetic oligonucleotide
  Sense strand starting at position 3144 of SEQ ID NO: 1883827
agucuaacuuugcauagaa

SEQ ID NO: 2219219 - RNA, 19 nt, Artificial Sequence
  Description of Artificial Sequence: Synthetic oligonucleotide
  Antisense strand to SEQ ID NO: 2219218
uucuaugcaaaguuagacu

SEQ ID NO: 2219220 - RNA, 19 nt, Artificial Sequence
  Description of Artificial Sequence: Synthetic oligonucleotide
  Sense strand starting at position 2053 of SEQ ID NO: 1883827
cgcagagcuuucccgcuaa

SEQ ID NO: 2219221 - RNA, 19 nt, Artificial Sequence
  Description of Artificial Sequence: Synthetic oligonucleotide
  Antisense strand to SEQ ID NO: 2219220
uuagcgggaaagcucugcg

SEQ ID NO: 2219222 - RNA, 19 nt, Artificial Sequence
  Description of Artificial Sequence: Synthetic oligonucleotide
  Sense strand starting at position 1158 of SEQ ID NO: 1883827
gcaagugagugcaguagua

SEQ ID NO: 2219223 - RNA, 19 nt, Artificial Sequence
  Description of Artificial Sequence: Synthetic oligonucleotide
  Antisense strand to SEQ ID NO: 2219222
uacuacugcacucacuugc

SEQ ID NO: 2219224 - RNA, 19 nt, Artificial Sequence
  Description of Artificial Sequence: Synthetic oligonucleotide
  Sense strand starting at position 2256 of SEQ ID NO: 1883827
aguagaaccuaguguggaa

SEQ ID NO: 2219225 - RNA, 19 nt, Artificial Sequence
  Description of Artificial Sequence: Synthetic oligonucleotide
  Antisense strand to SEQ ID NO: 2219224
uuccacacuagguucuacu

SEQ ID NO: 2219226 - RNA, 19 nt, Artificial Sequence
  Description of Artificial Sequence: Synthetic oligonucleotide
  Sense strand starting at position 819 of SEQ ID NO: 1883827
cuuuguccuuuguaaauuc

SEQ ID NO: 2219227 - RNA, 19 nt, Artificial Sequence
  Description of Artificial Sequence: Synthetic oligonucleotide
  Antisense strand to SEQ ID NO: 2219226
gaauuuacaaaggacaaag

SEQ ID NO: 2219228 - RNA, 19 nt, Artificial Sequence
  Description of Artificial Sequence: Synthetic oligonucleotide
  Sense strand starting at position 2951 of SEQ ID NO: 1883827
gggugaugguucugaggca

SEQ ID NO: 2219229 - RNA, 19 nt, Artificial Sequence
  Description of Artificial Sequence: Synthetic oligonucleotide
  Antisense strand to SEQ ID NO: 2219228
ugccucagaaccaucaccc

SEQ ID NO: 2219230 - RNA, 19 nt, Artificial Sequence
  Description of Artificial Sequence: Synthetic oligonucleotide
  Sense strand starting at position 1053 of SEQ ID NO: 1883827
ugaguaguguaccguccuu

SEQ ID NO: 2219231 - RNA, 19 nt, Artificial Sequence
  Description of Artificial Sequence: Synthetic oligonucleotide
  Antisense strand to SEQ ID NO: 2219230
aaggacgguacacuacuca

SEQ ID NO: 2219232 - RNA, 19 nt, Artificial Sequence
  Description of Artificial Sequence: Synthetic oligonucleotide
  Sense strand starting at position 2465 of SEQ ID NO: 1883827
gugugugacuccugcuguu

SEQ ID NO: 2219233 - RNA, 19 nt, Artificial Sequence
  Description of Artificial Sequence: Synthetic oligonucleotide
  Antisense strand to SEQ ID NO: 2219232
aacagcaggagucacacac

SEQ ID NO: 2219234 - RNA, 19 nt, Artificial Sequence
  Description of Artificial Sequence: Synthetic oligonucleotide
  Sense strand starting at position 2164 of SEQ ID NO: 1883828
uguagcagauccuuuauuu

SEQ ID NO: 2219235 - RNA, 19 nt, Artificial Sequence
  Description of Artificial Sequence: Synthetic oligonucleotide
  Antisense strand to SEQ ID NO: 2219234
aaauaaaggaucugcuaca

SEQ ID NO: 2219236 - RNA, 19 nt, Artificial Sequence
  Description of Artificial Sequence: Synthetic oligonucleotide
  Sense strand starting at position 831 of SEQ ID NO: 1883828
aacuguauuucgcuuagga

SEQ ID NO: 2219237 - RNA, 19 nt, Artificial Sequence
  Description of Artificial Sequence: Synthetic oligonucleotide
  Antisense strand to SEQ ID NO: 2219236
uccuaagcgaaauacaguu

SEQ ID NO: 2219238 - RNA, 19 nt, Artificial Sequence
  Description of Artificial Sequence: Synthetic oligonucleotide
  Sense strand starting at position 1533 of SEQ ID NO: 1883828
augucacuggcagaauuaa

SEQ ID NO: 2219239 - RNA, 19 nt, Artificial Sequence
  Description of Artificial Sequence: Synthetic oligonucleotide
  Antisense strand to SEQ ID NO: 2219238
uuaauucugccagugacau

SEQ ID NO: 2219240 - RNA, 19 nt, Artificial Sequence
  Description of Artificial Sequence: Synthetic oligonucleotide
  Sense strand starting at position 686 of SEQ ID NO: 1883828
gguucuaaaccacagaugu

SEQ ID NO: 2219241 - RNA, 19 nt, Artificial Sequence
  Description of Artificial Sequence: Synthetic oligonucleotide
  Antisense strand to SEQ ID NO: 2219240
acaucugugguuuagaacc

SEQ ID NO: 2219242 - RNA, 19 nt, Artificial Sequence
  Description of Artificial Sequence: Synthetic oligonucleotide
  Sense strand starting at position 3269 of SEQ ID NO: 1883828
uggaaucgaugaguaaaug

SEQ ID NO: 2219243 - RNA, 19 nt, Artificial Sequence
  Description of Artificial Sequence: Synthetic oligonucleotide
  Antisense strand to SEQ ID NO: 2219242
cauuuacucaucgauucca

SEQ ID NO: 2219244 - RNA, 19 nt, Artificial Sequence
  Description of Artificial Sequence: Synthetic oligonucleotide
  Sense strand starting at position 105 of SEQ ID NO: 1883828
uaguuugaucaggaaugca

SEQ ID NO: 2219245 - RNA, 19 nt, Artificial Sequence
  Description of Artificial Sequence: Synthetic oligonucleotide
  Antisense strand to SEQ ID NO: 2219244
ugcauuccugaucaaacua

SEQ ID NO: 2219246 - RNA, 19 nt, Artificial Sequence
  Description of Artificial Sequence: Synthetic oligonucleotide
  Sense strand starting at position 299 of SEQ ID NO: 1883828
uuuagcuugagugaaauga

SEQ ID NO: 2219247 - RNA, 19 nt, Artificial Sequence
  Description of Artificial Sequence: Synthetic oligonucleotide
  Antisense strand to SEQ ID NO: 2219246
ucauuucacucaagcuaaa

SEQ ID NO: 2219248 - RNA, 19 nt, Artificial Sequence
  Description of Artificial Sequence: Synthetic oligonucleotide
  Sense strand starting at position 666 of SEQ ID NO: 1883828
uguuuaaagaaugggaagu

SEQ ID NO: 2219249 - RNA, 19 nt, Artificial Sequence
  Description of Artificial Sequence: Synthetic oligonucleotide
  Antisense strand to SEQ ID NO: 2219248
acuucccauucuuuaaaca

SEQ ID NO: 2219250 - RNA, 19 nt, Artificial Sequence
  Description of Artificial Sequence: Synthetic oligonucleotide
  Sense strand starting at position 2331 of SEQ ID NO: 1883828
gccacaacaccugaguaau

SEQ ID NO: 2219251 - RNA, 19 nt, Artificial Sequence
  Description of Artificial Sequence: Synthetic oligonucleotide
  Antisense strand to SEQ ID NO: 2219250
auuacucagguguuguggc

SEQ ID NO: 2219252 - RNA, 19 nt, Artificial Sequence
  Description of Artificial Sequence: Synthetic oligonucleotide
  Sense strand starting at position 803 of SEQ ID NO: 1883828
cccauauuacccgagguaa

SEQ ID NO: 2219253 - RNA, 19 nt, Artificial Sequence
  Description of Artificial Sequence: Synthetic oligonucleotide
  Antisense strand to SEQ ID NO: 2219252
uuaccucggguaauauggg

SEQ ID NO: 2219254 - RNA, 19 nt, Artificial Sequence
  Description of Artificial Sequence: Synthetic oligonucleotide
  Sense strand starting at position 2053 of SEQ ID NO: 1883828
agaguuaagugacuuaaug

SEQ ID NO: 2219255 - RNA, 19 nt, Artificial Sequence
  Description of Artificial Sequence: Synthetic oligonucleotide
  Antisense strand to SEQ ID NO: 2219254
cauuaagucacuuaacucu

SEQ ID NO: 2219256 - RNA, 19 nt, Artificial Sequence
  Description of Artificial Sequence: Synthetic oligonucleotide
  Sense strand starting at position 3501 of SEQ ID NO: 1883828
gauugaggccuaugaaauc

SEQ ID NO: 2219257 - RNA, 19 nt, Artificial Sequence
  Description of Artificial Sequence: Synthetic oligonucleotide
  Antisense strand to SEQ ID NO: 2219256
gauuucauaggccucaauc

SEQ ID NO: 2219258 - RNA, 19 nt, Artificial Sequence
  Description of Artificial Sequence: Synthetic oligonucleotide
  Sense strand starting at position 1684 of SEQ ID NO: 1883828
uuuaguaugguccagaauu

SEQ ID NO: 2219259 - RNA, 19 nt, Artificial Sequence
  Description of Artificial Sequence: Synthetic oligonucleotide
  Antisense strand to SEQ ID NO: 2219258
aauucuggaccauacuaaa

SEQ ID NO: 2219260 - RNA, 19 nt, Artificial Sequence
  Description of Artificial Sequence: Synthetic oligonucleotide
  Sense strand starting at position 1954 of SEQ ID NO: 1883828
ugacaaguagagcaguauu

SEQ ID NO: 2219261 - RNA, 19 nt, Artificial Sequence
  Description of Artificial Sequence: Synthetic oligonucleotide
  Antisense strand to SEQ ID NO: 2219260
aauacugcucuacuuguca

SEQ ID NO: 2219262 - RNA, 19 nt, Artificial Sequence
  Description of Artificial Sequence: Synthetic oligonucleotide
  Sense strand starting at position 3472 of SEQ ID NO: 1883828
cuuuauacuucguccauuu

SEQ ID NO: 2219263 - RNA, 19 nt, Artificial Sequence
  Description of Artificial Sequence: Synthetic oligonucleotide
  Antisense strand to SEQ ID NO: 2219262
aaauggacgaaguauaaag

SEQ ID NO: 2219264 - RNA, 19 nt, Artificial Sequence
  Description of Artificial Sequence: Synthetic oligonucleotide
  Sense strand starting at position 2583 of SEQ ID NO: 1883828
augucauaaggucagaguu

SEQ ID NO: 2219265 - RNA, 19 nt, Artificial Sequence
  Description of Artificial Sequence: Synthetic oligonucleotide
  Antisense strand to SEQ ID NO: 2219264
aacucugaccuuaugacau

SEQ ID NO: 2219266 - RNA, 19 nt, Artificial Sequence
  Description of Artificial Sequence: Synthetic oligonucleotide
  Sense strand starting at position 1933 of SEQ ID NO: 1883828
guuuauucuagggaggcau

SEQ ID NO: 2219267 - RNA, 19 nt, Artificial Sequence
  Description of Artificial Sequence: Synthetic oligonucleotide
  Antisense strand to SEQ ID NO: 2219266
augccucccuagaauaaac

SEQ ID NO: 2219268 - RNA, 19 nt, Artificial Sequence
  Description of Artificial Sequence: Synthetic oligonucleotide
  Sense strand starting at position 3302 of SEQ ID NO: 1883828
gguucuauaggugacaagu

SEQ ID NO: 2219269 - RNA, 19 nt, Artificial Sequence
  Description of Artificial Sequence: Synthetic oligonucleotide
  Antisense strand to SEQ ID NO: 2219268
acuugucaccuauagaacc

SEQ ID NO: 2219270 - RNA, 19 nt, Artificial Sequence
  Description of Artificial Sequence: Synthetic oligonucleotide
  Sense strand starting at position 3301 of SEQ ID NO: 1883828
ggguucuauaggugacaag

SEQ ID NO: 2219271 - RNA, 19 nt, Artificial Sequence
  Description of Artificial Sequence: Synthetic oligonucleotide
  Antisense strand to SEQ ID NO: 2219270
cuugucaccuauagaaccc

SEQ ID NO: 2219272 - RNA, 19 nt, Artificial Sequence
  Description of Artificial Sequence: Synthetic oligonucleotide
  Sense strand starting at position 580 of SEQ ID NO: 1883828
guauaaacacuggguacau

SEQ ID NO: 2219273 - RNA, 19 nt, Artificial Sequence
  Description of Artificial Sequence: Synthetic oligonucleotide
  Antisense strand to SEQ ID NO: 2219272
auguacccaguguuuauac

SEQ ID NO: 2219274 - RNA, 19 nt, Artificial Sequence
  Description of Artificial Sequence: Synthetic oligonucleotide
  Sense strand starting at position 1882 of SEQ ID NO: 1883828
cguaucuguccguuacgau

SEQ ID NO: 2219275 - RNA, 19 nt, Artificial Sequence
  Description of Artificial Sequence: Synthetic oligonucleotide
  Antisense strand to SEQ ID NO: 2219274
aucguaacggacagauacg

SEQ ID NO: 2219276 - RNA, 19 nt, Artificial Sequence
  Description of Artificial Sequence: Synthetic oligonucleotide
  Sense strand starting at position 3328 of SEQ ID NO: 1883828
uuugaaugauucuugugga

SEQ ID NO: 2219277 - RNA, 19 nt, Artificial Sequence
  Description of Artificial Sequence: Synthetic oligonucleotide
  Antisense strand to SEQ ID NO: 2219276
uccacaagaaucauucaaa

SEQ ID NO: 2219278 - RNA, 19 nt, Artificial Sequence
  Description of Artificial Sequence: Synthetic oligonucleotide
  Sense strand starting at position 3199 of SEQ ID NO: 1883828
aggcuauucccagaggcua

SEQ ID NO: 2219279 - RNA, 19 nt, Artificial Sequence
  Description of Artificial Sequence: Synthetic oligonucleotide
  Antisense strand to SEQ ID NO: 2219278
uagccucugggaauagccu

SEQ ID NO: 2219280 - RNA, 19 nt, Artificial Sequence
  Description of Artificial Sequence: Synthetic oligonucleotide
  Sense strand starting at position 1438 of SEQ ID NO: 1883828
cuuaauaaucauggcugau

SEQ ID NO: 2219281 - RNA, 19 nt, Artificial Sequence
  Description of Artificial Sequence: Synthetic oligonucleotide
  Antisense strand to SEQ ID NO: 2219280
aucagccaugauuauuaag

SEQ ID NO: 2219282 - RNA, 19 nt, Artificial Sequence
  Description of Artificial Sequence: Synthetic oligonucleotide
  Sense strand starting at position 312 of SEQ ID NO: 1883828
aaaugaguucuguaaugcu

SEQ ID NO: 2219283 - RNA, 19 nt, Artificial Sequence
  Description of Artificial Sequence: Synthetic oligonucleotide
  Antisense strand to SEQ ID NO: 2219282
agcauuacagaacucauuu

SEQ ID NO: 2219284 - RNA, 19 nt, Artificial Sequence
  Description of Artificial Sequence: Synthetic oligonucleotide
  Sense strand starting at position 610 of SEQ ID NO: 1883828
uguaaugguuaaucuccaa

SEQ ID NO: 2219285 - RNA, 19 nt, Artificial Sequence
  Description of Artificial Sequence: Synthetic oligonucleotide
  Antisense strand to SEQ ID NO: 2219284
uuggagauuaaccauuaca

SEQ ID NO: 2219286 - RNA, 19 nt, Artificial Sequence
  Description of Artificial Sequence: Synthetic oligonucleotide
  Sense strand starting at position 2368 of SEQ ID NO: 1883828
augggcuuucuccauguga

SEQ ID NO: 2219287 - RNA, 19 nt, Artificial Sequence
  Description of Artificial Sequence: Synthetic oligonucleotide
  Antisense strand to SEQ ID NO: 2219286
ucacauggagaaagcccau

SEQ ID NO: 2219288 - RNA, 19 nt, Artificial Sequence
  Description of Artificial Sequence: Synthetic oligonucleotide
  Sense strand starting at position 1849 of SEQ ID NO: 1883828
ccuuuacgagucuauucua

SEQ ID NO: 2219289 - RNA, 19 nt, Artificial Sequence
  Description of Artificial Sequence: Synthetic oligonucleotide
  Antisense strand to SEQ ID NO: 2219288
uagaauagacucguaaagg

SEQ ID NO: 2219290 - RNA, 19 nt, Artificial Sequence
  Description of Artificial Sequence: Synthetic oligonucleotide
  Sense strand starting at position 805 of SEQ ID NO: 1883828
cauauuacccgagguaauc

SEQ ID NO: 2219291 - RNA, 19 nt, Artificial Sequence
  Description of Artificial Sequence: Synthetic oligonucleotide
  Antisense strand to SEQ ID NO: 2219290
gauuaccucggguaauaug

SEQ ID NO: 2219292 - RNA, 19 nt, Artificial Sequence
  Description of Artificial Sequence: Synthetic oligonucleotide
  Sense strand starting at position 3175 of SEQ ID NO: 1883828
ggacaaaggcuaugucuuu

SEQ ID NO: 2219293 - RNA, 19 nt, Artificial Sequence
  Description of Artificial Sequence: Synthetic oligonucleotide
  Antisense strand to SEQ ID NO: 2219292
aaagacauagccuuugucc

SEQ ID NO: 2219294 - RNA, 19 nt, Artificial Sequence
  Description of Artificial Sequence: Synthetic oligonucleotide
  Sense strand starting at position 3247 of SEQ ID NO: 1883828
uguuaacuauuugauggau

SEQ ID NO: 2219295 - RNA, 19 nt, Artificial Sequence
  Description of Artificial Sequence: Synthetic oligonucleotide
  Antisense strand to SEQ ID NO: 2219294
auccaucaaauaguuaaca

SEQ ID NO: 2219296 - RNA, 19 nt, Artificial Sequence
  Description of Artificial Sequence: Synthetic oligonucleotide
  Sense strand starting at position 3077 of SEQ ID NO: 1883828
agggaaacuuaacauuaaa

SEQ ID NO: 2219297 - RNA, 19 nt, Artificial Sequence
  Description of Artificial Sequence: Synthetic oligonucleotide
  Antisense strand to SEQ ID NO: 2219296
uuuaauguuaaguuucccu

SEQ ID NO: 2219298 - RNA, 19 nt, Artificial Sequence
  Description of Artificial Sequence: Synthetic oligonucleotide
  Sense strand starting at position 472 of SEQ ID NO: 1883828
accuaugcucagugauaau

SEQ ID NO: 2219299 - RNA, 19 nt, Artificial Sequence
  Description of Artificial Sequence: Synthetic oligonucleotide
  Antisense strand to SEQ ID NO: 2219298
auuaucacugagcauaggu

SEQ ID NO: 2219300 - RNA, 19 nt, Artificial Sequence
  Description of Artificial Sequence: Synthetic oligonucleotide
  Sense strand starting at position 1841 of SEQ ID NO: 1883828
uuccauucccuuuacgagu

SEQ ID NO: 2219301 - RNA, 19 nt, Artificial Sequence
  Description of Artificial Sequence: Synthetic oligonucleotide
  Antisense strand to SEQ ID NO: 2219300
acucguaaagggaauggaa

SEQ ID NO: 2219302 - RNA, 19 nt, Artificial Sequence
  Description of Artificial Sequence: Synthetic oligonucleotide
  Sense strand starting at position 3463 of SEQ ID NO: 1883828
uggcucagucuuuauacuu

SEQ ID NO: 2219303 - RNA, 19 nt, Artificial Sequence
  Description of Artificial Sequence: Synthetic oligonucleotide
  Antisense strand to SEQ ID NO: 2219302
aaguauaaagacugagcca

SEQ ID NO: 2219304 - RNA, 19 nt, Artificial Sequence
  Description of Artificial Sequence: Synthetic oligonucleotide
  Sense strand starting at position 319 of SEQ ID NO: 1883828
uucuguaaugcugagcaau

SEQ ID NO: 2219305 - RNA, 19 nt, Artificial Sequence
  Description of Artificial Sequence: Synthetic oligonucleotide
  Antisense strand to SEQ ID NO: 2219304
auugcucagcauuacagaa

SEQ ID NO: 2219306 - RNA, 19 nt, Artificial Sequence
  Description of Artificial Sequence: Synthetic oligonucleotide
  Sense strand starting at position 1523 of SEQ ID NO: 1883828
gugaaauuguaugucacug

SEQ ID NO: 2219307 - RNA, 19 nt, Artificial Sequence
  Description of Artificial Sequence: Synthetic oligonucleotide
  Antisense strand to SEQ ID NO: 2219306
cagugacauacaauuucac

SEQ ID NO: 2219308 - RNA, 19 nt, Artificial Sequence
  Description of Artificial Sequence: Synthetic oligonucleotide
  Sense strand starting at position 2385 of SEQ ID NO: 1883828
gagucaggcuggucucaaa

SEQ ID NO: 2219309 - RNA, 19 nt, Artificial Sequence
  Description of Artificial Sequence: Synthetic oligonucleotide
  Antisense strand to SEQ ID NO: 2219308
uuugagaccagccugacuc

SEQ ID NO: 2219310 - RNA, 19 nt, Artificial Sequence
  Description of Artificial Sequence: Synthetic oligonucleotide
  Sense strand starting at position 303 of SEQ ID NO: 1883828
gcuugagugaaaugaguuc

SEQ ID NO: 2219311 - RNA, 19 nt, Artificial Sequence
  Description of Artificial Sequence: Synthetic oligonucleotide
  Antisense strand to SEQ ID NO: 2219310
gaacucauuucacucaagc

SEQ ID NO: 2219312 - RNA, 19 nt, Artificial Sequence
  Description of Artificial Sequence: Synthetic oligonucleotide
  Sense strand starting at position 348 of SEQ ID NO: 1883828
uguggucacuuaccaguaa

SEQ ID NO: 2219313 - RNA, 19 nt, Artificial Sequence
  Description of Artificial Sequence: Synthetic oligonucleotide
  Antisense strand to SEQ ID NO: 2219312
uuacugguaagugaccaca

SEQ ID NO: 2219314 - RNA, 19 nt, Artificial Sequence
  Description of Artificial Sequence: Synthetic oligonucleotide
  Sense strand starting at position 1745 of SEQ ID NO: 1883829
cuaucucuucgcgcuggaa

SEQ ID NO: 2219315 - RNA, 19 nt, Artificial Sequence
  Description of Artificial Sequence: Synthetic oligonucleotide
  Antisense strand to SEQ ID NO: 2219314
uuccagcgcgaagagauag

SEQ ID NO: 2219316 - RNA, 19 nt, Artificial Sequence
  Description of Artificial Sequence: Synthetic oligonucleotide
  Sense strand starting at position 3162 of SEQ ID NO: 1883829
agaaauaaacucuggagcu

SEQ ID NO: 2219317 - RNA, 19 nt, Artificial Sequence
  Description of Artificial Sequence: Synthetic oligonucleotide
  Antisense strand to SEQ ID NO: 2219316
agcuccagaguuuauuucu

SEQ ID NO: 2219318 - RNA, 19 nt, Artificial Sequence
  Description of Artificial Sequence: Synthetic oligonucleotide
  Sense strand starting at position 2384 of SEQ ID NO: 1883829
gugucuuuaagagcucgca

SEQ ID NO: 2219319 - RNA, 19 nt, Artificial Sequence
  Description of Artificial Sequence: Synthetic oligonucleotide
  Antisense strand to SEQ ID NO: 2219318
ugcgagcucuuaaagacac

SEQ ID NO: 2219320 - RNA, 19 nt, Artificial Sequence
  Description of Artificial Sequence: Synthetic oligonucleotide
  Sense strand starting at position 453 of SEQ ID NO: 1883829
aguccagugcucuauuucu

SEQ ID NO: 2219321 - RNA, 19 nt, Artificial Sequence
  Description of Artificial Sequence: Synthetic oligonucleotide
  Antisense strand to SEQ ID NO: 2219320
agaaauagagcacuggacu

SEQ ID NO: 2219322 - RNA, 19 nt, Artificial Sequence
  Description of Artificial Sequence: Synthetic oligonucleotide
  Sense strand starting at position 3528 of SEQ ID NO: 1883829
aacacuugaguccagguau

SEQ ID NO: 2219323 - RNA, 19 nt, Artificial Sequence
  Description of Artificial Sequence: Synthetic oligonucleotide
  Antisense strand to SEQ ID NO: 2219322
auaccuggacucaaguguu

SEQ ID NO: 2219324 - RNA, 19 nt, Artificial Sequence
  Description of Artificial Sequence: Synthetic oligonucleotide
  Sense strand starting at position 2269 of SEQ ID NO: 1883829
ccuucugggacucaacgau

SEQ ID NO: 2219325 - RNA, 19 nt, Artificial Sequence
  Description of Artificial Sequence: Synthetic oligonucleotide
  Antisense strand to SEQ ID NO: 2219324
aucguugagucccagaagg

SEQ ID NO: 2219326 - RNA, 19 nt, Artificial Sequence
  Description of Artificial Sequence: Synthetic oligonucleotide
  Sense strand starting at position 1232 of SEQ ID NO: 1883829
gaugguauccgagaucuca

SEQ ID NO: 2219327 - RNA, 19 nt, Artificial Sequence
  Description of Artificial Sequence: Synthetic oligonucleotide
  Antisense strand to SEQ ID NO: 2219326
ugagaucucggauaccauc

SEQ ID NO: 2219328 - RNA, 19 nt, Artificial Sequence
  Description of Artificial Sequence: Synthetic oligonucleotide
  Sense strand starting at position 451 of SEQ ID NO: 1883829
gaaguccagugcucuauuu

SEQ ID NO: 2219329 - RNA, 19 nt, Artificial Sequence
  Description of Artificial Sequence: Synthetic oligonucleotide
  Antisense strand to SEQ ID NO: 2219328
aaauagagcacuggacuuc

SEQ ID NO: 2219330 - RNA, 19 nt, Artificial Sequence
  Description of Artificial Sequence: Synthetic oligonucleotide
  Sense strand starting at position 3148 of SEQ ID NO: 1883829
uugugcagugauuaagaaa

SEQ ID NO: 2219331 - RNA, 19 nt, Artificial Sequence
  Description of Artificial Sequence: Synthetic oligonucleotide
  Antisense strand to SEQ ID NO: 2219330
uuucuuaaucacugcacaa

SEQ ID NO: 2219332 - RNA, 19 nt, Artificial Sequence
  Description of Artificial Sequence: Synthetic oligonucleotide
  Sense strand starting at position 1228 of SEQ ID NO: 1883829
agaugaugguauccgagau

SEQ ID NO: 2219333 - RNA, 19 nt, Artificial Sequence
  Description of Artificial Sequence: Synthetic oligonucleotide
  Antisense strand to SEQ ID NO: 2219332
aucucggauaccaucaucu

SEQ ID NO: 2219334 - RNA, 19 nt, Artificial Sequence
  Description of Artificial Sequence: Synthetic oligonucleotide
  Sense strand starting at position 3366 of SEQ ID NO: 1883829
gccucacauggugagaauu

SEQ ID NO: 2219335 - RNA, 19 nt, Artificial Sequence
  Description of Artificial Sequence: Synthetic oligonucleotide
  Antisense strand to SEQ ID NO: 2219334
aauucucaccaugugaggc

SEQ ID NO: 2219336 - RNA, 19 nt, Artificial Sequence
  Description of Artificial Sequence: Synthetic oligonucleotide
  Sense strand starting at position 2695 of SEQ ID NO: 1883829
gcuuaacaacucuggaaau

SEQ ID NO: 2219337 - RNA, 19 nt, Artificial Sequence
  Description of Artificial Sequence: Synthetic oligonucleotide
  Antisense strand to SEQ ID NO: 2219336
auuuccagaguuguuaagc

SEQ ID NO: 2219338 - RNA, 19 nt, Artificial Sequence
  Description of Artificial Sequence: Synthetic oligonucleotide
  Sense strand starting at position 2273 of SEQ ID NO: 1883829
cugggacucaacgauuguu

SEQ ID NO: 2219339 - RNA, 19 nt, Artificial Sequence
  Description of Artificial Sequence: Synthetic oligonucleotide
  Antisense strand to SEQ ID NO: 2219338
aacaaucguugagucccag

SEQ ID NO: 2219340 - RNA, 19 nt, Artificial Sequence
  Description of Artificial Sequence: Synthetic oligonucleotide
  Sense strand starting at position 458 of SEQ ID NO: 1883829
agugcucuauuucuuaagu

SEQ ID NO: 2219341 - RNA, 19 nt, Artificial Sequence
  Description of Artificial Sequence: Synthetic oligonucleotide
  Antisense strand to SEQ ID NO: 2219340
acuuaagaaauagagcacu

SEQ ID NO: 2219342 - RNA, 19 nt, Artificial Sequence
  Description of Artificial Sequence: Synthetic oligonucleotide
  Sense strand starting at position 459 of SEQ ID NO: 1883829
gugcucuauuucuuaagua

SEQ ID NO: 2219343 - RNA, 19 nt, Artificial Sequence
  Description of Artificial Sequence: Synthetic oligonucleotide
  Antisense strand to SEQ ID NO: 2219342
uacuuaagaaauagagcac

SEQ ID NO: 2219344 - RNA, 19 nt, Artificial Sequence
  Description of Artificial Sequence: Synthetic oligonucleotide
  Sense strand starting at position 1268 of SEQ ID NO: 1883829
gugacaaucgcacaugaca

SEQ ID NO: 2219345 - RNA, 19 nt, Artificial Sequence
  Description of Artificial Sequence: Synthetic oligonucleotide
  Antisense strand to SEQ ID NO: 2219344
ugucaugugcgauugucac

SEQ ID NO: 2219346 - RNA, 19 nt, Artificial Sequence
  Description of Artificial Sequence: Synthetic oligonucleotide
  Sense strand starting at position 2298 of SEQ ID NO: 1883829
cgccuuuaccaggacugaa

SEQ ID NO: 2219347 - RNA, 19 nt, Artificial Sequence
  Description of Artificial Sequence: Synthetic oligonucleotide
  Antisense strand to SEQ ID NO: 2219346
uucaguccugguaaaggcg

SEQ ID NO: 2219348 - RNA, 19 nt, Artificial Sequence
  Description of Artificial Sequence: Synthetic oligonucleotide
  Sense strand starting at position 2276 of SEQ ID NO: 1883829
ggacucaacgauuguuaag

SEQ ID NO: 2219349 - RNA, 19 nt, Artificial Sequence
  Description of Artificial Sequence: Synthetic oligonucleotide
  Antisense strand to SEQ ID NO: 2219348
cuuaacaaucguugagucc

SEQ ID NO: 2219350 - RNA, 19 nt, Artificial Sequence
  Description of Artificial Sequence: Synthetic oligonucleotide
  Sense strand starting at position 1229 of SEQ ID NO: 1883829
gaugaugguauccgagauc

SEQ ID NO: 2219351 - RNA, 19 nt, Artificial Sequence
  Description of Artificial Sequence: Synthetic oligonucleotide
  Antisense strand to SEQ ID NO: 2219350
gaucucggauaccaucauc

SEQ ID NO: 2219352 - RNA, 19 nt, Artificial Sequence
  Description of Artificial Sequence: Synthetic oligonucleotide
  Sense strand starting at position 338 of SEQ ID NO: 1883829
ugggcuuguagcuaggaaa

SEQ ID NO: 2219353 - RNA, 19 nt, Artificial Sequence
  Description of Artificial Sequence: Synthetic oligonucleotide
  Antisense strand to SEQ ID NO: 2219352
uuuccuagcuacaagccca

SEQ ID NO: 2219354 - RNA, 19 nt, Artificial Sequence
  Description of Artificial Sequence: Synthetic oligonucleotide
  Sense strand starting at position 3225 of SEQ ID NO: 1883829
ucugaucuugggcaguuua

SEQ ID NO: 2219355 - RNA, 19 nt, Artificial Sequence
  Description of Artificial Sequence: Synthetic oligonucleotide
  Antisense strand to SEQ ID NO: 2219354
uaaacugcccaagaucaga

SEQ ID NO: 2219356 - RNA, 19 nt, Artificial Sequence
  Description of Artificial Sequence: Synthetic oligonucleotide
  Sense strand starting at position 900 of SEQ ID NO: 1883829
uggaauacugucugggcaa

SEQ ID NO: 2219357 - RNA, 19 nt, Artificial Sequence
  Description of Artificial Sequence: Synthetic oligonucleotide
  Antisense strand to SEQ ID NO: 2219356
uugcccagacaguauucca

SEQ ID NO: 2219358 - RNA, 19 nt, Artificial Sequence
  Description of Artificial Sequence: Synthetic oligonucleotide
  Sense strand starting at position 827 of SEQ ID NO: 1883829
aagauaacugucugucuug

SEQ ID NO: 2219359 - RNA, 19 nt, Artificial Sequence
  Description of Artificial Sequence: Synthetic oligonucleotide
  Antisense strand to SEQ ID NO: 2219358
caagacagacaguuaucuu

SEQ ID NO: 2219360 - RNA, 19 nt, Artificial Sequence
  Description of Artificial Sequence: Synthetic oligonucleotide
  Sense strand starting at position 2537 of SEQ ID NO: 1883829
agcugaggguuaucagcaa

SEQ ID NO: 2219361 - RNA, 19 nt, Artificial Sequence
  Description of Artificial Sequence: Synthetic oligonucleotide
  Antisense strand to SEQ ID NO: 2219360
uugcugauaacccucagcu

SEQ ID NO: 2219362 - RNA, 19 nt, Artificial Sequence
  Description of Artificial Sequence: Synthetic oligonucleotide
  Sense strand starting at position 220 of SEQ ID NO: 1883829
acguccucucuuuggagaa

SEQ ID NO: 2219363 - RNA, 19 nt, Artificial Sequence
  Description of Artificial Sequence: Synthetic oligonucleotide
  Antisense strand to SEQ ID NO: 2219362
uucuccaaagagaggacgu

SEQ ID NO: 2219364 - RNA, 19 nt, Artificial Sequence
  Description of Artificial Sequence: Synthetic oligonucleotide
  Sense strand starting at position 2378 of SEQ ID NO: 1883829
ugagcagugucuuuaagag

SEQ ID NO: 2219365 - RNA, 19 nt, Artificial Sequence
  Description of Artificial Sequence: Synthetic oligonucleotide
  Antisense strand to SEQ ID NO: 2219364
cucuuaaagacacugcuca

SEQ ID NO: 2219366 - RNA, 19 nt, Artificial Sequence
  Description of Artificial Sequence: Synthetic oligonucleotide
  Sense strand starting at position 3013 of SEQ ID NO: 1883829
gaugaaaucucacagggag

SEQ ID NO: 2219367 - RNA, 19 nt, Artificial Sequence
  Description of Artificial Sequence: Synthetic oligonucleotide
  Antisense strand to SEQ ID NO: 2219366
cucccugugagauuucauc

SEQ ID NO: 2219368 - RNA, 19 nt, Artificial Sequence
  Description of Artificial Sequence: Synthetic oligonucleotide
  Sense strand starting at position 1021 of SEQ ID NO: 1883829
accaaucaccuguggcuua

SEQ ID NO: 2219369 - RNA, 19 nt, Artificial Sequence
  Description of Artificial Sequence: Synthetic oligonucleotide
  Antisense strand to SEQ ID NO: 2219368
uaagccacaggugauuggu

SEQ ID NO: 2219370 - RNA, 19 nt, Artificial Sequence
  Description of Artificial Sequence: Synthetic oligonucleotide
  Sense strand starting at position 996 of SEQ ID NO: 1883829
gcaagagucccucagcucu

SEQ ID NO: 2219371 - RNA, 19 nt, Artificial Sequence
  Description of Artificial Sequence: Synthetic oligonucleotide
  Antisense strand to SEQ ID NO: 2219370
agagcugagggacucuugc

SEQ ID NO: 2219372 - RNA, 19 nt, Artificial Sequence
  Description of Artificial Sequence: Synthetic oligonucleotide
  Sense strand starting at position 2660 of SEQ ID NO: 1883829
aggucugugucaguggaga

SEQ ID NO: 2219373 - RNA, 19 nt, Artificial Sequence
  Description of Artificial Sequence: Synthetic oligonucleotide
  Antisense strand to SEQ ID NO: 2219372
ucuccacugacacagaccu

SEQ ID NO: 2219374 - RNA, 19 nt, Artificial Sequence
  Description of Artificial Sequence: Synthetic oligonucleotide
  Sense strand starting at position 919 of SEQ ID NO: 1883829
aauugugccugggcagaua

SEQ ID NO: 2219375 - RNA, 19 nt, Artificial Sequence
  Description of Artificial Sequence: Synthetic oligonucleotide
  Antisense strand to SEQ ID NO: 2219374
uaucugcccaggcacaauu

SEQ ID NO: 2219376 - RNA, 19 nt, Artificial Sequence
  Description of Artificial Sequence: Synthetic oligonucleotide
  Sense strand starting at position 2655 of SEQ ID NO: 1883829
agggaaggucugugucagu

SEQ ID NO: 2219377 - RNA, 19 nt, Artificial Sequence
  Description of Artificial Sequence: Synthetic oligonucleotide
  Antisense strand to SEQ ID NO: 2219376
acugacacagaccuucccu

SEQ ID NO: 2219378 - RNA, 19 nt, Artificial Sequence
  Description of Artificial Sequence: Synthetic oligonucleotide
  Sense strand starting at position 448 of SEQ ID NO: 1883829
ugggaaguccagugcucua

SEQ ID NO: 2219379 - RNA, 19 nt, Artificial Sequence
  Description of Artificial Sequence: Synthetic oligonucleotide
  Antisense strand to SEQ ID NO: 2219378
uagagcacuggacuuccca

SEQ ID NO: 2219380 - RNA, 19 nt, Artificial Sequence
  Description of Artificial Sequence: Synthetic oligonucleotide
  Sense strand starting at position 2387 of SEQ ID NO: 1883829
ucuuuaagagcucgcagaa

SEQ ID NO: 2219381 - RNA, 19 nt, Artificial Sequence
  Description of Artificial Sequence: Synthetic oligonucleotide
  Antisense strand to SEQ ID NO: 2219380
uucugcgagcucuuaaaga

SEQ ID NO: 2219382 - RNA, 19 nt, Artificial Sequence
  Description of Artificial Sequence: Synthetic oligonucleotide
  Sense strand starting at position 828 of SEQ ID NO: 1883829
agauaacugucugucuugu

SEQ ID NO: 2219383 - RNA, 19 nt, Artificial Sequence
  Description of Artificial Sequence: Synthetic oligonucleotide
  Antisense strand to SEQ ID NO: 2219382
acaagacagacaguuaucu

SEQ ID NO: 2219384 - RNA, 19 nt, Artificial Sequence
  Description of Artificial Sequence: Synthetic oligonucleotide
  Sense strand starting at position 3215 of SEQ ID NO: 1883829
cuacuaguugucugaucuu

SEQ ID NO: 2219385 - RNA, 19 nt, Artificial Sequence
  Description of Artificial Sequence: Synthetic oligonucleotide
  Antisense strand to SEQ ID NO: 2219384
aagaucagacaacuaguag

SEQ ID NO: 2219386 - RNA, 19 nt, Artificial Sequence
  Description of Artificial Sequence: Synthetic oligonucleotide
  Sense strand starting at position 944 of SEQ ID NO: 1883829
agacauguuuaauaggaag

SEQ ID NO: 2219387 - RNA, 19 nt, Artificial Sequence
  Description of Artificial Sequence: Synthetic oligonucleotide
  Antisense strand to SEQ ID NO: 2219386
cuuccuauuaaacaugucu

SEQ ID NO: 2219388 - RNA, 19 nt, Artificial Sequence
  Description of Artificial Sequence: Synthetic oligonucleotide
  Sense strand starting at position 2789 of SEQ ID NO: 1883829
uggcuaacauccuuugcau

SEQ ID NO: 2219389 - RNA, 19 nt, Artificial Sequence
  Description of Artificial Sequence: Synthetic oligonucleotide
  Antisense strand to SEQ ID NO: 2219388
augcaaaggauguuagcca

SEQ ID NO: 2219390 - RNA, 19 nt, Artificial Sequence
  Description of Artificial Sequence: Synthetic oligonucleotide
  Sense strand starting at position 2662 of SEQ ID NO: 1883829
gucugugucaguggagaug

SEQ ID NO: 2219391 - RNA, 19 nt, Artificial Sequence
  Description of Artificial Sequence: Synthetic oligonucleotide
  Antisense strand to SEQ ID NO: 2219390
caucuccacugacacagac

SEQ ID NO: 2219392 - RNA, 19 nt, Artificial Sequence
  Description of Artificial Sequence: Synthetic oligonucleotide
  Sense strand starting at position 191 of SEQ ID NO: 1883829
ccuaaauguucuguggcau

SEQ ID NO: 2219393 - RNA, 19 nt, Artificial Sequence
  Description of Artificial Sequence: Synthetic oligonucleotide
  Antisense strand to SEQ ID NO: 2219392
augccacagaacauuuagg

SEQ ID NO: 2219394 - RNA, 19 nt, Artificial Sequence
  Description of Artificial Sequence: Synthetic oligonucleotide
  Sense strand starting at position 3757 of SEQ ID NO: 1883830
ccuccuugucuggaaauaa

SEQ ID NO: 2219395 - RNA, 19 nt, Artificial Sequence
  Description of Artificial Sequence: Synthetic oligonucleotide
  Antisense strand to SEQ ID NO: 2219394
uuauuuccagacaaggagg

SEQ ID NO: 2219396 - RNA, 19 nt, Artificial Sequence
  Description of Artificial Sequence: Synthetic oligonucleotide
  Sense strand starting at position 2191 of SEQ ID NO: 1883830
caguuaacucuuggagaag

SEQ ID NO: 2219397 - RNA, 19 nt, Artificial Sequence
  Description of Artificial Sequence: Synthetic oligonucleotide
  Antisense strand to SEQ ID NO: 2219396
cuucuccaagaguuaacug

SEQ ID NO: 2219398 - RNA, 19 nt, Artificial Sequence
  Description of Artificial Sequence: Synthetic oligonucleotide
  Sense strand starting at position 3336 of SEQ ID NO: 1883830
ccacuaccgggauggauaa

SEQ ID NO: 2219399 - RNA, 19 nt, Artificial Sequence
  Description of Artificial Sequence: Synthetic oligonucleotide
  Antisense strand to SEQ ID NO: 2219398
uuauccaucccgguagugg

SEQ ID NO: 2219400 - RNA, 19 nt, Artificial Sequence
  Description of Artificial Sequence: Synthetic oligonucleotide
  Sense strand starting at position 3447 of SEQ ID NO: 1883830
agauguugauacuuacaca

SEQ ID NO: 2219401 - RNA, 19 nt, Artificial Sequence
  Description of Artificial Sequence: Synthetic oligonucleotide
  Antisense strand to SEQ ID NO: 2219400
uguguaaguaucaacaucu

SEQ ID NO: 2219402 - RNA, 19 nt, Artificial Sequence
  Description of Artificial Sequence: Synthetic oligonucleotide
  Sense strand starting at position 3813 of SEQ ID NO: 1883830
cuuccaaaugagugaauua

SEQ ID NO: 2219403 - RNA, 19 nt, Artificial Sequence
  Description of Artificial Sequence: Synthetic oligonucleotide
  Antisense strand to SEQ ID NO: 2219402
uaauucacucauuuggaag

SEQ ID NO: 2219404 - RNA, 19 nt, Artificial Sequence
  Description of Artificial Sequence: Synthetic oligonucleotide
  Sense strand starting at position 302 of SEQ ID NO: 1883830
ggagguaggaaaugucauu

SEQ ID NO: 2219405 - RNA, 19 nt, Artificial Sequence
  Description of Artificial Sequence: Synthetic oligonucleotide
  Antisense strand to SEQ ID NO: 2219404
aaugacauuuccuaccucc

SEQ ID NO: 2219406 - RNA, 19 nt, Artificial Sequence
  Description of Artificial Sequence: Synthetic oligonucleotide
  Sense strand starting at position 595 of SEQ ID NO: 1883830
auuucucacugggagaaau

SEQ ID NO: 2219407 - RNA, 19 nt, Artificial Sequence
  Description of Artificial Sequence: Synthetic oligonucleotide
  Antisense strand to SEQ ID NO: 2219406
auuucucccagugagaaau

SEQ ID NO: 2219408 - RNA, 19 nt, Artificial Sequence
  Description of Artificial Sequence: Synthetic oligonucleotide
  Sense strand starting at position 3754 of SEQ ID NO: 1883830
ggaccuccuugucuggaaa

SEQ ID NO: 2219409 - RNA, 19 nt, Artificial Sequence
  Description of Artificial Sequence: Synthetic oligonucleotide
  Antisense strand to SEQ ID NO: 2219408
uuuccagacaaggaggucc

SEQ ID NO: 2219410 - RNA, 19 nt, Artificial Sequence
  Description of Artificial Sequence: Synthetic oligonucleotide
  Sense strand starting at position 3589 of SEQ ID NO: 1883830
cuggauuauccaggcagau

SEQ ID NO: 2219411 - RNA, 19 nt, Artificial Sequence
  Description of Artificial Sequence: Synthetic oligonucleotide
  Antisense strand to SEQ ID NO: 2219410
aucugccuggauaauccag

SEQ ID NO: 2219412 - RNA, 19 nt, Artificial Sequence
  Description of Artificial Sequence: Synthetic oligonucleotide
  Sense strand starting at position 3865 of SEQ ID NO: 1883830
uuauaaccaugcuugauga

SEQ ID NO: 2219413 - RNA, 19 nt, Artificial Sequence
  Description of Artificial Sequence: Synthetic oligonucleotide
  Antisense strand to SEQ ID NO: 2219412
ucaucaagcaugguuauaa

SEQ ID NO: 2219414 - RNA, 19 nt, Artificial Sequence
  Description of Artificial Sequence: Synthetic oligonucleotide
  Sense strand starting at position 3528 of SEQ ID NO: 1883830
gauaacgagucugugagaa

SEQ ID NO: 2219415 - RNA, 19 nt, Artificial Sequence
  Description of Artificial Sequence: Synthetic oligonucleotide
  Antisense strand to SEQ ID NO: 2219414
uucucacagacucguuauc

SEQ ID NO: 2219416 - RNA, 19 nt, Artificial Sequence
  Description of Artificial Sequence: Synthetic oligonucleotide
  Sense strand starting at position 922 of SEQ ID NO: 1883830
gggugacugcuccaaaucu

SEQ ID NO: 2219417 - RNA, 19 nt, Artificial Sequence
  Description of Artificial Sequence: Synthetic oligonucleotide
  Antisense strand to SEQ ID NO: 2219416
agauuuggagcagucaccc

SEQ ID NO: 2219418 - RNA, 19 nt, Artificial Sequence
  Description of Artificial Sequence: Synthetic oligonucleotide
  Sense strand starting at position 3755 of SEQ ID NO: 1883830
gaccuccuugucuggaaau

SEQ ID NO: 2219419 - RNA, 19 nt, Artificial Sequence
  Description of Artificial Sequence: Synthetic oligonucleotide
  Antisense strand to SEQ ID NO: 2219418
auuuccagacaaggagguc

SEQ ID NO: 2219420 - RNA, 19 nt, Artificial Sequence
  Description of Artificial Sequence: Synthetic oligonucleotide
  Sense strand starting at position 886 of SEQ ID NO: 1883830
ugugcucucagacaagagu

SEQ ID NO: 2219421 - RNA, 19 nt, Artificial Sequence
  Description of Artificial Sequence: Synthetic oligonucleotide
  Antisense strand to SEQ ID NO: 2219420
acucuugucugagagcaca

SEQ ID NO: 2219422 - RNA, 19 nt, Artificial Sequence
  Description of Artificial Sequence: Synthetic oligonucleotide
  Sense strand starting at position 580 of SEQ ID NO: 1883830
uccuguguccuccggauuu

SEQ ID NO: 2219423 - RNA, 19 nt, Artificial Sequence
  Description of Artificial Sequence: Synthetic oligonucleotide
  Antisense strand to SEQ ID NO: 2219422
aaauccggaggacacagga

SEQ ID NO: 2219424 - RNA, 19 nt, Artificial Sequence
  Description of Artificial Sequence: Synthetic oligonucleotide
  Sense strand starting at position 656 of SEQ ID NO: 1883830
gcuagcucgcguccucaaa

SEQ ID NO: 2219425 - RNA, 19 nt, Artificial Sequence
  Description of Artificial Sequence: Synthetic oligonucleotide
  Antisense strand to SEQ ID NO: 2219424
uuugaggacgcgagcuagc

SEQ ID NO: 2219426 - RNA, 19 nt, Artificial Sequence
  Description of Artificial Sequence: Synthetic oligonucleotide
  Sense strand starting at position 3812 of SEQ ID NO: 1883830
gcuuccaaaugagugaauu

SEQ ID NO: 2219427 - RNA, 19 nt, Artificial Sequence
  Description of Artificial Sequence: Synthetic oligonucleotide
  Antisense strand to SEQ ID NO: 2219426
aauucacucauuuggaagc

SEQ ID NO: 2219428 - RNA, 19 nt, Artificial Sequence
  Description of Artificial Sequence: Synthetic oligonucleotide
  Sense strand starting at position 3527 of SEQ ID NO: 1883830
ugauaacgagucugugaga

SEQ ID NO: 2219429 - RNA, 19 nt, Artificial Sequence
  Description of Artificial Sequence: Synthetic oligonucleotide
  Antisense strand to SEQ ID NO: 2219428
ucucacagacucguuauca

SEQ ID NO: 2219430 - RNA, 19 nt, Artificial Sequence
  Description of Artificial Sequence: Synthetic oligonucleotide
  Sense strand starting at position 2973 of SEQ ID NO: 1883830
guuguacugagccaggauu

SEQ ID NO: 2219431 - RNA, 19 nt, Artificial Sequence
  Description of Artificial Sequence: Synthetic oligonucleotide
  Antisense strand to SEQ ID NO: 2219430
aauccuggcucaguacaac

SEQ ID NO: 2219432 - RNA, 19 nt, Artificial Sequence
  Description of Artificial Sequence: Synthetic oligonucleotide
  Sense strand starting at position 866 of SEQ ID NO: 1883830
uuuaacuuccuguggacau

SEQ ID NO: 2219433 - RNA, 19 nt, Artificial Sequence
  Description of Artificial Sequence: Synthetic oligonucleotide
  Antisense strand to SEQ ID NO: 2219432
auguccacaggaaguuaaa

SEQ ID NO: 2219434 - RNA, 19 nt, Artificial Sequence
  Description of Artificial Sequence: Synthetic oligonucleotide
  Sense strand starting at position 94 of SEQ ID NO: 1883830
agagacuguuccuuggcaa

SEQ ID NO: 2219435 - RNA, 19 nt, Artificial Sequence
  Description of Artificial Sequence: Synthetic oligonucleotide
  Antisense strand to SEQ ID NO: 2219434
uugccaaggaacagucucu

SEQ ID NO: 2219436 - RNA, 19 nt, Artificial Sequence
  Description of Artificial Sequence: Synthetic oligonucleotide
  Sense strand starting at position 920 of SEQ ID NO: 1883830
uagggugacugcuccaaau

SEQ ID NO: 2219437 - RNA, 19 nt, Artificial Sequence
  Description of Artificial Sequence: Synthetic oligonucleotide
  Antisense strand to SEQ ID NO: 2219436
auuuggagcagucacccua

SEQ ID NO: 2219438 - RNA, 19 nt, Artificial Sequence
  Description of Artificial Sequence: Synthetic oligonucleotide
  Sense strand starting at position 3438 of SEQ ID NO: 1883830
gguguuacaagauguugau

SEQ ID NO: 2219439 - RNA, 19 nt, Artificial Sequence
  Description of Artificial Sequence: Synthetic oligonucleotide
  Antisense strand to SEQ ID NO: 2219438
aucaacaucuuguaacacc

SEQ ID NO: 2219440 - RNA, 19 nt, Artificial Sequence
  Description of Artificial Sequence: Synthetic oligonucleotide
  Sense strand starting at position 879 of SEQ ID NO: 1883830
ggacaucugugcucucaga

SEQ ID NO: 2219441 - RNA, 19 nt, Artificial Sequence
  Description of Artificial Sequence: Synthetic oligonucleotide
  Antisense strand to SEQ ID NO: 2219440
ucugagagcacagaugucc

SEQ ID NO: 2219442 - RNA, 19 nt, Artificial Sequence
  Description of Artificial Sequence: Synthetic oligonucleotide
  Sense strand starting at position 97 of SEQ ID NO: 1883830
gacuguuccuuggcaauga

SEQ ID NO: 2219443 - RNA, 19 nt, Artificial Sequence
  Description of Artificial Sequence: Synthetic oligonucleotide
  Antisense strand to SEQ ID NO: 2219442
ucauugccaaggaacaguc

SEQ ID NO: 2219444 - RNA, 19 nt, Artificial Sequence
  Description of Artificial Sequence: Synthetic oligonucleotide
  Sense strand starting at position 3894 of SEQ ID NO: 1883830
uucugagcaucugcaaaua

SEQ ID NO: 2219445 - RNA, 19 nt, Artificial Sequence
  Description of Artificial Sequence: Synthetic oligonucleotide
  Antisense strand to SEQ ID NO: 2219444
uauuugcagaugcucagaa

SEQ ID NO: 2219446 - RNA, 19 nt, Artificial Sequence
  Description of Artificial Sequence: Synthetic oligonucleotide
  Sense strand starting at position 777 of SEQ ID NO: 1883830
augaccuggcgcgaucaaa

SEQ ID NO: 2219447 - RNA, 19 nt, Artificial Sequence
  Description of Artificial Sequence: Synthetic oligonucleotide
  Antisense strand to SEQ ID NO: 2219446
uuugaucgcgccaggucau

SEQ ID NO: 2219448 - RNA, 19 nt, Artificial Sequence
  Description of Artificial Sequence: Synthetic oligonucleotide
  Sense strand starting at position 95 of SEQ ID NO: 1883830
gagacuguuccuuggcaau

SEQ ID NO: 2219449 - RNA, 19 nt, Artificial Sequence
  Description of Artificial Sequence: Synthetic oligonucleotide
  Antisense strand to SEQ ID NO: 2219448
auugccaaggaacagucuc

SEQ ID NO: 2219450 - RNA, 19 nt, Artificial Sequence
  Description of Artificial Sequence: Synthetic oligonucleotide
  Sense strand starting at position 3621 of SEQ ID NO: 1883830
ccgcuaaauccaugacacu

SEQ ID NO: 2219451 - RNA, 19 nt, Artificial Sequence
  Description of Artificial Sequence: Synthetic oligonucleotide
  Antisense strand to SEQ ID NO: 2219450
agugucauggauuuagcgg

SEQ ID NO: 2219452 - RNA, 19 nt, Artificial Sequence
  Description of Artificial Sequence: Synthetic oligonucleotide
  Sense strand starting at position 3911 of SEQ ID NO: 1883830
uagaguugucagggcauua

SEQ ID NO: 2219453 - RNA, 19 nt, Artificial Sequence
  Description of Artificial Sequence: Synthetic oligonucleotide
  Antisense strand to SEQ ID NO: 2219452
uaaugcccugacaacucua

SEQ ID NO: 2219454 - RNA, 19 nt, Artificial Sequence
  Description of Artificial Sequence: Synthetic oligonucleotide
  Sense strand starting at position 3426 of SEQ ID NO: 1883830
acucguaaagaggguguua

SEQ ID NO: 2219455 - RNA, 19 nt, Artificial Sequence
  Description of Artificial Sequence: Synthetic oligonucleotide
  Antisense strand to SEQ ID NO: 2219454
uaacacccucuuuacgagu

SEQ ID NO: 2219456 - RNA, 19 nt, Artificial Sequence
  Description of Artificial Sequence: Synthetic oligonucleotide
  Sense strand starting at position 3428 of SEQ ID NO: 1883830
ucguaaagaggguguuaca

SEQ ID NO: 2219457 - RNA, 19 nt, Artificial Sequence
  Description of Artificial Sequence: Synthetic oligonucleotide
  Antisense strand to SEQ ID NO: 2219456
uguaacacccucuuuacga

SEQ ID NO: 2219458 - RNA, 19 nt, Artificial Sequence
  Description of Artificial Sequence: Synthetic oligonucleotide
  Sense strand starting at position 2434 of SEQ ID NO: 1883830
ccaguucagcugugaggau

SEQ ID NO: 2219459 - RNA, 19 nt, Artificial Sequence
  Description of Artificial Sequence: Synthetic oligonucleotide
  Antisense strand to SEQ ID NO: 2219458
auccucacagcugaacugg

SEQ ID NO: 2219460 - RNA, 19 nt, Artificial Sequence
  Description of Artificial Sequence: Synthetic oligonucleotide
  Sense strand starting at position 3579 of SEQ ID NO: 1883830
ugaggucgcacuggauuau

SEQ ID NO: 2219461 - RNA, 19 nt, Artificial Sequence
  Description of Artificial Sequence: Synthetic oligonucleotide
  Antisense strand to SEQ ID NO: 2219460
auaauccagugcgaccuca

SEQ ID NO: 2219462 - RNA, 19 nt, Artificial Sequence
  Description of Artificial Sequence: Synthetic oligonucleotide
  Sense strand starting at position 67 of SEQ ID NO: 1883830
gcacuuuagugucccaaga

SEQ ID NO: 2219463 - RNA, 19 nt, Artificial Sequence
  Description of Artificial Sequence: Synthetic oligonucleotide
  Antisense strand to SEQ ID NO: 2219462
ucuugggacacuaaagugc

SEQ ID NO: 2219464 - RNA, 19 nt, Artificial Sequence
  Description of Artificial Sequence: Synthetic oligonucleotide
  Sense strand starting at position 3477 of SEQ ID NO: 1883830
aacagagauuaugacaagu

SEQ ID NO: 2219465 - RNA, 19 nt, Artificial Sequence
  Description of Artificial Sequence: Synthetic oligonucleotide
  Antisense strand to SEQ ID NO: 2219464
acuugucauaaucucuguu

SEQ ID NO: 2219466 - RNA, 19 nt, Artificial Sequence
  Description of Artificial Sequence: Synthetic oligonucleotide
  Sense strand starting at position 3479 of SEQ ID NO: 1883830
cagagauuaugacaaguga

SEQ ID NO: 2219467 - RNA, 19 nt, Artificial Sequence
  Description of Artificial Sequence: Synthetic oligonucleotide
  Antisense strand to SEQ ID NO: 2219466
ucacuugucauaaucucug

SEQ ID NO: 2219468 - RNA, 19 nt, Artificial Sequence
  Description of Artificial Sequence: Synthetic oligonucleotide
  Sense strand starting at position 174 of SEQ ID NO: 1883830
cuguuaaugguuggcaacu

SEQ ID NO: 2219469 - RNA, 19 nt, Artificial Sequence
  Description of Artificial Sequence: Synthetic oligonucleotide
  Antisense strand to SEQ ID NO: 2219468
aguugccaaccauuaacag

SEQ ID NO: 2219470 - RNA, 19 nt, Artificial Sequence
  Description of Artificial Sequence: Synthetic oligonucleotide
  Sense strand starting at position 1315 of SEQ ID NO: 1883830
cacagcgaugucugagagu

SEQ ID NO: 2219471 - RNA, 19 nt, Artificial Sequence
  Description of Artificial Sequence: Synthetic oligonucleotide
  Antisense strand to SEQ ID NO: 2219470
acucucagacaucgcugug

SEQ ID NO: 2219472 - RNA, 19 nt, Artificial Sequence
  Description of Artificial Sequence: Synthetic oligonucleotide
  Sense strand starting at position 101 of SEQ ID NO: 1883830
guuccuuggcaaugagguu

SEQ ID NO: 2219473 - RNA, 19 nt, Artificial Sequence
  Description of Artificial Sequence: Synthetic oligonucleotide
  Antisense strand to SEQ ID NO: 2219472
aaccucauugccaaggaac

SEQ ID NO: 2219474 - RNA, 19 nt, Artificial Sequence
  Description of Artificial Sequence: Synthetic oligonucleotide
  Sense strand starting at position 686 of SEQ ID NO: 1883831
gcacuaaugggccauggaa

SEQ ID NO: 2219475 - RNA, 19 nt, Artificial Sequence
  Description of Artificial Sequence: Synthetic oligonucleotide
  Antisense strand to SEQ ID NO: 2219474
uuccauggcccauuagugc

SEQ ID NO: 2219476 - RNA, 19 nt, Artificial Sequence
  Description of Artificial Sequence: Synthetic oligonucleotide
  Sense strand starting at position 3447 of SEQ ID NO: 1883831
ggguacucugugcaggaaa

SEQ ID NO: 2219477 - RNA, 19 nt, Artificial Sequence
  Description of Artificial Sequence: Synthetic oligonucleotide
  Antisense strand to SEQ ID NO: 2219476
uuuccugcacagaguaccc

SEQ ID NO: 2219478 - RNA, 19 nt, Artificial Sequence
  Description of Artificial Sequence: Synthetic oligonucleotide
  Sense strand starting at position 1619 of SEQ ID NO: 1883831
ccuccaugucauggacaga

SEQ ID NO: 2219479 - RNA, 19 nt, Artificial Sequence
  Description of Artificial Sequence: Synthetic oligonucleotide
  Antisense strand to SEQ ID NO: 2219478
ucuguccaugacauggagg

SEQ ID NO: 2219480 - RNA, 19 nt, Artificial Sequence
  Description of Artificial Sequence: Synthetic oligonucleotide
  Sense strand starting at position 212 of SEQ ID NO: 1883831
agaaccugucucuauguuu

SEQ ID NO: 2219481 - RNA, 19 nt, Artificial Sequence
  Description of Artificial Sequence: Synthetic oligonucleotide
  Antisense strand to SEQ ID NO: 2219480
aaacauagagacagguucu

SEQ ID NO: 2219482 - RNA, 19 nt, Artificial Sequence
  Description of Artificial Sequence: Synthetic oligonucleotide
  Sense strand starting at position 3951 of SEQ ID NO: 1883831
cacggagcuccaugagaug

SEQ ID NO: 2219483 - RNA, 19 nt, Artificial Sequence
  Description of Artificial Sequence: Synthetic oligonucleotide
  Antisense strand to SEQ ID NO: 2219482
caucucauggagcuccgug

SEQ ID NO: 2219484 - RNA, 19 nt, Artificial Sequence
  Description of Artificial Sequence: Synthetic oligonucleotide
  Sense strand starting at position 3784 of SEQ ID NO: 1883831
cugugugcccugaguggua

SEQ ID NO: 2219485 - RNA, 19 nt, Artificial Sequence
  Description of Artificial Sequence: Synthetic oligonucleotide
  Antisense strand to SEQ ID NO: 2219484
uaccacucagggcacacag

SEQ ID NO: 2219486 - RNA, 19 nt, Artificial Sequence
  Description of Artificial Sequence: Synthetic oligonucleotide
  Sense strand starting at position 2510 of SEQ ID NO: 1883831
uggccagugaaguggaaau

SEQ ID NO: 2219487 - RNA, 19 nt, Artificial Sequence
  Description of Artificial Sequence: Synthetic oligonucleotide
  Antisense strand to SEQ ID NO: 2219486
auuuccacuucacuggcca

SEQ ID NO: 2219488 - RNA, 19 nt, Artificial Sequence
  Description of Artificial Sequence: Synthetic oligonucleotide
  Sense strand starting at position 3446 of SEQ ID NO: 1883831
uggguacucugugcaggaa

SEQ ID NO: 2219489 - RNA, 19 nt, Artificial Sequence
  Description of Artificial Sequence: Synthetic oligonucleotide
  Antisense strand to SEQ ID NO: 2219488
uuccugcacagaguaccca

SEQ ID NO: 2219490 - RNA, 19 nt, Artificial Sequence
  Description of Artificial Sequence: Synthetic oligonucleotide
  Sense strand starting at position 2655 of SEQ ID NO: 1883831
gcccaaguaccuggaguua

SEQ ID NO: 2219491 - RNA, 19 nt, Artificial Sequence
  Description of Artificial Sequence: Synthetic oligonucleotide
  Antisense strand to SEQ ID NO: 2219490
uaacuccagguacuugggc

SEQ ID NO: 2219492 - RNA, 19 nt, Artificial Sequence
  Description of Artificial Sequence: Synthetic oligonucleotide
  Sense strand starting at position 2735 of SEQ ID NO: 1883831
ggcacuaugcgccaugaga

SEQ ID NO: 2219493 - RNA, 19 nt, Artificial Sequence
  Description of Artificial Sequence: Synthetic oligonucleotide
  Antisense strand to SEQ ID NO: 2219492
ucucauggcgcauagugcc

SEQ ID NO: 2219494 - RNA, 19 nt, Artificial Sequence
  Description of Artificial Sequence: Synthetic oligonucleotide
  Sense strand starting at position 983 of SEQ ID NO: 1883831
cagagucgcuggguaauga

SEQ ID NO: 2219495 - RNA, 19 nt, Artificial Sequence
  Description of Artificial Sequence: Synthetic oligonucleotide
  Antisense strand to SEQ ID NO: 2219494
ucauuacccagcgacucug

SEQ ID NO: 2219496 - RNA, 19 nt, Artificial Sequence
  Description of Artificial Sequence: Synthetic oligonucleotide
  Sense strand starting at position 2737 of SEQ ID NO: 1883831
cacuaugcgccaugagaac

SEQ ID NO: 2219497 - RNA, 19 nt, Artificial Sequence
  Description of Artificial Sequence: Synthetic oligonucleotide
  Antisense strand to SEQ ID NO: 2219496
guucucauggcgcauagug

SEQ ID NO: 2219498 - RNA, 19 nt, Artificial Sequence
  Description of Artificial Sequence: Synthetic oligonucleotide
  Sense strand starting at position 3573 of SEQ ID NO: 1883831
ugguucugucuguagagca

SEQ ID NO: 2219499 - RNA, 19 nt, Artificial Sequence
  Description of Artificial Sequence: Synthetic oligonucleotide
  Antisense strand to SEQ ID NO: 2219498
ugcucuacagacagaacca

SEQ ID NO: 2219500 - RNA, 19 nt, Artificial Sequence
  Description of Artificial Sequence: Synthetic oligonucleotide
  Sense strand starting at position 1250 of SEQ ID NO: 1883831
gccugucaggucugauuag

SEQ ID NO: 2219501 - RNA, 19 nt, Artificial Sequence
  Description of Artificial Sequence: Synthetic oligonucleotide
  Antisense strand to SEQ ID NO: 2219500
cuaaucagaccugacaggc

SEQ ID NO: 2219502 - RNA, 19 nt, Artificial Sequence
  Description of Artificial Sequence: Synthetic oligonucleotide
  Sense strand starting at position 2549 of SEQ ID NO: 1883831
ggcucugggugcccugaua

SEQ ID NO: 2219503 - RNA, 19 nt, Artificial Sequence
  Description of Artificial Sequence: Synthetic oligonucleotide
  Antisense strand to SEQ ID NO: 2219502
uaucagggcacccagagcc

SEQ ID NO: 2219504 - RNA, 19 nt, Artificial Sequence
  Description of Artificial Sequence: Synthetic oligonucleotide
  Sense strand starting at position 2429 of SEQ ID NO: 1883831
ugguauuccuggccuaguu

SEQ ID NO: 2219505 - RNA, 19 nt, Artificial Sequence
  Description of Artificial Sequence: Synthetic oligonucleotide
  Antisense strand to SEQ ID NO: 2219504
aacuaggccaggaauacca

SEQ ID NO: 2219506 - RNA, 19 nt, Artificial Sequence
  Description of Artificial Sequence: Synthetic oligonucleotide
  Sense strand starting at position 980 of SEQ ID NO: 1883831
gggcagagucgcuggguaa

SEQ ID NO: 2219507 - RNA, 19 nt, Artificial Sequence
  Description of Artificial Sequence: Synthetic oligonucleotide
  Antisense strand to SEQ ID NO: 2219506
uuacccagcgacucugccc

SEQ ID NO: 2219508 - RNA, 19 nt, Artificial Sequence
  Description of Artificial Sequence: Synthetic oligonucleotide
  Sense strand starting at position 981 of SEQ ID NO: 1883831
ggcagagucgcuggguaau

SEQ ID NO: 2219509 - RNA, 19 nt, Artificial Sequence
  Description of Artificial Sequence: Synthetic oligonucleotide
  Antisense strand to SEQ ID NO: 2219508
auuacccagcgacucugcc

SEQ ID NO: 2219510 - RNA, 19 nt, Artificial Sequence
  Description of Artificial Sequence: Synthetic oligonucleotide
  Sense strand starting at position 3568 of SEQ ID NO: 1883831
gggcuugguucugucugua

SEQ ID NO: 2219511 - RNA, 19 nt, Artificial Sequence
  Description of Artificial Sequence: Synthetic oligonucleotide
  Antisense strand to SEQ ID NO: 2219510
uacagacagaaccaagccc

SEQ ID NO: 2219512 - RNA, 19 nt, Artificial Sequence
  Description of Artificial Sequence: Synthetic oligonucleotide
  Sense strand starting at position 1118 of SEQ ID NO: 1883831
caagaagucugacggagaa

SEQ ID NO: 2219513 - RNA, 19 nt, Artificial Sequence
  Description of Artificial Sequence: Synthetic oligonucleotide
  Antisense strand to SEQ ID NO: 2219512
uucuccgucagacuucuug

SEQ ID NO: 2219514 - RNA, 19 nt, Artificial Sequence
  Description of Artificial Sequence: Synthetic oligonucleotide
  Sense strand starting at position 1161 of SEQ ID NO: 1883831
uguuaccucuugggagaga

SEQ ID NO: 2219515 - RNA, 19 nt, Artificial Sequence
  Description of Artificial Sequence: Synthetic oligonucleotide
  Antisense strand to SEQ ID NO: 2219514
ucucucccaagagguaaca

SEQ ID NO: 2219516 - RNA, 19 nt, Artificial Sequence
  Description of Artificial Sequence: Synthetic oligonucleotide
  Sense strand starting at position 3963 of SEQ ID NO: 1883831
ugagaugccugccaugaca

SEQ ID NO: 2219517 - RNA, 19 nt, Artificial Sequence
  Description of Artificial Sequence: Synthetic oligonucleotide
  Antisense strand to SEQ ID NO: 2219516
ugucauggcaggcaucuca

SEQ ID NO: 2219518 - RNA, 19 nt, Artificial Sequence
  Description of Artificial Sequence: Synthetic oligonucleotide
  Sense strand starting at position 717 of SEQ ID NO: 1883831
gcccguuccuaagaagaga

SEQ ID NO: 2219519 - RNA, 19 nt, Artificial Sequence
  Description of Artificial Sequence: Synthetic oligonucleotide
  Antisense strand to SEQ ID NO: 2219518
ucucuucuuaggaacgggc

SEQ ID NO: 2219520 - RNA, 19 nt, Artificial Sequence
  Description of Artificial Sequence: Synthetic oligonucleotide
  Sense strand starting at position 1159 of SEQ ID NO: 1883831
guuguuaccucuugggaga

SEQ ID NO: 2219521 - RNA, 19 nt, Artificial Sequence
  Description of Artificial Sequence: Synthetic oligonucleotide
  Antisense strand to SEQ ID NO: 2219520
ucucccaagagguaacaac

SEQ ID NO: 2219522 - RNA, 19 nt, Artificial Sequence
  Description of Artificial Sequence: Synthetic oligonucleotide
  Sense strand starting at position 1374 of SEQ ID NO: 1883831
cggaucuccuucugcaaga

SEQ ID NO: 2219523 - RNA, 19 nt, Artificial Sequence
  Description of Artificial Sequence: Synthetic oligonucleotide
  Antisense strand to SEQ ID NO: 2219522
ucuugcagaaggagauccg

SEQ ID NO: 2219524 - RNA, 19 nt, Artificial Sequence
  Description of Artificial Sequence: Synthetic oligonucleotide
  Sense strand starting at position 996 of SEQ ID NO: 1883831
uaaugagcgugccgagauu

SEQ ID NO: 2219525 - RNA, 19 nt, Artificial Sequence
  Description of Artificial Sequence: Synthetic oligonucleotide
  Antisense strand to SEQ ID NO: 2219524
aaucucggcacgcucauua

SEQ ID NO: 2219526 - RNA, 19 nt, Artificial Sequence
  Description of Artificial Sequence: Synthetic oligonucleotide
  Sense strand starting at position 242 of SEQ ID NO: 1883832
ugguuaaauuucuuugcua

SEQ ID NO: 2219527 - RNA, 19 nt, Artificial Sequence
  Description of Artificial Sequence: Synthetic oligonucleotide
  Antisense strand to SEQ ID NO: 2219526
uagcaaagaaauuuaacca

SEQ ID NO: 2219528 - RNA, 19 nt, Artificial Sequence
  Description of Artificial Sequence: Synthetic oligonucleotide
  Sense strand starting at position 1126 of SEQ ID NO: 1883832
ugcaauaugcugucgcaga

SEQ ID NO: 2219529 - RNA, 19 nt, Artificial Sequence
  Description of Artificial Sequence: Synthetic oligonucleotide
  Antisense strand to SEQ ID NO: 2219528
ucugcgacagcauauugca

SEQ ID NO: 2219530 - RNA, 19 nt, Artificial Sequence
  Description of Artificial Sequence: Synthetic oligonucleotide
  Sense strand starting at position 548 of SEQ ID NO: 1883832
auucucaaaggaugugaau

SEQ ID NO: 2219531 - RNA, 19 nt, Artificial Sequence
  Description of Artificial Sequence: Synthetic oligonucleotide
  Antisense strand to SEQ ID NO: 2219530
auucacauccuuugagaau

SEQ ID NO: 2219532 - RNA, 19 nt, Artificial Sequence
  Description of Artificial Sequence: Synthetic oligonucleotide
  Sense strand starting at position 417 of SEQ ID NO: 1883832
agcuucugugacuaagaaa

SEQ ID NO: 2219533 - RNA, 19 nt, Artificial Sequence
  Description of Artificial Sequence: Synthetic oligonucleotide
  Antisense strand to SEQ ID NO: 2219532
uuucuuagucacagaagcu

SEQ ID NO: 2219534 - RNA, 19 nt, Artificial Sequence
  Description of Artificial Sequence: Synthetic oligonucleotide
  Sense strand starting at position 3282 of SEQ ID NO: 1883832
ggcauccagcguguucaua

SEQ ID NO: 2219535 - RNA, 19 nt, Artificial Sequence
  Description of Artificial Sequence: Synthetic oligonucleotide
  Antisense strand to SEQ ID NO: 2219534
uaugaacacgcuggaugcc

SEQ ID NO: 2219536 - RNA, 19 nt, Artificial Sequence
  Description of Artificial Sequence: Synthetic oligonucleotide
  Sense strand starting at position 2351 of SEQ ID NO: 1883832
cucauacuucuugagagug

SEQ ID NO: 2219537 - RNA, 19 nt, Artificial Sequence
  Description of Artificial Sequence: Synthetic oligonucleotide
  Antisense strand to SEQ ID NO: 2219536
cacucucaagaaguaugag

SEQ ID NO: 2219538 - RNA, 19 nt, Artificial Sequence
  Description of Artificial Sequence: Synthetic oligonucleotide
  Sense strand starting at position 3013 of SEQ ID NO: 1883832
aagucauagcagcaggaga

SEQ ID NO: 2219539 - RNA, 19 nt, Artificial Sequence
  Description of Artificial Sequence: Synthetic oligonucleotide
  Antisense strand to SEQ ID NO: 2219538
ucuccugcugcuaugacuu

SEQ ID NO: 2219540 - RNA, 19 nt, Artificial Sequence
  Description of Artificial Sequence: Synthetic oligonucleotide
  Sense strand starting at position 3714 of SEQ ID NO: 1883832
ucaugucaucccgcagcuu

SEQ ID NO: 2219541 - RNA, 19 nt, Artificial Sequence
  Description of Artificial Sequence: Synthetic oligonucleotide
  Antisense strand to SEQ ID NO: 2219540
aagcugcgggaugacauga

SEQ ID NO: 2219542 - RNA, 19 nt, Artificial Sequence
  Description of Artificial Sequence: Synthetic oligonucleotide
  Sense strand starting at position 476 of SEQ ID NO: 1883832
cauggaucagcaugauaca

SEQ ID NO: 2219543 - RNA, 19 nt, Artificial Sequence
  Description of Artificial Sequence: Synthetic oligonucleotide
  Antisense strand to SEQ ID NO: 2219542
uguaucaugcugauccaug

SEQ ID NO: 2219544 - RNA, 19 nt, Artificial Sequence
  Description of Artificial Sequence: Synthetic oligonucleotide
  Sense strand starting at position 883 of SEQ ID NO: 1883832
uggcaaggucacuauacau

SEQ ID NO: 2219545 - RNA, 19 nt, Artificial Sequence
  Description of Artificial Sequence: Synthetic oligonucleotide
  Antisense strand to SEQ ID NO: 2219544
auguauagugaccuugcca

SEQ ID NO: 2219546 - RNA, 19 nt, Artificial Sequence
  Description of Artificial Sequence: Synthetic oligonucleotide
  Sense strand starting at position 3553 of SEQ ID NO: 1883832
ucuucuugggcauaugaau

SEQ ID NO: 2219547 - RNA, 19 nt, Artificial Sequence
  Description of Artificial Sequence: Synthetic oligonucleotide
  Antisense strand to SEQ ID NO: 2219546
auucauaugcccaagaaga

SEQ ID NO: 2219548 - RNA, 19 nt, Artificial Sequence
  Description of Artificial Sequence: Synthetic oligonucleotide
  Sense strand starting at position 2349 of SEQ ID NO: 1883832
cccucauacuucuugagag

SEQ ID NO: 2219549 - RNA, 19 nt, Artificial Sequence
  Description of Artificial Sequence: Synthetic oligonucleotide
  Antisense strand to SEQ ID NO: 2219548
cucucaagaaguaugaggg

SEQ ID NO: 2219550 - RNA, 19 nt, Artificial Sequence
  Description of Artificial Sequence: Synthetic oligonucleotide
  Sense strand starting at position 637 of SEQ ID NO: 1883832
cuagcuugccaauauaaag

SEQ ID NO: 2219551 - RNA, 19 nt, Artificial Sequence
  Description of Artificial Sequence: Synthetic oligonucleotide
  Antisense strand to SEQ ID NO: 2219550
cuuuauauuggcaagcuag

SEQ ID NO: 2219552 - RNA, 19 nt, Artificial Sequence
  Description of Artificial Sequence: Synthetic oligonucleotide
  Sense strand starting at position 17 of SEQ ID NO: 1883832
auuacuguacauugagauu

SEQ ID NO: 2219553 - RNA, 19 nt, Artificial Sequence
  Description of Artificial Sequence: Synthetic oligonucleotide
  Antisense strand to SEQ ID NO: 2219552
aaucucaauguacaguaau

SEQ ID NO: 2219554 - RNA, 19 nt, Artificial Sequence
  Description of Artificial Sequence: Synthetic oligonucleotide
  Sense strand starting at position 952 of SEQ ID NO: 1883832
gaauuaagaucagcuaggu

SEQ ID NO: 2219555 - RNA, 19 nt, Artificial Sequence
  Description of Artificial Sequence: Synthetic oligonucleotide
  Antisense strand to SEQ ID NO: 2219554
accuagcugaucuuaauuc

SEQ ID NO: 2219556 - RNA, 19 nt, Artificial Sequence
  Description of Artificial Sequence: Synthetic oligonucleotide
  Sense strand starting at position 231 of SEQ ID NO: 1883832
uacugugaacaugguuaaa

SEQ ID NO: 2219557 - RNA, 19 nt, Artificial Sequence
  Description of Artificial Sequence: Synthetic oligonucleotide
  Antisense strand to SEQ ID NO: 2219556
uuuaaccauguucacagua

SEQ ID NO: 2219558 - RNA, 19 nt, Artificial Sequence
  Description of Artificial Sequence: Synthetic oligonucleotide
  Sense strand starting at position 28 of SEQ ID NO: 1883832
uugagauucucagauuuaa

SEQ ID NO: 2219559 - RNA, 19 nt, Artificial Sequence
  Description of Artificial Sequence: Synthetic oligonucleotide
  Antisense strand to SEQ ID NO: 2219558
uuaaaucugagaaucucaa

SEQ ID NO: 2219560 - RNA, 19 nt, Artificial Sequence
  Description of Artificial Sequence: Synthetic oligonucleotide
  Sense strand starting at position 2475 of SEQ ID NO: 1883832
uucugacucugaguuggaa

SEQ ID NO: 2219561 - RNA, 19 nt, Artificial Sequence
  Description of Artificial Sequence: Synthetic oligonucleotide
  Antisense strand to SEQ ID NO: 2219560
uuccaacucagagucagaa

SEQ ID NO: 2219562 - RNA, 19 nt, Artificial Sequence
  Description of Artificial Sequence: Synthetic oligonucleotide
  Sense strand starting at position 197 of SEQ ID NO: 1883832
gguaguacaguuuagacuu

SEQ ID NO: 2219563 - RNA, 19 nt, Artificial Sequence
  Description of Artificial Sequence: Synthetic oligonucleotide
  Antisense strand to SEQ ID NO: 2219562
aagucuaaacuguacuacc

SEQ ID NO: 2219564 - RNA, 19 nt, Artificial Sequence
  Description of Artificial Sequence: Synthetic oligonucleotide
  Sense strand starting at position 3108 of SEQ ID NO: 1883832
uaguacgcgagggauaaau

SEQ ID NO: 2219565 - RNA, 19 nt, Artificial Sequence
  Description of Artificial Sequence: Synthetic oligonucleotide
  Antisense strand to SEQ ID NO: 2219564
auuuaucccucgcguacua

SEQ ID NO: 2219566 - RNA, 19 nt, Artificial Sequence
  Description of Artificial Sequence: Synthetic oligonucleotide
  Sense strand starting at position 2457 of SEQ ID NO: 1883832
agucuuuggaaaugauggu

SEQ ID NO: 2219567 - RNA, 19 nt, Artificial Sequence
  Description of Artificial Sequence: Synthetic oligonucleotide
  Antisense strand to SEQ ID NO: 2219566
accaucauuuccaaagacu

SEQ ID NO: 2219568 - RNA, 19 nt, Artificial Sequence
  Description of Artificial Sequence: Synthetic oligonucleotide
  Sense strand starting at position 233 of SEQ ID NO: 1883832
cugugaacaugguuaaauu

SEQ ID NO: 2219569 - RNA, 19 nt, Artificial Sequence
  Description of Artificial Sequence: Synthetic oligonucleotide
  Antisense strand to SEQ ID NO: 2219568
aauuuaaccauguucacag

SEQ ID NO: 2219570 - RNA, 19 nt, Artificial Sequence
  Description of Artificial Sequence: Synthetic oligonucleotide
  Sense strand starting at position 174 of SEQ ID NO: 1883832
ggauaaugugcacagcauu

SEQ ID NO: 2219571 - RNA, 19 nt, Artificial Sequence
  Description of Artificial Sequence: Synthetic oligonucleotide
  Antisense strand to SEQ ID NO: 2219570
aaugcugugcacauuaucc

SEQ ID NO: 2219572 - RNA, 19 nt, Artificial Sequence
  Description of Artificial Sequence: Synthetic oligonucleotide
  Sense strand starting at position 2341 of SEQ ID NO: 1883832
agucauagcccucauacuu

SEQ ID NO: 2219573 - RNA, 19 nt, Artificial Sequence
  Description of Artificial Sequence: Synthetic oligonucleotide
  Antisense strand to SEQ ID NO: 2219572
aaguaugagggcuaugacu

SEQ ID NO: 2219574 - RNA, 19 nt, Artificial Sequence
  Description of Artificial Sequence: Synthetic oligonucleotide
  Sense strand starting at position 291 of SEQ ID NO: 1883832
uggauaauucuuugcaauu

SEQ ID NO: 2219575 - RNA, 19 nt, Artificial Sequence
  Description of Artificial Sequence: Synthetic oligonucleotide
  Antisense strand to SEQ ID NO: 2219574
aauugcaaagaauuaucca

SEQ ID NO: 2219576 - RNA, 19 nt, Artificial Sequence
  Description of Artificial Sequence: Synthetic oligonucleotide
  Sense strand starting at position 3104 of SEQ ID NO: 1883832
uaauuaguacgcgagggau

SEQ ID NO: 2219577 - RNA, 19 nt, Artificial Sequence
  Description of Artificial Sequence: Synthetic oligonucleotide
  Antisense strand to SEQ ID NO: 2219576
aucccucgcguacuaauua

SEQ ID NO: 2219578 - RNA, 19 nt, Artificial Sequence
  Description of Artificial Sequence: Synthetic oligonucleotide
  Sense strand starting at position 2234 of SEQ ID NO: 1883832
ugcuuugggacguauggau

SEQ ID NO: 2219579 - RNA, 19 nt, Artificial Sequence
  Description of Artificial Sequence: Synthetic oligonucleotide
  Antisense strand to SEQ ID NO: 2219578
auccauacgucccaaagca

SEQ ID NO: 2219580 - RNA, 19 nt, Artificial Sequence
  Description of Artificial Sequence: Synthetic oligonucleotide
  Sense strand starting at position 966 of SEQ ID NO: 1883832
uagguagagcugugagaug

SEQ ID NO: 2219581 - RNA, 19 nt, Artificial Sequence
  Description of Artificial Sequence: Synthetic oligonucleotide
  Antisense strand to SEQ ID NO: 2219580
caucucacagcucuaccua

SEQ ID NO: 2219582 - RNA, 19 nt, Artificial Sequence
  Description of Artificial Sequence: Synthetic oligonucleotide
  Sense strand starting at position 1158 of SEQ ID NO: 1883832
ggcuauguagcugaacuua

SEQ ID NO: 2219583 - RNA, 19 nt, Artificial Sequence
  Description of Artificial Sequence: Synthetic oligonucleotide
  Antisense strand to SEQ ID NO: 2219582
uaaguucagcuacauagcc

SEQ ID NO: 2219584 - RNA, 19 nt, Artificial Sequence
  Description of Artificial Sequence: Synthetic oligonucleotide
  Sense strand starting at position 3551 of SEQ ID NO: 1883832
gcucuucuugggcauauga

SEQ ID NO: 2219585 - RNA, 19 nt, Artificial Sequence
  Description of Artificial Sequence: Synthetic oligonucleotide
  Antisense strand to SEQ ID NO: 2219584
ucauaugcccaagaagagc

SEQ ID NO: 2219586 - RNA, 19 nt, Artificial Sequence
  Description of Artificial Sequence: Synthetic oligonucleotide
  Sense strand starting at position 3172 of SEQ ID NO: 1883832
caguuaaucgggcaacagu

SEQ ID NO: 2219587 - RNA, 19 nt, Artificial Sequence
  Description of Artificial Sequence: Synthetic oligonucleotide
  Antisense strand to SEQ ID NO: 2219586
acuguugcccgauuaacug

SEQ ID NO: 2219588 - RNA, 19 nt, Artificial Sequence
  Description of Artificial Sequence: Synthetic oligonucleotide
  Sense strand starting at position 2862 of SEQ ID NO: 1883832
gcgucugaugaaggauaca

SEQ ID NO: 2219589 - RNA, 19 nt, Artificial Sequence
  Description of Artificial Sequence: Synthetic oligonucleotide
  Antisense strand to SEQ ID NO: 2219588
uguauccuucaucagacgc

SEQ ID NO: 2219590 - RNA, 19 nt, Artificial Sequence
  Description of Artificial Sequence: Synthetic oligonucleotide
  Sense strand starting at position 3514 of SEQ ID NO: 1883832
cuuaguuccuugucagaaa

SEQ ID NO: 2219591 - RNA, 19 nt, Artificial Sequence
  Description of Artificial Sequence: Synthetic oligonucleotide
  Antisense strand to SEQ ID NO: 2219590
uuucugacaaggaacuaag

SEQ ID NO: 2219592 - RNA, 19 nt, Artificial Sequence
  Description of Artificial Sequence: Synthetic oligonucleotide
  Sense strand starting at position 289 of SEQ ID NO: 1883832
uguggauaauucuuugcaa

SEQ ID NO: 2219593 - RNA, 19 nt, Artificial Sequence
  Description of Artificial Sequence: Synthetic oligonucleotide
  Antisense strand to SEQ ID NO: 2219592
uugcaaagaauuauccaca

SEQ ID NO: 2219594 - RNA, 19 nt, Artificial Sequence
  Description of Artificial Sequence: Synthetic oligonucleotide
  Sense strand starting at position 290 of SEQ ID NO: 1883832
guggauaauucuuugcaau

SEQ ID NO: 2219595 - RNA, 19 nt, Artificial Sequence
  Description of Artificial Sequence: Synthetic oligonucleotide
  Antisense strand to SEQ ID NO: 2219594
auugcaaagaauuauccac

SEQ ID NO: 2219596 - RNA, 19 nt, Artificial Sequence
  Description of Artificial Sequence: Synthetic oligonucleotide
  Sense strand starting at position 2322 of SEQ ID NO: 1883832
guuagaaggcuugggucaa

SEQ ID NO: 2219597 - RNA, 19 nt, Artificial Sequence
  Description of Artificial Sequence: Synthetic oligonucleotide
  Antisense strand to SEQ ID NO: 2219596
uugacccaagccuucuaac

SEQ ID NO: 2219598 - RNA, 19 nt, Artificial Sequence
  Description of Artificial Sequence: Synthetic oligonucleotide
  Sense strand starting at position 507 of SEQ ID NO: 1883832
gcacaaaggucucugcaaa

SEQ ID NO: 2219599 - RNA, 19 nt, Artificial Sequence
  Description of Artificial Sequence: Synthetic oligonucleotide
  Antisense strand to SEQ ID NO: 2219598
uuugcagagaccuuugugc

SEQ ID NO: 2219600 - RNA, 19 nt, Artificial Sequence
  Description of Artificial Sequence: Synthetic oligonucleotide
  Sense strand starting at position 3106 of SEQ ID NO: 1883832
auuaguacgcgagggauaa

SEQ ID NO: 2219601 - RNA, 19 nt, Artificial Sequence
  Description of Artificial Sequence: Synthetic oligonucleotide
  Antisense strand to SEQ ID NO: 2219600
uuaucccucgcguacuaau

SEQ ID NO: 2219602 - RNA, 19 nt, Artificial Sequence
  Description of Artificial Sequence: Synthetic oligonucleotide
  Sense strand starting at position 3107 of SEQ ID NO: 1883832
uuaguacgcgagggauaaa

SEQ ID NO: 2219603 - RNA, 19 nt, Artificial Sequence
  Description of Artificial Sequence: Synthetic oligonucleotide
  Antisense strand to SEQ ID NO: 2219602
uuuaucccucgcguacuaa

SEQ ID NO: 2219604 - RNA, 19 nt, Artificial Sequence
  Description of Artificial Sequence: Synthetic oligonucleotide
  Sense strand starting at position 940 of SEQ ID NO: 1883832
aacagaaggugggaauuaa

SEQ ID NO: 2219605 - RNA, 19 nt, Artificial Sequence
  Description of Artificial Sequence: Synthetic oligonucleotide
  Antisense strand to SEQ ID NO: 2219604
uuaauucccaccuucuguu

SEQ ID NO: 2219606 - RNA, 19 nt, Artificial Sequence
  Description of Artificial Sequence: Synthetic oligonucleotide
  Sense strand starting at position 7 of SEQ ID NO: 1883833
ucacuuagcccuuagagaa

SEQ ID NO: 2219607 - RNA, 19 nt, Artificial Sequence
  Description of Artificial Sequence: Synthetic oligonucleotide
  Antisense strand to SEQ ID NO: 2219606
uucucuaagggcuaaguga

SEQ ID NO: 2219608 - RNA, 19 nt, Artificial Sequence
  Description of Artificial Sequence: Synthetic oligonucleotide
  Sense strand starting at position 2745 of SEQ ID NO: 1883833
acaauuuguuuagugucau

SEQ ID NO: 2219609 - RNA, 19 nt, Artificial Sequence
  Description of Artificial Sequence: Synthetic oligonucleotide
  Antisense strand to SEQ ID NO: 2219608
augacacuaaacaaauugu

SEQ ID NO: 2219610 - RNA, 19 nt, Artificial Sequence
  Description of Artificial Sequence: Synthetic oligonucleotide
  Sense strand starting at position 3315 of SEQ ID NO: 1883833
cucccaucuggaugacaga

SEQ ID NO: 2219611 - RNA, 19 nt, Artificial Sequence
  Description of Artificial Sequence: Synthetic oligonucleotide
  Antisense strand to SEQ ID NO: 2219610
ucugucauccagaugggag

SEQ ID NO: 2219612 - RNA, 19 nt, Artificial Sequence
  Description of Artificial Sequence: Synthetic oligonucleotide
  Sense strand starting at position 2547 of SEQ ID NO: 1883833
gguguuaaagacuaggagu

SEQ ID NO: 2219613 - RNA, 19 nt, Artificial Sequence
  Description of Artificial Sequence: Synthetic oligonucleotide
  Antisense strand to SEQ ID NO: 2219612
acuccuagucuuuaacacc

SEQ ID NO: 2219614 - RNA, 19 nt, Artificial Sequence
  Description of Artificial Sequence: Synthetic oligonucleotide
  Sense strand starting at position 1338 of SEQ ID NO: 1883833
aagugagacugauuugcgu

SEQ ID NO: 2219615 - RNA, 19 nt, Artificial Sequence
  Description of Artificial Sequence: Synthetic oligonucleotide
  Antisense strand to SEQ ID NO: 2219614
acgcaaaucagucucacuu

SEQ ID NO: 2219616 - RNA, 19 nt, Artificial Sequence
  Description of Artificial Sequence: Synthetic oligonucleotide
  Sense strand starting at position 1340 of SEQ ID NO: 1883833
gugagacugauuugcguaa

SEQ ID NO: 2219617 - RNA, 19 nt, Artificial Sequence
  Description of Artificial Sequence: Synthetic oligonucleotide
  Antisense strand to SEQ ID NO: 2219616
uuacgcaaaucagucucac

SEQ ID NO: 2219618 - RNA, 19 nt, Artificial Sequence
  Description of Artificial Sequence: Synthetic oligonucleotide
  Sense strand starting at position 1663 of SEQ ID NO: 1883833
gcuuaaagugugccguuaa

SEQ ID NO: 2219619 - RNA, 19 nt, Artificial Sequence
  Description of Artificial Sequence: Synthetic oligonucleotide
  Antisense strand to SEQ ID NO: 2219618
uuaacggcacacuuuaagc

SEQ ID NO: 2219620 - RNA, 19 nt, Artificial Sequence
  Description of Artificial Sequence: Synthetic oligonucleotide
  Sense strand starting at position 2870 of SEQ ID NO: 1883833
cagaaaugccgauauguga

SEQ ID NO: 2219621 - RNA, 19 nt, Artificial Sequence
  Description of Artificial Sequence: Synthetic oligonucleotide
  Antisense strand to SEQ ID NO: 2219620
ucacauaucggcauuucug

SEQ ID NO: 2219622 - RNA, 19 nt, Artificial Sequence
  Description of Artificial Sequence: Synthetic oligonucleotide
  Sense strand starting at position 237 of SEQ ID NO: 1883833
agagaugccgcugagauaa

SEQ ID NO: 2219623 - RNA, 19 nt, Artificial Sequence
  Description of Artificial Sequence: Synthetic oligonucleotide
  Antisense strand to SEQ ID NO: 2219622
uuaucucagcggcaucucu

SEQ ID NO: 2219624 - RNA, 19 nt, Artificial Sequence
  Description of Artificial Sequence: Synthetic oligonucleotide
  Sense strand starting at position 1170 of SEQ ID NO: 1883833
cugagugucagcuaaggaa

SEQ ID NO: 2219625 - RNA, 19 nt, Artificial Sequence
  Description of Artificial Sequence: Synthetic oligonucleotide
  Antisense strand to SEQ ID NO: 2219624
uuccuuagcugacacucag

SEQ ID NO: 2219626 - RNA, 19 nt, Artificial Sequence
  Description of Artificial Sequence: Synthetic oligonucleotide
  Sense strand starting at position 398 of SEQ ID NO: 1883833
auauaagcuccugagucua

SEQ ID NO: 2219627 - RNA, 19 nt, Artificial Sequence
  Description of Artificial Sequence: Synthetic oligonucleotide
  Antisense strand to SEQ ID NO: 2219626
uagacucaggagcuuauau

SEQ ID NO: 2219628 - RNA, 19 nt, Artificial Sequence
  Description of Artificial Sequence: Synthetic oligonucleotide
  Sense strand starting at position 2979 of SEQ ID NO: 1883833
auauuagcuguagaauucu

SEQ ID NO: 2219629 - RNA, 19 nt, Artificial Sequence
  Description of Artificial Sequence: Synthetic oligonucleotide
  Antisense strand to SEQ ID NO: 2219628
agaauucuacagcuaauau

SEQ ID NO: 2219630 - RNA, 19 nt, Artificial Sequence
  Description of Artificial Sequence: Synthetic oligonucleotide
  Sense strand starting at position 2868 of SEQ ID NO: 1883833
uacagaaaugccgauaugu

SEQ ID NO: 2219631 - RNA, 19 nt, Artificial Sequence
  Description of Artificial Sequence: Synthetic oligonucleotide
  Antisense strand to SEQ ID NO: 2219630
acauaucggcauuucugua

SEQ ID NO: 2219632 - RNA, 19 nt, Artificial Sequence
  Description of Artificial Sequence: Synthetic oligonucleotide
  Sense strand starting at position 1478 of SEQ ID NO: 1883833
cucaccaguucuuuggaaa

SEQ ID NO: 2219633 - RNA, 19 nt, Artificial Sequence
  Description of Artificial Sequence: Synthetic oligonucleotide
  Antisense strand to SEQ ID NO: 2219632
uuuccaaagaacuggugag

SEQ ID NO: 2219634 - RNA, 19 nt, Artificial Sequence
  Description of Artificial Sequence: Synthetic oligonucleotide
  Sense strand starting at position 1352 of SEQ ID NO: 1883833
ugcguaauccagcugcucu

SEQ ID NO: 2219635 - RNA, 19 nt, Artificial Sequence
  Description of Artificial Sequence: Synthetic oligonucleotide
  Antisense strand to SEQ ID NO: 2219634
agagcagcuggauuacgca

SEQ ID NO: 2219636 - RNA, 19 nt, Artificial Sequence
  Description of Artificial Sequence: Synthetic oligonucleotide
  Sense strand starting at position 1309 of SEQ ID NO: 1883833
auuaaucacucagugaguu

SEQ ID NO: 2219637 - RNA, 19 nt, Artificial Sequence
  Description of Artificial Sequence: Synthetic oligonucleotide
  Antisense strand to SEQ ID NO: 2219636
aacucacugagugauuaau

SEQ ID NO: 2219638 - RNA, 19 nt, Artificial Sequence
  Description of Artificial Sequence: Synthetic oligonucleotide
  Sense strand starting at position 1404 of SEQ ID NO: 1883833
caggacuuggcuugaguaa

SEQ ID NO: 2219639 - RNA, 19 nt, Artificial Sequence
  Description of Artificial Sequence: Synthetic oligonucleotide
  Antisense strand to SEQ ID NO: 2219638
uuacucaagccaaguccug

SEQ ID NO: 2219640 - RNA, 19 nt, Artificial Sequence
  Description of Artificial Sequence: Synthetic oligonucleotide
  Sense strand starting at position 3412 of SEQ ID NO: 1883833
agugguuauuucucgguuu

SEQ ID NO: 2219641 - RNA, 19 nt, Artificial Sequence
  Description of Artificial Sequence: Synthetic oligonucleotide
  Antisense strand to SEQ ID NO: 2219640
aaaccgagaaauaaccacu

SEQ ID NO: 2219642 - RNA, 19 nt, Artificial Sequence
  Description of Artificial Sequence: Synthetic oligonucleotide
  Sense strand starting at position 1104 of SEQ ID NO: 1883833
cguaaaguccaagggauug

SEQ ID NO: 2219643 - RNA, 19 nt, Artificial Sequence
  Description of Artificial Sequence: Synthetic oligonucleotide
  Antisense strand to SEQ ID NO: 2219642
caaucccuuggacuuuacg

SEQ ID NO: 2219644 - RNA, 19 nt, Artificial Sequence
  Description of Artificial Sequence: Synthetic oligonucleotide
  Sense strand starting at position 3575 of SEQ ID NO: 1883833
uaaguuugagauugcaacu

SEQ ID NO: 2219645 - RNA, 19 nt, Artificial Sequence
  Description of Artificial Sequence: Synthetic oligonucleotide
  Antisense strand to SEQ ID NO: 2219644
aguugcaaucucaaacuua

SEQ ID NO: 2219646 - RNA, 19 nt, Artificial Sequence
  Description of Artificial Sequence: Synthetic oligonucleotide
  Sense strand starting at position 3401 of SEQ ID NO: 1883833
caaguauuaugagugguua

SEQ ID NO: 2219647 - RNA, 19 nt, Artificial Sequence
  Description of Artificial Sequence: Synthetic oligonucleotide
  Antisense strand to SEQ ID NO: 2219646
uaaccacucauaauacuug

SEQ ID NO: 2219648 - RNA, 19 nt, Artificial Sequence
  Description of Artificial Sequence: Synthetic oligonucleotide
  Sense strand starting at position 2507 of SEQ ID NO: 1883833
cucuauagugcuuagugaa

SEQ ID NO: 2219649 - RNA, 19 nt, Artificial Sequence
  Description of Artificial Sequence: Synthetic oligonucleotide
  Antisense strand to SEQ ID NO: 2219648
uucacuaagcacuauagag

SEQ ID NO: 2219650 - RNA, 19 nt, Artificial Sequence
  Description of Artificial Sequence: Synthetic oligonucleotide
  Sense strand starting at position 444 of SEQ ID NO: 1883833
ggcucucauacaugugaga

SEQ ID NO: 2219651 - RNA, 19 nt, Artificial Sequence
  Description of Artificial Sequence: Synthetic oligonucleotide
  Antisense strand to SEQ ID NO: 2219650
ucucacauguaugagagcc

SEQ ID NO: 2219652 - RNA, 19 nt, Artificial Sequence
  Description of Artificial Sequence: Synthetic oligonucleotide
  Sense strand starting at position 3569 of SEQ ID NO: 1883833
uuggucuaaguuugagauu

SEQ ID NO: 2219653 - RNA, 19 nt, Artificial Sequence
  Description of Artificial Sequence: Synthetic oligonucleotide
  Antisense strand to SEQ ID NO: 2219652
aaucucaaacuuagaccaa

SEQ ID NO: 2219654 - RNA, 19 nt, Artificial Sequence
  Description of Artificial Sequence: Synthetic oligonucleotide
  Sense strand starting at position 1889 of SEQ ID NO: 1883833
guccuuuguaccugggaaa

SEQ ID NO: 2219655 - RNA, 19 nt, Artificial Sequence
  Description of Artificial Sequence: Synthetic oligonucleotide
  Antisense strand to SEQ ID NO: 2219654
uuucccagguacaaaggac

SEQ ID NO: 2219656 - RNA, 19 nt, Artificial Sequence
  Description of Artificial Sequence: Synthetic oligonucleotide
  Sense strand starting at position 1888 of SEQ ID NO: 1883833
gguccuuuguaccugggaa

SEQ ID NO: 2219657 - RNA, 19 nt, Artificial Sequence
  Description of Artificial Sequence: Synthetic oligonucleotide
  Antisense strand to SEQ ID NO: 2219656
uucccagguacaaaggacc

SEQ ID NO: 2219658 - RNA, 19 nt, Artificial Sequence
  Description of Artificial Sequence: Synthetic oligonucleotide
  Sense strand starting at position 3968 of SEQ ID NO: 1883833
cugaguuguuuaccaauua

SEQ ID NO: 2219659 - RNA, 19 nt, Artificial Sequence
  Description of Artificial Sequence: Synthetic oligonucleotide
  Antisense strand to SEQ ID NO: 2219658
uaauugguaaacaacucag

SEQ ID NO: 2219660 - RNA, 19 nt, Artificial Sequence
  Description of Artificial Sequence: Synthetic oligonucleotide
  Sense strand starting at position 1255 of SEQ ID NO: 1883833
ucugacaggucuccuucua

SEQ ID NO: 2219661 - RNA, 19 nt, Artificial Sequence
  Description of Artificial Sequence: Synthetic oligonucleotide
  Antisense strand to SEQ ID NO: 2219660
uagaaggagaccugucaga

SEQ ID NO: 2219662 - RNA, 19 nt, Artificial Sequence
  Description of Artificial Sequence: Synthetic oligonucleotide
  Sense strand starting at position 1703 of SEQ ID NO: 1883833
cucccugcuuagguaagaa

SEQ ID NO: 2219663 - RNA, 19 nt, Artificial Sequence
  Description of Artificial Sequence: Synthetic oligonucleotide
  Antisense strand to SEQ ID NO: 2219662
uucuuaccuaagcagggag

SEQ ID NO: 2219664 - RNA, 19 nt, Artificial Sequence
  Description of Artificial Sequence: Synthetic oligonucleotide
  Sense strand starting at position 1696 of SEQ ID NO: 1883833
ugauaaucucccugcuuag

SEQ ID NO: 2219665 - RNA, 19 nt, Artificial Sequence
  Description of Artificial Sequence: Synthetic oligonucleotide
  Antisense strand to SEQ ID NO: 2219664
cuaagcagggagauuauca

SEQ ID NO: 2219666 - RNA, 19 nt, Artificial Sequence
  Description of Artificial Sequence: Synthetic oligonucleotide
  Sense strand starting at position 1310 of SEQ ID NO: 1883833
uuaaucacucagugaguuu

SEQ ID NO: 2219667 - RNA, 19 nt, Artificial Sequence
  Description of Artificial Sequence: Synthetic oligonucleotide
  Antisense strand to SEQ ID NO: 2219666
aaacucacugagugauuaa

SEQ ID NO: 2219668 - RNA, 19 nt, Artificial Sequence
  Description of Artificial Sequence: Synthetic oligonucleotide
  Sense strand starting at position 1063 of SEQ ID NO: 1883833
uggcuagcaccucaaaguu

SEQ ID NO: 2219669 - RNA, 19 nt, Artificial Sequence
  Description of Artificial Sequence: Synthetic oligonucleotide
  Antisense strand to SEQ ID NO: 2219668
aacuuugaggugcuagcca

SEQ ID NO: 2219670 - RNA, 19 nt, Artificial Sequence
  Description of Artificial Sequence: Synthetic oligonucleotide
  Sense strand starting at position 1685 of SEQ ID NO: 1883833
ucguauuguccugauaauc

SEQ ID NO: 2219671 - RNA, 19 nt, Artificial Sequence
  Description of Artificial Sequence: Synthetic oligonucleotide
  Antisense strand to SEQ ID NO: 2219670
gauuaucaggacaauacga

SEQ ID NO: 2219672 - RNA, 19 nt, Artificial Sequence
  Description of Artificial Sequence: Synthetic oligonucleotide
  Sense strand starting at position 3628 of SEQ ID NO: 1883833
cuuaguagcaguuacaagu

SEQ ID NO: 2219673 - RNA, 19 nt, Artificial Sequence
  Description of Artificial Sequence: Synthetic oligonucleotide
  Antisense strand to SEQ ID NO: 2219672
acuuguaacugcuacuaag

SEQ ID NO: 2219674 - RNA, 19 nt, Artificial Sequence
  Description of Artificial Sequence: Synthetic oligonucleotide
  Sense strand starting at position 447 of SEQ ID NO: 1883833
ucucauacaugugagauuu

SEQ ID NO: 2219675 - RNA, 19 nt, Artificial Sequence
  Description of Artificial Sequence: Synthetic oligonucleotide
  Antisense strand to SEQ ID NO: 2219674
aaaucucacauguaugaga

SEQ ID NO: 2219676 - RNA, 19 nt, Artificial Sequence
  Description of Artificial Sequence: Synthetic oligonucleotide
  Sense strand starting at position 943 of SEQ ID NO: 1883833
ugggcaucacugugaccau

SEQ ID NO: 2219677 - RNA, 19 nt, Artificial Sequence
  Description of Artificial Sequence: Synthetic oligonucleotide
  Antisense strand to SEQ ID NO: 2219676
auggucacagugaugccca

SEQ ID NO: 2219678 - RNA, 19 nt, Artificial Sequence
  Description of Artificial Sequence: Synthetic oligonucleotide
  Sense strand starting at position 236 of SEQ ID NO: 1883833
cagagaugccgcugagaua

SEQ ID NO: 2219679 - RNA, 19 nt, Artificial Sequence
  Description of Artificial Sequence: Synthetic oligonucleotide
  Antisense strand to SEQ ID NO: 2219678
uaucucagcggcaucucug

SEQ ID NO: 2219680 - RNA, 19 nt, Artificial Sequence
  Description of Artificial Sequence: Synthetic oligonucleotide
  Sense strand starting at position 400 of SEQ ID NO: 1883833
auaagcuccugagucuauu

SEQ ID NO: 2219681 - RNA, 19 nt, Artificial Sequence
  Description of Artificial Sequence: Synthetic oligonucleotide
  Antisense strand to SEQ ID NO: 2219680
aauagacucaggagcuuau

SEQ ID NO: 2219682 - RNA, 19 nt, Artificial Sequence
  Description of Artificial Sequence: Synthetic oligonucleotide
  Sense strand starting at position 1566 of SEQ ID NO: 1883833
ucuuguuucuaagugacca

SEQ ID NO: 2219683 - RNA, 19 nt, Artificial Sequence
  Description of Artificial Sequence: Synthetic oligonucleotide
  Antisense strand to SEQ ID NO: 2219682
uggucacuuagaaacaaga

SEQ ID NO: 2219684 - RNA, 19 nt, Artificial Sequence
  Description of Artificial Sequence: Synthetic oligonucleotide
  Sense strand starting at position 2497 of SEQ ID NO: 1883833
aggacacguucucuauagu

SEQ ID NO: 2219685 - RNA, 19 nt, Artificial Sequence
  Description of Artificial Sequence: Synthetic oligonucleotide
  Antisense strand to SEQ ID NO: 2219684
acuauagagaacguguccu

SEQ ID NO: 2219686 - RNA, 19 nt, Artificial Sequence
  Description of Artificial Sequence: Synthetic oligonucleotide
  Sense strand starting at position 3303 of SEQ ID NO: 1883834
auuuaucacugcuuuguga

SEQ ID NO: 2219687 - RNA, 19 nt, Artificial Sequence
  Description of Artificial Sequence: Synthetic oligonucleotide
  Antisense strand to SEQ ID NO: 2219686
ucacaaagcagugauaaau

SEQ ID NO: 2219688 - RNA, 19 nt, Artificial Sequence
  Description of Artificial Sequence: Synthetic oligonucleotide
  Sense strand starting at position 3135 of SEQ ID NO: 1883834
ugaagacagucaucugaua

SEQ ID NO: 2219689 - RNA, 19 nt, Artificial Sequence
  Description of Artificial Sequence: Synthetic oligonucleotide
  Antisense strand to SEQ ID NO: 2219688
uaucagaugacugucuuca

SEQ ID NO: 2219690 - RNA, 19 nt, Artificial Sequence
  Description of Artificial Sequence: Synthetic oligonucleotide
  Sense strand starting at position 3265 of SEQ ID NO: 1883834
ugauaacucgagcacuaga

SEQ ID NO: 2219691 - RNA, 19 nt, Artificial Sequence
  Description of Artificial Sequence: Synthetic oligonucleotide
  Antisense strand to SEQ ID NO: 2219690
ucuagugcucgaguuauca

SEQ ID NO: 2219692 - RNA, 19 nt, Artificial Sequence
  Description of Artificial Sequence: Synthetic oligonucleotide
  Sense strand starting at position 2233 of SEQ ID NO: 1883834
aguguagugcgagcccaua

SEQ ID NO: 2219693 - RNA, 19 nt, Artificial Sequence
  Description of Artificial Sequence: Synthetic oligonucleotide
  Antisense strand to SEQ ID NO: 2219692
uaugggcucgcacuacacu

SEQ ID NO: 2219694 - RNA, 19 nt, Artificial Sequence
  Description of Artificial Sequence: Synthetic oligonucleotide
  Sense strand starting at position 3054 of SEQ ID NO: 1883834
ugaccauuaucuuccagga

SEQ ID NO: 2219695 - RNA, 19 nt, Artificial Sequence
  Description of Artificial Sequence: Synthetic oligonucleotide
  Antisense strand to SEQ ID NO: 2219694
uccuggaagauaaugguca

SEQ ID NO: 2219696 - RNA, 19 nt, Artificial Sequence
  Description of Artificial Sequence: Synthetic oligonucleotide
  Sense strand starting at position 2129 of SEQ ID NO: 1883834
cauagaaccgauuagcgaa

SEQ ID NO: 2219697 - RNA, 19 nt, Artificial Sequence
  Description of Artificial Sequence: Synthetic oligonucleotide
  Antisense strand to SEQ ID NO: 2219696
uucgcuaaucgguucuaug

SEQ ID NO: 2219698 - RNA, 19 nt, Artificial Sequence
  Description of Artificial Sequence: Synthetic oligonucleotide
  Sense strand starting at position 307 of SEQ ID NO: 1883834
aggauccaguccucuacaa

SEQ ID NO: 2219699 - RNA, 19 nt, Artificial Sequence
  Description of Artificial Sequence: Synthetic oligonucleotide
  Antisense strand to SEQ ID NO: 2219698
uuguagaggacuggauccu

SEQ ID NO: 2219700 - RNA, 19 nt, Artificial Sequence
  Description of Artificial Sequence: Synthetic oligonucleotide
  Sense strand starting at position 2452 of SEQ ID NO: 1883834
guuccugcuccgcuuuaau

SEQ ID NO: 2219701 - RNA, 19 nt, Artificial Sequence
  Description of Artificial Sequence: Synthetic oligonucleotide
  Antisense strand to SEQ ID NO: 2219700
auuaaagcggagcaggaac

SEQ ID NO: 2219702 - RNA, 19 nt, Artificial Sequence
  Description of Artificial Sequence: Synthetic oligonucleotide
  Sense strand starting at position 3118 of SEQ ID NO: 1883834
aaggcuaaccgguaugaug

SEQ ID NO: 2219703 - RNA, 19 nt, Artificial Sequence
  Description of Artificial Sequence: Synthetic oligonucleotide
  Antisense strand to SEQ ID NO: 2219702
caucauaccgguuagccuu

SEQ ID NO: 2219704 - RNA, 19 nt, Artificial Sequence
  Description of Artificial Sequence: Synthetic oligonucleotide
  Sense strand starting at position 3072 of SEQ ID NO: 1883834
agaguugugaagcaaggua

SEQ ID NO: 2219705 - RNA, 19 nt, Artificial Sequence
  Description of Artificial Sequence: Synthetic oligonucleotide
  Antisense strand to SEQ ID NO: 2219704
uaccuugcuucacaacucu

SEQ ID NO: 2219706 - RNA, 19 nt, Artificial Sequence
  Description of Artificial Sequence: Synthetic oligonucleotide
  Sense strand starting at position 3058 of SEQ ID NO: 1883834
cauuaucuuccaggagagu

SEQ ID NO: 2219707 - RNA, 19 nt, Artificial Sequence
  Description of Artificial Sequence: Synthetic oligonucleotide
  Antisense strand to SEQ ID NO: 2219706
acucuccuggaagauaaug

SEQ ID NO: 2219708 - RNA, 19 nt, Artificial Sequence
  Description of Artificial Sequence: Synthetic oligonucleotide
  Sense strand starting at position 3551 of SEQ ID NO: 1883834
uuggccuuuguagacaaau

SEQ ID NO: 2219709 - RNA, 19 nt, Artificial Sequence
  Description of Artificial Sequence: Synthetic oligonucleotide
  Antisense strand to SEQ ID NO: 2219708
auuugucuacaaaggccaa

SEQ ID NO: 2219710 - RNA, 19 nt, Artificial Sequence
  Description of Artificial Sequence: Synthetic oligonucleotide
  Sense strand starting at position 189 of SEQ ID NO: 1883834
gcaaacguuggugaaauga

SEQ ID NO: 2219711 - RNA, 19 nt, Artificial Sequence
  Description of Artificial Sequence: Synthetic oligonucleotide
  Antisense strand to SEQ ID NO: 2219710
ucauuucaccaacguuugc

SEQ ID NO: 2219712 - RNA, 19 nt, Artificial Sequence
  Description of Artificial Sequence: Synthetic oligonucleotide
  Sense strand starting at position 819 of SEQ ID NO: 1883834
augucaugaccucagugua

SEQ ID NO: 2219713 - RNA, 19 nt, Artificial Sequence
  Description of Artificial Sequence: Synthetic oligonucleotide
  Antisense strand to SEQ ID NO: 2219712
uacacugaggucaugacau

SEQ ID NO: 2219714 - RNA, 19 nt, Artificial Sequence
  Description of Artificial Sequence: Synthetic oligonucleotide
  Sense strand starting at position 801 of SEQ ID NO: 1883834
ucaccuuuccgagacugca

SEQ ID NO: 2219715 - RNA, 19 nt, Artificial Sequence
  Description of Artificial Sequence: Synthetic oligonucleotide
  Antisense strand to SEQ ID NO: 2219714
ugcagucucggaaagguga

SEQ ID NO: 2219716 - RNA, 19 nt, Artificial Sequence
  Description of Artificial Sequence: Synthetic oligonucleotide
  Sense strand starting at position 3386 of SEQ ID NO: 1883834
gugugcagaguggaucaau

SEQ ID NO: 2219717 - RNA, 19 nt, Artificial Sequence
  Description of Artificial Sequence: Synthetic oligonucleotide
  Antisense strand to SEQ ID NO: 2219716
auugauccacucugcacac

SEQ ID NO: 2219718 - RNA, 19 nt, Artificial Sequence
  Description of Artificial Sequence: Synthetic oligonucleotide
  Sense strand starting at position 3252 of SEQ ID NO: 1883834
agcaucuaaugcuugauaa

SEQ ID NO: 2219719 - RNA, 19 nt, Artificial Sequence
  Description of Artificial Sequence: Synthetic oligonucleotide
  Antisense strand to SEQ ID NO: 2219718
uuaucaagcauuagaugcu

SEQ ID NO: 2219720 - RNA, 19 nt, Artificial Sequence
  Description of Artificial Sequence: Synthetic oligonucleotide
  Sense strand starting at position 3120 of SEQ ID NO: 1883834
ggcuaaccgguaugaugaa

SEQ ID NO: 2219721 - RNA, 19 nt, Artificial Sequence
  Description of Artificial Sequence: Synthetic oligonucleotide
  Antisense strand to SEQ ID NO: 2219720
uucaucauaccgguuagcc

SEQ ID NO: 2219722 - RNA, 19 nt, Artificial Sequence
  Description of Artificial Sequence: Synthetic oligonucleotide
  Sense strand starting at position 3281 of SEQ ID NO: 1883834
agauguguauucuuaucac

SEQ ID NO: 2219723 - RNA, 19 nt, Artificial Sequence
  Description of Artificial Sequence: Synthetic oligonucleotide
  Antisense strand to SEQ ID NO: 2219722
gugauaagaauacacaucu

SEQ ID NO: 2219724 - RNA, 19 nt, Artificial Sequence
  Description of Artificial Sequence: Synthetic oligonucleotide
  Sense strand starting at position 2892 of SEQ ID NO: 1883834
guuggaucucaccaguugu

SEQ ID NO: 2219725 - RNA, 19 nt, Artificial Sequence
  Description of Artificial Sequence: Synthetic oligonucleotide
  Antisense strand to SEQ ID NO: 2219724
acaacuggugagauccaac

SEQ ID NO: 2219726 - RNA, 19 nt, Artificial Sequence
  Description of Artificial Sequence: Synthetic oligonucleotide
  Sense strand starting at position 3262 of SEQ ID NO: 1883834
gcuugauaacucgagcacu

SEQ ID NO: 2219727 - RNA, 19 nt, Artificial Sequence
  Description of Artificial Sequence: Synthetic oligonucleotide
  Antisense strand to SEQ ID NO: 2219726
agugcucgaguuaucaagc

SEQ ID NO: 2219728 - RNA, 19 nt, Artificial Sequence
  Description of Artificial Sequence: Synthetic oligonucleotide
  Sense strand starting at position 3276 of SEQ ID NO: 1883834
gcacuagauguguauucuu

SEQ ID NO: 2219729 - RNA, 19 nt, Artificial Sequence
  Description of Artificial Sequence: Synthetic oligonucleotide
  Antisense strand to SEQ ID NO: 2219728
aagaauacacaucuagugc

SEQ ID NO: 2219730 - RNA, 19 nt, Artificial Sequence
  Description of Artificial Sequence: Synthetic oligonucleotide
  Sense strand starting at position 2198 of SEQ ID NO: 1883834
ggaguuuccgucugggaga

SEQ ID NO: 2219731 - RNA, 19 nt, Artificial Sequence
  Description of Artificial Sequence: Synthetic oligonucleotide
  Antisense strand to SEQ ID NO: 2219730
ucucccagacggaaacucc

SEQ ID NO: 2219732 - RNA, 19 nt, Artificial Sequence
  Description of Artificial Sequence: Synthetic oligonucleotide
  Sense strand starting at position 3253 of SEQ ID NO: 1883834
gcaucuaaugcuugauaac

SEQ ID NO: 2219733 - RNA, 19 nt, Artificial Sequence
  Description of Artificial Sequence: Synthetic oligonucleotide
  Antisense strand to SEQ ID NO: 2219732
guuaucaagcauuagaugc

SEQ ID NO: 2219734 - RNA, 19 nt, Artificial Sequence
  Description of Artificial Sequence: Synthetic oligonucleotide
  Sense strand starting at position 3279 of SEQ ID NO: 1883834
cuagauguguauucuuauc

SEQ ID NO: 2219735 - RNA, 19 nt, Artificial Sequence
  Description of Artificial Sequence: Synthetic oligonucleotide
  Antisense strand to SEQ ID NO: 2219734
gauaagaauacacaucuag

SEQ ID NO: 2219736 - RNA, 19 nt, Artificial Sequence
  Description of Artificial Sequence: Synthetic oligonucleotide
  Sense strand starting at position 3671 of SEQ ID NO: 1883834
cugugacucuugucaaauu

SEQ ID NO: 2219737 - RNA, 19 nt, Artificial Sequence
  Description of Artificial Sequence: Synthetic oligonucleotide
  Antisense strand to SEQ ID NO: 2219736
aauuugacaagagucacag

SEQ ID NO: 2219738 - RNA, 19 nt, Artificial Sequence
  Description of Artificial Sequence: Synthetic oligonucleotide
  Sense strand starting at position 2654 of SEQ ID NO: 1883834
ucaugcuucccagauugcu

SEQ ID NO: 2219739 - RNA, 19 nt, Artificial Sequence
  Description of Artificial Sequence: Synthetic oligonucleotide
  Antisense strand to SEQ ID NO: 2219738
agcaaucugggaagcauga

SEQ ID NO: 2219740 - RNA, 19 nt, Artificial Sequence
  Description of Artificial Sequence: Synthetic oligonucleotide
  Sense strand starting at position 187 of SEQ ID NO: 1883834
uagcaaacguuggugaaau

SEQ ID NO: 2219741 - RNA, 19 nt, Artificial Sequence
  Description of Artificial Sequence: Synthetic oligonucleotide
  Antisense strand to SEQ ID NO: 2219740
auuucaccaacguuugcua

SEQ ID NO: 2219742 - RNA, 19 nt, Artificial Sequence
  Description of Artificial Sequence: Synthetic oligonucleotide
  Sense strand starting at position 186 of SEQ ID NO: 1883834
uuagcaaacguuggugaaa

SEQ ID NO: 2219743 - RNA, 19 nt, Artificial Sequence
  Description of Artificial Sequence: Synthetic oligonucleotide
  Antisense strand to SEQ ID NO: 2219742
uuucaccaacguuugcuaa

SEQ ID NO: 2219744 - RNA, 19 nt, Artificial Sequence
  Description of Artificial Sequence: Synthetic oligonucleotide
  Sense strand starting at position 2760 of SEQ ID NO: 1883834
ucuuaagugucacucacuu

SEQ ID NO: 2219745 - RNA, 19 nt, Artificial Sequence
  Description of Artificial Sequence: Synthetic oligonucleotide
  Antisense strand to SEQ ID NO: 2219744
aagugagugacacuuaaga

SEQ ID NO: 2219746 - RNA, 19 nt, Artificial Sequence
  Description of Artificial Sequence: Synthetic oligonucleotide
  Sense strand starting at position 3686 of SEQ ID NO: 1883834
aauuguggguggcucuaau

SEQ ID NO: 2219747 - RNA, 19 nt, Artificial Sequence
  Description of Artificial Sequence: Synthetic oligonucleotide
  Antisense strand to SEQ ID NO: 2219746
auuagagccacccacaauu

SEQ ID NO: 2219748 - RNA, 19 nt, Artificial Sequence
  Description of Artificial Sequence: Synthetic oligonucleotide
  Sense strand starting at position 3705 of SEQ ID NO: 1883834
gcugcugauuuggaagaau

SEQ ID NO: 2219749 - RNA, 19 nt, Artificial Sequence
  Description of Artificial Sequence: Synthetic oligonucleotide
  Antisense strand to SEQ ID NO: 2219748
auucuuccaaaucagcagc

SEQ ID NO: 2219750 - RNA, 19 nt, Artificial Sequence
  Description of Artificial Sequence: Synthetic oligonucleotide
  Sense strand starting at position 685 of SEQ ID NO: 1883834
guggaucauccgcagguuu

SEQ ID NO: 2219751 - RNA, 19 nt, Artificial Sequence
  Description of Artificial Sequence: Synthetic oligonucleotide
  Antisense strand to SEQ ID NO: 2219750
aaaccugcggaugauccac

SEQ ID NO: 2219752 - RNA, 19 nt, Artificial Sequence
  Description of Artificial Sequence: Synthetic oligonucleotide
  Sense strand starting at position 3028 of SEQ ID NO: 1883834
uguguuuccucaucucuaa

SEQ ID NO: 2219753 - RNA, 19 nt, Artificial Sequence
  Description of Artificial Sequence: Synthetic oligonucleotide
  Antisense strand to SEQ ID NO: 2219752
uuagagaugaggaaacaca

SEQ ID NO: 2219754 - RNA, 19 nt, Artificial Sequence
  Description of Artificial Sequence: Synthetic oligonucleotide
  Sense strand starting at position 2996 of SEQ ID NO: 1883834
agaggcuuggcuuguaauc

SEQ ID NO: 2219755 - RNA, 19 nt, Artificial Sequence
  Description of Artificial Sequence: Synthetic oligonucleotide
  Antisense strand to SEQ ID NO: 2219754
gauuacaagccaagccucu

SEQ ID NO: 2219756 - RNA, 19 nt, Artificial Sequence
  Description of Artificial Sequence: Synthetic oligonucleotide
  Sense strand starting at position 3317 of SEQ ID NO: 1883834
ugugaucccuuguuuacuu

SEQ ID NO: 2219757 - RNA, 19 nt, Artificial Sequence
  Description of Artificial Sequence: Synthetic oligonucleotide
  Antisense strand to SEQ ID NO: 2219756
aaguaaacaagggaucaca

SEQ ID NO: 2219758 - RNA, 19 nt, Artificial Sequence
  Description of Artificial Sequence: Synthetic oligonucleotide
  Sense strand starting at position 3305 of SEQ ID NO: 1883834
uuaucacugcuuugugauc

SEQ ID NO: 2219759 - RNA, 19 nt, Artificial Sequence
  Description of Artificial Sequence: Synthetic oligonucleotide
  Antisense strand to SEQ ID NO: 2219758
gaucacaaagcagugauaa

SEQ ID NO: 2219760 - RNA, 19 nt, Artificial Sequence
  Description of Artificial Sequence: Synthetic oligonucleotide
  Sense strand starting at position 101 of SEQ ID NO: 1883834
uguguuucugcccaguuaa

SEQ ID NO: 2219761 - RNA, 19 nt, Artificial Sequence
  Description of Artificial Sequence: Synthetic oligonucleotide
  Antisense strand to SEQ ID NO: 2219760
uuaacugggcagaaacaca

SEQ ID NO: 2219762 - RNA, 19 nt, Artificial Sequence
  Description of Artificial Sequence: Synthetic oligonucleotide
  Sense strand starting at position 3272 of SEQ ID NO: 1883834
ucgagcacuagauguguau

SEQ ID NO: 2219763 - RNA, 19 nt, Artificial Sequence
  Description of Artificial Sequence: Synthetic oligonucleotide
  Antisense strand to SEQ ID NO: 2219762
auacacaucuagugcucga

SEQ ID NO: 2219764 - RNA, 19 nt, Artificial Sequence
  Description of Artificial Sequence: Synthetic oligonucleotide
  Sense strand starting at position 3284 of SEQ ID NO: 1883834
uguguauucuuaucacagc

SEQ ID NO: 2219765 - RNA, 19 nt, Artificial Sequence
  Description of Artificial Sequence: Synthetic oligonucleotide
  Antisense strand to SEQ ID NO: 2219764
gcugugauaagaauacaca

SEQ ID NO: 2219766 - RNA, 19 nt, Artificial Sequence
  Description of Artificial Sequence: Synthetic oligonucleotide
  Sense strand starting at position 406 of SEQ ID NO: 1883835
uaauaaauaucuguuggag

SEQ ID NO: 2219767 - RNA, 19 nt, Artificial Sequence
  Description of Artificial Sequence: Synthetic oligonucleotide
  Antisense strand to SEQ ID NO: 2219766
cuccaacagauauuuauua

SEQ ID NO: 2219768 - RNA, 19 nt, Artificial Sequence
  Description of Artificial Sequence: Synthetic oligonucleotide
  Sense strand starting at position 2483 of SEQ ID NO: 1883835
ucuagaauuuaugaaugag

SEQ ID NO: 2219769 - RNA, 19 nt, Artificial Sequence
  Description of Artificial Sequence: Synthetic oligonucleotide
  Antisense strand to SEQ ID NO: 2219768
cucauucauaaauucuaga

SEQ ID NO: 2219770 - RNA, 19 nt, Artificial Sequence
  Description of Artificial Sequence: Synthetic oligonucleotide
  Sense strand starting at position 859 of SEQ ID NO: 1883835
cagccucagcuuucguauu

SEQ ID NO: 2219771 - RNA, 19 nt, Artificial Sequence
  Description of Artificial Sequence: Synthetic oligonucleotide
  Antisense strand to SEQ ID NO: 2219770
aauacgaaagcugaggcug

SEQ ID NO: 2219772 - RNA, 19 nt, Artificial Sequence
  Description of Artificial Sequence: Synthetic oligonucleotide
  Sense strand starting at position 3265 of SEQ ID NO: 1883835
cuauauagaugcccagaga

SEQ ID NO: 2219773 - RNA, 19 nt, Artificial Sequence
  Description of Artificial Sequence: Synthetic oligonucleotide
  Antisense strand to SEQ ID NO: 2219772
ucucugggcaucuauauag

SEQ ID NO: 2219774 - RNA, 19 nt, Artificial Sequence
  Description of Artificial Sequence: Synthetic oligonucleotide
  Sense strand starting at position 5 of SEQ ID NO: 1883835
ucccaagaacggugggaaa

SEQ ID NO: 2219775 - RNA, 19 nt, Artificial Sequence
  Description of Artificial Sequence: Synthetic oligonucleotide
  Antisense strand to SEQ ID NO: 2219774
uuucccaccguucuuggga

SEQ ID NO: 2219776 - RNA, 19 nt, Artificial Sequence
  Description of Artificial Sequence: Synthetic oligonucleotide
  Sense strand starting at position 1015 of SEQ ID NO: 1883835
uguaacauaguagaguuua

SEQ ID NO: 2219777 - RNA, 19 nt, Artificial Sequence
  Description of Artificial Sequence: Synthetic oligonucleotide
  Antisense strand to SEQ ID NO: 2219776
uaaacucuacuauguuaca

SEQ ID NO: 2219778 - RNA, 19 nt, Artificial Sequence
  Description of Artificial Sequence: Synthetic oligonucleotide
  Sense strand starting at position 1076 of SEQ ID NO: 1883835
gguaauuaacacgauugua

SEQ ID NO: 2219779 - RNA, 19 nt, Artificial Sequence
  Description of Artificial Sequence: Synthetic oligonucleotide
  Antisense strand to SEQ ID NO: 2219778
uacaaucguguuaauuacc

SEQ ID NO: 2219780 - RNA, 19 nt, Artificial Sequence
  Description of Artificial Sequence: Synthetic oligonucleotide
  Sense strand starting at position 389 of SEQ ID NO: 1883835
aguauuuaguaggugcuua

SEQ ID NO: 2219781 - RNA, 19 nt, Artificial Sequence
  Description of Artificial Sequence: Synthetic oligonucleotide
  Antisense strand to SEQ ID NO: 2219780
uaagcaccuacuaaauacu

SEQ ID NO: 2219782 - RNA, 19 nt, Artificial Sequence
  Description of Artificial Sequence: Synthetic oligonucleotide
  Sense strand starting at position 3881 of SEQ ID NO: 1883835
uccuaaauguaagugaaau

SEQ ID NO: 2219783 - RNA, 19 nt, Artificial Sequence
  Description of Artificial Sequence: Synthetic oligonucleotide
  Antisense strand to SEQ ID NO: 2219782
auuucacuuacauuuagga

SEQ ID NO: 2219784 - RNA, 19 nt, Artificial Sequence
  Description of Artificial Sequence: Synthetic oligonucleotide
  Sense strand starting at position 3961 of SEQ ID NO: 1883835
acuuauccacagcaguaua

SEQ ID NO: 2219785 - RNA, 19 nt, Artificial Sequence
  Description of Artificial Sequence: Synthetic oligonucleotide
  Antisense strand to SEQ ID NO: 2219784
uauacugcuguggauaagu

SEQ ID NO: 2219786 - RNA, 19 nt, Artificial Sequence
  Description of Artificial Sequence: Synthetic oligonucleotide
  Sense strand starting at position 1406 of SEQ ID NO: 1883835
gaccguugaacauggagau

SEQ ID NO: 2219787 - RNA, 19 nt, Artificial Sequence
  Description of Artificial Sequence: Synthetic oligonucleotide
  Antisense strand to SEQ ID NO: 2219786
aucuccauguucaacgguc

SEQ ID NO: 2219788 - RNA, 19 nt, Artificial Sequence
  Description of Artificial Sequence: Synthetic oligonucleotide
  Sense strand starting at position 2573 of SEQ ID NO: 1883835
ucacaaauuguguauccau

SEQ ID NO: 2219789 - RNA, 19 nt, Artificial Sequence
  Description of Artificial Sequence: Synthetic oligonucleotide
  Antisense strand to SEQ ID NO: 2219788
auggauacacaauuuguga

SEQ ID NO: 2219790 - RNA, 19 nt, Artificial Sequence
  Description of Artificial Sequence: Synthetic oligonucleotide
  Sense strand starting at position 1383 of SEQ ID NO: 1883835
gacuuacuggcucaggagu

SEQ ID NO: 2219791 - RNA, 19 nt, Artificial Sequence
  Description of Artificial Sequence: Synthetic oligonucleotide
  Antisense strand to SEQ ID NO: 2219790
acuccugagccaguaaguc

SEQ ID NO: 2219792 - RNA, 19 nt, Artificial Sequence
  Description of Artificial Sequence: Synthetic oligonucleotide
  Sense strand starting at position 1416 of SEQ ID NO: 1883835
cauggagaucuguguaagg

SEQ ID NO: 2219793 - RNA, 19 nt, Artificial Sequence
  Description of Artificial Sequence: Synthetic oligonucleotide
  Antisense strand to SEQ ID NO: 2219792
ccuuacacagaucuccaug

SEQ ID NO: 2219794 - RNA, 19 nt, Artificial Sequence
  Description of Artificial Sequence: Synthetic oligonucleotide
  Sense strand starting at position 53 of SEQ ID NO: 1883835
aucacaagugcuuagugaa

SEQ ID NO: 2219795 - RNA, 19 nt, Artificial Sequence
  Description of Artificial Sequence: Synthetic oligonucleotide
  Antisense strand to SEQ ID NO: 2219794
uucacuaagcacuugugau

SEQ ID NO: 2219796 - RNA, 19 nt, Artificial Sequence
  Description of Artificial Sequence: Synthetic oligonucleotide
  Sense strand starting at position 3397 of SEQ ID NO: 1883835
accagaagugcccaaguua

SEQ ID NO: 2219797 - RNA, 19 nt, Artificial Sequence
  Description of Artificial Sequence: Synthetic oligonucleotide
  Antisense strand to SEQ ID NO: 2219796
uaacuugggcacuucuggu

SEQ ID NO: 2219798 - RNA, 19 nt, Artificial Sequence
  Description of Artificial Sequence: Synthetic oligonucleotide
  Sense strand starting at position 2312 of SEQ ID NO: 1883835
ugagaugagcuucgacaaa

SEQ ID NO: 2219799 - RNA, 19 nt, Artificial Sequence
  Description of Artificial Sequence: Synthetic oligonucleotide
  Antisense strand to SEQ ID NO: 2219798
uuugucgaagcucaucuca

SEQ ID NO: 2219800 - RNA, 19 nt, Artificial Sequence
  Description of Artificial Sequence: Synthetic oligonucleotide
  Sense strand starting at position 2177 of SEQ ID NO: 1883835
ccaggcuuuccuggaaaga

SEQ ID NO: 2219801 - RNA, 19 nt, Artificial Sequence
  Description of Artificial Sequence: Synthetic oligonucleotide
  Antisense strand to SEQ ID NO: 2219800
ucuuuccaggaaagccugg

SEQ ID NO: 2219802 - RNA, 19 nt, Artificial Sequence
  Description of Artificial Sequence: Synthetic oligonucleotide
  Sense strand starting at position 412 of SEQ ID NO: 1883835
auaucuguuggagguacaa

SEQ ID NO: 2219803 - RNA, 19 nt, Artificial Sequence
  Description of Artificial Sequence: Synthetic oligonucleotide
  Antisense strand to SEQ ID NO: 2219802
uuguaccuccaacagauau

SEQ ID NO: 2219804 - RNA, 19 nt, Artificial Sequence
  Description of Artificial Sequence: Synthetic oligonucleotide
  Sense strand starting at position 1130 of SEQ ID NO: 1883835
gacugugagacugguccaa

SEQ ID NO: 2219805 - RNA, 19 nt, Artificial Sequence
  Description of Artificial Sequence: Synthetic oligonucleotide
  Antisense strand to SEQ ID NO: 2219804
uuggaccagucucacaguc

SEQ ID NO: 2219806 - RNA, 19 nt, Artificial Sequence
  Description of Artificial Sequence: Synthetic oligonucleotide
  Sense strand starting at position 1491 of SEQ ID NO: 1883835
gaaagaaucugucugagcu

SEQ ID NO: 2219807 - RNA, 19 nt, Artificial Sequence
  Description of Artificial Sequence: Synthetic oligonucleotide
  Antisense strand to SEQ ID NO: 2219806
agcucagacagauucuuuc

SEQ ID NO: 2219808 - RNA, 19 nt, Artificial Sequence
  Description of Artificial Sequence: Synthetic oligonucleotide
  Sense strand starting at position 3711 of SEQ ID NO: 1883835
ugauauucuucugcacaag

SEQ ID NO: 2219809 - RNA, 19 nt, Artificial Sequence
  Description of Artificial Sequence: Synthetic oligonucleotide
  Antisense strand to SEQ ID NO: 2219808
cuugugcagaagaauauca

SEQ ID NO: 2219810 - RNA, 19 nt, Artificial Sequence
  Description of Artificial Sequence: Synthetic oligonucleotide
  Sense strand starting at position 909 of SEQ ID NO: 1883835
cugaaucuguauguauaua

SEQ ID NO: 2219811 - RNA, 19 nt, Artificial Sequence
  Description of Artificial Sequence: Synthetic oligonucleotide
  Antisense strand to SEQ ID NO: 2219810
uauauacauacagauucag

SEQ ID NO: 2219812 - RNA, 19 nt, Artificial Sequence
  Description of Artificial Sequence: Synthetic oligonucleotide
  Sense strand starting at position 1263 of SEQ ID NO: 1883835
gcacaaauuugcguuuacu

SEQ ID NO: 2219813 - RNA, 19 nt, Artificial Sequence
  Description of Artificial Sequence: Synthetic oligonucleotide
  Antisense strand to SEQ ID NO: 2219812
aguaaacgcaaauuugugc

SEQ ID NO: 2219814 - RNA, 19 nt, Artificial Sequence
  Description of Artificial Sequence: Synthetic oligonucleotide
  Sense strand starting at position 1492 of SEQ ID NO: 1883835
aaagaaucugucugagcuc

SEQ ID NO: 2219815 - RNA, 19 nt, Artificial Sequence
  Description of Artificial Sequence: Synthetic oligonucleotide
  Antisense strand to SEQ ID NO: 2219814
gagcucagacagauucuuu

SEQ ID NO: 2219816 - RNA, 19 nt, Artificial Sequence
  Description of Artificial Sequence: Synthetic oligonucleotide
  Sense strand starting at position 2716 of SEQ ID NO: 1883835
gggugaagccuugggacuu

SEQ ID NO: 2219817 - RNA, 19 nt, Artificial Sequence
  Description of Artificial Sequence: Synthetic oligonucleotide
  Antisense strand to SEQ ID NO: 2219816
aagucccaaggcuucaccc

SEQ ID NO: 2219818 - RNA, 19 nt, Artificial Sequence
  Description of Artificial Sequence: Synthetic oligonucleotide
  Sense strand starting at position 1123 of SEQ ID NO: 1883835
aauugcugacugugagacu

SEQ ID NO: 2219819 - RNA, 19 nt, Artificial Sequence
  Description of Artificial Sequence: Synthetic oligonucleotide
  Antisense strand to SEQ ID NO: 2219818
agucucacagucagcaauu

SEQ ID NO: 2219820 - RNA, 19 nt, Artificial Sequence
  Description of Artificial Sequence: Synthetic oligonucleotide
  Sense strand starting at position 214 of SEQ ID NO: 1883835
cuggaaugcucugugacag

SEQ ID NO: 2219821 - RNA, 19 nt, Artificial Sequence
  Description of Artificial Sequence: Synthetic oligonucleotide
  Antisense strand to SEQ ID NO: 2219820
cugucacagagcauuccag

SEQ ID NO: 2219822 - RNA, 19 nt, Artificial Sequence
  Description of Artificial Sequence: Synthetic oligonucleotide
  Sense strand starting at position 1075 of SEQ ID NO: 1883835
ggguaauuaacacgauugu

SEQ ID NO: 2219823 - RNA, 19 nt, Artificial Sequence
  Description of Artificial Sequence: Synthetic oligonucleotide
  Antisense strand to SEQ ID NO: 2219822
acaaucguguuaauuaccc

SEQ ID NO: 2219824 - RNA, 19 nt, Artificial Sequence
  Description of Artificial Sequence: Synthetic oligonucleotide
  Sense strand starting at position 202 of SEQ ID NO: 1883835
gcucacuucuaccuggaau

SEQ ID NO: 2219825 - RNA, 19 nt, Artificial Sequence
  Description of Artificial Sequence: Synthetic oligonucleotide
  Antisense strand to SEQ ID NO: 2219824
auuccagguagaagugagc

SEQ ID NO: 2219826 - RNA, 19 nt, Artificial Sequence
  Description of Artificial Sequence: Synthetic oligonucleotide
  Sense strand starting at position 2425 of SEQ ID NO: 1883835
ugacuauugcuguagguua

SEQ ID NO: 2219827 - RNA, 19 nt, Artificial Sequence
  Description of Artificial Sequence: Synthetic oligonucleotide
  Antisense strand to SEQ ID NO: 2219826
uaaccuacagcaauaguca

SEQ ID NO: 2219828 - RNA, 19 nt, Artificial Sequence
  Description of Artificial Sequence: Synthetic oligonucleotide
  Sense strand starting at position 1397 of SEQ ID NO: 1883835
ggaguaccugaccguugaa

SEQ ID NO: 2219829 - RNA, 19 nt, Artificial Sequence
  Description of Artificial Sequence: Synthetic oligonucleotide
  Antisense strand to SEQ ID NO: 2219828
uucaacggucagguacucc

SEQ ID NO: 2219830 - RNA, 19 nt, Artificial Sequence
  Description of Artificial Sequence: Synthetic oligonucleotide
  Sense strand starting at position 3531 of SEQ ID NO: 1883835
ucuugugagucuccaaaug

SEQ ID NO: 2219831 - RNA, 19 nt, Artificial Sequence
  Description of Artificial Sequence: Synthetic oligonucleotide
  Antisense strand to SEQ ID NO: 2219830
cauuuggagacucacaaga

SEQ ID NO: 2219832 - RNA, 19 nt, Artificial Sequence
  Description of Artificial Sequence: Synthetic oligonucleotide
  Sense strand starting at position 26 of SEQ ID NO: 1883835
acuguucuccucgaacagu

SEQ ID NO: 2219833 - RNA, 19 nt, Artificial Sequence
  Description of Artificial Sequence: Synthetic oligonucleotide
  Antisense strand to SEQ ID NO: 2219832
acuguucgaggagaacagu

SEQ ID NO: 2219834 - RNA, 19 nt, Artificial Sequence
  Description of Artificial Sequence: Synthetic oligonucleotide
  Sense strand starting at position 213 of SEQ ID NO: 1883835
ccuggaaugcucugugaca

SEQ ID NO: 2219835 - RNA, 19 nt, Artificial Sequence
  Description of Artificial Sequence: Synthetic oligonucleotide
  Antisense strand to SEQ ID NO: 2219834
ugucacagagcauuccagg

SEQ ID NO: 2219836 - RNA, 19 nt, Artificial Sequence
  Description of Artificial Sequence: Synthetic oligonucleotide
  Sense strand starting at position 2553 of SEQ ID NO: 1883835
uguuuaaucguugaauagu

SEQ ID NO: 2219837 - RNA, 19 nt, Artificial Sequence
  Description of Artificial Sequence: Synthetic oligonucleotide
  Antisense strand to SEQ ID NO: 2219836
acuauucaacgauuaaaca

SEQ ID NO: 2219838 - RNA, 19 nt, Artificial Sequence
  Description of Artificial Sequence: Synthetic oligonucleotide
  Sense strand starting at position 376 of SEQ ID NO: 1883835
uugcaaugggcucaguauu

SEQ ID NO: 2219839 - RNA, 19 nt, Artificial Sequence
  Description of Artificial Sequence: Synthetic oligonucleotide
  Antisense strand to SEQ ID NO: 2219838
aauacugagcccauugcaa

SEQ ID NO: 2219840 - RNA, 19 nt, Artificial Sequence
  Description of Artificial Sequence: Synthetic oligonucleotide
  Sense strand starting at position 3697 of SEQ ID NO: 1883835
uaaggaguugcuugugaua

SEQ ID NO: 2219841 - RNA, 19 nt, Artificial Sequence
  Description of Artificial Sequence: Synthetic oligonucleotide
  Antisense strand to SEQ ID NO: 2219840
uaucacaagcaacuccuua

SEQ ID NO: 2219842 - RNA, 19 nt, Artificial Sequence
  Description of Artificial Sequence: Synthetic oligonucleotide
  Sense strand starting at position 905 of SEQ ID NO: 1883835
uaagcugaaucuguaugua

SEQ ID NO: 2219843 - RNA, 19 nt, Artificial Sequence
  Description of Artificial Sequence: Synthetic oligonucleotide
  Antisense strand to SEQ ID NO: 2219842
uacauacagauucagcuua

SEQ ID NO: 2219844 - RNA, 19 nt, Artificial Sequence
  Description of Artificial Sequence: Synthetic oligonucleotide
  Sense strand starting at position 52 of SEQ ID NO: 1883835
caucacaagugcuuaguga

SEQ ID NO: 2219845 - RNA, 19 nt, Artificial Sequence
  Description of Artificial Sequence: Synthetic oligonucleotide
  Antisense strand to SEQ ID NO: 2219844
ucacuaagcacuugugaug

SEQ ID NO: 2219846 - RNA, 19 nt, Artificial Sequence
  Description of Artificial Sequence: Synthetic oligonucleotide
  Sense strand starting at position 1776 of SEQ ID NO: 1883836
ucuuaaugggaguaguuag

SEQ ID NO: 2219847 - RNA, 19 nt, Artificial Sequence
  Description of Artificial Sequence: Synthetic oligonucleotide
  Antisense strand to SEQ ID NO: 2219846
cuaacuacucccauuaaga

SEQ ID NO: 2219848 - RNA, 19 nt, Artificial Sequence
  Description of Artificial Sequence: Synthetic oligonucleotide
  Sense strand starting at position 302 of SEQ ID NO: 1883836
cugaguaagagucagugga

SEQ ID NO: 2219849 - RNA, 19 nt, Artificial Sequence
  Description of Artificial Sequence: Synthetic oligonucleotide
  Antisense strand to SEQ ID NO: 2219848
uccacugacucuuacucag

SEQ ID NO: 2219850 - RNA, 19 nt, Artificial Sequence
  Description of Artificial Sequence: Synthetic oligonucleotide
  Sense strand starting at position 1670 of SEQ ID NO: 1883836
ccauuugucuuauauuuag

SEQ ID NO: 2219851 - RNA, 19 nt, Artificial Sequence
  Description of Artificial Sequence: Synthetic oligonucleotide
  Antisense strand to SEQ ID NO: 2219850
cuaaauauaagacaaaugg

SEQ ID NO: 2219852 - RNA, 19 nt, Artificial Sequence
  Description of Artificial Sequence: Synthetic oligonucleotide
  Sense strand starting at position 1309 of SEQ ID NO: 1883836
cuuccaguucccuaggaga

SEQ ID NO: 2219853 - RNA, 19 nt, Artificial Sequence
  Description of Artificial Sequence: Synthetic oligonucleotide
  Antisense strand to SEQ ID NO: 2219852
ucuccuagggaacuggaag

SEQ ID NO: 2219854 - RNA, 19 nt, Artificial Sequence
  Description of Artificial Sequence: Synthetic oligonucleotide
  Sense strand starting at position 2533 of SEQ ID NO: 1883836
ggugcuauccacuaaagag

SEQ ID NO: 2219855 - RNA, 19 nt, Artificial Sequence
  Description of Artificial Sequence: Synthetic oligonucleotide
  Antisense strand to SEQ ID NO: 2219854
cucuuuaguggauagcacc

SEQ ID NO: 2219856 - RNA, 19 nt, Artificial Sequence
  Description of Artificial Sequence: Synthetic oligonucleotide
  Sense strand starting at position 1819 of SEQ ID NO: 1883836
aggaguccuuauccaacaa

SEQ ID NO: 2219857 - RNA, 19 nt, Artificial Sequence
  Description of Artificial Sequence: Synthetic oligonucleotide
  Antisense strand to SEQ ID NO: 2219856
uuguuggauaaggacuccu

SEQ ID NO: 2219858 - RNA, 19 nt, Artificial Sequence
  Description of Artificial Sequence: Synthetic oligonucleotide
  Sense strand starting at position 1644 of SEQ ID NO: 1883836
guuagucaucagugauuuc

SEQ ID NO: 2219859 - RNA, 19 nt, Artificial Sequence
  Description of Artificial Sequence: Synthetic oligonucleotide
  Antisense strand to SEQ ID NO: 2219858
gaaaucacugaugacuaac

SEQ ID NO: 2219860 - RNA, 19 nt, Artificial Sequence
  Description of Artificial Sequence: Synthetic oligonucleotide
  Sense strand starting at position 1676 of SEQ ID NO: 1883836
gucuuauauuuagcagcaa

SEQ ID NO: 2219861 - RNA, 19 nt, Artificial Sequence
  Description of Artificial Sequence: Synthetic oligonucleotide
  Antisense strand to SEQ ID NO: 2219860
uugcugcuaaauauaagac

SEQ ID NO: 2219862 - RNA, 19 nt, Artificial Sequence
  Description of Artificial Sequence: Synthetic oligonucleotide
  Sense strand starting at position 1050 of SEQ ID NO: 1883836
ugagacuccuucucugaaa

SEQ ID NO: 2219863 - RNA, 19 nt, Artificial Sequence
  Description of Artificial Sequence: Synthetic oligonucleotide
  Antisense strand to SEQ ID NO: 2219862
uuucagagaaggagucuca

SEQ ID NO: 2219864 - RNA, 19 nt, Artificial Sequence
  Description of Artificial Sequence: Synthetic oligonucleotide
  Sense strand starting at position 1371 of SEQ ID NO: 1883836
auguguguccuugcuggua

SEQ ID NO: 2219865 - RNA, 19 nt, Artificial Sequence
  Description of Artificial Sequence: Synthetic oligonucleotide
  Antisense strand to SEQ ID NO: 2219864
uaccagcaaggacacacau

SEQ ID NO: 2219866 - RNA, 19 nt, Artificial Sequence
  Description of Artificial Sequence: Synthetic oligonucleotide
  Sense strand starting at position 826 of SEQ ID NO: 1883836
ugaauaauguagguaacua

SEQ ID NO: 2219867 - RNA, 19 nt, Artificial Sequence
  Description of Artificial Sequence: Synthetic oligonucleotide
  Antisense strand to SEQ ID NO: 2219866
uaguuaccuacauuauuca

SEQ ID NO: 2219868 - RNA, 19 nt, Artificial Sequence
  Description of Artificial Sequence: Synthetic oligonucleotide
  Sense strand starting at position 988 of SEQ ID NO: 1883836
uguggugcacgaguguauu

SEQ ID NO: 2219869 - RNA, 19 nt, Artificial Sequence
  Description of Artificial Sequence: Synthetic oligonucleotide
  Antisense strand to SEQ ID NO: 2219868
aauacacucgugcaccaca

SEQ ID NO: 2219870 - RNA, 19 nt, Artificial Sequence
  Description of Artificial Sequence: Synthetic oligonucleotide
  Sense strand starting at position 646 of SEQ ID NO: 1883836
auaauauggcguuagaaau

SEQ ID NO: 2219871 - RNA, 19 nt, Artificial Sequence
  Description of Artificial Sequence: Synthetic oligonucleotide
  Antisense strand to SEQ ID NO: 2219870
auuucuaacgccauauuau

SEQ ID NO: 2219872 - RNA, 19 nt, Artificial Sequence
  Description of Artificial Sequence: Synthetic oligonucleotide
  Sense strand starting at position 318 of SEQ ID NO: 1883836
ggaggucguaaacaagagu

SEQ ID NO: 2219873 - RNA, 19 nt, Artificial Sequence
  Description of Artificial Sequence: Synthetic oligonucleotide
  Antisense strand to SEQ ID NO: 2219872
acucuuguuuacgaccucc

SEQ ID NO: 2219874 - RNA, 19 nt, Artificial Sequence
  Description of Artificial Sequence: Synthetic oligonucleotide
  Sense strand starting at position 2866 of SEQ ID NO: 1883836
acuagauucuaugcaugaa

SEQ ID NO: 2219875 - RNA, 19 nt, Artificial Sequence
  Description of Artificial Sequence: Synthetic oligonucleotide
  Antisense strand to SEQ ID NO: 2219874
uucaugcauagaaucuagu

SEQ ID NO: 2219876 - RNA, 19 nt, Artificial Sequence
  Description of Artificial Sequence: Synthetic oligonucleotide
  Sense strand starting at position 2041 of SEQ ID NO: 1883836
aaaguuaauguguaagagu

SEQ ID NO: 2219877 - RNA, 19 nt, Artificial Sequence
  Description of Artificial Sequence: Synthetic oligonucleotide
  Antisense strand to SEQ ID NO: 2219876
acucuuacacauuaacuuu

SEQ ID NO: 2219878 - RNA, 19 nt, Artificial Sequence
  Description of Artificial Sequence: Synthetic oligonucleotide
  Sense strand starting at position 2845 of SEQ ID NO: 1883836
auaauaggaucggcuaaua

SEQ ID NO: 2219879 - RNA, 19 nt, Artificial Sequence
  Description of Artificial Sequence: Synthetic oligonucleotide
  Antisense strand to SEQ ID NO: 2219878
uauuagccgauccuauuau

SEQ ID NO: 2219880 - RNA, 19 nt, Artificial Sequence
  Description of Artificial Sequence: Synthetic oligonucleotide
  Sense strand starting at position 1823 of SEQ ID NO: 1883836
guccuuauccaacaacagu

SEQ ID NO: 2219881 - RNA, 19 nt, Artificial Sequence
  Description of Artificial Sequence: Synthetic oligonucleotide
  Antisense strand to SEQ ID NO: 2219880
acuguuguuggauaaggac

SEQ ID NO: 2219882 - RNA, 19 nt, Artificial Sequence
  Description of Artificial Sequence: Synthetic oligonucleotide
  Sense strand starting at position 2947 of SEQ ID NO: 1883836
agacaagcuguuuaaccuu

SEQ ID NO: 2219883 - RNA, 19 nt, Artificial Sequence
  Description of Artificial Sequence: Synthetic oligonucleotide
  Antisense strand to SEQ ID NO: 2219882
aagguuaaacagcuugucu

SEQ ID NO: 2219884 - RNA, 19 nt, Artificial Sequence
  Description of Artificial Sequence: Synthetic oligonucleotide
  Sense strand starting at position 2843 of SEQ ID NO: 1883836
uaauaauaggaucggcuaa

SEQ ID NO: 2219885 - RNA, 19 nt, Artificial Sequence
  Description of Artificial Sequence: Synthetic oligonucleotide
  Antisense strand to SEQ ID NO: 2219884
uuagccgauccuauuauua

SEQ ID NO: 2219886 - RNA, 19 nt, Artificial Sequence
  Description of Artificial Sequence: Synthetic oligonucleotide
  Sense strand starting at position 2040 of SEQ ID NO: 1883836
caaaguuaauguguaagag

SEQ ID NO: 2219887 - RNA, 19 nt, Artificial Sequence
  Description of Artificial Sequence: Synthetic oligonucleotide
  Antisense strand to SEQ ID NO: 2219886
cucuuacacauuaacuuug

SEQ ID NO: 2219888 - RNA, 19 nt, Artificial Sequence
  Description of Artificial Sequence: Synthetic oligonucleotide
  Sense strand starting at position 3458 of SEQ ID NO: 1883836
ugucgcuuugaggagagaa

SEQ ID NO: 2219889 - RNA, 19 nt, Artificial Sequence
  Description of Artificial Sequence: Synthetic oligonucleotide
  Antisense strand to SEQ ID NO: 2219888
uucucuccucaaagcgaca

SEQ ID NO: 2219890 - RNA, 19 nt, Artificial Sequence
  Description of Artificial Sequence: Synthetic oligonucleotide
  Sense strand starting at position 825 of SEQ ID NO: 1883836
cugaauaauguagguaacu

SEQ ID NO: 2219891 - RNA, 19 nt, Artificial Sequence
  Description of Artificial Sequence: Synthetic oligonucleotide
  Antisense strand to SEQ ID NO: 2219890
aguuaccuacauuauucag

SEQ ID NO: 2219892 - RNA, 19 nt, Artificial Sequence
  Description of Artificial Sequence: Synthetic oligonucleotide
  Sense strand starting at position 1641 of SEQ ID NO: 1883836
caaguuagucaucagugau

SEQ ID NO: 2219893 - RNA, 19 nt, Artificial Sequence
  Description of Artificial Sequence: Synthetic oligonucleotide
  Antisense strand to SEQ ID NO: 2219892
aucacugaugacuaacuug

SEQ ID NO: 2219894 - RNA, 19 nt, Artificial Sequence
  Description of Artificial Sequence: Synthetic oligonucleotide
  Sense strand starting at position 1164 of SEQ ID NO: 1883836
augagucuuccuuacuucu

SEQ ID NO: 2219895 - RNA, 19 nt, Artificial Sequence
  Description of Artificial Sequence: Synthetic oligonucleotide
  Antisense strand to SEQ ID NO: 2219894
agaaguaaggaagacucau

SEQ ID NO: 2219896 - RNA, 19 nt, Artificial Sequence
  Description of Artificial Sequence: Synthetic oligonucleotide
  Sense strand starting at position 2635 of SEQ ID NO: 1883836
cuacccagucuaggauauu

SEQ ID NO: 2219897 - RNA, 19 nt, Artificial Sequence
  Description of Artificial Sequence: Synthetic oligonucleotide
  Antisense strand to SEQ ID NO: 2219896
aauauccuagacuggguag

SEQ ID NO: 2219898 - RNA, 19 nt, Artificial Sequence
  Description of Artificial Sequence: Synthetic oligonucleotide
  Sense strand starting at position 1 of SEQ ID NO: 1883836
gauaaagaaguuuguucuu

SEQ ID NO: 2219899 - RNA, 19 nt, Artificial Sequence
  Description of Artificial Sequence: Synthetic oligonucleotide
  Antisense strand to SEQ ID NO: 2219898
aagaacaaacuucuuuauc

SEQ ID NO: 2219900 - RNA, 19 nt, Artificial Sequence
  Description of Artificial Sequence: Synthetic oligonucleotide
  Sense strand starting at position 3211 of SEQ ID NO: 1883836
aacagcucucgguagacua

SEQ ID NO: 2219901 - RNA, 19 nt, Artificial Sequence
  Description of Artificial Sequence: Synthetic oligonucleotide
  Antisense strand to SEQ ID NO: 2219900
uagucuaccgagagcuguu

SEQ ID NO: 2219902 - RNA, 19 nt, Artificial Sequence
  Description of Artificial Sequence: Synthetic oligonucleotide
  Sense strand starting at position 164 of SEQ ID NO: 1883836
aucuuuaagagcuacggua

SEQ ID NO: 2219903 - RNA, 19 nt, Artificial Sequence
  Description of Artificial Sequence: Synthetic oligonucleotide
  Antisense strand to SEQ ID NO: 2219902
uaccguagcucuuaaagau

SEQ ID NO: 2219904 - RNA, 19 nt, Artificial Sequence
  Description of Artificial Sequence: Synthetic oligonucleotide
  Sense strand starting at position 2283 of SEQ ID NO: 1883836
cauuccugguagguuaaga

SEQ ID NO: 2219905 - RNA, 19 nt, Artificial Sequence
  Description of Artificial Sequence: Synthetic oligonucleotide
  Antisense strand to SEQ ID NO: 2219904
ucuuaaccuaccaggaaug

SEQ ID NO: 2219906 - RNA, 19 nt, Artificial Sequence
  Description of Artificial Sequence: Synthetic oligonucleotide
  Sense strand starting at position 1668 of SEQ ID NO: 1883836
guccauuugucuuauauuu

SEQ ID NO: 2219907 - RNA, 19 nt, Artificial Sequence
  Description of Artificial Sequence: Synthetic oligonucleotide
  Antisense strand to SEQ ID NO: 2219906
aaauauaagacaaauggac

SEQ ID NO: 2219908 - RNA, 19 nt, Artificial Sequence
  Description of Artificial Sequence: Synthetic oligonucleotide
  Sense strand starting at position 2571 of SEQ ID NO: 1883836
acaccuuauucugugacau

SEQ ID NO: 2219909 - RNA, 19 nt, Artificial Sequence
  Description of Artificial Sequence: Synthetic oligonucleotide
  Antisense strand to SEQ ID NO: 2219908
augucacagaauaaggugu

SEQ ID NO: 2219910 - RNA, 19 nt, Artificial Sequence
  Description of Artificial Sequence: Synthetic oligonucleotide
  Sense strand starting at position 2244 of SEQ ID NO: 1883836
uuuacucccuuaucgagaa

SEQ ID NO: 2219911 - RNA, 19 nt, Artificial Sequence
  Description of Artificial Sequence: Synthetic oligonucleotide
  Antisense strand to SEQ ID NO: 2219910
uucucgauaagggaguaaa

SEQ ID NO: 2219912 - RNA, 19 nt, Artificial Sequence
  Description of Artificial Sequence: Synthetic oligonucleotide
  Sense strand starting at position 619 of SEQ ID NO: 1883836
guuauauucggugaaccca

SEQ ID NO: 2219913 - RNA, 19 nt, Artificial Sequence
  Description of Artificial Sequence: Synthetic oligonucleotide
  Antisense strand to SEQ ID NO: 2219912
uggguucaccgaauauaac

SEQ ID NO: 2219914 - RNA, 19 nt, Artificial Sequence
  Description of Artificial Sequence: Synthetic oligonucleotide
  Sense strand starting at position 1902 of SEQ ID NO: 1883836
agacuaacagucugucuua

SEQ ID NO: 2219915 - RNA, 19 nt, Artificial Sequence
  Description of Artificial Sequence: Synthetic oligonucleotide
  Antisense strand to SEQ ID NO: 2219914
uaagacagacuguuagucu

SEQ ID NO: 2219916 - RNA, 19 nt, Artificial Sequence
  Description of Artificial Sequence: Synthetic oligonucleotide
  Sense strand starting at position 2611 of SEQ ID NO: 1883836
gaauaaacuucugugguuc

SEQ ID NO: 2219917 - RNA, 19 nt, Artificial Sequence
  Description of Artificial Sequence: Synthetic oligonucleotide
  Antisense strand to SEQ ID NO: 2219916
gaaccacagaaguuuauuc

SEQ ID NO: 2219918 - RNA, 19 nt, Artificial Sequence
  Description of Artificial Sequence: Synthetic oligonucleotide
  Sense strand starting at position 1790 of SEQ ID NO: 1883836
guuagaucugcacauucuu

SEQ ID NO: 2219919 - RNA, 19 nt, Artificial Sequence
  Description of Artificial Sequence: Synthetic oligonucleotide
  Antisense strand to SEQ ID NO: 2219918
aagaaugugcagaucuaac

SEQ ID NO: 2219920 - RNA, 19 nt, Artificial Sequence
  Description of Artificial Sequence: Synthetic oligonucleotide
  Sense strand starting at position 2876 of SEQ ID NO: 1883836
augcaugaagccuaguauu

SEQ ID NO: 2219921 - RNA, 19 nt, Artificial Sequence
  Description of Artificial Sequence: Synthetic oligonucleotide
  Antisense strand to SEQ ID NO: 2219920
aauacuaggcuucaugcau

SEQ ID NO: 2219922 - RNA, 19 nt, Artificial Sequence
  Description of Artificial Sequence: Synthetic oligonucleotide
  Sense strand starting at position 1905 of SEQ ID NO: 1883836
cuaacagucugucuuaaca

SEQ ID NO: 2219923 - RNA, 19 nt, Artificial Sequence
  Description of Artificial Sequence: Synthetic oligonucleotide
  Antisense strand to SEQ ID NO: 2219922
uguuaagacagacuguuag

SEQ ID NO: 2219924 - RNA, 19 nt, Artificial Sequence
  Description of Artificial Sequence: Synthetic oligonucleotide
  Sense strand starting at position 3695 of SEQ ID NO: 1883836
ucgagacucucauucuauu

SEQ ID NO: 2219925 - RNA, 19 nt, Artificial Sequence
  Description of Artificial Sequence: Synthetic oligonucleotide
  Antisense strand to SEQ ID NO: 2219924
aauagaaugagagucucga

SEQ ID NO: 2219926 - RNA, 19 nt, Artificial Sequence
  Description of Artificial Sequence: Synthetic oligonucleotide
  Sense strand starting at position 740 of SEQ ID NO: 1883837
uguugugucagccuuaagu

SEQ ID NO: 2219927 - RNA, 19 nt, Artificial Sequence
  Description of Artificial Sequence: Synthetic oligonucleotide
  Antisense strand to SEQ ID NO: 2219926
acuuaaggcugacacaaca

SEQ ID NO: 2219928 - RNA, 19 nt, Artificial Sequence
  Description of Artificial Sequence: Synthetic oligonucleotide
  Sense strand starting at position 3687 of SEQ ID NO: 1883837
aaagaagcucaguagguua

SEQ ID NO: 2219929 - RNA, 19 nt, Artificial Sequence
  Description of Artificial Sequence: Synthetic oligonucleotide
  Antisense strand to SEQ ID NO: 2219928
uaaccuacugagcuucuuu

SEQ ID NO: 2219930 - RNA, 19 nt, Artificial Sequence
  Description of Artificial Sequence: Synthetic oligonucleotide
  Sense strand starting at position 2838 of SEQ ID NO: 1883837
aagguuguucgggaaugga

SEQ ID NO: 2219931 - RNA, 19 nt, Artificial Sequence
  Description of Artificial Sequence: Synthetic oligonucleotide
  Antisense strand to SEQ ID NO: 2219930
uccauucccgaacaaccuu

SEQ ID NO: 2219932 - RNA, 19 nt, Artificial Sequence
  Description of Artificial Sequence: Synthetic oligonucleotide
  Sense strand starting at position 2379 of SEQ ID NO: 1883837
gagaacuuccuguaaguug

SEQ ID NO: 2219933 - RNA, 19 nt, Artificial Sequence
  Description of Artificial Sequence: Synthetic oligonucleotide
  Antisense strand to SEQ ID NO: 2219932
caacuuacaggaaguucuc

SEQ ID NO: 2219934 - RNA, 19 nt, Artificial Sequence
  Description of Artificial Sequence: Synthetic oligonucleotide
  Sense strand starting at position 3775 of SEQ ID NO: 1883837
guaaucaaaugaguuagau

SEQ ID NO: 2219935 - RNA, 19 nt, Artificial Sequence
  Description of Artificial Sequence: Synthetic oligonucleotide
  Antisense strand to SEQ ID NO: 2219934
aucuaacucauuugauuac

SEQ ID NO: 2219936 - RNA, 19 nt, Artificial Sequence
  Description of Artificial Sequence: Synthetic oligonucleotide
  Sense strand starting at position 3858 of SEQ ID NO: 1883837
gagaaagggcuuuguaaag

SEQ ID NO: 2219937 - RNA, 19 nt, Artificial Sequence
  Description of Artificial Sequence: Synthetic oligonucleotide
  Antisense strand to SEQ ID NO: 2219936
cuuuacaaagcccuuucuc

SEQ ID NO: 2219938 - RNA, 19 nt, Artificial Sequence
  Description of Artificial Sequence: Synthetic oligonucleotide
  Sense strand starting at position 933 of SEQ ID NO: 1883837
aagagcagugcauaaauua

SEQ ID NO: 2219939 - RNA, 19 nt, Artificial Sequence
  Description of Artificial Sequence: Synthetic oligonucleotide
  Antisense strand to SEQ ID NO: 2219938
uaauuuaugcacugcucuu

SEQ ID NO: 2219940 - RNA, 19 nt, Artificial Sequence
  Description of Artificial Sequence: Synthetic oligonucleotide
  Sense strand starting at position 931 of SEQ ID NO: 1883837
acaagagcagugcauaaau

SEQ ID NO: 2219941 - RNA, 19 nt, Artificial Sequence
  Description of Artificial Sequence: Synthetic oligonucleotide
  Antisense strand to SEQ ID NO: 2219940
auuuaugcacugcucuugu

SEQ ID NO: 2219942 - RNA, 19 nt, Artificial Sequence
  Description of Artificial Sequence: Synthetic oligonucleotide
  Sense strand starting at position 2791 of SEQ ID NO: 1883837
ggauucuuaggguaggcau

SEQ ID NO: 2219943 - RNA, 19 nt, Artificial Sequence
  Description of Artificial Sequence: Synthetic oligonucleotide
  Antisense strand to SEQ ID NO: 2219942
augccuacccuaagaaucc

SEQ ID NO: 2219944 - RNA, 19 nt, Artificial Sequence
  Description of Artificial Sequence: Synthetic oligonucleotide
  Sense strand starting at position 2555 of SEQ ID NO: 1883837
gagauugacguguaugaug

SEQ ID NO: 2219945 - RNA, 19 nt, Artificial Sequence
  Description of Artificial Sequence: Synthetic oligonucleotide
  Antisense strand to SEQ ID NO: 2219944
caucauacacgucaaucuc

SEQ ID NO: 2219946 - RNA, 19 nt, Artificial Sequence
  Description of Artificial Sequence: Synthetic oligonucleotide
  Sense strand starting at position 3038 of SEQ ID NO: 1883837
ucauuuguuccaggucuuu

SEQ ID NO: 2219947 - RNA, 19 nt, Artificial Sequence
  Description of Artificial Sequence: Synthetic oligonucleotide
  Antisense strand to SEQ ID NO: 2219946
aaagaccuggaacaaauga

SEQ ID NO: 2219948 - RNA, 19 nt, Artificial Sequence
  Description of Artificial Sequence: Synthetic oligonucleotide
  Sense strand starting at position 1286 of SEQ ID NO: 1883837
caguuucuuguagauuaga

SEQ ID NO: 2219949 - RNA, 19 nt, Artificial Sequence
  Description of Artificial Sequence: Synthetic oligonucleotide
  Antisense strand to SEQ ID NO: 2219948
ucuaaucuacaagaaacug

SEQ ID NO: 2219950 - RNA, 19 nt, Artificial Sequence
  Description of Artificial Sequence: Synthetic oligonucleotide
  Sense strand starting at position 955 of SEQ ID NO: 1883837
cgauuagauuaguuauaga

SEQ ID NO: 2219951 - RNA, 19 nt, Artificial Sequence
  Description of Artificial Sequence: Synthetic oligonucleotide
  Antisense strand to SEQ ID NO: 2219950
ucuauaacuaaucuaaucg

SEQ ID NO: 2219952 - RNA, 19 nt, Artificial Sequence
  Description of Artificial Sequence: Synthetic oligonucleotide
  Sense strand starting at position 715 of SEQ ID NO: 1883837
acagucugacauuaugcua

SEQ ID NO: 2219953 - RNA, 19 nt, Artificial Sequence
  Description of Artificial Sequence: Synthetic oligonucleotide
  Antisense strand to SEQ ID NO: 2219952
uagcauaaugucagacugu

SEQ ID NO: 2219954 - RNA, 19 nt, Artificial Sequence
  Description of Artificial Sequence: Synthetic oligonucleotide
  Sense strand starting at position 1348 of SEQ ID NO: 1883837
gugugcugccuccucuuua

SEQ ID NO: 2219955 - RNA, 19 nt, Artificial Sequence
  Description of Artificial Sequence: Synthetic oligonucleotide
  Antisense strand to SEQ ID NO: 2219954
uaaagaggaggcagcacac

SEQ ID NO: 2219956 - RNA, 19 nt, Artificial Sequence
  Description of Artificial Sequence: Synthetic oligonucleotide
  Sense strand starting at position 3824 of SEQ ID NO: 1883837
aaaggaugaagugguuagu

SEQ ID NO: 2219957 - RNA, 19 nt, Artificial Sequence
  Description of Artificial Sequence: Synthetic oligonucleotide
  Antisense strand to SEQ ID NO: 2219956
acuaaccacuucauccuuu

SEQ ID NO: 2219958 - RNA, 19 nt, Artificial Sequence
  Description of Artificial Sequence: Synthetic oligonucleotide
  Sense strand starting at position 1052 of SEQ ID NO: 1883837
uuuggucuuccugauuaua

SEQ ID NO: 2219959 - RNA, 19 nt, Artificial Sequence
  Description of Artificial Sequence: Synthetic oligonucleotide
  Antisense strand to SEQ ID NO: 2219958
uauaaucaggaagaccaaa

SEQ ID NO: 2219960 - RNA, 19 nt, Artificial Sequence
  Description of Artificial Sequence: Synthetic oligonucleotide
  Sense strand starting at position 2562 of SEQ ID NO: 1883837
acguguaugauguaggaga

SEQ ID NO: 2219961 - RNA, 19 nt, Artificial Sequence
  Description of Artificial Sequence: Synthetic oligonucleotide
  Antisense strand to SEQ ID NO: 2219960
ucuccuacaucauacacgu

SEQ ID NO: 2219962 - RNA, 19 nt, Artificial Sequence
  Description of Artificial Sequence: Synthetic oligonucleotide
  Sense strand starting at position 3843 of SEQ ID NO: 1883837
uuugucuacgaguaugaga

SEQ ID NO: 2219963 - RNA, 19 nt, Artificial Sequence
  Description of Artificial Sequence: Synthetic oligonucleotide
  Antisense strand to SEQ ID NO: 2219962
ucucauacucguagacaaa

SEQ ID NO: 2219964 - RNA, 19 nt, Artificial Sequence
  Description of Artificial Sequence: Synthetic oligonucleotide
  Sense strand starting at position 2704 of SEQ ID NO: 1883837
ggcccuggucuggaauuca

SEQ ID NO: 2219965 - RNA, 19 nt, Artificial Sequence
  Description of Artificial Sequence: Synthetic oligonucleotide
  Antisense strand to SEQ ID NO: 2219964
ugaauuccagaccagggcc

SEQ ID NO: 2219966 - RNA, 19 nt, Artificial Sequence
  Description of Artificial Sequence: Synthetic oligonucleotide
  Sense strand starting at position 952 of SEQ ID NO: 1883837
cagcgauuagauuaguuau

SEQ ID NO: 2219967 - RNA, 19 nt, Artificial Sequence
  Description of Artificial Sequence: Synthetic oligonucleotide
  Antisense strand to SEQ ID NO: 2219966
auaacuaaucuaaucgcug

SEQ ID NO: 2219968 - RNA, 19 nt, Artificial Sequence
  Description of Artificial Sequence: Synthetic oligonucleotide
  Sense strand starting at position 1897 of SEQ ID NO: 1883837
ugccgaaauauacggagaa

SEQ ID NO: 2219969 - RNA, 19 nt, Artificial Sequence
  Description of Artificial Sequence: Synthetic oligonucleotide
  Antisense strand to SEQ ID NO: 2219968
uucuccguauauuucggca

SEQ ID NO: 2219970 - RNA, 19 nt, Artificial Sequence
  Description of Artificial Sequence: Synthetic oligonucleotide
  Sense strand starting at position 3686 of SEQ ID NO: 1883837
gaaagaagcucaguagguu

SEQ ID NO: 2219971 - RNA, 19 nt, Artificial Sequence
  Description of Artificial Sequence: Synthetic oligonucleotide
  Antisense strand to SEQ ID NO: 2219970
aaccuacugagcuucuuuc

SEQ ID NO: 2219972 - RNA, 19 nt, Artificial Sequence
  Description of Artificial Sequence: Synthetic oligonucleotide
  Sense strand starting at position 1466 of SEQ ID NO: 1883837
gcggaaguuuaaccagaga

SEQ ID NO: 2219973 - RNA, 19 nt, Artificial Sequence
  Description of Artificial Sequence: Synthetic oligonucleotide
  Antisense strand to SEQ ID NO: 2219972
ucucugguuaaacuuccgc

SEQ ID NO: 2219974 - RNA, 19 nt, Artificial Sequence
  Description of Artificial Sequence: Synthetic oligonucleotide
  Sense strand starting at position 2564 of SEQ ID NO: 1883837
guguaugauguaggagaug

SEQ ID NO: 2219975 - RNA, 19 nt, Artificial Sequence
  Description of Artificial Sequence: Synthetic oligonucleotide
  Antisense strand to SEQ ID NO: 2219974
caucuccuacaucauacac

SEQ ID NO: 2219976 - RNA, 19 nt, Artificial Sequence
  Description of Artificial Sequence: Synthetic oligonucleotide
  Sense strand starting at position 965 of SEQ ID NO: 1883837
aguuauagauagcuacauu

SEQ ID NO: 2219977 - RNA, 19 nt, Artificial Sequence
  Description of Artificial Sequence: Synthetic oligonucleotide
  Antisense strand to SEQ ID NO: 2219976
aauguagcuaucuauaacu

SEQ ID NO: 2219978 - RNA, 19 nt, Artificial Sequence
  Description of Artificial Sequence: Synthetic oligonucleotide
  Sense strand starting at position 3845 of SEQ ID NO: 1883837
ugucuacgaguaugagaaa

SEQ ID NO: 2219979 - RNA, 19 nt, Artificial Sequence
  Description of Artificial Sequence: Synthetic oligonucleotide
  Antisense strand to SEQ ID NO: 2219978
uuucucauacucguagaca

SEQ ID NO: 2219980 - RNA, 19 nt, Artificial Sequence
  Description of Artificial Sequence: Synthetic oligonucleotide
  Sense strand starting at position 1373 of SEQ ID NO: 1883837
gggcuuacuagaugaaugu

SEQ ID NO: 2219981 - RNA, 19 nt, Artificial Sequence
  Description of Artificial Sequence: Synthetic oligonucleotide
  Antisense strand to SEQ ID NO: 2219980
acauucaucuaguaagccc

SEQ ID NO: 2219982 - RNA, 19 nt, Artificial Sequence
  Description of Artificial Sequence: Synthetic oligonucleotide
  Sense strand starting at position 3880 of SEQ ID NO: 1883837
auaugaaagucuuuggucu

SEQ ID NO: 2219983 - RNA, 19 nt, Artificial Sequence
  Description of Artificial Sequence: Synthetic oligonucleotide
  Antisense strand to SEQ ID NO: 2219982
agaccaaagacuuucauau

SEQ ID NO: 2219984 - RNA, 19 nt, Artificial Sequence
  Description of Artificial Sequence: Synthetic oligonucleotide
  Sense strand starting at position 1132 of SEQ ID NO: 1883837
cuucgcaaggcucagaaua

SEQ ID NO: 2219985 - RNA, 19 nt, Artificial Sequence
  Description of Artificial Sequence: Synthetic oligonucleotide
  Antisense strand to SEQ ID NO: 2219984
uauucugagccuugcgaag

SEQ ID NO: 2219986 - RNA, 19 nt, Artificial Sequence
  Description of Artificial Sequence: Synthetic oligonucleotide
  Sense strand starting at position 1361 of SEQ ID NO: 1883837
ucuuuaacgagagggcuua

SEQ ID NO: 2219987 - RNA, 19 nt, Artificial Sequence
  Description of Artificial Sequence: Synthetic oligonucleotide
  Antisense strand to SEQ ID NO: 2219986
uaagcccucucguuaaaga

SEQ ID NO: 2219988 - RNA, 19 nt, Artificial Sequence
  Description of Artificial Sequence: Synthetic oligonucleotide
  Sense strand starting at position 2974 of SEQ ID NO: 1883837
uaguuaccgcuuuagaauu

SEQ ID NO: 2219989 - RNA, 19 nt, Artificial Sequence
  Description of Artificial Sequence: Synthetic oligonucleotide
  Antisense strand to SEQ ID NO: 2219988
aauucuaaagcgguaacua

SEQ ID NO: 2219990 - RNA, 19 nt, Artificial Sequence
  Description of Artificial Sequence: Synthetic oligonucleotide
  Sense strand starting at position 954 of SEQ ID NO: 1883837
gcgauuagauuaguuauag

SEQ ID NO: 2219991 - RNA, 19 nt, Artificial Sequence
  Description of Artificial Sequence: Synthetic oligonucleotide
  Antisense strand to SEQ ID NO: 2219990
cuauaacuaaucuaaucgc

SEQ ID NO: 2219992 - RNA, 19 nt, Artificial Sequence
  Description of Artificial Sequence: Synthetic oligonucleotide
  Sense strand starting at position 2834 of SEQ ID NO: 1883837
gguaaagguuguucgggaa

SEQ ID NO: 2219993 - RNA, 19 nt, Artificial Sequence
  Description of Artificial Sequence: Synthetic oligonucleotide
  Antisense strand to SEQ ID NO: 2219992
uucccgaacaaccuuuacc

SEQ ID NO: 2219994 - RNA, 19 nt, Artificial Sequence
  Description of Artificial Sequence: Synthetic oligonucleotide
  Sense strand starting at position 592 of SEQ ID NO: 1883837
uucucagaucgucacaguu

SEQ ID NO: 2219995 - RNA, 19 nt, Artificial Sequence
  Description of Artificial Sequence: Synthetic oligonucleotide
  Antisense strand to SEQ ID NO: 2219994
aacugugacgaucugagaa

SEQ ID NO: 2219996 - RNA, 19 nt, Artificial Sequence
  Description of Artificial Sequence: Synthetic oligonucleotide
  Sense strand starting at position 3881 of SEQ ID NO: 1883837
uaugaaagucuuuggucuu

SEQ ID NO: 2219997 - RNA, 19 nt, Artificial Sequence
  Description of Artificial Sequence: Synthetic oligonucleotide
  Antisense strand to SEQ ID NO: 2219996
aagaccaaagacuuucaua

SEQ ID NO: 2219998 - RNA, 19 nt, Artificial Sequence
  Description of Artificial Sequence: Synthetic oligonucleotide
  Sense strand starting at position 718 of SEQ ID NO: 1883837
gucugacauuaugcuaauc

SEQ ID NO: 2219999 - RNA, 19 nt, Artificial Sequence
  Description of Artificial Sequence: Synthetic oligonucleotide
  Antisense strand to SEQ ID NO: 2219998
gauuagcauaaugucagac

SEQ ID NO: 2220000 - RNA, 19 nt, Artificial Sequence
  Description of Artificial Sequence: Synthetic oligonucleotide
  Sense strand starting at position 709 of SEQ ID NO: 1883837
ccugucacagucugacauu

SEQ ID NO: 2220001 - RNA, 19 nt, Artificial Sequence
  Description of Artificial Sequence: Synthetic oligonucleotide
  Antisense strand to SEQ ID NO: 2220000
aaugucagacugugacagg

SEQ ID NO: 2220002 - RNA, 19 nt, Artificial Sequence
  Description of Artificial Sequence: Synthetic oligonucleotide
  Sense strand starting at position 742 of SEQ ID NO: 1883837
uugugucagccuuaaguag

SEQ ID NO: 2220003 - RNA, 19 nt, Artificial Sequence
  Description of Artificial Sequence: Synthetic oligonucleotide
  Antisense strand to SEQ ID NO: 2220002
cuacuuaaggcugacacaa

SEQ ID NO: 2220004 - RNA, 19 nt, Artificial Sequence
  Description of Artificial Sequence: Synthetic oligonucleotide
  Sense strand starting at position 2557 of SEQ ID NO: 1883837
gauugacguguaugaugua

SEQ ID NO: 2220005 - RNA, 19 nt, Artificial Sequence
  Description of Artificial Sequence: Synthetic oligonucleotide
  Antisense strand to SEQ ID NO: 2220004
uacaucauacacgucaauc

SEQ ID NO: 2220006 - RNA, 19 nt, Artificial Sequence
  Description of Artificial Sequence: Synthetic oligonucleotide
  Sense strand starting at position 3807 of SEQ ID NO: 1883838
gcugauauuuggcccuaac

SEQ ID NO: 2220007 - RNA, 19 nt, Artificial Sequence
  Description of Artificial Sequence: Synthetic oligonucleotide
  Antisense strand to SEQ ID NO: 2220006
guuagggccaaauaucagc

SEQ ID NO: 2220008 - RNA, 19 nt, Artificial Sequence
  Description of Artificial Sequence: Synthetic oligonucleotide
  Sense strand starting at position 3806 of SEQ ID NO: 1883838
ugcugauauuuggcccuaa

SEQ ID NO: 2220009 - RNA, 19 nt, Artificial Sequence
  Description of Artificial Sequence: Synthetic oligonucleotide
  Antisense strand to SEQ ID NO: 2220008
uuagggccaaauaucagca

SEQ ID NO: 2220010 - RNA, 19 nt, Artificial Sequence
  Description of Artificial Sequence: Synthetic oligonucleotide
  Sense strand starting at position 695 of SEQ ID NO: 1883838
uguccuguugaagacuaaa

SEQ ID NO: 2220011 - RNA, 19 nt, Artificial Sequence
  Description of Artificial Sequence: Synthetic oligonucleotide
  Antisense strand to SEQ ID NO: 2220010
uuuagucuucaacaggaca

SEQ ID NO: 2220012 - RNA, 19 nt, Artificial Sequence
  Description of Artificial Sequence: Synthetic oligonucleotide
  Sense strand starting at position 810 of SEQ ID NO: 1883838
cuuaguuacauuggaggau

SEQ ID NO: 2220013 - RNA, 19 nt, Artificial Sequence
  Description of Artificial Sequence: Synthetic oligonucleotide
  Antisense strand to SEQ ID NO: 2220012
auccuccaauguaacuaag

SEQ ID NO: 2220014 - RNA, 19 nt, Artificial Sequence
  Description of Artificial Sequence: Synthetic oligonucleotide
  Sense strand starting at position 3674 of SEQ ID NO: 1883838
gagugagaucuggaguugu

SEQ ID NO: 2220015 - RNA, 19 nt, Artificial Sequence
  Description of Artificial Sequence: Synthetic oligonucleotide
  Antisense strand to SEQ ID NO: 2220014
acaacuccagaucucacuc

SEQ ID NO: 2220016 - RNA, 19 nt, Artificial Sequence
  Description of Artificial Sequence: Synthetic oligonucleotide
  Sense strand starting at position 225 of SEQ ID NO: 1883838
caagaaugcuuggcaaaga

SEQ ID NO: 2220017 - RNA, 19 nt, Artificial Sequence
  Description of Artificial Sequence: Synthetic oligonucleotide
  Antisense strand to SEQ ID NO: 2220016
ucuuugccaagcauucuug

SEQ ID NO: 2220018 - RNA, 19 nt, Artificial Sequence
  Description of Artificial Sequence: Synthetic oligonucleotide
  Sense strand starting at position 2938 of SEQ ID NO: 1883838
gcaggagcuggugauaaau

SEQ ID NO: 2220019 - RNA, 19 nt, Artificial Sequence
  Description of Artificial Sequence: Synthetic oligonucleotide
  Antisense strand to SEQ ID NO: 2220018
auuuaucaccagcuccugc

SEQ ID NO: 2220020 - RNA, 19 nt, Artificial Sequence
  Description of Artificial Sequence: Synthetic oligonucleotide
  Sense strand starting at position 224 of SEQ ID NO: 1883838
acaagaaugcuuggcaaag

SEQ ID NO: 2220021 - RNA, 19 nt, Artificial Sequence
  Description of Artificial Sequence: Synthetic oligonucleotide
  Antisense strand to SEQ ID NO: 2220020
cuuugccaagcauucuugu

SEQ ID NO: 2220022 - RNA, 19 nt, Artificial Sequence
  Description of Artificial Sequence: Synthetic oligonucleotide
  Sense strand starting at position 3672 of SEQ ID NO: 1883838
uggagugagaucuggaguu

SEQ ID NO: 2220023 - RNA, 19 nt, Artificial Sequence
  Description of Artificial Sequence: Synthetic oligonucleotide
  Antisense strand to SEQ ID NO: 2220022
aacuccagaucucacucca

SEQ ID NO: 2220024 - RNA, 19 nt, Artificial Sequence
  Description of Artificial Sequence: Synthetic oligonucleotide
  Sense strand starting at position 823 of SEQ ID NO: 1883838
gaggauugacccuguucca

SEQ ID NO: 2220025 - RNA, 19 nt, Artificial Sequence
  Description of Artificial Sequence: Synthetic oligonucleotide
  Antisense strand to SEQ ID NO: 2220024
uggaacagggucaauccuc

SEQ ID NO: 2220026 - RNA, 19 nt, Artificial Sequence
  Description of Artificial Sequence: Synthetic oligonucleotide
  Sense strand starting at position 3951 of SEQ ID NO: 1883838
ggcucugauccuggaacua

SEQ ID NO: 2220027 - RNA, 19 nt, Artificial Sequence
  Description of Artificial Sequence: Synthetic oligonucleotide
  Antisense strand to SEQ ID NO: 2220026
uaguuccaggaucagagcc

SEQ ID NO: 2220028 - RNA, 19 nt, Artificial Sequence
  Description of Artificial Sequence: Synthetic oligonucleotide
  Sense strand starting at position 540 of SEQ ID NO: 1883838
acagaugccuguccacaaa

SEQ ID NO: 2220029 - RNA, 19 nt, Artificial Sequence
  Description of Artificial Sequence: Synthetic oligonucleotide
  Antisense strand to SEQ ID NO: 2220028
uuuguggacaggcaucugu

SEQ ID NO: 2220030 - RNA, 19 nt, Artificial Sequence
  Description of Artificial Sequence: Synthetic oligonucleotide
  Sense strand starting at position 692 of SEQ ID NO: 1883838
caguguccuguugaagacu

SEQ ID NO: 2220031 - RNA, 19 nt, Artificial Sequence
  Description of Artificial Sequence: Synthetic oligonucleotide
  Antisense strand to SEQ ID NO: 2220030
agucuucaacaggacacug

SEQ ID NO: 2220032 - RNA, 19 nt, Artificial Sequence
  Description of Artificial Sequence: Synthetic oligonucleotide
  Sense strand starting at position 3841 of SEQ ID NO: 1883838
ggaacugguccuggcuaga

SEQ ID NO: 2220033 - RNA, 19 nt, Artificial Sequence
  Description of Artificial Sequence: Synthetic oligonucleotide
  Antisense strand to SEQ ID NO: 2220032
ucuagccaggaccaguucc

SEQ ID NO: 2220034 - RNA, 19 nt, Artificial Sequence
  Description of Artificial Sequence: Synthetic oligonucleotide
  Sense strand starting at position 1045 of SEQ ID NO: 1883838
ugaaacccgucucucuaaa

SEQ ID NO: 2220035 - RNA, 19 nt, Artificial Sequence
  Description of Artificial Sequence: Synthetic oligonucleotide
  Antisense strand to SEQ ID NO: 2220034
uuuagagagacggguuuca

SEQ ID NO: 2220036 - RNA, 19 nt, Artificial Sequence
  Description of Artificial Sequence: Synthetic oligonucleotide
  Sense strand starting at position 337 of SEQ ID NO: 1883838
cggcaugauccagcgcgua

SEQ ID NO: 2220037 - RNA, 19 nt, Artificial Sequence
  Description of Artificial Sequence: Synthetic oligonucleotide
  Antisense strand to SEQ ID NO: 2220036
uacgcgcuggaucaugccg

SEQ ID NO: 2220038 - RNA, 19 nt, Artificial Sequence
  Description of Artificial Sequence: Synthetic oligonucleotide
  Sense strand starting at position 1654 of SEQ ID NO: 1883838
ggugccuuucucuaagauc

SEQ ID NO: 2220039 - RNA, 19 nt, Artificial Sequence
  Description of Artificial Sequence: Synthetic oligonucleotide
  Antisense strand to SEQ ID NO: 2220038
gaucuuagagaaaggcacc

SEQ ID NO: 2220040 - RNA, 19 nt, Artificial Sequence
  Description of Artificial Sequence: Synthetic oligonucleotide
  Sense strand starting at position 3250 of SEQ ID NO: 1883838
agcuguguugcuguugcua

SEQ ID NO: 2220041 - RNA, 19 nt, Artificial Sequence
  Description of Artificial Sequence: Synthetic oligonucleotide
  Antisense strand to SEQ ID NO: 2220040
uagcaacagcaacacagcu

SEQ ID NO: 2220042 - RNA, 19 nt, Artificial Sequence
  Description of Artificial Sequence: Synthetic oligonucleotide
  Sense strand starting at position 3414 of SEQ ID NO: 1883838
uggagcugccucuaauucu

SEQ ID NO: 2220043 - RNA, 19 nt, Artificial Sequence
  Description of Artificial Sequence: Synthetic oligonucleotide
  Antisense strand to SEQ ID NO: 2220042
agaauuagaggcagcucca

SEQ ID NO: 2220044 - RNA, 19 nt, Artificial Sequence
  Description of Artificial Sequence: Synthetic oligonucleotide
  Sense strand starting at position 3267 of SEQ ID NO: 1883838
uagucuuugcccugggaaa

SEQ ID NO: 2220045 - RNA, 19 nt, Artificial Sequence
  Description of Artificial Sequence: Synthetic oligonucleotide
  Antisense strand to SEQ ID NO: 2220044
uuucccagggcaaagacua

SEQ ID NO: 2220046 - RNA, 19 nt, Artificial Sequence
  Description of Artificial Sequence: Synthetic oligonucleotide
  Sense strand starting at position 3816 of SEQ ID NO: 1883838
uggcccuaaccaugcaaau

SEQ ID NO: 2220047 - RNA, 19 nt, Artificial Sequence
  Description of Artificial Sequence: Synthetic oligonucleotide
  Antisense strand to SEQ ID NO: 2220046
auuugcaugguuagggcca

SEQ ID NO: 2220048 - RNA, 19 nt, Artificial Sequence
  Description of Artificial Sequence: Synthetic oligonucleotide
  Sense strand starting at position 3612 of SEQ ID NO: 1883838
cagauuuggugauagagcu

SEQ ID NO: 2220049 - RNA, 19 nt, Artificial Sequence
  Description of Artificial Sequence: Synthetic oligonucleotide
  Antisense strand to SEQ ID NO: 2220048
agcucuaucaccaaaucug

SEQ ID NO: 2220050 - RNA, 19 nt, Artificial Sequence
  Description of Artificial Sequence: Synthetic oligonucleotide
  Sense strand starting at position 1653 of SEQ ID NO: 1883838
gggugccuuucucuaagau

SEQ ID NO: 2220051 - RNA, 19 nt, Artificial Sequence
  Description of Artificial Sequence: Synthetic oligonucleotide
  Antisense strand to SEQ ID NO: 2220050
aucuuagagaaaggcaccc

SEQ ID NO: 2220052 - RNA, 19 nt, Artificial Sequence
  Description of Artificial Sequence: Synthetic oligonucleotide
  Sense strand starting at position 3297 of SEQ ID NO: 1883838
ugguccuagcucuggauau

SEQ ID NO: 2220053 - RNA, 19 nt, Artificial Sequence
  Description of Artificial Sequence: Synthetic oligonucleotide
  Antisense strand to SEQ ID NO: 2220052
auauccagagcuaggacca

SEQ ID NO: 2220054 - RNA, 19 nt, Artificial Sequence
  Description of Artificial Sequence: Synthetic oligonucleotide
  Sense strand starting at position 3325 of SEQ ID NO: 1883838
gcugguucuugauuggauu

SEQ ID NO: 2220055 - RNA, 19 nt, Artificial Sequence
  Description of Artificial Sequence: Synthetic oligonucleotide
  Antisense strand to SEQ ID NO: 2220054
aauccaaucaagaaccagc

SEQ ID NO: 2220056 - RNA, 19 nt, Artificial Sequence
  Description of Artificial Sequence: Synthetic oligonucleotide
  Sense strand starting at position 602 of SEQ ID NO: 1883838
gaacgcugagcguagacau

SEQ ID NO: 2220057 - RNA, 19 nt, Artificial Sequence
  Description of Artificial Sequence: Synthetic oligonucleotide
  Antisense strand to SEQ ID NO: 2220056
augucuacgcucagcguuc

SEQ ID NO: 2220058 - RNA, 19 nt, Artificial Sequence
  Description of Artificial Sequence: Synthetic oligonucleotide
  Sense strand starting at position 3705 of SEQ ID NO: 1883838
cauaguucuugagcuggua

SEQ ID NO: 2220059 - RNA, 19 nt, Artificial Sequence
  Description of Artificial Sequence: Synthetic oligonucleotide
  Antisense strand to SEQ ID NO: 2220058
uaccagcucaagaacuaug

SEQ ID NO: 2220060 - RNA, 19 nt, Artificial Sequence
  Description of Artificial Sequence: Synthetic oligonucleotide
  Sense strand starting at position 3430 of SEQ ID NO: 1883838
ucugguucugguuguggaa

SEQ ID NO: 2220061 - RNA, 19 nt, Artificial Sequence
  Description of Artificial Sequence: Synthetic oligonucleotide
  Antisense strand to SEQ ID NO: 2220060
uuccacaaccagaaccaga

SEQ ID NO: 2220062 - RNA, 19 nt, Artificial Sequence
  Description of Artificial Sequence: Synthetic oligonucleotide
  Sense strand starting at position 3445 of SEQ ID NO: 1883838
ggaaucagccaucgcuuua

SEQ ID NO: 2220063 - RNA, 19 nt, Artificial Sequence
  Description of Artificial Sequence: Synthetic oligonucleotide
  Antisense strand to SEQ ID NO: 2220062
uaaagcgauggcugauucc

SEQ ID NO: 2220064 - RNA, 19 nt, Artificial Sequence
  Description of Artificial Sequence: Synthetic oligonucleotide
  Sense strand starting at position 203 of SEQ ID NO: 1883838
accuccuucccguguuaaa

SEQ ID NO: 2220065 - RNA, 19 nt, Artificial Sequence
  Description of Artificial Sequence: Synthetic oligonucleotide
  Antisense strand to SEQ ID NO: 2220064
uuuaacacgggaaggaggu

SEQ ID NO: 2220066 - RNA, 19 nt, Artificial Sequence
  Description of Artificial Sequence: Synthetic oligonucleotide
  Sense strand starting at position 3607 of SEQ ID NO: 1883838
ggcaccagauuuggugaua

SEQ ID NO: 2220067 - RNA, 19 nt, Artificial Sequence
  Description of Artificial Sequence: Synthetic oligonucleotide
  Antisense strand to SEQ ID NO: 2220066
uaucaccaaaucuggugcc

SEQ ID NO: 2220068 - RNA, 19 nt, Artificial Sequence
  Description of Artificial Sequence: Synthetic oligonucleotide
  Sense strand starting at position 3265 of SEQ ID NO: 1883838
gcuagucuuugcccuggga

SEQ ID NO: 2220069 - RNA, 19 nt, Artificial Sequence
  Description of Artificial Sequence: Synthetic oligonucleotide
  Antisense strand to SEQ ID NO: 2220068
ucccagggcaaagacuagc

SEQ ID NO: 2220070 - RNA, 19 nt, Artificial Sequence
  Description of Artificial Sequence: Synthetic oligonucleotide
  Sense strand starting at position 226 of SEQ ID NO: 1883838
aagaaugcuuggcaaagaa

SEQ ID NO: 2220071 - RNA, 19 nt, Artificial Sequence
  Description of Artificial Sequence: Synthetic oligonucleotide
  Antisense strand to SEQ ID NO: 2220070
uucuuugccaagcauucuu

SEQ ID NO: 2220072 - RNA, 19 nt, Artificial Sequence
  Description of Artificial Sequence: Synthetic oligonucleotide
  Sense strand starting at position 811 of SEQ ID NO: 1883838
uuaguuacauuggaggauu

SEQ ID NO: 2220073 - RNA, 19 nt, Artificial Sequence
  Description of Artificial Sequence: Synthetic oligonucleotide
  Antisense strand to SEQ ID NO: 2220072
aauccuccaauguaacuaa

SEQ ID NO: 2220074 - RNA, 19 nt, Artificial Sequence
  Description of Artificial Sequence: Synthetic oligonucleotide
  Sense strand starting at position 565 of SEQ ID NO: 1883838
gugugagacuaucaaacau

SEQ ID NO: 2220075 - RNA, 19 nt, Artificial Sequence
  Description of Artificial Sequence: Synthetic oligonucleotide
  Antisense strand to SEQ ID NO: 2220074
auguuugauagucucacac

SEQ ID NO: 2220076 - RNA, 19 nt, Artificial Sequence
  Description of Artificial Sequence: Synthetic oligonucleotide
  Sense strand starting at position 213 of SEQ ID NO: 1883838
cguguuaaauaacaagaau

SEQ ID NO: 2220077 - RNA, 19 nt, Artificial Sequence
  Description of Artificial Sequence: Synthetic oligonucleotide
  Antisense strand to SEQ ID NO: 2220076
auucuuguuauuuaacacg

SEQ ID NO: 2220078 - RNA, 19 nt, Artificial Sequence
  Description of Artificial Sequence: Synthetic oligonucleotide
  Sense strand starting at position 3861 of SEQ ID NO: 1883838
ggcggaugcuggagcuaua

SEQ ID NO: 2220079 - RNA, 19 nt, Artificial Sequence
  Description of Artificial Sequence: Synthetic oligonucleotide
  Antisense strand to SEQ ID NO: 2220078
uauagcuccagcauccgcc

SEQ ID NO: 2220080 - RNA, 19 nt, Artificial Sequence
  Description of Artificial Sequence: Synthetic oligonucleotide
  Sense strand starting at position 3553 of SEQ ID NO: 1883838
ggcugaaacucuggaagug

SEQ ID NO: 2220081 - RNA, 19 nt, Artificial Sequence
  Description of Artificial Sequence: Synthetic oligonucleotide
  Antisense strand to SEQ ID NO: 2220080
cacuuccagaguuucagcc

SEQ ID NO: 2220082 - RNA, 19 nt, Artificial Sequence
  Description of Artificial Sequence: Synthetic oligonucleotide
  Sense strand starting at position 3797 of SEQ ID NO: 1883838
ugaaccugaugcugauauu

SEQ ID NO: 2220083 - RNA, 19 nt, Artificial Sequence
  Description of Artificial Sequence: Synthetic oligonucleotide
  Antisense strand to SEQ ID NO: 2220082
aauaucagcaucagguuca

SEQ ID NO: 2220084 - RNA, 19 nt, Artificial Sequence
  Description of Artificial Sequence: Synthetic oligonucleotide
  Sense strand starting at position 3309 of SEQ ID NO: 1883838
uggauauggugcuagagcu

SEQ ID NO: 2220085 - RNA, 19 nt, Artificial Sequence
  Description of Artificial Sequence: Synthetic oligonucleotide
  Antisense strand to SEQ ID NO: 2220084
agcucuagcaccauaucca

SEQ ID NO: 2220086 - RNA, 19 nt, Artificial Sequence
  Description of Artificial Sequence: Synthetic oligonucleotide
  Sense strand starting at position 2000 of SEQ ID NO: 1883839
uguccuguugaagacuaaa

SEQ ID NO: 2220087 - RNA, 19 nt, Artificial Sequence
  Description of Artificial Sequence: Synthetic oligonucleotide
  Antisense strand to SEQ ID NO: 2220086
uuuagucuucaacaggaca

SEQ ID NO: 2220088 - RNA, 19 nt, Artificial Sequence
  Description of Artificial Sequence: Synthetic oligonucleotide
  Sense strand starting at position 1267 of SEQ ID NO: 1883839
gagcacugaguguagaaau

SEQ ID NO: 2220089 - RNA, 19 nt, Artificial Sequence
  Description of Artificial Sequence: Synthetic oligonucleotide
  Antisense strand to SEQ ID NO: 2220088
auuucuacacucagugcuc

SEQ ID NO: 2220090 - RNA, 19 nt, Artificial Sequence
  Description of Artificial Sequence: Synthetic oligonucleotide
  Sense strand starting at position 2115 of SEQ ID NO: 1883839
cuuaguuacauuggaggau

SEQ ID NO: 2220091 - RNA, 19 nt, Artificial Sequence
  Description of Artificial Sequence: Synthetic oligonucleotide
  Antisense strand to SEQ ID NO: 2220090
auccuccaauguaacuaag

SEQ ID NO: 2220092 - RNA, 19 nt, Artificial Sequence
  Description of Artificial Sequence: Synthetic oligonucleotide
  Sense strand starting at position 1530 of SEQ ID NO: 1883839
caagaaugcuuggcaaaga

SEQ ID NO: 2220093 - RNA, 19 nt, Artificial Sequence
  Description of Artificial Sequence: Synthetic oligonucleotide
  Antisense strand to SEQ ID NO: 2220092
ucuuugccaagcauucuug

SEQ ID NO: 2220094 - RNA, 19 nt, Artificial Sequence
  Description of Artificial Sequence: Synthetic oligonucleotide
  Sense strand starting at position 812 of SEQ ID NO: 1883839
gaggauuccuguuuccaaa

SEQ ID NO: 2220095 - RNA, 19 nt, Artificial Sequence
  Description of Artificial Sequence: Synthetic oligonucleotide
  Antisense strand to SEQ ID NO: 2220094
uuuggaaacaggaauccuc

SEQ ID NO: 2220096 - RNA, 19 nt, Artificial Sequence
  Description of Artificial Sequence: Synthetic oligonucleotide
  Sense strand starting at position 1529 of SEQ ID NO: 1883839
acaagaaugcuuggcaaag

SEQ ID NO: 2220097 - RNA, 19 nt, Artificial Sequence
  Description of Artificial Sequence: Synthetic oligonucleotide
  Antisense strand to SEQ ID NO: 2220096
cuuugccaagcauucuugu

SEQ ID NO: 2220098 - RNA, 19 nt, Artificial Sequence
  Description of Artificial Sequence: Synthetic oligonucleotide
  Sense strand starting at position 2128 of SEQ ID NO: 1883839
gaggauugacccuguucca

SEQ ID NO: 2220099 - RNA, 19 nt, Artificial Sequence
  Description of Artificial Sequence: Synthetic oligonucleotide
  Antisense strand to SEQ ID NO: 2220098
uggaacagggucaauccuc

SEQ ID NO: 2220100 - RNA, 19 nt, Artificial Sequence
  Description of Artificial Sequence: Synthetic oligonucleotide
  Sense strand starting at position 1014 of SEQ ID NO: 1883839
acagaaucguuuccagaac

SEQ ID NO: 2220101 - RNA, 19 nt, Artificial Sequence
  Description of Artificial Sequence: Synthetic oligonucleotide
  Antisense strand to SEQ ID NO: 2220100
guucuggaaacgauucugu

SEQ ID NO: 2220102 - RNA, 19 nt, Artificial Sequence
  Description of Artificial Sequence: Synthetic oligonucleotide
  Sense strand starting at position 1845 of SEQ ID NO: 1883839
acagaugccuguccacaaa

SEQ ID NO: 2220103 - RNA, 19 nt, Artificial Sequence
  Description of Artificial Sequence: Synthetic oligonucleotide
  Antisense strand to SEQ ID NO: 2220102
uuuguggacaggcaucugu

SEQ ID NO: 2220104 - RNA, 19 nt, Artificial Sequence
  Description of Artificial Sequence: Synthetic oligonucleotide
  Sense strand starting at position 1997 of SEQ ID NO: 1883839
caguguccuguugaagacu

SEQ ID NO: 2220105 - RNA, 19 nt, Artificial Sequence
  Description of Artificial Sequence: Synthetic oligonucleotide
  Antisense strand to SEQ ID NO: 2220104
agucuucaacaggacacug

SEQ ID NO: 2220106 - RNA, 19 nt, Artificial Sequence
  Description of Artificial Sequence: Synthetic oligonucleotide
  Sense strand starting at position 944 of SEQ ID NO: 1883839
caaggaacagccuguuuau

SEQ ID NO: 2220107 - RNA, 19 nt, Artificial Sequence
  Description of Artificial Sequence: Synthetic oligonucleotide
  Antisense strand to SEQ ID NO: 2220106
auaaacaggcuguuccuug

SEQ ID NO: 2220108 - RNA, 19 nt, Artificial Sequence
  Description of Artificial Sequence: Synthetic oligonucleotide
  Sense strand starting at position 2350 of SEQ ID NO: 1883839
ugaaacccgucucucuaaa

SEQ ID NO: 2220109 - RNA, 19 nt, Artificial Sequence
  Description of Artificial Sequence: Synthetic oligonucleotide
  Antisense strand to SEQ ID NO: 2220108
uuuagagagacggguuuca

SEQ ID NO: 2220110 - RNA, 19 nt, Artificial Sequence
  Description of Artificial Sequence: Synthetic oligonucleotide
  Sense strand starting at position 1642 of SEQ ID NO: 1883839
cggcaugauccagcgcgua

SEQ ID NO: 2220111 - RNA, 19 nt, Artificial Sequence
  Description of Artificial Sequence: Synthetic oligonucleotide
  Antisense strand to SEQ ID NO: 2220110
uacgcgcuggaucaugccg

SEQ ID NO: 2220112 - RNA, 19 nt, Artificial Sequence
  Description of Artificial Sequence: Synthetic oligonucleotide
  Sense strand starting at position 2959 of SEQ ID NO: 1883839
ggugccuuucucuaagauc

SEQ ID NO: 2220113 - RNA, 19 nt, Artificial Sequence
  Description of Artificial Sequence: Synthetic oligonucleotide
  Antisense strand to SEQ ID NO: 2220112
gaucuuagagaaaggcacc

SEQ ID NO: 2220114 - RNA, 19 nt, Artificial Sequence
  Description of Artificial Sequence: Synthetic oligonucleotide
  Sense strand starting at position 1168 of SEQ ID NO: 1883839
cagguaaggugguuuccaa

SEQ ID NO: 2220115 - RNA, 19 nt, Artificial Sequence
  Description of Artificial Sequence: Synthetic oligonucleotide
  Antisense strand to SEQ ID NO: 2220114
uuggaaaccaccuuaccug

SEQ ID NO: 2220116 - RNA, 19 nt, Artificial Sequence
  Description of Artificial Sequence: Synthetic oligonucleotide
  Sense strand starting at position 1277 of SEQ ID NO: 1883839
uguagaaaucgccacuuuc

SEQ ID NO: 2220117 - RNA, 19 nt, Artificial Sequence
  Description of Artificial Sequence: Synthetic oligonucleotide
  Antisense strand to SEQ ID NO: 2220116
gaaaguggcgauuucuaca

SEQ ID NO: 2220118 - RNA, 19 nt, Artificial Sequence
  Description of Artificial Sequence: Synthetic oligonucleotide
  Sense strand starting at position 814 of SEQ ID NO: 1883839
ggauuccuguuuccaaagu

SEQ ID NO: 2220119 - RNA, 19 nt, Artificial Sequence
  Description of Artificial Sequence: Synthetic oligonucleotide
  Antisense strand to SEQ ID NO: 2220118
acuuuggaaacaggaaucc

SEQ ID NO: 2220120 - RNA, 19 nt, Artificial Sequence
  Description of Artificial Sequence: Synthetic oligonucleotide
  Sense strand starting at position 2958 of SEQ ID NO: 1883839
gggugccuuucucuaagau

SEQ ID NO: 2220121 - RNA, 19 nt, Artificial Sequence
  Description of Artificial Sequence: Synthetic oligonucleotide
  Antisense strand to SEQ ID NO: 2220120
aucuuagagaaaggcaccc

SEQ ID NO: 2220122 - RNA, 19 nt, Artificial Sequence
  Description of Artificial Sequence: Synthetic oligonucleotide
  Sense strand starting at position 667 of SEQ ID NO: 1883839
uugauacugucucuuagca

SEQ ID NO: 2220123 - RNA, 19 nt, Artificial Sequence
  Description of Artificial Sequence: Synthetic oligonucleotide
  Antisense strand to SEQ ID NO: 2220122
ugcuaagagacaguaucaa

SEQ ID NO: 2220124 - RNA, 19 nt, Artificial Sequence
  Description of Artificial Sequence: Synthetic oligonucleotide
  Sense strand starting at position 1265 of SEQ ID NO: 1883839
ccgagcacugaguguagaa

SEQ ID NO: 2220125 - RNA, 19 nt, Artificial Sequence
  Description of Artificial Sequence: Synthetic oligonucleotide
  Antisense strand to SEQ ID NO: 2220124
uucuacacucagugcucgg

SEQ ID NO: 2220126 - RNA, 19 nt, Artificial Sequence
  Description of Artificial Sequence: Synthetic oligonucleotide
  Sense strand starting at position 1907 of SEQ ID NO: 1883839
gaacgcugagcguagacau

SEQ ID NO: 2220127 - RNA, 19 nt, Artificial Sequence
  Description of Artificial Sequence: Synthetic oligonucleotide
  Antisense strand to SEQ ID NO: 2220126
augucuacgcucagcguuc

SEQ ID NO: 2220128 - RNA, 19 nt, Artificial Sequence
  Description of Artificial Sequence: Synthetic oligonucleotide
  Sense strand starting at position 966 of SEQ ID NO: 1883839
gcucgacuguucuuaauca

SEQ ID NO: 2220129 - RNA, 19 nt, Artificial Sequence
  Description of Artificial Sequence: Synthetic oligonucleotide
  Antisense strand to SEQ ID NO: 2220128
ugauuaagaacagucgagc

SEQ ID NO: 2220130 - RNA, 19 nt, Artificial Sequence
  Description of Artificial Sequence: Synthetic oligonucleotide
  Sense strand starting at position 964 of SEQ ID NO: 1883839
cagcucgacuguucuuaau

SEQ ID NO: 2220131 - RNA, 19 nt, Artificial Sequence
  Description of Artificial Sequence: Synthetic oligonucleotide
  Antisense strand to SEQ ID NO: 2220130
auuaagaacagucgagcug

SEQ ID NO: 2220132 - RNA, 19 nt, Artificial Sequence
  Description of Artificial Sequence: Synthetic oligonucleotide
  Sense strand starting at position 1508 of SEQ ID NO: 1883839
accuccuucccguguuaaa

SEQ ID NO: 2220133 - RNA, 19 nt, Artificial Sequence
  Description of Artificial Sequence: Synthetic oligonucleotide
  Antisense strand to SEQ ID NO: 2220132
uuuaacacgggaaggaggu

SEQ ID NO: 2220134 - RNA, 19 nt, Artificial Sequence
  Description of Artificial Sequence: Synthetic oligonucleotide
  Sense strand starting at position 1124 of SEQ ID NO: 1883839
caggguucccagcgauguu

SEQ ID NO: 2220135 - RNA, 19 nt, Artificial Sequence
  Description of Artificial Sequence: Synthetic oligonucleotide
  Antisense strand to SEQ ID NO: 2220134
aacaucgcugggaacccug

SEQ ID NO: 2220136 - RNA, 19 nt, Artificial Sequence
  Description of Artificial Sequence: Synthetic oligonucleotide
  Sense strand starting at position 1531 of SEQ ID NO: 1883839
aagaaugcuuggcaaagaa

SEQ ID NO: 2220137 - RNA, 19 nt, Artificial Sequence
  Description of Artificial Sequence: Synthetic oligonucleotide
  Antisense strand to SEQ ID NO: 2220136
uucuuugccaagcauucuu

SEQ ID NO: 2220138 - RNA, 19 nt, Artificial Sequence
  Description of Artificial Sequence: Synthetic oligonucleotide
  Sense strand starting at position 2116 of SEQ ID NO: 1883839
uuaguuacauuggaggauu

SEQ ID NO: 2220139 - RNA, 19 nt, Artificial Sequence
  Description of Artificial Sequence: Synthetic oligonucleotide
  Antisense strand to SEQ ID NO: 2220138
aauccuccaauguaacuaa

SEQ ID NO: 2220140 - RNA, 19 nt, Artificial Sequence
  Description of Artificial Sequence: Synthetic oligonucleotide
  Sense strand starting at position 1870 of SEQ ID NO: 1883839
gugugagacuaucaaacau

SEQ ID NO: 2220141 - RNA, 19 nt, Artificial Sequence
  Description of Artificial Sequence: Synthetic oligonucleotide
  Antisense strand to SEQ ID NO: 2220140
auguuugauagucucacac

SEQ ID NO: 2220142 - RNA, 19 nt, Artificial Sequence
  Description of Artificial Sequence: Synthetic oligonucleotide
  Sense strand starting at position 1518 of SEQ ID NO: 1883839
cguguuaaauaacaagaau

SEQ ID NO: 2220143 - RNA, 19 nt, Artificial Sequence
  Description of Artificial Sequence: Synthetic oligonucleotide
  Antisense strand to SEQ ID NO: 2220142
auucuuguuauuuaacacg

SEQ ID NO: 2220144 - RNA, 19 nt, Artificial Sequence
  Description of Artificial Sequence: Synthetic oligonucleotide
  Sense strand starting at position 928 of SEQ ID NO: 1883839
gaugacuagugcuggacaa

SEQ ID NO: 2220145 - RNA, 19 nt, Artificial Sequence
  Description of Artificial Sequence: Synthetic oligonucleotide
  Antisense strand to SEQ ID NO: 2220144
uuguccagcacuagucauc

SEQ ID NO: 2220146 - RNA, 19 nt, Artificial Sequence
  Description of Artificial Sequence: Synthetic oligonucleotide
  Sense strand starting at position 967 of SEQ ID NO: 1883839
cucgacuguucuuaaucaa

SEQ ID NO: 2220147 - RNA, 19 nt, Artificial Sequence
  Description of Artificial Sequence: Synthetic oligonucleotide
  Antisense strand to SEQ ID NO: 2220146
uugauuaagaacagucgag

SEQ ID NO: 2220148 - RNA, 19 nt, Artificial Sequence
  Description of Artificial Sequence: Synthetic oligonucleotide
  Sense strand starting at position 2962 of SEQ ID NO: 1883839
gccuuucucuaagauccga

SEQ ID NO: 2220149 - RNA, 19 nt, Artificial Sequence
  Description of Artificial Sequence: Synthetic oligonucleotide
  Antisense strand to SEQ ID NO: 2220148
ucggaucuuagagaaaggc

SEQ ID NO: 2220150 - RNA, 19 nt, Artificial Sequence
  Description of Artificial Sequence: Synthetic oligonucleotide
  Sense strand starting at position 656 of SEQ ID NO: 1883839
aguuaucuuucuugauacu

SEQ ID NO: 2220151 - RNA, 19 nt, Artificial Sequence
  Description of Artificial Sequence: Synthetic oligonucleotide
  Antisense strand to SEQ ID NO: 2220150
aguaucaagaaagauaacu

SEQ ID NO: 2220152 - RNA, 19 nt, Artificial Sequence
  Description of Artificial Sequence: Synthetic oligonucleotide
  Sense strand starting at position 1511 of SEQ ID NO: 1883839
uccuucccguguuaaauaa

SEQ ID NO: 2220153 - RNA, 19 nt, Artificial Sequence
  Description of Artificial Sequence: Synthetic oligonucleotide
  Antisense strand to SEQ ID NO: 2220152
uuauuuaacacgggaagga

SEQ ID NO: 2220154 - RNA, 19 nt, Artificial Sequence
  Description of Artificial Sequence: Synthetic oligonucleotide
  Sense strand starting at position 1221 of SEQ ID NO: 1883839
caaguaaugucaggccaua

SEQ ID NO: 2220155 - RNA, 19 nt, Artificial Sequence
  Description of Artificial Sequence: Synthetic oligonucleotide
  Antisense strand to SEQ ID NO: 2220154
uauggccugacauuacuug

SEQ ID NO: 2220156 - RNA, 19 nt, Artificial Sequence
  Description of Artificial Sequence: Synthetic oligonucleotide
  Sense strand starting at position 1209 of SEQ ID NO: 1883839
uggcuuugguugcaaguaa

SEQ ID NO: 2220157 - RNA, 19 nt, Artificial Sequence
  Description of Artificial Sequence: Synthetic oligonucleotide
  Antisense strand to SEQ ID NO: 2220156
uuacuugcaaccaaagcca

SEQ ID NO: 2220158 - RNA, 19 nt, Artificial Sequence
  Description of Artificial Sequence: Synthetic oligonucleotide
  Sense strand starting at position 1708 of SEQ ID NO: 1883839
gaaggcugcuccuggugaa

SEQ ID NO: 2220159 - RNA, 19 nt, Artificial Sequence
  Description of Artificial Sequence: Synthetic oligonucleotide
  Antisense strand to SEQ ID NO: 2220158
uucaccaggagcagccuuc

SEQ ID NO: 2220160 - RNA, 19 nt, Artificial Sequence
  Description of Artificial Sequence: Synthetic oligonucleotide
  Sense strand starting at position 1567 of SEQ ID NO: 1883839
ugccguuacugcuauuaac

SEQ ID NO: 2220161 - RNA, 19 nt, Artificial Sequence
  Description of Artificial Sequence: Synthetic oligonucleotide
  Antisense strand to SEQ ID NO: 2220160
guuaauagcaguaacggca

SEQ ID NO: 2220162 - RNA, 19 nt, Artificial Sequence
  Description of Artificial Sequence: Synthetic oligonucleotide
  Sense strand starting at position 2642 of SEQ ID NO: 1883840
uguccuguugaagacuaaa

SEQ ID NO: 2220163 - RNA, 19 nt, Artificial Sequence
  Description of Artificial Sequence: Synthetic oligonucleotide
  Antisense strand to SEQ ID NO: 2220162
uuuagucuucaacaggaca

SEQ ID NO: 2220164 - RNA, 19 nt, Artificial Sequence
  Description of Artificial Sequence: Synthetic oligonucleotide
  Sense strand starting at position 1909 of SEQ ID NO: 1883840
gagcacugaguguagaaau

SEQ ID NO: 2220165 - RNA, 19 nt, Artificial Sequence
  Description of Artificial Sequence: Synthetic oligonucleotide
  Antisense strand to SEQ ID NO: 2220164
auuucuacacucagugcuc

SEQ ID NO: 2220166 - RNA, 19 nt, Artificial Sequence
  Description of Artificial Sequence: Synthetic oligonucleotide
  Sense strand starting at position 2757 of SEQ ID NO: 1883840
cuuaguuacauuggaggau

SEQ ID NO: 2220167 - RNA, 19 nt, Artificial Sequence
  Description of Artificial Sequence: Synthetic oligonucleotide
  Antisense strand to SEQ ID NO: 2220166
auccuccaauguaacuaag

SEQ ID NO: 2220168 - RNA, 19 nt, Artificial Sequence
  Description of Artificial Sequence: Synthetic oligonucleotide
  Sense strand starting at position 2172 of SEQ ID NO: 1883840
caagaaugcuuggcaaaga

SEQ ID NO: 2220169 - RNA, 19 nt, Artificial Sequence
  Description of Artificial Sequence: Synthetic oligonucleotide
  Antisense strand to SEQ ID NO: 2220168
ucuuugccaagcauucuug

SEQ ID NO: 2220170 - RNA, 19 nt, Artificial Sequence
  Description of Artificial Sequence: Synthetic oligonucleotide
  Sense strand starting at position 1454 of SEQ ID NO: 1883840
gaggauuccuguuuccaaa

SEQ ID NO: 2220171 - RNA, 19 nt, Artificial Sequence
  Description of Artificial Sequence: Synthetic oligonucleotide
  Antisense strand to SEQ ID NO: 2220170
uuuggaaacaggaauccuc

SEQ ID NO: 2220172 - RNA, 19 nt, Artificial Sequence
  Description of Artificial Sequence: Synthetic oligonucleotide
  Sense strand starting at position 2171 of SEQ ID NO: 1883840
acaagaaugcuuggcaaag

SEQ ID NO: 2220173 - RNA, 19 nt, Artificial Sequence
  Description of Artificial Sequence: Synthetic oligonucleotide
  Antisense strand to SEQ ID NO: 2220172
cuuugccaagcauucuugu

SEQ ID NO: 2220174 - RNA, 19 nt, Artificial Sequence
  Description of Artificial Sequence: Synthetic oligonucleotide
  Sense strand starting at position 2770 of SEQ ID NO: 1883840
gaggauugacccuguucca

SEQ ID NO: 2220175 - RNA, 19 nt, Artificial Sequence
  Description of Artificial Sequence: Synthetic oligonucleotide
  Antisense strand to SEQ ID NO: 2220174
uggaacagggucaauccuc

SEQ ID NO: 2220176 - RNA, 19 nt, Artificial Sequence
  Description of Artificial Sequence: Synthetic oligonucleotide
  Sense strand starting at position 1656 of SEQ ID NO: 1883840
acagaaucguuuccagaac

SEQ ID NO: 2220177 - RNA, 19 nt, Artificial Sequence
  Description of Artificial Sequence: Synthetic oligonucleotide
  Antisense strand to SEQ ID NO: 2220176
guucuggaaacgauucugu

SEQ ID NO: 2220178 - RNA, 19 nt, Artificial Sequence
  Description of Artificial Sequence: Synthetic oligonucleotide
  Sense strand starting at position 2487 of SEQ ID NO: 1883840
acagaugccuguccacaaa

SEQ ID NO: 2220179 - RNA, 19 nt, Artificial Sequence
  Description of Artificial Sequence: Synthetic oligonucleotide
  Antisense strand to SEQ ID NO: 2220178
uuuguggacaggcaucugu

SEQ ID NO: 2220180 - RNA, 19 nt, Artificial Sequence
  Description of Artificial Sequence: Synthetic oligonucleotide
  Sense strand starting at position 2639 of SEQ ID NO: 1883840
caguguccuguugaagacu

SEQ ID NO: 2220181 - RNA, 19 nt, Artificial Sequence
  Description of Artificial Sequence: Synthetic oligonucleotide
  Antisense strand to SEQ ID NO: 2220180
agucuucaacaggacacug

SEQ ID NO: 2220182 - RNA, 19 nt, Artificial Sequence
  Description of Artificial Sequence: Synthetic oligonucleotide
  Sense strand starting at position 1586 of SEQ ID NO: 1883840
caaggaacagccuguuuau

SEQ ID NO: 2220183 - RNA, 19 nt, Artificial Sequence
  Description of Artificial Sequence: Synthetic oligonucleotide
  Antisense strand to SEQ ID NO: 2220182
auaaacaggcuguuccuug

SEQ ID NO: 2220184 - RNA, 19 nt, Artificial Sequence
  Description of Artificial Sequence: Synthetic oligonucleotide
  Sense strand starting at position 2992 of SEQ ID NO: 1883840
ugaaacccgucucucuaaa

SEQ ID NO: 2220185 - RNA, 19 nt, Artificial Sequence
  Description of Artificial Sequence: Synthetic oligonucleotide
  Antisense strand to SEQ ID NO: 2220184
uuuagagagacggguuuca

SEQ ID NO: 2220186 - RNA, 19 nt, Artificial Sequence
  Description of Artificial Sequence: Synthetic oligonucleotide
  Sense strand starting at position 2284 of SEQ ID NO: 1883840
cggcaugauccagcgcgua

SEQ ID NO: 2220187 - RNA, 19 nt, Artificial Sequence
  Description of Artificial Sequence: Synthetic oligonucleotide
  Antisense strand to SEQ ID NO: 2220186
uacgcgcuggaucaugccg

SEQ ID NO: 2220188 - RNA, 19 nt, Artificial Sequence
  Description of Artificial Sequence: Synthetic oligonucleotide
  Sense strand starting at position 3601 of SEQ ID NO: 1883840
ggugccuuucucuaagauc

SEQ ID NO: 2220189 - RNA, 19 nt, Artificial Sequence
  Description of Artificial Sequence: Synthetic oligonucleotide
  Antisense strand to SEQ ID NO: 2220188
gaucuuagagaaaggcacc

SEQ ID NO: 2220190 - RNA, 19 nt, Artificial Sequence
  Description of Artificial Sequence: Synthetic oligonucleotide
  Sense strand starting at position 1810 of SEQ ID NO: 1883840
cagguaaggugguuuccaa

SEQ ID NO: 2220191 - RNA, 19 nt, Artificial Sequence
  Description of Artificial Sequence: Synthetic oligonucleotide
  Antisense strand to SEQ ID NO: 2220190
uuggaaaccaccuuaccug

SEQ ID NO: 2220192 - RNA, 19 nt, Artificial Sequence
  Description of Artificial Sequence: Synthetic oligonucleotide
  Sense strand starting at position 1919 of SEQ ID NO: 1883840
uguagaaaucgccacuuuc

SEQ ID NO: 2220193 - RNA, 19 nt, Artificial Sequence
  Description of Artificial Sequence: Synthetic oligonucleotide
  Antisense strand to SEQ ID NO: 2220192
gaaaguggcgauuucuaca

SEQ ID NO: 2220194 - RNA, 19 nt, Artificial Sequence
  Description of Artificial Sequence: Synthetic oligonucleotide
  Sense strand starting at position 1456 of SEQ ID NO: 1883840
ggauuccuguuuccaaagu

SEQ ID NO: 2220195 - RNA, 19 nt, Artificial Sequence
  Description of Artificial Sequence: Synthetic oligonucleotide
  Antisense strand to SEQ ID NO: 2220194
acuuuggaaacaggaaucc

SEQ ID NO: 2220196 - RNA, 19 nt, Artificial Sequence
  Description of Artificial Sequence: Synthetic oligonucleotide
  Sense strand starting at position 3600 of SEQ ID NO: 1883840
gggugccuuucucuaagau

SEQ ID NO: 2220197 - RNA, 19 nt, Artificial Sequence
  Description of Artificial Sequence: Synthetic oligonucleotide
  Antisense strand to SEQ ID NO: 2220196
aucuuagagaaaggcaccc

SEQ ID NO: 2220198 - RNA, 19 nt, Artificial Sequence
  Description of Artificial Sequence: Synthetic oligonucleotide
  Sense strand starting at position 1309 of SEQ ID NO: 1883840
uugauacugucucuuagca

SEQ ID NO: 2220199 - RNA, 19 nt, Artificial Sequence
  Description of Artificial Sequence: Synthetic oligonucleotide
  Antisense strand to SEQ ID NO: 2220198
ugcuaagagacaguaucaa

SEQ ID NO: 2220200 - RNA, 19 nt, Artificial Sequence
  Description of Artificial Sequence: Synthetic oligonucleotide
  Sense strand starting at position 1907 of SEQ ID NO: 1883840
ccgagcacugaguguagaa

SEQ ID NO: 2220201 - RNA, 19 nt, Artificial Sequence
  Description of Artificial Sequence: Synthetic oligonucleotide
  Antisense strand to SEQ ID NO: 2220200
uucuacacucagugcucgg

SEQ ID NO: 2220202 - RNA, 19 nt, Artificial Sequence
  Description of Artificial Sequence: Synthetic oligonucleotide
  Sense strand starting at position 2549 of SEQ ID NO: 1883840
gaacgcugagcguagacau

SEQ ID NO: 2220203 - RNA, 19 nt, Artificial Sequence
  Description of Artificial Sequence: Synthetic oligonucleotide
  Antisense strand to SEQ ID NO: 2220202
augucuacgcucagcguuc

SEQ ID NO: 2220204 - RNA, 19 nt, Artificial Sequence
  Description of Artificial Sequence: Synthetic oligonucleotide
  Sense strand starting at position 1608 of SEQ ID NO: 1883840
gcucgacuguucuuaauca

SEQ ID NO: 2220205 - RNA, 19 nt, Artificial Sequence
  Description of Artificial Sequence: Synthetic oligonucleotide
  Antisense strand to SEQ ID NO: 2220204
ugauuaagaacagucgagc

SEQ ID NO: 2220206 - RNA, 19 nt, Artificial Sequence
  Description of Artificial Sequence: Synthetic oligonucleotide
  Sense strand starting at position 1606 of SEQ ID NO: 1883840
cagcucgacuguucuuaau

SEQ ID NO: 2220207 - RNA, 19 nt, Artificial Sequence
  Description of Artificial Sequence: Synthetic oligonucleotide
  Antisense strand to SEQ ID NO: 2220206
auuaagaacagucgagcug

SEQ ID NO: 2220208 - RNA, 19 nt, Artificial Sequence
  Description of Artificial Sequence: Synthetic oligonucleotide
  Sense strand starting at position 2150 of SEQ ID NO: 1883840
accuccuucccguguuaaa

SEQ ID NO: 2220209 - RNA, 19 nt, Artificial Sequence
  Description of Artificial Sequence: Synthetic oligonucleotide
  Antisense strand to SEQ ID NO: 2220208
uuuaacacgggaaggaggu

SEQ ID NO: 2220210 - RNA, 19 nt, Artificial Sequence
  Description of Artificial Sequence: Synthetic oligonucleotide
  Sense strand starting at position 1766 of SEQ ID NO: 1883840
caggguucccagcgauguu

SEQ ID NO: 2220211 - RNA, 19 nt, Artificial Sequence
  Description of Artificial Sequence: Synthetic oligonucleotide
  Antisense strand to SEQ ID NO: 2220210
aacaucgcugggaacccug

SEQ ID NO: 2220212 - RNA, 19 nt, Artificial Sequence
  Description of Artificial Sequence: Synthetic oligonucleotide
  Sense strand starting at position 2173 of SEQ ID NO: 1883840
aagaaugcuuggcaaagaa

SEQ ID NO: 2220213 - RNA, 19 nt, Artificial Sequence
  Description of Artificial Sequence: Synthetic oligonucleotide
  Antisense strand to SEQ ID NO: 2220212
uucuuugccaagcauucuu

SEQ ID NO: 2220214 - RNA, 19 nt, Artificial Sequence
  Description of Artificial Sequence: Synthetic oligonucleotide
  Sense strand starting at position 2758 of SEQ ID NO: 1883840
uuaguuacauuggaggauu

SEQ ID NO: 2220215 - RNA, 19 nt, Artificial Sequence
  Description of Artificial Sequence: Synthetic oligonucleotide
  Antisense strand to SEQ ID NO: 2220214
aauccuccaauguaacuaa

SEQ ID NO: 2220216 - RNA, 19 nt, Artificial Sequence
  Description of Artificial Sequence: Synthetic oligonucleotide
  Sense strand starting at position 2512 of SEQ ID NO: 1883840
gugugagacuaucaaacau

SEQ ID NO: 2220217 - RNA, 19 nt, Artificial Sequence
  Description of Artificial Sequence: Synthetic oligonucleotide
  Antisense strand to SEQ ID NO: 2220216
auguuugauagucucacac

SEQ ID NO: 2220218 - RNA, 19 nt, Artificial Sequence
  Description of Artificial Sequence: Synthetic oligonucleotide
  Sense strand starting at position 2160 of SEQ ID NO: 1883840
cguguuaaauaacaagaau

SEQ ID NO: 2220219 - RNA, 19 nt, Artificial Sequence
  Description of Artificial Sequence: Synthetic oligonucleotide
  Antisense strand to SEQ ID NO: 2220218
auucuuguuauuuaacacg

SEQ ID NO: 2220220 - RNA, 19 nt, Artificial Sequence
  Description of Artificial Sequence: Synthetic oligonucleotide
  Sense strand starting at position 1570 of SEQ ID NO: 1883840
gaugacuagugcuggacaa

SEQ ID NO: 2220221 - RNA, 19 nt, Artificial Sequence
  Description of Artificial Sequence: Synthetic oligonucleotide
  Antisense strand to SEQ ID NO: 2220220
uuguccagcacuagucauc

SEQ ID NO: 2220222 - RNA, 19 nt, Artificial Sequence
  Description of Artificial Sequence: Synthetic oligonucleotide
  Sense strand starting at position 1609 of SEQ ID NO: 1883840
cucgacuguucuuaaucaa

SEQ ID NO: 2220223 - RNA, 19 nt, Artificial Sequence
  Description of Artificial Sequence: Synthetic oligonucleotide
  Antisense strand to SEQ ID NO: 2220222
uugauuaagaacagucgag

SEQ ID NO: 2220224 - RNA, 19 nt, Artificial Sequence
  Description of Artificial Sequence: Synthetic oligonucleotide
  Sense strand starting at position 3604 of SEQ ID NO: 1883840
gccuuucucuaagauccga

SEQ ID NO: 2220225 - RNA, 19 nt, Artificial Sequence
  Description of Artificial Sequence: Synthetic oligonucleotide
  Antisense strand to SEQ ID NO: 2220224
ucggaucuuagagaaaggc

SEQ ID NO: 2220226 - RNA, 19 nt, Artificial Sequence
  Description of Artificial Sequence: Synthetic oligonucleotide
  Sense strand starting at position 1298 of SEQ ID NO: 1883840
aguuaucuuucuugauacu

SEQ ID NO: 2220227 - RNA, 19 nt, Artificial Sequence
  Description of Artificial Sequence: Synthetic oligonucleotide
  Antisense strand to SEQ ID NO: 2220226
aguaucaagaaagauaacu

SEQ ID NO: 2220228 - RNA, 19 nt, Artificial Sequence
  Description of Artificial Sequence: Synthetic oligonucleotide
  Sense strand starting at position 2153 of SEQ ID NO: 1883840
uccuucccguguuaaauaa

SEQ ID NO: 2220229 - RNA, 19 nt, Artificial Sequence
  Description of Artificial Sequence: Synthetic oligonucleotide
  Antisense strand to SEQ ID NO: 2220228
uuauuuaacacgggaagga

SEQ ID NO: 2220230 - RNA, 19 nt, Artificial Sequence
  Description of Artificial Sequence: Synthetic oligonucleotide
  Sense strand starting at position 1863 of SEQ ID NO: 1883840
caaguaaugucaggccaua

SEQ ID NO: 2220231 - RNA, 19 nt, Artificial Sequence
  Description of Artificial Sequence: Synthetic oligonucleotide
  Antisense strand to SEQ ID NO: 2220230
uauggccugacauuacuug

SEQ ID NO: 2220232 - RNA, 19 nt, Artificial Sequence
  Description of Artificial Sequence: Synthetic oligonucleotide
  Sense strand starting at position 1851 of SEQ ID NO: 1883840
uggcuuugguugcaaguaa

SEQ ID NO: 2220233 - RNA, 19 nt, Artificial Sequence
  Description of Artificial Sequence: Synthetic oligonucleotide
  Antisense strand to SEQ ID NO: 2220232
uuacuugcaaccaaagcca

SEQ ID NO: 2220234 - RNA, 19 nt, Artificial Sequence
  Description of Artificial Sequence: Synthetic oligonucleotide
  Sense strand starting at position 2350 of SEQ ID NO: 1883840
gaaggcugcuccuggugaa

SEQ ID NO: 2220235 - RNA, 19 nt, Artificial Sequence
  Description of Artificial Sequence: Synthetic oligonucleotide
  Antisense strand to SEQ ID NO: 2220234
uucaccaggagcagccuuc

SEQ ID NO: 2220236 - RNA, 19 nt, Artificial Sequence
  Description of Artificial Sequence: Synthetic oligonucleotide
  Sense strand starting at position 2209 of SEQ ID NO: 1883840
ugccguuacugcuauuaac

SEQ ID NO: 2220237 - RNA, 19 nt, Artificial Sequence
  Description of Artificial Sequence: Synthetic oligonucleotide
  Antisense strand to SEQ ID NO: 2220236
guuaauagcaguaacggca

SEQ ID NO: 2220238 - RNA, 19 nt, Artificial Sequence
  Description of Artificial Sequence: Synthetic oligonucleotide
  Sense strand starting at position 1533 of SEQ ID NO: 1883841
ccuugaugcccagauuaaa

SEQ ID NO: 2220239 - RNA, 19 nt, Artificial Sequence
  Description of Artificial Sequence: Synthetic oligonucleotide
  Antisense strand to SEQ ID NO: 2220238
uuuaaucugggcaucaagg

SEQ ID NO: 2220240 - RNA, 19 nt, Artificial Sequence
  Description of Artificial Sequence: Synthetic oligonucleotide
  Sense strand starting at position 1626 of SEQ ID NO: 1883841
aaguaagaagaauguuauc

SEQ ID NO: 2220241 - RNA, 19 nt, Artificial Sequence
  Description of Artificial Sequence: Synthetic oligonucleotide
  Antisense strand to SEQ ID NO: 2220240
gauaacauucuucuuacuu

SEQ ID NO: 2220242 - RNA, 19 nt, Artificial Sequence
  Description of Artificial Sequence: Synthetic oligonucleotide
  Sense strand starting at position 2115 of SEQ ID NO: 1883841
cugauuauaggucauuauu

SEQ ID NO: 2220243 - RNA, 19 nt, Artificial Sequence
  Description of Artificial Sequence: Synthetic oligonucleotide
  Antisense strand to SEQ ID NO: 2220242
aauaaugaccuauaaucag

SEQ ID NO: 2220244 - RNA, 19 nt, Artificial Sequence
  Description of Artificial Sequence: Synthetic oligonucleotide
  Sense strand starting at position 3773 of SEQ ID NO: 1883841
acuuccugacgaggaaaua

SEQ ID NO: 2220245 - RNA, 19 nt, Artificial Sequence
  Description of Artificial Sequence: Synthetic oligonucleotide
  Antisense strand to SEQ ID NO: 2220244
uauuuccucgucaggaagu

SEQ ID NO: 2220246 - RNA, 19 nt, Artificial Sequence
  Description of Artificial Sequence: Synthetic oligonucleotide
  Sense strand starting at position 291 of SEQ ID NO: 1883841
acuugagaaacgugagaca

SEQ ID NO: 2220247 - RNA, 19 nt, Artificial Sequence
  Description of Artificial Sequence: Synthetic oligonucleotide
  Antisense strand to SEQ ID NO: 2220246
ugucucacguuucucaagu

SEQ ID NO: 2220248 - RNA, 19 nt, Artificial Sequence
  Description of Artificial Sequence: Synthetic oligonucleotide
  Sense strand starting at position 1083 of SEQ ID NO: 1883841
cuuaacucugugggaaaga

SEQ ID NO: 2220249 - RNA, 19 nt, Artificial Sequence
  Description of Artificial Sequence: Synthetic oligonucleotide
  Antisense strand to SEQ ID NO: 2220248
ucuuucccacagaguuaag

SEQ ID NO: 2220250 - RNA, 19 nt, Artificial Sequence
  Description of Artificial Sequence: Synthetic oligonucleotide
  Sense strand starting at position 2734 of SEQ ID NO: 1883841
gagauuccugagugaauac

SEQ ID NO: 2220251 - RNA, 19 nt, Artificial Sequence
  Description of Artificial Sequence: Synthetic oligonucleotide
  Antisense strand to SEQ ID NO: 2220250
guauucacucaggaaucuc

SEQ ID NO: 2220252 - RNA, 19 nt, Artificial Sequence
  Description of Artificial Sequence: Synthetic oligonucleotide
  Sense strand starting at position 3260 of SEQ ID NO: 1883841
cagacuuggccacaaugua

SEQ ID NO: 2220253 - RNA, 19 nt, Artificial Sequence
  Description of Artificial Sequence: Synthetic oligonucleotide
  Antisense strand to SEQ ID NO: 2220252
uacauuguggccaagucug

SEQ ID NO: 2220254 - RNA, 19 nt, Artificial Sequence
  Description of Artificial Sequence: Synthetic oligonucleotide
  Sense strand starting at position 351 of SEQ ID NO: 1883841
ggaguaacaguuuauaguu

SEQ ID NO: 2220255 - RNA, 19 nt, Artificial Sequence
  Description of Artificial Sequence: Synthetic oligonucleotide
  Antisense strand to SEQ ID NO: 2220254
aacuauaaacuguuacucc

SEQ ID NO: 2220256 - RNA, 19 nt, Artificial Sequence
  Description of Artificial Sequence: Synthetic oligonucleotide
  Sense strand starting at position 2113 of SEQ ID NO: 1883841
uccugauuauaggucauua

SEQ ID NO: 2220257 - RNA, 19 nt, Artificial Sequence
  Description of Artificial Sequence: Synthetic oligonucleotide
  Antisense strand to SEQ ID NO: 2220256
uaaugaccuauaaucagga

SEQ ID NO: 2220258 - RNA, 19 nt, Artificial Sequence
  Description of Artificial Sequence: Synthetic oligonucleotide
  Sense strand starting at position 1267 of SEQ ID NO: 1883841
gaugucaucgaugauguca

SEQ ID NO: 2220259 - RNA, 19 nt, Artificial Sequence
  Description of Artificial Sequence: Synthetic oligonucleotide
  Antisense strand to SEQ ID NO: 2220258
ugacaucaucgaugacauc

SEQ ID NO: 2220260 - RNA, 19 nt, Artificial Sequence
  Description of Artificial Sequence: Synthetic oligonucleotide
  Sense strand starting at position 1347 of SEQ ID NO: 1883841
ugguuccuuuaaguaaaga

SEQ ID NO: 2220261 - RNA, 19 nt, Artificial Sequence
  Description of Artificial Sequence: Synthetic oligonucleotide
  Antisense strand to SEQ ID NO: 2220260
ucuuuacuuaaaggaacca

SEQ ID NO: 2220262 - RNA, 19 nt, Artificial Sequence
  Description of Artificial Sequence: Synthetic oligonucleotide
  Sense strand starting at position 1531 of SEQ ID NO: 1883841
guccuugaugcccagauua

SEQ ID NO: 2220263 - RNA, 19 nt, Artificial Sequence
  Description of Artificial Sequence: Synthetic oligonucleotide
  Antisense strand to SEQ ID NO: 2220262
uaaucugggcaucaaggac

SEQ ID NO: 2220264 - RNA, 19 nt, Artificial Sequence
  Description of Artificial Sequence: Synthetic oligonucleotide
  Sense strand starting at position 1690 of SEQ ID NO: 1883841
cugcucuuaccagagaguu

SEQ ID NO: 2220265 - RNA, 19 nt, Artificial Sequence
  Description of Artificial Sequence: Synthetic oligonucleotide
  Antisense strand to SEQ ID NO: 2220264
aacucucugguaagagcag

SEQ ID NO: 2220266 - RNA, 19 nt, Artificial Sequence
  Description of Artificial Sequence: Synthetic oligonucleotide
  Sense strand starting at position 2062 of SEQ ID NO: 1883841
uuaaauugccagggaguua

SEQ ID NO: 2220267 - RNA, 19 nt, Artificial Sequence
  Description of Artificial Sequence: Synthetic oligonucleotide
  Antisense strand to SEQ ID NO: 2220266
uaacucccuggcaauuuaa

SEQ ID NO: 2220268 - RNA, 19 nt, Artificial Sequence
  Description of Artificial Sequence: Synthetic oligonucleotide
  Sense strand starting at position 2830 of SEQ ID NO: 1883841
guccguacucuugacaaag

SEQ ID NO: 2220269 - RNA, 19 nt, Artificial Sequence
  Description of Artificial Sequence: Synthetic oligonucleotide
  Antisense strand to SEQ ID NO: 2220268
cuuugucaagaguacggac

SEQ ID NO: 2220270 - RNA, 19 nt, Artificial Sequence
  Description of Artificial Sequence: Synthetic oligonucleotide
  Sense strand starting at position 3395 of SEQ ID NO: 1883841
guccaucuuccuggaugga

SEQ ID NO: 2220271 - RNA, 19 nt, Artificial Sequence
  Description of Artificial Sequence: Synthetic oligonucleotide
  Antisense strand to SEQ ID NO: 2220270
uccauccaggaagauggac

SEQ ID NO: 2220272 - RNA, 19 nt, Artificial Sequence
  Description of Artificial Sequence: Synthetic oligonucleotide
  Sense strand starting at position 1341 of SEQ ID NO: 1883841
cuuuaaugguuccuuuaag

SEQ ID NO: 2220273 - RNA, 19 nt, Artificial Sequence
  Description of Artificial Sequence: Synthetic oligonucleotide
  Antisense strand to SEQ ID NO: 2220272
cuuaaaggaaccauuaaag

SEQ ID NO: 2220274 - RNA, 19 nt, Artificial Sequence
  Description of Artificial Sequence: Synthetic oligonucleotide
  Sense strand starting at position 1882 of SEQ ID NO: 1883841
ggcacagagucauccacau

SEQ ID NO: 2220275 - RNA, 19 nt, Artificial Sequence
  Description of Artificial Sequence: Synthetic oligonucleotide
  Antisense strand to SEQ ID NO: 2220274
auguggaugacucugugcc

SEQ ID NO: 2220276 - RNA, 19 nt, Artificial Sequence
  Description of Artificial Sequence: Synthetic oligonucleotide
  Sense strand starting at position 3889 of SEQ ID NO: 1883841
uggagcuaauuacaauuua

SEQ ID NO: 2220277 - RNA, 19 nt, Artificial Sequence
  Description of Artificial Sequence: Synthetic oligonucleotide
  Antisense strand to SEQ ID NO: 2220276
uaaauuguaauuagcucca

SEQ ID NO: 2220278 - RNA, 19 nt, Artificial Sequence
  Description of Artificial Sequence: Synthetic oligonucleotide
  Sense strand starting at position 2125 of SEQ ID NO: 1883841
gucauuauugcugacaucu

SEQ ID NO: 2220279 - RNA, 19 nt, Artificial Sequence
  Description of Artificial Sequence: Synthetic oligonucleotide
  Antisense strand to SEQ ID NO: 2220278
agaugucagcaauaaugac

SEQ ID NO: 2220280 - RNA, 19 nt, Artificial Sequence
  Description of Artificial Sequence: Synthetic oligonucleotide
  Sense strand starting at position 195 of SEQ ID NO: 1883841
ucaggagugcuuuaggguu

SEQ ID NO: 2220281 - RNA, 19 nt, Artificial Sequence
  Description of Artificial Sequence: Synthetic oligonucleotide
  Antisense strand to SEQ ID NO: 2220280
aacccuaaagcacuccuga

SEQ ID NO: 2220282 - RNA, 19 nt, Artificial Sequence
  Description of Artificial Sequence: Synthetic oligonucleotide
  Sense strand starting at position 2061 of SEQ ID NO: 1883841
cuuaaauugccagggaguu

SEQ ID NO: 2220283 - RNA, 19 nt, Artificial Sequence
  Description of Artificial Sequence: Synthetic oligonucleotide
  Antisense strand to SEQ ID NO: 2220282
aacucccuggcaauuuaag

SEQ ID NO: 2220284 - RNA, 19 nt, Artificial Sequence
  Description of Artificial Sequence: Synthetic oligonucleotide
  Sense strand starting at position 1081 of SEQ ID NO: 1883841
ugcuuaacucugugggaaa

SEQ ID NO: 2220285 - RNA, 19 nt, Artificial Sequence
  Description of Artificial Sequence: Synthetic oligonucleotide
  Antisense strand to SEQ ID NO: 2220284
uuucccacagaguuaagca

SEQ ID NO: 2220286 - RNA, 19 nt, Artificial Sequence
  Description of Artificial Sequence: Synthetic oligonucleotide
  Sense strand starting at position 2123 of SEQ ID NO: 1883841
aggucauuauugcugacau

SEQ ID NO: 2220287 - RNA, 19 nt, Artificial Sequence
  Description of Artificial Sequence: Synthetic oligonucleotide
  Antisense strand to SEQ ID NO: 2220286
augucagcaauaaugaccu

SEQ ID NO: 2220288 - RNA, 19 nt, Artificial Sequence
  Description of Artificial Sequence: Synthetic oligonucleotide
  Sense strand starting at position 3235 of SEQ ID NO: 1883841
gguucuuguccagaacugu

SEQ ID NO: 2220289 - RNA, 19 nt, Artificial Sequence
  Description of Artificial Sequence: Synthetic oligonucleotide
  Antisense strand to SEQ ID NO: 2220288
acaguucuggacaagaacc

SEQ ID NO: 2220290 - RNA, 19 nt, Artificial Sequence
  Description of Artificial Sequence: Synthetic oligonucleotide
  Sense strand starting at position 3438 of SEQ ID NO: 1883841
guucuccuccucuaguaau

SEQ ID NO: 2220291 - RNA, 19 nt, Artificial Sequence
  Description of Artificial Sequence: Synthetic oligonucleotide
  Antisense strand to SEQ ID NO: 2220290
auuacuagaggaggagaac

SEQ ID NO: 2220292 - RNA, 19 nt, Artificial Sequence
  Description of Artificial Sequence: Synthetic oligonucleotide
  Sense strand starting at position 3570 of SEQ ID NO: 1883841
agcacugugcaaggauuaa

SEQ ID NO: 2220293 - RNA, 19 nt, Artificial Sequence
  Description of Artificial Sequence: Synthetic oligonucleotide
  Antisense strand to SEQ ID NO: 2220292
uuaauccuugcacagugcu

SEQ ID NO: 2220294 - RNA, 19 nt, Artificial Sequence
  Description of Artificial Sequence: Synthetic oligonucleotide
  Sense strand starting at position 1488 of SEQ ID NO: 1883841
aguuccaucuaguuccaua

SEQ ID NO: 2220295 - RNA, 19 nt, Artificial Sequence
  Description of Artificial Sequence: Synthetic oligonucleotide
  Antisense strand to SEQ ID NO: 2220294
uauggaacuagauggaacu

SEQ ID NO: 2220296 - RNA, 19 nt, Artificial Sequence
  Description of Artificial Sequence: Synthetic oligonucleotide
  Sense strand starting at position 1342 of SEQ ID NO: 1883841
uuuaaugguuccuuuaagu

SEQ ID NO: 2220297 - RNA, 19 nt, Artificial Sequence
  Description of Artificial Sequence: Synthetic oligonucleotide
  Antisense strand to SEQ ID NO: 2220296
acuuaaaggaaccauuaaa

SEQ ID NO: 2220298 - RNA, 19 nt, Artificial Sequence
  Description of Artificial Sequence: Synthetic oligonucleotide
  Sense strand starting at position 570 of SEQ ID NO: 1883841
gagcauuucuuaggaaagg

SEQ ID NO: 2220299 - RNA, 19 nt, Artificial Sequence
  Description of Artificial Sequence: Synthetic oligonucleotide
  Antisense strand to SEQ ID NO: 2220298
ccuuuccuaagaaaugcuc

SEQ ID NO: 2220300 - RNA, 19 nt, Artificial Sequence
  Description of Artificial Sequence: Synthetic oligonucleotide
  Sense strand starting at position 1170 of SEQ ID NO: 1883841
agcuuaucucugugaauac

SEQ ID NO: 2220301 - RNA, 19 nt, Artificial Sequence
  Description of Artificial Sequence: Synthetic oligonucleotide
  Antisense strand to SEQ ID NO: 2220300
guauucacagagauaagcu

SEQ ID NO: 2220302 - RNA, 19 nt, Artificial Sequence
  Description of Artificial Sequence: Synthetic oligonucleotide
  Sense strand starting at position 3804 of SEQ ID NO: 1883841
gcccaaugucucuaagcca

SEQ ID NO: 2220303 - RNA, 19 nt, Artificial Sequence
  Description of Artificial Sequence: Synthetic oligonucleotide
  Antisense strand to SEQ ID NO: 2220302
uggcuuagagacauugggc

SEQ ID NO: 2220304 - RNA, 19 nt, Artificial Sequence
  Description of Artificial Sequence: Synthetic oligonucleotide
  Sense strand starting at position 3472 of SEQ ID NO: 1883841
gaggcuaagugucccuuaa

SEQ ID NO: 2220305 - RNA, 19 nt, Artificial Sequence
  Description of Artificial Sequence: Synthetic oligonucleotide
  Antisense strand to SEQ ID NO: 2220304
uuaagggacacuuagccuc

SEQ ID NO: 2220306 - RNA, 19 nt, Artificial Sequence
  Description of Artificial Sequence: Synthetic oligonucleotide
  Sense strand starting at position 1530 of SEQ ID NO: 1883841
gguccuugaugcccagauu

SEQ ID NO: 2220307 - RNA, 19 nt, Artificial Sequence
  Description of Artificial Sequence: Synthetic oligonucleotide
  Antisense strand to SEQ ID NO: 2220306
aaucugggcaucaaggacc

SEQ ID NO: 2220308 - RNA, 19 nt, Artificial Sequence
  Description of Artificial Sequence: Synthetic oligonucleotide
  Sense strand starting at position 2466 of SEQ ID NO: 1883841
gugugagccacccagcaua

SEQ ID NO: 2220309 - RNA, 19 nt, Artificial Sequence
  Description of Artificial Sequence: Synthetic oligonucleotide
  Antisense strand to SEQ ID NO: 2220308
uaugcuggguggcucacac

SEQ ID NO: 2220310 - RNA, 19 nt, Artificial Sequence
  Description of Artificial Sequence: Synthetic oligonucleotide
  Sense strand starting at position 1080 of SEQ ID NO: 1883841
gugcuuaacucugugggaa

SEQ ID NO: 2220311 - RNA, 19 nt, Artificial Sequence
  Description of Artificial Sequence: Synthetic oligonucleotide
  Antisense strand to SEQ ID NO: 2220310
uucccacagaguuaagcac

SEQ ID NO: 2220312 - RNA, 19 nt, Artificial Sequence
  Description of Artificial Sequence: Synthetic oligonucleotide
  Sense strand starting at position 1167 of SEQ ID NO: 1883841
cccagcuuaucucugugaa

SEQ ID NO: 2220313 - RNA, 19 nt, Artificial Sequence
  Description of Artificial Sequence: Synthetic oligonucleotide
  Antisense strand to SEQ ID NO: 2220312
uucacagagauaagcuggg

SEQ ID NO: 2220314 - RNA, 19 nt, Artificial Sequence
  Description of Artificial Sequence: Synthetic oligonucleotide
  Sense strand starting at position 1266 of SEQ ID NO: 1883841
ugaugucaucgaugauguc

SEQ ID NO: 2220315 - RNA, 19 nt, Artificial Sequence
  Description of Artificial Sequence: Synthetic oligonucleotide
  Antisense strand to SEQ ID NO: 2220314
gacaucaucgaugacauca

SEQ ID NO: 2220316 - RNA, 19 nt, Artificial Sequence
  Description of Artificial Sequence: Synthetic oligonucleotide
  Sense strand starting at position 1775 of SEQ ID NO: 1883841
cacuguguuuaacugcaga

SEQ ID NO: 2220317 - RNA, 19 nt, Artificial Sequence
  Description of Artificial Sequence: Synthetic oligonucleotide
  Antisense strand to SEQ ID NO: 2220316
ucugcaguuaaacacagug

SEQ ID NO: 2220318 - RNA, 19 nt, Artificial Sequence
  Description of Artificial Sequence: Synthetic oligonucleotide
  Sense strand starting at position 3163 of SEQ ID NO: 1883842
gcacacauggcauaaugaa

SEQ ID NO: 2220319 - RNA, 19 nt, Artificial Sequence
  Description of Artificial Sequence: Synthetic oligonucleotide
  Antisense strand to SEQ ID NO: 2220318
uucauuaugccaugugugc

SEQ ID NO: 2220320 - RNA, 19 nt, Artificial Sequence
  Description of Artificial Sequence: Synthetic oligonucleotide
  Sense strand starting at position 1306 of SEQ ID NO: 1883842
ccauuuccucugugauccu

SEQ ID NO: 2220321 - RNA, 19 nt, Artificial Sequence
  Description of Artificial Sequence: Synthetic oligonucleotide
  Antisense strand to SEQ ID NO: 2220320
aggaucacagaggaaaugg

SEQ ID NO: 2220322 - RNA, 19 nt, Artificial Sequence
  Description of Artificial Sequence: Synthetic oligonucleotide
  Sense strand starting at position 1411 of SEQ ID NO: 1883842
acugaucuggaguaucuuu

SEQ ID NO: 2220323 - RNA, 19 nt, Artificial Sequence
  Description of Artificial Sequence: Synthetic oligonucleotide
  Antisense strand to SEQ ID NO: 2220322
aaagauacuccagaucagu

SEQ ID NO: 2220324 - RNA, 19 nt, Artificial Sequence
  Description of Artificial Sequence: Synthetic oligonucleotide
  Sense strand starting at position 991 of SEQ ID NO: 1883842
gaagacuaucugggcauga

SEQ ID NO: 2220325 - RNA, 19 nt, Artificial Sequence
  Description of Artificial Sequence: Synthetic oligonucleotide
  Antisense strand to SEQ ID NO: 2220324
ucaugcccagauagucuuc

SEQ ID NO: 2220326 - RNA, 19 nt, Artificial Sequence
  Description of Artificial Sequence: Synthetic oligonucleotide
  Sense strand starting at position 2120 of SEQ ID NO: 1883842
agagcugguaaguaucaga

SEQ ID NO: 2220327 - RNA, 19 nt, Artificial Sequence
  Description of Artificial Sequence: Synthetic oligonucleotide
  Antisense strand to SEQ ID NO: 2220326
ucugauacuuaccagcucu

SEQ ID NO: 2220328 - RNA, 19 nt, Artificial Sequence
  Description of Artificial Sequence: Synthetic oligonucleotide
  Sense strand starting at position 1996 of SEQ ID NO: 1883842
gcagaugaucuggaguauu

SEQ ID NO: 2220329 - RNA, 19 nt, Artificial Sequence
  Description of Artificial Sequence: Synthetic oligonucleotide
  Antisense strand to SEQ ID NO: 2220328
aauacuccagaucaucugc

SEQ ID NO: 2220330 - RNA, 19 nt, Artificial Sequence
  Description of Artificial Sequence: Synthetic oligonucleotide
  Sense strand starting at position 3585 of SEQ ID NO: 1883842
cucuguguccuagaauaaa

SEQ ID NO: 2220331 - RNA, 19 nt, Artificial Sequence
  Description of Artificial Sequence: Synthetic oligonucleotide
  Antisense strand to SEQ ID NO: 2220330
uuuauucuaggacacagag

SEQ ID NO: 2220332 - RNA, 19 nt, Artificial Sequence
  Description of Artificial Sequence: Synthetic oligonucleotide
  Sense strand starting at position 711 of SEQ ID NO: 1883842
gauguaggugauggaugau

SEQ ID NO: 2220333 - RNA, 19 nt, Artificial Sequence
  Description of Artificial Sequence: Synthetic oligonucleotide
  Antisense strand to SEQ ID NO: 2220332
aucauccaucaccuacauc

SEQ ID NO: 2220334 - RNA, 19 nt, Artificial Sequence
  Description of Artificial Sequence: Synthetic oligonucleotide
  Sense strand starting at position 3220 of SEQ ID NO: 1883842
guguucucacaccaaggau

SEQ ID NO: 2220335 - RNA, 19 nt, Artificial Sequence
  Description of Artificial Sequence: Synthetic oligonucleotide
  Antisense strand to SEQ ID NO: 2220334
auccuuggugugagaacac

SEQ ID NO: 2220336 - RNA, 19 nt, Artificial Sequence
  Description of Artificial Sequence: Synthetic oligonucleotide
  Sense strand starting at position 1218 of SEQ ID NO: 1883842
ggguucacugaugagcuua

SEQ ID NO: 2220337 - RNA, 19 nt, Artificial Sequence
  Description of Artificial Sequence: Synthetic oligonucleotide
  Antisense strand to SEQ ID NO: 2220336
uaagcucaucagugaaccc

SEQ ID NO: 2220338 - RNA, 19 nt, Artificial Sequence
  Description of Artificial Sequence: Synthetic oligonucleotide
  Sense strand starting at position 3311 of SEQ ID NO: 1883842
ccuauagcucuagggaaau

SEQ ID NO: 2220339 - RNA, 19 nt, Artificial Sequence
  Description of Artificial Sequence: Synthetic oligonucleotide
  Antisense strand to SEQ ID NO: 2220338
auuucccuagagcuauagg

SEQ ID NO: 2220340 - RNA, 19 nt, Artificial Sequence
  Description of Artificial Sequence: Synthetic oligonucleotide
  Sense strand starting at position 2225 of SEQ ID NO: 1883842
aaacuuguugaagguauua

SEQ ID NO: 2220341 - RNA, 19 nt, Artificial Sequence
  Description of Artificial Sequence: Synthetic oligonucleotide
  Antisense strand to SEQ ID NO: 2220340
uaauaccuucaacaaguuu

SEQ ID NO: 2220342 - RNA, 19 nt, Artificial Sequence
  Description of Artificial Sequence: Synthetic oligonucleotide
  Sense strand starting at position 1304 of SEQ ID NO: 1883842
ugccauuuccucugugauc

SEQ ID NO: 2220343 - RNA, 19 nt, Artificial Sequence
  Description of Artificial Sequence: Synthetic oligonucleotide
  Antisense strand to SEQ ID NO: 2220342
gaucacagaggaaauggca

SEQ ID NO: 2220344 - RNA, 19 nt, Artificial Sequence
  Description of Artificial Sequence: Synthetic oligonucleotide
  Sense strand starting at position 2575 of SEQ ID NO: 1883842
acaguagauacucaguguu

SEQ ID NO: 2220345 - RNA, 19 nt, Artificial Sequence
  Description of Artificial Sequence: Synthetic oligonucleotide
  Antisense strand to SEQ ID NO: 2220344
aacacugaguaucuacugu

SEQ ID NO: 2220346 - RNA, 19 nt, Artificial Sequence
  Description of Artificial Sequence: Synthetic oligonucleotide
  Sense strand starting at position 1985 of SEQ ID NO: 1883842
cuuaauuggcugcagauga

SEQ ID NO: 2220347 - RNA, 19 nt, Artificial Sequence
  Description of Artificial Sequence: Synthetic oligonucleotide
  Antisense strand to SEQ ID NO: 2220346
ucaucugcagccaauuaag

SEQ ID NO: 2220348 - RNA, 19 nt, Artificial Sequence
  Description of Artificial Sequence: Synthetic oligonucleotide
  Sense strand starting at position 443 of SEQ ID NO: 1883842
guguaauguaacgacauga

SEQ ID NO: 2220349 - RNA, 19 nt, Artificial Sequence
  Description of Artificial Sequence: Synthetic oligonucleotide
  Antisense strand to SEQ ID NO: 2220348
ucaugucguuacauuacac

SEQ ID NO: 2220350 - RNA, 19 nt, Artificial Sequence
  Description of Artificial Sequence: Synthetic oligonucleotide
  Sense strand starting at position 707 of SEQ ID NO: 1883842
guaggauguaggugaugga

SEQ ID NO: 2220351 - RNA, 19 nt, Artificial Sequence
  Description of Artificial Sequence: Synthetic oligonucleotide
  Antisense strand to SEQ ID NO: 2220350
uccaucaccuacauccuac

SEQ ID NO: 2220352 - RNA, 19 nt, Artificial Sequence
  Description of Artificial Sequence: Synthetic oligonucleotide
  Sense strand starting at position 3643 of SEQ ID NO: 1883842
cuucuaggccauuaagcaa

SEQ ID NO: 2220353 - RNA, 19 nt, Artificial Sequence
  Description of Artificial Sequence: Synthetic oligonucleotide
  Antisense strand to SEQ ID NO: 2220352
uugcuuaauggccuagaag

SEQ ID NO: 2220354 - RNA, 19 nt, Artificial Sequence
  Description of Artificial Sequence: Synthetic oligonucleotide
  Sense strand starting at position 734 of SEQ ID NO: 1883842
cugagaucauugguucuca

SEQ ID NO: 2220355 - RNA, 19 nt, Artificial Sequence
  Description of Artificial Sequence: Synthetic oligonucleotide
  Antisense strand to SEQ ID NO: 2220354
ugagaaccaaugaucucag

SEQ ID NO: 2220356 - RNA, 19 nt, Artificial Sequence
  Description of Artificial Sequence: Synthetic oligonucleotide
  Sense strand starting at position 735 of SEQ ID NO: 1883842
ugagaucauugguucucau

SEQ ID NO: 2220357 - RNA, 19 nt, Artificial Sequence
  Description of Artificial Sequence: Synthetic oligonucleotide
  Antisense strand to SEQ ID NO: 2220356
augagaaccaaugaucuca

SEQ ID NO: 2220358 - RNA, 19 nt, Artificial Sequence
  Description of Artificial Sequence: Synthetic oligonucleotide
  Sense strand starting at position 618 of SEQ ID NO: 1883842
gaaaguugguguuuaggga

SEQ ID NO: 2220359 - RNA, 19 nt, Artificial Sequence
  Description of Artificial Sequence: Synthetic oligonucleotide
  Antisense strand to SEQ ID NO: 2220358
ucccuaaacaccaacuuuc

SEQ ID NO: 2220360 - RNA, 19 nt, Artificial Sequence
  Description of Artificial Sequence: Synthetic oligonucleotide
  Sense strand starting at position 800 of SEQ ID NO: 1883842
auggcagaucugcagcaaa

SEQ ID NO: 2220361 - RNA, 19 nt, Artificial Sequence
  Description of Artificial Sequence: Synthetic oligonucleotide
  Antisense strand to SEQ ID NO: 2220360
uuugcugcagaucugccau

SEQ ID NO: 2220362 - RNA, 19 nt, Artificial Sequence
  Description of Artificial Sequence: Synthetic oligonucleotide
  Sense strand starting at position 1313 of SEQ ID NO: 1883842
cucugugauccuggaauau

SEQ ID NO: 2220363 - RNA, 19 nt, Artificial Sequence
  Description of Artificial Sequence: Synthetic oligonucleotide
  Antisense strand to SEQ ID NO: 2220362
auauuccaggaucacagag

SEQ ID NO: 2220364 - RNA, 19 nt, Artificial Sequence
  Description of Artificial Sequence: Synthetic oligonucleotide
  Sense strand starting at position 2041 of SEQ ID NO: 1883842
agcugagaaugcucacaua

SEQ ID NO: 2220365 - RNA, 19 nt, Artificial Sequence
  Description of Artificial Sequence: Synthetic oligonucleotide
  Antisense strand to SEQ ID NO: 2220364
uaugugagcauucucagcu

SEQ ID NO: 2220366 - RNA, 19 nt, Artificial Sequence
  Description of Artificial Sequence: Synthetic oligonucleotide
  Sense strand starting at position 1251 of SEQ ID NO: 1883842
ucaaaugucuccucuugag

SEQ ID NO: 2220367 - RNA, 19 nt, Artificial Sequence
  Description of Artificial Sequence: Synthetic oligonucleotide
  Antisense strand to SEQ ID NO: 2220366
cucaagaggagacauuuga

SEQ ID NO: 2220368 - RNA, 19 nt, Artificial Sequence
  Description of Artificial Sequence: Synthetic oligonucleotide
  Sense strand starting at position 3 of SEQ ID NO: 1883842
cuuucuuucuacuuuggga

SEQ ID NO: 2220369 - RNA, 19 nt, Artificial Sequence
  Description of Artificial Sequence: Synthetic oligonucleotide
  Antisense strand to SEQ ID NO: 2220368
ucccaaaguagaaagaaag

SEQ ID NO: 2220370 - RNA, 19 nt, Artificial Sequence
  Description of Artificial Sequence: Synthetic oligonucleotide
  Sense strand starting at position 2989 of SEQ ID NO: 1883842
auauuuauguagggagaga

SEQ ID NO: 2220371 - RNA, 19 nt, Artificial Sequence
  Description of Artificial Sequence: Synthetic oligonucleotide
  Antisense strand to SEQ ID NO: 2220370
ucucucccuacauaaauau

SEQ ID NO: 2220372 - RNA, 19 nt, Artificial Sequence
  Description of Artificial Sequence: Synthetic oligonucleotide
  Sense strand starting at position 851 of SEQ ID NO: 1883842
agaucagugcuguaucauc

SEQ ID NO: 2220373 - RNA, 19 nt, Artificial Sequence
  Description of Artificial Sequence: Synthetic oligonucleotide
  Antisense strand to SEQ ID NO: 2220372
gaugauacagcacugaucu

SEQ ID NO: 2220374 - RNA, 19 nt, Artificial Sequence
  Description of Artificial Sequence: Synthetic oligonucleotide
  Sense strand starting at position 3081 of SEQ ID NO: 1883842
gagugaacucagcaugcuu

SEQ ID NO: 2220375 - RNA, 19 nt, Artificial Sequence
  Description of Artificial Sequence: Synthetic oligonucleotide
  Antisense strand to SEQ ID NO: 2220374
aagcaugcugaguucacuc

SEQ ID NO: 2220376 - RNA, 19 nt, Artificial Sequence
  Description of Artificial Sequence: Synthetic oligonucleotide
  Sense strand starting at position 2152 of SEQ ID NO: 1883842
ucuggcaaaugucucaaau

SEQ ID NO: 2220377 - RNA, 19 nt, Artificial Sequence
  Description of Artificial Sequence: Synthetic oligonucleotide
  Antisense strand to SEQ ID NO: 2220376
auuugagacauuugccaga

SEQ ID NO: 2220378 - RNA, 19 nt, Artificial Sequence
  Description of Artificial Sequence: Synthetic oligonucleotide
  Sense strand starting at position 3952 of SEQ ID NO: 1883842
uuaguaauugugugauaag

SEQ ID NO: 2220379 - RNA, 19 nt, Artificial Sequence
  Description of Artificial Sequence: Synthetic oligonucleotide
  Antisense strand to SEQ ID NO: 2220378
cuuaucacacaauuacuaa

SEQ ID NO: 2220380 - RNA, 19 nt, Artificial Sequence
  Description of Artificial Sequence: Synthetic oligonucleotide
  Sense strand starting at position 3962 of SEQ ID NO: 1883842
ugugauaaguugguucaag

SEQ ID NO: 2220381 - RNA, 19 nt, Artificial Sequence
  Description of Artificial Sequence: Synthetic oligonucleotide
  Antisense strand to SEQ ID NO: 2220380
cuugaaccaacuuaucaca

SEQ ID NO: 2220382 - RNA, 19 nt, Artificial Sequence
  Description of Artificial Sequence: Synthetic oligonucleotide
  Sense strand starting at position 1973 of SEQ ID NO: 1883842
gaacccaguuggcuuaauu

SEQ ID NO: 2220383 - RNA, 19 nt, Artificial Sequence
  Description of Artificial Sequence: Synthetic oligonucleotide
  Antisense strand to SEQ ID NO: 2220382
aauuaagccaacuggguuc

SEQ ID NO: 2220384 - RNA, 19 nt, Artificial Sequence
  Description of Artificial Sequence: Synthetic oligonucleotide
  Sense strand starting at position 2597 of SEQ ID NO: 1883842
uauaauggccguuaucauu

SEQ ID NO: 2220385 - RNA, 19 nt, Artificial Sequence
  Description of Artificial Sequence: Synthetic oligonucleotide
  Antisense strand to SEQ ID NO: 2220384
aaugauaacggccauuaua

SEQ ID NO: 2220386 - RNA, 19 nt, Artificial Sequence
  Description of Artificial Sequence: Synthetic oligonucleotide
  Sense strand starting at position 2577 of SEQ ID NO: 1883842
aguagauacucaguguuug

SEQ ID NO: 2220387 - RNA, 19 nt, Artificial Sequence
  Description of Artificial Sequence: Synthetic oligonucleotide
  Antisense strand to SEQ ID NO: 2220386
caaacacugaguaucuacu

SEQ ID NO: 2220388 - RNA, 19 nt, Artificial Sequence
  Description of Artificial Sequence: Synthetic oligonucleotide
  Sense strand starting at position 2691 of SEQ ID NO: 1883842
cagcaagacucguuuggga

SEQ ID NO: 2220389 - RNA, 19 nt, Artificial Sequence
  Description of Artificial Sequence: Synthetic oligonucleotide
  Antisense strand to SEQ ID NO: 2220388
ucccaaacgagucuugcug

SEQ ID NO: 2220390 - RNA, 19 nt, Artificial Sequence
  Description of Artificial Sequence: Synthetic oligonucleotide
  Sense strand starting at position 1004 of SEQ ID NO: 1883842
gcaugacacuucucaguua

SEQ ID NO: 2220391 - RNA, 19 nt, Artificial Sequence
  Description of Artificial Sequence: Synthetic oligonucleotide
  Antisense strand to SEQ ID NO: 2220390
uaacugagaagugucaugc

SEQ ID NO: 2220392 - RNA, 19 nt, Artificial Sequence
  Description of Artificial Sequence: Synthetic oligonucleotide
  Sense strand starting at position 744 of SEQ ID NO: 1883842
ugguucucauuugauagau

SEQ ID NO: 2220393 - RNA, 19 nt, Artificial Sequence
  Description of Artificial Sequence: Synthetic oligonucleotide
  Antisense strand to SEQ ID NO: 2220392
aucuaucaaaugagaacca

SEQ ID NO: 2220394 - RNA, 19 nt, Artificial Sequence
  Description of Artificial Sequence: Synthetic oligonucleotide
  Sense strand starting at position 540 of SEQ ID NO: 1883842
cuuucugccugauucugaa

SEQ ID NO: 2220395 - RNA, 19 nt, Artificial Sequence
  Description of Artificial Sequence: Synthetic oligonucleotide
  Antisense strand to SEQ ID NO: 2220394
uucagaaucaggcagaaag

SEQ ID NO: 2220396 - RNA, 19 nt, Artificial Sequence
  Description of Artificial Sequence: Synthetic oligonucleotide
  Sense strand starting at position 811 of SEQ ID NO: 1883842
gcagcaaagcuuugaauaa

SEQ ID NO: 2220397 - RNA, 19 nt, Artificial Sequence
  Description of Artificial Sequence: Synthetic oligonucleotide
  Antisense strand to SEQ ID NO: 2220396
uuauucaaagcuuugcugc

SEQ ID NO: 2220398 - RNA, 19 nt, Artificial Sequence
  Description of Artificial Sequence: Synthetic oligonucleotide
  Sense strand starting at position 1536 of SEQ ID NO: 1883843
caguuuagcccgccaagua

SEQ ID NO: 2220399 - RNA, 19 nt, Artificial Sequence
  Description of Artificial Sequence: Synthetic oligonucleotide
  Antisense strand to SEQ ID NO: 2220398
uacuuggcgggcuaaacug

SEQ ID NO: 2220400 - RNA, 19 nt, Artificial Sequence
  Description of Artificial Sequence: Synthetic oligonucleotide
  Sense strand starting at position 878 of SEQ ID NO: 1883843
gugugagugccucugaguu

SEQ ID NO: 2220401 - RNA, 19 nt, Artificial Sequence
  Description of Artificial Sequence: Synthetic oligonucleotide
  Antisense strand to SEQ ID NO: 2220400
aacucagaggcacucacac

SEQ ID NO: 2220402 - RNA, 19 nt, Artificial Sequence
  Description of Artificial Sequence: Synthetic oligonucleotide
  Sense strand starting at position 1259 of SEQ ID NO: 1883843
cgagucagaaccugcauuu

SEQ ID NO: 2220403 - RNA, 19 nt, Artificial Sequence
  Description of Artificial Sequence: Synthetic oligonucleotide
  Antisense strand to SEQ ID NO: 2220402
aaaugcagguucugacucg

SEQ ID NO: 2220404 - RNA, 19 nt, Artificial Sequence
  Description of Artificial Sequence: Synthetic oligonucleotide
  Sense strand starting at position 2505 of SEQ ID NO: 1883843
agucaaauguaaccugaaa

SEQ ID NO: 2220405 - RNA, 19 nt, Artificial Sequence
  Description of Artificial Sequence: Synthetic oligonucleotide
  Antisense strand to SEQ ID NO: 2220404
uuucagguuacauuugacu

SEQ ID NO: 2220406 - RNA, 19 nt, Artificial Sequence
  Description of Artificial Sequence: Synthetic oligonucleotide
  Sense strand starting at position 215 of SEQ ID NO: 1883843
aucucaaaguaguuaagaa

SEQ ID NO: 2220407 - RNA, 19 nt, Artificial Sequence
  Description of Artificial Sequence: Synthetic oligonucleotide
  Antisense strand to SEQ ID NO: 2220406
uucuuaacuacuuugagau

SEQ ID NO: 2220408 - RNA, 19 nt, Artificial Sequence
  Description of Artificial Sequence: Synthetic oligonucleotide
  Sense strand starting at position 1125 of SEQ ID NO: 1883843
ugggauuguuaucugaaga

SEQ ID NO: 2220409 - RNA, 19 nt, Artificial Sequence
  Description of Artificial Sequence: Synthetic oligonucleotide
  Antisense strand to SEQ ID NO: 2220408
ucuucagauaacaauccca

SEQ ID NO: 2220410 - RNA, 19 nt, Artificial Sequence
  Description of Artificial Sequence: Synthetic oligonucleotide
  Sense strand starting at position 1124 of SEQ ID NO: 1883843
augggauuguuaucugaag

SEQ ID NO: 2220411 - RNA, 19 nt, Artificial Sequence
  Description of Artificial Sequence: Synthetic oligonucleotide
  Antisense strand to SEQ ID NO: 2220410
cuucagauaacaaucccau

SEQ ID NO: 2220412 - RNA, 19 nt, Artificial Sequence
  Description of Artificial Sequence: Synthetic oligonucleotide
  Sense strand starting at position 164 of SEQ ID NO: 1883843
ggaaauucuaucuaguggu

SEQ ID NO: 2220413 - RNA, 19 nt, Artificial Sequence
  Description of Artificial Sequence: Synthetic oligonucleotide
  Antisense strand to SEQ ID NO: 2220412
accacuagauagaauuucc

SEQ ID NO: 2220414 - RNA, 19 nt, Artificial Sequence
  Description of Artificial Sequence: Synthetic oligonucleotide
  Sense strand starting at position 1126 of SEQ ID NO: 1883843
gggauuguuaucugaagac

SEQ ID NO: 2220415 - RNA, 19 nt, Artificial Sequence
  Description of Artificial Sequence: Synthetic oligonucleotide
  Antisense strand to SEQ ID NO: 2220414
gucuucagauaacaauccc

SEQ ID NO: 2220416 - RNA, 19 nt, Artificial Sequence
  Description of Artificial Sequence: Synthetic oligonucleotide
  Sense strand starting at position 259 of SEQ ID NO: 1883843
gaaaucaguucucuugaag

SEQ ID NO: 2220417 - RNA, 19 nt, Artificial Sequence
  Description of Artificial Sequence: Synthetic oligonucleotide
  Antisense strand to SEQ ID NO: 2220416
cuucaagagaacugauuuc

SEQ ID NO: 2220418 - RNA, 19 nt, Artificial Sequence
  Description of Artificial Sequence: Synthetic oligonucleotide
  Sense strand starting at position 2688 of SEQ ID NO: 1883843
aguaaauuacgguacauca

SEQ ID NO: 2220419 - RNA, 19 nt, Artificial Sequence
  Description of Artificial Sequence: Synthetic oligonucleotide
  Antisense strand to SEQ ID NO: 2220418
ugauguaccguaauuuacu

SEQ ID NO: 2220420 - RNA, 19 nt, Artificial Sequence
  Description of Artificial Sequence: Synthetic oligonucleotide
  Sense strand starting at position 262 of SEQ ID NO: 1883843
aucaguucucuugaaguaa

SEQ ID NO: 2220421 - RNA, 19 nt, Artificial Sequence
  Description of Artificial Sequence: Synthetic oligonucleotide
  Antisense strand to SEQ ID NO: 2220420
uuacuucaagagaacugau

SEQ ID NO: 2220422 - RNA, 19 nt, Artificial Sequence
  Description of Artificial Sequence: Synthetic oligonucleotide
  Sense strand starting at position 614 of SEQ ID NO: 1883843
uuuccaagucaguaucaga

SEQ ID NO: 2220423 - RNA, 19 nt, Artificial Sequence
  Description of Artificial Sequence: Synthetic oligonucleotide
  Antisense strand to SEQ ID NO: 2220422
ucugauacugacuuggaaa

SEQ ID NO: 2220424 - RNA, 19 nt, Artificial Sequence
  Description of Artificial Sequence: Synthetic oligonucleotide
  Sense strand starting at position 415 of SEQ ID NO: 1883843
ggaugagcccuauaccuuu

SEQ ID NO: 2220425 - RNA, 19 nt, Artificial Sequence
  Description of Artificial Sequence: Synthetic oligonucleotide
  Antisense strand to SEQ ID NO: 2220424
aaagguauagggcucaucc

SEQ ID NO: 2220426 - RNA, 19 nt, Artificial Sequence
  Description of Artificial Sequence: Synthetic oligonucleotide
  Sense strand starting at position 3668 of SEQ ID NO: 1883843
aaauguuuccgguaaugaa

SEQ ID NO: 2220427 - RNA, 19 nt, Artificial Sequence
  Description of Artificial Sequence: Synthetic oligonucleotide
  Antisense strand to SEQ ID NO: 2220426
uucauuaccggaaacauuu

SEQ ID NO: 2220428 - RNA, 19 nt, Artificial Sequence
  Description of Artificial Sequence: Synthetic oligonucleotide
  Sense strand starting at position 2397 of SEQ ID NO: 1883843
ucaagucauguggauccua

SEQ ID NO: 2220429 - RNA, 19 nt, Artificial Sequence
  Description of Artificial Sequence: Synthetic oligonucleotide
  Antisense strand to SEQ ID NO: 2220428
uaggauccacaugacuuga

SEQ ID NO: 2220430 - RNA, 19 nt, Artificial Sequence
  Description of Artificial Sequence: Synthetic oligonucleotide
  Sense strand starting at position 1115 of SEQ ID NO: 1883843
cugaaacuuaugggauugu

SEQ ID NO: 2220431 - RNA, 19 nt, Artificial Sequence
  Description of Artificial Sequence: Synthetic oligonucleotide
  Antisense strand to SEQ ID NO: 2220430
acaaucccauaaguuucag

SEQ ID NO: 2220432 - RNA, 19 nt, Artificial Sequence
  Description of Artificial Sequence: Synthetic oligonucleotide
  Sense strand starting at position 435 of SEQ ID NO: 1883843
ugguuuagucccuaaugag

SEQ ID NO: 2220433 - RNA, 19 nt, Artificial Sequence
  Description of Artificial Sequence: Synthetic oligonucleotide
  Antisense strand to SEQ ID NO: 2220432
cucauuagggacuaaacca

SEQ ID NO: 2220434 - RNA, 19 nt, Artificial Sequence
  Description of Artificial Sequence: Synthetic oligonucleotide
  Sense strand starting at position 2405 of SEQ ID NO: 1883843
uguggauccuaccuauaag

SEQ ID NO: 2220435 - RNA, 19 nt, Artificial Sequence
  Description of Artificial Sequence: Synthetic oligonucleotide
  Antisense strand to SEQ ID NO: 2220434
cuuauagguaggauccaca

SEQ ID NO: 2220436 - RNA, 19 nt, Artificial Sequence
  Description of Artificial Sequence: Synthetic oligonucleotide
  Sense strand starting at position 283 of SEQ ID NO: 1883843
ucaucuucucuuugaggaa

SEQ ID NO: 2220437 - RNA, 19 nt, Artificial Sequence
  Description of Artificial Sequence: Synthetic oligonucleotide
  Antisense strand to SEQ ID NO: 2220436
uuccucaaagagaagauga

SEQ ID NO: 2220438 - RNA, 19 nt, Artificial Sequence
  Description of Artificial Sequence: Synthetic oligonucleotide
  Sense strand starting at position 1055 of SEQ ID NO: 1883843
auaaguguuugugcauuua

SEQ ID NO: 2220439 - RNA, 19 nt, Artificial Sequence
  Description of Artificial Sequence: Synthetic oligonucleotide
  Antisense strand to SEQ ID NO: 2220438
uaaaugcacaaacacuuau

SEQ ID NO: 2220440 - RNA, 19 nt, Artificial Sequence
  Description of Artificial Sequence: Synthetic oligonucleotide
  Sense strand starting at position 1119 of SEQ ID NO: 1883843
aacuuaugggauuguuauc

SEQ ID NO: 2220441 - RNA, 19 nt, Artificial Sequence
  Description of Artificial Sequence: Synthetic oligonucleotide
  Antisense strand to SEQ ID NO: 2220440
gauaacaaucccauaaguu

SEQ ID NO: 2220442 - RNA, 19 nt, Artificial Sequence
  Description of Artificial Sequence: Synthetic oligonucleotide
  Sense strand starting at position 2328 of SEQ ID NO: 1883843
auuacuuaggcaugacauu

SEQ ID NO: 2220443 - RNA, 19 nt, Artificial Sequence
  Description of Artificial Sequence: Synthetic oligonucleotide
  Antisense strand to SEQ ID NO: 2220442
aaugucaugccuaaguaau

SEQ ID NO: 2220444 - RNA, 19 nt, Artificial Sequence
  Description of Artificial Sequence: Synthetic oligonucleotide
  Sense strand starting at position 521 of SEQ ID NO: 1883843
ugacuuaaguaucuaguga

SEQ ID NO: 2220445 - RNA, 19 nt, Artificial Sequence
  Description of Artificial Sequence: Synthetic oligonucleotide
  Antisense strand to SEQ ID NO: 2220444
ucacuagauacuuaaguca

SEQ ID NO: 2220446 - RNA, 19 nt, Artificial Sequence
  Description of Artificial Sequence: Synthetic oligonucleotide
  Sense strand starting at position 3960 of SEQ ID NO: 1883843
uccuuaacuguugggauua

SEQ ID NO: 2220447 - RNA, 19 nt, Artificial Sequence
  Description of Artificial Sequence: Synthetic oligonucleotide
  Antisense strand to SEQ ID NO: 2220446
uaaucccaacaguuaagga

SEQ ID NO: 2220448 - RNA, 19 nt, Artificial Sequence
  Description of Artificial Sequence: Synthetic oligonucleotide
  Sense strand starting at position 777 of SEQ ID NO: 1883843
aucauagucuaaucaaguu

SEQ ID NO: 2220449 - RNA, 19 nt, Artificial Sequence
  Description of Artificial Sequence: Synthetic oligonucleotide
  Antisense strand to SEQ ID NO: 2220448
aacuugauuagacuaugau

SEQ ID NO: 2220450 - RNA, 19 nt, Artificial Sequence
  Description of Artificial Sequence: Synthetic oligonucleotide
  Sense strand starting at position 2761 of SEQ ID NO: 1883843
acguauugccuauacauaa

SEQ ID NO: 2220451 - RNA, 19 nt, Artificial Sequence
  Description of Artificial Sequence: Synthetic oligonucleotide
  Antisense strand to SEQ ID NO: 2220450
uuauguauaggcaauacgu

SEQ ID NO: 2220452 - RNA, 19 nt, Artificial Sequence
  Description of Artificial Sequence: Synthetic oligonucleotide
  Sense strand starting at position 1839 of SEQ ID NO: 1883843
guauaacagcauugacuau

SEQ ID NO: 2220453 - RNA, 19 nt, Artificial Sequence
  Description of Artificial Sequence: Synthetic oligonucleotide
  Antisense strand to SEQ ID NO: 2220452
auagucaaugcuguuauac

SEQ ID NO: 2220454 - RNA, 19 nt, Artificial Sequence
  Description of Artificial Sequence: Synthetic oligonucleotide
  Sense strand starting at position 3583 of SEQ ID NO: 1883843
cauaaauggcuacgugaaa

SEQ ID NO: 2220455 - RNA, 19 nt, Artificial Sequence
  Description of Artificial Sequence: Synthetic oligonucleotide
  Antisense strand to SEQ ID NO: 2220454
uuucacguagccauuuaug

SEQ ID NO: 2220456 - RNA, 19 nt, Artificial Sequence
  Description of Artificial Sequence: Synthetic oligonucleotide
  Sense strand starting at position 1217 of SEQ ID NO: 1883843
gcuuauuagagaugcagac

SEQ ID NO: 2220457 - RNA, 19 nt, Artificial Sequence
  Description of Artificial Sequence: Synthetic oligonucleotide
  Antisense strand to SEQ ID NO: 2220456
gucugcaucucuaauaagc

SEQ ID NO: 2220458 - RNA, 19 nt, Artificial Sequence
  Description of Artificial Sequence: Synthetic oligonucleotide
  Sense strand starting at position 2032 of SEQ ID NO: 1883843
ccuuguugugcagagggau

SEQ ID NO: 2220459 - RNA, 19 nt, Artificial Sequence
  Description of Artificial Sequence: Synthetic oligonucleotide
  Antisense strand to SEQ ID NO: 2220458
aucccucugcacaacaagg

SEQ ID NO: 2220460 - RNA, 19 nt, Artificial Sequence
  Description of Artificial Sequence: Synthetic oligonucleotide
  Sense strand starting at position 3457 of SEQ ID NO: 1883843
caguauuuaucugacugga

SEQ ID NO: 2220461 - RNA, 19 nt, Artificial Sequence
  Description of Artificial Sequence: Synthetic oligonucleotide
  Antisense strand to SEQ ID NO: 2220460
uccagucagauaaauacug

SEQ ID NO: 2220462 - RNA, 19 nt, Artificial Sequence
  Description of Artificial Sequence: Synthetic oligonucleotide
  Sense strand starting at position 2759 of SEQ ID NO: 1883843
auacguauugccuauacau

SEQ ID NO: 2220463 - RNA, 19 nt, Artificial Sequence
  Description of Artificial Sequence: Synthetic oligonucleotide
  Antisense strand to SEQ ID NO: 2220462
auguauaggcaauacguau

SEQ ID NO: 2220464 - RNA, 19 nt, Artificial Sequence
  Description of Artificial Sequence: Synthetic oligonucleotide
  Sense strand starting at position 824 of SEQ ID NO: 1883843
gucugugacaaguaguauc

SEQ ID NO: 2220465 - RNA, 19 nt, Artificial Sequence
  Description of Artificial Sequence: Synthetic oligonucleotide
  Antisense strand to SEQ ID NO: 2220464
gauacuacuugucacagac

SEQ ID NO: 2220466 - RNA, 19 nt, Artificial Sequence
  Description of Artificial Sequence: Synthetic oligonucleotide
  Sense strand starting at position 434 of SEQ ID NO: 1883843
cugguuuagucccuaauga

SEQ ID NO: 2220467 - RNA, 19 nt, Artificial Sequence
  Description of Artificial Sequence: Synthetic oligonucleotide
  Antisense strand to SEQ ID NO: 2220466
ucauuagggacuaaaccag

SEQ ID NO: 2220468 - RNA, 19 nt, Artificial Sequence
  Description of Artificial Sequence: Synthetic oligonucleotide
  Sense strand starting at position 1934 of SEQ ID NO: 1883843
auugcuauggcccaucgaa

SEQ ID NO: 2220469 - RNA, 19 nt, Artificial Sequence
  Description of Artificial Sequence: Synthetic oligonucleotide
  Antisense strand to SEQ ID NO: 2220468
uucgaugggccauagcaau

SEQ ID NO: 2220470 - RNA, 19 nt, Artificial Sequence
  Description of Artificial Sequence: Synthetic oligonucleotide
  Sense strand starting at position 2723 of SEQ ID NO: 1883843
gcagccauugaagguaaua

SEQ ID NO: 2220471 - RNA, 19 nt, Artificial Sequence
  Description of Artificial Sequence: Synthetic oligonucleotide
  Antisense strand to SEQ ID NO: 2220470
uauuaccuucaauggcugc

SEQ ID NO: 2220472 - RNA, 19 nt, Artificial Sequence
  Description of Artificial Sequence: Synthetic oligonucleotide
  Sense strand starting at position 1063 of SEQ ID NO: 1883843
uugugcauuuacugauuua

SEQ ID NO: 2220473 - RNA, 19 nt, Artificial Sequence
  Description of Artificial Sequence: Synthetic oligonucleotide
  Antisense strand to SEQ ID NO: 2220472
uaaaucaguaaaugcacaa

SEQ ID NO: 2220474 - RNA, 19 nt, Artificial Sequence
  Description of Artificial Sequence: Synthetic oligonucleotide
  Sense strand starting at position 2628 of SEQ ID NO: 1883843
ccgaauaauuguuucucca

SEQ ID NO: 2220475 - RNA, 19 nt, Artificial Sequence
  Description of Artificial Sequence: Synthetic oligonucleotide
  Antisense strand to SEQ ID NO: 2220474
uggagaaacaauuauucgg

SEQ ID NO: 2220476 - RNA, 19 nt, Artificial Sequence
  Description of Artificial Sequence: Synthetic oligonucleotide
  Sense strand starting at position 2632 of SEQ ID NO: 1883843
auaauuguuucuccaggca

SEQ ID NO: 2220477 - RNA, 19 nt, Artificial Sequence
  Description of Artificial Sequence: Synthetic oligonucleotide
  Antisense strand to SEQ ID NO: 2220476
ugccuggagaaacaauuau

SEQ ID NO: 2220478 - RNA, 19 nt, Artificial Sequence
  Description of Artificial Sequence: Synthetic oligonucleotide
  Sense strand starting at position 1612 of SEQ ID NO: 1883844
cucuguuaaucauuuggca

SEQ ID NO: 2220479 - RNA, 19 nt, Artificial Sequence
  Description of Artificial Sequence: Synthetic oligonucleotide
  Antisense strand to SEQ ID NO: 2220478
ugccaaaugauuaacagag

SEQ ID NO: 2220480 - RNA, 19 nt, Artificial Sequence
  Description of Artificial Sequence: Synthetic oligonucleotide
  Sense strand starting at position 1909 of SEQ ID NO: 1883844
aucuuuguccaggaaacuc

SEQ ID NO: 2220481 - RNA, 19 nt, Artificial Sequence
  Description of Artificial Sequence: Synthetic oligonucleotide
  Antisense strand to SEQ ID NO: 2220480
gaguuuccuggacaaagau

SEQ ID NO: 2220482 - RNA, 19 nt, Artificial Sequence
  Description of Artificial Sequence: Synthetic oligonucleotide
  Sense strand starting at position 1906 of SEQ ID NO: 1883844
uuuaucuuuguccaggaaa

SEQ ID NO: 2220483 - RNA, 19 nt, Artificial Sequence
  Description of Artificial Sequence: Synthetic oligonucleotide
  Antisense strand to SEQ ID NO: 2220482
uuuccuggacaaagauaaa

SEQ ID NO: 2220484 - RNA, 19 nt, Artificial Sequence
  Description of Artificial Sequence: Synthetic oligonucleotide
  Sense strand starting at position 2498 of SEQ ID NO: 1883844
uguugcgaauuugugaaga

SEQ ID NO: 2220485 - RNA, 19 nt, Artificial Sequence
  Description of Artificial Sequence: Synthetic oligonucleotide
  Antisense strand to SEQ ID NO: 2220484
ucuucacaaauucgcaaca

SEQ ID NO: 2220486 - RNA, 19 nt, Artificial Sequence
  Description of Artificial Sequence: Synthetic oligonucleotide
  Sense strand starting at position 1856 of SEQ ID NO: 1883844
ucucaagagugaucaucag

SEQ ID NO: 2220487 - RNA, 19 nt, Artificial Sequence
  Description of Artificial Sequence: Synthetic oligonucleotide
  Antisense strand to SEQ ID NO: 2220486
cugaugaucacucuugaga

SEQ ID NO: 2220488 - RNA, 19 nt, Artificial Sequence
  Description of Artificial Sequence: Synthetic oligonucleotide
  Sense strand starting at position 284 of SEQ ID NO: 1883844
cugggauuacaguagcuau

SEQ ID NO: 2220489 - RNA, 19 nt, Artificial Sequence
  Description of Artificial Sequence: Synthetic oligonucleotide
  Antisense strand to SEQ ID NO: 2220488
auagcuacuguaaucccag

SEQ ID NO: 2220490 - RNA, 19 nt, Artificial Sequence
  Description of Artificial Sequence: Synthetic oligonucleotide
  Sense strand starting at position 3876 of SEQ ID NO: 1883844
aauagagaauaugugcauu

SEQ ID NO: 2220491 - RNA, 19 nt, Artificial Sequence
  Description of Artificial Sequence: Synthetic oligonucleotide
  Antisense strand to SEQ ID NO: 2220490
aaugcacauauucucuauu

SEQ ID NO: 2220492 - RNA, 19 nt, Artificial Sequence
  Description of Artificial Sequence: Synthetic oligonucleotide
  Sense strand starting at position 2607 of SEQ ID NO: 1883844
cuaccagaucaaugcuaag

SEQ ID NO: 2220493 - RNA, 19 nt, Artificial Sequence
  Description of Artificial Sequence: Synthetic oligonucleotide
  Antisense strand to SEQ ID NO: 2220492
cuuagcauugaucugguag

SEQ ID NO: 2220494 - RNA, 19 nt, Artificial Sequence
  Description of Artificial Sequence: Synthetic oligonucleotide
  Sense strand starting at position 2570 of SEQ ID NO: 1883844
gaggcuugacugugaggaa

SEQ ID NO: 2220495 - RNA, 19 nt, Artificial Sequence
  Description of Artificial Sequence: Synthetic oligonucleotide
  Antisense strand to SEQ ID NO: 2220494
uuccucacagucaagccuc

SEQ ID NO: 2220496 - RNA, 19 nt, Artificial Sequence
  Description of Artificial Sequence: Synthetic oligonucleotide
  Sense strand starting at position 919 of SEQ ID NO: 1883844
aucugaagauugcuguaaa

SEQ ID NO: 2220497 - RNA, 19 nt, Artificial Sequence
  Description of Artificial Sequence: Synthetic oligonucleotide
  Antisense strand to SEQ ID NO: 2220496
uuuacagcaaucuucagau

SEQ ID NO: 2220498 - RNA, 19 nt, Artificial Sequence
  Description of Artificial Sequence: Synthetic oligonucleotide
  Sense strand starting at position 3799 of SEQ ID NO: 1883844
guuccucucccuuauagac

SEQ ID NO: 2220499 - RNA, 19 nt, Artificial Sequence
  Description of Artificial Sequence: Synthetic oligonucleotide
  Antisense strand to SEQ ID NO: 2220498
gucuauaagggagaggaac

SEQ ID NO: 2220500 - RNA, 19 nt, Artificial Sequence
  Description of Artificial Sequence: Synthetic oligonucleotide
  Sense strand starting at position 287 of SEQ ID NO: 1883844
ggauuacaguagcuaugau

SEQ ID NO: 2220501 - RNA, 19 nt, Artificial Sequence
  Description of Artificial Sequence: Synthetic oligonucleotide
  Antisense strand to SEQ ID NO: 2220500
aucauagcuacuguaaucc

SEQ ID NO: 2220502 - RNA, 19 nt, Artificial Sequence
  Description of Artificial Sequence: Synthetic oligonucleotide
  Sense strand starting at position 1956 of SEQ ID NO: 1883844
agauaugugcuuggaaauu

SEQ ID NO: 2220503 - RNA, 19 nt, Artificial Sequence
  Description of Artificial Sequence: Synthetic oligonucleotide
  Antisense strand to SEQ ID NO: 2220502
aauuuccaagcacauaucu

SEQ ID NO: 2220504 - RNA, 19 nt, Artificial Sequence
  Description of Artificial Sequence: Synthetic oligonucleotide
  Sense strand starting at position 1510 of SEQ ID NO: 1883844
uucugaaguuccuucugga

SEQ ID NO: 2220505 - RNA, 19 nt, Artificial Sequence
  Description of Artificial Sequence: Synthetic oligonucleotide
  Antisense strand to SEQ ID NO: 2220504
uccagaaggaacuucagaa

SEQ ID NO: 2220506 - RNA, 19 nt, Artificial Sequence
  Description of Artificial Sequence: Synthetic oligonucleotide
  Sense strand starting at position 917 of SEQ ID NO: 1883844
auaucugaagauugcugua

SEQ ID NO: 2220507 - RNA, 19 nt, Artificial Sequence
  Description of Artificial Sequence: Synthetic oligonucleotide
  Antisense strand to SEQ ID NO: 2220506
uacagcaaucuucagauau

SEQ ID NO: 2220508 - RNA, 19 nt, Artificial Sequence
  Description of Artificial Sequence: Synthetic oligonucleotide
  Sense strand starting at position 3000 of SEQ ID NO: 1883844
ccauauuucuagggaauga

SEQ ID NO: 2220509 - RNA, 19 nt, Artificial Sequence
  Description of Artificial Sequence: Synthetic oligonucleotide
  Antisense strand to SEQ ID NO: 2220508
ucauucccuagaaauaugg

SEQ ID NO: 2220510 - RNA, 19 nt, Artificial Sequence
  Description of Artificial Sequence: Synthetic oligonucleotide
  Sense strand starting at position 1446 of SEQ ID NO: 1883844
uuguauaagcuaugaucua

SEQ ID NO: 2220511 - RNA, 19 nt, Artificial Sequence
  Description of Artificial Sequence: Synthetic oligonucleotide
  Antisense strand to SEQ ID NO: 2220510
uagaucauagcuuauacaa

SEQ ID NO: 2220512 - RNA, 19 nt, Artificial Sequence
  Description of Artificial Sequence: Synthetic oligonucleotide
  Sense strand starting at position 1398 of SEQ ID NO: 1883844
uccuguaguuggguaggaa

SEQ ID NO: 2220513 - RNA, 19 nt, Artificial Sequence
  Description of Artificial Sequence: Synthetic oligonucleotide
  Antisense strand to SEQ ID NO: 2220512
uuccuacccaacuacagga

SEQ ID NO: 2220514 - RNA, 19 nt, Artificial Sequence
  Description of Artificial Sequence: Synthetic oligonucleotide
  Sense strand starting at position 1615 of SEQ ID NO: 1883844
uguuaaucauuuggcauuu

SEQ ID NO: 2220515 - RNA, 19 nt, Artificial Sequence
  Description of Artificial Sequence: Synthetic oligonucleotide
  Antisense strand to SEQ ID NO: 2220514
aaaugccaaaugauuaaca

SEQ ID NO: 2220516 - RNA, 19 nt, Artificial Sequence
  Description of Artificial Sequence: Synthetic oligonucleotide
  Sense strand starting at position 2309 of SEQ ID NO: 1883844
ccggccuuacuguagauau

SEQ ID NO: 2220517 - RNA, 19 nt, Artificial Sequence
  Description of Artificial Sequence: Synthetic oligonucleotide
  Antisense strand to SEQ ID NO: 2220516
auaucuacaguaaggccgg

SEQ ID NO: 2220518 - RNA, 19 nt, Artificial Sequence
  Description of Artificial Sequence: Synthetic oligonucleotide
  Sense strand starting at position 891 of SEQ ID NO: 1883844
ucaugcuggucacuacaua

SEQ ID NO: 2220519 - RNA, 19 nt, Artificial Sequence
  Description of Artificial Sequence: Synthetic oligonucleotide
  Antisense strand to SEQ ID NO: 2220518
uauguagugaccagcauga

SEQ ID NO: 2220520 - RNA, 19 nt, Artificial Sequence
  Description of Artificial Sequence: Synthetic oligonucleotide
  Sense strand starting at position 1336 of SEQ ID NO: 1883844
uaguaagagcuguaguucu

SEQ ID NO: 2220521 - RNA, 19 nt, Artificial Sequence
  Description of Artificial Sequence: Synthetic oligonucleotide
  Antisense strand to SEQ ID NO: 2220520
agaacuacagcucuuacua

SEQ ID NO: 2220522 - RNA, 19 nt, Artificial Sequence
  Description of Artificial Sequence: Synthetic oligonucleotide
  Sense strand starting at position 3655 of SEQ ID NO: 1883844
ccuuguaaugaaugccauu

SEQ ID NO: 2220523 - RNA, 19 nt, Artificial Sequence
  Description of Artificial Sequence: Synthetic oligonucleotide
  Antisense strand to SEQ ID NO: 2220522
aauggcauucauuacaagg

SEQ ID NO: 2220524 - RNA, 19 nt, Artificial Sequence
  Description of Artificial Sequence: Synthetic oligonucleotide
  Sense strand starting at position 512 of SEQ ID NO: 1883844
gagauagaguuucucucgu

SEQ ID NO: 2220525 - RNA, 19 nt, Artificial Sequence
  Description of Artificial Sequence: Synthetic oligonucleotide
  Antisense strand to SEQ ID NO: 2220524
acgagagaaacucuaucuc

SEQ ID NO: 2220526 - RNA, 19 nt, Artificial Sequence
  Description of Artificial Sequence: Synthetic oligonucleotide
  Sense strand starting at position 3795 of SEQ ID NO: 1883844
cugaguuccucucccuuau

SEQ ID NO: 2220527 - RNA, 19 nt, Artificial Sequence
  Description of Artificial Sequence: Synthetic oligonucleotide
  Antisense strand to SEQ ID NO: 2220526
auaagggagaggaacucag

SEQ ID NO: 2220528 - RNA, 19 nt, Artificial Sequence
  Description of Artificial Sequence: Synthetic oligonucleotide
  Sense strand starting at position 310 of SEQ ID NO: 1883844
gggcaugugccaugacaac

SEQ ID NO: 2220529 - RNA, 19 nt, Artificial Sequence
  Description of Artificial Sequence: Synthetic oligonucleotide
  Antisense strand to SEQ ID NO: 2220528
guugucauggcacaugccc

SEQ ID NO: 2220530 - RNA, 19 nt, Artificial Sequence
  Description of Artificial Sequence: Synthetic oligonucleotide
  Sense strand starting at position 876 of SEQ ID NO: 1883844
ucauguuggucauucucau

SEQ ID NO: 2220531 - RNA, 19 nt, Artificial Sequence
  Description of Artificial Sequence: Synthetic oligonucleotide
  Antisense strand to SEQ ID NO: 2220530
augagaaugaccaacauga

SEQ ID NO: 2220532 - RNA, 19 nt, Artificial Sequence
  Description of Artificial Sequence: Synthetic oligonucleotide
  Sense strand starting at position 3782 of SEQ ID NO: 1883844
caaaguuccuagccugagu

SEQ ID NO: 2220533 - RNA, 19 nt, Artificial Sequence
  Description of Artificial Sequence: Synthetic oligonucleotide
  Antisense strand to SEQ ID NO: 2220532
acucaggcuaggaacuuug

SEQ ID NO: 2220534 - RNA, 19 nt, Artificial Sequence
  Description of Artificial Sequence: Synthetic oligonucleotide
  Sense strand starting at position 1256 of SEQ ID NO: 1883844
cgauuugacucgggagaaa

SEQ ID NO: 2220535 - RNA, 19 nt, Artificial Sequence
  Description of Artificial Sequence: Synthetic oligonucleotide
  Antisense strand to SEQ ID NO: 2220534
uuucucccgagucaaaucg

SEQ ID NO: 2220536 - RNA, 19 nt, Artificial Sequence
  Description of Artificial Sequence: Synthetic oligonucleotide
  Sense strand starting at position 3643 of SEQ ID NO: 1883844
cguauuaccuaaccuugua

SEQ ID NO: 2220537 - RNA, 19 nt, Artificial Sequence
  Description of Artificial Sequence: Synthetic oligonucleotide
  Antisense strand to SEQ ID NO: 2220536
uacaagguuagguaauacg

SEQ ID NO: 2220538 - RNA, 19 nt, Artificial Sequence
  Description of Artificial Sequence: Synthetic oligonucleotide
  Sense strand starting at position 2500 of SEQ ID NO: 1883844
uugcgaauuugugaagaca

SEQ ID NO: 2220539 - RNA, 19 nt, Artificial Sequence
  Description of Artificial Sequence: Synthetic oligonucleotide
  Antisense strand to SEQ ID NO: 2220538
ugucuucacaaauucgcaa

SEQ ID NO: 2220540 - RNA, 19 nt, Artificial Sequence
  Description of Artificial Sequence: Synthetic oligonucleotide
  Sense strand starting at position 3556 of SEQ ID NO: 1883844
uggacuaccugacaacaau

SEQ ID NO: 2220541 - RNA, 19 nt, Artificial Sequence
  Description of Artificial Sequence: Synthetic oligonucleotide
  Antisense strand to SEQ ID NO: 2220540
auuguugucagguagucca

SEQ ID NO: 2220542 - RNA, 19 nt, Artificial Sequence
  Description of Artificial Sequence: Synthetic oligonucleotide
  Sense strand starting at position 2672 of SEQ ID NO: 1883844
aaaugaaugugagaaguca

SEQ ID NO: 2220543 - RNA, 19 nt, Artificial Sequence
  Description of Artificial Sequence: Synthetic oligonucleotide
  Antisense strand to SEQ ID NO: 2220542
ugacuucucacauucauuu

SEQ ID NO: 2220544 - RNA, 19 nt, Artificial Sequence
  Description of Artificial Sequence: Synthetic oligonucleotide
  Sense strand starting at position 2670 of SEQ ID NO: 1883844
acaaaugaaugugagaagu

SEQ ID NO: 2220545 - RNA, 19 nt, Artificial Sequence
  Description of Artificial Sequence: Synthetic oligonucleotide
  Antisense strand to SEQ ID NO: 2220544
acuucucacauucauuugu

SEQ ID NO: 2220546 - RNA, 19 nt, Artificial Sequence
  Description of Artificial Sequence: Synthetic oligonucleotide
  Sense strand starting at position 1334 of SEQ ID NO: 1883844
ccuaguaagagcuguaguu

SEQ ID NO: 2220547 - RNA, 19 nt, Artificial Sequence
  Description of Artificial Sequence: Synthetic oligonucleotide
  Antisense strand to SEQ ID NO: 2220546
aacuacagcucuuacuagg

SEQ ID NO: 2220548 - RNA, 19 nt, Artificial Sequence
  Description of Artificial Sequence: Synthetic oligonucleotide
  Sense strand starting at position 1035 of SEQ ID NO: 1883844
aagacucuggugcgucaau

SEQ ID NO: 2220549 - RNA, 19 nt, Artificial Sequence
  Description of Artificial Sequence: Synthetic oligonucleotide
  Antisense strand to SEQ ID NO: 2220548
auugacgcaccagagucuu

SEQ ID NO: 2220550 - RNA, 19 nt, Artificial Sequence
  Description of Artificial Sequence: Synthetic oligonucleotide
  Sense strand starting at position 3838 of SEQ ID NO: 1883844
ugacaaugaucccaguaaa

SEQ ID NO: 2220551 - RNA, 19 nt, Artificial Sequence
  Description of Artificial Sequence: Synthetic oligonucleotide
  Antisense strand to SEQ ID NO: 2220550
uuuacugggaucauuguca

SEQ ID NO: 2220552 - RNA, 19 nt, Artificial Sequence
  Description of Artificial Sequence: Synthetic oligonucleotide
  Sense strand starting at position 1036 of SEQ ID NO: 1883844
agacucuggugcgucaauu

SEQ ID NO: 2220553 - RNA, 19 nt, Artificial Sequence
  Description of Artificial Sequence: Synthetic oligonucleotide
  Antisense strand to SEQ ID NO: 2220552
aauugacgcaccagagucu

SEQ ID NO: 2220554 - RNA, 19 nt, Artificial Sequence
  Description of Artificial Sequence: Synthetic oligonucleotide
  Sense strand starting at position 1344 of SEQ ID NO: 1883844
gcuguaguucugcauccau

SEQ ID NO: 2220555 - RNA, 19 nt, Artificial Sequence
  Description of Artificial Sequence: Synthetic oligonucleotide
  Antisense strand to SEQ ID NO: 2220554
auggaugcagaacuacagc

SEQ ID NO: 2220556 - RNA, 19 nt, Artificial Sequence
  Description of Artificial Sequence: Synthetic oligonucleotide
  Sense strand starting at position 118 of SEQ ID NO: 1883844
uuuagagacuugggaaaua

SEQ ID NO: 2220557 - RNA, 19 nt, Artificial Sequence
  Description of Artificial Sequence: Synthetic oligonucleotide
  Antisense strand to SEQ ID NO: 2220556
uauuucccaagucucuaaa

SEQ ID NO: 2220558 - RNA, 19 nt, Artificial Sequence
  Description of Artificial Sequence: Synthetic oligonucleotide
  Sense strand starting at position 2872 of SEQ ID NO: 1883845
agacaaugagccuaucuuu

SEQ ID NO: 2220559 - RNA, 19 nt, Artificial Sequence
  Description of Artificial Sequence: Synthetic oligonucleotide
  Antisense strand to SEQ ID NO: 2220558
aaagauaggcucauugucu

SEQ ID NO: 2220560 - RNA, 19 nt, Artificial Sequence
  Description of Artificial Sequence: Synthetic oligonucleotide
  Sense strand starting at position 2812 of SEQ ID NO: 1883845
cccaaauguccacagugaa

SEQ ID NO: 2220561 - RNA, 19 nt, Artificial Sequence
  Description of Artificial Sequence: Synthetic oligonucleotide
  Antisense strand to SEQ ID NO: 2220560
uucacuguggacauuuggg

SEQ ID NO: 2220562 - RNA, 19 nt, Artificial Sequence
  Description of Artificial Sequence: Synthetic oligonucleotide
  Sense strand starting at position 1604 of SEQ ID NO: 1883845
gaauuauaacgugaggcaa

SEQ ID NO: 2220563 - RNA, 19 nt, Artificial Sequence
  Description of Artificial Sequence: Synthetic oligonucleotide
  Antisense strand to SEQ ID NO: 2220562
uugccucacguuauaauuc

SEQ ID NO: 2220564 - RNA, 19 nt, Artificial Sequence
  Description of Artificial Sequence: Synthetic oligonucleotide
  Sense strand starting at position 3543 of SEQ ID NO: 1883845
augaaaucauuaccugagu

SEQ ID NO: 2220565 - RNA, 19 nt, Artificial Sequence
  Description of Artificial Sequence: Synthetic oligonucleotide
  Antisense strand to SEQ ID NO: 2220564
acucagguaaugauuucau

SEQ ID NO: 2220566 - RNA, 19 nt, Artificial Sequence
  Description of Artificial Sequence: Synthetic oligonucleotide
  Sense strand starting at position 1355 of SEQ ID NO: 1883845
aguugagacguccauaaag

SEQ ID NO: 2220567 - RNA, 19 nt, Artificial Sequence
  Description of Artificial Sequence: Synthetic oligonucleotide
  Antisense strand to SEQ ID NO: 2220566
cuuuauggacgucucaacu

SEQ ID NO: 2220568 - RNA, 19 nt, Artificial Sequence
  Description of Artificial Sequence: Synthetic oligonucleotide
  Sense strand starting at position 1853 of SEQ ID NO: 1883845
uguaucucagagcacauaa

SEQ ID NO: 2220569 - RNA, 19 nt, Artificial Sequence
  Description of Artificial Sequence: Synthetic oligonucleotide
  Antisense strand to SEQ ID NO: 2220568
uuaugugcucugagauaca

SEQ ID NO: 2220570 - RNA, 19 nt, Artificial Sequence
  Description of Artificial Sequence: Synthetic oligonucleotide
  Sense strand starting at position 1592 of SEQ ID NO: 1883845
gccuaauauguagaauuau

SEQ ID NO: 2220571 - RNA, 19 nt, Artificial Sequence
  Description of Artificial Sequence: Synthetic oligonucleotide
  Antisense strand to SEQ ID NO: 2220570
auaauucuacauauuaggc

SEQ ID NO: 2220572 - RNA, 19 nt, Artificial Sequence
  Description of Artificial Sequence: Synthetic oligonucleotide
  Sense strand starting at position 1695 of SEQ ID NO: 1883845
ucaggcugacucuaccaau

SEQ ID NO: 2220573 - RNA, 19 nt, Artificial Sequence
  Description of Artificial Sequence: Synthetic oligonucleotide
  Antisense strand to SEQ ID NO: 2220572
auugguagagucagccuga

SEQ ID NO: 2220574 - RNA, 19 nt, Artificial Sequence
  Description of Artificial Sequence: Synthetic oligonucleotide
  Sense strand starting at position 745 of SEQ ID NO: 1883845
ucagacaccugcucagaaa

SEQ ID NO: 2220575 - RNA, 19 nt, Artificial Sequence
  Description of Artificial Sequence: Synthetic oligonucleotide
  Antisense strand to SEQ ID NO: 2220574
uuucugagcaggugucuga

SEQ ID NO: 2220576 - RNA, 19 nt, Artificial Sequence
  Description of Artificial Sequence: Synthetic oligonucleotide
  Sense strand starting at position 1821 of SEQ ID NO: 1883845
gugagcauuuccuugguau

SEQ ID NO: 2220577 - RNA, 19 nt, Artificial Sequence
  Description of Artificial Sequence: Synthetic oligonucleotide
  Antisense strand to SEQ ID NO: 2220576
auaccaaggaaaugcucac

SEQ ID NO: 2220578 - RNA, 19 nt, Artificial Sequence
  Description of Artificial Sequence: Synthetic oligonucleotide
  Sense strand starting at position 634 of SEQ ID NO: 1883845
cuagcuaaagagugaugga

SEQ ID NO: 2220579 - RNA, 19 nt, Artificial Sequence
  Description of Artificial Sequence: Synthetic oligonucleotide
  Antisense strand to SEQ ID NO: 2220578
uccaucacucuuuagcuag

SEQ ID NO: 2220580 - RNA, 19 nt, Artificial Sequence
  Description of Artificial Sequence: Synthetic oligonucleotide
  Sense strand starting at position 1823 of SEQ ID NO: 1883845
gagcauuuccuugguaugu

SEQ ID NO: 2220581 - RNA, 19 nt, Artificial Sequence
  Description of Artificial Sequence: Synthetic oligonucleotide
  Antisense strand to SEQ ID NO: 2220580
acauaccaaggaaaugcuc

SEQ ID NO: 2220582 - RNA, 19 nt, Artificial Sequence
  Description of Artificial Sequence: Synthetic oligonucleotide
  Sense strand starting at position 536 of SEQ ID NO: 1883845
acggucauccuugacaauc

SEQ ID NO: 2220583 - RNA, 19 nt, Artificial Sequence
  Description of Artificial Sequence: Synthetic oligonucleotide
  Antisense strand to SEQ ID NO: 2220582
gauugucaaggaugaccgu

SEQ ID NO: 2220584 - RNA, 19 nt, Artificial Sequence
  Description of Artificial Sequence: Synthetic oligonucleotide
  Sense strand starting at position 1962 of SEQ ID NO: 1883845
agauaugugcuuggaaaua

SEQ ID NO: 2220585 - RNA, 19 nt, Artificial Sequence
  Description of Artificial Sequence: Synthetic oligonucleotide
  Antisense strand to SEQ ID NO: 2220584
uauuuccaagcacauaucu

SEQ ID NO: 2220586 - RNA, 19 nt, Artificial Sequence
  Description of Artificial Sequence: Synthetic oligonucleotide
  Sense strand starting at position 1357 of SEQ ID NO: 1883845
uugagacguccauaaaguu

SEQ ID NO: 2220587 - RNA, 19 nt, Artificial Sequence
  Description of Artificial Sequence: Synthetic oligonucleotide
  Antisense strand to SEQ ID NO: 2220586
aacuuuauggacgucucaa

SEQ ID NO: 2220588 - RNA, 19 nt, Artificial Sequence
  Description of Artificial Sequence: Synthetic oligonucleotide
  Sense strand starting at position 1261 of SEQ ID NO: 1883845
agaugaaguagcuguaaga

SEQ ID NO: 2220589 - RNA, 19 nt, Artificial Sequence
  Description of Artificial Sequence: Synthetic oligonucleotide
  Antisense strand to SEQ ID NO: 2220588
ucuuacagcuacuucaucu

SEQ ID NO: 2220590 - RNA, 19 nt, Artificial Sequence
  Description of Artificial Sequence: Synthetic oligonucleotide
  Sense strand starting at position 3358 of SEQ ID NO: 1883845
cgaauaagccauugaccaa

SEQ ID NO: 2220591 - RNA, 19 nt, Artificial Sequence
  Description of Artificial Sequence: Synthetic oligonucleotide
  Antisense strand to SEQ ID NO: 2220590
uuggucaauggcuuauucg

SEQ ID NO: 2220592 - RNA, 19 nt, Artificial Sequence
  Description of Artificial Sequence: Synthetic oligonucleotide
  Sense strand starting at position 430 of SEQ ID NO: 1883845
gggaaugacucgccaugag

SEQ ID NO: 2220593 - RNA, 19 nt, Artificial Sequence
  Description of Artificial Sequence: Synthetic oligonucleotide
  Antisense strand to SEQ ID NO: 2220592
cucauggcgagucauuccc

SEQ ID NO: 2220594 - RNA, 19 nt, Artificial Sequence
  Description of Artificial Sequence: Synthetic oligonucleotide
  Sense strand starting at position 1589 of SEQ ID NO: 1883845
ugagccuaauauguagaau

SEQ ID NO: 2220595 - RNA, 19 nt, Artificial Sequence
  Description of Artificial Sequence: Synthetic oligonucleotide
  Antisense strand to SEQ ID NO: 2220594
auucuacauauuaggcuca

SEQ ID NO: 2220596 - RNA, 19 nt, Artificial Sequence
  Description of Artificial Sequence: Synthetic oligonucleotide
  Sense strand starting at position 1834 of SEQ ID NO: 1883845
ugguaugugcuugaauaga

SEQ ID NO: 2220597 - RNA, 19 nt, Artificial Sequence
  Description of Artificial Sequence: Synthetic oligonucleotide
  Antisense strand to SEQ ID NO: 2220596
ucuauucaagcacauacca

SEQ ID NO: 2220598 - RNA, 19 nt, Artificial Sequence
  Description of Artificial Sequence: Synthetic oligonucleotide
  Sense strand starting at position 1395 of SEQ ID NO: 1883845
caagcauaucgccagauag

SEQ ID NO: 2220599 - RNA, 19 nt, Artificial Sequence
  Description of Artificial Sequence: Synthetic oligonucleotide
  Antisense strand to SEQ ID NO: 2220598
cuaucuggcgauaugcuug

SEQ ID NO: 2220600 - RNA, 19 nt, Artificial Sequence
  Description of Artificial Sequence: Synthetic oligonucleotide
  Sense strand starting at position 321 of SEQ ID NO: 1883845
gggucagugagcuagauuc

SEQ ID NO: 2220601 - RNA, 19 nt, Artificial Sequence
  Description of Artificial Sequence: Synthetic oligonucleotide
  Antisense strand to SEQ ID NO: 2220600
gaaucuagcucacugaccc

SEQ ID NO: 2220602 - RNA, 19 nt, Artificial Sequence
  Description of Artificial Sequence: Synthetic oligonucleotide
  Sense strand starting at position 1603 of SEQ ID NO: 1883845
agaauuauaacgugaggca

SEQ ID NO: 2220603 - RNA, 19 nt, Artificial Sequence
  Description of Artificial Sequence: Synthetic oligonucleotide
  Antisense strand to SEQ ID NO: 2220602
ugccucacguuauaauucu

SEQ ID NO: 2220604 - RNA, 19 nt, Artificial Sequence
  Description of Artificial Sequence: Synthetic oligonucleotide
  Sense strand starting at position 1839 of SEQ ID NO: 1883845
ugugcuugaauagauguau

SEQ ID NO: 2220605 - RNA, 19 nt, Artificial Sequence
  Description of Artificial Sequence: Synthetic oligonucleotide
  Antisense strand to SEQ ID NO: 2220604
auacaucuauucaagcaca

SEQ ID NO: 2220606 - RNA, 19 nt, Artificial Sequence
  Description of Artificial Sequence: Synthetic oligonucleotide
  Sense strand starting at position 1877 of SEQ ID NO: 1883845
cuucguaggcuucagaaag

SEQ ID NO: 2220607 - RNA, 19 nt, Artificial Sequence
  Description of Artificial Sequence: Synthetic oligonucleotide
  Antisense strand to SEQ ID NO: 2220606
cuuucugaagccuacgaag

SEQ ID NO: 2220608 - RNA, 19 nt, Artificial Sequence
  Description of Artificial Sequence: Synthetic oligonucleotide
  Sense strand starting at position 1277 of SEQ ID NO: 1883845
agaagcagaucuguuuauu

SEQ ID NO: 2220609 - RNA, 19 nt, Artificial Sequence
  Description of Artificial Sequence: Synthetic oligonucleotide
  Antisense strand to SEQ ID NO: 2220608
aauaaacagaucugcuucu

SEQ ID NO: 2220610 - RNA, 19 nt, Artificial Sequence
  Description of Artificial Sequence: Synthetic oligonucleotide
  Sense strand starting at position 1456 of SEQ ID NO: 1883845
uggucagcuguucaagaug

SEQ ID NO: 2220611 - RNA, 19 nt, Artificial Sequence
  Description of Artificial Sequence: Synthetic oligonucleotide
  Antisense strand to SEQ ID NO: 2220610
caucuugaacagcugacca

SEQ ID NO: 2220612 - RNA, 19 nt, Artificial Sequence
  Description of Artificial Sequence: Synthetic oligonucleotide
  Sense strand starting at position 2390 of SEQ ID NO: 1883845
acuuuaguucucgacccau

SEQ ID NO: 2220613 - RNA, 19 nt, Artificial Sequence
  Description of Artificial Sequence: Synthetic oligonucleotide
  Antisense strand to SEQ ID NO: 2220612
augggucgagaacuaaagu

SEQ ID NO: 2220614 - RNA, 19 nt, Artificial Sequence
  Description of Artificial Sequence: Synthetic oligonucleotide
  Sense strand starting at position 2113 of SEQ ID NO: 1883845
cuaggucaguucuuacaga

SEQ ID NO: 2220615 - RNA, 19 nt, Artificial Sequence
  Description of Artificial Sequence: Synthetic oligonucleotide
  Antisense strand to SEQ ID NO: 2220614
ucuguaagaacugaccuag

SEQ ID NO: 2220616 - RNA, 19 nt, Artificial Sequence
  Description of Artificial Sequence: Synthetic oligonucleotide
  Sense strand starting at position 1342 of SEQ ID NO: 1883845
acaugucagccucaguuga

SEQ ID NO: 2220617 - RNA, 19 nt, Artificial Sequence
  Description of Artificial Sequence: Synthetic oligonucleotide
  Antisense strand to SEQ ID NO: 2220616
ucaacugaggcugacaugu

SEQ ID NO: 2220618 - RNA, 19 nt, Artificial Sequence
  Description of Artificial Sequence: Synthetic oligonucleotide
  Sense strand starting at position 2553 of SEQ ID NO: 1883845
ccaaaucugucauuacagu

SEQ ID NO: 2220619 - RNA, 19 nt, Artificial Sequence
  Description of Artificial Sequence: Synthetic oligonucleotide
  Antisense strand to SEQ ID NO: 2220618
acuguaaugacagauuugg

SEQ ID NO: 2220620 - RNA, 19 nt, Artificial Sequence
  Description of Artificial Sequence: Synthetic oligonucleotide
  Sense strand starting at position 2760 of SEQ ID NO: 1883845
uugguaaucacugagcugu

SEQ ID NO: 2220621 - RNA, 19 nt, Artificial Sequence
  Description of Artificial Sequence: Synthetic oligonucleotide
  Antisense strand to SEQ ID NO: 2220620
acagcucagugauuaccaa

SEQ ID NO: 2220622 - RNA, 19 nt, Artificial Sequence
  Description of Artificial Sequence: Synthetic oligonucleotide
  Sense strand starting at position 3275 of SEQ ID NO: 1883845
ucuugcugugguuaagaca

SEQ ID NO: 2220623 - RNA, 19 nt, Artificial Sequence
  Description of Artificial Sequence: Synthetic oligonucleotide
  Antisense strand to SEQ ID NO: 2220622
ugucuuaaccacagcaaga

SEQ ID NO: 2220624 - RNA, 19 nt, Artificial Sequence
  Description of Artificial Sequence: Synthetic oligonucleotide
  Sense strand starting at position 2109 of SEQ ID NO: 1883845
acaccuaggucaguucuua

SEQ ID NO: 2220625 - RNA, 19 nt, Artificial Sequence
  Description of Artificial Sequence: Synthetic oligonucleotide
  Antisense strand to SEQ ID NO: 2220624
uaagaacugaccuaggugu

SEQ ID NO: 2220626 - RNA, 19 nt, Artificial Sequence
  Description of Artificial Sequence: Synthetic oligonucleotide
  Sense strand starting at position 2385 of SEQ ID NO: 1883845
cagauacuuuaguucucga

SEQ ID NO: 2220627 - RNA, 19 nt, Artificial Sequence
  Description of Artificial Sequence: Synthetic oligonucleotide
  Antisense strand to SEQ ID NO: 2220626
ucgagaacuaaaguaucug

SEQ ID NO: 2220628 - RNA, 19 nt, Artificial Sequence
  Description of Artificial Sequence: Synthetic oligonucleotide
  Sense strand starting at position 1243 of SEQ ID NO: 1883845
ugucuuuggagcuggaaca

SEQ ID NO: 2220629 - RNA, 19 nt, Artificial Sequence
  Description of Artificial Sequence: Synthetic oligonucleotide
  Antisense strand to SEQ ID NO: 2220628
uguuccagcuccaaagaca

SEQ ID NO: 2220630 - RNA, 19 nt, Artificial Sequence
  Description of Artificial Sequence: Synthetic oligonucleotide
  Sense strand starting at position 575 of SEQ ID NO: 1883845
ggaucaaaguuccuaugcu

SEQ ID NO: 2220631 - RNA, 19 nt, Artificial Sequence
  Description of Artificial Sequence: Synthetic oligonucleotide
  Antisense strand to SEQ ID NO: 2220630
agcauaggaacuuugaucc

SEQ ID NO: 2220632 - RNA, 19 nt, Artificial Sequence
  Description of Artificial Sequence: Synthetic oligonucleotide
  Sense strand starting at position 535 of SEQ ID NO: 1883845
cacggucauccuugacaau

SEQ ID NO: 2220633 - RNA, 19 nt, Artificial Sequence
  Description of Artificial Sequence: Synthetic oligonucleotide
  Antisense strand to SEQ ID NO: 2220632
auugucaaggaugaccgug

SEQ ID NO: 2220634 - RNA, 19 nt, Artificial Sequence
  Description of Artificial Sequence: Synthetic oligonucleotide
  Sense strand starting at position 3386 of SEQ ID NO: 1883845
uccacaucacgugagcuau

SEQ ID NO: 2220635 - RNA, 19 nt, Artificial Sequence
  Description of Artificial Sequence: Synthetic oligonucleotide
  Antisense strand to SEQ ID NO: 2220634
auagcucacgugaugugga

SEQ ID NO: 2220636 - RNA, 19 nt, Artificial Sequence
  Description of Artificial Sequence: Synthetic oligonucleotide
  Sense strand starting at position 2751 of SEQ ID NO: 1883845
gcacuaucuuugguaauca

SEQ ID NO: 2220637 - RNA, 19 nt, Artificial Sequence
  Description of Artificial Sequence: Synthetic oligonucleotide
  Antisense strand to SEQ ID NO: 2220636
ugauuaccaaagauagugc

SEQ ID NO: 2220638 - RNA, 19 nt, Artificial Sequence
  Description of Artificial Sequence: Synthetic oligonucleotide
  Sense strand starting at position 949 of SEQ ID NO: 1883846
gcauguguuggaucugugu

SEQ ID NO: 2220639 - RNA, 19 nt, Artificial Sequence
  Description of Artificial Sequence: Synthetic oligonucleotide
  Antisense strand to SEQ ID NO: 2220638
acacagauccaacacaugc

SEQ ID NO: 2220640 - RNA, 19 nt, Artificial Sequence
  Description of Artificial Sequence: Synthetic oligonucleotide
  Sense strand starting at position 3182 of SEQ ID NO: 1883846
aagggaauuguggguaaua

SEQ ID NO: 2220641 - RNA, 19 nt, Artificial Sequence
  Description of Artificial Sequence: Synthetic oligonucleotide
  Antisense strand to SEQ ID NO: 2220640
uauuacccacaauucccuu

SEQ ID NO: 2220642 - RNA, 19 nt, Artificial Sequence
  Description of Artificial Sequence: Synthetic oligonucleotide
  Sense strand starting at position 229 of SEQ ID NO: 1883846
cugaucgucagauagaacu

SEQ ID NO: 2220643 - RNA, 19 nt, Artificial Sequence
  Description of Artificial Sequence: Synthetic oligonucleotide
  Antisense strand to SEQ ID NO: 2220642
aguucuaucugacgaucag

SEQ ID NO: 2220644 - RNA, 19 nt, Artificial Sequence
  Description of Artificial Sequence: Synthetic oligonucleotide
  Sense strand starting at position 3183 of SEQ ID NO: 1883846
agggaauuguggguaauau

SEQ ID NO: 2220645 - RNA, 19 nt, Artificial Sequence
  Description of Artificial Sequence: Synthetic oligonucleotide
  Antisense strand to SEQ ID NO: 2220644
auauuacccacaauucccu

SEQ ID NO: 2220646 - RNA, 19 nt, Artificial Sequence
  Description of Artificial Sequence: Synthetic oligonucleotide
  Sense strand starting at position 1651 of SEQ ID NO: 1883846
aggaauccuugccugagaa

SEQ ID NO: 2220647 - RNA, 19 nt, Artificial Sequence
  Description of Artificial Sequence: Synthetic oligonucleotide
  Antisense strand to SEQ ID NO: 2220646
uucucaggcaaggauuccu

SEQ ID NO: 2220648 - RNA, 19 nt, Artificial Sequence
  Description of Artificial Sequence: Synthetic oligonucleotide
  Sense strand starting at position 1650 of SEQ ID NO: 1883846
aaggaauccuugccugaga

SEQ ID NO: 2220649 - RNA, 19 nt, Artificial Sequence
  Description of Artificial Sequence: Synthetic oligonucleotide
  Antisense strand to SEQ ID NO: 2220648
ucucaggcaaggauuccuu

SEQ ID NO: 2220650 - RNA, 19 nt, Artificial Sequence
  Description of Artificial Sequence: Synthetic oligonucleotide
  Sense strand starting at position 1632 of SEQ ID NO: 1883846
ucauguucuggaugaaaua

SEQ ID NO: 2220651 - RNA, 19 nt, Artificial Sequence
  Description of Artificial Sequence: Synthetic oligonucleotide
  Antisense strand to SEQ ID NO: 2220650
uauuucauccagaacauga

SEQ ID NO: 2220652 - RNA, 19 nt, Artificial Sequence
  Description of Artificial Sequence: Synthetic oligonucleotide
  Sense strand starting at position 1652 of SEQ ID NO: 1883846
ggaauccuugccugagaaa

SEQ ID NO: 2220653 - RNA, 19 nt, Artificial Sequence
  Description of Artificial Sequence: Synthetic oligonucleotide
  Antisense strand to SEQ ID NO: 2220652
uuucucaggcaaggauucc

SEQ ID NO: 2220654 - RNA, 19 nt, Artificial Sequence
  Description of Artificial Sequence: Synthetic oligonucleotide
  Sense strand starting at position 582 of SEQ ID NO: 1883846
aagauuggccuuuaaggca

SEQ ID NO: 2220655 - RNA, 19 nt, Artificial Sequence
  Description of Artificial Sequence: Synthetic oligonucleotide
  Antisense strand to SEQ ID NO: 2220654
ugccuuaaaggccaaucuu

SEQ ID NO: 2220656 - RNA, 19 nt, Artificial Sequence
  Description of Artificial Sequence: Synthetic oligonucleotide
  Sense strand starting at position 266 of SEQ ID NO: 1883846
ccaguuauuugggagaaag

SEQ ID NO: 2220657 - RNA, 19 nt, Artificial Sequence
  Description of Artificial Sequence: Synthetic oligonucleotide
  Antisense strand to SEQ ID NO: 2220656
cuuucucccaaauaacugg

SEQ ID NO: 2220658 - RNA, 19 nt, Artificial Sequence
  Description of Artificial Sequence: Synthetic oligonucleotide
  Sense strand starting at position 202 of SEQ ID NO: 1883846
gcguuaauucuguuuggcu

SEQ ID NO: 2220659 - RNA, 19 nt, Artificial Sequence
  Description of Artificial Sequence: Synthetic oligonucleotide
  Antisense strand to SEQ ID NO: 2220658
agccaaacagaauuaacgc

SEQ ID NO: 2220660 - RNA, 19 nt, Artificial Sequence
  Description of Artificial Sequence: Synthetic oligonucleotide
  Sense strand starting at position 2153 of SEQ ID NO: 1883846
cuaccauauugagcugaau

SEQ ID NO: 2220661 - RNA, 19 nt, Artificial Sequence
  Description of Artificial Sequence: Synthetic oligonucleotide
  Antisense strand to SEQ ID NO: 2220660
auucagcucaauaugguag

SEQ ID NO: 2220662 - RNA, 19 nt, Artificial Sequence
  Description of Artificial Sequence: Synthetic oligonucleotide
  Sense strand starting at position 610 of SEQ ID NO: 1883846
aacugugaggcauggauua

SEQ ID NO: 2220663 - RNA, 19 nt, Artificial Sequence
  Description of Artificial Sequence: Synthetic oligonucleotide
  Antisense strand to SEQ ID NO: 2220662
uaauccaugccucacaguu

SEQ ID NO: 2220664 - RNA, 19 nt, Artificial Sequence
  Description of Artificial Sequence: Synthetic oligonucleotide
  Sense strand starting at position 278 of SEQ ID NO: 1883846
gagaaagauuugugaauga

SEQ ID NO: 2220665 - RNA, 19 nt, Artificial Sequence
  Description of Artificial Sequence: Synthetic oligonucleotide
  Antisense strand to SEQ ID NO: 2220664
ucauucacaaaucuuucuc

SEQ ID NO: 2220666 - RNA, 19 nt, Artificial Sequence
  Description of Artificial Sequence: Synthetic oligonucleotide
  Sense strand starting at position 866 of SEQ ID NO: 1883846
acaauugcucaggguuaaa

SEQ ID NO: 2220667 - RNA, 19 nt, Artificial Sequence
  Description of Artificial Sequence: Synthetic oligonucleotide
  Antisense strand to SEQ ID NO: 2220666
uuuaacccugagcaauugu

SEQ ID NO: 2220668 - RNA, 19 nt, Artificial Sequence
  Description of Artificial Sequence: Synthetic oligonucleotide
  Sense strand starting at position 811 of SEQ ID NO: 1883846
gcauuagcugaagacugua

SEQ ID NO: 2220669 - RNA, 19 nt, Artificial Sequence
  Description of Artificial Sequence: Synthetic oligonucleotide
  Antisense strand to SEQ ID NO: 2220668
uacagucuucagcuaaugc

SEQ ID NO: 2220670 - RNA, 19 nt, Artificial Sequence
  Description of Artificial Sequence: Synthetic oligonucleotide
  Sense strand starting at position 863 of SEQ ID NO: 1883846
guaacaauugcucaggguu

SEQ ID NO: 2220671 - RNA, 19 nt, Artificial Sequence
  Description of Artificial Sequence: Synthetic oligonucleotide
  Antisense strand to SEQ ID NO: 2220670
aacccugagcaauuguuac

SEQ ID NO: 2220672 - RNA, 19 nt, Artificial Sequence
  Description of Artificial Sequence: Synthetic oligonucleotide
  Sense strand starting at position 1867 of SEQ ID NO: 1883846
ccgagugaggcucaaauuc

SEQ ID NO: 2220673 - RNA, 19 nt, Artificial Sequence
  Description of Artificial Sequence: Synthetic oligonucleotide
  Antisense strand to SEQ ID NO: 2220672
gaauuugagccucacucgg

SEQ ID NO: 2220674 - RNA, 19 nt, Artificial Sequence
  Description of Artificial Sequence: Synthetic oligonucleotide
  Sense strand starting at position 2750 of SEQ ID NO: 1883846
acucaugacuccucugagu

SEQ ID NO: 2220675 - RNA, 19 nt, Artificial Sequence
  Description of Artificial Sequence: Synthetic oligonucleotide
  Antisense strand to SEQ ID NO: 2220674
acucagaggagucaugagu

SEQ ID NO: 2220676 - RNA, 19 nt, Artificial Sequence
  Description of Artificial Sequence: Synthetic oligonucleotide
  Sense strand starting at position 1837 of SEQ ID NO: 1883846
auguccuguccugagaagu

SEQ ID NO: 2220677 - RNA, 19 nt, Artificial Sequence
  Description of Artificial Sequence: Synthetic oligonucleotide
  Antisense strand to SEQ ID NO: 2220676
acuucucaggacaggacau

SEQ ID NO: 2220678 - RNA, 19 nt, Artificial Sequence
  Description of Artificial Sequence: Synthetic oligonucleotide
  Sense strand starting at position 2125 of SEQ ID NO: 1883846
ccagauggcuaagcugaau

SEQ ID NO: 2220679 - RNA, 19 nt, Artificial Sequence
  Description of Artificial Sequence: Synthetic oligonucleotide
  Antisense strand to SEQ ID NO: 2220678
auucagcuuagccaucugg

SEQ ID NO: 2220680 - RNA, 19 nt, Artificial Sequence
  Description of Artificial Sequence: Synthetic oligonucleotide
  Sense strand starting at position 3580 of SEQ ID NO: 1883846
gcgugugacuuauuuccca

SEQ ID NO: 2220681 - RNA, 19 nt, Artificial Sequence
  Description of Artificial Sequence: Synthetic oligonucleotide
  Antisense strand to SEQ ID NO: 2220680
ugggaaauaagucacacgc

SEQ ID NO: 2220682 - RNA, 19 nt, Artificial Sequence
  Description of Artificial Sequence: Synthetic oligonucleotide
  Sense strand starting at position 1876 of SEQ ID NO: 1883846
gcucaaauuccaugucaag

SEQ ID NO: 2220683 - RNA, 19 nt, Artificial Sequence
  Description of Artificial Sequence: Synthetic oligonucleotide
  Antisense strand to SEQ ID NO: 2220682
cuugacauggaauuugagc

SEQ ID NO: 2220684 - RNA, 19 nt, Artificial Sequence
  Description of Artificial Sequence: Synthetic oligonucleotide
  Sense strand starting at position 3213 of SEQ ID NO: 1883846
cggagaucgcgagaguuga

SEQ ID NO: 2220685 - RNA, 19 nt, Artificial Sequence
  Description of Artificial Sequence: Synthetic oligonucleotide
  Antisense strand to SEQ ID NO: 2220684
ucaacucucgcgaucuccg

SEQ ID NO: 2220686 - RNA, 19 nt, Artificial Sequence
  Description of Artificial Sequence: Synthetic oligonucleotide
  Sense strand starting at position 285 of SEQ ID NO: 1883846
auuugugaaugacaguauu

SEQ ID NO: 2220687 - RNA, 19 nt, Artificial Sequence
  Description of Artificial Sequence: Synthetic oligonucleotide
  Antisense strand to SEQ ID NO: 2220686
aauacugucauucacaaau

SEQ ID NO: 2220688 - RNA, 19 nt, Artificial Sequence
  Description of Artificial Sequence: Synthetic oligonucleotide
  Sense strand starting at position 224 of SEQ ID NO: 1883846
ccaagcugaucgucagaua

SEQ ID NO: 2220689 - RNA, 19 nt, Artificial Sequence
  Description of Artificial Sequence: Synthetic oligonucleotide
  Antisense strand to SEQ ID NO: 2220688
uaucugacgaucagcuugg

SEQ ID NO: 2220690 - RNA, 19 nt, Artificial Sequence
  Description of Artificial Sequence: Synthetic oligonucleotide
  Sense strand starting at position 255 of SEQ ID NO: 1883846
gguuaagccagccaguuau

SEQ ID NO: 2220691 - RNA, 19 nt, Artificial Sequence
  Description of Artificial Sequence: Synthetic oligonucleotide
  Antisense strand to SEQ ID NO: 2220690
auaacuggcuggcuuaacc

SEQ ID NO: 2220692 - RNA, 19 nt, Artificial Sequence
  Description of Artificial Sequence: Synthetic oligonucleotide
  Sense strand starting at position 1502 of SEQ ID NO: 1883846
caguuuaggcuuggaguca

SEQ ID NO: 2220693 - RNA, 19 nt, Artificial Sequence
  Description of Artificial Sequence: Synthetic oligonucleotide
  Antisense strand to SEQ ID NO: 2220692
ugacuccaagccuaaacug

SEQ ID NO: 2220694 - RNA, 19 nt, Artificial Sequence
  Description of Artificial Sequence: Synthetic oligonucleotide
  Sense strand starting at position 1522 of SEQ ID NO: 1883846
gguucuaauccuugucacu

SEQ ID NO: 2220695 - RNA, 19 nt, Artificial Sequence
  Description of Artificial Sequence: Synthetic oligonucleotide
  Antisense strand to SEQ ID NO: 2220694
agugacaaggauuagaacc

SEQ ID NO: 2220696 - RNA, 19 nt, Artificial Sequence
  Description of Artificial Sequence: Synthetic oligonucleotide
  Sense strand starting at position 3211 of SEQ ID NO: 1883846
cucggagaucgcgagaguu

SEQ ID NO: 2220697 - RNA, 19 nt, Artificial Sequence
  Description of Artificial Sequence: Synthetic oligonucleotide
  Antisense strand to SEQ ID NO: 2220696
aacucucgcgaucuccgag

SEQ ID NO: 2220698 - RNA, 19 nt, Artificial Sequence
  Description of Artificial Sequence: Synthetic oligonucleotide
  Sense strand starting at position 1038 of SEQ ID NO: 1883846
gccagaagcccuuggguua

SEQ ID NO: 2220699 - RNA, 19 nt, Artificial Sequence
  Description of Artificial Sequence: Synthetic oligonucleotide
  Antisense strand to SEQ ID NO: 2220698
uaacccaagggcuucuggc

SEQ ID NO: 2220700 - RNA, 19 nt, Artificial Sequence
  Description of Artificial Sequence: Synthetic oligonucleotide
  Sense strand starting at position 265 of SEQ ID NO: 1883846
gccaguuauuugggagaaa

SEQ ID NO: 2220701 - RNA, 19 nt, Artificial Sequence
  Description of Artificial Sequence: Synthetic oligonucleotide
  Antisense strand to SEQ ID NO: 2220700
uuucucccaaauaacuggc

SEQ ID NO: 2220702 - RNA, 19 nt, Artificial Sequence
  Description of Artificial Sequence: Synthetic oligonucleotide
  Sense strand starting at position 2807 of SEQ ID NO: 1883846
cagaacucgucgcucacaa

SEQ ID NO: 2220703 - RNA, 19 nt, Artificial Sequence
  Description of Artificial Sequence: Synthetic oligonucleotide
  Antisense strand to SEQ ID NO: 2220702
uugugagcgacgaguucug

SEQ ID NO: 2220704 - RNA, 19 nt, Artificial Sequence
  Description of Artificial Sequence: Synthetic oligonucleotide
  Sense strand starting at position 951 of SEQ ID NO: 1883846
auguguuggaucuguguca

SEQ ID NO: 2220705 - RNA, 19 nt, Artificial Sequence
  Description of Artificial Sequence: Synthetic oligonucleotide
  Antisense strand to SEQ ID NO: 2220704
ugacacagauccaacacau

SEQ ID NO: 2220706 - RNA, 19 nt, Artificial Sequence
  Description of Artificial Sequence: Synthetic oligonucleotide
  Sense strand starting at position 3119 of SEQ ID NO: 1883846
gcuauagugccacggaacu

SEQ ID NO: 2220707 - RNA, 19 nt, Artificial Sequence
  Description of Artificial Sequence: Synthetic oligonucleotide
  Antisense strand to SEQ ID NO: 2220706
aguuccguggcacuauagc

SEQ ID NO: 2220708 - RNA, 19 nt, Artificial Sequence
  Description of Artificial Sequence: Synthetic oligonucleotide
  Sense strand starting at position 3108 of SEQ ID NO: 1883846
gccggaaccuggcuauagu

SEQ ID NO: 2220709 - RNA, 19 nt, Artificial Sequence
  Description of Artificial Sequence: Synthetic oligonucleotide
  Antisense strand to SEQ ID NO: 2220708
acuauagccagguuccggc

SEQ ID NO: 2220710 - RNA, 19 nt, Artificial Sequence
  Description of Artificial Sequence: Synthetic oligonucleotide
  Sense strand starting at position 1226 of SEQ ID NO: 1883846
gcugcugacucaguguuaa

SEQ ID NO: 2220711 - RNA, 19 nt, Artificial Sequence
  Description of Artificial Sequence: Synthetic oligonucleotide
  Antisense strand to SEQ ID NO: 2220710
uuaacacugagucagcagc

SEQ ID NO: 2220712 - RNA, 19 nt, Artificial Sequence
  Description of Artificial Sequence: Synthetic oligonucleotide
  Sense strand starting at position 239 of SEQ ID NO: 1883846
gauagaacuucucauaggu

SEQ ID NO: 2220713 - RNA, 19 nt, Artificial Sequence
  Description of Artificial Sequence: Synthetic oligonucleotide
  Antisense strand to SEQ ID NO: 2220712
accuaugagaaguucuauc

SEQ ID NO: 2220714 - RNA, 19 nt, Artificial Sequence
  Description of Artificial Sequence: Synthetic oligonucleotide
  Sense strand starting at position 189 of SEQ ID NO: 1883846
aagguuauuaguugcguua

SEQ ID NO: 2220715 - RNA, 19 nt, Artificial Sequence
  Description of Artificial Sequence: Synthetic oligonucleotide
  Antisense strand to SEQ ID NO: 2220714
uaacgcaacuaauaaccuu

SEQ ID NO: 2220716 - RNA, 19 nt, Artificial Sequence
  Description of Artificial Sequence: Synthetic oligonucleotide
  Sense strand starting at position 2339 of SEQ ID NO: 1883846
gccguuuguuacuuaccaa

SEQ ID NO: 2220717 - RNA, 19 nt, Artificial Sequence
  Description of Artificial Sequence: Synthetic oligonucleotide
  Antisense strand to SEQ ID NO: 2220716
uugguaaguaacaaacggc

SEQ ID NO: 2220718 - RNA, 19 nt, Artificial Sequence
  Description of Artificial Sequence: Synthetic oligonucleotide
  Sense strand starting at position 644 of SEQ ID NO: 1883847
cuuaaaugagcucaugacu

SEQ ID NO: 2220719 - RNA, 19 nt, Artificial Sequence
  Description of Artificial Sequence: Synthetic oligonucleotide
  Antisense strand to SEQ ID NO: 2220718
agucaugagcucauuuaag

SEQ ID NO: 2220720 - RNA, 19 nt, Artificial Sequence
  Description of Artificial Sequence: Synthetic oligonucleotide
  Sense strand starting at position 2009 of SEQ ID NO: 1883847
gcauguguuggaucugugu

SEQ ID NO: 2220721 - RNA, 19 nt, Artificial Sequence
  Description of Artificial Sequence: Synthetic oligonucleotide
  Antisense strand to SEQ ID NO: 2220720
acacagauccaacacaugc

SEQ ID NO: 2220722 - RNA, 19 nt, Artificial Sequence
  Description of Artificial Sequence: Synthetic oligonucleotide
  Sense strand starting at position 499 of SEQ ID NO: 1883847
cuaccugugguuuaagaaa

SEQ ID NO: 2220723 - RNA, 19 nt, Artificial Sequence
  Description of Artificial Sequence: Synthetic oligonucleotide
  Antisense strand to SEQ ID NO: 2220722
uuucuuaaaccacagguag

SEQ ID NO: 2220724 - RNA, 19 nt, Artificial Sequence
  Description of Artificial Sequence: Synthetic oligonucleotide
  Sense strand starting at position 1289 of SEQ ID NO: 1883847
cugaucgucagauagaacu

SEQ ID NO: 2220725 - RNA, 19 nt, Artificial Sequence
  Description of Artificial Sequence: Synthetic oligonucleotide
  Antisense strand to SEQ ID NO: 2220724
aguucuaucugacgaucag

SEQ ID NO: 2220726 - RNA, 19 nt, Artificial Sequence
  Description of Artificial Sequence: Synthetic oligonucleotide
  Sense strand starting at position 723 of SEQ ID NO: 1883847
caaguuacaucucuaggga

SEQ ID NO: 2220727 - RNA, 19 nt, Artificial Sequence
  Description of Artificial Sequence: Synthetic oligonucleotide
  Antisense strand to SEQ ID NO: 2220726
ucccuagagauguaacuug

SEQ ID NO: 2220728 - RNA, 19 nt, Artificial Sequence
  Description of Artificial Sequence: Synthetic oligonucleotide
  Sense strand starting at position 634 of SEQ ID NO: 1883847
ggccuucuaccuuaaauga

SEQ ID NO: 2220729 - RNA, 19 nt, Artificial Sequence
  Description of Artificial Sequence: Synthetic oligonucleotide
  Antisense strand to SEQ ID NO: 2220728
ucauuuaagguagaaggcc

SEQ ID NO: 2220730 - RNA, 19 nt, Artificial Sequence
  Description of Artificial Sequence: Synthetic oligonucleotide
  Sense strand starting at position 2711 of SEQ ID NO: 1883847
aggaauccuugccugagaa

SEQ ID NO: 2220731 - RNA, 19 nt, Artificial Sequence
  Description of Artificial Sequence: Synthetic oligonucleotide
  Antisense strand to SEQ ID NO: 2220730
uucucaggcaaggauuccu

SEQ ID NO: 2220732 - RNA, 19 nt, Artificial Sequence
  Description of Artificial Sequence: Synthetic oligonucleotide
  Sense strand starting at position 2710 of SEQ ID NO: 1883847
aaggaauccuugccugaga

SEQ ID NO: 2220733 - RNA, 19 nt, Artificial Sequence
  Description of Artificial Sequence: Synthetic oligonucleotide
  Antisense strand to SEQ ID NO: 2220732
ucucaggcaaggauuccuu

SEQ ID NO: 2220734 - RNA, 19 nt, Artificial Sequence
  Description of Artificial Sequence: Synthetic oligonucleotide
  Sense strand starting at position 726 of SEQ ID NO: 1883847
guuacaucucuagggaaca

SEQ ID NO: 2220735 - RNA, 19 nt, Artificial Sequence
  Description of Artificial Sequence: Synthetic oligonucleotide
  Antisense strand to SEQ ID NO: 2220734
uguucccuagagauguaac

SEQ ID NO: 2220736 - RNA, 19 nt, Artificial Sequence
  Description of Artificial Sequence: Synthetic oligonucleotide
  Sense strand starting at position 2692 of SEQ ID NO: 1883847
ucauguucuggaugaaaua

SEQ ID NO: 2220737 - RNA, 19 nt, Artificial Sequence
  Description of Artificial Sequence: Synthetic oligonucleotide
  Antisense strand to SEQ ID NO: 2220736
uauuucauccagaacauga

SEQ ID NO: 2220738 - RNA, 19 nt, Artificial Sequence
  Description of Artificial Sequence: Synthetic oligonucleotide
  Sense strand starting at position 2712 of SEQ ID NO: 1883847
ggaauccuugccugagaaa

SEQ ID NO: 2220739 - RNA, 19 nt, Artificial Sequence
  Description of Artificial Sequence: Synthetic oligonucleotide
  Antisense strand to SEQ ID NO: 2220738
uuucucaggcaaggauucc

SEQ ID NO: 2220740 - RNA, 19 nt, Artificial Sequence
  Description of Artificial Sequence: Synthetic oligonucleotide
  Sense strand starting at position 1642 of SEQ ID NO: 1883847
aagauuggccuuuaaggca

SEQ ID NO: 2220741 - RNA, 19 nt, Artificial Sequence
  Description of Artificial Sequence: Synthetic oligonucleotide
  Antisense strand to SEQ ID NO: 2220740
ugccuuaaaggccaaucuu

SEQ ID NO: 2220742 - RNA, 19 nt, Artificial Sequence
  Description of Artificial Sequence: Synthetic oligonucleotide
  Sense strand starting at position 512 of SEQ ID NO: 1883847
aagaaauuccuacguggga

SEQ ID NO: 2220743 - RNA, 19 nt, Artificial Sequence
  Description of Artificial Sequence: Synthetic oligonucleotide
  Antisense strand to SEQ ID NO: 2220742
ucccacguaggaauuucuu

SEQ ID NO: 2220744 - RNA, 19 nt, Artificial Sequence
  Description of Artificial Sequence: Synthetic oligonucleotide
  Sense strand starting at position 1326 of SEQ ID NO: 1883847
ccaguuauuugggagaaag

SEQ ID NO: 2220745 - RNA, 19 nt, Artificial Sequence
  Description of Artificial Sequence: Synthetic oligonucleotide
  Antisense strand to SEQ ID NO: 2220744
cuuucucccaaauaacugg

SEQ ID NO: 2220746 - RNA, 19 nt, Artificial Sequence
  Description of Artificial Sequence: Synthetic oligonucleotide
  Sense strand starting at position 1262 of SEQ ID NO: 1883847
gcguuaauucuguuuggcu

SEQ ID NO: 2220747 - RNA, 19 nt, Artificial Sequence
  Description of Artificial Sequence: Synthetic oligonucleotide
  Antisense strand to SEQ ID NO: 2220746
agccaaacagaauuaacgc

SEQ ID NO: 2220748 - RNA, 19 nt, Artificial Sequence
  Description of Artificial Sequence: Synthetic oligonucleotide
  Sense strand starting at position 3213 of SEQ ID NO: 1883847
cuaccauauugagcugaau

SEQ ID NO: 2220749 - RNA, 19 nt, Artificial Sequence
  Description of Artificial Sequence: Synthetic oligonucleotide
  Antisense strand to SEQ ID NO: 2220748
auucagcucaauaugguag

SEQ ID NO: 2220750 - RNA, 19 nt, Artificial Sequence
  Description of Artificial Sequence: Synthetic oligonucleotide
  Sense strand starting at position 1670 of SEQ ID NO: 1883847
aacugugaggcauggauua

SEQ ID NO: 2220751 - RNA, 19 nt, Artificial Sequence
  Description of Artificial Sequence: Synthetic oligonucleotide
  Antisense strand to SEQ ID NO: 2220750
uaauccaugccucacaguu

SEQ ID NO: 2220752 - RNA, 19 nt, Artificial Sequence
  Description of Artificial Sequence: Synthetic oligonucleotide
  Sense strand starting at position 1338 of SEQ ID NO: 1883847
gagaaagauuugugaauga

SEQ ID NO: 2220753 - RNA, 19 nt, Artificial Sequence
  Description of Artificial Sequence: Synthetic oligonucleotide
  Antisense strand to SEQ ID NO: 2220752
ucauucacaaaucuuucuc

SEQ ID NO: 2220754 - RNA, 19 nt, Artificial Sequence
  Description of Artificial Sequence: Synthetic oligonucleotide
  Sense strand starting at position 1926 of SEQ ID NO: 1883847
acaauugcucaggguuaaa

SEQ ID NO: 2220755 - RNA, 19 nt, Artificial Sequence
  Description of Artificial Sequence: Synthetic oligonucleotide
  Antisense strand to SEQ ID NO: 2220754
uuuaacccugagcaauugu

SEQ ID NO: 2220756 - RNA, 19 nt, Artificial Sequence
  Description of Artificial Sequence: Synthetic oligonucleotide
  Sense strand starting at position 1871 of SEQ ID NO: 1883847
gcauuagcugaagacugua

SEQ ID NO: 2220757 - RNA, 19 nt, Artificial Sequence
  Description of Artificial Sequence: Synthetic oligonucleotide
  Antisense strand to SEQ ID NO: 2220756
uacagucuucagcuaaugc

SEQ ID NO: 2220758 - RNA, 19 nt, Artificial Sequence
  Description of Artificial Sequence: Synthetic oligonucleotide
  Sense strand starting at position 1923 of SEQ ID NO: 1883847
guaacaauugcucaggguu

SEQ ID NO: 2220759 - RNA, 19 nt, Artificial Sequence
  Description of Artificial Sequence: Synthetic oligonucleotide
  Antisense strand to SEQ ID NO: 2220758
aacccugagcaauuguuac

SEQ ID NO: 2220760 - RNA, 19 nt, Artificial Sequence
  Description of Artificial Sequence: Synthetic oligonucleotide
  Sense strand starting at position 2927 of SEQ ID NO: 1883847
ccgagugaggcucaaauuc

SEQ ID NO: 2220761 - RNA, 19 nt, Artificial Sequence
  Description of Artificial Sequence: Synthetic oligonucleotide
  Antisense strand to SEQ ID NO: 2220760
gaauuugagccucacucgg

SEQ ID NO: 2220762 - RNA, 19 nt, Artificial Sequence
  Description of Artificial Sequence: Synthetic oligonucleotide
  Sense strand starting at position 3810 of SEQ ID NO: 1883847
acucaugacuccucugagu

SEQ ID NO: 2220763 - RNA, 19 nt, Artificial Sequence
  Description of Artificial Sequence: Synthetic oligonucleotide
  Antisense strand to SEQ ID NO: 2220762
acucagaggagucaugagu

SEQ ID NO: 2220764 - RNA, 19 nt, Artificial Sequence
  Description of Artificial Sequence: Synthetic oligonucleotide
  Sense strand starting at position 2897 of SEQ ID NO: 1883847
auguccuguccugagaagu

SEQ ID NO: 2220765 - RNA, 19 nt, Artificial Sequence
  Description of Artificial Sequence: Synthetic oligonucleotide
  Antisense strand to SEQ ID NO: 2220764
acuucucaggacaggacau

SEQ ID NO: 2220766 - RNA, 19 nt, Artificial Sequence
  Description of Artificial Sequence: Synthetic oligonucleotide
  Sense strand starting at position 3185 of SEQ ID NO: 1883847
ccagauggcuaagcugaau

SEQ ID NO: 2220767 - RNA, 19 nt, Artificial Sequence
  Description of Artificial Sequence: Synthetic oligonucleotide
  Antisense strand to SEQ ID NO: 2220766
auucagcuuagccaucugg

SEQ ID NO: 2220768 - RNA, 19 nt, Artificial Sequence
  Description of Artificial Sequence: Synthetic oligonucleotide
  Sense strand starting at position 595 of SEQ ID NO: 1883847
gccuuuaugcuggaucaug

SEQ ID NO: 2220769 - RNA, 19 nt, Artificial Sequence
  Description of Artificial Sequence: Synthetic oligonucleotide
  Antisense strand to SEQ ID NO: 2220768
caugauccagcauaaaggc

SEQ ID NO: 2220770 - RNA, 19 nt, Artificial Sequence
  Description of Artificial Sequence: Synthetic oligonucleotide
  Sense strand starting at position 2936 of SEQ ID NO: 1883847
gcucaaauuccaugucaag

SEQ ID NO: 2220771 - RNA, 19 nt, Artificial Sequence
  Description of Artificial Sequence: Synthetic oligonucleotide
  Antisense strand to SEQ ID NO: 2220770
cuugacauggaauuugagc

SEQ ID NO: 2220772 - RNA, 19 nt, Artificial Sequence
  Description of Artificial Sequence: Synthetic oligonucleotide
  Sense strand starting at position 497 of SEQ ID NO: 1883847
uccuaccugugguuuaaga

SEQ ID NO: 2220773 - RNA, 19 nt, Artificial Sequence
  Description of Artificial Sequence: Synthetic oligonucleotide
  Antisense strand to SEQ ID NO: 2220772
ucuuaaaccacagguagga

SEQ ID NO: 2220774 - RNA, 19 nt, Artificial Sequence
  Description of Artificial Sequence: Synthetic oligonucleotide
  Sense strand starting at position 559 of SEQ ID NO: 1883847
aagcccugucccuggauaa

SEQ ID NO: 2220775 - RNA, 19 nt, Artificial Sequence
  Description of Artificial Sequence: Synthetic oligonucleotide
  Antisense strand to SEQ ID NO: 2220774
uuauccagggacagggcuu

SEQ ID NO: 2220776 - RNA, 19 nt, Artificial Sequence
  Description of Artificial Sequence: Synthetic oligonucleotide
  Sense strand starting at position 1345 of SEQ ID NO: 1883847
auuugugaaugacaguauu

SEQ ID NO: 2220777 - RNA, 19 nt, Artificial Sequence
  Description of Artificial Sequence: Synthetic oligonucleotide
  Antisense strand to SEQ ID NO: 2220776
aauacugucauucacaaau

SEQ ID NO: 2220778 - RNA, 19 nt, Artificial Sequence
  Description of Artificial Sequence: Synthetic oligonucleotide
  Sense strand starting at position 613 of SEQ ID NO: 1883847
gugcuacugguauaaaguu

SEQ ID NO: 2220779 - RNA, 19 nt, Artificial Sequence
  Description of Artificial Sequence: Synthetic oligonucleotide
  Antisense strand to SEQ ID NO: 2220778
aacuuuauaccaguagcac

SEQ ID NO: 2220780 - RNA, 19 nt, Artificial Sequence
  Description of Artificial Sequence: Synthetic oligonucleotide
  Sense strand starting at position 1284 of SEQ ID NO: 1883847
ccaagcugaucgucagaua

SEQ ID NO: 2220781 - RNA, 19 nt, Artificial Sequence
  Description of Artificial Sequence: Synthetic oligonucleotide
  Antisense strand to SEQ ID NO: 2220780
uaucugacgaucagcuugg

SEQ ID NO: 2220782 - RNA, 19 nt, Artificial Sequence
  Description of Artificial Sequence: Synthetic oligonucleotide
  Sense strand starting at position 494 of SEQ ID NO: 1883847
acauccuaccugugguuua

SEQ ID NO: 2220783 - RNA, 19 nt, Artificial Sequence
  Description of Artificial Sequence: Synthetic oligonucleotide
  Antisense strand to SEQ ID NO: 2220782
uaaaccacagguaggaugu

SEQ ID NO: 2220784 - RNA, 19 nt, Artificial Sequence
  Description of Artificial Sequence: Synthetic oligonucleotide
  Sense strand starting at position 560 of SEQ ID NO: 1883847
agcccugucccuggauaau

SEQ ID NO: 2220785 - RNA, 19 nt, Artificial Sequence
  Description of Artificial Sequence: Synthetic oligonucleotide
  Antisense strand to SEQ ID NO: 2220784
auuauccagggacagggcu

SEQ ID NO: 2220786 - RNA, 19 nt, Artificial Sequence
  Description of Artificial Sequence: Synthetic oligonucleotide
  Sense strand starting at position 1315 of SEQ ID NO: 1883847
gguuaagccagccaguuau

SEQ ID NO: 2220787 - RNA, 19 nt, Artificial Sequence
  Description of Artificial Sequence: Synthetic oligonucleotide
  Antisense strand to SEQ ID NO: 2220786
auaacuggcuggcuuaacc

SEQ ID NO: 2220788 - RNA, 19 nt, Artificial Sequence
  Description of Artificial Sequence: Synthetic oligonucleotide
  Sense strand starting at position 163 of SEQ ID NO: 1883847
gcaaguacugagcggacaa

SEQ ID NO: 2220789 - RNA, 19 nt, Artificial Sequence
  Description of Artificial Sequence: Synthetic oligonucleotide
  Antisense strand to SEQ ID NO: 2220788
uuguccgcucaguacuugc

SEQ ID NO: 2220790 - RNA, 19 nt, Artificial Sequence
  Description of Artificial Sequence: Synthetic oligonucleotide
  Sense strand starting at position 2562 of SEQ ID NO: 1883847
caguuuaggcuuggaguca

SEQ ID NO: 2220791 - RNA, 19 nt, Artificial Sequence
  Description of Artificial Sequence: Synthetic oligonucleotide
  Antisense strand to SEQ ID NO: 2220790
ugacuccaagccuaaacug

SEQ ID NO: 2220792 - RNA, 19 nt, Artificial Sequence
  Description of Artificial Sequence: Synthetic oligonucleotide
  Sense strand starting at position 98 of SEQ ID NO: 1883847
uggcuuauguucucacaug

SEQ ID NO: 2220793 - RNA, 19 nt, Artificial Sequence
  Description of Artificial Sequence: Synthetic oligonucleotide
  Antisense strand to SEQ ID NO: 2220792
caugugagaacauaagcca

SEQ ID NO: 2220794 - RNA, 19 nt, Artificial Sequence
  Description of Artificial Sequence: Synthetic oligonucleotide
  Sense strand starting at position 2582 of SEQ ID NO: 1883847
gguucuaauccuugucacu

SEQ ID NO: 2220795 - RNA, 19 nt, Artificial Sequence
  Description of Artificial Sequence: Synthetic oligonucleotide
  Antisense strand to SEQ ID NO: 2220794
agugacaaggauuagaacc

SEQ ID NO: 2220796 - RNA, 19 nt, Artificial Sequence
  Description of Artificial Sequence: Synthetic oligonucleotide
  Sense strand starting at position 2098 of SEQ ID NO: 1883847
gccagaagcccuuggguua

SEQ ID NO: 2220797 - RNA, 19 nt, Artificial Sequence
  Description of Artificial Sequence: Synthetic oligonucleotide
  Antisense strand to SEQ ID NO: 2220796
uaacccaagggcuucuggc

SEQ ID NO: 2220798 - RNA, 19 nt, Artificial Sequence
  Description of Artificial Sequence: Synthetic oligonucleotide
  Sense strand starting at position 282 of SEQ ID NO: 1883848
cuuaaaugagcucaugacu

SEQ ID NO: 2220799 - RNA, 19 nt, Artificial Sequence
  Description of Artificial Sequence: Synthetic oligonucleotide
  Antisense strand to SEQ ID NO: 2220798
agucaugagcucauuuaag

SEQ ID NO: 2220800 - RNA, 19 nt, Artificial Sequence
  Description of Artificial Sequence: Synthetic oligonucleotide
  Sense strand starting at position 1647 of SEQ ID NO: 1883848
gcauguguuggaucugugu

SEQ ID NO: 2220801 - RNA, 19 nt, Artificial Sequence
  Description of Artificial Sequence: Synthetic oligonucleotide
  Antisense strand to SEQ ID NO: 2220800
acacagauccaacacaugc

SEQ ID NO: 2220802 - RNA, 19 nt, Artificial Sequence
  Description of Artificial Sequence: Synthetic oligonucleotide
  Sense strand starting at position 3880 of SEQ ID NO: 1883848
aagggaauuguggguaaua

SEQ ID NO: 2220803 - RNA, 19 nt, Artificial Sequence
  Description of Artificial Sequence: Synthetic oligonucleotide
  Antisense strand to SEQ ID NO: 2220802
uauuacccacaauucccuu

SEQ ID NO: 2220804 - RNA, 19 nt, Artificial Sequence
  Description of Artificial Sequence: Synthetic oligonucleotide
  Sense strand starting at position 137 of SEQ ID NO: 1883848
cuaccugugguuuaagaaa

SEQ ID NO: 2220805 - RNA, 19 nt, Artificial Sequence
  Description of Artificial Sequence: Synthetic oligonucleotide
  Antisense strand to SEQ ID NO: 2220804
uuucuuaaaccacagguag

SEQ ID NO: 2220806 - RNA, 19 nt, Artificial Sequence
  Description of Artificial Sequence: Synthetic oligonucleotide
  Sense strand starting at position 927 of SEQ ID NO: 1883848
cugaucgucagauagaacu

SEQ ID NO: 2220807 - RNA, 19 nt, Artificial Sequence
  Description of Artificial Sequence: Synthetic oligonucleotide
  Antisense strand to SEQ ID NO: 2220806
aguucuaucugacgaucag

SEQ ID NO: 2220808 - RNA, 19 nt, Artificial Sequence
  Description of Artificial Sequence: Synthetic oligonucleotide
  Sense strand starting at position 3881 of SEQ ID NO: 1883848
agggaauuguggguaauau

SEQ ID NO: 2220809 - RNA, 19 nt, Artificial Sequence
  Description of Artificial Sequence: Synthetic oligonucleotide
  Antisense strand to SEQ ID NO: 2220808
auauuacccacaauucccu

SEQ ID NO: 2220810 - RNA, 19 nt, Artificial Sequence
  Description of Artificial Sequence: Synthetic oligonucleotide
  Sense strand starting at position 361 of SEQ ID NO: 1883848
caaguuacaucucuaggga

SEQ ID NO: 2220811 - RNA, 19 nt, Artificial Sequence
  Description of Artificial Sequence: Synthetic oligonucleotide
  Antisense strand to SEQ ID NO: 2220810
ucccuagagauguaacuug

SEQ ID NO: 2220812 - RNA, 19 nt, Artificial Sequence
  Description of Artificial Sequence: Synthetic oligonucleotide
  Sense strand starting at position 272 of SEQ ID NO: 1883848
ggccuucuaccuuaaauga

SEQ ID NO: 2220813 - RNA, 19 nt, Artificial Sequence
  Description of Artificial Sequence: Synthetic oligonucleotide
  Antisense strand to SEQ ID NO: 2220812
ucauuuaagguagaaggcc

SEQ ID NO: 2220814 - RNA, 19 nt, Artificial Sequence
  Description of Artificial Sequence: Synthetic oligonucleotide
  Sense strand starting at position 2349 of SEQ ID NO: 1883848
aggaauccuugccugagaa

SEQ ID NO: 2220815 - RNA, 19 nt, Artificial Sequence
  Description of Artificial Sequence: Synthetic oligonucleotide
  Antisense strand to SEQ ID NO: 2220814
uucucaggcaaggauuccu

SEQ ID NO: 2220816 - RNA, 19 nt, Artificial Sequence
  Description of Artificial Sequence: Synthetic oligonucleotide
  Sense strand starting at position 2348 of SEQ ID NO: 1883848
aaggaauccuugccugaga

SEQ ID NO: 2220817 - RNA, 19 nt, Artificial Sequence
  Description of Artificial Sequence: Synthetic oligonucleotide
  Antisense strand to SEQ ID NO: 2220816
ucucaggcaaggauuccuu

SEQ ID NO: 2220818 - RNA, 19 nt, Artificial Sequence
  Description of Artificial Sequence: Synthetic oligonucleotide
  Sense strand starting at position 364 of SEQ ID NO: 1883848
guuacaucucuagggaaca

SEQ ID NO: 2220819 - RNA, 19 nt, Artificial Sequence
  Description of Artificial Sequence: Synthetic oligonucleotide
  Antisense strand to SEQ ID NO: 2220818
uguucccuagagauguaac

SEQ ID NO: 2220820 - RNA, 19 nt, Artificial Sequence
  Description of Artificial Sequence: Synthetic oligonucleotide
  Sense strand starting at position 2330 of SEQ ID NO: 1883848
ucauguucuggaugaaaua

SEQ ID NO: 2220821 - RNA, 19 nt, Artificial Sequence
  Description of Artificial Sequence: Synthetic oligonucleotide
  Antisense strand to SEQ ID NO: 2220820
uauuucauccagaacauga

SEQ ID NO: 2220822 - RNA, 19 nt, Artificial Sequence
  Description of Artificial Sequence: Synthetic oligonucleotide
  Sense strand starting at position 2350 of SEQ ID NO: 1883848
ggaauccuugccugagaaa

SEQ ID NO: 2220823 - RNA, 19 nt, Artificial Sequence
  Description of Artificial Sequence: Synthetic oligonucleotide
  Antisense strand to SEQ ID NO: 2220822
uuucucaggcaaggauucc

SEQ ID NO: 2220824 - RNA, 19 nt, Artificial Sequence
  Description of Artificial Sequence: Synthetic oligonucleotide
  Sense strand starting at position 1280 of SEQ ID NO: 1883848
aagauuggccuuuaaggca

SEQ ID NO: 2220825 - RNA, 19 nt, Artificial Sequence
  Description of Artificial Sequence: Synthetic oligonucleotide
  Antisense strand to SEQ ID NO: 2220824
ugccuuaaaggccaaucuu

SEQ ID NO: 2220826 - RNA, 19 nt, Artificial Sequence
  Description of Artificial Sequence: Synthetic oligonucleotide
  Sense strand starting at position 150 of SEQ ID NO: 1883848
aagaaauuccuacguggga

SEQ ID NO: 2220827 - RNA, 19 nt, Artificial Sequence
  Description of Artificial Sequence: Synthetic oligonucleotide
  Antisense strand to SEQ ID NO: 2220826
ucccacguaggaauuucuu

SEQ ID NO: 2220828 - RNA, 19 nt, Artificial Sequence
  Description of Artificial Sequence: Synthetic oligonucleotide
  Sense strand starting at position 964 of SEQ ID NO: 1883848
ccaguuauuugggagaaag

SEQ ID NO: 2220829 - RNA, 19 nt, Artificial Sequence
  Description of Artificial Sequence: Synthetic oligonucleotide
  Antisense strand to SEQ ID NO: 2220828
cuuucucccaaauaacugg

SEQ ID NO: 2220830 - RNA, 19 nt, Artificial Sequence
  Description of Artificial Sequence: Synthetic oligonucleotide
  Sense strand starting at position 900 of SEQ ID NO: 1883848
gcguuaauucuguuuggcu

SEQ ID NO: 2220831 - RNA, 19 nt, Artificial Sequence
  Description of Artificial Sequence: Synthetic oligonucleotide
  Antisense strand to SEQ ID NO: 2220830
agccaaacagaauuaacgc

SEQ ID NO: 2220832 - RNA, 19 nt, Artificial Sequence
  Description of Artificial Sequence: Synthetic oligonucleotide
  Sense strand starting at position 2851 of SEQ ID NO: 1883848
cuaccauauugagcugaau

SEQ ID NO: 2220833 - RNA, 19 nt, Artificial Sequence
  Description of Artificial Sequence: Synthetic oligonucleotide
  Antisense strand to SEQ ID NO: 2220832
auucagcucaauaugguag

SEQ ID NO: 2220834 - RNA, 19 nt, Artificial Sequence
  Description of Artificial Sequence: Synthetic oligonucleotide
  Sense strand starting at position 1308 of SEQ ID NO: 1883848
aacugugaggcauggauua

SEQ ID NO: 2220835 - RNA, 19 nt, Artificial Sequence
  Description of Artificial Sequence: Synthetic oligonucleotide
  Antisense strand to SEQ ID NO: 2220834
uaauccaugccucacaguu

SEQ ID NO: 2220836 - RNA, 19 nt, Artificial Sequence
  Description of Artificial Sequence: Synthetic oligonucleotide
  Sense strand starting at position 976 of SEQ ID NO: 1883848
gagaaagauuugugaauga

SEQ ID NO: 2220837 - RNA, 19 nt, Artificial Sequence
  Description of Artificial Sequence: Synthetic oligonucleotide
  Antisense strand to SEQ ID NO: 2220836
ucauucacaaaucuuucuc

SEQ ID NO: 2220838 - RNA, 19 nt, Artificial Sequence
  Description of Artificial Sequence: Synthetic oligonucleotide
  Sense strand starting at position 1564 of SEQ ID NO: 1883848
acaauugcucaggguuaaa

SEQ ID NO: 2220839 - RNA, 19 nt, Artificial Sequence
  Description of Artificial Sequence: Synthetic oligonucleotide
  Antisense strand to SEQ ID NO: 2220838
uuuaacccugagcaauugu

SEQ ID NO: 2220840 - RNA, 19 nt, Artificial Sequence
  Description of Artificial Sequence: Synthetic oligonucleotide
  Sense strand starting at position 1509 of SEQ ID NO: 1883848
gcauuagcugaagacugua

SEQ ID NO: 2220841 - RNA, 19 nt, Artificial Sequence
  Description of Artificial Sequence: Synthetic oligonucleotide
  Antisense strand to SEQ ID NO: 2220840
uacagucuucagcuaaugc

SEQ ID NO: 2220842 - RNA, 19 nt, Artificial Sequence
  Description of Artificial Sequence: Synthetic oligonucleotide
  Sense strand starting at position 1561 of SEQ ID NO: 1883848
guaacaauugcucaggguu

SEQ ID NO: 2220843 - RNA, 19 nt, Artificial Sequence
  Description of Artificial Sequence: Synthetic oligonucleotide
  Antisense strand to SEQ ID NO: 2220842
aacccugagcaauuguuac

SEQ ID NO: 2220844 - RNA, 19 nt, Artificial Sequence
  Description of Artificial Sequence: Synthetic oligonucleotide
  Sense strand starting at position 2565 of SEQ ID NO: 1883848
ccgagugaggcucaaauuc

SEQ ID NO: 2220845 - RNA, 19 nt, Artificial Sequence
  Description of Artificial Sequence: Synthetic oligonucleotide
  Antisense strand to SEQ ID NO: 2220844
gaauuugagccucacucgg

SEQ ID NO: 2220846 - RNA, 19 nt, Artificial Sequence
  Description of Artificial Sequence: Synthetic oligonucleotide
  Sense strand starting at position 3448 of SEQ ID NO: 1883848
acucaugacuccucugagu

SEQ ID NO: 2220847 - RNA, 19 nt, Artificial Sequence
  Description of Artificial Sequence: Synthetic oligonucleotide
  Antisense strand to SEQ ID NO: 2220846
acucagaggagucaugagu

SEQ ID NO: 2220848 - RNA, 19 nt, Artificial Sequence
  Description of Artificial Sequence: Synthetic oligonucleotide
  Sense strand starting at position 2535 of SEQ ID NO: 1883848
auguccuguccugagaagu

SEQ ID NO: 2220849 - RNA, 19 nt, Artificial Sequence
  Description of Artificial Sequence: Synthetic oligonucleotide
  Antisense strand to SEQ ID NO: 2220848
acuucucaggacaggacau

SEQ ID NO: 2220850 - RNA, 19 nt, Artificial Sequence
  Description of Artificial Sequence: Synthetic oligonucleotide
  Sense strand starting at position 2823 of SEQ ID NO: 1883848
ccagauggcuaagcugaau

SEQ ID NO: 2220851 - RNA, 19 nt, Artificial Sequence
  Description of Artificial Sequence: Synthetic oligonucleotide
  Antisense strand to SEQ ID NO: 2220850
auucagcuuagccaucugg

SEQ ID NO: 2220852 - RNA, 19 nt, Artificial Sequence
  Description of Artificial Sequence: Synthetic oligonucleotide
  Sense strand starting at position 233 of SEQ ID NO: 1883848
gccuuuaugcuggaucaug

SEQ ID NO: 2220853 - RNA, 19 nt, Artificial Sequence
  Description of Artificial Sequence: Synthetic oligonucleotide
  Antisense strand to SEQ ID NO: 2220852
caugauccagcauaaaggc

SEQ ID NO: 2220854 - RNA, 19 nt, Artificial Sequence
  Description of Artificial Sequence: Synthetic oligonucleotide
  Sense strand starting at position 2574 of SEQ ID NO: 1883848
gcucaaauuccaugucaag

SEQ ID NO: 2220855 - RNA, 19 nt, Artificial Sequence
  Description of Artificial Sequence: Synthetic oligonucleotide
  Antisense strand to SEQ ID NO: 2220854
cuugacauggaauuugagc

SEQ ID NO: 2220856 - RNA, 19 nt, Artificial Sequence
  Description of Artificial Sequence: Synthetic oligonucleotide
  Sense strand starting at position 135 of SEQ ID NO: 1883848
uccuaccugugguuuaaga

SEQ ID NO: 2220857 - RNA, 19 nt, Artificial Sequence
  Description of Artificial Sequence: Synthetic oligonucleotide
  Antisense strand to SEQ ID NO: 2220856
ucuuaaaccacagguagga

SEQ ID NO: 2220858 - RNA, 19 nt, Artificial Sequence
  Description of Artificial Sequence: Synthetic oligonucleotide
  Sense strand starting at position 197 of SEQ ID NO: 1883848
aagcccugucccuggauaa

SEQ ID NO: 2220859 - RNA, 19 nt, Artificial Sequence
  Description of Artificial Sequence: Synthetic oligonucleotide
  Antisense strand to SEQ ID NO: 2220858
uuauccagggacagggcuu

SEQ ID NO: 2220860 - RNA, 19 nt, Artificial Sequence
  Description of Artificial Sequence: Synthetic oligonucleotide
  Sense strand starting at position 3911 of SEQ ID NO: 1883848
cggagaucgcgagaguuga

SEQ ID NO: 2220861 - RNA, 19 nt, Artificial Sequence
  Description of Artificial Sequence: Synthetic oligonucleotide
  Antisense strand to SEQ ID NO: 2220860
ucaacucucgcgaucuccg

SEQ ID NO: 2220862 - RNA, 19 nt, Artificial Sequence
  Description of Artificial Sequence: Synthetic oligonucleotide
  Sense strand starting at position 983 of SEQ ID NO: 1883848
auuugugaaugacaguauu

SEQ ID NO: 2220863 - RNA, 19 nt, Artificial Sequence
  Description of Artificial Sequence: Synthetic oligonucleotide
  Antisense strand to SEQ ID NO: 2220862
aauacugucauucacaaau

SEQ ID NO: 2220864 - RNA, 19 nt, Artificial Sequence
  Description of Artificial Sequence: Synthetic oligonucleotide
  Sense strand starting at position 251 of SEQ ID NO: 1883848
gugcuacugguauaaaguu

SEQ ID NO: 2220865 - RNA, 19 nt, Artificial Sequence
  Description of Artificial Sequence: Synthetic oligonucleotide
  Antisense strand to SEQ ID NO: 2220864
aacuuuauaccaguagcac

SEQ ID NO: 2220866 - RNA, 19 nt, Artificial Sequence
  Description of Artificial Sequence: Synthetic oligonucleotide
  Sense strand starting at position 922 of SEQ ID NO: 1883848
ccaagcugaucgucagaua

SEQ ID NO: 2220867 - RNA, 19 nt, Artificial Sequence
  Description of Artificial Sequence: Synthetic oligonucleotide
  Antisense strand to SEQ ID NO: 2220866
uaucugacgaucagcuugg

SEQ ID NO: 2220868 - RNA, 19 nt, Artificial Sequence
  Description of Artificial Sequence: Synthetic oligonucleotide
  Sense strand starting at position 132 of SEQ ID NO: 1883848
acauccuaccugugguuua

SEQ ID NO: 2220869 - RNA, 19 nt, Artificial Sequence
  Description of Artificial Sequence: Synthetic oligonucleotide
  Antisense strand to SEQ ID NO: 2220868
uaaaccacagguaggaugu

SEQ ID NO: 2220870 - RNA, 19 nt, Artificial Sequence
  Description of Artificial Sequence: Synthetic oligonucleotide
  Sense strand starting at position 198 of SEQ ID NO: 1883848
agcccugucccuggauaau

SEQ ID NO: 2220871 - RNA, 19 nt, Artificial Sequence
  Description of Artificial Sequence: Synthetic oligonucleotide
  Antisense strand to SEQ ID NO: 2220870
auuauccagggacagggcu

SEQ ID NO: 2220872 - RNA, 19 nt, Artificial Sequence
  Description of Artificial Sequence: Synthetic oligonucleotide
  Sense strand starting at position 953 of SEQ ID NO: 1883848
gguuaagccagccaguuau

SEQ ID NO: 2220873 - RNA, 19 nt, Artificial Sequence
  Description of Artificial Sequence: Synthetic oligonucleotide
  Antisense strand to SEQ ID NO: 2220872
auaacuggcuggcuuaacc

SEQ ID NO: 2220874 - RNA, 19 nt, Artificial Sequence
  Description of Artificial Sequence: Synthetic oligonucleotide
  Sense strand starting at position 2200 of SEQ ID NO: 1883848
caguuuaggcuuggaguca

SEQ ID NO: 2220875 - RNA, 19 nt, Artificial Sequence
  Description of Artificial Sequence: Synthetic oligonucleotide
  Antisense strand to SEQ ID NO: 2220874
ugacuccaagccuaaacug

SEQ ID NO: 2220876 - RNA, 19 nt, Artificial Sequence
  Description of Artificial Sequence: Synthetic oligonucleotide
  Sense strand starting at position 2220 of SEQ ID NO: 1883848
gguucuaauccuugucacu

SEQ ID NO: 2220877 - RNA, 19 nt, Artificial Sequence
  Description of Artificial Sequence: Synthetic oligonucleotide
  Antisense strand to SEQ ID NO: 2220876
agugacaaggauuagaacc

SEQ ID NO: 2220878 - RNA, 19 nt, Artificial Sequence
  Description of Artificial Sequence: Synthetic oligonucleotide
  Sense strand starting at position 1034 of SEQ ID NO: 1883849
cuuaaaugagcucaugacu

SEQ ID NO: 2220879 - RNA, 19 nt, Artificial Sequence
  Description of Artificial Sequence: Synthetic oligonucleotide
  Antisense strand to SEQ ID NO: 2220878
agucaugagcucauuuaag

SEQ ID NO: 2220880 - RNA, 19 nt, Artificial Sequence
  Description of Artificial Sequence: Synthetic oligonucleotide
  Sense strand starting at position 2399 of SEQ ID NO: 1883849
gcauguguuggaucugugu

SEQ ID NO: 2220881 - RNA, 19 nt, Artificial Sequence
  Description of Artificial Sequence: Synthetic oligonucleotide
  Antisense strand to SEQ ID NO: 2220880
acacagauccaacacaugc

SEQ ID NO: 2220882 - RNA, 19 nt, Artificial Sequence
  Description of Artificial Sequence: Synthetic oligonucleotide
  Sense strand starting at position 889 of SEQ ID NO: 1883849
cuaccugugguuuaagaaa

SEQ ID NO: 2220883 - RNA, 19 nt, Artificial Sequence
  Description of Artificial Sequence: Synthetic oligonucleotide
  Antisense strand to SEQ ID NO: 2220882
uuucuuaaaccacagguag

SEQ ID NO: 2220884 - RNA, 19 nt, Artificial Sequence
  Description of Artificial Sequence: Synthetic oligonucleotide
  Sense strand starting at position 1679 of SEQ ID NO: 1883849
cugaucgucagauagaacu

SEQ ID NO: 2220885 - RNA, 19 nt, Artificial Sequence
  Description of Artificial Sequence: Synthetic oligonucleotide
  Antisense strand to SEQ ID NO: 2220884
aguucuaucugacgaucag

SEQ ID NO: 2220886 - RNA, 19 nt, Artificial Sequence
  Description of Artificial Sequence: Synthetic oligonucleotide
  Sense strand starting at position 335 of SEQ ID NO: 1883849
uaucgagaccuggaagcua

SEQ ID NO: 2220887 - RNA, 19 nt, Artificial Sequence
  Description of Artificial Sequence: Synthetic oligonucleotide
  Antisense strand to SEQ ID NO: 2220886
uagcuuccaggucucgaua

SEQ ID NO: 2220888 - RNA, 19 nt, Artificial Sequence
  Description of Artificial Sequence: Synthetic oligonucleotide
  Sense strand starting at position 1113 of SEQ ID NO: 1883849
caaguuacaucucuaggga

SEQ ID NO: 2220889 - RNA, 19 nt, Artificial Sequence
  Description of Artificial Sequence: Synthetic oligonucleotide
  Antisense strand to SEQ ID NO: 2220888
ucccuagagauguaacuug

SEQ ID NO: 2220890 - RNA, 19 nt, Artificial Sequence
  Description of Artificial Sequence: Synthetic oligonucleotide
  Sense strand starting at position 1024 of SEQ ID NO: 1883849
ggccuucuaccuuaaauga

SEQ ID NO: 2220891 - RNA, 19 nt, Artificial Sequence
  Description of Artificial Sequence: Synthetic oligonucleotide
  Antisense strand to SEQ ID NO: 2220890
ucauuuaagguagaaggcc

SEQ ID NO: 2220892 - RNA, 19 nt, Artificial Sequence
  Description of Artificial Sequence: Synthetic oligonucleotide
  Sense strand starting at position 3101 of SEQ ID NO: 1883849
aggaauccuugccugagaa

SEQ ID NO: 2220893 - RNA, 19 nt, Artificial Sequence
  Description of Artificial Sequence: Synthetic oligonucleotide
  Antisense strand to SEQ ID NO: 2220892
uucucaggcaaggauuccu

SEQ ID NO: 2220894 - RNA, 19 nt, Artificial Sequence
  Description of Artificial Sequence: Synthetic oligonucleotide
  Sense strand starting at position 3100 of SEQ ID NO: 1883849
aaggaauccuugccugaga

SEQ ID NO: 2220895 - RNA, 19 nt, Artificial Sequence
  Description of Artificial Sequence: Synthetic oligonucleotide
  Antisense strand to SEQ ID NO: 2220894
ucucaggcaaggauuccuu

SEQ ID NO: 2220896 - RNA, 19 nt, Artificial Sequence
  Description of Artificial Sequence: Synthetic oligonucleotide
  Sense strand starting at position 1116 of SEQ ID NO: 1883849
guuacaucucuagggaaca

SEQ ID NO: 2220897 - RNA, 19 nt, Artificial Sequence
  Description of Artificial Sequence: Synthetic oligonucleotide
  Antisense strand to SEQ ID NO: 2220896
uguucccuagagauguaac

SEQ ID NO: 2220898 - RNA, 19 nt, Artificial Sequence
  Description of Artificial Sequence: Synthetic oligonucleotide
  Sense strand starting at position 3082 of SEQ ID NO: 1883849
ucauguucuggaugaaaua

SEQ ID NO: 2220899 - RNA, 19 nt, Artificial Sequence
  Description of Artificial Sequence: Synthetic oligonucleotide
  Antisense strand to SEQ ID NO: 2220898
uauuucauccagaacauga

SEQ ID NO: 2220900 - RNA, 19 nt, Artificial Sequence
  Description of Artificial Sequence: Synthetic oligonucleotide
  Sense strand starting at position 3102 of SEQ ID NO: 1883849
ggaauccuugccugagaaa

SEQ ID NO: 2220901 - RNA, 19 nt, Artificial Sequence
  Description of Artificial Sequence: Synthetic oligonucleotide
  Antisense strand to SEQ ID NO: 2220900
uuucucaggcaaggauucc

SEQ ID NO: 2220902 - RNA, 19 nt, Artificial Sequence
  Description of Artificial Sequence: Synthetic oligonucleotide
  Sense strand starting at position 2032 of SEQ ID NO: 1883849
aagauuggccuuuaaggca

SEQ ID NO: 2220903 - RNA, 19 nt, Artificial Sequence
  Description of Artificial Sequence: Synthetic oligonucleotide
  Antisense strand to SEQ ID NO: 2220902
ugccuuaaaggccaaucuu

SEQ ID NO: 2220904 - RNA, 19 nt, Artificial Sequence
  Description of Artificial Sequence: Synthetic oligonucleotide
  Sense strand starting at position 902 of SEQ ID NO: 1883849
aagaaauuccuacguggga

SEQ ID NO: 2220905 - RNA, 19 nt, Artificial Sequence
  Description of Artificial Sequence: Synthetic oligonucleotide
  Antisense strand to SEQ ID NO: 2220904
ucccacguaggaauuucuu

SEQ ID NO: 2220906 - RNA, 19 nt, Artificial Sequence
  Description of Artificial Sequence: Synthetic oligonucleotide
  Sense strand starting at position 105 of SEQ ID NO: 1883849
guucguucccaggaagaaa

SEQ ID NO: 2220907 - RNA, 19 nt, Artificial Sequence
  Description of Artificial Sequence: Synthetic oligonucleotide
  Antisense strand to SEQ ID NO: 2220906
uuucuuccugggaacgaac

SEQ ID NO: 2220908 - RNA, 19 nt, Artificial Sequence
  Description of Artificial Sequence: Synthetic oligonucleotide
  Sense strand starting at position 1716 of SEQ ID NO: 1883849
ccaguuauuugggagaaag

SEQ ID NO: 2220909 - RNA, 19 nt, Artificial Sequence
  Description of Artificial Sequence: Synthetic oligonucleotide
  Antisense strand to SEQ ID NO: 2220908
cuuucucccaaauaacugg

SEQ ID NO: 2220910 - RNA, 19 nt, Artificial Sequence
  Description of Artificial Sequence: Synthetic oligonucleotide
  Sense strand starting at position 180 of SEQ ID NO: 1883849
uagagaaggcucugggagu

SEQ ID NO: 2220911 - RNA, 19 nt, Artificial Sequence
  Description of Artificial Sequence: Synthetic oligonucleotide
  Antisense strand to SEQ ID NO: 2220910
acucccagagccuucucua

SEQ ID NO: 2220912 - RNA, 19 nt, Artificial Sequence
  Description of Artificial Sequence: Synthetic oligonucleotide
  Sense strand starting at position 1652 of SEQ ID NO: 1883849
gcguuaauucuguuuggcu

SEQ ID NO: 2220913 - RNA, 19 nt, Artificial Sequence
  Description of Artificial Sequence: Synthetic oligonucleotide
  Antisense strand to SEQ ID NO: 2220912
agccaaacagaauuaacgc

SEQ ID NO: 2220914 - RNA, 19 nt, Artificial Sequence
  Description of Artificial Sequence: Synthetic oligonucleotide
  Sense strand starting at position 3603 of SEQ ID NO: 1883849
cuaccauauugagcugaau

SEQ ID NO: 2220915 - RNA, 19 nt, Artificial Sequence
  Description of Artificial Sequence: Synthetic oligonucleotide
  Antisense strand to SEQ ID NO: 2220914
auucagcucaauaugguag

SEQ ID NO: 2220916 - RNA, 19 nt, Artificial Sequence
  Description of Artificial Sequence: Synthetic oligonucleotide
  Sense strand starting at position 2060 of SEQ ID NO: 1883849
aacugugaggcauggauua

SEQ ID NO: 2220917 - RNA, 19 nt, Artificial Sequence
  Description of Artificial Sequence: Synthetic oligonucleotide
  Antisense strand to SEQ ID NO: 2220916
uaauccaugccucacaguu

SEQ ID NO: 2220918 - RNA, 19 nt, Artificial Sequence
  Description of Artificial Sequence: Synthetic oligonucleotide
  Sense strand starting at position 1728 of SEQ ID NO: 1883849
gagaaagauuugugaauga

SEQ ID NO: 2220919 - RNA, 19 nt, Artificial Sequence
  Description of Artificial Sequence: Synthetic oligonucleotide
  Antisense strand to SEQ ID NO: 2220918
ucauucacaaaucuuucuc

SEQ ID NO: 2220920 - RNA, 19 nt, Artificial Sequence
  Description of Artificial Sequence: Synthetic oligonucleotide
  Sense strand starting at position 2316 of SEQ ID NO: 1883849
acaauugcucaggguuaaa

SEQ ID NO: 2220921 - RNA, 19 nt, Artificial Sequence
  Description of Artificial Sequence: Synthetic oligonucleotide
  Antisense strand to SEQ ID NO: 2220920
uuuaacccugagcaauugu

SEQ ID NO: 2220922 - RNA, 19 nt, Artificial Sequence
  Description of Artificial Sequence: Synthetic oligonucleotide
  Sense strand starting at position 2261 of SEQ ID NO: 1883849
gcauuagcugaagacugua

SEQ ID NO: 2220923 - RNA, 19 nt, Artificial Sequence
  Description of Artificial Sequence: Synthetic oligonucleotide
  Antisense strand to SEQ ID NO: 2220922
uacagucuucagcuaaugc

SEQ ID NO: 2220924 - RNA, 19 nt, Artificial Sequence
  Description of Artificial Sequence: Synthetic oligonucleotide
  Sense strand starting at position 23 of SEQ ID NO: 1883849
agugacugucuuuagucaa

SEQ ID NO: 2220925 - RNA, 19 nt, Artificial Sequence
  Description of Artificial Sequence: Synthetic oligonucleotide
  Antisense strand to SEQ ID NO: 2220924
uugacuaaagacagucacu

SEQ ID NO: 2220926 - RNA, 19 nt, Artificial Sequence
  Description of Artificial Sequence: Synthetic oligonucleotide
  Sense strand starting at position 2313 of SEQ ID NO: 1883849
guaacaauugcucaggguu

SEQ ID NO: 2220927 - RNA, 19 nt, Artificial Sequence
  Description of Artificial Sequence: Synthetic oligonucleotide
  Antisense strand to SEQ ID NO: 2220926
aacccugagcaauuguuac

SEQ ID NO: 2220928 - RNA, 19 nt, Artificial Sequence
  Description of Artificial Sequence: Synthetic oligonucleotide
  Sense strand starting at position 3317 of SEQ ID NO: 1883849
ccgagugaggcucaaauuc

SEQ ID NO: 2220929 - RNA, 19 nt, Artificial Sequence
  Description of Artificial Sequence: Synthetic oligonucleotide
  Antisense strand to SEQ ID NO: 2220928
gaauuugagccucacucgg

SEQ ID NO: 2220930 - RNA, 19 nt, Artificial Sequence
  Description of Artificial Sequence: Synthetic oligonucleotide
  Sense strand starting at position 3287 of SEQ ID NO: 1883849
auguccuguccugagaagu

SEQ ID NO: 2220931 - RNA, 19 nt, Artificial Sequence
  Description of Artificial Sequence: Synthetic oligonucleotide
  Antisense strand to SEQ ID NO: 2220930
acuucucaggacaggacau

SEQ ID NO: 2220932 - RNA, 19 nt, Artificial Sequence
  Description of Artificial Sequence: Synthetic oligonucleotide
  Sense strand starting at position 3575 of SEQ ID NO: 1883849
ccagauggcuaagcugaau

SEQ ID NO: 2220933 - RNA, 19 nt, Artificial Sequence
  Description of Artificial Sequence: Synthetic oligonucleotide
  Antisense strand to SEQ ID NO: 2220932
auucagcuuagccaucugg

SEQ ID NO: 2220934 - RNA, 19 nt, Artificial Sequence
  Description of Artificial Sequence: Synthetic oligonucleotide
  Sense strand starting at position 81 of SEQ ID NO: 1883849
agucaccauccugguaaau

SEQ ID NO: 2220935 - RNA, 19 nt, Artificial Sequence
  Description of Artificial Sequence: Synthetic oligonucleotide
  Antisense strand to SEQ ID NO: 2220934
auuuaccaggauggugacu

SEQ ID NO: 2220936 - RNA, 19 nt, Artificial Sequence
  Description of Artificial Sequence: Synthetic oligonucleotide
  Sense strand starting at position 985 of SEQ ID NO: 1883849
gccuuuaugcuggaucaug

SEQ ID NO: 2220937 - RNA, 19 nt, Artificial Sequence
  Description of Artificial Sequence: Synthetic oligonucleotide
  Antisense strand to SEQ ID NO: 2220936
caugauccagcauaaaggc

SEQ ID NO: 2220938 - RNA, 19 nt, Artificial Sequence
  Description of Artificial Sequence: Synthetic oligonucleotide
  Sense strand starting at position 3326 of SEQ ID NO: 1883849
gcucaaauuccaugucaag

SEQ ID NO: 2220939 - RNA, 19 nt, Artificial Sequence
  Description of Artificial Sequence: Synthetic oligonucleotide
  Antisense strand to SEQ ID NO: 2220938
cuugacauggaauuugagc

SEQ ID NO: 2220940 - RNA, 19 nt, Artificial Sequence
  Description of Artificial Sequence: Synthetic oligonucleotide
  Sense strand starting at position 101 of SEQ ID NO: 1883849
gaggguucguucccaggaa

SEQ ID NO: 2220941 - RNA, 19 nt, Artificial Sequence
  Description of Artificial Sequence: Synthetic oligonucleotide
  Antisense strand to SEQ ID NO: 2220940
uuccugggaacgaacccuc

SEQ ID NO: 2220942 - RNA, 19 nt, Artificial Sequence
  Description of Artificial Sequence: Synthetic oligonucleotide
  Sense strand starting at position 887 of SEQ ID NO: 1883849
uccuaccugugguuuaaga

SEQ ID NO: 2220943 - RNA, 19 nt, Artificial Sequence
  Description of Artificial Sequence: Synthetic oligonucleotide
  Antisense strand to SEQ ID NO: 2220942
ucuuaaaccacagguagga

SEQ ID NO: 2220944 - RNA, 19 nt, Artificial Sequence
  Description of Artificial Sequence: Synthetic oligonucleotide
  Sense strand starting at position 949 of SEQ ID NO: 1883849
aagcccugucccuggauaa

SEQ ID NO: 2220945 - RNA, 19 nt, Artificial Sequence
  Description of Artificial Sequence: Synthetic oligonucleotide
  Antisense strand to SEQ ID NO: 2220944
uuauccagggacagggcuu

SEQ ID NO: 2220946 - RNA, 19 nt, Artificial Sequence
  Description of Artificial Sequence: Synthetic oligonucleotide
  Sense strand starting at position 1735 of SEQ ID NO: 1883849
auuugugaaugacaguauu

SEQ ID NO: 2220947 - RNA, 19 nt, Artificial Sequence
  Description of Artificial Sequence: Synthetic oligonucleotide
  Antisense strand to SEQ ID NO: 2220946
aauacugucauucacaaau

SEQ ID NO: 2220948 - RNA, 19 nt, Artificial Sequence
  Description of Artificial Sequence: Synthetic oligonucleotide
  Sense strand starting at position 1003 of SEQ ID NO: 1883849
gugcuacugguauaaaguu

SEQ ID NO: 2220949 - RNA, 19 nt, Artificial Sequence
  Description of Artificial Sequence: Synthetic oligonucleotide
  Antisense strand to SEQ ID NO: 2220948
aacuuuauaccaguagcac

SEQ ID NO: 2220950 - RNA, 19 nt, Artificial Sequence
  Description of Artificial Sequence: Synthetic oligonucleotide
  Sense strand starting at position 1674 of SEQ ID NO: 1883849
ccaagcugaucgucagaua

SEQ ID NO: 2220951 - RNA, 19 nt, Artificial Sequence
  Description of Artificial Sequence: Synthetic oligonucleotide
  Antisense strand to SEQ ID NO: 2220950
uaucugacgaucagcuugg

SEQ ID NO: 2220952 - RNA, 19 nt, Artificial Sequence
  Description of Artificial Sequence: Synthetic oligonucleotide
  Sense strand starting at position 884 of SEQ ID NO: 1883849
acauccuaccugugguuua

SEQ ID NO: 2220953 - RNA, 19 nt, Artificial Sequence
  Description of Artificial Sequence: Synthetic oligonucleotide
  Antisense strand to SEQ ID NO: 2220952
uaaaccacagguaggaugu

SEQ ID NO: 2220954 - RNA, 19 nt, Artificial Sequence
  Description of Artificial Sequence: Synthetic oligonucleotide
  Sense strand starting at position 950 of SEQ ID NO: 1883849
agcccugucccuggauaau

SEQ ID NO: 2220955 - RNA, 19 nt, Artificial Sequence
  Description of Artificial Sequence: Synthetic oligonucleotide
  Antisense strand to SEQ ID NO: 2220954
auuauccagggacagggcu

SEQ ID NO: 2220956 - RNA, 19 nt, Artificial Sequence
  Description of Artificial Sequence: Synthetic oligonucleotide
  Sense strand starting at position 20 of SEQ ID NO: 1883849
augagugacugucuuuagu

SEQ ID NO: 2220957 - RNA, 19 nt, Artificial Sequence
  Description of Artificial Sequence: Synthetic oligonucleotide
  Antisense strand to SEQ ID NO: 2220956
acuaaagacagucacucau

SEQ ID NO: 2220958 - RNA, 19 nt, Artificial Sequence
  Description of Artificial Sequence: Synthetic oligonucleotide
  Sense strand starting at position 828 of SEQ ID NO: 1883850
ccaguuaugcaagaaccaa

SEQ ID NO: 2220959 - RNA, 19 nt, Artificial Sequence
  Description of Artificial Sequence: Synthetic oligonucleotide
  Antisense strand to SEQ ID NO: 2220958
uugguucuugcauaacugg

SEQ ID NO: 2220960 - RNA, 19 nt, Artificial Sequence
  Description of Artificial Sequence: Synthetic oligonucleotide
  Sense strand starting at position 710 of SEQ ID NO: 1883850
ccuggaauucuacacagca

SEQ ID NO: 2220961 - RNA, 19 nt, Artificial Sequence
  Description of Artificial Sequence: Synthetic oligonucleotide
  Antisense strand to SEQ ID NO: 2220960
ugcuguguagaauuccagg

SEQ ID NO: 2220962 - RNA, 19 nt, Artificial Sequence
  Description of Artificial Sequence: Synthetic oligonucleotide
  Sense strand starting at position 3331 of SEQ ID NO: 1883850
agccaugucccggcaguau

SEQ ID NO: 2220963 - RNA, 19 nt, Artificial Sequence
  Description of Artificial Sequence: Synthetic oligonucleotide
  Antisense strand to SEQ ID NO: 2220962
auacugccgggacauggcu

SEQ ID NO: 2220964 - RNA, 19 nt, Artificial Sequence
  Description of Artificial Sequence: Synthetic oligonucleotide
  Sense strand starting at position 2515 of SEQ ID NO: 1883850
ggaugagauaccuggcaua

SEQ ID NO: 2220965 - RNA, 19 nt, Artificial Sequence
  Description of Artificial Sequence: Synthetic oligonucleotide
  Antisense strand to SEQ ID NO: 2220964
uaugccagguaucucaucc

SEQ ID NO: 2220966 - RNA, 19 nt, Artificial Sequence
  Description of Artificial Sequence: Synthetic oligonucleotide
  Sense strand starting at position 2100 of SEQ ID NO: 1883850
gagggcucuguugauacaa

SEQ ID NO: 2220967 - RNA, 19 nt, Artificial Sequence
  Description of Artificial Sequence: Synthetic oligonucleotide
  Antisense strand to SEQ ID NO: 2220966
uuguaucaacagagcccuc

SEQ ID NO: 2220968 - RNA, 19 nt, Artificial Sequence
  Description of Artificial Sequence: Synthetic oligonucleotide
  Sense strand starting at position 3731 of SEQ ID NO: 1883850
agcagugaaccagauguca

SEQ ID NO: 2220969 - RNA, 19 nt, Artificial Sequence
  Description of Artificial Sequence: Synthetic oligonucleotide
  Antisense strand to SEQ ID NO: 2220968
ugacaucugguucacugcu

SEQ ID NO: 2220970 - RNA, 19 nt, Artificial Sequence
  Description of Artificial Sequence: Synthetic oligonucleotide
  Sense strand starting at position 217 of SEQ ID NO: 1883850
cggacugaagagugauuca

SEQ ID NO: 2220971 - RNA, 19 nt, Artificial Sequence
  Description of Artificial Sequence: Synthetic oligonucleotide
  Antisense strand to SEQ ID NO: 2220970
ugaaucacucuucaguccg

SEQ ID NO: 2220972 - RNA, 19 nt, Artificial Sequence
  Description of Artificial Sequence: Synthetic oligonucleotide
  Sense strand starting at position 3146 of SEQ ID NO: 1883850
cuaugaauuguccaaaugc

SEQ ID NO: 2220973 - RNA, 19 nt, Artificial Sequence
  Description of Artificial Sequence: Synthetic oligonucleotide
  Antisense strand to SEQ ID NO: 2220972
gcauuuggacaauucauag

SEQ ID NO: 2220974 - RNA, 19 nt, Artificial Sequence
  Description of Artificial Sequence: Synthetic oligonucleotide
  Sense strand starting at position 1633 of SEQ ID NO: 1883850
ucucaaugucccugaggga

SEQ ID NO: 2220975 - RNA, 19 nt, Artificial Sequence
  Description of Artificial Sequence: Synthetic oligonucleotide
  Antisense strand to SEQ ID NO: 2220974
ucccucagggacauugaga

SEQ ID NO: 2220976 - RNA, 19 nt, Artificial Sequence
  Description of Artificial Sequence: Synthetic oligonucleotide
  Sense strand starting at position 3828 of SEQ ID NO: 1883850
gcaggucuucuggaucaca

SEQ ID NO: 2220977 - RNA, 19 nt, Artificial Sequence
  Description of Artificial Sequence: Synthetic oligonucleotide
  Antisense strand to SEQ ID NO: 2220976
ugugauccagaagaccugc

SEQ ID NO: 2220978 - RNA, 19 nt, Artificial Sequence
  Description of Artificial Sequence: Synthetic oligonucleotide
  Sense strand starting at position 824 of SEQ ID NO: 1883850
ugacccaguuaugcaagaa

SEQ ID NO: 2220979 - RNA, 19 nt, Artificial Sequence
  Description of Artificial Sequence: Synthetic oligonucleotide
  Antisense strand to SEQ ID NO: 2220978
uucuugcauaacuggguca

SEQ ID NO: 2220980 - RNA, 19 nt, Artificial Sequence
  Description of Artificial Sequence: Synthetic oligonucleotide
  Sense strand starting at position 6 of SEQ ID NO: 1883850
ugaagacauccaggcugua

SEQ ID NO: 2220981 - RNA, 19 nt, Artificial Sequence
  Description of Artificial Sequence: Synthetic oligonucleotide
  Antisense strand to SEQ ID NO: 2220980
uacagccuggaugucuuca

SEQ ID NO: 2220982 - RNA, 19 nt, Artificial Sequence
  Description of Artificial Sequence: Synthetic oligonucleotide
  Sense strand starting at position 3631 of SEQ ID NO: 1883850
gcacucacauuccuuggaa

SEQ ID NO: 2220983 - RNA, 19 nt, Artificial Sequence
  Description of Artificial Sequence: Synthetic oligonucleotide
  Antisense strand to SEQ ID NO: 2220982
uuccaaggaaugugagugc

SEQ ID NO: 2220984 - RNA, 19 nt, Artificial Sequence
  Description of Artificial Sequence: Synthetic oligonucleotide
  Sense strand starting at position 3144 of SEQ ID NO: 1883850
gucuaugaauuguccaaau

SEQ ID NO: 2220985 - RNA, 19 nt, Artificial Sequence
  Description of Artificial Sequence: Synthetic oligonucleotide
  Antisense strand to SEQ ID NO: 2220984
auuuggacaauucauagac

SEQ ID NO: 2220986 - RNA, 19 nt, Artificial Sequence
  Description of Artificial Sequence: Synthetic oligonucleotide
  Sense strand starting at position 3077 of SEQ ID NO: 1883850
guccaaauguaucuaugac

SEQ ID NO: 2220987 - RNA, 19 nt, Artificial Sequence
  Description of Artificial Sequence: Synthetic oligonucleotide
  Antisense strand to SEQ ID NO: 2220986
gucauagauacauuuggac

SEQ ID NO: 2220988 - RNA, 19 nt, Artificial Sequence
  Description of Artificial Sequence: Synthetic oligonucleotide
  Sense strand starting at position 1307 of SEQ ID NO: 1883850
cgauuauucgcuuaacaaa

SEQ ID NO: 2220989 - RNA, 19 nt, Artificial Sequence
  Description of Artificial Sequence: Synthetic oligonucleotide
  Antisense strand to SEQ ID NO: 2220988
uuuguuaagcgaauaaucg

SEQ ID NO: 2220990 - RNA, 19 nt, Artificial Sequence
  Description of Artificial Sequence: Synthetic oligonucleotide
  Sense strand starting at position 1079 of SEQ ID NO: 1883850
gccaguccugcauaaauaa

SEQ ID NO: 2220991 - RNA, 19 nt, Artificial Sequence
  Description of Artificial Sequence: Synthetic oligonucleotide
  Antisense strand to SEQ ID NO: 2220990
uuauuuaugcaggacuggc

SEQ ID NO: 2220992 - RNA, 19 nt, Artificial Sequence
  Description of Artificial Sequence: Synthetic oligonucleotide
  Sense strand starting at position 3023 of SEQ ID NO: 1883850
agagauggcuuugcccaaa

SEQ ID NO: 2220993 - RNA, 19 nt, Artificial Sequence
  Description of Artificial Sequence: Synthetic oligonucleotide
  Antisense strand to SEQ ID NO: 2220992
uuugggcaaagccaucucu

SEQ ID NO: 2220994 - RNA, 19 nt, Artificial Sequence
  Description of Artificial Sequence: Synthetic oligonucleotide
  Sense strand starting at position 1240 of SEQ ID NO: 1883850
ggagaacuuugagaaagga

SEQ ID NO: 2220995 - RNA, 19 nt, Artificial Sequence
  Description of Artificial Sequence: Synthetic oligonucleotide
  Antisense strand to SEQ ID NO: 2220994
uccuuucucaaaguucucc

SEQ ID NO: 2220996 - RNA, 19 nt, Artificial Sequence
  Description of Artificial Sequence: Synthetic oligonucleotide
  Sense strand starting at position 940 of SEQ ID NO: 1883850
agcagauucugccuggaag

SEQ ID NO: 2220997 - RNA, 19 nt, Artificial Sequence
  Description of Artificial Sequence: Synthetic oligonucleotide
  Antisense strand to SEQ ID NO: 2220996
cuuccaggcagaaucugcu

SEQ ID NO: 2220998 - RNA, 19 nt, Artificial Sequence
  Description of Artificial Sequence: Synthetic oligonucleotide
  Sense strand starting at position 1077 of SEQ ID NO: 1883850
augccaguccugcauaaau

SEQ ID NO: 2220999 - RNA, 19 nt, Artificial Sequence
  Description of Artificial Sequence: Synthetic oligonucleotide
  Antisense strand to SEQ ID NO: 2220998
auuuaugcaggacuggcau

SEQ ID NO: 2221000 - RNA, 19 nt, Artificial Sequence
  Description of Artificial Sequence: Synthetic oligonucleotide
  Sense strand starting at position 2096 of SEQ ID NO: 1883850
gacugagggcucuguugau

SEQ ID NO: 2221001 - RNA, 19 nt, Artificial Sequence
  Description of Artificial Sequence: Synthetic oligonucleotide
  Antisense strand to SEQ ID NO: 2221000
aucaacagagcccucaguc

SEQ ID NO: 2221002 - RNA, 19 nt, Artificial Sequence
  Description of Artificial Sequence: Synthetic oligonucleotide
  Sense strand starting at position 3022 of SEQ ID NO: 1883850
cagagauggcuuugcccaa

SEQ ID NO: 2221003 - RNA, 19 nt, Artificial Sequence
  Description of Artificial Sequence: Synthetic oligonucleotide
  Antisense strand to SEQ ID NO: 2221002
uugggcaaagccaucucug

SEQ ID NO: 2221004 - RNA, 19 nt, Artificial Sequence
  Description of Artificial Sequence: Synthetic oligonucleotide
  Sense strand starting at position 942 of SEQ ID NO: 1883850
cagauucugccuggaaguc

SEQ ID NO: 2221005 - RNA, 19 nt, Artificial Sequence
  Description of Artificial Sequence: Synthetic oligonucleotide
  Antisense strand to SEQ ID NO: 2221004
gacuuccaggcagaaucug

SEQ ID NO: 2221006 - RNA, 19 nt, Artificial Sequence
  Description of Artificial Sequence: Synthetic oligonucleotide
  Sense strand starting at position 1296 of SEQ ID NO: 1883850
cuucccugucucgauuauu

SEQ ID NO: 2221007 - RNA, 19 nt, Artificial Sequence
  Description of Artificial Sequence: Synthetic oligonucleotide
  Antisense strand to SEQ ID NO: 2221006
aauaaucgagacagggaag

SEQ ID NO: 2221008 - RNA, 19 nt, Artificial Sequence
  Description of Artificial Sequence: Synthetic oligonucleotide
  Sense strand starting at position 3739 of SEQ ID NO: 1883850
accagaugucacugcgaca

SEQ ID NO: 2221009 - RNA, 19 nt, Artificial Sequence
  Description of Artificial Sequence: Synthetic oligonucleotide
  Antisense strand to SEQ ID NO: 2221008
ugucgcagugacaucuggu

SEQ ID NO: 2221010 - RNA, 19 nt, Artificial Sequence
  Description of Artificial Sequence: Synthetic oligonucleotide
  Sense strand starting at position 1137 of SEQ ID NO: 1883850
cauccaugccugggaguuu

SEQ ID NO: 2221011 - RNA, 19 nt, Artificial Sequence
  Description of Artificial Sequence: Synthetic oligonucleotide
  Antisense strand to SEQ ID NO: 2221010
aaacucccaggcauggaug

SEQ ID NO: 2221012 - RNA, 19 nt, Artificial Sequence
  Description of Artificial Sequence: Synthetic oligonucleotide
  Sense strand starting at position 3066 of SEQ ID NO: 1883850
acucaaggcucguccaaau

SEQ ID NO: 2221013 - RNA, 19 nt, Artificial Sequence
  Description of Artificial Sequence: Synthetic oligonucleotide
  Antisense strand to SEQ ID NO: 2221012
auuuggacgagccuugagu

SEQ ID NO: 2221014 - RNA, 19 nt, Artificial Sequence
  Description of Artificial Sequence: Synthetic oligonucleotide
  Sense strand starting at position 3135 of SEQ ID NO: 1883850
cagcuccgugucuaugaau

SEQ ID NO: 2221015 - RNA, 19 nt, Artificial Sequence
  Description of Artificial Sequence: Synthetic oligonucleotide
  Antisense strand to SEQ ID NO: 2221014
auucauagacacggagcug

SEQ ID NO: 2221016 - RNA, 19 nt, Artificial Sequence
  Description of Artificial Sequence: Synthetic oligonucleotide
  Sense strand starting at position 941 of SEQ ID NO: 1883850
gcagauucugccuggaagu

SEQ ID NO: 2221017 - RNA, 19 nt, Artificial Sequence
  Description of Artificial Sequence: Synthetic oligonucleotide
  Antisense strand to SEQ ID NO: 2221016
acuuccaggcagaaucugc

SEQ ID NO: 2221018 - RNA, 19 nt, Artificial Sequence
  Description of Artificial Sequence: Synthetic oligonucleotide
  Sense strand starting at position 3525 of SEQ ID NO: 1883850
uguccaucugcaugugaca

SEQ ID NO: 2221019 - RNA, 19 nt, Artificial Sequence
  Description of Artificial Sequence: Synthetic oligonucleotide
  Antisense strand to SEQ ID NO: 2221018
ugucacaugcagauggaca

SEQ ID NO: 2221020 - RNA, 19 nt, Artificial Sequence
  Description of Artificial Sequence: Synthetic oligonucleotide
  Sense strand starting at position 1305 of SEQ ID NO: 1883850
cucgauuauucgcuuaaca

SEQ ID NO: 2221021 - RNA, 19 nt, Artificial Sequence
  Description of Artificial Sequence: Synthetic oligonucleotide
  Antisense strand to SEQ ID NO: 2221020
uguuaagcgaauaaucgag

SEQ ID NO: 2221022 - RNA, 19 nt, Artificial Sequence
  Description of Artificial Sequence: Synthetic oligonucleotide
  Sense strand starting at position 3824 of SEQ ID NO: 1883850
gccagcaggucuucuggau

SEQ ID NO: 2221023 - RNA, 19 nt, Artificial Sequence
  Description of Artificial Sequence: Synthetic oligonucleotide
  Antisense strand to SEQ ID NO: 2221022
auccagaagaccugcuggc

SEQ ID NO: 2221024 - RNA, 19 nt, Artificial Sequence
  Description of Artificial Sequence: Synthetic oligonucleotide
  Sense strand starting at position 3134 of SEQ ID NO: 1883850
acagcuccgugucuaugaa

SEQ ID NO: 2221025 - RNA, 19 nt, Artificial Sequence
  Description of Artificial Sequence: Synthetic oligonucleotide
  Antisense strand to SEQ ID NO: 2221024
uucauagacacggagcugu

SEQ ID NO: 2221026 - RNA, 19 nt, Artificial Sequence
  Description of Artificial Sequence: Synthetic oligonucleotide
  Sense strand starting at position 782 of SEQ ID NO: 1883850
cgcugaauuuaacaaugca

SEQ ID NO: 2221027 - RNA, 19 nt, Artificial Sequence
  Description of Artificial Sequence: Synthetic oligonucleotide
  Antisense strand to SEQ ID NO: 2221026
ugcauuguuaaauucagcg

SEQ ID NO: 2221028 - RNA, 19 nt, Artificial Sequence
  Description of Artificial Sequence: Synthetic oligonucleotide
  Sense strand starting at position 2518 of SEQ ID NO: 1883850
ugagauaccuggcauagaa

SEQ ID NO: 2221029 - RNA, 19 nt, Artificial Sequence
  Description of Artificial Sequence: Synthetic oligonucleotide
  Antisense strand to SEQ ID NO: 2221028
uucuaugccagguaucuca

SEQ ID NO: 2221030 - RNA, 19 nt, Artificial Sequence
  Description of Artificial Sequence: Synthetic oligonucleotide
  Sense strand starting at position 1304 of SEQ ID NO: 1883850
ucucgauuauucgcuuaac

SEQ ID NO: 2221031 - RNA, 19 nt, Artificial Sequence
  Description of Artificial Sequence: Synthetic oligonucleotide
  Antisense strand to SEQ ID NO: 2221030
guuaagcgaauaaucgaga

SEQ ID NO: 2221032 - RNA, 19 nt, Artificial Sequence
  Description of Artificial Sequence: Synthetic oligonucleotide
  Sense strand starting at position 634 of SEQ ID NO: 1883850
cugggcuucccuugcuauu

SEQ ID NO: 2221033 - RNA, 19 nt, Artificial Sequence
  Description of Artificial Sequence: Synthetic oligonucleotide
  Antisense strand to SEQ ID NO: 2221032
aauagcaagggaagcccag

SEQ ID NO: 2221034 - RNA, 19 nt, Artificial Sequence
  Description of Artificial Sequence: Synthetic oligonucleotide
  Sense strand starting at position 3644 of SEQ ID NO: 1883850
uuggaauccucugggaaac

SEQ ID NO: 2221035 - RNA, 19 nt, Artificial Sequence
  Description of Artificial Sequence: Synthetic oligonucleotide
  Antisense strand to SEQ ID NO: 2221034
guuucccagaggauuccaa

SEQ ID NO: 2221036 - RNA, 19 nt, Artificial Sequence
  Description of Artificial Sequence: Synthetic oligonucleotide
  Sense strand starting at position 643 of SEQ ID NO: 1883850
ccuugcuauugggauaaag

SEQ ID NO: 2221037 - RNA, 19 nt, Artificial Sequence
  Description of Artificial Sequence: Synthetic oligonucleotide
  Antisense strand to SEQ ID NO: 2221036
cuuuaucccaauagcaagg

SEQ ID NO: 2221038 - RNA, 19 nt, Artificial Sequence
  Description of Artificial Sequence: Synthetic oligonucleotide
  Sense strand starting at position 2691 of SEQ ID NO: 1883851
auaucugaugcaugaaaga

SEQ ID NO: 2221039 - RNA, 19 nt, Artificial Sequence
  Description of Artificial Sequence: Synthetic oligonucleotide
  Antisense strand to SEQ ID NO: 2221038
ucuuucaugcaucagauau

SEQ ID NO: 2221040 - RNA, 19 nt, Artificial Sequence
  Description of Artificial Sequence: Synthetic oligonucleotide
  Sense strand starting at position 2327 of SEQ ID NO: 1883851
ugaauaugaugagucuuga

SEQ ID NO: 2221041 - RNA, 19 nt, Artificial Sequence
  Description of Artificial Sequence: Synthetic oligonucleotide
  Antisense strand to SEQ ID NO: 2221040
ucaagacucaucauauuca

SEQ ID NO: 2221042 - RNA, 19 nt, Artificial Sequence
  Description of Artificial Sequence: Synthetic oligonucleotide
  Sense strand starting at position 418 of SEQ ID NO: 1883851
gggaauucccagggaggca

SEQ ID NO: 2221043 - RNA, 19 nt, Artificial Sequence
  Description of Artificial Sequence: Synthetic oligonucleotide
  Antisense strand to SEQ ID NO: 2221042
ugccucccugggaauuccc

SEQ ID NO: 2221044 - RNA, 19 nt, Artificial Sequence
  Description of Artificial Sequence: Synthetic oligonucleotide
  Sense strand starting at position 3372 of SEQ ID NO: 1883851
gagaguugagauuaugcga

SEQ ID NO: 2221045 - RNA, 19 nt, Artificial Sequence
  Description of Artificial Sequence: Synthetic oligonucleotide
  Antisense strand to SEQ ID NO: 2221044
ucgcauaaucucaacucuc

SEQ ID NO: 2221046 - RNA, 19 nt, Artificial Sequence
  Description of Artificial Sequence: Synthetic oligonucleotide
  Sense strand starting at position 1650 of SEQ ID NO: 1883851
agaugaaagcugcaucgga

SEQ ID NO: 2221047 - RNA, 19 nt, Artificial Sequence
  Description of Artificial Sequence: Synthetic oligonucleotide
  Antisense strand to SEQ ID NO: 2221046
uccgaugcagcuuucaucu

SEQ ID NO: 2221048 - RNA, 19 nt, Artificial Sequence
  Description of Artificial Sequence: Synthetic oligonucleotide
  Sense strand starting at position 1341 of SEQ ID NO: 1883851
gcguuaagugugucucauc

SEQ ID NO: 2221049 - RNA, 19 nt, Artificial Sequence
  Description of Artificial Sequence: Synthetic oligonucleotide
  Antisense strand to SEQ ID NO: 2221048
gaugagacacacuuaacgc

SEQ ID NO: 2221050 - RNA, 19 nt, Artificial Sequence
  Description of Artificial Sequence: Synthetic oligonucleotide
  Sense strand starting at position 2505 of SEQ ID NO: 1883851
gggcaugcugaccauuaca

SEQ ID NO: 2221051 - RNA, 19 nt, Artificial Sequence
  Description of Artificial Sequence: Synthetic oligonucleotide
  Antisense strand to SEQ ID NO: 2221050
uguaauggucagcaugccc

SEQ ID NO: 2221052 - RNA, 19 nt, Artificial Sequence
  Description of Artificial Sequence: Synthetic oligonucleotide
  Sense strand starting at position 582 of SEQ ID NO: 1883851
gagggcuucuucuuagaag

SEQ ID NO: 2221053 - RNA, 19 nt, Artificial Sequence
  Description of Artificial Sequence: Synthetic oligonucleotide
  Antisense strand to SEQ ID NO: 2221052
cuucuaagaagaagcccuc

SEQ ID NO: 2221054 - RNA, 19 nt, Artificial Sequence
  Description of Artificial Sequence: Synthetic oligonucleotide
  Sense strand starting at position 405 of SEQ ID NO: 1883851
uggugagggccaugggaau

SEQ ID NO: 2221055 - RNA, 19 nt, Artificial Sequence
  Description of Artificial Sequence: Synthetic oligonucleotide
  Antisense strand to SEQ ID NO: 2221054
auucccauggcccucacca

SEQ ID NO: 2221056 - RNA, 19 nt, Artificial Sequence
  Description of Artificial Sequence: Synthetic oligonucleotide
  Sense strand starting at position 3518 of SEQ ID NO: 1883851
gggucaucucugcagacau

SEQ ID NO: 2221057 - RNA, 19 nt, Artificial Sequence
  Description of Artificial Sequence: Synthetic oligonucleotide
  Antisense strand to SEQ ID NO: 2221056
augucugcagagaugaccc

SEQ ID NO: 2221058 - RNA, 19 nt, Artificial Sequence
  Description of Artificial Sequence: Synthetic oligonucleotide
  Sense strand starting at position 1267 of SEQ ID NO: 1883851
gucuucuugcuggaauaga

SEQ ID NO: 2221059 - RNA, 19 nt, Artificial Sequence
  Description of Artificial Sequence: Synthetic oligonucleotide
  Antisense strand to SEQ ID NO: 2221058
ucuauuccagcaagaagac

SEQ ID NO: 2221060 - RNA, 19 nt, Artificial Sequence
  Description of Artificial Sequence: Synthetic oligonucleotide
  Sense strand starting at position 2377 of SEQ ID NO: 1883851
gaaaguccauuggauuuga

SEQ ID NO: 2221061 - RNA, 19 nt, Artificial Sequence
  Description of Artificial Sequence: Synthetic oligonucleotide
  Antisense strand to SEQ ID NO: 2221060
ucaaauccaauggacuuuc

SEQ ID NO: 2221062 - RNA, 19 nt, Artificial Sequence
  Description of Artificial Sequence: Synthetic oligonucleotide
  Sense strand starting at position 3520 of SEQ ID NO: 1883851
gucaucucugcagacauca

SEQ ID NO: 2221063 - RNA, 19 nt, Artificial Sequence
  Description of Artificial Sequence: Synthetic oligonucleotide
  Antisense strand to SEQ ID NO: 2221062
ugaugucugcagagaugac

SEQ ID NO: 2221064 - RNA, 19 nt, Artificial Sequence
  Description of Artificial Sequence: Synthetic oligonucleotide
  Sense strand starting at position 3090 of SEQ ID NO: 1883851
ucagccugacauggugaaa

SEQ ID NO: 2221065 - RNA, 19 nt, Artificial Sequence
  Description of Artificial Sequence: Synthetic oligonucleotide
  Antisense strand to SEQ ID NO: 2221064
uuucaccaugucaggcuga

SEQ ID NO: 2221066 - RNA, 19 nt, Artificial Sequence
  Description of Artificial Sequence: Synthetic oligonucleotide
  Sense strand starting at position 1409 of SEQ ID NO: 1883851
ccagcaagugcuuacugaa

SEQ ID NO: 2221067 - RNA, 19 nt, Artificial Sequence
  Description of Artificial Sequence: Synthetic oligonucleotide
  Antisense strand to SEQ ID NO: 2221066
uucaguaagcacuugcugg

SEQ ID NO: 2221068 - RNA, 19 nt, Artificial Sequence
  Description of Artificial Sequence: Synthetic oligonucleotide
  Sense strand starting at position 2336 of SEQ ID NO: 1883851
ugagucuugagaugccaua

SEQ ID NO: 2221069 - RNA, 19 nt, Artificial Sequence
  Description of Artificial Sequence: Synthetic oligonucleotide
  Antisense strand to SEQ ID NO: 2221068
uauggcaucucaagacuca

SEQ ID NO: 2221070 - RNA, 19 nt, Artificial Sequence
  Description of Artificial Sequence: Synthetic oligonucleotide
  Sense strand starting at position 2364 of SEQ ID NO: 1883851
agcagacaugcuggaaagu

SEQ ID NO: 2221071 - RNA, 19 nt, Artificial Sequence
  Description of Artificial Sequence: Synthetic oligonucleotide
  Antisense strand to SEQ ID NO: 2221070
acuuuccagcaugucugcu

SEQ ID NO: 2221072 - RNA, 19 nt, Artificial Sequence
  Description of Artificial Sequence: Synthetic oligonucleotide
  Sense strand starting at position 1998 of SEQ ID NO: 1883851
gagacuugugguggccaga

SEQ ID NO: 2221073 - RNA, 19 nt, Artificial Sequence
  Description of Artificial Sequence: Synthetic oligonucleotide
  Antisense strand to SEQ ID NO: 2221072
ucuggccaccacaagucuc

SEQ ID NO: 2221074 - RNA, 19 nt, Artificial Sequence
  Description of Artificial Sequence: Synthetic oligonucleotide
  Sense strand starting at position 2801 of SEQ ID NO: 1883851
cuguuuccugggugacaca

SEQ ID NO: 2221075 - RNA, 19 nt, Artificial Sequence
  Description of Artificial Sequence: Synthetic oligonucleotide
  Antisense strand to SEQ ID NO: 2221074
ugugucacccaggaaacag

SEQ ID NO: 2221076 - RNA, 19 nt, Artificial Sequence
  Description of Artificial Sequence: Synthetic oligonucleotide
  Sense strand starting at position 335 of SEQ ID NO: 1883851
ggaacaagcugucauuuga

SEQ ID NO: 2221077 - RNA, 19 nt, Artificial Sequence
  Description of Artificial Sequence: Synthetic oligonucleotide
  Antisense strand to SEQ ID NO: 2221076
ucaaaugacagcuuguucc

SEQ ID NO: 2221078 - RNA, 19 nt, Artificial Sequence
  Description of Artificial Sequence: Synthetic oligonucleotide
  Sense strand starting at position 143 of SEQ ID NO: 1883851
ggcccagauucuucugagu

SEQ ID NO: 2221079 - RNA, 19 nt, Artificial Sequence
  Description of Artificial Sequence: Synthetic oligonucleotide
  Antisense strand to SEQ ID NO: 2221078
acucagaagaaucugggcc

SEQ ID NO: 2221080 - RNA, 19 nt, Artificial Sequence
  Description of Artificial Sequence: Synthetic oligonucleotide
  Sense strand starting at position 332 of SEQ ID NO: 1883851
gcaggaacaagcugucauu

SEQ ID NO: 2221081 - RNA, 19 nt, Artificial Sequence
  Description of Artificial Sequence: Synthetic oligonucleotide
  Antisense strand to SEQ ID NO: 2221080
aaugacagcuuguuccugc

SEQ ID NO: 2221082 - RNA, 19 nt, Artificial Sequence
  Description of Artificial Sequence: Synthetic oligonucleotide
  Sense strand starting at position 832 of SEQ ID NO: 1883851
guacuuagcuugcuagaaa

SEQ ID NO: 2221083 - RNA, 19 nt, Artificial Sequence
  Description of Artificial Sequence: Synthetic oligonucleotide
  Antisense strand to SEQ ID NO: 2221082
uuucuagcaagcuaaguac

SEQ ID NO: 2221084 - RNA, 19 nt, Artificial Sequence
  Description of Artificial Sequence: Synthetic oligonucleotide
  Sense strand starting at position 2799 of SEQ ID NO: 1883851
uccuguuuccugggugaca

SEQ ID NO: 2221085 - RNA, 19 nt, Artificial Sequence
  Description of Artificial Sequence: Synthetic oligonucleotide
  Antisense strand to SEQ ID NO: 2221084
ugucacccaggaaacagga

SEQ ID NO: 2221086 - RNA, 19 nt, Artificial Sequence
  Description of Artificial Sequence: Synthetic oligonucleotide
  Sense strand starting at position 2075 of SEQ ID NO: 1883851
ggaagaugcugccauuuau

SEQ ID NO: 2221087 - RNA, 19 nt, Artificial Sequence
  Description of Artificial Sequence: Synthetic oligonucleotide
  Antisense strand to SEQ ID NO: 2221086
auaaauggcagcaucuucc

SEQ ID NO: 2221088 - RNA, 19 nt, Artificial Sequence
  Description of Artificial Sequence: Synthetic oligonucleotide
  Sense strand starting at position 830 of SEQ ID NO: 1883851
ggguacuuagcuugcuaga

SEQ ID NO: 2221089 - RNA, 19 nt, Artificial Sequence
  Description of Artificial Sequence: Synthetic oligonucleotide
  Antisense strand to SEQ ID NO: 2221088
ucuagcaagcuaaguaccc

SEQ ID NO: 2221090 - RNA, 19 nt, Artificial Sequence
  Description of Artificial Sequence: Synthetic oligonucleotide
  Sense strand starting at position 1611 of SEQ ID NO: 1883851
ugaggaaagucagaaguaa

SEQ ID NO: 2221091 - RNA, 19 nt, Artificial Sequence
  Description of Artificial Sequence: Synthetic oligonucleotide
  Antisense strand to SEQ ID NO: 2221090
uuacuucugacuuuccuca

SEQ ID NO: 2221092 - RNA, 19 nt, Artificial Sequence
  Description of Artificial Sequence: Synthetic oligonucleotide
  Sense strand starting at position 1666 of SEQ ID NO: 1883851
ggacguauaucucugcauu

SEQ ID NO: 2221093 - RNA, 19 nt, Artificial Sequence
  Description of Artificial Sequence: Synthetic oligonucleotide
  Antisense strand to SEQ ID NO: 2221092
aaugcagagauauacgucc

SEQ ID NO: 2221094 - RNA, 19 nt, Artificial Sequence
  Description of Artificial Sequence: Synthetic oligonucleotide
  Sense strand starting at position 1677 of SEQ ID NO: 1883851
ucugcauuccuuuguacag

SEQ ID NO: 2221095 - RNA, 19 nt, Artificial Sequence
  Description of Artificial Sequence: Synthetic oligonucleotide
  Antisense strand to SEQ ID NO: 2221094
cuguacaaaggaaugcaga

SEQ ID NO: 2221096 - RNA, 19 nt, Artificial Sequence
  Description of Artificial Sequence: Synthetic oligonucleotide
  Sense strand starting at position 1266 of SEQ ID NO: 1883851
cgucuucuugcuggaauag

SEQ ID NO: 2221097 - RNA, 19 nt, Artificial Sequence
  Description of Artificial Sequence: Synthetic oligonucleotide
  Antisense strand to SEQ ID NO: 2221096
cuauuccagcaagaagacg

SEQ ID NO: 2221098 - RNA, 19 nt, Artificial Sequence
  Description of Artificial Sequence: Synthetic oligonucleotide
  Sense strand starting at position 2407 of SEQ ID NO: 1883851
agggacagaucugagcuaa

SEQ ID NO: 2221099 - RNA, 19 nt, Artificial Sequence
  Description of Artificial Sequence: Synthetic oligonucleotide
  Antisense strand to SEQ ID NO: 2221098
uuagcucagaucugucccu

SEQ ID NO: 2221100 - RNA, 19 nt, Artificial Sequence
  Description of Artificial Sequence: Synthetic oligonucleotide
  Sense strand starting at position 1667 of SEQ ID NO: 1883851
gacguauaucucugcauuc

SEQ ID NO: 2221101 - RNA, 19 nt, Artificial Sequence
  Description of Artificial Sequence: Synthetic oligonucleotide
  Antisense strand to SEQ ID NO: 2221100
gaaugcagagauauacguc

SEQ ID NO: 2221102 - RNA, 19 nt, Artificial Sequence
  Description of Artificial Sequence: Synthetic oligonucleotide
  Sense strand starting at position 1264 of SEQ ID NO: 1883851
cacgucuucuugcuggaau

SEQ ID NO: 2221103 - RNA, 19 nt, Artificial Sequence
  Description of Artificial Sequence: Synthetic oligonucleotide
  Antisense strand to SEQ ID NO: 2221102
auuccagcaagaagacgug

SEQ ID NO: 2221104 - RNA, 19 nt, Artificial Sequence
  Description of Artificial Sequence: Synthetic oligonucleotide
  Sense strand starting at position 69 of SEQ ID NO: 1883851
agugcaucccagugcugaa

SEQ ID NO: 2221105 - RNA, 19 nt, Artificial Sequence
  Description of Artificial Sequence: Synthetic oligonucleotide
  Antisense strand to SEQ ID NO: 2221104
uucagcacugggaugcacu

SEQ ID NO: 2221106 - RNA, 19 nt, Artificial Sequence
  Description of Artificial Sequence: Synthetic oligonucleotide
  Sense strand starting at position 1781 of SEQ ID NO: 1883851
gaagcaugcugacaggaga

SEQ ID NO: 2221107 - RNA, 19 nt, Artificial Sequence
  Description of Artificial Sequence: Synthetic oligonucleotide
  Antisense strand to SEQ ID NO: 2221106
ucuccugucagcaugcuuc

SEQ ID NO: 2221108 - RNA, 19 nt, Artificial Sequence
  Description of Artificial Sequence: Synthetic oligonucleotide
  Sense strand starting at position 1657 of SEQ ID NO: 1883851
agcugcaucggacguauau

SEQ ID NO: 2221109 - RNA, 19 nt, Artificial Sequence
  Description of Artificial Sequence: Synthetic oligonucleotide
  Antisense strand to SEQ ID NO: 2221108
auauacguccgaugcagcu

SEQ ID NO: 2221110 - RNA, 19 nt, Artificial Sequence
  Description of Artificial Sequence: Synthetic oligonucleotide
  Sense strand starting at position 3891 of SEQ ID NO: 1883851
acagccaggucucaagaau

SEQ ID NO: 2221111 - RNA, 19 nt, Artificial Sequence
  Description of Artificial Sequence: Synthetic oligonucleotide
  Antisense strand to SEQ ID NO: 2221110
auucuugagaccuggcugu

SEQ ID NO: 2221112 - RNA, 19 nt, Artificial Sequence
  Description of Artificial Sequence: Synthetic oligonucleotide
  Sense strand starting at position 2901 of SEQ ID NO: 1883851
agccacagcuuggaugaaa

SEQ ID NO: 2221113 - RNA, 19 nt, Artificial Sequence
  Description of Artificial Sequence: Synthetic oligonucleotide
  Antisense strand to SEQ ID NO: 2221112
uuucauccaagcuguggcu

SEQ ID NO: 2221114 - RNA, 19 nt, Artificial Sequence
  Description of Artificial Sequence: Synthetic oligonucleotide
  Sense strand starting at position 2687 of SEQ ID NO: 1883851
agggauaucugaugcauga

SEQ ID NO: 2221115 - RNA, 19 nt, Artificial Sequence
  Description of Artificial Sequence: Synthetic oligonucleotide
  Antisense strand to SEQ ID NO: 2221114
ucaugcaucagauaucccu

SEQ ID NO: 2221116 - RNA, 19 nt, Artificial Sequence
  Description of Artificial Sequence: Synthetic oligonucleotide
  Sense strand starting at position 430 of SEQ ID NO: 1883851
ggaggcaucuuauagagca

SEQ ID NO: 2221117 - RNA, 19 nt, Artificial Sequence
  Description of Artificial Sequence: Synthetic oligonucleotide
  Antisense strand to SEQ ID NO: 2221116
ugcucuauaagaugccucc

SEQ ID NO: 2221118 - RNA, 19 nt, Artificial Sequence
  Description of Artificial Sequence: Synthetic oligonucleotide
  Sense strand starting at position 828 of SEQ ID NO: 1883852
ccaguuaugcaagaaccaa

SEQ ID NO: 2221119 - RNA, 19 nt, Artificial Sequence
  Description of Artificial Sequence: Synthetic oligonucleotide
  Antisense strand to SEQ ID NO: 2221118
uugguucuugcauaacugg

SEQ ID NO: 2221120 - RNA, 19 nt, Artificial Sequence
  Description of Artificial Sequence: Synthetic oligonucleotide
  Sense strand starting at position 710 of SEQ ID NO: 1883852
ccuggaauucuacacagca

SEQ ID NO: 2221121 - RNA, 19 nt, Artificial Sequence
  Description of Artificial Sequence: Synthetic oligonucleotide
  Antisense strand to SEQ ID NO: 2221120
ugcuguguagaauuccagg

SEQ ID NO: 2221122 - RNA, 19 nt, Artificial Sequence
  Description of Artificial Sequence: Synthetic oligonucleotide
  Sense strand starting at position 3331 of SEQ ID NO: 1883852
agccaugucccggcaguau

SEQ ID NO: 2221123 - RNA, 19 nt, Artificial Sequence
  Description of Artificial Sequence: Synthetic oligonucleotide
  Antisense strand to SEQ ID NO: 2221122
auacugccgggacauggcu

SEQ ID NO: 2221124 - RNA, 19 nt, Artificial Sequence
  Description of Artificial Sequence: Synthetic oligonucleotide
  Sense strand starting at position 2515 of SEQ ID NO: 1883852
ggaugagauaccuggcaua

SEQ ID NO: 2221125 - RNA, 19 nt, Artificial Sequence
  Description of Artificial Sequence: Synthetic oligonucleotide
  Antisense strand to SEQ ID NO: 2221124
uaugccagguaucucaucc

SEQ ID NO: 2221126 - RNA, 19 nt, Artificial Sequence
  Description of Artificial Sequence: Synthetic oligonucleotide
  Sense strand starting at position 2100 of SEQ ID NO: 1883852
gagggcucuguugauacaa

SEQ ID NO: 2221127 - RNA, 19 nt, Artificial Sequence
  Description of Artificial Sequence: Synthetic oligonucleotide
  Antisense strand to SEQ ID NO: 2221126
uuguaucaacagagcccuc

SEQ ID NO: 2221128 - RNA, 19 nt, Artificial Sequence
  Description of Artificial Sequence: Synthetic oligonucleotide
  Sense strand starting at position 3731 of SEQ ID NO: 1883852
agcagugaaccagauguca

SEQ ID NO: 2221129 - RNA, 19 nt, Artificial Sequence
  Description of Artificial Sequence: Synthetic oligonucleotide
  Antisense strand to SEQ ID NO: 2221128
ugacaucugguucacugcu

SEQ ID NO: 2221130 - RNA, 19 nt, Artificial Sequence
  Description of Artificial Sequence: Synthetic oligonucleotide
  Sense strand starting at position 217 of SEQ ID NO: 1883852
cggacugaagagugauuca

SEQ ID NO: 2221131 - RNA, 19 nt, Artificial Sequence
  Description of Artificial Sequence: Synthetic oligonucleotide
  Antisense strand to SEQ ID NO: 2221130
ugaaucacucuucaguccg

SEQ ID NO: 2221132 - RNA, 19 nt, Artificial Sequence
  Description of Artificial Sequence: Synthetic oligonucleotide
  Sense strand starting at position 3146 of SEQ ID NO: 1883852
cuaugaauuguccaaaugc

SEQ ID NO: 2221133 - RNA, 19 nt, Artificial Sequence
  Description of Artificial Sequence: Synthetic oligonucleotide
  Antisense strand to SEQ ID NO: 2221132
gcauuuggacaauucauag

SEQ ID NO: 2221134 - RNA, 19 nt, Artificial Sequence
  Description of Artificial Sequence: Synthetic oligonucleotide
  Sense strand starting at position 1633 of SEQ ID NO: 1883852
ucucaaugucccugaggga

SEQ ID NO: 2221135 - RNA, 19 nt, Artificial Sequence
  Description of Artificial Sequence: Synthetic oligonucleotide
  Antisense strand to SEQ ID NO: 2221134
ucccucagggacauugaga

SEQ ID NO: 2221136 - RNA, 19 nt, Artificial Sequence
  Description of Artificial Sequence: Synthetic oligonucleotide
  Sense strand starting at position 3828 of SEQ ID NO: 1883852
gcaggucuucuggaucaca

SEQ ID NO: 2221137 - RNA, 19 nt, Artificial Sequence
  Description of Artificial Sequence: Synthetic oligonucleotide
  Antisense strand to SEQ ID NO: 2221136
ugugauccagaagaccugc

SEQ ID NO: 2221138 - RNA, 19 nt, Artificial Sequence
  Description of Artificial Sequence: Synthetic oligonucleotide
  Sense strand starting at position 824 of SEQ ID NO: 1883852
ugacccaguuaugcaagaa

SEQ ID NO: 2221139 - RNA, 19 nt, Artificial Sequence
  Description of Artificial Sequence: Synthetic oligonucleotide
  Antisense strand to SEQ ID NO: 2221138
uucuugcauaacuggguca

SEQ ID NO: 2221140 - RNA, 19 nt, Artificial Sequence
  Description of Artificial Sequence: Synthetic oligonucleotide
  Sense strand starting at position 6 of SEQ ID NO: 1883852
ugaagacauccaggcugua

SEQ ID NO: 2221141 - RNA, 19 nt, Artificial Sequence
  Description of Artificial Sequence: Synthetic oligonucleotide
  Antisense strand to SEQ ID NO: 2221140
uacagccuggaugucuuca

SEQ ID NO: 2221142 - RNA, 19 nt, Artificial Sequence
  Description of Artificial Sequence: Synthetic oligonucleotide
  Sense strand starting at position 3631 of SEQ ID NO: 1883852
gcacucacauuccuuggaa

SEQ ID NO: 2221143 - RNA, 19 nt, Artificial Sequence
  Description of Artificial Sequence: Synthetic oligonucleotide
  Antisense strand to SEQ ID NO: 2221142
uuccaaggaaugugagugc

SEQ ID NO: 2221144 - RNA, 19 nt, Artificial Sequence
  Description of Artificial Sequence: Synthetic oligonucleotide
  Sense strand starting at position 3144 of SEQ ID NO: 1883852
gucuaugaauuguccaaau

SEQ ID NO: 2221145 - RNA, 19 nt, Artificial Sequence
  Description of Artificial Sequence: Synthetic oligonucleotide
  Antisense strand to SEQ ID NO: 2221144
auuuggacaauucauagac

SEQ ID NO: 2221146 - RNA, 19 nt, Artificial Sequence
  Description of Artificial Sequence: Synthetic oligonucleotide
  Sense strand starting at position 3077 of SEQ ID NO: 1883852
guccaaauguaucuaugac

SEQ ID NO: 2221147 - RNA, 19 nt, Artificial Sequence
  Description of Artificial Sequence: Synthetic oligonucleotide
  Antisense strand to SEQ ID NO: 2221146
gucauagauacauuuggac

SEQ ID NO: 2221148 - RNA, 19 nt, Artificial Sequence
  Description of Artificial Sequence: Synthetic oligonucleotide
  Sense strand starting at position 1307 of SEQ ID NO: 1883852
cgauuauucgcuuaacaaa

SEQ ID NO: 2221149 - RNA, 19 nt, Artificial Sequence
  Description of Artificial Sequence: Synthetic oligonucleotide
  Antisense strand to SEQ ID NO: 2221148
uuuguuaagcgaauaaucg

SEQ ID NO: 2221150 - RNA, 19 nt, Artificial Sequence
  Description of Artificial Sequence: Synthetic oligonucleotide
  Sense strand starting at position 1079 of SEQ ID NO: 1883852
gccaguccugcauaaauaa

SEQ ID NO: 2221151 - RNA, 19 nt, Artificial Sequence
  Description of Artificial Sequence: Synthetic oligonucleotide
  Antisense strand to SEQ ID NO: 2221150
uuauuuaugcaggacuggc

SEQ ID NO: 2221152 - RNA, 19 nt, Artificial Sequence
  Description of Artificial Sequence: Synthetic oligonucleotide
  Sense strand starting at position 3023 of SEQ ID NO: 1883852
agagauggcuuugcccaaa

SEQ ID NO: 2221153 - RNA, 19 nt, Artificial Sequence
  Description of Artificial Sequence: Synthetic oligonucleotide
  Antisense strand to SEQ ID NO: 2221152
uuugggcaaagccaucucu

SEQ ID NO: 2221154 - RNA, 19 nt, Artificial Sequence
  Description of Artificial Sequence: Synthetic oligonucleotide
  Sense strand starting at position 1240 of SEQ ID NO: 1883852
ggagaacuuugagaaagga

SEQ ID NO: 2221155 - RNA, 19 nt, Artificial Sequence
  Description of Artificial Sequence: Synthetic oligonucleotide
  Antisense strand to SEQ ID NO: 2221154
uccuuucucaaaguucucc

SEQ ID NO: 2221156 - RNA, 19 nt, Artificial Sequence
  Description of Artificial Sequence: Synthetic oligonucleotide
  Sense strand starting at position 940 of SEQ ID NO: 1883852
agcagauucugccuggaag

SEQ ID NO: 2221157 - RNA, 19 nt, Artificial Sequence
  Description of Artificial Sequence: Synthetic oligonucleotide
  Antisense strand to SEQ ID NO: 2221156
cuuccaggcagaaucugcu

SEQ ID NO: 2221158 - RNA, 19 nt, Artificial Sequence
  Description of Artificial Sequence: Synthetic oligonucleotide
  Sense strand starting at position 1077 of SEQ ID NO: 1883852
augccaguccugcauaaau

SEQ ID NO: 2221159 - RNA, 19 nt, Artificial Sequence
  Description of Artificial Sequence: Synthetic oligonucleotide
  Antisense strand to SEQ ID NO: 2221158
auuuaugcaggacuggcau

SEQ ID NO: 2221160 - RNA, 19 nt, Artificial Sequence
  Description of Artificial Sequence: Synthetic oligonucleotide
  Sense strand starting at position 2096 of SEQ ID NO: 1883852
gacugagggcucuguugau

SEQ ID NO: 2221161 - RNA, 19 nt, Artificial Sequence
  Description of Artificial Sequence: Synthetic oligonucleotide
  Antisense strand to SEQ ID NO: 2221160
aucaacagagcccucaguc

SEQ ID NO: 2221162 - RNA, 19 nt, Artificial Sequence
  Description of Artificial Sequence: Synthetic oligonucleotide
  Sense strand starting at position 3022 of SEQ ID NO: 1883852
cagagauggcuuugcccaa

SEQ ID NO: 2221163 - RNA, 19 nt, Artificial Sequence
  Description of Artificial Sequence: Synthetic oligonucleotide
  Antisense strand to SEQ ID NO: 2221162
uugggcaaagccaucucug

SEQ ID NO: 2221164 - RNA, 19 nt, Artificial Sequence
  Description of Artificial Sequence: Synthetic oligonucleotide
  Sense strand starting at position 942 of SEQ ID NO: 1883852
cagauucugccuggaaguc

SEQ ID NO: 2221165 - RNA, 19 nt, Artificial Sequence
  Description of Artificial Sequence: Synthetic oligonucleotide
  Antisense strand to SEQ ID NO: 2221164
gacuuccaggcagaaucug

SEQ ID NO: 2221166 - RNA, 19 nt, Artificial Sequence
  Description of Artificial Sequence: Synthetic oligonucleotide
  Sense strand starting at position 1296 of SEQ ID NO: 1883852
cuucccugucucgauuauu

SEQ ID NO: 2221167 - RNA, 19 nt, Artificial Sequence
  Description of Artificial Sequence: Synthetic oligonucleotide
  Antisense strand to SEQ ID NO: 2221166
aauaaucgagacagggaag

SEQ ID NO: 2221168 - RNA, 19 nt, Artificial Sequence
  Description of Artificial Sequence: Synthetic oligonucleotide
  Sense strand starting at position 3739 of SEQ ID NO: 1883852
accagaugucacugcgaca

SEQ ID NO: 2221169 - RNA, 19 nt, Artificial Sequence
  Description of Artificial Sequence: Synthetic oligonucleotide
  Antisense strand to SEQ ID NO: 2221168
ugucgcagugacaucuggu

SEQ ID NO: 2221170 - RNA, 19 nt, Artificial Sequence
  Description of Artificial Sequence: Synthetic oligonucleotide
  Sense strand starting at position 1137 of SEQ ID NO: 1883852
cauccaugccugggaguuu

SEQ ID NO: 2221171 - RNA, 19 nt, Artificial Sequence
  Description of Artificial Sequence: Synthetic oligonucleotide
  Antisense strand to SEQ ID NO: 2221170
aaacucccaggcauggaug

SEQ ID NO: 2221172 - RNA, 19 nt, Artificial Sequence
  Description of Artificial Sequence: Synthetic oligonucleotide
  Sense strand starting at position 3066 of SEQ ID NO: 1883852
acucaaggcucguccaaau

SEQ ID NO: 2221173 - RNA, 19 nt, Artificial Sequence
  Description of Artificial Sequence: Synthetic oligonucleotide
  Antisense strand to SEQ ID NO: 2221172
auuuggacgagccuugagu

SEQ ID NO: 2221174 - RNA, 19 nt, Artificial Sequence
  Description of Artificial Sequence: Synthetic oligonucleotide
  Sense strand starting at position 3135 of SEQ ID NO: 1883852
cagcuccgugucuaugaau

SEQ ID NO: 2221175 - RNA, 19 nt, Artificial Sequence
  Description of Artificial Sequence: Synthetic oligonucleotide
  Antisense strand to SEQ ID NO: 2221174
auucauagacacggagcug

SEQ ID NO: 2221176 - RNA, 19 nt, Artificial Sequence
  Description of Artificial Sequence: Synthetic oligonucleotide
  Sense strand starting at position 941 of SEQ ID NO: 1883852
gcagauucugccuggaagu

SEQ ID NO: 2221177 - RNA, 19 nt, Artificial Sequence
  Description of Artificial Sequence: Synthetic oligonucleotide
  Antisense strand to SEQ ID NO: 2221176
acuuccaggcagaaucugc

SEQ ID NO: 2221178 - RNA, 19 nt, Artificial Sequence
  Description of Artificial Sequence: Synthetic oligonucleotide
  Sense strand starting at position 3525 of SEQ ID NO: 1883852
uguccaucugcaugugaca

SEQ ID NO: 2221179 - RNA, 19 nt, Artificial Sequence
  Description of Artificial Sequence: Synthetic oligonucleotide
  Antisense strand to SEQ ID NO: 2221178
ugucacaugcagauggaca

SEQ ID NO: 2221180 - RNA, 19 nt, Artificial Sequence
  Description of Artificial Sequence: Synthetic oligonucleotide
  Sense strand starting at position 1305 of SEQ ID NO: 1883852
cucgauuauucgcuuaaca

SEQ ID NO: 2221181 - RNA, 19 nt, Artificial Sequence
  Description of Artificial Sequence: Synthetic oligonucleotide
  Antisense strand to SEQ ID NO: 2221180
uguuaagcgaauaaucgag

SEQ ID NO: 2221182 - RNA, 19 nt, Artificial Sequence
  Description of Artificial Sequence: Synthetic oligonucleotide
  Sense strand starting at position 3824 of SEQ ID NO: 1883852
gccagcaggucuucuggau

SEQ ID NO: 2221183 - RNA, 19 nt, Artificial Sequence
  Description of Artificial Sequence: Synthetic oligonucleotide
  Antisense strand to SEQ ID NO: 2221182
auccagaagaccugcuggc

SEQ ID NO: 2221184 - RNA, 19 nt, Artificial Sequence
  Description of Artificial Sequence: Synthetic oligonucleotide
  Sense strand starting at position 3134 of SEQ ID NO: 1883852
acagcuccgugucuaugaa

SEQ ID NO: 2221185 - RNA, 19 nt, Artificial Sequence
  Description of Artificial Sequence: Synthetic oligonucleotide
  Antisense strand to SEQ ID NO: 2221184
uucauagacacggagcugu

SEQ ID NO: 2221186 - RNA, 19 nt, Artificial Sequence
  Description of Artificial Sequence: Synthetic oligonucleotide
  Sense strand starting at position 782 of SEQ ID NO: 1883852
cgcugaauuuaacaaugca

SEQ ID NO: 2221187 - RNA, 19 nt, Artificial Sequence
  Description of Artificial Sequence: Synthetic oligonucleotide
  Antisense strand to SEQ ID NO: 2221186
ugcauuguuaaauucagcg

SEQ ID NO: 2221188 - RNA, 19 nt, Artificial Sequence
  Description of Artificial Sequence: Synthetic oligonucleotide
  Sense strand starting at position 2518 of SEQ ID NO: 1883852
ugagauaccuggcauagaa

SEQ ID NO: 2221189 - RNA, 19 nt, Artificial Sequence
  Description of Artificial Sequence: Synthetic oligonucleotide
  Antisense strand to SEQ ID NO: 2221188
uucuaugccagguaucuca

SEQ ID NO: 2221190 - RNA, 19 nt, Artificial Sequence
  Description of Artificial Sequence: Synthetic oligonucleotide
  Sense strand starting at position 1304 of SEQ ID NO: 1883852
ucucgauuauucgcuuaac

SEQ ID NO: 2221191 - RNA, 19 nt, Artificial Sequence
  Description of Artificial Sequence: Synthetic oligonucleotide
  Antisense strand to SEQ ID NO: 2221190
guuaagcgaauaaucgaga

SEQ ID NO: 2221192 - RNA, 19 nt, Artificial Sequence
  Description of Artificial Sequence: Synthetic oligonucleotide
  Sense strand starting at position 634 of SEQ ID NO: 1883852
cugggcuucccuugcuauu

SEQ ID NO: 2221193 - RNA, 19 nt, Artificial Sequence
  Description of Artificial Sequence: Synthetic oligonucleotide
  Antisense strand to SEQ ID NO: 2221192
aauagcaagggaagcccag

SEQ ID NO: 2221194 - RNA, 19 nt, Artificial Sequence
  Description of Artificial Sequence: Synthetic oligonucleotide
  Sense strand starting at position 3644 of SEQ ID NO: 1883852
uuggaauccucugggaaac

SEQ ID NO: 2221195 - RNA, 19 nt, Artificial Sequence
  Description of Artificial Sequence: Synthetic oligonucleotide
  Antisense strand to SEQ ID NO: 2221194
guuucccagaggauuccaa

SEQ ID NO: 2221196 - RNA, 19 nt, Artificial Sequence
  Description of Artificial Sequence: Synthetic oligonucleotide
  Sense strand starting at position 643 of SEQ ID NO: 1883852
ccuugcuauugggauaaag

SEQ ID NO: 2221197 - RNA, 19 nt, Artificial Sequence
  Description of Artificial Sequence: Synthetic oligonucleotide
  Antisense strand to SEQ ID NO: 2221196
cuuuaucccaauagcaagg

SEQ ID NO: 2221198 - RNA, 19 nt, Artificial Sequence
  Description of Artificial Sequence: Synthetic oligonucleotide
  Sense strand starting at position 2691 of SEQ ID NO: 1883853
auaucugaugcaugaaaga

SEQ ID NO: 2221199 - RNA, 19 nt, Artificial Sequence
  Description of Artificial Sequence: Synthetic oligonucleotide
  Antisense strand to SEQ ID NO: 2221198
ucuuucaugcaucagauau

SEQ ID NO: 2221200 - RNA, 19 nt, Artificial Sequence
  Description of Artificial Sequence: Synthetic oligonucleotide
  Sense strand starting at position 2327 of SEQ ID NO: 1883853
ugaauaugaugagucuuga

SEQ ID NO: 2221201 - RNA, 19 nt, Artificial Sequence
  Description of Artificial Sequence: Synthetic oligonucleotide
  Antisense strand to SEQ ID NO: 2221200
ucaagacucaucauauuca

SEQ ID NO: 2221202 - RNA, 19 nt, Artificial Sequence
  Description of Artificial Sequence: Synthetic oligonucleotide
  Sense strand starting at position 418 of SEQ ID NO: 1883853
gggaauucccagggaggca

SEQ ID NO: 2221203 - RNA, 19 nt, Artificial Sequence
  Description of Artificial Sequence: Synthetic oligonucleotide
  Antisense strand to SEQ ID NO: 2221202
ugccucccugggaauuccc

SEQ ID NO: 2221204 - RNA, 19 nt, Artificial Sequence
  Description of Artificial Sequence: Synthetic oligonucleotide
  Sense strand starting at position 3372 of SEQ ID NO: 1883853
gagaguugagauuaugcga

SEQ ID NO: 2221205 - RNA, 19 nt, Artificial Sequence
  Description of Artificial Sequence: Synthetic oligonucleotide
  Antisense strand to SEQ ID NO: 2221204
ucgcauaaucucaacucuc

SEQ ID NO: 2221206 - RNA, 19 nt, Artificial Sequence
  Description of Artificial Sequence: Synthetic oligonucleotide
  Sense strand starting at position 1650 of SEQ ID NO: 1883853
agaugaaagcugcaucgga

SEQ ID NO: 2221207 - RNA, 19 nt, Artificial Sequence
  Description of Artificial Sequence: Synthetic oligonucleotide
  Antisense strand to SEQ ID NO: 2221206
uccgaugcagcuuucaucu

SEQ ID NO: 2221208 - RNA, 19 nt, Artificial Sequence
  Description of Artificial Sequence: Synthetic oligonucleotide
  Sense strand starting at position 1341 of SEQ ID NO: 1883853
gcguuaagugugucucauc

SEQ ID NO: 2221209 - RNA, 19 nt, Artificial Sequence
  Description of Artificial Sequence: Synthetic oligonucleotide
  Antisense strand to SEQ ID NO: 2221208
gaugagacacacuuaacgc

SEQ ID NO: 2221210 - RNA, 19 nt, Artificial Sequence
  Description of Artificial Sequence: Synthetic oligonucleotide
  Sense strand starting at position 2505 of SEQ ID NO: 1883853
gggcaugcugaccauuaca

SEQ ID NO: 2221211 - RNA, 19 nt, Artificial Sequence
  Description of Artificial Sequence: Synthetic oligonucleotide
  Antisense strand to SEQ ID NO: 2221210
uguaauggucagcaugccc

SEQ ID NO: 2221212 - RNA, 19 nt, Artificial Sequence
  Description of Artificial Sequence: Synthetic oligonucleotide
  Sense strand starting at position 582 of SEQ ID NO: 1883853
gagggcuucuucuuagaag

SEQ ID NO: 2221213 - RNA, 19 nt, Artificial Sequence
  Description of Artificial Sequence: Synthetic oligonucleotide
  Antisense strand to SEQ ID NO: 2221212
cuucuaagaagaagcccuc

SEQ ID NO: 2221214 - RNA, 19 nt, Artificial Sequence
  Description of Artificial Sequence: Synthetic oligonucleotide
  Sense strand starting at position 405 of SEQ ID NO: 1883853
uggugagggccaugggaau

SEQ ID NO: 2221215 - RNA, 19 nt, Artificial Sequence
  Description of Artificial Sequence: Synthetic oligonucleotide
  Antisense strand to SEQ ID NO: 2221214
auucccauggcccucacca

SEQ ID NO: 2221216 - RNA, 19 nt, Artificial Sequence
  Description of Artificial Sequence: Synthetic oligonucleotide
  Sense strand starting at position 3518 of SEQ ID NO: 1883853
gggucaucucugcagacau

SEQ ID NO: 2221217 - RNA, 19 nt, Artificial Sequence
  Description of Artificial Sequence: Synthetic oligonucleotide
  Antisense strand to SEQ ID NO: 2221216
augucugcagagaugaccc

SEQ ID NO: 2221218 - RNA, 19 nt, Artificial Sequence
  Description of Artificial Sequence: Synthetic oligonucleotide
  Sense strand starting at position 1267 of SEQ ID NO: 1883853
gucuucuugcuggaauaga

SEQ ID NO: 2221219 - RNA, 19 nt, Artificial Sequence
  Description of Artificial Sequence: Synthetic oligonucleotide
  Antisense strand to SEQ ID NO: 2221218
ucuauuccagcaagaagac

SEQ ID NO: 2221220 - RNA, 19 nt, Artificial Sequence
  Description of Artificial Sequence: Synthetic oligonucleotide
  Sense strand starting at position 2377 of SEQ ID NO: 1883853
gaaaguccauuggauuuga

SEQ ID NO: 2221221 - RNA, 19 nt, Artificial Sequence
  Description of Artificial Sequence: Synthetic oligonucleotide
  Antisense strand to SEQ ID NO: 2221220
ucaaauccaauggacuuuc

SEQ ID NO: 2221222 - RNA, 19 nt, Artificial Sequence
  Description of Artificial Sequence: Synthetic oligonucleotide
  Sense strand starting at position 3520 of SEQ ID NO: 1883853
gucaucucugcagacauca

SEQ ID NO: 2221223 - RNA, 19 nt, Artificial Sequence
  Description of Artificial Sequence: Synthetic oligonucleotide
  Antisense strand to SEQ ID NO: 2221222
ugaugucugcagagaugac

SEQ ID NO: 2221224 - RNA, 19 nt, Artificial Sequence
  Description of Artificial Sequence: Synthetic oligonucleotide
  Sense strand starting at position 3090 of SEQ ID NO: 1883853
ucagccugacauggugaaa

SEQ ID NO: 2221225 - RNA, 19 nt, Artificial Sequence
  Description of Artificial Sequence: Synthetic oligonucleotide
  Antisense strand to SEQ ID NO: 2221224
uuucaccaugucaggcuga

SEQ ID NO: 2221226 - RNA, 19 nt, Artificial Sequence
  Description of Artificial Sequence: Synthetic oligonucleotide
  Sense strand starting at position 1409 of SEQ ID NO: 1883853
ccagcaagugcuuacugaa

SEQ ID NO: 2221227 - RNA, 19 nt, Artificial Sequence
  Description of Artificial Sequence: Synthetic oligonucleotide
  Antisense strand to SEQ ID NO: 2221226
uucaguaagcacuugcugg

SEQ ID NO: 2221228 - RNA, 19 nt, Artificial Sequence
  Description of Artificial Sequence: Synthetic oligonucleotide
  Sense strand starting at position 2336 of SEQ ID NO: 1883853
ugagucuugagaugccaua

SEQ ID NO: 2221229 - RNA, 19 nt, Artificial Sequence
  Description of Artificial Sequence: Synthetic oligonucleotide
  Antisense strand to SEQ ID NO: 2221228
uauggcaucucaagacuca

SEQ ID NO: 2221230 - RNA, 19 nt, Artificial Sequence
  Description of Artificial Sequence: Synthetic oligonucleotide
  Sense strand starting at position 2364 of SEQ ID NO: 1883853
agcagacaugcuggaaagu

SEQ ID NO: 2221231 - RNA, 19 nt, Artificial Sequence
  Description of Artificial Sequence: Synthetic oligonucleotide
  Antisense strand to SEQ ID NO: 2221230
acuuuccagcaugucugcu

SEQ ID NO: 2221232 - RNA, 19 nt, Artificial Sequence
  Description of Artificial Sequence: Synthetic oligonucleotide
  Sense strand starting at position 1998 of SEQ ID NO: 1883853
gagacuugugguggccaga

SEQ ID NO: 2221233 - RNA, 19 nt, Artificial Sequence
  Description of Artificial Sequence: Synthetic oligonucleotide
  Antisense strand to SEQ ID NO: 2221232
ucuggccaccacaagucuc

SEQ ID NO: 2221234 - RNA, 19 nt, Artificial Sequence
  Description of Artificial Sequence: Synthetic oligonucleotide
  Sense strand starting at position 2801 of SEQ ID NO: 1883853
cuguuuccugggugacaca

SEQ ID NO: 2221235 - RNA, 19 nt, Artificial Sequence
  Description of Artificial Sequence: Synthetic oligonucleotide
  Antisense strand to SEQ ID NO: 2221234
ugugucacccaggaaacag

SEQ ID NO: 2221236 - RNA, 19 nt, Artificial Sequence
  Description of Artificial Sequence: Synthetic oligonucleotide
  Sense strand starting at position 335 of SEQ ID NO: 1883853
ggaacaagcugucauuuga

SEQ ID NO: 2221237 - RNA, 19 nt, Artificial Sequence
  Description of Artificial Sequence: Synthetic oligonucleotide
  Antisense strand to SEQ ID NO: 2221236
ucaaaugacagcuuguucc

SEQ ID NO: 2221238 - RNA, 19 nt, Artificial Sequence
  Description of Artificial Sequence: Synthetic oligonucleotide
  Sense strand starting at position 143 of SEQ ID NO: 1883853
ggcccagauucuucugagu

SEQ ID NO: 2221239 - RNA, 19 nt, Artificial Sequence
  Description of Artificial Sequence: Synthetic oligonucleotide
  Antisense strand to SEQ ID NO: 2221238
acucagaagaaucugggcc

SEQ ID NO: 2221240 - RNA, 19 nt, Artificial Sequence
  Description of Artificial Sequence: Synthetic oligonucleotide
  Sense strand starting at position 332 of SEQ ID NO: 1883853
gcaggaacaagcugucauu

SEQ ID NO: 2221241 - RNA, 19 nt, Artificial Sequence
  Description of Artificial Sequence: Synthetic oligonucleotide
  Antisense strand to SEQ ID NO: 2221240
aaugacagcuuguuccugc

SEQ ID NO: 2221242 - RNA, 19 nt, Artificial Sequence
  Description of Artificial Sequence: Synthetic oligonucleotide
  Sense strand starting at position 832 of SEQ ID NO: 1883853
guacuuagcuugcuagaaa

SEQ ID NO: 2221243 - RNA, 19 nt, Artificial Sequence
  Description of Artificial Sequence: Synthetic oligonucleotide
  Antisense strand to SEQ ID NO: 2221242
uuucuagcaagcuaaguac

SEQ ID NO: 2221244 - RNA, 19 nt, Artificial Sequence
  Description of Artificial Sequence: Synthetic oligonucleotide
  Sense strand starting at position 2799 of SEQ ID NO: 1883853
uccuguuuccugggugaca

SEQ ID NO: 2221245 - RNA, 19 nt, Artificial Sequence
  Description of Artificial Sequence: Synthetic oligonucleotide
  Antisense strand to SEQ ID NO: 2221244
ugucacccaggaaacagga

SEQ ID NO: 2221246 - RNA, 19 nt, Artificial Sequence
  Description of Artificial Sequence: Synthetic oligonucleotide
  Sense strand starting at position 2075 of SEQ ID NO: 1883853
ggaagaugcugccauuuau

SEQ ID NO: 2221247 - RNA, 19 nt, Artificial Sequence
  Description of Artificial Sequence: Synthetic oligonucleotide
  Antisense strand to SEQ ID NO: 2221246
auaaauggcagcaucuucc

SEQ ID NO: 2221248 - RNA, 19 nt, Artificial Sequence
  Description of Artificial Sequence: Synthetic oligonucleotide
  Sense strand starting at position 830 of SEQ ID NO: 1883853
ggguacuuagcuugcuaga

SEQ ID NO: 2221249 - RNA, 19 nt, Artificial Sequence
  Description of Artificial Sequence: Synthetic oligonucleotide
  Antisense strand to SEQ ID NO: 2221248
ucuagcaagcuaaguaccc

SEQ ID NO: 2221250 - RNA, 19 nt, Artificial Sequence
  Description of Artificial Sequence: Synthetic oligonucleotide
  Sense strand starting at position 1611 of SEQ ID NO: 1883853
ugaggaaagucagaaguaa

SEQ ID NO: 2221251 - RNA, 19 nt, Artificial Sequence
  Description of Artificial Sequence: Synthetic oligonucleotide
  Antisense strand to SEQ ID NO: 2221250
uuacuucugacuuuccuca

SEQ ID NO: 2221252 - RNA, 19 nt, Artificial Sequence
  Description of Artificial Sequence: Synthetic oligonucleotide
  Sense strand starting at position 1666 of SEQ ID NO: 1883853
ggacguauaucucugcauu

SEQ ID NO: 2221253 - RNA, 19 nt, Artificial Sequence
  Description of Artificial Sequence: Synthetic oligonucleotide
  Antisense strand to SEQ ID NO: 2221252
aaugcagagauauacgucc

SEQ ID NO: 2221254 - RNA, 19 nt, Artificial Sequence
  Description of Artificial Sequence: Synthetic oligonucleotide
  Sense strand starting at position 1677 of SEQ ID NO: 1883853
ucugcauuccuuuguacag

SEQ ID NO: 2221255 - RNA, 19 nt, Artificial Sequence
  Description of Artificial Sequence: Synthetic oligonucleotide
  Antisense strand to SEQ ID NO: 2221254
cuguacaaaggaaugcaga

SEQ ID NO: 2221256 - RNA, 19 nt, Artificial Sequence
  Description of Artificial Sequence: Synthetic oligonucleotide
  Sense strand starting at position 1266 of SEQ ID NO: 1883853
cgucuucuugcuggaauag

SEQ ID NO: 2221257 - RNA, 19 nt, Artificial Sequence
  Description of Artificial Sequence: Synthetic oligonucleotide
  Antisense strand to SEQ ID NO: 2221256
cuauuccagcaagaagacg

SEQ ID NO: 2221258 - RNA, 19 nt, Artificial Sequence
  Description of Artificial Sequence: Synthetic oligonucleotide
  Sense strand starting at position 2407 of SEQ ID NO: 1883853
agggacagaucugagcuaa

SEQ ID NO: 2221259 - RNA, 19 nt, Artificial Sequence
  Description of Artificial Sequence: Synthetic oligonucleotide
  Antisense strand to SEQ ID NO: 2221258
uuagcucagaucugucccu

SEQ ID NO: 2221260 - RNA, 19 nt, Artificial Sequence
  Description of Artificial Sequence: Synthetic oligonucleotide
  Sense strand starting at position 1667 of SEQ ID NO: 1883853
gacguauaucucugcauuc

SEQ ID NO: 2221261 - RNA, 19 nt, Artificial Sequence
  Description of Artificial Sequence: Synthetic oligonucleotide
  Antisense strand to SEQ ID NO: 2221260
gaaugcagagauauacguc

SEQ ID NO: 2221262 - RNA, 19 nt, Artificial Sequence
  Description of Artificial Sequence: Synthetic oligonucleotide
  Sense strand starting at position 1264 of SEQ ID NO: 1883853
cacgucuucuugcuggaau

SEQ ID NO: 2221263 - RNA, 19 nt, Artificial Sequence
  Description of Artificial Sequence: Synthetic oligonucleotide
  Antisense strand to SEQ ID NO: 2221262
auuccagcaagaagacgug

SEQ ID NO: 2221264 - RNA, 19 nt, Artificial Sequence
  Description of Artificial Sequence: Synthetic oligonucleotide
  Sense strand starting at position 69 of SEQ ID NO: 1883853
agugcaucccagugcugaa

SEQ ID NO: 2221265 - RNA, 19 nt, Artificial Sequence
  Description of Artificial Sequence: Synthetic oligonucleotide
  Antisense strand to SEQ ID NO: 2221264
uucagcacugggaugcacu

SEQ ID NO: 2221266 - RNA, 19 nt, Artificial Sequence
  Description of Artificial Sequence: Synthetic oligonucleotide
  Sense strand starting at position 1781 of SEQ ID NO: 1883853
gaagcaugcugacaggaga

SEQ ID NO: 2221267 - RNA, 19 nt, Artificial Sequence
  Description of Artificial Sequence: Synthetic oligonucleotide
  Antisense strand to SEQ ID NO: 2221266
ucuccugucagcaugcuuc

SEQ ID NO: 2221268 - RNA, 19 nt, Artificial Sequence
  Description of Artificial Sequence: Synthetic oligonucleotide
  Sense strand starting at position 1657 of SEQ ID NO: 1883853
agcugcaucggacguauau

SEQ ID NO: 2221269 - RNA, 19 nt, Artificial Sequence
  Description of Artificial Sequence: Synthetic oligonucleotide
  Antisense strand to SEQ ID NO: 2221268
auauacguccgaugcagcu

SEQ ID NO: 2221270 - RNA, 19 nt, Artificial Sequence
  Description of Artificial Sequence: Synthetic oligonucleotide
  Sense strand starting at position 3891 of SEQ ID NO: 1883853
acagccaggucucaagaau

SEQ ID NO: 2221271 - RNA, 19 nt, Artificial Sequence
  Description of Artificial Sequence: Synthetic oligonucleotide
  Antisense strand to SEQ ID NO: 2221270
auucuugagaccuggcugu

SEQ ID NO: 2221272 - RNA, 19 nt, Artificial Sequence
  Description of Artificial Sequence: Synthetic oligonucleotide
  Sense strand starting at position 2901 of SEQ ID NO: 1883853
agccacagcuuggaugaaa

SEQ ID NO: 2221273 - RNA, 19 nt, Artificial Sequence
  Description of Artificial Sequence: Synthetic oligonucleotide
  Antisense strand to SEQ ID NO: 2221272
uuucauccaagcuguggcu

SEQ ID NO: 2221274 - RNA, 19 nt, Artificial Sequence
  Description of Artificial Sequence: Synthetic oligonucleotide
  Sense strand starting at position 2687 of SEQ ID NO: 1883853
agggauaucugaugcauga

SEQ ID NO: 2221275 - RNA, 19 nt, Artificial Sequence
  Description of Artificial Sequence: Synthetic oligonucleotide
  Antisense strand to SEQ ID NO: 2221274
ucaugcaucagauaucccu

SEQ ID NO: 2221276 - RNA, 19 nt, Artificial Sequence
  Description of Artificial Sequence: Synthetic oligonucleotide
  Sense strand starting at position 430 of SEQ ID NO: 1883853
ggaggcaucuuauagagca

SEQ ID NO: 2221277 - RNA, 19 nt, Artificial Sequence
  Description of Artificial Sequence: Synthetic oligonucleotide
  Antisense strand to SEQ ID NO: 2221276
ugcucuauaagaugccucc

SEQ ID NO: 2221278 - RNA, 19 nt, Artificial Sequence
  Description of Artificial Sequence: Synthetic oligonucleotide
  Sense strand starting at position 2292 of SEQ ID NO: 1883854
gcaugugugauuuaugagc

SEQ ID NO: 2221279 - RNA, 19 nt, Artificial Sequence
  Description of Artificial Sequence: Synthetic oligonucleotide
  Antisense strand to SEQ ID NO: 2221278
gcucauaaaucacacaugc

SEQ ID NO: 2221280 - RNA, 19 nt, Artificial Sequence
  Description of Artificial Sequence: Synthetic oligonucleotide
  Sense strand starting at position 364 of SEQ ID NO: 1883854
uagugaauggcucauaaua

SEQ ID NO: 2221281 - RNA, 19 nt, Artificial Sequence
  Description of Artificial Sequence: Synthetic oligonucleotide
  Antisense strand to SEQ ID NO: 2221280
uauuaugagccauucacua

SEQ ID NO: 2221282 - RNA, 19 nt, Artificial Sequence
  Description of Artificial Sequence: Synthetic oligonucleotide
  Sense strand starting at position 2290 of SEQ ID NO: 1883854
cugcaugugugauuuauga

SEQ ID NO: 2221283 - RNA, 19 nt, Artificial Sequence
  Description of Artificial Sequence: Synthetic oligonucleotide
  Antisense strand to SEQ ID NO: 2221282
ucauaaaucacacaugcag

SEQ ID NO: 2221284 - RNA, 19 nt, Artificial Sequence
  Description of Artificial Sequence: Synthetic oligonucleotide
  Sense strand starting at position 2034 of SEQ ID NO: 1883854
agauaaauuugagacuuug

SEQ ID NO: 2221285 - RNA, 19 nt, Artificial Sequence
  Description of Artificial Sequence: Synthetic oligonucleotide
  Antisense strand to SEQ ID NO: 2221284
caaagucucaaauuuaucu

SEQ ID NO: 2221286 - RNA, 19 nt, Artificial Sequence
  Description of Artificial Sequence: Synthetic oligonucleotide
  Sense strand starting at position 3497 of SEQ ID NO: 1883854
cacagagcugauugaggau

SEQ ID NO: 2221287 - RNA, 19 nt, Artificial Sequence
  Description of Artificial Sequence: Synthetic oligonucleotide
  Antisense strand to SEQ ID NO: 2221286
auccucaaucagcucugug

SEQ ID NO: 2221288 - RNA, 19 nt, Artificial Sequence
  Description of Artificial Sequence: Synthetic oligonucleotide
  Sense strand starting at position 2072 of SEQ ID NO: 1883854
gcuaguaucauguauuugu

SEQ ID NO: 2221289 - RNA, 19 nt, Artificial Sequence
  Description of Artificial Sequence: Synthetic oligonucleotide
  Antisense strand to SEQ ID NO: 2221288
acaaauacaugauacuagc

SEQ ID NO: 2221290 - RNA, 19 nt, Artificial Sequence
  Description of Artificial Sequence: Synthetic oligonucleotide
  Sense strand starting at position 320 of SEQ ID NO: 1883854
gguggcugugaggauaaga

SEQ ID NO: 2221291 - RNA, 19 nt, Artificial Sequence
  Description of Artificial Sequence: Synthetic oligonucleotide
  Antisense strand to SEQ ID NO: 2221290
ucuuauccucacagccacc

SEQ ID NO: 2221292 - RNA, 19 nt, Artificial Sequence
  Description of Artificial Sequence: Synthetic oligonucleotide
  Sense strand starting at position 2230 of SEQ ID NO: 1883854
auguaacagcaaugauaga

SEQ ID NO: 2221293 - RNA, 19 nt, Artificial Sequence
  Description of Artificial Sequence: Synthetic oligonucleotide
  Antisense strand to SEQ ID NO: 2221292
ucuaucauugcuguuacau

SEQ ID NO: 2221294 - RNA, 19 nt, Artificial Sequence
  Description of Artificial Sequence: Synthetic oligonucleotide
  Sense strand starting at position 1762 of SEQ ID NO: 1883854
ugucaauuccuggacacuc

SEQ ID NO: 2221295 - RNA, 19 nt, Artificial Sequence
  Description of Artificial Sequence: Synthetic oligonucleotide
  Antisense strand to SEQ ID NO: 2221294
gaguguccaggaauugaca

SEQ ID NO: 2221296 - RNA, 19 nt, Artificial Sequence
  Description of Artificial Sequence: Synthetic oligonucleotide
  Sense strand starting at position 1266 of SEQ ID NO: 1883854
augaaauguuuaccaagua

SEQ ID NO: 2221297 - RNA, 19 nt, Artificial Sequence
  Description of Artificial Sequence: Synthetic oligonucleotide
  Antisense strand to SEQ ID NO: 2221296
uacuugguaaacauuucau

SEQ ID NO: 2221298 - RNA, 19 nt, Artificial Sequence
  Description of Artificial Sequence: Synthetic oligonucleotide
  Sense strand starting at position 2195 of SEQ ID NO: 1883854
uguauagacucuuuagaau

SEQ ID NO: 2221299 - RNA, 19 nt, Artificial Sequence
  Description of Artificial Sequence: Synthetic oligonucleotide
  Antisense strand to SEQ ID NO: 2221298
auucuaaagagucuauaca

SEQ ID NO: 2221300 - RNA, 19 nt, Artificial Sequence
  Description of Artificial Sequence: Synthetic oligonucleotide
  Sense strand starting at position 1713 of SEQ ID NO: 1883854
gccucagucuauuuaaguu

SEQ ID NO: 2221301 - RNA, 19 nt, Artificial Sequence
  Description of Artificial Sequence: Synthetic oligonucleotide
  Antisense strand to SEQ ID NO: 2221300
aacuuaaauagacugaggc

SEQ ID NO: 2221302 - RNA, 19 nt, Artificial Sequence
  Description of Artificial Sequence: Synthetic oligonucleotide
  Sense strand starting at position 3322 of SEQ ID NO: 1883854
augugaaaccacugacuuu

SEQ ID NO: 2221303 - RNA, 19 nt, Artificial Sequence
  Description of Artificial Sequence: Synthetic oligonucleotide
  Antisense strand to SEQ ID NO: 2221302
aaagucagugguuucacau

SEQ ID NO: 2221304 - RNA, 19 nt, Artificial Sequence
  Description of Artificial Sequence: Synthetic oligonucleotide
  Sense strand starting at position 2148 of SEQ ID NO: 1883854
uuuauaagagucugacauu

SEQ ID NO: 2221305 - RNA, 19 nt, Artificial Sequence
  Description of Artificial Sequence: Synthetic oligonucleotide
  Antisense strand to SEQ ID NO: 2221304
aaugucagacucuuauaaa

SEQ ID NO: 2221306 - RNA, 19 nt, Artificial Sequence
  Description of Artificial Sequence: Synthetic oligonucleotide
  Sense strand starting at position 1675 of SEQ ID NO: 1883854
uggauuagggucuauguuu

SEQ ID NO: 2221307 - RNA, 19 nt, Artificial Sequence
  Description of Artificial Sequence: Synthetic oligonucleotide
  Antisense strand to SEQ ID NO: 2221306
aaacauagacccuaaucca

SEQ ID NO: 2221308 - RNA, 19 nt, Artificial Sequence
  Description of Artificial Sequence: Synthetic oligonucleotide
  Sense strand starting at position 2151 of SEQ ID NO: 1883854
auaagagucugacauuuaa

SEQ ID NO: 2221309 - RNA, 19 nt, Artificial Sequence
  Description of Artificial Sequence: Synthetic oligonucleotide
  Antisense strand to SEQ ID NO: 2221308
uuaaaugucagacucuuau

SEQ ID NO: 2221310 - RNA, 19 nt, Artificial Sequence
  Description of Artificial Sequence: Synthetic oligonucleotide
  Sense strand starting at position 1590 of SEQ ID NO: 1883854
ggaagaauguuagcaguaa

SEQ ID NO: 2221311 - RNA, 19 nt, Artificial Sequence
  Description of Artificial Sequence: Synthetic oligonucleotide
  Antisense strand to SEQ ID NO: 2221310
uuacugcuaacauucuucc

SEQ ID NO: 2221312 - RNA, 19 nt, Artificial Sequence
  Description of Artificial Sequence: Synthetic oligonucleotide
  Sense strand starting at position 2857 of SEQ ID NO: 1883854
ggaguuuccugagcaaaga

SEQ ID NO: 2221313 - RNA, 19 nt, Artificial Sequence
  Description of Artificial Sequence: Synthetic oligonucleotide
  Antisense strand to SEQ ID NO: 2221312
ucuuugcucaggaaacucc

SEQ ID NO: 2221314 - RNA, 19 nt, Artificial Sequence
  Description of Artificial Sequence: Synthetic oligonucleotide
  Sense strand starting at position 1367 of SEQ ID NO: 1883854
ugguuaagauguucaggau

SEQ ID NO: 2221315 - RNA, 19 nt, Artificial Sequence
  Description of Artificial Sequence: Synthetic oligonucleotide
  Antisense strand to SEQ ID NO: 2221314
auccugaacaucuuaacca

SEQ ID NO: 2221316 - RNA, 19 nt, Artificial Sequence
  Description of Artificial Sequence: Synthetic oligonucleotide
  Sense strand starting at position 1922 of SEQ ID NO: 1883854
guaggaguaucagugauga

SEQ ID NO: 2221317 - RNA, 19 nt, Artificial Sequence
  Description of Artificial Sequence: Synthetic oligonucleotide
  Antisense strand to SEQ ID NO: 2221316
ucaucacugauacuccuac

SEQ ID NO: 2221318 - RNA, 19 nt, Artificial Sequence
  Description of Artificial Sequence: Synthetic oligonucleotide
  Sense strand starting at position 1772 of SEQ ID NO: 1883854
uggacacucuuugcaaaug

SEQ ID NO: 2221319 - RNA, 19 nt, Artificial Sequence
  Description of Artificial Sequence: Synthetic oligonucleotide
  Antisense strand to SEQ ID NO: 2221318
cauuugcaaagagugucca

SEQ ID NO: 2221320 - RNA, 19 nt, Artificial Sequence
  Description of Artificial Sequence: Synthetic oligonucleotide
  Sense strand starting at position 1594 of SEQ ID NO: 1883854
gaauguuagcaguaauucu

SEQ ID NO: 2221321 - RNA, 19 nt, Artificial Sequence
  Description of Artificial Sequence: Synthetic oligonucleotide
  Antisense strand to SEQ ID NO: 2221320
agaauuacugcuaacauuc

SEQ ID NO: 2221322 - RNA, 19 nt, Artificial Sequence
  Description of Artificial Sequence: Synthetic oligonucleotide
  Sense strand starting at position 1770 of SEQ ID NO: 1883854
ccuggacacucuuugcaaa

SEQ ID NO: 2221323 - RNA, 19 nt, Artificial Sequence
  Description of Artificial Sequence: Synthetic oligonucleotide
  Antisense strand to SEQ ID NO: 2221322
uuugcaaagaguguccagg

SEQ ID NO: 2221324 - RNA, 19 nt, Artificial Sequence
  Description of Artificial Sequence: Synthetic oligonucleotide
  Sense strand starting at position 1954 of SEQ ID NO: 1883854
cucagaaucugcccuauga

SEQ ID NO: 2221325 - RNA, 19 nt, Artificial Sequence
  Description of Artificial Sequence: Synthetic oligonucleotide
  Antisense strand to SEQ ID NO: 2221324
ucauagggcagauucugag

SEQ ID NO: 2221326 - RNA, 19 nt, Artificial Sequence
  Description of Artificial Sequence: Synthetic oligonucleotide
  Sense strand starting at position 2739 of SEQ ID NO: 1883854
guuauaaggcuugauggca

SEQ ID NO: 2221327 - RNA, 19 nt, Artificial Sequence
  Description of Artificial Sequence: Synthetic oligonucleotide
  Antisense strand to SEQ ID NO: 2221326
ugccaucaagccuuauaac

SEQ ID NO: 2221328 - RNA, 19 nt, Artificial Sequence
  Description of Artificial Sequence: Synthetic oligonucleotide
  Sense strand starting at position 1771 of SEQ ID NO: 1883854
cuggacacucuuugcaaau

SEQ ID NO: 2221329 - RNA, 19 nt, Artificial Sequence
  Description of Artificial Sequence: Synthetic oligonucleotide
  Antisense strand to SEQ ID NO: 2221328
auuugcaaagaguguccag

SEQ ID NO: 2221330 - RNA, 19 nt, Artificial Sequence
  Description of Artificial Sequence: Synthetic oligonucleotide
  Sense strand starting at position 3945 of SEQ ID NO: 1883854
gcccuaagagcaugaaacu

SEQ ID NO: 2221331 - RNA, 19 nt, Artificial Sequence
  Description of Artificial Sequence: Synthetic oligonucleotide
  Antisense strand to SEQ ID NO: 2221330
aguuucaugcucuuagggc

SEQ ID NO: 2221332 - RNA, 19 nt, Artificial Sequence
  Description of Artificial Sequence: Synthetic oligonucleotide
  Sense strand starting at position 1761 of SEQ ID NO: 1883854
uugucaauuccuggacacu

SEQ ID NO: 2221333 - RNA, 19 nt, Artificial Sequence
  Description of Artificial Sequence: Synthetic oligonucleotide
  Antisense strand to SEQ ID NO: 2221332
aguguccaggaauugacaa

SEQ ID NO: 2221334 - RNA, 19 nt, Artificial Sequence
  Description of Artificial Sequence: Synthetic oligonucleotide
  Sense strand starting at position 2149 of SEQ ID NO: 1883854
uuauaagagucugacauuu

SEQ ID NO: 2221335 - RNA, 19 nt, Artificial Sequence
  Description of Artificial Sequence: Synthetic oligonucleotide
  Antisense strand to SEQ ID NO: 2221334
aaaugucagacucuuauaa

SEQ ID NO: 2221336 - RNA, 19 nt, Artificial Sequence
  Description of Artificial Sequence: Synthetic oligonucleotide
  Sense strand starting at position 359 of SEQ ID NO: 1883854
gaauguagugaauggcuca

SEQ ID NO: 2221337 - RNA, 19 nt, Artificial Sequence
  Description of Artificial Sequence: Synthetic oligonucleotide
  Antisense strand to SEQ ID NO: 2221336
ugagccauucacuacauuc

SEQ ID NO: 2221338 - RNA, 19 nt, Artificial Sequence
  Description of Artificial Sequence: Synthetic oligonucleotide
  Sense strand starting at position 3609 of SEQ ID NO: 1883854
gcuaauagguaggcauaua

SEQ ID NO: 2221339 - RNA, 19 nt, Artificial Sequence
  Description of Artificial Sequence: Synthetic oligonucleotide
  Antisense strand to SEQ ID NO: 2221338
uauaugccuaccuauuagc

SEQ ID NO: 2221340 - RNA, 19 nt, Artificial Sequence
  Description of Artificial Sequence: Synthetic oligonucleotide
  Sense strand starting at position 2007 of SEQ ID NO: 1883854
uguauuaacucucugaggu

SEQ ID NO: 2221341 - RNA, 19 nt, Artificial Sequence
  Description of Artificial Sequence: Synthetic oligonucleotide
  Antisense strand to SEQ ID NO: 2221340
accucagagaguuaauaca

SEQ ID NO: 2221342 - RNA, 19 nt, Artificial Sequence
  Description of Artificial Sequence: Synthetic oligonucleotide
  Sense strand starting at position 362 of SEQ ID NO: 1883854
uguagugaauggcucauaa

SEQ ID NO: 2221343 - RNA, 19 nt, Artificial Sequence
  Description of Artificial Sequence: Synthetic oligonucleotide
  Antisense strand to SEQ ID NO: 2221342
uuaugagccauucacuaca

SEQ ID NO: 2221344 - RNA, 19 nt, Artificial Sequence
  Description of Artificial Sequence: Synthetic oligonucleotide
  Sense strand starting at position 1686 of SEQ ID NO: 1883854
cuauguuugcaagaagcuc

SEQ ID NO: 2221345 - RNA, 19 nt, Artificial Sequence
  Description of Artificial Sequence: Synthetic oligonucleotide
  Antisense strand to SEQ ID NO: 2221344
gagcuucuugcaaacauag

SEQ ID NO: 2221346 - RNA, 19 nt, Artificial Sequence
  Description of Artificial Sequence: Synthetic oligonucleotide
  Sense strand starting at position 3608 of SEQ ID NO: 1883854
agcuaauagguaggcauau

SEQ ID NO: 2221347 - RNA, 19 nt, Artificial Sequence
  Description of Artificial Sequence: Synthetic oligonucleotide
  Antisense strand to SEQ ID NO: 2221346
auaugccuaccuauuagcu

SEQ ID NO: 2221348 - RNA, 19 nt, Artificial Sequence
  Description of Artificial Sequence: Synthetic oligonucleotide
  Sense strand starting at position 2008 of SEQ ID NO: 1883854
guauuaacucucugagguc

SEQ ID NO: 2221349 - RNA, 19 nt, Artificial Sequence
  Description of Artificial Sequence: Synthetic oligonucleotide
  Antisense strand to SEQ ID NO: 2221348
gaccucagagaguuaauac

SEQ ID NO: 2221350 - RNA, 19 nt, Artificial Sequence
  Description of Artificial Sequence: Synthetic oligonucleotide
  Sense strand starting at position 1682 of SEQ ID NO: 1883854
gggucuauguuugcaagaa

SEQ ID NO: 2221351 - RNA, 19 nt, Artificial Sequence
  Description of Artificial Sequence: Synthetic oligonucleotide
  Antisense strand to SEQ ID NO: 2221350
uucuugcaaacauagaccc

SEQ ID NO: 2221352 - RNA, 19 nt, Artificial Sequence
  Description of Artificial Sequence: Synthetic oligonucleotide
  Sense strand starting at position 1681 of SEQ ID NO: 1883854
agggucuauguuugcaaga

SEQ ID NO: 2221353 - RNA, 19 nt, Artificial Sequence
  Description of Artificial Sequence: Synthetic oligonucleotide
  Antisense strand to SEQ ID NO: 2221352
ucuugcaaacauagacccu

SEQ ID NO: 2221354 - RNA, 19 nt, Artificial Sequence
  Description of Artificial Sequence: Synthetic oligonucleotide
  Sense strand starting at position 3303 of SEQ ID NO: 1883854
ggauauuauuaugaaggga

SEQ ID NO: 2221355 - RNA, 19 nt, Artificial Sequence
  Description of Artificial Sequence: Synthetic oligonucleotide
  Antisense strand to SEQ ID NO: 2221354
ucccuucauaauaauaucc

SEQ ID NO: 2221356 - RNA, 19 nt, Artificial Sequence
  Description of Artificial Sequence: Synthetic oligonucleotide
  Sense strand starting at position 551 of SEQ ID NO: 1883854
gucucaguaguugggauua

SEQ ID NO: 2221357 - RNA, 19 nt, Artificial Sequence
  Description of Artificial Sequence: Synthetic oligonucleotide
  Antisense strand to SEQ ID NO: 2221356
uaaucccaacuacugagac

SEQ ID NO: 2221358 - RNA, 19 nt, Artificial Sequence
  Description of Artificial Sequence: Synthetic oligonucleotide
  Sense strand starting at position 1457 of SEQ ID NO: 1883855
aggagagacuauucuccuu

SEQ ID NO: 2221359 - RNA, 19 nt, Artificial Sequence
  Description of Artificial Sequence: Synthetic oligonucleotide
  Antisense strand to SEQ ID NO: 2221358
aaggagaauagucucuccu

SEQ ID NO: 2221360 - RNA, 19 nt, Artificial Sequence
  Description of Artificial Sequence: Synthetic oligonucleotide
  Sense strand starting at position 2057 of SEQ ID NO: 1883855
ggaagagucauagacgguu

SEQ ID NO: 2221361 - RNA, 19 nt, Artificial Sequence
  Description of Artificial Sequence: Synthetic oligonucleotide
  Antisense strand to SEQ ID NO: 2221360
aaccgucuaugacucuucc

SEQ ID NO: 2221362 - RNA, 19 nt, Artificial Sequence
  Description of Artificial Sequence: Synthetic oligonucleotide
  Sense strand starting at position 3388 of SEQ ID NO: 1883855
ggcauuauuugguuaaugu

SEQ ID NO: 2221363 - RNA, 19 nt, Artificial Sequence
  Description of Artificial Sequence: Synthetic oligonucleotide
  Antisense strand to SEQ ID NO: 2221362
acauuaaccaaauaaugcc

SEQ ID NO: 2221364 - RNA, 19 nt, Artificial Sequence
  Description of Artificial Sequence: Synthetic oligonucleotide
  Sense strand starting at position 2639 of SEQ ID NO: 1883855
cugggacauccucaggcau

SEQ ID NO: 2221365 - RNA, 19 nt, Artificial Sequence
  Description of Artificial Sequence: Synthetic oligonucleotide
  Antisense strand to SEQ ID NO: 2221364
augccugaggaugucccag

SEQ ID NO: 2221366 - RNA, 19 nt, Artificial Sequence
  Description of Artificial Sequence: Synthetic oligonucleotide
  Sense strand starting at position 644 of SEQ ID NO: 1883855
ccaggaggaaucugagcau

SEQ ID NO: 2221367 - RNA, 19 nt, Artificial Sequence
  Description of Artificial Sequence: Synthetic oligonucleotide
  Antisense strand to SEQ ID NO: 2221366
augcucagauuccuccugg

SEQ ID NO: 2221368 - RNA, 19 nt, Artificial Sequence
  Description of Artificial Sequence: Synthetic oligonucleotide
  Sense strand starting at position 3385 of SEQ ID NO: 1883855
uguggcauuauuugguuaa

SEQ ID NO: 2221369 - RNA, 19 nt, Artificial Sequence
  Description of Artificial Sequence: Synthetic oligonucleotide
  Antisense strand to SEQ ID NO: 2221368
uuaaccaaauaaugccaca

SEQ ID NO: 2221370 - RNA, 19 nt, Artificial Sequence
  Description of Artificial Sequence: Synthetic oligonucleotide
  Sense strand starting at position 3499 of SEQ ID NO: 1883855
cuaucuaggccugauaacu

SEQ ID NO: 2221371 - RNA, 19 nt, Artificial Sequence
  Description of Artificial Sequence: Synthetic oligonucleotide
  Antisense strand to SEQ ID NO: 2221370
aguuaucaggccuagauag

SEQ ID NO: 2221372 - RNA, 19 nt, Artificial Sequence
  Description of Artificial Sequence: Synthetic oligonucleotide
  Sense strand starting at position 3288 of SEQ ID NO: 1883855
aguuguuaucaggaauucu

SEQ ID NO: 2221373 - RNA, 19 nt, Artificial Sequence
  Description of Artificial Sequence: Synthetic oligonucleotide
  Antisense strand to SEQ ID NO: 2221372
agaauuccugauaacaacu

SEQ ID NO: 2221374 - RNA, 19 nt, Artificial Sequence
  Description of Artificial Sequence: Synthetic oligonucleotide
  Sense strand starting at position 411 of SEQ ID NO: 1883855
guuauaugcaaugaaggua

SEQ ID NO: 2221375 - RNA, 19 nt, Artificial Sequence
  Description of Artificial Sequence: Synthetic oligonucleotide
  Antisense strand to SEQ ID NO: 2221374
uaccuucauugcauauaac

SEQ ID NO: 2221376 - RNA, 19 nt, Artificial Sequence
  Description of Artificial Sequence: Synthetic oligonucleotide
  Sense strand starting at position 514 of SEQ ID NO: 1883855
ggcaaauagucauugauaa

SEQ ID NO: 2221377 - RNA, 19 nt, Artificial Sequence
  Description of Artificial Sequence: Synthetic oligonucleotide
  Antisense strand to SEQ ID NO: 2221376
uuaucaaugacuauuugcc

SEQ ID NO: 2221378 - RNA, 19 nt, Artificial Sequence
  Description of Artificial Sequence: Synthetic oligonucleotide
  Sense strand starting at position 2711 of SEQ ID NO: 1883855
guuaguuugaaacauggua

SEQ ID NO: 2221379 - RNA, 19 nt, Artificial Sequence
  Description of Artificial Sequence: Synthetic oligonucleotide
  Antisense strand to SEQ ID NO: 2221378
uaccauguuucaaacuaac

SEQ ID NO: 2221380 - RNA, 19 nt, Artificial Sequence
  Description of Artificial Sequence: Synthetic oligonucleotide
  Sense strand starting at position 449 of SEQ ID NO: 1883855
gaagucacucuguggaaga

SEQ ID NO: 2221381 - RNA, 19 nt, Artificial Sequence
  Description of Artificial Sequence: Synthetic oligonucleotide
  Antisense strand to SEQ ID NO: 2221380
ucuuccacagagugacuuc

SEQ ID NO: 2221382 - RNA, 19 nt, Artificial Sequence
  Description of Artificial Sequence: Synthetic oligonucleotide
  Sense strand starting at position 3210 of SEQ ID NO: 1883855
aaauauacgcuguaauuag

SEQ ID NO: 2221383 - RNA, 19 nt, Artificial Sequence
  Description of Artificial Sequence: Synthetic oligonucleotide
  Antisense strand to SEQ ID NO: 2221382
cuaauuacagcguauauuu

SEQ ID NO: 2221384 - RNA, 19 nt, Artificial Sequence
  Description of Artificial Sequence: Synthetic oligonucleotide
  Sense strand starting at position 3281 of SEQ ID NO: 1883855
gauacaaaguuguuaucag

SEQ ID NO: 2221385 - RNA, 19 nt, Artificial Sequence
  Description of Artificial Sequence: Synthetic oligonucleotide
  Antisense strand to SEQ ID NO: 2221384
cugauaacaacuuuguauc

SEQ ID NO: 2221386 - RNA, 19 nt, Artificial Sequence
  Description of Artificial Sequence: Synthetic oligonucleotide
  Sense strand starting at position 1742 of SEQ ID NO: 1883855
gagggaaucucucuugggu

SEQ ID NO: 2221387 - RNA, 19 nt, Artificial Sequence
  Description of Artificial Sequence: Synthetic oligonucleotide
  Antisense strand to SEQ ID NO: 2221386
acccaagagagauucccuc

SEQ ID NO: 2221388 - RNA, 19 nt, Artificial Sequence
  Description of Artificial Sequence: Synthetic oligonucleotide
  Sense strand starting at position 1148 of SEQ ID NO: 1883855
guguuccuguuaucaauuu

SEQ ID NO: 2221389 - RNA, 19 nt, Artificial Sequence
  Description of Artificial Sequence: Synthetic oligonucleotide
  Antisense strand to SEQ ID NO: 2221388
aaauugauaacaggaacac

SEQ ID NO: 2221390 - RNA, 19 nt, Artificial Sequence
  Description of Artificial Sequence: Synthetic oligonucleotide
  Sense strand starting at position 2412 of SEQ ID NO: 1883855
ccgucuuaucuacagaaug

SEQ ID NO: 2221391 - RNA, 19 nt, Artificial Sequence
  Description of Artificial Sequence: Synthetic oligonucleotide
  Antisense strand to SEQ ID NO: 2221390
cauucuguagauaagacgg

SEQ ID NO: 2221392 - RNA, 19 nt, Artificial Sequence
  Description of Artificial Sequence: Synthetic oligonucleotide
  Sense strand starting at position 1562 of SEQ ID NO: 1883855
ccagauagguagucuauga

SEQ ID NO: 2221393 - RNA, 19 nt, Artificial Sequence
  Description of Artificial Sequence: Synthetic oligonucleotide
  Antisense strand to SEQ ID NO: 2221392
ucauagacuaccuaucugg

SEQ ID NO: 2221394 - RNA, 19 nt, Artificial Sequence
  Description of Artificial Sequence: Synthetic oligonucleotide
  Sense strand starting at position 2603 of SEQ ID NO: 1883855
ggauuaguaggugaucugu

SEQ ID NO: 2221395 - RNA, 19 nt, Artificial Sequence
  Description of Artificial Sequence: Synthetic oligonucleotide
  Antisense strand to SEQ ID NO: 2221394
acagaucaccuacuaaucc

SEQ ID NO: 2221396 - RNA, 19 nt, Artificial Sequence
  Description of Artificial Sequence: Synthetic oligonucleotide
  Sense strand starting at position 2602 of SEQ ID NO: 1883855
gggauuaguaggugaucug

SEQ ID NO: 2221397 - RNA, 19 nt, Artificial Sequence
  Description of Artificial Sequence: Synthetic oligonucleotide
  Antisense strand to SEQ ID NO: 2221396
cagaucaccuacuaauccc

SEQ ID NO: 2221398 - RNA, 19 nt, Artificial Sequence
  Description of Artificial Sequence: Synthetic oligonucleotide
  Sense strand starting at position 515 of SEQ ID NO: 1883855
gcaaauagucauugauaau

SEQ ID NO: 2221399 - RNA, 19 nt, Artificial Sequence
  Description of Artificial Sequence: Synthetic oligonucleotide
  Antisense strand to SEQ ID NO: 2221398
auuaucaaugacuauuugc

SEQ ID NO: 2221400 - RNA, 19 nt, Artificial Sequence
  Description of Artificial Sequence: Synthetic oligonucleotide
  Sense strand starting at position 3037 of SEQ ID NO: 1883855
ucugaaguuagugaaguuu

SEQ ID NO: 2221401 - RNA, 19 nt, Artificial Sequence
  Description of Artificial Sequence: Synthetic oligonucleotide
  Antisense strand to SEQ ID NO: 2221400
aaacuucacuaacuucaga

SEQ ID NO: 2221402 - RNA, 19 nt, Artificial Sequence
  Description of Artificial Sequence: Synthetic oligonucleotide
  Sense strand starting at position 983 of SEQ ID NO: 1883855
cgacauuaccuuuauaugu

SEQ ID NO: 2221403 - RNA, 19 nt, Artificial Sequence
  Description of Artificial Sequence: Synthetic oligonucleotide
  Antisense strand to SEQ ID NO: 2221402
acauauaaagguaaugucg

SEQ ID NO: 2221404 - RNA, 19 nt, Artificial Sequence
  Description of Artificial Sequence: Synthetic oligonucleotide
  Sense strand starting at position 884 of SEQ ID NO: 1883855
cugagacuguaucuaguaa

SEQ ID NO: 2221405 - RNA, 19 nt, Artificial Sequence
  Description of Artificial Sequence: Synthetic oligonucleotide
  Antisense strand to SEQ ID NO: 2221404
uuacuagauacagucucag

SEQ ID NO: 2221406 - RNA, 19 nt, Artificial Sequence
  Description of Artificial Sequence: Synthetic oligonucleotide
  Sense strand starting at position 3878 of SEQ ID NO: 1883855
ucuacaugaccuuguauag

SEQ ID NO: 2221407 - RNA, 19 nt, Artificial Sequence
  Description of Artificial Sequence: Synthetic oligonucleotide
  Antisense strand to SEQ ID NO: 2221406
cuauacaaggucauguaga

SEQ ID NO: 2221408 - RNA, 19 nt, Artificial Sequence
  Description of Artificial Sequence: Synthetic oligonucleotide
  Sense strand starting at position 3368 of SEQ ID NO: 1883855
uggguuauauugucaaaug

SEQ ID NO: 2221409 - RNA, 19 nt, Artificial Sequence
  Description of Artificial Sequence: Synthetic oligonucleotide
  Antisense strand to SEQ ID NO: 2221408
cauuugacaauauaaccca

SEQ ID NO: 2221410 - RNA, 19 nt, Artificial Sequence
  Description of Artificial Sequence: Synthetic oligonucleotide
  Sense strand starting at position 3159 of SEQ ID NO: 1883855
uugggugaagcuugaggau

SEQ ID NO: 2221411 - RNA, 19 nt, Artificial Sequence
  Description of Artificial Sequence: Synthetic oligonucleotide
  Antisense strand to SEQ ID NO: 2221410
auccucaagcuucacccaa

SEQ ID NO: 2221412 - RNA, 19 nt, Artificial Sequence
  Description of Artificial Sequence: Synthetic oligonucleotide
  Sense strand starting at position 788 of SEQ ID NO: 1883855
cuaagucuugcccauggau

SEQ ID NO: 2221413 - RNA, 19 nt, Artificial Sequence
  Description of Artificial Sequence: Synthetic oligonucleotide
  Antisense strand to SEQ ID NO: 2221412
auccaugggcaagacuuag

SEQ ID NO: 2221414 - RNA, 19 nt, Artificial Sequence
  Description of Artificial Sequence: Synthetic oligonucleotide
  Sense strand starting at position 3349 of SEQ ID NO: 1883855
uuuguuaagcuauagagug

SEQ ID NO: 2221415 - RNA, 19 nt, Artificial Sequence
  Description of Artificial Sequence: Synthetic oligonucleotide
  Antisense strand to SEQ ID NO: 2221414
cacucuauagcuuaacaaa

SEQ ID NO: 2221416 - RNA, 19 nt, Artificial Sequence
  Description of Artificial Sequence: Synthetic oligonucleotide
  Sense strand starting at position 3848 of SEQ ID NO: 1883855
cuuagaaaguaaguucuuu

SEQ ID NO: 2221417 - RNA, 19 nt, Artificial Sequence
  Description of Artificial Sequence: Synthetic oligonucleotide
  Antisense strand to SEQ ID NO: 2221416
aaagaacuuacuuucuaag

SEQ ID NO: 2221418 - RNA, 19 nt, Artificial Sequence
  Description of Artificial Sequence: Synthetic oligonucleotide
  Sense strand starting at position 3498 of SEQ ID NO: 1883855
ucuaucuaggccugauaac

SEQ ID NO: 2221419 - RNA, 19 nt, Artificial Sequence
  Description of Artificial Sequence: Synthetic oligonucleotide
  Antisense strand to SEQ ID NO: 2221418
guuaucaggccuagauaga

SEQ ID NO: 2221420 - RNA, 19 nt, Artificial Sequence
  Description of Artificial Sequence: Synthetic oligonucleotide
  Sense strand starting at position 727 of SEQ ID NO: 1883855
guccuuccucgauaucuaa

SEQ ID NO: 2221421 - RNA, 19 nt, Artificial Sequence
  Description of Artificial Sequence: Synthetic oligonucleotide
  Antisense strand to SEQ ID NO: 2221420
uuagauaucgaggaaggac

SEQ ID NO: 2221422 - RNA, 19 nt, Artificial Sequence
  Description of Artificial Sequence: Synthetic oligonucleotide
  Sense strand starting at position 398 of SEQ ID NO: 1883855
agcagaacaguauguuaua

SEQ ID NO: 2221423 - RNA, 19 nt, Artificial Sequence
  Description of Artificial Sequence: Synthetic oligonucleotide
  Antisense strand to SEQ ID NO: 2221422
uauaacauacuguucugcu

SEQ ID NO: 2221424 - RNA, 19 nt, Artificial Sequence
  Description of Artificial Sequence: Synthetic oligonucleotide
  Sense strand starting at position 2864 of SEQ ID NO: 1883855
ucugcuauccuguaaacug

SEQ ID NO: 2221425 - RNA, 19 nt, Artificial Sequence
  Description of Artificial Sequence: Synthetic oligonucleotide
  Antisense strand to SEQ ID NO: 2221424
caguuuacaggauagcaga

SEQ ID NO: 2221426 - RNA, 19 nt, Artificial Sequence
  Description of Artificial Sequence: Synthetic oligonucleotide
  Sense strand starting at position 3571 of SEQ ID NO: 1883855
guaccuauagugugacaaa

SEQ ID NO: 2221427 - RNA, 19 nt, Artificial Sequence
  Description of Artificial Sequence: Synthetic oligonucleotide
  Antisense strand to SEQ ID NO: 2221426
uuugucacacuauagguac

SEQ ID NO: 2221428 - RNA, 19 nt, Artificial Sequence
  Description of Artificial Sequence: Synthetic oligonucleotide
  Sense strand starting at position 3359 of SEQ ID NO: 1883855
uauagaguguggguuauau

SEQ ID NO: 2221429 - RNA, 19 nt, Artificial Sequence
  Description of Artificial Sequence: Synthetic oligonucleotide
  Antisense strand to SEQ ID NO: 2221428
auauaacccacacucuaua

SEQ ID NO: 2221430 - RNA, 19 nt, Artificial Sequence
  Description of Artificial Sequence: Synthetic oligonucleotide
  Sense strand starting at position 3943 of SEQ ID NO: 1883855
cugggagguuacuuucagu

SEQ ID NO: 2221431 - RNA, 19 nt, Artificial Sequence
  Description of Artificial Sequence: Synthetic oligonucleotide
  Antisense strand to SEQ ID NO: 2221430
acugaaaguaaccucccag

SEQ ID NO: 2221432 - RNA, 19 nt, Artificial Sequence
  Description of Artificial Sequence: Synthetic oligonucleotide
  Sense strand starting at position 971 of SEQ ID NO: 1883855
gauagagcaggucgacauu

SEQ ID NO: 2221433 - RNA, 19 nt, Artificial Sequence
  Description of Artificial Sequence: Synthetic oligonucleotide
  Antisense strand to SEQ ID NO: 2221432
aaugucgaccugcucuauc

SEQ ID NO: 2221434 - RNA, 19 nt, Artificial Sequence
  Description of Artificial Sequence: Synthetic oligonucleotide
  Sense strand starting at position 2589 of SEQ ID NO: 1883855
ggagguggccucugggauu

SEQ ID NO: 2221435 - RNA, 19 nt, Artificial Sequence
  Description of Artificial Sequence: Synthetic oligonucleotide
  Antisense strand to SEQ ID NO: 2221434
aaucccagaggccaccucc

SEQ ID NO: 2221436 - RNA, 19 nt, Artificial Sequence
  Description of Artificial Sequence: Synthetic oligonucleotide
  Sense strand starting at position 3906 of SEQ ID NO: 1883855
cuccacaggugucuuaaau

SEQ ID NO: 2221437 - RNA, 19 nt, Artificial Sequence
  Description of Artificial Sequence: Synthetic oligonucleotide
  Antisense strand to SEQ ID NO: 2221436
auuuaagacaccuguggag

SEQ ID NO: 2221438 - RNA, 19 nt, Artificial Sequence
  Description of Artificial Sequence: Synthetic oligonucleotide
  Sense strand starting at position 124 of SEQ ID NO: 1883856
acuguacuuauaugggaag

SEQ ID NO: 2221439 - RNA, 19 nt, Artificial Sequence
  Description of Artificial Sequence: Synthetic oligonucleotide
  Antisense strand to SEQ ID NO: 2221438
cuucccauauaaguacagu

SEQ ID NO: 2221440 - RNA, 19 nt, Artificial Sequence
  Description of Artificial Sequence: Synthetic oligonucleotide
  Sense strand starting at position 1950 of SEQ ID NO: 1883856
cagaccugucaaggaucau

SEQ ID NO: 2221441 - RNA, 19 nt, Artificial Sequence
  Description of Artificial Sequence: Synthetic oligonucleotide
  Antisense strand to SEQ ID NO: 2221440
augauccuugacaggucug

SEQ ID NO: 2221442 - RNA, 19 nt, Artificial Sequence
  Description of Artificial Sequence: Synthetic oligonucleotide
  Sense strand starting at position 1956 of SEQ ID NO: 1883856
ugucaaggaucaucuccau

SEQ ID NO: 2221443 - RNA, 19 nt, Artificial Sequence
  Description of Artificial Sequence: Synthetic oligonucleotide
  Antisense strand to SEQ ID NO: 2221442
auggagaugauccuugaca

SEQ ID NO: 2221444 - RNA, 19 nt, Artificial Sequence
  Description of Artificial Sequence: Synthetic oligonucleotide
  Sense strand starting at position 1903 of SEQ ID NO: 1883856
ucaguuuccugaucaagac

SEQ ID NO: 2221445 - RNA, 19 nt, Artificial Sequence
  Description of Artificial Sequence: Synthetic oligonucleotide
  Antisense strand to SEQ ID NO: 2221444
gucuugaucaggaaacuga

SEQ ID NO: 2221446 - RNA, 19 nt, Artificial Sequence
  Description of Artificial Sequence: Synthetic oligonucleotide
  Sense strand starting at position 2954 of SEQ ID NO: 1883856
acagcagagcauuagcaua

SEQ ID NO: 2221447 - RNA, 19 nt, Artificial Sequence
  Description of Artificial Sequence: Synthetic oligonucleotide
  Antisense strand to SEQ ID NO: 2221446
uaugcuaaugcucugcugu

SEQ ID NO: 2221448 - RNA, 19 nt, Artificial Sequence
  Description of Artificial Sequence: Synthetic oligonucleotide
  Sense strand starting at position 1146 of SEQ ID NO: 1883856
cuuccaugguauucuggaa

SEQ ID NO: 2221449 - RNA, 19 nt, Artificial Sequence
  Description of Artificial Sequence: Synthetic oligonucleotide
  Antisense strand to SEQ ID NO: 2221448
uuccagaauaccauggaag

SEQ ID NO: 2221450 - RNA, 19 nt, Artificial Sequence
  Description of Artificial Sequence: Synthetic oligonucleotide
  Sense strand starting at position 2455 of SEQ ID NO: 1883856
ggguacuaaucugccaaga

SEQ ID NO: 2221451 - RNA, 19 nt, Artificial Sequence
  Description of Artificial Sequence: Synthetic oligonucleotide
  Antisense strand to SEQ ID NO: 2221450
ucuuggcagauuaguaccc

SEQ ID NO: 2221452 - RNA, 19 nt, Artificial Sequence
  Description of Artificial Sequence: Synthetic oligonucleotide
  Sense strand starting at position 1969 of SEQ ID NO: 1883856
cuccaucugccuggaggaa

SEQ ID NO: 2221453 - RNA, 19 nt, Artificial Sequence
  Description of Artificial Sequence: Synthetic oligonucleotide
  Antisense strand to SEQ ID NO: 2221452
uuccuccaggcagauggag

SEQ ID NO: 2221454 - RNA, 19 nt, Artificial Sequence
  Description of Artificial Sequence: Synthetic oligonucleotide
  Sense strand starting at position 636 of SEQ ID NO: 1883856
ggcucacuccagcaggauu

SEQ ID NO: 2221455 - RNA, 19 nt, Artificial Sequence
  Description of Artificial Sequence: Synthetic oligonucleotide
  Antisense strand to SEQ ID NO: 2221454
aauccugcuggagugagcc

SEQ ID NO: 2221456 - RNA, 19 nt, Artificial Sequence
  Description of Artificial Sequence: Synthetic oligonucleotide
  Sense strand starting at position 126 of SEQ ID NO: 1883856
uguacuuauaugggaaguu

SEQ ID NO: 2221457 - RNA, 19 nt, Artificial Sequence
  Description of Artificial Sequence: Synthetic oligonucleotide
  Antisense strand to SEQ ID NO: 2221456
aacuucccauauaaguaca

SEQ ID NO: 2221458 - RNA, 19 nt, Artificial Sequence
  Description of Artificial Sequence: Synthetic oligonucleotide
  Sense strand starting at position 1353 of SEQ ID NO: 1883856
aggagaggccugugagagu

SEQ ID NO: 2221459 - RNA, 19 nt, Artificial Sequence
  Description of Artificial Sequence: Synthetic oligonucleotide
  Antisense strand to SEQ ID NO: 2221458
acucucacaggccucuccu

SEQ ID NO: 2221460 - RNA, 19 nt, Artificial Sequence
  Description of Artificial Sequence: Synthetic oligonucleotide
  Sense strand starting at position 775 of SEQ ID NO: 1883856
cucauugaauccuuauggu

SEQ ID NO: 2221461 - RNA, 19 nt, Artificial Sequence
  Description of Artificial Sequence: Synthetic oligonucleotide
  Antisense strand to SEQ ID NO: 2221460
accauaaggauucaaugag

SEQ ID NO: 2221462 - RNA, 19 nt, Artificial Sequence
  Description of Artificial Sequence: Synthetic oligonucleotide
  Sense strand starting at position 2379 of SEQ ID NO: 1883856
gggauaguccacugucuga

SEQ ID NO: 2221463 - RNA, 19 nt, Artificial Sequence
  Description of Artificial Sequence: Synthetic oligonucleotide
  Antisense strand to SEQ ID NO: 2221462
ucagacaguggacuauccc

SEQ ID NO: 2221464 - RNA, 19 nt, Artificial Sequence
  Description of Artificial Sequence: Synthetic oligonucleotide
  Sense strand starting at position 2833 of SEQ ID NO: 1883856
cgggacuacuggcuacaua

SEQ ID NO: 2221465 - RNA, 19 nt, Artificial Sequence
  Description of Artificial Sequence: Synthetic oligonucleotide
  Antisense strand to SEQ ID NO: 2221464
uauguagccaguagucccg

SEQ ID NO: 2221466 - RNA, 19 nt, Artificial Sequence
  Description of Artificial Sequence: Synthetic oligonucleotide
  Sense strand starting at position 3312 of SEQ ID NO: 1883856
gaaaguaaggccugagcca

SEQ ID NO: 2221467 - RNA, 19 nt, Artificial Sequence
  Description of Artificial Sequence: Synthetic oligonucleotide
  Antisense strand to SEQ ID NO: 2221466
uggcucaggccuuacuuuc

SEQ ID NO: 2221468 - RNA, 19 nt, Artificial Sequence
  Description of Artificial Sequence: Synthetic oligonucleotide
  Sense strand starting at position 148 of SEQ ID NO: 1883856
accaguuuguuuccaauua

SEQ ID NO: 2221469 - RNA, 19 nt, Artificial Sequence
  Description of Artificial Sequence: Synthetic oligonucleotide
  Antisense strand to SEQ ID NO: 2221468
uaauuggaaacaaacuggu

SEQ ID NO: 2221470 - RNA, 19 nt, Artificial Sequence
  Description of Artificial Sequence: Synthetic oligonucleotide
  Sense strand starting at position 146 of SEQ ID NO: 1883856
auaccaguuuguuuccaau

SEQ ID NO: 2221471 - RNA, 19 nt, Artificial Sequence
  Description of Artificial Sequence: Synthetic oligonucleotide
  Antisense strand to SEQ ID NO: 2221470
auuggaaacaaacugguau

SEQ ID NO: 2221472 - RNA, 19 nt, Artificial Sequence
  Description of Artificial Sequence: Synthetic oligonucleotide
  Sense strand starting at position 924 of SEQ ID NO: 1883856
aagccuugggucugugaga

SEQ ID NO: 2221473 - RNA, 19 nt, Artificial Sequence
  Description of Artificial Sequence: Synthetic oligonucleotide
  Antisense strand to SEQ ID NO: 2221472
ucucacagacccaaggcuu

SEQ ID NO: 2221474 - RNA, 19 nt, Artificial Sequence
  Description of Artificial Sequence: Synthetic oligonucleotide
  Sense strand starting at position 2845 of SEQ ID NO: 1883856
cuacauaauuucugggauc

SEQ ID NO: 2221475 - RNA, 19 nt, Artificial Sequence
  Description of Artificial Sequence: Synthetic oligonucleotide
  Antisense strand to SEQ ID NO: 2221474
gaucccagaaauuauguag

SEQ ID NO: 2221476 - RNA, 19 nt, Artificial Sequence
  Description of Artificial Sequence: Synthetic oligonucleotide
  Sense strand starting at position 884 of SEQ ID NO: 1883856
aggccugucuguuuaauaa

SEQ ID NO: 2221477 - RNA, 19 nt, Artificial Sequence
  Description of Artificial Sequence: Synthetic oligonucleotide
  Antisense strand to SEQ ID NO: 2221476
uuauuaaacagacaggccu

SEQ ID NO: 2221478 - RNA, 19 nt, Artificial Sequence
  Description of Artificial Sequence: Synthetic oligonucleotide
  Sense strand starting at position 794 of SEQ ID NO: 1883856
ggccuaugaguuggguacu

SEQ ID NO: 2221479 - RNA, 19 nt, Artificial Sequence
  Description of Artificial Sequence: Synthetic oligonucleotide
  Antisense strand to SEQ ID NO: 2221478
aguacccaacucauaggcc

SEQ ID NO: 2221480 - RNA, 19 nt, Artificial Sequence
  Description of Artificial Sequence: Synthetic oligonucleotide
  Sense strand starting at position 1117 of SEQ ID NO: 1883856
aaacuucuuugagccguua

SEQ ID NO: 2221481 - RNA, 19 nt, Artificial Sequence
  Description of Artificial Sequence: Synthetic oligonucleotide
  Antisense strand to SEQ ID NO: 2221480
uaacggcucaaagaaguuu

SEQ ID NO: 2221482 - RNA, 19 nt, Artificial Sequence
  Description of Artificial Sequence: Synthetic oligonucleotide
  Sense strand starting at position 35 of SEQ ID NO: 1883856
agcaguugauucccuguua

SEQ ID NO: 2221483 - RNA, 19 nt, Artificial Sequence
  Description of Artificial Sequence: Synthetic oligonucleotide
  Antisense strand to SEQ ID NO: 2221482
uaacagggaaucaacugcu

SEQ ID NO: 2221484 - RNA, 19 nt, Artificial Sequence
  Description of Artificial Sequence: Synthetic oligonucleotide
  Sense strand starting at position 36 of SEQ ID NO: 1883856
gcaguugauucccuguuaa

SEQ ID NO: 2221485 - RNA, 19 nt, Artificial Sequence
  Description of Artificial Sequence: Synthetic oligonucleotide
  Antisense strand to SEQ ID NO: 2221484
uuaacagggaaucaacugc

SEQ ID NO: 2221486 - RNA, 19 nt, Artificial Sequence
  Description of Artificial Sequence: Synthetic oligonucleotide
  Sense strand starting at position 3216 of SEQ ID NO: 1883856
ggccucagcucaucuguaa

SEQ ID NO: 2221487 - RNA, 19 nt, Artificial Sequence
  Description of Artificial Sequence: Synthetic oligonucleotide
  Antisense strand to SEQ ID NO: 2221486
uuacagaugagcugaggcc

SEQ ID NO: 2221488 - RNA, 19 nt, Artificial Sequence
  Description of Artificial Sequence: Synthetic oligonucleotide
  Sense strand starting at position 882 of SEQ ID NO: 1883856
cuaggccugucuguuuaau

SEQ ID NO: 2221489 - RNA, 19 nt, Artificial Sequence
  Description of Artificial Sequence: Synthetic oligonucleotide
  Antisense strand to SEQ ID NO: 2221488
auuaaacagacaggccuag

SEQ ID NO: 2221490 - RNA, 19 nt, Artificial Sequence
  Description of Artificial Sequence: Synthetic oligonucleotide
  Sense strand starting at position 1076 of SEQ ID NO: 1883856
guaggagaggcccguguau

SEQ ID NO: 2221491 - RNA, 19 nt, Artificial Sequence
  Description of Artificial Sequence: Synthetic oligonucleotide
  Antisense strand to SEQ ID NO: 2221490
auacacgggccucuccuac

SEQ ID NO: 2221492 - RNA, 19 nt, Artificial Sequence
  Description of Artificial Sequence: Synthetic oligonucleotide
  Sense strand starting at position 3041 of SEQ ID NO: 1883856
ggcccaguccucugagucu

SEQ ID NO: 2221493 - RNA, 19 nt, Artificial Sequence
  Description of Artificial Sequence: Synthetic oligonucleotide
  Antisense strand to SEQ ID NO: 2221492
agacucagaggacugggcc

SEQ ID NO: 2221494 - RNA, 19 nt, Artificial Sequence
  Description of Artificial Sequence: Synthetic oligonucleotide
  Sense strand starting at position 420 of SEQ ID NO: 1883856
gaacuugacuucugaggac

SEQ ID NO: 2221495 - RNA, 19 nt, Artificial Sequence
  Description of Artificial Sequence: Synthetic oligonucleotide
  Antisense strand to SEQ ID NO: 2221494
guccucagaagucaaguuc

SEQ ID NO: 2221496 - RNA, 19 nt, Artificial Sequence
  Description of Artificial Sequence: Synthetic oligonucleotide
  Sense strand starting at position 127 of SEQ ID NO: 1883856
guacuuauaugggaaguua

SEQ ID NO: 2221497 - RNA, 19 nt, Artificial Sequence
  Description of Artificial Sequence: Synthetic oligonucleotide
  Antisense strand to SEQ ID NO: 2221496
uaacuucccauauaaguac

SEQ ID NO: 2221498 - RNA, 19 nt, Artificial Sequence
  Description of Artificial Sequence: Synthetic oligonucleotide
  Sense strand starting at position 114 of SEQ ID NO: 1883856
gguuguuugcacuguacuu

SEQ ID NO: 2221499 - RNA, 19 nt, Artificial Sequence
  Description of Artificial Sequence: Synthetic oligonucleotide
  Antisense strand to SEQ ID NO: 2221498
aaguacagugcaaacaacc

SEQ ID NO: 2221500 - RNA, 19 nt, Artificial Sequence
  Description of Artificial Sequence: Synthetic oligonucleotide
  Sense strand starting at position 423 of SEQ ID NO: 1883856
cuugacuucugaggacuca

SEQ ID NO: 2221501 - RNA, 19 nt, Artificial Sequence
  Description of Artificial Sequence: Synthetic oligonucleotide
  Antisense strand to SEQ ID NO: 2221500
ugaguccucagaagucaag

SEQ ID NO: 2221502 - RNA, 19 nt, Artificial Sequence
  Description of Artificial Sequence: Synthetic oligonucleotide
  Sense strand starting at position 40 of SEQ ID NO: 1883856
uugauucccuguuaaagug

SEQ ID NO: 2221503 - RNA, 19 nt, Artificial Sequence
  Description of Artificial Sequence: Synthetic oligonucleotide
  Antisense strand to SEQ ID NO: 2221502
cacuuuaacagggaaucaa

SEQ ID NO: 2221504 - RNA, 19 nt, Artificial Sequence
  Description of Artificial Sequence: Synthetic oligonucleotide
  Sense strand starting at position 125 of SEQ ID NO: 1883856
cuguacuuauaugggaagu

SEQ ID NO: 2221505 - RNA, 19 nt, Artificial Sequence
  Description of Artificial Sequence: Synthetic oligonucleotide
  Antisense strand to SEQ ID NO: 2221504
acuucccauauaaguacag

SEQ ID NO: 2221506 - RNA, 19 nt, Artificial Sequence
  Description of Artificial Sequence: Synthetic oligonucleotide
  Sense strand starting at position 2692 of SEQ ID NO: 1883856
gcagaaacuucugggucca

SEQ ID NO: 2221507 - RNA, 19 nt, Artificial Sequence
  Description of Artificial Sequence: Synthetic oligonucleotide
  Antisense strand to SEQ ID NO: 2221506
uggacccagaaguuucugc

SEQ ID NO: 2221508 - RNA, 19 nt, Artificial Sequence
  Description of Artificial Sequence: Synthetic oligonucleotide
  Sense strand starting at position 2358 of SEQ ID NO: 1883856
ccugcuauguccuaagcca

SEQ ID NO: 2221509 - RNA, 19 nt, Artificial Sequence
  Description of Artificial Sequence: Synthetic oligonucleotide
  Antisense strand to SEQ ID NO: 2221508
uggcuuaggacauagcagg

SEQ ID NO: 2221510 - RNA, 19 nt, Artificial Sequence
  Description of Artificial Sequence: Synthetic oligonucleotide
  Sense strand starting at position 3982 of SEQ ID NO: 1883856
gggucaguuuccugggcca

SEQ ID NO: 2221511 - RNA, 19 nt, Artificial Sequence
  Description of Artificial Sequence: Synthetic oligonucleotide
  Antisense strand to SEQ ID NO: 2221510
uggcccaggaaacugaccc

SEQ ID NO: 2221512 - RNA, 19 nt, Artificial Sequence
  Description of Artificial Sequence: Synthetic oligonucleotide
  Sense strand starting at position 1538 of SEQ ID NO: 1883856
gccagauguuccuguucuc

SEQ ID NO: 2221513 - RNA, 19 nt, Artificial Sequence
  Description of Artificial Sequence: Synthetic oligonucleotide
  Antisense strand to SEQ ID NO: 2221512
gagaacaggaacaucuggc

SEQ ID NO: 2221514 - RNA, 19 nt, Artificial Sequence
  Description of Artificial Sequence: Synthetic oligonucleotide
  Sense strand starting at position 3464 of SEQ ID NO: 1883857
uuacuuaauguguucgugu

SEQ ID NO: 2221515 - RNA, 19 nt, Artificial Sequence
  Description of Artificial Sequence: Synthetic oligonucleotide
  Antisense strand to SEQ ID NO: 2221514
acacgaacacauuaaguaa

SEQ ID NO: 2221516 - RNA, 19 nt, Artificial Sequence
  Description of Artificial Sequence: Synthetic oligonucleotide
  Sense strand starting at position 3192 of SEQ ID NO: 1883857
cagggaagccuuugaaaca

SEQ ID NO: 2221517 - RNA, 19 nt, Artificial Sequence
  Description of Artificial Sequence: Synthetic oligonucleotide
  Antisense strand to SEQ ID NO: 2221516
uguuucaaaggcuucccug

SEQ ID NO: 2221518 - RNA, 19 nt, Artificial Sequence
  Description of Artificial Sequence: Synthetic oligonucleotide
  Sense strand starting at position 1075 of SEQ ID NO: 1883857
gugugagagcguucaagcu

SEQ ID NO: 2221519 - RNA, 19 nt, Artificial Sequence
  Description of Artificial Sequence: Synthetic oligonucleotide
  Antisense strand to SEQ ID NO: 2221518
agcuugaacgcucucacac

SEQ ID NO: 2221520 - RNA, 19 nt, Artificial Sequence
  Description of Artificial Sequence: Synthetic oligonucleotide
  Sense strand starting at position 3559 of SEQ ID NO: 1883857
gaggccuagacuuaucgga

SEQ ID NO: 2221521 - RNA, 19 nt, Artificial Sequence
  Description of Artificial Sequence: Synthetic oligonucleotide
  Antisense strand to SEQ ID NO: 2221520
uccgauaagucuaggccuc

SEQ ID NO: 2221522 - RNA, 19 nt, Artificial Sequence
  Description of Artificial Sequence: Synthetic oligonucleotide
  Sense strand starting at position 1634 of SEQ ID NO: 1883857
ggagaauccuuagucaauu

SEQ ID NO: 2221523 - RNA, 19 nt, Artificial Sequence
  Description of Artificial Sequence: Synthetic oligonucleotide
  Antisense strand to SEQ ID NO: 2221522
aauugacuaaggauucucc

SEQ ID NO: 2221524 - RNA, 19 nt, Artificial Sequence
  Description of Artificial Sequence: Synthetic oligonucleotide
  Sense strand starting at position 3555 of SEQ ID NO: 1883857
cucugaggccuagacuuau

SEQ ID NO: 2221525 - RNA, 19 nt, Artificial Sequence
  Description of Artificial Sequence: Synthetic oligonucleotide
  Antisense strand to SEQ ID NO: 2221524
auaagucuaggccucagag

SEQ ID NO: 2221526 - RNA, 19 nt, Artificial Sequence
  Description of Artificial Sequence: Synthetic oligonucleotide
  Sense strand starting at position 3301 of SEQ ID NO: 1883857
cuugauuaagcuugacaga

SEQ ID NO: 2221527 - RNA, 19 nt, Artificial Sequence
  Description of Artificial Sequence: Synthetic oligonucleotide
  Antisense strand to SEQ ID NO: 2221526
ucugucaagcuuaaucaag

SEQ ID NO: 2221528 - RNA, 19 nt, Artificial Sequence
  Description of Artificial Sequence: Synthetic oligonucleotide
  Sense strand starting at position 1161 of SEQ ID NO: 1883857
agguauauuccugaaacgu

SEQ ID NO: 2221529 - RNA, 19 nt, Artificial Sequence
  Description of Artificial Sequence: Synthetic oligonucleotide
  Antisense strand to SEQ ID NO: 2221528
acguuucaggaauauaccu

SEQ ID NO: 2221530 - RNA, 19 nt, Artificial Sequence
  Description of Artificial Sequence: Synthetic oligonucleotide
  Sense strand starting at position 3469 of SEQ ID NO: 1883857
uaauguguucguguggcuu

SEQ ID NO: 2221531 - RNA, 19 nt, Artificial Sequence
  Description of Artificial Sequence: Synthetic oligonucleotide
  Antisense strand to SEQ ID NO: 2221530
aagccacacgaacacauua

SEQ ID NO: 2221532 - RNA, 19 nt, Artificial Sequence
  Description of Artificial Sequence: Synthetic oligonucleotide
  Sense strand starting at position 3532 of SEQ ID NO: 1883857
ggaggugguagugagucau

SEQ ID NO: 2221533 - RNA, 19 nt, Artificial Sequence
  Description of Artificial Sequence: Synthetic oligonucleotide
  Antisense strand to SEQ ID NO: 2221532
augacucacuaccaccucc

SEQ ID NO: 2221534 - RNA, 19 nt, Artificial Sequence
  Description of Artificial Sequence: Synthetic oligonucleotide
  Sense strand starting at position 3536 of SEQ ID NO: 1883857
gugguagugagucaucaaa

SEQ ID NO: 2221535 - RNA, 19 nt, Artificial Sequence
  Description of Artificial Sequence: Synthetic oligonucleotide
  Antisense strand to SEQ ID NO: 2221534
uuugaugacucacuaccac

SEQ ID NO: 2221536 - RNA, 19 nt, Artificial Sequence
  Description of Artificial Sequence: Synthetic oligonucleotide
  Sense strand starting at position 206 of SEQ ID NO: 1883857
ugcucaugacacuggauau

SEQ ID NO: 2221537 - RNA, 19 nt, Artificial Sequence
  Description of Artificial Sequence: Synthetic oligonucleotide
  Antisense strand to SEQ ID NO: 2221536
auauccagugucaugagca

SEQ ID NO: 2221538 - RNA, 19 nt, Artificial Sequence
  Description of Artificial Sequence: Synthetic oligonucleotide
  Sense strand starting at position 3561 of SEQ ID NO: 1883857
ggccuagacuuaucggaag

SEQ ID NO: 2221539 - RNA, 19 nt, Artificial Sequence
  Description of Artificial Sequence: Synthetic oligonucleotide
  Antisense strand to SEQ ID NO: 2221538
cuuccgauaagucuaggcc

SEQ ID NO: 2221540 - RNA, 19 nt, Artificial Sequence
  Description of Artificial Sequence: Synthetic oligonucleotide
  Sense strand starting at position 3498 of SEQ ID NO: 1883857
uuaaguagugaugguuaaa

SEQ ID NO: 2221541 - RNA, 19 nt, Artificial Sequence
  Description of Artificial Sequence: Synthetic oligonucleotide
  Antisense strand to SEQ ID NO: 2221540
uuuaaccaucacuacuuaa

SEQ ID NO: 2221542 - RNA, 19 nt, Artificial Sequence
  Description of Artificial Sequence: Synthetic oligonucleotide
  Sense strand starting at position 3148 of SEQ ID NO: 1883857
cugauagucuccuuccaga

SEQ ID NO: 2221543 - RNA, 19 nt, Artificial Sequence
  Description of Artificial Sequence: Synthetic oligonucleotide
  Antisense strand to SEQ ID NO: 2221542
ucuggaaggagacuaucag

SEQ ID NO: 2221544 - RNA, 19 nt, Artificial Sequence
  Description of Artificial Sequence: Synthetic oligonucleotide
  Sense strand starting at position 1159 of SEQ ID NO: 1883857
gcagguauauuccugaaac

SEQ ID NO: 2221545 - RNA, 19 nt, Artificial Sequence
  Description of Artificial Sequence: Synthetic oligonucleotide
  Antisense strand to SEQ ID NO: 2221544
guuucaggaauauaccugc

SEQ ID NO: 2221546 - RNA, 19 nt, Artificial Sequence
  Description of Artificial Sequence: Synthetic oligonucleotide
  Sense strand starting at position 1518 of SEQ ID NO: 1883857
ccaauuauguacucgggau

SEQ ID NO: 2221547 - RNA, 19 nt, Artificial Sequence
  Description of Artificial Sequence: Synthetic oligonucleotide
  Antisense strand to SEQ ID NO: 2221546
aucccgaguacauaauugg

SEQ ID NO: 2221548 - RNA, 19 nt, Artificial Sequence
  Description of Artificial Sequence: Synthetic oligonucleotide
  Sense strand starting at position 1631 of SEQ ID NO: 1883857
gcuggagaauccuuaguca

SEQ ID NO: 2221549 - RNA, 19 nt, Artificial Sequence
  Description of Artificial Sequence: Synthetic oligonucleotide
  Antisense strand to SEQ ID NO: 2221548
ugacuaaggauucuccagc

SEQ ID NO: 2221550 - RNA, 19 nt, Artificial Sequence
  Description of Artificial Sequence: Synthetic oligonucleotide
  Sense strand starting at position 3538 of SEQ ID NO: 1883857
gguagugagucaucaaacu

SEQ ID NO: 2221551 - RNA, 19 nt, Artificial Sequence
  Description of Artificial Sequence: Synthetic oligonucleotide
  Antisense strand to SEQ ID NO: 2221550
aguuugaugacucacuacc

SEQ ID NO: 2221552 - RNA, 19 nt, Artificial Sequence
  Description of Artificial Sequence: Synthetic oligonucleotide
  Sense strand starting at position 3153 of SEQ ID NO: 1883857
agucuccuuccagaagugu

SEQ ID NO: 2221553 - RNA, 19 nt, Artificial Sequence
  Description of Artificial Sequence: Synthetic oligonucleotide
  Antisense strand to SEQ ID NO: 2221552
acacuucuggaaggagacu

SEQ ID NO: 2221554 - RNA, 19 nt, Artificial Sequence
  Description of Artificial Sequence: Synthetic oligonucleotide
  Sense strand starting at position 504 of SEQ ID NO: 1883857
ccgagaggauggucuaguu

SEQ ID NO: 2221555 - RNA, 19 nt, Artificial Sequence
  Description of Artificial Sequence: Synthetic oligonucleotide
  Antisense strand to SEQ ID NO: 2221554
aacuagaccauccucucgg

SEQ ID NO: 2221556 - RNA, 19 nt, Artificial Sequence
  Description of Artificial Sequence: Synthetic oligonucleotide
  Sense strand starting at position 3138 of SEQ ID NO: 1883857
gccuaucucccugauaguc

SEQ ID NO: 2221557 - RNA, 19 nt, Artificial Sequence
  Description of Artificial Sequence: Synthetic oligonucleotide
  Antisense strand to SEQ ID NO: 2221556
gacuaucagggagauaggc

SEQ ID NO: 2221558 - RNA, 19 nt, Artificial Sequence
  Description of Artificial Sequence: Synthetic oligonucleotide
  Sense strand starting at position 3387 of SEQ ID NO: 1883857
ccguuaugucgacaaauua

SEQ ID NO: 2221559 - RNA, 19 nt, Artificial Sequence
  Description of Artificial Sequence: Synthetic oligonucleotide
  Antisense strand to SEQ ID NO: 2221558
uaauuugucgacauaacgg

SEQ ID NO: 2221560 - RNA, 19 nt, Artificial Sequence
  Description of Artificial Sequence: Synthetic oligonucleotide
  Sense strand starting at position 3146 of SEQ ID NO: 1883857
cccugauagucuccuucca

SEQ ID NO: 2221561 - RNA, 19 nt, Artificial Sequence
  Description of Artificial Sequence: Synthetic oligonucleotide
  Antisense strand to SEQ ID NO: 2221560
uggaaggagacuaucaggg

SEQ ID NO: 2221562 - RNA, 19 nt, Artificial Sequence
  Description of Artificial Sequence: Synthetic oligonucleotide
  Sense strand starting at position 1520 of SEQ ID NO: 1883857
aauuauguacucgggaugu

SEQ ID NO: 2221563 - RNA, 19 nt, Artificial Sequence
  Description of Artificial Sequence: Synthetic oligonucleotide
  Antisense strand to SEQ ID NO: 2221562
acaucccgaguacauaauu

SEQ ID NO: 2221564 - RNA, 19 nt, Artificial Sequence
  Description of Artificial Sequence: Synthetic oligonucleotide
  Sense strand starting at position 170 of SEQ ID NO: 1883857
gucuuaggagucuguaauc

SEQ ID NO: 2221565 - RNA, 19 nt, Artificial Sequence
  Description of Artificial Sequence: Synthetic oligonucleotide
  Antisense strand to SEQ ID NO: 2221564
gauuacagacuccuaagac

SEQ ID NO: 2221566 - RNA, 19 nt, Artificial Sequence
  Description of Artificial Sequence: Synthetic oligonucleotide
  Sense strand starting at position 3567 of SEQ ID NO: 1883857
gacuuaucggaaggcuugu

SEQ ID NO: 2221567 - RNA, 19 nt, Artificial Sequence
  Description of Artificial Sequence: Synthetic oligonucleotide
  Antisense strand to SEQ ID NO: 2221566
acaagccuuccgauaaguc

SEQ ID NO: 2221568 - RNA, 19 nt, Artificial Sequence
  Description of Artificial Sequence: Synthetic oligonucleotide
  Sense strand starting at position 3137 of SEQ ID NO: 1883857
agccuaucucccugauagu

SEQ ID NO: 2221569 - RNA, 19 nt, Artificial Sequence
  Description of Artificial Sequence: Synthetic oligonucleotide
  Antisense strand to SEQ ID NO: 2221568
acuaucagggagauaggcu

SEQ ID NO: 2221570 - RNA, 19 nt, Artificial Sequence
  Description of Artificial Sequence: Synthetic oligonucleotide
  Sense strand starting at position 1262 of SEQ ID NO: 1883857
gcccuauaguccucucaca

SEQ ID NO: 2221571 - RNA, 19 nt, Artificial Sequence
  Description of Artificial Sequence: Synthetic oligonucleotide
  Antisense strand to SEQ ID NO: 2221570
ugugagaggacuauagggc

SEQ ID NO: 2221572 - RNA, 19 nt, Artificial Sequence
  Description of Artificial Sequence: Synthetic oligonucleotide
  Sense strand starting at position 3695 of SEQ ID NO: 1883857
aucgguucucauugcaaca

SEQ ID NO: 2221573 - RNA, 19 nt, Artificial Sequence
  Description of Artificial Sequence: Synthetic oligonucleotide
  Antisense strand to SEQ ID NO: 2221572
uguugcaaugagaaccgau

SEQ ID NO: 2221574 - RNA, 19 nt, Artificial Sequence
  Description of Artificial Sequence: Synthetic oligonucleotide
  Sense strand starting at position 663 of SEQ ID NO: 1883857
ccgccuccaucuguggaaa

SEQ ID NO: 2221575 - RNA, 19 nt, Artificial Sequence
  Description of Artificial Sequence: Synthetic oligonucleotide
  Antisense strand to SEQ ID NO: 2221574
uuuccacagauggaggcgg

SEQ ID NO: 2221576 - RNA, 19 nt, Artificial Sequence
  Description of Artificial Sequence: Synthetic oligonucleotide
  Sense strand starting at position 3667 of SEQ ID NO: 1883857
ggugaucucuuucuagugu

SEQ ID NO: 2221577 - RNA, 19 nt, Artificial Sequence
  Description of Artificial Sequence: Synthetic oligonucleotide
  Antisense strand to SEQ ID NO: 2221576
acacuagaaagagaucacc

SEQ ID NO: 2221578 - RNA, 19 nt, Artificial Sequence
  Description of Artificial Sequence: Synthetic oligonucleotide
  Sense strand starting at position 624 of SEQ ID NO: 1883857
cuaaguguaaugugcuuga

SEQ ID NO: 2221579 - RNA, 19 nt, Artificial Sequence
  Description of Artificial Sequence: Synthetic oligonucleotide
  Antisense strand to SEQ ID NO: 2221578
ucaagcacauuacacuuag

SEQ ID NO: 2221580 - RNA, 19 nt, Artificial Sequence
  Description of Artificial Sequence: Synthetic oligonucleotide
  Sense strand starting at position 3581 of SEQ ID NO: 1883857
cuuguauaugugugguuua

SEQ ID NO: 2221581 - RNA, 19 nt, Artificial Sequence
  Description of Artificial Sequence: Synthetic oligonucleotide
  Antisense strand to SEQ ID NO: 2221580
uaaaccacacauauacaag

SEQ ID NO: 2221582 - RNA, 19 nt, Artificial Sequence
  Description of Artificial Sequence: Synthetic oligonucleotide
  Sense strand starting at position 452 of SEQ ID NO: 1883857
ugcuccuuaugagaaacaa

SEQ ID NO: 2221583 - RNA, 19 nt, Artificial Sequence
  Description of Artificial Sequence: Synthetic oligonucleotide
  Antisense strand to SEQ ID NO: 2221582
uuguuucucauaaggagca

SEQ ID NO: 2221584 - RNA, 19 nt, Artificial Sequence
  Description of Artificial Sequence: Synthetic oligonucleotide
  Sense strand starting at position 3580 of SEQ ID NO: 1883857
gcuuguauaugugugguuu

SEQ ID NO: 2221585 - RNA, 19 nt, Artificial Sequence
  Description of Artificial Sequence: Synthetic oligonucleotide
  Antisense strand to SEQ ID NO: 2221584
aaaccacacauauacaagc

SEQ ID NO: 2221586 - RNA, 19 nt, Artificial Sequence
  Description of Artificial Sequence: Synthetic oligonucleotide
  Sense strand starting at position 512 of SEQ ID NO: 1883857
auggucuaguugcaagaaa

SEQ ID NO: 2221587 - RNA, 19 nt, Artificial Sequence
  Description of Artificial Sequence: Synthetic oligonucleotide
  Antisense strand to SEQ ID NO: 2221586
uuucuugcaacuagaccau

SEQ ID NO: 2221588 - RNA, 19 nt, Artificial Sequence
  Description of Artificial Sequence: Synthetic oligonucleotide
  Sense strand starting at position 3564 of SEQ ID NO: 1883857
cuagacuuaucggaaggcu

SEQ ID NO: 2221589 - RNA, 19 nt, Artificial Sequence
  Description of Artificial Sequence: Synthetic oligonucleotide
  Antisense strand to SEQ ID NO: 2221588
agccuuccgauaagucuag

SEQ ID NO: 2221590 - RNA, 19 nt, Artificial Sequence
  Description of Artificial Sequence: Synthetic oligonucleotide
  Sense strand starting at position 3219 of SEQ ID NO: 1883857
gguaacuguugagagcauu

SEQ ID NO: 2221591 - RNA, 19 nt, Artificial Sequence
  Description of Artificial Sequence: Synthetic oligonucleotide
  Antisense strand to SEQ ID NO: 2221590
aaugcucucaacaguuacc

SEQ ID NO: 2221592 - RNA, 19 nt, Artificial Sequence
  Description of Artificial Sequence: Synthetic oligonucleotide
  Sense strand starting at position 1160 of SEQ ID NO: 1883857
cagguauauuccugaaacg

SEQ ID NO: 2221593 - RNA, 19 nt, Artificial Sequence
  Description of Artificial Sequence: Synthetic oligonucleotide
  Antisense strand to SEQ ID NO: 2221592
cguuucaggaauauaccug

SEQ ID NO: 2221594 - RNA, 19 nt, Artificial Sequence
  Description of Artificial Sequence: Synthetic oligonucleotide
  Sense strand starting at position 1661 of SEQ ID NO: 1883858
ggguucgugaugcucaguu

SEQ ID NO: 2221595 - RNA, 19 nt, Artificial Sequence
  Description of Artificial Sequence: Synthetic oligonucleotide
  Antisense strand to SEQ ID NO: 2221594
aacugagcaucacgaaccc

SEQ ID NO: 2221596 - RNA, 19 nt, Artificial Sequence
  Description of Artificial Sequence: Synthetic oligonucleotide
  Sense strand starting at position 3799 of SEQ ID NO: 1883858
cuccaauacgaugaaguua

SEQ ID NO: 2221597 - RNA, 19 nt, Artificial Sequence
  Description of Artificial Sequence: Synthetic oligonucleotide
  Antisense strand to SEQ ID NO: 2221596
uaacuucaucguauuggag

SEQ ID NO: 2221598 - RNA, 19 nt, Artificial Sequence
  Description of Artificial Sequence: Synthetic oligonucleotide
  Sense strand starting at position 1422 of SEQ ID NO: 1883858
gagagagugagucgggaaa

SEQ ID NO: 2221599 - RNA, 19 nt, Artificial Sequence
  Description of Artificial Sequence: Synthetic oligonucleotide
  Antisense strand to SEQ ID NO: 2221598
uuucccgacucacucucuc

SEQ ID NO: 2221600 - RNA, 19 nt, Artificial Sequence
  Description of Artificial Sequence: Synthetic oligonucleotide
  Sense strand starting at position 849 of SEQ ID NO: 1883858
uggaacuuauagcuaagau

SEQ ID NO: 2221601 - RNA, 19 nt, Artificial Sequence
  Description of Artificial Sequence: Synthetic oligonucleotide
  Antisense strand to SEQ ID NO: 2221600
aucuuagcuauaaguucca

SEQ ID NO: 2221602 - RNA, 19 nt, Artificial Sequence
  Description of Artificial Sequence: Synthetic oligonucleotide
  Sense strand starting at position 681 of SEQ ID NO: 1883858
guuguugugguugccauua

SEQ ID NO: 2221603 - RNA, 19 nt, Artificial Sequence
  Description of Artificial Sequence: Synthetic oligonucleotide
  Antisense strand to SEQ ID NO: 2221602
uaauggcaaccacaacaac

SEQ ID NO: 2221604 - RNA, 19 nt, Artificial Sequence
  Description of Artificial Sequence: Synthetic oligonucleotide
  Sense strand starting at position 3810 of SEQ ID NO: 1883858
ugaaguuauaaugaggcga

SEQ ID NO: 2221605 - RNA, 19 nt, Artificial Sequence
  Description of Artificial Sequence: Synthetic oligonucleotide
  Antisense strand to SEQ ID NO: 2221604
ucgccucauuauaacuuca

SEQ ID NO: 2221606 - RNA, 19 nt, Artificial Sequence
  Description of Artificial Sequence: Synthetic oligonucleotide
  Sense strand starting at position 1673 of SEQ ID NO: 1883858
cucaguuuacuagggagga

SEQ ID NO: 2221607 - RNA, 19 nt, Artificial Sequence
  Description of Artificial Sequence: Synthetic oligonucleotide
  Antisense strand to SEQ ID NO: 2221606
uccucccuaguaaacugag

SEQ ID NO: 2221608 - RNA, 19 nt, Artificial Sequence
  Description of Artificial Sequence: Synthetic oligonucleotide
  Sense strand starting at position 3112 of SEQ ID NO: 1883858
agugaagaguuaccaauua

SEQ ID NO: 2221609 - RNA, 19 nt, Artificial Sequence
  Description of Artificial Sequence: Synthetic oligonucleotide
  Antisense strand to SEQ ID NO: 2221608
uaauugguaacucuucacu

SEQ ID NO: 2221610 - RNA, 19 nt, Artificial Sequence
  Description of Artificial Sequence: Synthetic oligonucleotide
  Sense strand starting at position 1186 of SEQ ID NO: 1883858
gggagaacucaggguuccu

SEQ ID NO: 2221611 - RNA, 19 nt, Artificial Sequence
  Description of Artificial Sequence: Synthetic oligonucleotide
  Antisense strand to SEQ ID NO: 2221610
aggaacccugaguucuccc

SEQ ID NO: 2221612 - RNA, 19 nt, Artificial Sequence
  Description of Artificial Sequence: Synthetic oligonucleotide
  Sense strand starting at position 1010 of SEQ ID NO: 1883858
guaauuccucuggaucacu

SEQ ID NO: 2221613 - RNA, 19 nt, Artificial Sequence
  Description of Artificial Sequence: Synthetic oligonucleotide
  Antisense strand to SEQ ID NO: 2221612
agugauccagaggaauuac

SEQ ID NO: 2221614 - RNA, 19 nt, Artificial Sequence
  Description of Artificial Sequence: Synthetic oligonucleotide
  Sense strand starting at position 904 of SEQ ID NO: 1883858
agaugacuccaaugucaug

SEQ ID NO: 2221615 - RNA, 19 nt, Artificial Sequence
  Description of Artificial Sequence: Synthetic oligonucleotide
  Antisense strand to SEQ ID NO: 2221614
caugacauuggagucaucu

SEQ ID NO: 2221616 - RNA, 19 nt, Artificial Sequence
  Description of Artificial Sequence: Synthetic oligonucleotide
  Sense strand starting at position 3286 of SEQ ID NO: 1883858
guaugaucagaucacugca

SEQ ID NO: 2221617 - RNA, 19 nt, Artificial Sequence
  Description of Artificial Sequence: Synthetic oligonucleotide
  Antisense strand to SEQ ID NO: 2221616
ugcagugaucugaucauac

SEQ ID NO: 2221618 - RNA, 19 nt, Artificial Sequence
  Description of Artificial Sequence: Synthetic oligonucleotide
  Sense strand starting at position 3397 of SEQ ID NO: 1883858
gcaaguaugcagucugugu

SEQ ID NO: 2221619 - RNA, 19 nt, Artificial Sequence
  Description of Artificial Sequence: Synthetic oligonucleotide
  Antisense strand to SEQ ID NO: 2221618
acacagacugcauacuugc

SEQ ID NO: 2221620 - RNA, 19 nt, Artificial Sequence
  Description of Artificial Sequence: Synthetic oligonucleotide
  Sense strand starting at position 27 of SEQ ID NO: 1883858
ucauguugauucucaaaga

SEQ ID NO: 2221621 - RNA, 19 nt, Artificial Sequence
  Description of Artificial Sequence: Synthetic oligonucleotide
  Antisense strand to SEQ ID NO: 2221620
ucuuugagaaucaacauga

SEQ ID NO: 2221622 - RNA, 19 nt, Artificial Sequence
  Description of Artificial Sequence: Synthetic oligonucleotide
  Sense strand starting at position 2010 of SEQ ID NO: 1883858
gugagaguuggccaaucaa

SEQ ID NO: 2221623 - RNA, 19 nt, Artificial Sequence
  Description of Artificial Sequence: Synthetic oligonucleotide
  Antisense strand to SEQ ID NO: 2221622
uugauuggccaacucucac

SEQ ID NO: 2221624 - RNA, 19 nt, Artificial Sequence
  Description of Artificial Sequence: Synthetic oligonucleotide
  Sense strand starting at position 1413 of SEQ ID NO: 1883858
gcggccuucgagagaguga

SEQ ID NO: 2221625 - RNA, 19 nt, Artificial Sequence
  Description of Artificial Sequence: Synthetic oligonucleotide
  Antisense strand to SEQ ID NO: 2221624
ucacucucucgaaggccgc

SEQ ID NO: 2221626 - RNA, 19 nt, Artificial Sequence
  Description of Artificial Sequence: Synthetic oligonucleotide
  Sense strand starting at position 737 of SEQ ID NO: 1883858
gaagauaaccugcaacguu

SEQ ID NO: 2221627 - RNA, 19 nt, Artificial Sequence
  Description of Artificial Sequence: Synthetic oligonucleotide
  Antisense strand to SEQ ID NO: 2221626
aacguugcagguuaucuuc

SEQ ID NO: 2221628 - RNA, 19 nt, Artificial Sequence
  Description of Artificial Sequence: Synthetic oligonucleotide
  Sense strand starting at position 3280 of SEQ ID NO: 1883858
agugauguaugaucagauc

SEQ ID NO: 2221629 - RNA, 19 nt, Artificial Sequence
  Description of Artificial Sequence: Synthetic oligonucleotide
  Antisense strand to SEQ ID NO: 2221628
gaucugaucauacaucacu

SEQ ID NO: 2221630 - RNA, 19 nt, Artificial Sequence
  Description of Artificial Sequence: Synthetic oligonucleotide
  Sense strand starting at position 54 of SEQ ID NO: 1883858
cagauuugccacugcaguu

SEQ ID NO: 2221631 - RNA, 19 nt, Artificial Sequence
  Description of Artificial Sequence: Synthetic oligonucleotide
  Antisense strand to SEQ ID NO: 2221630
aacugcaguggcaaaucug

SEQ ID NO: 2221632 - RNA, 19 nt, Artificial Sequence
  Description of Artificial Sequence: Synthetic oligonucleotide
  Sense strand starting at position 725 of SEQ ID NO: 1883858
cucuccauuugggaagaua

SEQ ID NO: 2221633 - RNA, 19 nt, Artificial Sequence
  Description of Artificial Sequence: Synthetic oligonucleotide
  Antisense strand to SEQ ID NO: 2221632
uaucuucccaaauggagag

SEQ ID NO: 2221634 - RNA, 19 nt, Artificial Sequence
  Description of Artificial Sequence: Synthetic oligonucleotide
  Sense strand starting at position 3679 of SEQ ID NO: 1883858
cuggcaugaccuuagguau

SEQ ID NO: 2221635 - RNA, 19 nt, Artificial Sequence
  Description of Artificial Sequence: Synthetic oligonucleotide
  Antisense strand to SEQ ID NO: 2221634
auaccuaaggucaugccag

SEQ ID NO: 2221636 - RNA, 19 nt, Artificial Sequence
  Description of Artificial Sequence: Synthetic oligonucleotide
  Sense strand starting at position 3798 of SEQ ID NO: 1883858
acuccaauacgaugaaguu

SEQ ID NO: 2221637 - RNA, 19 nt, Artificial Sequence
  Description of Artificial Sequence: Synthetic oligonucleotide
  Antisense strand to SEQ ID NO: 2221636
aacuucaucguauuggagu

SEQ ID NO: 2221638 - RNA, 19 nt, Artificial Sequence
  Description of Artificial Sequence: Synthetic oligonucleotide
  Sense strand starting at position 3386 of SEQ ID NO: 1883858
caggaaggugugcaaguau

SEQ ID NO: 2221639 - RNA, 19 nt, Artificial Sequence
  Description of Artificial Sequence: Synthetic oligonucleotide
  Antisense strand to SEQ ID NO: 2221638
auacuugcacaccuuccug

SEQ ID NO: 2221640 - RNA, 19 nt, Artificial Sequence
  Description of Artificial Sequence: Synthetic oligonucleotide
  Sense strand starting at position 3682 of SEQ ID NO: 1883858
gcaugaccuuagguauaau

SEQ ID NO: 2221641 - RNA, 19 nt, Artificial Sequence
  Description of Artificial Sequence: Synthetic oligonucleotide
  Antisense strand to SEQ ID NO: 2221640
auuauaccuaaggucaugc

SEQ ID NO: 2221642 - RNA, 19 nt, Artificial Sequence
  Description of Artificial Sequence: Synthetic oligonucleotide
  Sense strand starting at position 873 of SEQ ID NO: 1883858
ggauaaagcuggcuuuaca

SEQ ID NO: 2221643 - RNA, 19 nt, Artificial Sequence
  Description of Artificial Sequence: Synthetic oligonucleotide
  Antisense strand to SEQ ID NO: 2221642
uguaaagccagcuuuaucc

SEQ ID NO: 2221644 - RNA, 19 nt, Artificial Sequence
  Description of Artificial Sequence: Synthetic oligonucleotide
  Sense strand starting at position 1008 of SEQ ID NO: 1883858
cuguaauuccucuggauca

SEQ ID NO: 2221645 - RNA, 19 nt, Artificial Sequence
  Description of Artificial Sequence: Synthetic oligonucleotide
  Antisense strand to SEQ ID NO: 2221644
ugauccagaggaauuacag

SEQ ID NO: 2221646 - RNA, 19 nt, Artificial Sequence
  Description of Artificial Sequence: Synthetic oligonucleotide
  Sense strand starting at position 3635 of SEQ ID NO: 1883858
acaguuuauucucuaagug

SEQ ID NO: 2221647 - RNA, 19 nt, Artificial Sequence
  Description of Artificial Sequence: Synthetic oligonucleotide
  Antisense strand to SEQ ID NO: 2221646
cacuuagagaauaaacugu

SEQ ID NO: 2221648 - RNA, 19 nt, Artificial Sequence
  Description of Artificial Sequence: Synthetic oligonucleotide
  Sense strand starting at position 295 of SEQ ID NO: 1883858
accacaucaucuguuguga

SEQ ID NO: 2221649 - RNA, 19 nt, Artificial Sequence
  Description of Artificial Sequence: Synthetic oligonucleotide
  Antisense strand to SEQ ID NO: 2221648
ucacaacagaugauguggu

SEQ ID NO: 2221650 - RNA, 19 nt, Artificial Sequence
  Description of Artificial Sequence: Synthetic oligonucleotide
  Sense strand starting at position 786 of SEQ ID NO: 1883858
uucuguaauuccuuugaug

SEQ ID NO: 2221651 - RNA, 19 nt, Artificial Sequence
  Description of Artificial Sequence: Synthetic oligonucleotide
  Antisense strand to SEQ ID NO: 2221650
caucaaaggaauuacagaa

SEQ ID NO: 2221652 - RNA, 19 nt, Artificial Sequence
  Description of Artificial Sequence: Synthetic oligonucleotide
  Sense strand starting at position 975 of SEQ ID NO: 1883858
gccauccugccugaaauuc

SEQ ID NO: 2221653 - RNA, 19 nt, Artificial Sequence
  Description of Artificial Sequence: Synthetic oligonucleotide
  Antisense strand to SEQ ID NO: 2221652
gaauuucaggcaggauggc

SEQ ID NO: 2221654 - RNA, 19 nt, Artificial Sequence
  Description of Artificial Sequence: Synthetic oligonucleotide
  Sense strand starting at position 3271 of SEQ ID NO: 1883858
ggaggcugcagugauguau

SEQ ID NO: 2221655 - RNA, 19 nt, Artificial Sequence
  Description of Artificial Sequence: Synthetic oligonucleotide
  Antisense strand to SEQ ID NO: 2221654
auacaucacugcagccucc

SEQ ID NO: 2221656 - RNA, 19 nt, Artificial Sequence
  Description of Artificial Sequence: Synthetic oligonucleotide
  Sense strand starting at position 3842 of SEQ ID NO: 1883858
uccugucauuggcugggaa

SEQ ID NO: 2221657 - RNA, 19 nt, Artificial Sequence
  Description of Artificial Sequence: Synthetic oligonucleotide
  Antisense strand to SEQ ID NO: 2221656
uucccagccaaugacagga

SEQ ID NO: 2221658 - RNA, 19 nt, Artificial Sequence
  Description of Artificial Sequence: Synthetic oligonucleotide
  Sense strand starting at position 3657 of SEQ ID NO: 1883858
ggaugugugccuuaaccuu

SEQ ID NO: 2221659 - RNA, 19 nt, Artificial Sequence
  Description of Artificial Sequence: Synthetic oligonucleotide
  Antisense strand to SEQ ID NO: 2221658
aagguuaaggcacacaucc

SEQ ID NO: 2221660 - RNA, 19 nt, Artificial Sequence
  Description of Artificial Sequence: Synthetic oligonucleotide
  Sense strand starting at position 1330 of SEQ ID NO: 1883858
ugcaaaucggucuaaguuu

SEQ ID NO: 2221661 - RNA, 19 nt, Artificial Sequence
  Description of Artificial Sequence: Synthetic oligonucleotide
  Antisense strand to SEQ ID NO: 2221660
aaacuuagaccgauuugca

SEQ ID NO: 2221662 - RNA, 19 nt, Artificial Sequence
  Description of Artificial Sequence: Synthetic oligonucleotide
  Sense strand starting at position 871 of SEQ ID NO: 1883858
guggauaaagcuggcuuua

SEQ ID NO: 2221663 - RNA, 19 nt, Artificial Sequence
  Description of Artificial Sequence: Synthetic oligonucleotide
  Antisense strand to SEQ ID NO: 2221662
uaaagccagcuuuauccac

SEQ ID NO: 2221664 - RNA, 19 nt, Artificial Sequence
  Description of Artificial Sequence: Synthetic oligonucleotide
  Sense strand starting at position 740 of SEQ ID NO: 1883858
gauaaccugcaacguuauu

SEQ ID NO: 2221665 - RNA, 19 nt, Artificial Sequence
  Description of Artificial Sequence: Synthetic oligonucleotide
  Antisense strand to SEQ ID NO: 2221664
aauaacguugcagguuauc

SEQ ID NO: 2221666 - RNA, 19 nt, Artificial Sequence
  Description of Artificial Sequence: Synthetic oligonucleotide
  Sense strand starting at position 1640 of SEQ ID NO: 1883858
gugaccucagucugccaaa

SEQ ID NO: 2221667 - RNA, 19 nt, Artificial Sequence
  Description of Artificial Sequence: Synthetic oligonucleotide
  Antisense strand to SEQ ID NO: 2221666
uuuggcagacugaggucac

SEQ ID NO: 2221668 - RNA, 19 nt, Artificial Sequence
  Description of Artificial Sequence: Synthetic oligonucleotide
  Sense strand starting at position 2512 of SEQ ID NO: 1883858
cgagugagguguguuaaga

SEQ ID NO: 2221669 - RNA, 19 nt, Artificial Sequence
  Description of Artificial Sequence: Synthetic oligonucleotide
  Antisense strand to SEQ ID NO: 2221668
ucuuaacacaccucacucg

SEQ ID NO: 2221670 - RNA, 19 nt, Artificial Sequence
  Description of Artificial Sequence: Synthetic oligonucleotide
  Sense strand starting at position 973 of SEQ ID NO: 1883858
cugccauccugccugaaau

SEQ ID NO: 2221671 - RNA, 19 nt, Artificial Sequence
  Description of Artificial Sequence: Synthetic oligonucleotide
  Antisense strand to SEQ ID NO: 2221670
auuucaggcaggauggcag

SEQ ID NO: 2221672 - RNA, 19 nt, Artificial Sequence
  Description of Artificial Sequence: Synthetic oligonucleotide
  Sense strand starting at position 974 of SEQ ID NO: 1883858
ugccauccugccugaaauu

SEQ ID NO: 2221673 - RNA, 19 nt, Artificial Sequence
  Description of Artificial Sequence: Synthetic oligonucleotide
  Antisense strand to SEQ ID NO: 2221672
aauuucaggcaggauggca

SEQ ID NO: 2221674 - RNA, 19 nt, Artificial Sequence
  Description of Artificial Sequence: Synthetic oligonucleotide
  Sense strand starting at position 3529 of SEQ ID NO: 1883859
agaguauauucucuggaga

SEQ ID NO: 2221675 - RNA, 19 nt, Artificial Sequence
  Description of Artificial Sequence: Synthetic oligonucleotide
  Antisense strand to SEQ ID NO: 2221674
ucuccagagaauauacucu

SEQ ID NO: 2221676 - RNA, 19 nt, Artificial Sequence
  Description of Artificial Sequence: Synthetic oligonucleotide
  Sense strand starting at position 3704 of SEQ ID NO: 1883859
aaguguguuagggaagacu

SEQ ID NO: 2221677 - RNA, 19 nt, Artificial Sequence
  Description of Artificial Sequence: Synthetic oligonucleotide
  Antisense strand to SEQ ID NO: 2221676
agucuucccuaacacacuu

SEQ ID NO: 2221678 - RNA, 19 nt, Artificial Sequence
  Description of Artificial Sequence: Synthetic oligonucleotide
  Sense strand starting at position 422 of SEQ ID NO: 1883859
ucuacugauuucguucuca

SEQ ID NO: 2221679 - RNA, 19 nt, Artificial Sequence
  Description of Artificial Sequence: Synthetic oligonucleotide
  Antisense strand to SEQ ID NO: 2221678
ugagaacgaaaucaguaga

SEQ ID NO: 2221680 - RNA, 19 nt, Artificial Sequence
  Description of Artificial Sequence: Synthetic oligonucleotide
  Sense strand starting at position 3530 of SEQ ID NO: 1883859
gaguauauucucuggagau

SEQ ID NO: 2221681 - RNA, 19 nt, Artificial Sequence
  Description of Artificial Sequence: Synthetic oligonucleotide
  Antisense strand to SEQ ID NO: 2221680
aucuccagagaauauacuc

SEQ ID NO: 2221682 - RNA, 19 nt, Artificial Sequence
  Description of Artificial Sequence: Synthetic oligonucleotide
  Sense strand starting at position 3762 of SEQ ID NO: 1883859
guaggaugcccauaaguau

SEQ ID NO: 2221683 - RNA, 19 nt, Artificial Sequence
  Description of Artificial Sequence: Synthetic oligonucleotide
  Antisense strand to SEQ ID NO: 2221682
auacuuaugggcauccuac

SEQ ID NO: 2221684 - RNA, 19 nt, Artificial Sequence
  Description of Artificial Sequence: Synthetic oligonucleotide
  Sense strand starting at position 3506 of SEQ ID NO: 1883859
uggguauccuuaucaauca

SEQ ID NO: 2221685 - RNA, 19 nt, Artificial Sequence
  Description of Artificial Sequence: Synthetic oligonucleotide
  Antisense strand to SEQ ID NO: 2221684
ugauugauaaggauaccca

SEQ ID NO: 2221686 - RNA, 19 nt, Artificial Sequence
  Description of Artificial Sequence: Synthetic oligonucleotide
  Sense strand starting at position 3053 of SEQ ID NO: 1883859
augucuuugcccuaagaca

SEQ ID NO: 2221687 - RNA, 19 nt, Artificial Sequence
  Description of Artificial Sequence: Synthetic oligonucleotide
  Antisense strand to SEQ ID NO: 2221686
ugucuuagggcaaagacau

SEQ ID NO: 2221688 - RNA, 19 nt, Artificial Sequence
  Description of Artificial Sequence: Synthetic oligonucleotide
  Sense strand starting at position 2842 of SEQ ID NO: 1883859
cucugaccuccuuaugguu

SEQ ID NO: 2221689 - RNA, 19 nt, Artificial Sequence
  Description of Artificial Sequence: Synthetic oligonucleotide
  Antisense strand to SEQ ID NO: 2221688
aaccauaaggaggucagag

SEQ ID NO: 2221690 - RNA, 19 nt, Artificial Sequence
  Description of Artificial Sequence: Synthetic oligonucleotide
  Sense strand starting at position 3931 of SEQ ID NO: 1883859
auugcaaccguauaucuaa

SEQ ID NO: 2221691 - RNA, 19 nt, Artificial Sequence
  Description of Artificial Sequence: Synthetic oligonucleotide
  Antisense strand to SEQ ID NO: 2221690
uuagauauacgguugcaau

SEQ ID NO: 2221692 - RNA, 19 nt, Artificial Sequence
  Description of Artificial Sequence: Synthetic oligonucleotide
  Sense strand starting at position 3854 of SEQ ID NO: 1883859
aucucucuagucuaaguuu

SEQ ID NO: 2221693 - RNA, 19 nt, Artificial Sequence
  Description of Artificial Sequence: Synthetic oligonucleotide
  Antisense strand to SEQ ID NO: 2221692
aaacuuagacuagagagau

SEQ ID NO: 2221694 - RNA, 19 nt, Artificial Sequence
  Description of Artificial Sequence: Synthetic oligonucleotide
  Sense strand starting at position 3622 of SEQ ID NO: 1883859
auggcacuagauuguaauu

SEQ ID NO: 2221695 - RNA, 19 nt, Artificial Sequence
  Description of Artificial Sequence: Synthetic oligonucleotide
  Antisense strand to SEQ ID NO: 2221694
aauuacaaucuagugccau

SEQ ID NO: 2221696 - RNA, 19 nt, Artificial Sequence
  Description of Artificial Sequence: Synthetic oligonucleotide
  Sense strand starting at position 2863 of SEQ ID NO: 1883859
gucagacuuuggcugaaca

SEQ ID NO: 2221697 - RNA, 19 nt, Artificial Sequence
  Description of Artificial Sequence: Synthetic oligonucleotide
  Antisense strand to SEQ ID NO: 2221696
uguucagccaaagucugac

SEQ ID NO: 2221698 - RNA, 19 nt, Artificial Sequence
  Description of Artificial Sequence: Synthetic oligonucleotide
  Sense strand starting at position 2803 of SEQ ID NO: 1883859
uaaugaaccucgcugggau

SEQ ID NO: 2221699 - RNA, 19 nt, Artificial Sequence
  Description of Artificial Sequence: Synthetic oligonucleotide
  Antisense strand to SEQ ID NO: 2221698
aucccagcgagguucauua

SEQ ID NO: 2221700 - RNA, 19 nt, Artificial Sequence
  Description of Artificial Sequence: Synthetic oligonucleotide
  Sense strand starting at position 2411 of SEQ ID NO: 1883859
gcgaaaugcacggaaacuu

SEQ ID NO: 2221701 - RNA, 19 nt, Artificial Sequence
  Description of Artificial Sequence: Synthetic oligonucleotide
  Antisense strand to SEQ ID NO: 2221700
aaguuuccgugcauuucgc

SEQ ID NO: 2221702 - RNA, 19 nt, Artificial Sequence
  Description of Artificial Sequence: Synthetic oligonucleotide
  Sense strand starting at position 2804 of SEQ ID NO: 1883859
aaugaaccucgcugggauu

SEQ ID NO: 2221703 - RNA, 19 nt, Artificial Sequence
  Description of Artificial Sequence: Synthetic oligonucleotide
  Antisense strand to SEQ ID NO: 2221702
aaucccagcgagguucauu

SEQ ID NO: 2221704 - RNA, 19 nt, Artificial Sequence
  Description of Artificial Sequence: Synthetic oligonucleotide
  Sense strand starting at position 3402 of SEQ ID NO: 1883859
gagccugagucuccugaga

SEQ ID NO: 2221705 - RNA, 19 nt, Artificial Sequence
  Description of Artificial Sequence: Synthetic oligonucleotide
  Antisense strand to SEQ ID NO: 2221704
ucucaggagacucaggcuc

SEQ ID NO: 2221706 - RNA, 19 nt, Artificial Sequence
  Description of Artificial Sequence: Synthetic oligonucleotide
  Sense strand starting at position 3599 of SEQ ID NO: 1883859
ccuguuaagcuauauguau

SEQ ID NO: 2221707 - RNA, 19 nt, Artificial Sequence
  Description of Artificial Sequence: Synthetic oligonucleotide
  Antisense strand to SEQ ID NO: 2221706
auacauauagcuuaacagg

SEQ ID NO: 2221708 - RNA, 19 nt, Artificial Sequence
  Description of Artificial Sequence: Synthetic oligonucleotide
  Sense strand starting at position 1323 of SEQ ID NO: 1883859
gacggaauguccuccaucu

SEQ ID NO: 2221709 - RNA, 19 nt, Artificial Sequence
  Description of Artificial Sequence: Synthetic oligonucleotide
  Antisense strand to SEQ ID NO: 2221708
agauggaggacauuccguc

SEQ ID NO: 2221710 - RNA, 19 nt, Artificial Sequence
  Description of Artificial Sequence: Synthetic oligonucleotide
  Sense strand starting at position 3794 of SEQ ID NO: 1883859
ggcgccacacuguaaagau

SEQ ID NO: 2221711 - RNA, 19 nt, Artificial Sequence
  Description of Artificial Sequence: Synthetic oligonucleotide
  Antisense strand to SEQ ID NO: 2221710
aucuuuacaguguggcgcc

SEQ ID NO: 2221712 - RNA, 19 nt, Artificial Sequence
  Description of Artificial Sequence: Synthetic oligonucleotide
  Sense strand starting at position 3862 of SEQ ID NO: 1883859
agucuaaguuuacucaucu

SEQ ID NO: 2221713 - RNA, 19 nt, Artificial Sequence
  Description of Artificial Sequence: Synthetic oligonucleotide
  Antisense strand to SEQ ID NO: 2221712
agaugaguaaacuuagacu

SEQ ID NO: 2221714 - RNA, 19 nt, Artificial Sequence
  Description of Artificial Sequence: Synthetic oligonucleotide
  Sense strand starting at position 3606 of SEQ ID NO: 1883859
agcuauauguauucucaug

SEQ ID NO: 2221715 - RNA, 19 nt, Artificial Sequence
  Description of Artificial Sequence: Synthetic oligonucleotide
  Antisense strand to SEQ ID NO: 2221714
caugagaauacauauagcu

SEQ ID NO: 2221716 - RNA, 19 nt, Artificial Sequence
  Description of Artificial Sequence: Synthetic oligonucleotide
  Sense strand starting at position 177 of SEQ ID NO: 1883859
augccuuucuaguuacaga

SEQ ID NO: 2221717 - RNA, 19 nt, Artificial Sequence
  Description of Artificial Sequence: Synthetic oligonucleotide
  Antisense strand to SEQ ID NO: 2221716
ucuguaacuagaaaggcau

SEQ ID NO: 2221718 - RNA, 19 nt, Artificial Sequence
  Description of Artificial Sequence: Synthetic oligonucleotide
  Sense strand starting at position 2419 of SEQ ID NO: 1883859
cacggaaacuucguaacuu

SEQ ID NO: 2221719 - RNA, 19 nt, Artificial Sequence
  Description of Artificial Sequence: Synthetic oligonucleotide
  Antisense strand to SEQ ID NO: 2221718
aaguuacgaaguuuccgug

SEQ ID NO: 2221720 - RNA, 19 nt, Artificial Sequence
  Description of Artificial Sequence: Synthetic oligonucleotide
  Sense strand starting at position 3612 of SEQ ID NO: 1883859
auguauucucauggcacua

SEQ ID NO: 2221721 - RNA, 19 nt, Artificial Sequence
  Description of Artificial Sequence: Synthetic oligonucleotide
  Antisense strand to SEQ ID NO: 2221720
uagugccaugagaauacau

SEQ ID NO: 2221722 - RNA, 19 nt, Artificial Sequence
  Description of Artificial Sequence: Synthetic oligonucleotide
  Sense strand starting at position 3048 of SEQ ID NO: 1883859
agacaaugucuuugcccua

SEQ ID NO: 2221723 - RNA, 19 nt, Artificial Sequence
  Description of Artificial Sequence: Synthetic oligonucleotide
  Antisense strand to SEQ ID NO: 2221722
uagggcaaagacauugucu

SEQ ID NO: 2221724 - RNA, 19 nt, Artificial Sequence
  Description of Artificial Sequence: Synthetic oligonucleotide
  Sense strand starting at position 3047 of SEQ ID NO: 1883859
gagacaaugucuuugcccu

SEQ ID NO: 2221725 - RNA, 19 nt, Artificial Sequence
  Description of Artificial Sequence: Synthetic oligonucleotide
  Antisense strand to SEQ ID NO: 2221724
agggcaaagacauugucuc

SEQ ID NO: 2221726 - RNA, 19 nt, Artificial Sequence
  Description of Artificial Sequence: Synthetic oligonucleotide
  Sense strand starting at position 3857 of SEQ ID NO: 1883859
ucucuagucuaaguuuacu

SEQ ID NO: 2221727 - RNA, 19 nt, Artificial Sequence
  Description of Artificial Sequence: Synthetic oligonucleotide
  Antisense strand to SEQ ID NO: 2221726
aguaaacuuagacuagaga

SEQ ID NO: 2221728 - RNA, 19 nt, Artificial Sequence
  Description of Artificial Sequence: Synthetic oligonucleotide
  Sense strand starting at position 3280 of SEQ ID NO: 1883859
gugaucuggccuuaagcuu

SEQ ID NO: 2221729 - RNA, 19 nt, Artificial Sequence
  Description of Artificial Sequence: Synthetic oligonucleotide
  Antisense strand to SEQ ID NO: 2221728
aagcuuaaggccagaucac

SEQ ID NO: 2221730 - RNA, 19 nt, Artificial Sequence
  Description of Artificial Sequence: Synthetic oligonucleotide
  Sense strand starting at position 3966 of SEQ ID NO: 1883859
uccagcacuugguuacauu

SEQ ID NO: 2221731 - RNA, 19 nt, Artificial Sequence
  Description of Artificial Sequence: Synthetic oligonucleotide
  Antisense strand to SEQ ID NO: 2221730
aauguaaccaagugcugga

SEQ ID NO: 2221732 - RNA, 19 nt, Artificial Sequence
  Description of Artificial Sequence: Synthetic oligonucleotide
  Sense strand starting at position 3365 of SEQ ID NO: 1883859
caguacuguuguuuccaga

SEQ ID NO: 2221733 - RNA, 19 nt, Artificial Sequence
  Description of Artificial Sequence: Synthetic oligonucleotide
  Antisense strand to SEQ ID NO: 2221732
ucuggaaacaacaguacug

SEQ ID NO: 2221734 - RNA, 19 nt, Artificial Sequence
  Description of Artificial Sequence: Synthetic oligonucleotide
  Sense strand starting at position 2917 of SEQ ID NO: 1883859
gaauuaaagguucgcuuuc

SEQ ID NO: 2221735 - RNA, 19 nt, Artificial Sequence
  Description of Artificial Sequence: Synthetic oligonucleotide
  Antisense strand to SEQ ID NO: 2221734
gaaagcgaaccuuuaauuc

SEQ ID NO: 2221736 - RNA, 19 nt, Artificial Sequence
  Description of Artificial Sequence: Synthetic oligonucleotide
  Sense strand starting at position 173 of SEQ ID NO: 1883859
accuaugccuuucuaguua

SEQ ID NO: 2221737 - RNA, 19 nt, Artificial Sequence
  Description of Artificial Sequence: Synthetic oligonucleotide
  Antisense strand to SEQ ID NO: 2221736
uaacuagaaaggcauaggu

SEQ ID NO: 2221738 - RNA, 19 nt, Artificial Sequence
  Description of Artificial Sequence: Synthetic oligonucleotide
  Sense strand starting at position 2919 of SEQ ID NO: 1883859
auuaaagguucgcuuucua

SEQ ID NO: 2221739 - RNA, 19 nt, Artificial Sequence
  Description of Artificial Sequence: Synthetic oligonucleotide
  Antisense strand to SEQ ID NO: 2221738
uagaaagcgaaccuuuaau

SEQ ID NO: 2221740 - RNA, 19 nt, Artificial Sequence
  Description of Artificial Sequence: Synthetic oligonucleotide
  Sense strand starting at position 3381 of SEQ ID NO: 1883859
agaguaugcccaggugugu

SEQ ID NO: 2221741 - RNA, 19 nt, Artificial Sequence
  Description of Artificial Sequence: Synthetic oligonucleotide
  Antisense strand to SEQ ID NO: 2221740
acacaccugggcauacucu

SEQ ID NO: 2221742 - RNA, 19 nt, Artificial Sequence
  Description of Artificial Sequence: Synthetic oligonucleotide
  Sense strand starting at position 3577 of SEQ ID NO: 1883859
gcucccucggcuugaacau

SEQ ID NO: 2221743 - RNA, 19 nt, Artificial Sequence
  Description of Artificial Sequence: Synthetic oligonucleotide
  Antisense strand to SEQ ID NO: 2221742
auguucaagccgagggagc

SEQ ID NO: 2221744 - RNA, 19 nt, Artificial Sequence
  Description of Artificial Sequence: Synthetic oligonucleotide
  Sense strand starting at position 3884 of SEQ ID NO: 1883859
aagugagacuaauaguauu

SEQ ID NO: 2221745 - RNA, 19 nt, Artificial Sequence
  Description of Artificial Sequence: Synthetic oligonucleotide
  Antisense strand to SEQ ID NO: 2221744
aauacuauuagucucacuu

SEQ ID NO: 2221746 - RNA, 19 nt, Artificial Sequence
  Description of Artificial Sequence: Synthetic oligonucleotide
  Sense strand starting at position 2988 of SEQ ID NO: 1883859
guauacagucccugcugua

SEQ ID NO: 2221747 - RNA, 19 nt, Artificial Sequence
  Description of Artificial Sequence: Synthetic oligonucleotide
  Antisense strand to SEQ ID NO: 2221746
uacagcagggacuguauac

SEQ ID NO: 2221748 - RNA, 19 nt, Artificial Sequence
  Description of Artificial Sequence: Synthetic oligonucleotide
  Sense strand starting at position 3824 of SEQ ID NO: 1883859
gcacacuagcugugugauc

SEQ ID NO: 2221749 - RNA, 19 nt, Artificial Sequence
  Description of Artificial Sequence: Synthetic oligonucleotide
  Antisense strand to SEQ ID NO: 2221748
gaucacacagcuagugugc

SEQ ID NO: 2221750 - RNA, 19 nt, Artificial Sequence
  Description of Artificial Sequence: Synthetic oligonucleotide
  Sense strand starting at position 3407 of SEQ ID NO: 1883859
ugagucuccugagacagau

SEQ ID NO: 2221751 - RNA, 19 nt, Artificial Sequence
  Description of Artificial Sequence: Synthetic oligonucleotide
  Antisense strand to SEQ ID NO: 2221750
aucugucucaggagacuca

SEQ ID NO: 2221752 - RNA, 19 nt, Artificial Sequence
  Description of Artificial Sequence: Synthetic oligonucleotide
  Sense strand starting at position 2973 of SEQ ID NO: 1883859
gcauucugcuugccaguau

SEQ ID NO: 2221753 - RNA, 19 nt, Artificial Sequence
  Description of Artificial Sequence: Synthetic oligonucleotide
  Antisense strand to SEQ ID NO: 2221752
auacuggcaagcagaaugc

SEQ ID NO: 2221754 - RNA, 19 nt, Artificial Sequence
  Description of Artificial Sequence: Synthetic oligonucleotide
  Sense strand starting at position 2857 of SEQ ID NO: 1883860
cuaaguaacuuacugggaa

SEQ ID NO: 2221755 - RNA, 19 nt, Artificial Sequence
  Description of Artificial Sequence: Synthetic oligonucleotide
  Antisense strand to SEQ ID NO: 2221754
uucccaguaaguuacuuag

SEQ ID NO: 2221756 - RNA, 19 nt, Artificial Sequence
  Description of Artificial Sequence: Synthetic oligonucleotide
  Sense strand starting at position 2662 of SEQ ID NO: 1883860
aggagacuuuacuuugacu

SEQ ID NO: 2221757 - RNA, 19 nt, Artificial Sequence
  Description of Artificial Sequence: Synthetic oligonucleotide
  Antisense strand to SEQ ID NO: 2221756
agucaaaguaaagucuccu

SEQ ID NO: 2221758 - RNA, 19 nt, Artificial Sequence
  Description of Artificial Sequence: Synthetic oligonucleotide
  Sense strand starting at position 147 of SEQ ID NO: 1883860
augauuguuguuuaggaga

SEQ ID NO: 2221759 - RNA, 19 nt, Artificial Sequence
  Description of Artificial Sequence: Synthetic oligonucleotide
  Antisense strand to SEQ ID NO: 2221758
ucuccuaaacaacaaucau

SEQ ID NO: 2221760 - RNA, 19 nt, Artificial Sequence
  Description of Artificial Sequence: Synthetic oligonucleotide
  Sense strand starting at position 3403 of SEQ ID NO: 1883860
gaaugcuggucaguuauuu

SEQ ID NO: 2221761 - RNA, 19 nt, Artificial Sequence
  Description of Artificial Sequence: Synthetic oligonucleotide
  Antisense strand to SEQ ID NO: 2221760
aaauaacugaccagcauuc

SEQ ID NO: 2221762 - RNA, 19 nt, Artificial Sequence
  Description of Artificial Sequence: Synthetic oligonucleotide
  Sense strand starting at position 3604 of SEQ ID NO: 1883860
gggauucuccaauguaaag

SEQ ID NO: 2221763 - RNA, 19 nt, Artificial Sequence
  Description of Artificial Sequence: Synthetic oligonucleotide
  Antisense strand to SEQ ID NO: 2221762
cuuuacauuggagaauccc

SEQ ID NO: 2221764 - RNA, 19 nt, Artificial Sequence
  Description of Artificial Sequence: Synthetic oligonucleotide
  Sense strand starting at position 1341 of SEQ ID NO: 1883860
ggaccugugacuuggacaa

SEQ ID NO: 2221765 - RNA, 19 nt, Artificial Sequence
  Description of Artificial Sequence: Synthetic oligonucleotide
  Antisense strand to SEQ ID NO: 2221764
uuguccaagucacaggucc

SEQ ID NO: 2221766 - RNA, 19 nt, Artificial Sequence
  Description of Artificial Sequence: Synthetic oligonucleotide
  Sense strand starting at position 1318 of SEQ ID NO: 1883860
gaaguuaggccaugaagag

SEQ ID NO: 2221767 - RNA, 19 nt, Artificial Sequence
  Description of Artificial Sequence: Synthetic oligonucleotide
  Antisense strand to SEQ ID NO: 2221766
cucuucauggccuaacuuc

SEQ ID NO: 2221768 - RNA, 19 nt, Artificial Sequence
  Description of Artificial Sequence: Synthetic oligonucleotide
  Sense strand starting at position 2908 of SEQ ID NO: 1883860
uuguaagcacuacaugaua

SEQ ID NO: 2221769 - RNA, 19 nt, Artificial Sequence
  Description of Artificial Sequence: Synthetic oligonucleotide
  Antisense strand to SEQ ID NO: 2221768
uaucauguagugcuuacaa

SEQ ID NO: 2221770 - RNA, 19 nt, Artificial Sequence
  Description of Artificial Sequence: Synthetic oligonucleotide
  Sense strand starting at position 3532 of SEQ ID NO: 1883860
augagcauagcugauauau

SEQ ID NO: 2221771 - RNA, 19 nt, Artificial Sequence
  Description of Artificial Sequence: Synthetic oligonucleotide
  Antisense strand to SEQ ID NO: 2221770
auauaucagcuaugcucau

SEQ ID NO: 2221772 - RNA, 19 nt, Artificial Sequence
  Description of Artificial Sequence: Synthetic oligonucleotide
  Sense strand starting at position 2920 of SEQ ID NO: 1883860
caugauaaaguuuguaaag

SEQ ID NO: 2221773 - RNA, 19 nt, Artificial Sequence
  Description of Artificial Sequence: Synthetic oligonucleotide
  Antisense strand to SEQ ID NO: 2221772
cuuuacaaacuuuaucaug

SEQ ID NO: 2221774 - RNA, 19 nt, Artificial Sequence
  Description of Artificial Sequence: Synthetic oligonucleotide
  Sense strand starting at position 3576 of SEQ ID NO: 1883860
cuugaucacuugguagaga

SEQ ID NO: 2221775 - RNA, 19 nt, Artificial Sequence
  Description of Artificial Sequence: Synthetic oligonucleotide
  Antisense strand to SEQ ID NO: 2221774
ucucuaccaagugaucaag

SEQ ID NO: 2221776 - RNA, 19 nt, Artificial Sequence
  Description of Artificial Sequence: Synthetic oligonucleotide
  Sense strand starting at position 3202 of SEQ ID NO: 1883860
cugaauuacuaacuuguga

SEQ ID NO: 2221777 - RNA, 19 nt, Artificial Sequence
  Description of Artificial Sequence: Synthetic oligonucleotide
  Antisense strand to SEQ ID NO: 2221776
ucacaaguuaguaauucag

SEQ ID NO: 2221778 - RNA, 19 nt, Artificial Sequence
  Description of Artificial Sequence: Synthetic oligonucleotide
  Sense strand starting at position 1247 of SEQ ID NO: 1883860
gccauuagugaauacauuc

SEQ ID NO: 2221779 - RNA, 19 nt, Artificial Sequence
  Description of Artificial Sequence: Synthetic oligonucleotide
  Antisense strand to SEQ ID NO: 2221778
gaauguauucacuaauggc

SEQ ID NO: 2221780 - RNA, 19 nt, Artificial Sequence
  Description of Artificial Sequence: Synthetic oligonucleotide
  Sense strand starting at position 2906 of SEQ ID NO: 1883860
aguuguaagcacuacauga

SEQ ID NO: 2221781 - RNA, 19 nt, Artificial Sequence
  Description of Artificial Sequence: Synthetic oligonucleotide
  Antisense strand to SEQ ID NO: 2221780
ucauguagugcuuacaacu

SEQ ID NO: 2221782 - RNA, 19 nt, Artificial Sequence
  Description of Artificial Sequence: Synthetic oligonucleotide
  Sense strand starting at position 152 of SEQ ID NO: 1883860
uguuguuuaggagagguau

SEQ ID NO: 2221783 - RNA, 19 nt, Artificial Sequence
  Description of Artificial Sequence: Synthetic oligonucleotide
  Antisense strand to SEQ ID NO: 2221782
auaccucuccuaaacaaca

SEQ ID NO: 2221784 - RNA, 19 nt, Artificial Sequence
  Description of Artificial Sequence: Synthetic oligonucleotide
  Sense strand starting at position 3947 of SEQ ID NO: 1883860
cagcuuugaucauugggag

SEQ ID NO: 2221785 - RNA, 19 nt, Artificial Sequence
  Description of Artificial Sequence: Synthetic oligonucleotide
  Antisense strand to SEQ ID NO: 2221784
cucccaaugaucaaagcug

SEQ ID NO: 2221786 - RNA, 19 nt, Artificial Sequence
  Description of Artificial Sequence: Synthetic oligonucleotide
  Sense strand starting at position 3453 of SEQ ID NO: 1883860
guguucucucaugauuaga

SEQ ID NO: 2221787 - RNA, 19 nt, Artificial Sequence
  Description of Artificial Sequence: Synthetic oligonucleotide
  Antisense strand to SEQ ID NO: 2221786
ucuaaucaugagagaacac

SEQ ID NO: 2221788 - RNA, 19 nt, Artificial Sequence
  Description of Artificial Sequence: Synthetic oligonucleotide
  Sense strand starting at position 1090 of SEQ ID NO: 1883860
uagauuuggugcuuuguuu

SEQ ID NO: 2221789 - RNA, 19 nt, Artificial Sequence
  Description of Artificial Sequence: Synthetic oligonucleotide
  Antisense strand to SEQ ID NO: 2221788
aaacaaagcaccaaaucua

SEQ ID NO: 2221790 - RNA, 19 nt, Artificial Sequence
  Description of Artificial Sequence: Synthetic oligonucleotide
  Sense strand starting at position 3401 of SEQ ID NO: 1883860
aagaaugcuggucaguuau

SEQ ID NO: 2221791 - RNA, 19 nt, Artificial Sequence
  Description of Artificial Sequence: Synthetic oligonucleotide
  Antisense strand to SEQ ID NO: 2221790
auaacugaccagcauucuu

SEQ ID NO: 2221792 - RNA, 19 nt, Artificial Sequence
  Description of Artificial Sequence: Synthetic oligonucleotide
  Sense strand starting at position 3575 of SEQ ID NO: 1883860
ucuugaucacuugguagag

SEQ ID NO: 2221793 - RNA, 19 nt, Artificial Sequence
  Description of Artificial Sequence: Synthetic oligonucleotide
  Antisense strand to SEQ ID NO: 2221792
cucuaccaagugaucaaga

SEQ ID NO: 2221794 - RNA, 19 nt, Artificial Sequence
  Description of Artificial Sequence: Synthetic oligonucleotide
  Sense strand starting at position 2697 of SEQ ID NO: 1883860
guaucucuuccauaaguca

SEQ ID NO: 2221795 - RNA, 19 nt, Artificial Sequence
  Description of Artificial Sequence: Synthetic oligonucleotide
  Antisense strand to SEQ ID NO: 2221794
ugacuuauggaagagauac

SEQ ID NO: 2221796 - RNA, 19 nt, Artificial Sequence
  Description of Artificial Sequence: Synthetic oligonucleotide
  Sense strand starting at position 146 of SEQ ID NO: 1883860
gaugauuguuguuuaggag

SEQ ID NO: 2221797 - RNA, 19 nt, Artificial Sequence
  Description of Artificial Sequence: Synthetic oligonucleotide
  Antisense strand to SEQ ID NO: 2221796
cuccuaaacaacaaucauc

SEQ ID NO: 2221798 - RNA, 19 nt, Artificial Sequence
  Description of Artificial Sequence: Synthetic oligonucleotide
  Sense strand starting at position 819 of SEQ ID NO: 1883860
cuuagaaguccagguccaa

SEQ ID NO: 2221799 - RNA, 19 nt, Artificial Sequence
  Description of Artificial Sequence: Synthetic oligonucleotide
  Antisense strand to SEQ ID NO: 2221798
uuggaccuggacuucuaag

SEQ ID NO: 2221800 - RNA, 19 nt, Artificial Sequence
  Description of Artificial Sequence: Synthetic oligonucleotide
  Sense strand starting at position 1399 of SEQ ID NO: 1883860
gcuggucuaacuggaauaa

SEQ ID NO: 2221801 - RNA, 19 nt, Artificial Sequence
  Description of Artificial Sequence: Synthetic oligonucleotide
  Antisense strand to SEQ ID NO: 2221800
uuauuccaguuagaccagc

SEQ ID NO: 2221802 - RNA, 19 nt, Artificial Sequence
  Description of Artificial Sequence: Synthetic oligonucleotide
  Sense strand starting at position 3530 of SEQ ID NO: 1883860
auaugagcauagcugauau

SEQ ID NO: 2221803 - RNA, 19 nt, Artificial Sequence
  Description of Artificial Sequence: Synthetic oligonucleotide
  Antisense strand to SEQ ID NO: 2221802
auaucagcuaugcucauau

SEQ ID NO: 2221804 - RNA, 19 nt, Artificial Sequence
  Description of Artificial Sequence: Synthetic oligonucleotide
  Sense strand starting at position 145 of SEQ ID NO: 1883860
ugaugauuguuguuuagga

SEQ ID NO: 2221805 - RNA, 19 nt, Artificial Sequence
  Description of Artificial Sequence: Synthetic oligonucleotide
  Antisense strand to SEQ ID NO: 2221804
uccuaaacaacaaucauca

SEQ ID NO: 2221806 - RNA, 19 nt, Artificial Sequence
  Description of Artificial Sequence: Synthetic oligonucleotide
  Sense strand starting at position 2896 of SEQ ID NO: 1883860
aucucauauuaguuguaag

SEQ ID NO: 2221807 - RNA, 19 nt, Artificial Sequence
  Description of Artificial Sequence: Synthetic oligonucleotide
  Antisense strand to SEQ ID NO: 2221806
cuuacaacuaauaugagau

SEQ ID NO: 2221808 - RNA, 19 nt, Artificial Sequence
  Description of Artificial Sequence: Synthetic oligonucleotide
  Sense strand starting at position 2686 of SEQ ID NO: 1883860
cuccaaauucgguaucucu

SEQ ID NO: 2221809 - RNA, 19 nt, Artificial Sequence
  Description of Artificial Sequence: Synthetic oligonucleotide
  Antisense strand to SEQ ID NO: 2221808
agagauaccgaauuuggag

SEQ ID NO: 2221810 - RNA, 19 nt, Artificial Sequence
  Description of Artificial Sequence: Synthetic oligonucleotide
  Sense strand starting at position 3683 of SEQ ID NO: 1883860
ccuguuucuccucagacuu

SEQ ID NO: 2221811 - RNA, 19 nt, Artificial Sequence
  Description of Artificial Sequence: Synthetic oligonucleotide
  Antisense strand to SEQ ID NO: 2221810
aagucugaggagaaacagg

SEQ ID NO: 2221812 - RNA, 19 nt, Artificial Sequence
  Description of Artificial Sequence: Synthetic oligonucleotide
  Sense strand starting at position 1075 of SEQ ID NO: 1883860
auccaaauugcuugguaga

SEQ ID NO: 2221813 - RNA, 19 nt, Artificial Sequence
  Description of Artificial Sequence: Synthetic oligonucleotide
  Antisense strand to SEQ ID NO: 2221812
ucuaccaagcaauuuggau

SEQ ID NO: 2221814 - RNA, 19 nt, Artificial Sequence
  Description of Artificial Sequence: Synthetic oligonucleotide
  Sense strand starting at position 3846 of SEQ ID NO: 1883860
guuuauuuguauuccguua

SEQ ID NO: 2221815 - RNA, 19 nt, Artificial Sequence
  Description of Artificial Sequence: Synthetic oligonucleotide
  Antisense strand to SEQ ID NO: 2221814
uaacggaauacaaauaaac

SEQ ID NO: 2221816 - RNA, 19 nt, Artificial Sequence
  Description of Artificial Sequence: Synthetic oligonucleotide
  Sense strand starting at position 831 of SEQ ID NO: 1883860
gguccaaauuuagaaucuu

SEQ ID NO: 2221817 - RNA, 19 nt, Artificial Sequence
  Description of Artificial Sequence: Synthetic oligonucleotide
  Antisense strand to SEQ ID NO: 2221816
aagauucuaaauuuggacc

SEQ ID NO: 2221818 - RNA, 19 nt, Artificial Sequence
  Description of Artificial Sequence: Synthetic oligonucleotide
  Sense strand starting at position 1207 of SEQ ID NO: 1883860
uuaacugugguuugaacau

SEQ ID NO: 2221819 - RNA, 19 nt, Artificial Sequence
  Description of Artificial Sequence: Synthetic oligonucleotide
  Antisense strand to SEQ ID NO: 2221818
auguucaaaccacaguuaa

SEQ ID NO: 2221820 - RNA, 19 nt, Artificial Sequence
  Description of Artificial Sequence: Synthetic oligonucleotide
  Sense strand starting at position 3754 of SEQ ID NO: 1883860
ugacuaugguguucuaaug

SEQ ID NO: 2221821 - RNA, 19 nt, Artificial Sequence
  Description of Artificial Sequence: Synthetic oligonucleotide
  Antisense strand to SEQ ID NO: 2221820
cauuagaacaccauaguca

SEQ ID NO: 2221822 - RNA, 19 nt, Artificial Sequence
  Description of Artificial Sequence: Synthetic oligonucleotide
  Sense strand starting at position 3400 of SEQ ID NO: 1883860
gaagaaugcuggucaguua

SEQ ID NO: 2221823 - RNA, 19 nt, Artificial Sequence
  Description of Artificial Sequence: Synthetic oligonucleotide
  Antisense strand to SEQ ID NO: 2221822
uaacugaccagcauucuuc

SEQ ID NO: 2221824 - RNA, 19 nt, Artificial Sequence
  Description of Artificial Sequence: Synthetic oligonucleotide
  Sense strand starting at position 3032 of SEQ ID NO: 1883860
cgugaaacauccucuuaua

SEQ ID NO: 2221825 - RNA, 19 nt, Artificial Sequence
  Description of Artificial Sequence: Synthetic oligonucleotide
  Antisense strand to SEQ ID NO: 2221824
uauaagaggauguuucacg

SEQ ID NO: 2221826 - RNA, 19 nt, Artificial Sequence
  Description of Artificial Sequence: Synthetic oligonucleotide
  Sense strand starting at position 2297 of SEQ ID NO: 1883860
uuuauuggaagcugguaua

SEQ ID NO: 2221827 - RNA, 19 nt, Artificial Sequence
  Description of Artificial Sequence: Synthetic oligonucleotide
  Antisense strand to SEQ ID NO: 2221826
uauaccagcuuccaauaaa

SEQ ID NO: 2221828 - RNA, 19 nt, Artificial Sequence
  Description of Artificial Sequence: Synthetic oligonucleotide
  Sense strand starting at position 2291 of SEQ ID NO: 1883860
ggaagcuuuauuggaagcu

SEQ ID NO: 2221829 - RNA, 19 nt, Artificial Sequence
  Description of Artificial Sequence: Synthetic oligonucleotide
  Antisense strand to SEQ ID NO: 2221828
agcuuccaauaaagcuucc

SEQ ID NO: 2221830 - RNA, 19 nt, Artificial Sequence
  Description of Artificial Sequence: Synthetic oligonucleotide
  Sense strand starting at position 1077 of SEQ ID NO: 1883860
ccaaauugcuugguagauu

SEQ ID NO: 2221831 - RNA, 19 nt, Artificial Sequence
  Description of Artificial Sequence: Synthetic oligonucleotide
  Antisense strand to SEQ ID NO: 2221830
aaucuaccaagcaauuugg

SEQ ID NO: 2221832 - RNA, 19 nt, Artificial Sequence
  Description of Artificial Sequence: Synthetic oligonucleotide
  Sense strand starting at position 1205 of SEQ ID NO: 1883860
ccuuaacugugguuugaac

SEQ ID NO: 2221833 - RNA, 19 nt, Artificial Sequence
  Description of Artificial Sequence: Synthetic oligonucleotide
  Antisense strand to SEQ ID NO: 2221832
guucaaaccacaguuaagg

SEQ ID NO: 2221834 - RNA, 19 nt, Artificial Sequence
  Description of Artificial Sequence: Synthetic oligonucleotide
  Sense strand starting at position 410 of SEQ ID NO: 1883861
acagaauacugaucaguuu

SEQ ID NO: 2221835 - RNA, 19 nt, Artificial Sequence
  Description of Artificial Sequence: Synthetic oligonucleotide
  Antisense strand to SEQ ID NO: 2221834
aaacugaucaguauucugu

SEQ ID NO: 2221836 - RNA, 19 nt, Artificial Sequence
  Description of Artificial Sequence: Synthetic oligonucleotide
  Sense strand starting at position 2116 of SEQ ID NO: 1883861
gugaauagagaugguuuaa

SEQ ID NO: 2221837 - RNA, 19 nt, Artificial Sequence
  Description of Artificial Sequence: Synthetic oligonucleotide
  Antisense strand to SEQ ID NO: 2221836
uuaaaccaucucuauucac

SEQ ID NO: 2221838 - RNA, 19 nt, Artificial Sequence
  Description of Artificial Sequence: Synthetic oligonucleotide
  Sense strand starting at position 3787 of SEQ ID NO: 1883861
acaacaauucuuugaagug

SEQ ID NO: 2221839 - RNA, 19 nt, Artificial Sequence
  Description of Artificial Sequence: Synthetic oligonucleotide
  Antisense strand to SEQ ID NO: 2221838
cacuucaaagaauuguugu

SEQ ID NO: 2221840 - RNA, 19 nt, Artificial Sequence
  Description of Artificial Sequence: Synthetic oligonucleotide
  Sense strand starting at position 1380 of SEQ ID NO: 1883861
ugauuaauuggucaugggu

SEQ ID NO: 2221841 - RNA, 19 nt, Artificial Sequence
  Description of Artificial Sequence: Synthetic oligonucleotide
  Antisense strand to SEQ ID NO: 2221840
acccaugaccaauuaauca

SEQ ID NO: 2221842 - RNA, 19 nt, Artificial Sequence
  Description of Artificial Sequence: Synthetic oligonucleotide
  Sense strand starting at position 3407 of SEQ ID NO: 1883861
gaaucagaucuguggaccu

SEQ ID NO: 2221843 - RNA, 19 nt, Artificial Sequence
  Description of Artificial Sequence: Synthetic oligonucleotide
  Antisense strand to SEQ ID NO: 2221842
agguccacagaucugauuc

SEQ ID NO: 2221844 - RNA, 19 nt, Artificial Sequence
  Description of Artificial Sequence: Synthetic oligonucleotide
  Sense strand starting at position 2409 of SEQ ID NO: 1883861
gccgguuguccuuccggau

SEQ ID NO: 2221845 - RNA, 19 nt, Artificial Sequence
  Description of Artificial Sequence: Synthetic oligonucleotide
  Antisense strand to SEQ ID NO: 2221844
auccggaaggacaaccggc

SEQ ID NO: 2221846 - RNA, 19 nt, Artificial Sequence
  Description of Artificial Sequence: Synthetic oligonucleotide
  Sense strand starting at position 2115 of SEQ ID NO: 1883861
ugugaauagagaugguuua

SEQ ID NO: 2221847 - RNA, 19 nt, Artificial Sequence
  Description of Artificial Sequence: Synthetic oligonucleotide
  Antisense strand to SEQ ID NO: 2221846
uaaaccaucucuauucaca

SEQ ID NO: 2221848 - RNA, 19 nt, Artificial Sequence
  Description of Artificial Sequence: Synthetic oligonucleotide
  Sense strand starting at position 2109 of SEQ ID NO: 1883861
gcagucugugaauagagau

SEQ ID NO: 2221849 - RNA, 19 nt, Artificial Sequence
  Description of Artificial Sequence: Synthetic oligonucleotide
  Antisense strand to SEQ ID NO: 2221848
aucucuauucacagacugc

SEQ ID NO: 2221850 - RNA, 19 nt, Artificial Sequence
  Description of Artificial Sequence: Synthetic oligonucleotide
  Sense strand starting at position 1486 of SEQ ID NO: 1883861
gcucuuugacgauaauaua

SEQ ID NO: 2221851 - RNA, 19 nt, Artificial Sequence
  Description of Artificial Sequence: Synthetic oligonucleotide
  Antisense strand to SEQ ID NO: 2221850
uauauuaucgucaaagagc

SEQ ID NO: 2221852 - RNA, 19 nt, Artificial Sequence
  Description of Artificial Sequence: Synthetic oligonucleotide
  Sense strand starting at position 1145 of SEQ ID NO: 1883861
caaagaagagcaugucauu

SEQ ID NO: 2221853 - RNA, 19 nt, Artificial Sequence
  Description of Artificial Sequence: Synthetic oligonucleotide
  Antisense strand to SEQ ID NO: 2221852
aaugacaugcucuucuuug

SEQ ID NO: 2221854 - RNA, 19 nt, Artificial Sequence
  Description of Artificial Sequence: Synthetic oligonucleotide
  Sense strand starting at position 1171 of SEQ ID NO: 1883861
ucuguuaaacaguaaaugu

SEQ ID NO: 2221855 - RNA, 19 nt, Artificial Sequence
  Description of Artificial Sequence: Synthetic oligonucleotide
  Antisense strand to SEQ ID NO: 2221854
acauuuacuguuuaacaga

SEQ ID NO: 2221856 - RNA, 19 nt, Artificial Sequence
  Description of Artificial Sequence: Synthetic oligonucleotide
  Sense strand starting at position 1383 of SEQ ID NO: 1883861
uuaauuggucauggguaaa

SEQ ID NO: 2221857 - RNA, 19 nt, Artificial Sequence
  Description of Artificial Sequence: Synthetic oligonucleotide
  Antisense strand to SEQ ID NO: 2221856
uuuacccaugaccaauuaa

SEQ ID NO: 2221858 - RNA, 19 nt, Artificial Sequence
  Description of Artificial Sequence: Synthetic oligonucleotide
  Sense strand starting at position 2437 of SEQ ID NO: 1883861
uuccgauugggaugacacu

SEQ ID NO: 2221859 - RNA, 19 nt, Artificial Sequence
  Description of Artificial Sequence: Synthetic oligonucleotide
  Antisense strand to SEQ ID NO: 2221858
agugucaucccaaucggaa

SEQ ID NO: 2221860 - RNA, 19 nt, Artificial Sequence
  Description of Artificial Sequence: Synthetic oligonucleotide
  Sense strand starting at position 2359 of SEQ ID NO: 1883861
guuacaaugugaccaauua

SEQ ID NO: 2221861 - RNA, 19 nt, Artificial Sequence
  Description of Artificial Sequence: Synthetic oligonucleotide
  Antisense strand to SEQ ID NO: 2221860
uaauuggucacauuguaac

SEQ ID NO: 2221862 - RNA, 19 nt, Artificial Sequence
  Description of Artificial Sequence: Synthetic oligonucleotide
  Sense strand starting at position 3257 of SEQ ID NO: 1883861
cuguaucguggacauugaa

SEQ ID NO: 2221863 - RNA, 19 nt, Artificial Sequence
  Description of Artificial Sequence: Synthetic oligonucleotide
  Antisense strand to SEQ ID NO: 2221862
uucaauguccacgauacag

SEQ ID NO: 2221864 - RNA, 19 nt, Artificial Sequence
  Description of Artificial Sequence: Synthetic oligonucleotide
  Sense strand starting at position 576 of SEQ ID NO: 1883861
gaauaaagcugugugacaa

SEQ ID NO: 2221865 - RNA, 19 nt, Artificial Sequence
  Description of Artificial Sequence: Synthetic oligonucleotide
  Antisense strand to SEQ ID NO: 2221864
uugucacacagcuuuauuc

SEQ ID NO: 2221866 - RNA, 19 nt, Artificial Sequence
  Description of Artificial Sequence: Synthetic oligonucleotide
  Sense strand starting at position 3260 of SEQ ID NO: 1883861
uaucguggacauugaaauu

SEQ ID NO: 2221867 - RNA, 19 nt, Artificial Sequence
  Description of Artificial Sequence: Synthetic oligonucleotide
  Antisense strand to SEQ ID NO: 2221866
aauuucaauguccacgaua

SEQ ID NO: 2221868 - RNA, 19 nt, Artificial Sequence
  Description of Artificial Sequence: Synthetic oligonucleotide
  Sense strand starting at position 3689 of SEQ ID NO: 1883861
uuuccucuuccugagaguu

SEQ ID NO: 2221869 - RNA, 19 nt, Artificial Sequence
  Description of Artificial Sequence: Synthetic oligonucleotide
  Antisense strand to SEQ ID NO: 2221868
aacucucaggaagaggaaa

SEQ ID NO: 2221870 - RNA, 19 nt, Artificial Sequence
  Description of Artificial Sequence: Synthetic oligonucleotide
  Sense strand starting at position 1188 of SEQ ID NO: 1883861
gugauacuauucuuuauca

SEQ ID NO: 2221871 - RNA, 19 nt, Artificial Sequence
  Description of Artificial Sequence: Synthetic oligonucleotide
  Antisense strand to SEQ ID NO: 2221870
ugauaaagaauaguaucac

SEQ ID NO: 2221872 - RNA, 19 nt, Artificial Sequence
  Description of Artificial Sequence: Synthetic oligonucleotide
  Sense strand starting at position 1479 of SEQ ID NO: 1883861
acaauaagcucuuugacga

SEQ ID NO: 2221873 - RNA, 19 nt, Artificial Sequence
  Description of Artificial Sequence: Synthetic oligonucleotide
  Antisense strand to SEQ ID NO: 2221872
ucgucaaagagcuuauugu

SEQ ID NO: 2221874 - RNA, 19 nt, Artificial Sequence
  Description of Artificial Sequence: Synthetic oligonucleotide
  Sense strand starting at position 3750 of SEQ ID NO: 1883861
auaagagugcuguaacagu

SEQ ID NO: 2221875 - RNA, 19 nt, Artificial Sequence
  Description of Artificial Sequence: Synthetic oligonucleotide
  Antisense strand to SEQ ID NO: 2221874
acuguuacagcacucuuau

SEQ ID NO: 2221876 - RNA, 19 nt, Artificial Sequence
  Description of Artificial Sequence: Synthetic oligonucleotide
  Sense strand starting at position 2085 of SEQ ID NO: 1883861
uggaauuuaugugauuaca

SEQ ID NO: 2221877 - RNA, 19 nt, Artificial Sequence
  Description of Artificial Sequence: Synthetic oligonucleotide
  Antisense strand to SEQ ID NO: 2221876
uguaaucacauaaauucca

SEQ ID NO: 2221878 - RNA, 19 nt, Artificial Sequence
  Description of Artificial Sequence: Synthetic oligonucleotide
  Sense strand starting at position 3486 of SEQ ID NO: 1883861
auccuacuguggucugaga

SEQ ID NO: 2221879 - RNA, 19 nt, Artificial Sequence
  Description of Artificial Sequence: Synthetic oligonucleotide
  Antisense strand to SEQ ID NO: 2221878
ucucagaccacaguaggau

SEQ ID NO: 2221880 - RNA, 19 nt, Artificial Sequence
  Description of Artificial Sequence: Synthetic oligonucleotide
  Sense strand starting at position 3598 of SEQ ID NO: 1883861
aaacaagaggccuguugua

SEQ ID NO: 2221881 - RNA, 19 nt, Artificial Sequence
  Description of Artificial Sequence: Synthetic oligonucleotide
  Antisense strand to SEQ ID NO: 2221880
uacaacaggccucuuguuu

SEQ ID NO: 2221882 - RNA, 19 nt, Artificial Sequence
  Description of Artificial Sequence: Synthetic oligonucleotide
  Sense strand starting at position 3892 of SEQ ID NO: 1883861
agugucagaagcugacaau

SEQ ID NO: 2221883 - RNA, 19 nt, Artificial Sequence
  Description of Artificial Sequence: Synthetic oligonucleotide
  Antisense strand to SEQ ID NO: 2221882
auugucagcuucugacacu

SEQ ID NO: 2221884 - RNA, 19 nt, Artificial Sequence
  Description of Artificial Sequence: Synthetic oligonucleotide
  Sense strand starting at position 575 of SEQ ID NO: 1883861
ugaauaaagcugugugaca

SEQ ID NO: 2221885 - RNA, 19 nt, Artificial Sequence
  Description of Artificial Sequence: Synthetic oligonucleotide
  Antisense strand to SEQ ID NO: 2221884
ugucacacagcuuuauuca

SEQ ID NO: 2221886 - RNA, 19 nt, Artificial Sequence
  Description of Artificial Sequence: Synthetic oligonucleotide
  Sense strand starting at position 1644 of SEQ ID NO: 1883861
agaaacuacuuggaggaaa

SEQ ID NO: 2221887 - RNA, 19 nt, Artificial Sequence
  Description of Artificial Sequence: Synthetic oligonucleotide
  Antisense strand to SEQ ID NO: 2221886
uuuccuccaaguaguuucu

SEQ ID NO: 2221888 - RNA, 19 nt, Artificial Sequence
  Description of Artificial Sequence: Synthetic oligonucleotide
  Sense strand starting at position 3488 of SEQ ID NO: 1883861
ccuacuguggucugagaua

SEQ ID NO: 2221889 - RNA, 19 nt, Artificial Sequence
  Description of Artificial Sequence: Synthetic oligonucleotide
  Antisense strand to SEQ ID NO: 2221888
uaucucagaccacaguagg

SEQ ID NO: 2221890 - RNA, 19 nt, Artificial Sequence
  Description of Artificial Sequence: Synthetic oligonucleotide
  Sense strand starting at position 2529 of SEQ ID NO: 1883861
gugggcuggccuggagaaa

SEQ ID NO: 2221891 - RNA, 19 nt, Artificial Sequence
  Description of Artificial Sequence: Synthetic oligonucleotide
  Antisense strand to SEQ ID NO: 2221890
uuucuccaggccagcccac

SEQ ID NO: 2221892 - RNA, 19 nt, Artificial Sequence
  Description of Artificial Sequence: Synthetic oligonucleotide
  Sense strand starting at position 560 of SEQ ID NO: 1883861
aagcucuucggucagugaa

SEQ ID NO: 2221893 - RNA, 19 nt, Artificial Sequence
  Description of Artificial Sequence: Synthetic oligonucleotide
  Antisense strand to SEQ ID NO: 2221892
uucacugaccgaagagcuu

SEQ ID NO: 2221894 - RNA, 19 nt, Artificial Sequence
  Description of Artificial Sequence: Synthetic oligonucleotide
  Sense strand starting at position 573 of SEQ ID NO: 1883861
agugaauaaagcuguguga

SEQ ID NO: 2221895 - RNA, 19 nt, Artificial Sequence
  Description of Artificial Sequence: Synthetic oligonucleotide
  Antisense strand to SEQ ID NO: 2221894
ucacacagcuuuauucacu

SEQ ID NO: 2221896 - RNA, 19 nt, Artificial Sequence
  Description of Artificial Sequence: Synthetic oligonucleotide
  Sense strand starting at position 2127 of SEQ ID NO: 1883861
ugguuuaacuuuccuguaa

SEQ ID NO: 2221897 - RNA, 19 nt, Artificial Sequence
  Description of Artificial Sequence: Synthetic oligonucleotide
  Antisense strand to SEQ ID NO: 2221896
uuacaggaaaguuaaacca

SEQ ID NO: 2221898 - RNA, 19 nt, Artificial Sequence
  Description of Artificial Sequence: Synthetic oligonucleotide
  Sense strand starting at position 2128 of SEQ ID NO: 1883861
gguuuaacuuuccuguaau

SEQ ID NO: 2221899 - RNA, 19 nt, Artificial Sequence
  Description of Artificial Sequence: Synthetic oligonucleotide
  Antisense strand to SEQ ID NO: 2221898
auuacaggaaaguuaaacc

SEQ ID NO: 2221900 - RNA, 19 nt, Artificial Sequence
  Description of Artificial Sequence: Synthetic oligonucleotide
  Sense strand starting at position 3699 of SEQ ID NO: 1883861
cugagaguuucgcuauaaa

SEQ ID NO: 2221901 - RNA, 19 nt, Artificial Sequence
  Description of Artificial Sequence: Synthetic oligonucleotide
  Antisense strand to SEQ ID NO: 2221900
uuuauagcgaaacucucag

SEQ ID NO: 2221902 - RNA, 19 nt, Artificial Sequence
  Description of Artificial Sequence: Synthetic oligonucleotide
  Sense strand starting at position 2821 of SEQ ID NO: 1883861
gccauacaccaagguguau

SEQ ID NO: 2221903 - RNA, 19 nt, Artificial Sequence
  Description of Artificial Sequence: Synthetic oligonucleotide
  Antisense strand to SEQ ID NO: 2221902
auacaccuugguguauggc

SEQ ID NO: 2221904 - RNA, 19 nt, Artificial Sequence
  Description of Artificial Sequence: Synthetic oligonucleotide
  Sense strand starting at position 2575 of SEQ ID NO: 1883861
gcauguaguccauauagca

SEQ ID NO: 2221905 - RNA, 19 nt, Artificial Sequence
  Description of Artificial Sequence: Synthetic oligonucleotide
  Antisense strand to SEQ ID NO: 2221904
ugcuauauggacuacaugc

SEQ ID NO: 2221906 - RNA, 19 nt, Artificial Sequence
  Description of Artificial Sequence: Synthetic oligonucleotide
  Sense strand starting at position 611 of SEQ ID NO: 1883861
ucauuagcaucacuuaugu

SEQ ID NO: 2221907 - RNA, 19 nt, Artificial Sequence
  Description of Artificial Sequence: Synthetic oligonucleotide
  Antisense strand to SEQ ID NO: 2221906
acauaagugaugcuaauga

SEQ ID NO: 2221908 - RNA, 19 nt, Artificial Sequence
  Description of Artificial Sequence: Synthetic oligonucleotide
  Sense strand starting at position 563 of SEQ ID NO: 1883861
cucuucggucagugaauaa

SEQ ID NO: 2221909 - RNA, 19 nt, Artificial Sequence
  Description of Artificial Sequence: Synthetic oligonucleotide
  Antisense strand to SEQ ID NO: 2221908
uuauucacugaccgaagag

SEQ ID NO: 2221910 - RNA, 19 nt, Artificial Sequence
  Description of Artificial Sequence: Synthetic oligonucleotide
  Sense strand starting at position 3797 of SEQ ID NO: 1883861
uuugaagugcuuuauuguu

SEQ ID NO: 2221911 - RNA, 19 nt, Artificial Sequence
  Description of Artificial Sequence: Synthetic oligonucleotide
  Antisense strand to SEQ ID NO: 2221910
aacaauaaagcacuucaaa

SEQ ID NO: 2221912 - RNA, 19 nt, Artificial Sequence
  Description of Artificial Sequence: Synthetic oligonucleotide
  Sense strand starting at position 1556 of SEQ ID NO: 1883861
aaacauguugagugucagu

SEQ ID NO: 2221913 - RNA, 19 nt, Artificial Sequence
  Description of Artificial Sequence: Synthetic oligonucleotide
  Antisense strand to SEQ ID NO: 2221912
acugacacucaacauguuu

SEQ ID NO: 2221914 - RNA, 19 nt, Artificial Sequence
  Description of Artificial Sequence: Synthetic oligonucleotide
  Sense strand starting at position 2917 of SEQ ID NO: 1883862
agauguggucuuuauaaua

SEQ ID NO: 2221915 - RNA, 19 nt, Artificial Sequence
  Description of Artificial Sequence: Synthetic oligonucleotide
  Antisense strand to SEQ ID NO: 2221914
uauuauaaagaccacaucu

SEQ ID NO: 2221916 - RNA, 19 nt, Artificial Sequence
  Description of Artificial Sequence: Synthetic oligonucleotide
  Sense strand starting at position 3399 of SEQ ID NO: 1883862
agaagagacgauugcuuga

SEQ ID NO: 2221917 - RNA, 19 nt, Artificial Sequence
  Description of Artificial Sequence: Synthetic oligonucleotide
  Antisense strand to SEQ ID NO: 2221916
ucaagcaaucgucucuucu

SEQ ID NO: 2221918 - RNA, 19 nt, Artificial Sequence
  Description of Artificial Sequence: Synthetic oligonucleotide
  Sense strand starting at position 3665 of SEQ ID NO: 1883862
ugaacugcuggguaucuua

SEQ ID NO: 2221919 - RNA, 19 nt, Artificial Sequence
  Description of Artificial Sequence: Synthetic oligonucleotide
  Antisense strand to SEQ ID NO: 2221918
uaagauacccagcaguuca

SEQ ID NO: 2221920 - RNA, 19 nt, Artificial Sequence
  Description of Artificial Sequence: Synthetic oligonucleotide
  Sense strand starting at position 2428 of SEQ ID NO: 1883862
cguagaggugacugauaaa

SEQ ID NO: 2221921 - RNA, 19 nt, Artificial Sequence
  Description of Artificial Sequence: Synthetic oligonucleotide
  Antisense strand to SEQ ID NO: 2221920
uuuaucagucaccucuacg

SEQ ID NO: 2221922 - RNA, 19 nt, Artificial Sequence
  Description of Artificial Sequence: Synthetic oligonucleotide
  Sense strand starting at position 3571 of SEQ ID NO: 1883862
uaagguuaauuaguucuga

SEQ ID NO: 2221923 - RNA, 19 nt, Artificial Sequence
  Description of Artificial Sequence: Synthetic oligonucleotide
  Antisense strand to SEQ ID NO: 2221922
ucagaacuaauuaaccuua

SEQ ID NO: 2221924 - RNA, 19 nt, Artificial Sequence
  Description of Artificial Sequence: Synthetic oligonucleotide
  Sense strand starting at position 2415 of SEQ ID NO: 1883862
ggcgagugucugccguaga

SEQ ID NO: 2221925 - RNA, 19 nt, Artificial Sequence
  Description of Artificial Sequence: Synthetic oligonucleotide
  Antisense strand to SEQ ID NO: 2221924
ucuacggcagacacucgcc

SEQ ID NO: 2221926 - RNA, 19 nt, Artificial Sequence
  Description of Artificial Sequence: Synthetic oligonucleotide
  Sense strand starting at position 1208 of SEQ ID NO: 1883862
auauaucguccuugaauaa

SEQ ID NO: 2221927 - RNA, 19 nt, Artificial Sequence
  Description of Artificial Sequence: Synthetic oligonucleotide
  Antisense strand to SEQ ID NO: 2221926
uuauucaaggacgauauau

SEQ ID NO: 2221928 - RNA, 19 nt, Artificial Sequence
  Description of Artificial Sequence: Synthetic oligonucleotide
  Sense strand starting at position 609 of SEQ ID NO: 1883862
ucaccauuauuugagugaa

SEQ ID NO: 2221929 - RNA, 19 nt, Artificial Sequence
  Description of Artificial Sequence: Synthetic oligonucleotide
  Antisense strand to SEQ ID NO: 2221928
uucacucaaauaaugguga

SEQ ID NO: 2221930 - RNA, 19 nt, Artificial Sequence
  Description of Artificial Sequence: Synthetic oligonucleotide
  Sense strand starting at position 1204 of SEQ ID NO: 1883862
accaauauaucguccuuga

SEQ ID NO: 2221931 - RNA, 19 nt, Artificial Sequence
  Description of Artificial Sequence: Synthetic oligonucleotide
  Antisense strand to SEQ ID NO: 2221930
ucaaggacgauauauuggu

SEQ ID NO: 2221932 - RNA, 19 nt, Artificial Sequence
  Description of Artificial Sequence: Synthetic oligonucleotide
  Sense strand starting at position 3132 of SEQ ID NO: 1883862
acagaacuguuguauuuga

SEQ ID NO: 2221933 - RNA, 19 nt, Artificial Sequence
  Description of Artificial Sequence: Synthetic oligonucleotide
  Antisense strand to SEQ ID NO: 2221932
ucaaauacaacaguucugu

SEQ ID NO: 2221934 - RNA, 19 nt, Artificial Sequence
  Description of Artificial Sequence: Synthetic oligonucleotide
  Sense strand starting at position 1041 of SEQ ID NO: 1883862
gccggacaauguuuacauu

SEQ ID NO: 2221935 - RNA, 19 nt, Artificial Sequence
  Description of Artificial Sequence: Synthetic oligonucleotide
  Antisense strand to SEQ ID NO: 2221934
aauguaaacauuguccggc

SEQ ID NO: 2221936 - RNA, 19 nt, Artificial Sequence
  Description of Artificial Sequence: Synthetic oligonucleotide
  Sense strand starting at position 29 of SEQ ID NO: 1883862
cuagcacuccugugaucuu

SEQ ID NO: 2221937 - RNA, 19 nt, Artificial Sequence
  Description of Artificial Sequence: Synthetic oligonucleotide
  Antisense strand to SEQ ID NO: 2221936
aagaucacaggagugcuag

SEQ ID NO: 2221938 - RNA, 19 nt, Artificial Sequence
  Description of Artificial Sequence: Synthetic oligonucleotide
  Sense strand starting at position 1422 of SEQ ID NO: 1883862
gcaccaugcccguagugaa

SEQ ID NO: 2221939 - RNA, 19 nt, Artificial Sequence
  Description of Artificial Sequence: Synthetic oligonucleotide
  Antisense strand to SEQ ID NO: 2221938
uucacuacgggcauggugc

SEQ ID NO: 2221940 - RNA, 19 nt, Artificial Sequence
  Description of Artificial Sequence: Synthetic oligonucleotide
  Sense strand starting at position 2431 of SEQ ID NO: 1883862
agaggugacugauaaaccu

SEQ ID NO: 2221941 - RNA, 19 nt, Artificial Sequence
  Description of Artificial Sequence: Synthetic oligonucleotide
  Antisense strand to SEQ ID NO: 2221940
agguuuaucagucaccucu

SEQ ID NO: 2221942 - RNA, 19 nt, Artificial Sequence
  Description of Artificial Sequence: Synthetic oligonucleotide
  Sense strand starting at position 552 of SEQ ID NO: 1883862
aguaguucugcuugugaga

SEQ ID NO: 2221943 - RNA, 19 nt, Artificial Sequence
  Description of Artificial Sequence: Synthetic oligonucleotide
  Antisense strand to SEQ ID NO: 2221942
ucucacaagcagaacuacu

SEQ ID NO: 2221944 - RNA, 19 nt, Artificial Sequence
  Description of Artificial Sequence: Synthetic oligonucleotide
  Sense strand starting at position 3070 of SEQ ID NO: 1883862
gggagaacuuaagagucuu

SEQ ID NO: 2221945 - RNA, 19 nt, Artificial Sequence
  Description of Artificial Sequence: Synthetic oligonucleotide
  Antisense strand to SEQ ID NO: 2221944
aagacucuuaaguucuccc

SEQ ID NO: 2221946 - RNA, 19 nt, Artificial Sequence
  Description of Artificial Sequence: Synthetic oligonucleotide
  Sense strand starting at position 363 of SEQ ID NO: 1883862
ugcaguuucugagccuuga

SEQ ID NO: 2221947 - RNA, 19 nt, Artificial Sequence
  Description of Artificial Sequence: Synthetic oligonucleotide
  Antisense strand to SEQ ID NO: 2221946
ucaaggcucagaaacugca

SEQ ID NO: 2221948 - RNA, 19 nt, Artificial Sequence
  Description of Artificial Sequence: Synthetic oligonucleotide
  Sense strand starting at position 367 of SEQ ID NO: 1883862
guuucugagccuugaguuu

SEQ ID NO: 2221949 - RNA, 19 nt, Artificial Sequence
  Description of Artificial Sequence: Synthetic oligonucleotide
  Antisense strand to SEQ ID NO: 2221948
aaacucaaggcucagaaac

SEQ ID NO: 2221950 - RNA, 19 nt, Artificial Sequence
  Description of Artificial Sequence: Synthetic oligonucleotide
  Sense strand starting at position 2418 of SEQ ID NO: 1883862
gagugucugccguagaggu

SEQ ID NO: 2221951 - RNA, 19 nt, Artificial Sequence
  Description of Artificial Sequence: Synthetic oligonucleotide
  Antisense strand to SEQ ID NO: 2221950
accucuacggcagacacuc

SEQ ID NO: 2221952 - RNA, 19 nt, Artificial Sequence
  Description of Artificial Sequence: Synthetic oligonucleotide
  Sense strand starting at position 1157 of SEQ ID NO: 1883862
cauacuagguaaugagaaa

SEQ ID NO: 2221953 - RNA, 19 nt, Artificial Sequence
  Description of Artificial Sequence: Synthetic oligonucleotide
  Antisense strand to SEQ ID NO: 2221952
uuucucauuaccuaguaug

SEQ ID NO: 2221954 - RNA, 19 nt, Artificial Sequence
  Description of Artificial Sequence: Synthetic oligonucleotide
  Sense strand starting at position 36 of SEQ ID NO: 1883862
uccugugaucuuugcucuu

SEQ ID NO: 2221955 - RNA, 19 nt, Artificial Sequence
  Description of Artificial Sequence: Synthetic oligonucleotide
  Antisense strand to SEQ ID NO: 2221954
aagagcaaagaucacagga

SEQ ID NO: 2221956 - RNA, 19 nt, Artificial Sequence
  Description of Artificial Sequence: Synthetic oligonucleotide
  Sense strand starting at position 1706 of SEQ ID NO: 1883862
cggcgauaauuucacaagu

SEQ ID NO: 2221957 - RNA, 19 nt, Artificial Sequence
  Description of Artificial Sequence: Synthetic oligonucleotide
  Antisense strand to SEQ ID NO: 2221956
acuugugaaauuaucgccg

SEQ ID NO: 2221958 - RNA, 19 nt, Artificial Sequence
  Description of Artificial Sequence: Synthetic oligonucleotide
  Sense strand starting at position 2401 of SEQ ID NO: 1883862
acagauguguucucggcga

SEQ ID NO: 2221959 - RNA, 19 nt, Artificial Sequence
  Description of Artificial Sequence: Synthetic oligonucleotide
  Antisense strand to SEQ ID NO: 2221958
ucgccgagaacacaucugu

SEQ ID NO: 2221960 - RNA, 19 nt, Artificial Sequence
  Description of Artificial Sequence: Synthetic oligonucleotide
  Sense strand starting at position 463 of SEQ ID NO: 1883862
aggcuuugaucccaggaag

SEQ ID NO: 2221961 - RNA, 19 nt, Artificial Sequence
  Description of Artificial Sequence: Synthetic oligonucleotide
  Antisense strand to SEQ ID NO: 2221960
cuuccugggaucaaagccu

SEQ ID NO: 2221962 - RNA, 19 nt, Artificial Sequence
  Description of Artificial Sequence: Synthetic oligonucleotide
  Sense strand starting at position 3948 of SEQ ID NO: 1883862
aauggagagucucacucuu

SEQ ID NO: 2221963 - RNA, 19 nt, Artificial Sequence
  Description of Artificial Sequence: Synthetic oligonucleotide
  Antisense strand to SEQ ID NO: 2221962
aagagugagacucuccauu

SEQ ID NO: 2221964 - RNA, 19 nt, Artificial Sequence
  Description of Artificial Sequence: Synthetic oligonucleotide
  Sense strand starting at position 411 of SEQ ID NO: 1883862
agaguuaagucccaaucuc

SEQ ID NO: 2221965 - RNA, 19 nt, Artificial Sequence
  Description of Artificial Sequence: Synthetic oligonucleotide
  Antisense strand to SEQ ID NO: 2221964
gagauugggacuuaacucu

SEQ ID NO: 2221966 - RNA, 19 nt, Artificial Sequence
  Description of Artificial Sequence: Synthetic oligonucleotide
  Sense strand starting at position 2403 of SEQ ID NO: 1883862
agauguguucucggcgagu

SEQ ID NO: 2221967 - RNA, 19 nt, Artificial Sequence
  Description of Artificial Sequence: Synthetic oligonucleotide
  Antisense strand to SEQ ID NO: 2221966
acucgccgagaacacaucu

SEQ ID NO: 2221968 - RNA, 19 nt, Artificial Sequence
  Description of Artificial Sequence: Synthetic oligonucleotide
  Sense strand starting at position 2404 of SEQ ID NO: 1883862
gauguguucucggcgagug

SEQ ID NO: 2221969 - RNA, 19 nt, Artificial Sequence
  Description of Artificial Sequence: Synthetic oligonucleotide
  Antisense strand to SEQ ID NO: 2221968
cacucgccgagaacacauc

SEQ ID NO: 2221970 - RNA, 19 nt, Artificial Sequence
  Description of Artificial Sequence: Synthetic oligonucleotide
  Sense strand starting at position 3562 of SEQ ID NO: 1883862
uagugacacuaagguuaau

SEQ ID NO: 2221971 - RNA, 19 nt, Artificial Sequence
  Description of Artificial Sequence: Synthetic oligonucleotide
  Antisense strand to SEQ ID NO: 2221970
auuaaccuuagugucacua

SEQ ID NO: 2221972 - RNA, 19 nt, Artificial Sequence
  Description of Artificial Sequence: Synthetic oligonucleotide
  Sense strand starting at position 3619 of SEQ ID NO: 1883862
ggugauguuucauggagga

SEQ ID NO: 2221973 - RNA, 19 nt, Artificial Sequence
  Description of Artificial Sequence: Synthetic oligonucleotide
  Antisense strand to SEQ ID NO: 2221972
uccuccaugaaacaucacc

SEQ ID NO: 2221974 - RNA, 19 nt, Artificial Sequence
  Description of Artificial Sequence: Synthetic oligonucleotide
  Sense strand starting at position 2405 of SEQ ID NO: 1883862
auguguucucggcgagugu

SEQ ID NO: 2221975 - RNA, 19 nt, Artificial Sequence
  Description of Artificial Sequence: Synthetic oligonucleotide
  Antisense strand to SEQ ID NO: 2221974
acacucgccgagaacacau

SEQ ID NO: 2221976 - RNA, 19 nt, Artificial Sequence
  Description of Artificial Sequence: Synthetic oligonucleotide
  Sense strand starting at position 555 of SEQ ID NO: 1883862
aguucugcuugugagaauu

SEQ ID NO: 2221977 - RNA, 19 nt, Artificial Sequence
  Description of Artificial Sequence: Synthetic oligonucleotide
  Antisense strand to SEQ ID NO: 2221976
aauucucacaagcagaacu

SEQ ID NO: 2221978 - RNA, 19 nt, Artificial Sequence
  Description of Artificial Sequence: Synthetic oligonucleotide
  Sense strand starting at position 3575 of SEQ ID NO: 1883862
guuaauuaguucugacauc

SEQ ID NO: 2221979 - RNA, 19 nt, Artificial Sequence
  Description of Artificial Sequence: Synthetic oligonucleotide
  Antisense strand to SEQ ID NO: 2221978
gaugucagaacuaauuaac

SEQ ID NO: 2221980 - RNA, 19 nt, Artificial Sequence
  Description of Artificial Sequence: Synthetic oligonucleotide
  Sense strand starting at position 3103 of SEQ ID NO: 1883862
aaagguggcugcugauaua

SEQ ID NO: 2221981 - RNA, 19 nt, Artificial Sequence
  Description of Artificial Sequence: Synthetic oligonucleotide
  Antisense strand to SEQ ID NO: 2221980
uauaucagcagccaccuuu

SEQ ID NO: 2221982 - RNA, 19 nt, Artificial Sequence
  Description of Artificial Sequence: Synthetic oligonucleotide
  Sense strand starting at position 554 of SEQ ID NO: 1883862
uaguucugcuugugagaau

SEQ ID NO: 2221983 - RNA, 19 nt, Artificial Sequence
  Description of Artificial Sequence: Synthetic oligonucleotide
  Antisense strand to SEQ ID NO: 2221982
auucucacaagcagaacua

SEQ ID NO: 2221984 - RNA, 19 nt, Artificial Sequence
  Description of Artificial Sequence: Synthetic oligonucleotide
  Sense strand starting at position 496 of SEQ ID NO: 1883863
cucugaugcccauagaaca

SEQ ID NO: 2221985 - RNA, 19 nt, Artificial Sequence
  Description of Artificial Sequence: Synthetic oligonucleotide
  Antisense strand to SEQ ID NO: 2221984
uguucuaugggcaucagag

SEQ ID NO: 2221986 - RNA, 19 nt, Artificial Sequence
  Description of Artificial Sequence: Synthetic oligonucleotide
  Sense strand starting at position 1431 of SEQ ID NO: 1883863
aaagucguugcaggaauuu

SEQ ID NO: 2221987 - RNA, 19 nt, Artificial Sequence
  Description of Artificial Sequence: Synthetic oligonucleotide
  Antisense strand to SEQ ID NO: 2221986
aaauuccugcaacgacuuu

SEQ ID NO: 2221988 - RNA, 19 nt, Artificial Sequence
  Description of Artificial Sequence: Synthetic oligonucleotide
  Sense strand starting at position 494 of SEQ ID NO: 1883863
uucucugaugcccauagaa

SEQ ID NO: 2221989 - RNA, 19 nt, Artificial Sequence
  Description of Artificial Sequence: Synthetic oligonucleotide
  Antisense strand to SEQ ID NO: 2221988
uucuaugggcaucagagaa

SEQ ID NO: 2221990 - RNA, 19 nt, Artificial Sequence
  Description of Artificial Sequence: Synthetic oligonucleotide
  Sense strand starting at position 907 of SEQ ID NO: 1883863
gcaugccuagaugaacaau

SEQ ID NO: 2221991 - RNA, 19 nt, Artificial Sequence
  Description of Artificial Sequence: Synthetic oligonucleotide
  Antisense strand to SEQ ID NO: 2221990
auuguucaucuaggcaugc

SEQ ID NO: 2221992 - RNA, 19 nt, Artificial Sequence
  Description of Artificial Sequence: Synthetic oligonucleotide
  Sense strand starting at position 1027 of SEQ ID NO: 1883863
gaauccuggccuugagaga

SEQ ID NO: 2221993 - RNA, 19 nt, Artificial Sequence
  Description of Artificial Sequence: Synthetic oligonucleotide
  Antisense strand to SEQ ID NO: 2221992
ucucucaaggccaggauuc

SEQ ID NO: 2221994 - RNA, 19 nt, Artificial Sequence
  Description of Artificial Sequence: Synthetic oligonucleotide
  Sense strand starting at position 728 of SEQ ID NO: 1883863
uagguucugagagguuaag

SEQ ID NO: 2221995 - RNA, 19 nt, Artificial Sequence
  Description of Artificial Sequence: Synthetic oligonucleotide
  Antisense strand to SEQ ID NO: 2221994
cuuaaccucucagaaccua

SEQ ID NO: 2221996 - RNA, 19 nt, Artificial Sequence
  Description of Artificial Sequence: Synthetic oligonucleotide
  Sense strand starting at position 2235 of SEQ ID NO: 1883863
cgcauagucaccuagaaag

SEQ ID NO: 2221997 - RNA, 19 nt, Artificial Sequence
  Description of Artificial Sequence: Synthetic oligonucleotide
  Antisense strand to SEQ ID NO: 2221996
cuuucuaggugacuaugcg

SEQ ID NO: 2221998 - RNA, 19 nt, Artificial Sequence
  Description of Artificial Sequence: Synthetic oligonucleotide
  Sense strand starting at position 57 of SEQ ID NO: 1883863
ugcacagacuuaucacaug

SEQ ID NO: 2221999 - RNA, 19 nt, Artificial Sequence
  Description of Artificial Sequence: Synthetic oligonucleotide
  Antisense strand to SEQ ID NO: 2221998
caugugauaagucugugca

SEQ ID NO: 2222000 - RNA, 19 nt, Artificial Sequence
  Description of Artificial Sequence: Synthetic oligonucleotide
  Sense strand starting at position 3043 of SEQ ID NO: 1883863
gcccaauugcguccagcuu

SEQ ID NO: 2222001 - RNA, 19 nt, Artificial Sequence
  Description of Artificial Sequence: Synthetic oligonucleotide
  Antisense strand to SEQ ID NO: 2222000
aagcuggacgcaauugggc

SEQ ID NO: 2222002 - RNA, 19 nt, Artificial Sequence
  Description of Artificial Sequence: Synthetic oligonucleotide
  Sense strand starting at position 705 of SEQ ID NO: 1883863
gugucaaaugcuuacaaac

SEQ ID NO: 2222003 - RNA, 19 nt, Artificial Sequence
  Description of Artificial Sequence: Synthetic oligonucleotide
  Antisense strand to SEQ ID NO: 2222002
guuuguaagcauuugacac

SEQ ID NO: 2222004 - RNA, 19 nt, Artificial Sequence
  Description of Artificial Sequence: Synthetic oligonucleotide
  Sense strand starting at position 512 of SEQ ID NO: 1883863
acacuuagcccagaucugu

SEQ ID NO: 2222005 - RNA, 19 nt, Artificial Sequence
  Description of Artificial Sequence: Synthetic oligonucleotide
  Antisense strand to SEQ ID NO: 2222004
acagaucugggcuaagugu

SEQ ID NO: 2222006 - RNA, 19 nt, Artificial Sequence
  Description of Artificial Sequence: Synthetic oligonucleotide
  Sense strand starting at position 2331 of SEQ ID NO: 1883863
cggccauuggcugaaagga

SEQ ID NO: 2222007 - RNA, 19 nt, Artificial Sequence
  Description of Artificial Sequence: Synthetic oligonucleotide
  Antisense strand to SEQ ID NO: 2222006
uccuuucagccaauggccg

SEQ ID NO: 2222008 - RNA, 19 nt, Artificial Sequence
  Description of Artificial Sequence: Synthetic oligonucleotide
  Sense strand starting at position 923 of SEQ ID NO: 1883863
aaucuaggcugaucaguga

SEQ ID NO: 2222009 - RNA, 19 nt, Artificial Sequence
  Description of Artificial Sequence: Synthetic oligonucleotide
  Antisense strand to SEQ ID NO: 2222008
ucacugaucagccuagauu

SEQ ID NO: 2222010 - RNA, 19 nt, Artificial Sequence
  Description of Artificial Sequence: Synthetic oligonucleotide
  Sense strand starting at position 3322 of SEQ ID NO: 1883863
caacuuuacggugaagcua

SEQ ID NO: 2222011 - RNA, 19 nt, Artificial Sequence
  Description of Artificial Sequence: Synthetic oligonucleotide
  Antisense strand to SEQ ID NO: 2222010
uagcuucaccguaaaguug

SEQ ID NO: 2222012 - RNA, 19 nt, Artificial Sequence
  Description of Artificial Sequence: Synthetic oligonucleotide
  Sense strand starting at position 1595 of SEQ ID NO: 1883863
auuuccuuucgucguagaa

SEQ ID NO: 2222013 - RNA, 19 nt, Artificial Sequence
  Description of Artificial Sequence: Synthetic oligonucleotide
  Antisense strand to SEQ ID NO: 2222012
uucuacgacgaaaggaaau

SEQ ID NO: 2222014 - RNA, 19 nt, Artificial Sequence
  Description of Artificial Sequence: Synthetic oligonucleotide
  Sense strand starting at position 1301 of SEQ ID NO: 1883863
gggaaugcacuuugcaaag

SEQ ID NO: 2222015 - RNA, 19 nt, Artificial Sequence
  Description of Artificial Sequence: Synthetic oligonucleotide
  Antisense strand to SEQ ID NO: 2222014
cuuugcaaagugcauuccc

SEQ ID NO: 2222016 - RNA, 19 nt, Artificial Sequence
  Description of Artificial Sequence: Synthetic oligonucleotide
  Sense strand starting at position 656 of SEQ ID NO: 1883863
uguauucuaggugaugcaa

SEQ ID NO: 2222017 - RNA, 19 nt, Artificial Sequence
  Description of Artificial Sequence: Synthetic oligonucleotide
  Antisense strand to SEQ ID NO: 2222016
uugcaucaccuagaauaca

SEQ ID NO: 2222018 - RNA, 19 nt, Artificial Sequence
  Description of Artificial Sequence: Synthetic oligonucleotide
  Sense strand starting at position 937 of SEQ ID NO: 1883863
agugaaaccuaaguguuua

SEQ ID NO: 2222019 - RNA, 19 nt, Artificial Sequence
  Description of Artificial Sequence: Synthetic oligonucleotide
  Antisense strand to SEQ ID NO: 2222018
uaaacacuuagguuucacu

SEQ ID NO: 2222020 - RNA, 19 nt, Artificial Sequence
  Description of Artificial Sequence: Synthetic oligonucleotide
  Sense strand starting at position 3621 of SEQ ID NO: 1883863
aaauaauaugugugaagcu

SEQ ID NO: 2222021 - RNA, 19 nt, Artificial Sequence
  Description of Artificial Sequence: Synthetic oligonucleotide
  Antisense strand to SEQ ID NO: 2222020
agcuucacacauauuauuu

SEQ ID NO: 2222022 - RNA, 19 nt, Artificial Sequence
  Description of Artificial Sequence: Synthetic oligonucleotide
  Sense strand starting at position 1594 of SEQ ID NO: 1883863
cauuuccuuucgucguaga

SEQ ID NO: 2222023 - RNA, 19 nt, Artificial Sequence
  Description of Artificial Sequence: Synthetic oligonucleotide
  Antisense strand to SEQ ID NO: 2222022
ucuacgacgaaaggaaaug

SEQ ID NO: 2222024 - RNA, 19 nt, Artificial Sequence
  Description of Artificial Sequence: Synthetic oligonucleotide
  Sense strand starting at position 2249 of SEQ ID NO: 1883863
gaaagauagugcuuucuug

SEQ ID NO: 2222025 - RNA, 19 nt, Artificial Sequence
  Description of Artificial Sequence: Synthetic oligonucleotide
  Antisense strand to SEQ ID NO: 2222024
caagaaagcacuaucuuuc

SEQ ID NO: 2222026 - RNA, 19 nt, Artificial Sequence
  Description of Artificial Sequence: Synthetic oligonucleotide
  Sense strand starting at position 3585 of SEQ ID NO: 1883863
ccugucuacccuuagaguu

SEQ ID NO: 2222027 - RNA, 19 nt, Artificial Sequence
  Description of Artificial Sequence: Synthetic oligonucleotide
  Antisense strand to SEQ ID NO: 2222026
aacucuaaggguagacagg

SEQ ID NO: 2222028 - RNA, 19 nt, Artificial Sequence
  Description of Artificial Sequence: Synthetic oligonucleotide
  Sense strand starting at position 249 of SEQ ID NO: 1883863
gcagucaaccuguggaaga

SEQ ID NO: 2222029 - RNA, 19 nt, Artificial Sequence
  Description of Artificial Sequence: Synthetic oligonucleotide
  Antisense strand to SEQ ID NO: 2222028
ucuuccacagguugacugc

SEQ ID NO: 2222030 - RNA, 19 nt, Artificial Sequence
  Description of Artificial Sequence: Synthetic oligonucleotide
  Sense strand starting at position 3157 of SEQ ID NO: 1883863
augcacacucagugauauu

SEQ ID NO: 2222031 - RNA, 19 nt, Artificial Sequence
  Description of Artificial Sequence: Synthetic oligonucleotide
  Antisense strand to SEQ ID NO: 2222030
aauaucacugagugugcau

SEQ ID NO: 2222032 - RNA, 19 nt, Artificial Sequence
  Description of Artificial Sequence: Synthetic oligonucleotide
  Sense strand starting at position 815 of SEQ ID NO: 1883863
caaagaauguggccuuucu

SEQ ID NO: 2222033 - RNA, 19 nt, Artificial Sequence
  Description of Artificial Sequence: Synthetic oligonucleotide
  Antisense strand to SEQ ID NO: 2222032
agaaaggccacauucuuug

SEQ ID NO: 2222034 - RNA, 19 nt, Artificial Sequence
  Description of Artificial Sequence: Synthetic oligonucleotide
  Sense strand starting at position 485 of SEQ ID NO: 1883863
ggcacauucuucucugaug

SEQ ID NO: 2222035 - RNA, 19 nt, Artificial Sequence
  Description of Artificial Sequence: Synthetic oligonucleotide
  Antisense strand to SEQ ID NO: 2222034
caucagagaagaaugugcc

SEQ ID NO: 2222036 - RNA, 19 nt, Artificial Sequence
  Description of Artificial Sequence: Synthetic oligonucleotide
  Sense strand starting at position 2170 of SEQ ID NO: 1883863
guggcacugaguuagguua

SEQ ID NO: 2222037 - RNA, 19 nt, Artificial Sequence
  Description of Artificial Sequence: Synthetic oligonucleotide
  Antisense strand to SEQ ID NO: 2222036
uaaccuaacucagugccac

SEQ ID NO: 2222038 - RNA, 19 nt, Artificial Sequence
  Description of Artificial Sequence: Synthetic oligonucleotide
  Sense strand starting at position 1427 of SEQ ID NO: 1883863
ggagaaagucguugcagga

SEQ ID NO: 2222039 - RNA, 19 nt, Artificial Sequence
  Description of Artificial Sequence: Synthetic oligonucleotide
  Antisense strand to SEQ ID NO: 2222038
uccugcaacgacuuucucc

SEQ ID NO: 2222040 - RNA, 19 nt, Artificial Sequence
  Description of Artificial Sequence: Synthetic oligonucleotide
  Sense strand starting at position 704 of SEQ ID NO: 1883863
ugugucaaaugcuuacaaa

SEQ ID NO: 2222041 - RNA, 19 nt, Artificial Sequence
  Description of Artificial Sequence: Synthetic oligonucleotide
  Antisense strand to SEQ ID NO: 2222040
uuuguaagcauuugacaca

SEQ ID NO: 2222042 - RNA, 19 nt, Artificial Sequence
  Description of Artificial Sequence: Synthetic oligonucleotide
  Sense strand starting at position 206 of SEQ ID NO: 1883863
ggaauacuauuauaaagac

SEQ ID NO: 2222043 - RNA, 19 nt, Artificial Sequence
  Description of Artificial Sequence: Synthetic oligonucleotide
  Antisense strand to SEQ ID NO: 2222042
gucuuuauaauaguauucc

SEQ ID NO: 2222044 - RNA, 19 nt, Artificial Sequence
  Description of Artificial Sequence: Synthetic oligonucleotide
  Sense strand starting at position 1652 of SEQ ID NO: 1883863
cgccgaacuuacuuaaaua

SEQ ID NO: 2222045 - RNA, 19 nt, Artificial Sequence
  Description of Artificial Sequence: Synthetic oligonucleotide
  Antisense strand to SEQ ID NO: 2222044
uauuuaaguaaguucggcg

SEQ ID NO: 2222046 - RNA, 19 nt, Artificial Sequence
  Description of Artificial Sequence: Synthetic oligonucleotide
  Sense strand starting at position 2233 of SEQ ID NO: 1883863
uucgcauagucaccuagaa

SEQ ID NO: 2222047 - RNA, 19 nt, Artificial Sequence
  Description of Artificial Sequence: Synthetic oligonucleotide
  Antisense strand to SEQ ID NO: 2222046
uucuaggugacuaugcgaa

SEQ ID NO: 2222048 - RNA, 19 nt, Artificial Sequence
  Description of Artificial Sequence: Synthetic oligonucleotide
  Sense strand starting at position 1476 of SEQ ID NO: 1883863
agucuugauuucgaagauc

SEQ ID NO: 2222049 - RNA, 19 nt, Artificial Sequence
  Description of Artificial Sequence: Synthetic oligonucleotide
  Antisense strand to SEQ ID NO: 2222048
gaucuucgaaaucaagacu

SEQ ID NO: 2222050 - RNA, 19 nt, Artificial Sequence
  Description of Artificial Sequence: Synthetic oligonucleotide
  Sense strand starting at position 901 of SEQ ID NO: 1883863
guuuaagcaugccuagaug

SEQ ID NO: 2222051 - RNA, 19 nt, Artificial Sequence
  Description of Artificial Sequence: Synthetic oligonucleotide
  Antisense strand to SEQ ID NO: 2222050
caucuaggcaugcuuaaac

SEQ ID NO: 2222052 - RNA, 19 nt, Artificial Sequence
  Description of Artificial Sequence: Synthetic oligonucleotide
  Sense strand starting at position 473 of SEQ ID NO: 1883863
aggcuaucuccuggcacau

SEQ ID NO: 2222053 - RNA, 19 nt, Artificial Sequence
  Description of Artificial Sequence: Synthetic oligonucleotide
  Antisense strand to SEQ ID NO: 2222052
augugccaggagauagccu

SEQ ID NO: 2222054 - RNA, 19 nt, Artificial Sequence
  Description of Artificial Sequence: Synthetic oligonucleotide
  Sense strand starting at position 2216 of SEQ ID NO: 1883863
cuacacuucccugguaguu

SEQ ID NO: 2222055 - RNA, 19 nt, Artificial Sequence
  Description of Artificial Sequence: Synthetic oligonucleotide
  Antisense strand to SEQ ID NO: 2222054
aacuaccagggaaguguag

SEQ ID NO: 2222056 - RNA, 19 nt, Artificial Sequence
  Description of Artificial Sequence: Synthetic oligonucleotide
  Sense strand starting at position 653 of SEQ ID NO: 1883863
ggcuguauucuaggugaug

SEQ ID NO: 2222057 - RNA, 19 nt, Artificial Sequence
  Description of Artificial Sequence: Synthetic oligonucleotide
  Antisense strand to SEQ ID NO: 2222056
caucaccuagaauacagcc

SEQ ID NO: 2222058 - RNA, 19 nt, Artificial Sequence
  Description of Artificial Sequence: Synthetic oligonucleotide
  Sense strand starting at position 3212 of SEQ ID NO: 1883863
agagucuauuugcauaauu

SEQ ID NO: 2222059 - RNA, 19 nt, Artificial Sequence
  Description of Artificial Sequence: Synthetic oligonucleotide
  Antisense strand to SEQ ID NO: 2222058
aauuaugcaaauagacucu

SEQ ID NO: 2222060 - RNA, 19 nt, Artificial Sequence
  Description of Artificial Sequence: Synthetic oligonucleotide
  Sense strand starting at position 655 of SEQ ID NO: 1883863
cuguauucuaggugaugca

SEQ ID NO: 2222061 - RNA, 19 nt, Artificial Sequence
  Description of Artificial Sequence: Synthetic oligonucleotide
  Antisense strand to SEQ ID NO: 2222060
ugcaucaccuagaauacag

SEQ ID NO: 2222062 - RNA, 19 nt, Artificial Sequence
  Description of Artificial Sequence: Synthetic oligonucleotide
  Sense strand starting at position 1234 of SEQ ID NO: 1883863
ucaguuucuugauccguaa

SEQ ID NO: 2222063 - RNA, 19 nt, Artificial Sequence
  Description of Artificial Sequence: Synthetic oligonucleotide
  Antisense strand to SEQ ID NO: 2222062
uuacggaucaagaaacuga

SEQ ID NO: 2222064 - RNA, 19 nt, Artificial Sequence
  Description of Artificial Sequence: Synthetic oligonucleotide
  Sense strand starting at position 3607 of SEQ ID NO: 1883864
ggaugacucggugacuuaa

SEQ ID NO: 2222065 - RNA, 19 nt, Artificial Sequence
  Description of Artificial Sequence: Synthetic oligonucleotide
  Antisense strand to SEQ ID NO: 2222064
uuaagucaccgagucaucc

SEQ ID NO: 2222066 - RNA, 19 nt, Artificial Sequence
  Description of Artificial Sequence: Synthetic oligonucleotide
  Sense strand starting at position 3142 of SEQ ID NO: 1883864
ggagaagcaagucaaguuu

SEQ ID NO: 2222067 - RNA, 19 nt, Artificial Sequence
  Description of Artificial Sequence: Synthetic oligonucleotide
  Antisense strand to SEQ ID NO: 2222066
aaacuugacuugcuucucc

SEQ ID NO: 2222068 - RNA, 19 nt, Artificial Sequence
  Description of Artificial Sequence: Synthetic oligonucleotide
  Sense strand starting at position 2062 of SEQ ID NO: 1883864
acauuaaucgccguucugu

SEQ ID NO: 2222069 - RNA, 19 nt, Artificial Sequence
  Description of Artificial Sequence: Synthetic oligonucleotide
  Antisense strand to SEQ ID NO: 2222068
acagaacggcgauuaaugu

SEQ ID NO: 2222070 - RNA, 19 nt, Artificial Sequence
  Description of Artificial Sequence: Synthetic oligonucleotide
  Sense strand starting at position 2633 of SEQ ID NO: 1883864
gaggaucacgcugaucuua

SEQ ID NO: 2222071 - RNA, 19 nt, Artificial Sequence
  Description of Artificial Sequence: Synthetic oligonucleotide
  Antisense strand to SEQ ID NO: 2222070
uaagaucagcgugauccuc

SEQ ID NO: 2222072 - RNA, 19 nt, Artificial Sequence
  Description of Artificial Sequence: Synthetic oligonucleotide
  Sense strand starting at position 3326 of SEQ ID NO: 1883864
gcgccuuuccauccuuagu

SEQ ID NO: 2222073 - RNA, 19 nt, Artificial Sequence
  Description of Artificial Sequence: Synthetic oligonucleotide
  Antisense strand to SEQ ID NO: 2222072
acuaaggauggaaaggcgc

SEQ ID NO: 2222074 - RNA, 19 nt, Artificial Sequence
  Description of Artificial Sequence: Synthetic oligonucleotide
  Sense strand starting at position 2047 of SEQ ID NO: 1883864
aucagagguggcugaacau

SEQ ID NO: 2222075 - RNA, 19 nt, Artificial Sequence
  Description of Artificial Sequence: Synthetic oligonucleotide
  Antisense strand to SEQ ID NO: 2222074
auguucagccaccucugau

SEQ ID NO: 2222076 - RNA, 19 nt, Artificial Sequence
  Description of Artificial Sequence: Synthetic oligonucleotide
  Sense strand starting at position 2951 of SEQ ID NO: 1883864
gcugaagauccgggaauca

SEQ ID NO: 2222077 - RNA, 19 nt, Artificial Sequence
  Description of Artificial Sequence: Synthetic oligonucleotide
  Antisense strand to SEQ ID NO: 2222076
ugauucccggaucuucagc

SEQ ID NO: 2222078 - RNA, 19 nt, Artificial Sequence
  Description of Artificial Sequence: Synthetic oligonucleotide
  Sense strand starting at position 3456 of SEQ ID NO: 1883864
agaagaguguuggcuaaug

SEQ ID NO: 2222079 - RNA, 19 nt, Artificial Sequence
  Description of Artificial Sequence: Synthetic oligonucleotide
  Antisense strand to SEQ ID NO: 2222078
cauuagccaacacucuucu

SEQ ID NO: 2222080 - RNA, 19 nt, Artificial Sequence
  Description of Artificial Sequence: Synthetic oligonucleotide
  Sense strand starting at position 3458 of SEQ ID NO: 1883864
aagaguguuggcuaaugua

SEQ ID NO: 2222081 - RNA, 19 nt, Artificial Sequence
  Description of Artificial Sequence: Synthetic oligonucleotide
  Antisense strand to SEQ ID NO: 2222080
uacauuagccaacacucuu

SEQ ID NO: 2222082 - RNA, 19 nt, Artificial Sequence
  Description of Artificial Sequence: Synthetic oligonucleotide
  Sense strand starting at position 2171 of SEQ ID NO: 1883864
uguagcuccgaccaauuaa

SEQ ID NO: 2222083 - RNA, 19 nt, Artificial Sequence
  Description of Artificial Sequence: Synthetic oligonucleotide
  Antisense strand to SEQ ID NO: 2222082
uuaauuggucggagcuaca

SEQ ID NO: 2222084 - RNA, 19 nt, Artificial Sequence
  Description of Artificial Sequence: Synthetic oligonucleotide
  Sense strand starting at position 3528 of SEQ ID NO: 1883864
ugaccuguugguugagaug

SEQ ID NO: 2222085 - RNA, 19 nt, Artificial Sequence
  Description of Artificial Sequence: Synthetic oligonucleotide
  Antisense strand to SEQ ID NO: 2222084
caucucaaccaacagguca

SEQ ID NO: 2222086 - RNA, 19 nt, Artificial Sequence
  Description of Artificial Sequence: Synthetic oligonucleotide
  Sense strand starting at position 3594 of SEQ ID NO: 1883864
cccuuuccucaguggauga

SEQ ID NO: 2222087 - RNA, 19 nt, Artificial Sequence
  Description of Artificial Sequence: Synthetic oligonucleotide
  Antisense strand to SEQ ID NO: 2222086
ucauccacugaggaaaggg

SEQ ID NO: 2222088 - RNA, 19 nt, Artificial Sequence
  Description of Artificial Sequence: Synthetic oligonucleotide
  Sense strand starting at position 3133 of SEQ ID NO: 1883864
ccgcucuuuggagaagcaa

SEQ ID NO: 2222089 - RNA, 19 nt, Artificial Sequence
  Description of Artificial Sequence: Synthetic oligonucleotide
  Antisense strand to SEQ ID NO: 2222088
uugcuucuccaaagagcgg

SEQ ID NO: 2222090 - RNA, 19 nt, Artificial Sequence
  Description of Artificial Sequence: Synthetic oligonucleotide
  Sense strand starting at position 3527 of SEQ ID NO: 1883864
uugaccuguugguugagau

SEQ ID NO: 2222091 - RNA, 19 nt, Artificial Sequence
  Description of Artificial Sequence: Synthetic oligonucleotide
  Antisense strand to SEQ ID NO: 2222090
aucucaaccaacaggucaa

SEQ ID NO: 2222092 - RNA, 19 nt, Artificial Sequence
  Description of Artificial Sequence: Synthetic oligonucleotide
  Sense strand starting at position 2560 of SEQ ID NO: 1883864
gguccaaugucuccuuaaa

SEQ ID NO: 2222093 - RNA, 19 nt, Artificial Sequence
  Description of Artificial Sequence: Synthetic oligonucleotide
  Antisense strand to SEQ ID NO: 2222092
uuuaaggagacauuggacc

SEQ ID NO: 2222094 - RNA, 19 nt, Artificial Sequence
  Description of Artificial Sequence: Synthetic oligonucleotide
  Sense strand starting at position 3876 of SEQ ID NO: 1883864
cuugaaauguguccaauuc

SEQ ID NO: 2222095 - RNA, 19 nt, Artificial Sequence
  Description of Artificial Sequence: Synthetic oligonucleotide
  Antisense strand to SEQ ID NO: 2222094
gaauuggacacauuucaag

SEQ ID NO: 2222096 - RNA, 19 nt, Artificial Sequence
  Description of Artificial Sequence: Synthetic oligonucleotide
  Sense strand starting at position 2632 of SEQ ID NO: 1883864
ggaggaucacgcugaucuu

SEQ ID NO: 2222097 - RNA, 19 nt, Artificial Sequence
  Description of Artificial Sequence: Synthetic oligonucleotide
  Antisense strand to SEQ ID NO: 2222096
aagaucagcgugauccucc

SEQ ID NO: 2222098 - RNA, 19 nt, Artificial Sequence
  Description of Artificial Sequence: Synthetic oligonucleotide
  Sense strand starting at position 2742 of SEQ ID NO: 1883864
cagaaauggagucgcgaga

SEQ ID NO: 2222099 - RNA, 19 nt, Artificial Sequence
  Description of Artificial Sequence: Synthetic oligonucleotide
  Antisense strand to SEQ ID NO: 2222098
ucucgcgacuccauuucug

SEQ ID NO: 2222100 - RNA, 19 nt, Artificial Sequence
  Description of Artificial Sequence: Synthetic oligonucleotide
  Sense strand starting at position 3604 of SEQ ID NO: 1883864
aguggaugacucggugacu

SEQ ID NO: 2222101 - RNA, 19 nt, Artificial Sequence
  Description of Artificial Sequence: Synthetic oligonucleotide
  Antisense strand to SEQ ID NO: 2222100
agucaccgagucauccacu

SEQ ID NO: 2222102 - RNA, 19 nt, Artificial Sequence
  Description of Artificial Sequence: Synthetic oligonucleotide
  Sense strand starting at position 3854 of SEQ ID NO: 1883864
agccacaugugacuguuaa

SEQ ID NO: 2222103 - RNA, 19 nt, Artificial Sequence
  Description of Artificial Sequence: Synthetic oligonucleotide
  Antisense strand to SEQ ID NO: 2222102
uuaacagucacauguggcu

SEQ ID NO: 2222104 - RNA, 19 nt, Artificial Sequence
  Description of Artificial Sequence: Synthetic oligonucleotide
  Sense strand starting at position 2635 of SEQ ID NO: 1883864
ggaucacgcugaucuuacu

SEQ ID NO: 2222105 - RNA, 19 nt, Artificial Sequence
  Description of Artificial Sequence: Synthetic oligonucleotide
  Antisense strand to SEQ ID NO: 2222104
aguaagaucagcgugaucc

SEQ ID NO: 2222106 - RNA, 19 nt, Artificial Sequence
  Description of Artificial Sequence: Synthetic oligonucleotide
  Sense strand starting at position 3605 of SEQ ID NO: 1883864
guggaugacucggugacuu

SEQ ID NO: 2222107 - RNA, 19 nt, Artificial Sequence
  Description of Artificial Sequence: Synthetic oligonucleotide
  Antisense strand to SEQ ID NO: 2222106
aagucaccgagucauccac

SEQ ID NO: 2222108 - RNA, 19 nt, Artificial Sequence
  Description of Artificial Sequence: Synthetic oligonucleotide
  Sense strand starting at position 2832 of SEQ ID NO: 1883864
ccauuuaguuccgaaacag

SEQ ID NO: 2222109 - RNA, 19 nt, Artificial Sequence
  Description of Artificial Sequence: Synthetic oligonucleotide
  Antisense strand to SEQ ID NO: 2222108
cuguuucggaacuaaaugg

SEQ ID NO: 2222110 - RNA, 19 nt, Artificial Sequence
  Description of Artificial Sequence: Synthetic oligonucleotide
  Sense strand starting at position 3855 of SEQ ID NO: 1883864
gccacaugugacuguuaag

SEQ ID NO: 2222111 - RNA, 19 nt, Artificial Sequence
  Description of Artificial Sequence: Synthetic oligonucleotide
  Antisense strand to SEQ ID NO: 2222110
cuuaacagucacauguggc

SEQ ID NO: 2222112 - RNA, 19 nt, Artificial Sequence
  Description of Artificial Sequence: Synthetic oligonucleotide
  Sense strand starting at position 75 of SEQ ID NO: 1883864
ugaugcggugccugaagaa

SEQ ID NO: 2222113 - RNA, 19 nt, Artificial Sequence
  Description of Artificial Sequence: Synthetic oligonucleotide
  Antisense strand to SEQ ID NO: 2222112
uucuucaggcaccgcauca

SEQ ID NO: 2222114 - RNA, 19 nt, Artificial Sequence
  Description of Artificial Sequence: Synthetic oligonucleotide
  Sense strand starting at position 2273 of SEQ ID NO: 1883864
gagcguucgaaccgggaaa

SEQ ID NO: 2222115 - RNA, 19 nt, Artificial Sequence
  Description of Artificial Sequence: Synthetic oligonucleotide
  Antisense strand to SEQ ID NO: 2222114
uuucccgguucgaacgcuc

SEQ ID NO: 2222116 - RNA, 19 nt, Artificial Sequence
  Description of Artificial Sequence: Synthetic oligonucleotide
  Sense strand starting at position 2078 of SEQ ID NO: 1883864
uguguuagugcccaucauu

SEQ ID NO: 2222117 - RNA, 19 nt, Artificial Sequence
  Description of Artificial Sequence: Synthetic oligonucleotide
  Antisense strand to SEQ ID NO: 2222116
aaugaugggcacuaacaca

SEQ ID NO: 2222118 - RNA, 19 nt, Artificial Sequence
  Description of Artificial Sequence: Synthetic oligonucleotide
  Sense strand starting at position 2821 of SEQ ID NO: 1883864
ggcugugauugccauuuag

SEQ ID NO: 2222119 - RNA, 19 nt, Artificial Sequence
  Description of Artificial Sequence: Synthetic oligonucleotide
  Antisense strand to SEQ ID NO: 2222118
cuaaauggcaaucacagcc

SEQ ID NO: 2222120 - RNA, 19 nt, Artificial Sequence
  Description of Artificial Sequence: Synthetic oligonucleotide
  Sense strand starting at position 2077 of SEQ ID NO: 1883864
cuguguuagugcccaucau

SEQ ID NO: 2222121 - RNA, 19 nt, Artificial Sequence
  Description of Artificial Sequence: Synthetic oligonucleotide
  Antisense strand to SEQ ID NO: 2222120
augaugggcacuaacacag

SEQ ID NO: 2222122 - RNA, 19 nt, Artificial Sequence
  Description of Artificial Sequence: Synthetic oligonucleotide
  Sense strand starting at position 2645 of SEQ ID NO: 1883864
gaucuuacuucguucgguu

SEQ ID NO: 2222123 - RNA, 19 nt, Artificial Sequence
  Description of Artificial Sequence: Synthetic oligonucleotide
  Antisense strand to SEQ ID NO: 2222122
aaccgaacgaaguaagauc

SEQ ID NO: 2222124 - RNA, 19 nt, Artificial Sequence
  Description of Artificial Sequence: Synthetic oligonucleotide
  Sense strand starting at position 2831 of SEQ ID NO: 1883864
gccauuuaguuccgaaaca

SEQ ID NO: 2222125 - RNA, 19 nt, Artificial Sequence
  Description of Artificial Sequence: Synthetic oligonucleotide
  Antisense strand to SEQ ID NO: 2222124
uguuucggaacuaaauggc

SEQ ID NO: 2222126 - RNA, 19 nt, Artificial Sequence
  Description of Artificial Sequence: Synthetic oligonucleotide
  Sense strand starting at position 2583 of SEQ ID NO: 1883864
caagcucggccuuguguaa

SEQ ID NO: 2222127 - RNA, 19 nt, Artificial Sequence
  Description of Artificial Sequence: Synthetic oligonucleotide
  Antisense strand to SEQ ID NO: 2222126
uuacacaaggccgagcuug

SEQ ID NO: 2222128 - RNA, 19 nt, Artificial Sequence
  Description of Artificial Sequence: Synthetic oligonucleotide
  Sense strand starting at position 2548 of SEQ ID NO: 1883864
cggacuaauuaggguccaa

SEQ ID NO: 2222129 - RNA, 19 nt, Artificial Sequence
  Description of Artificial Sequence: Synthetic oligonucleotide
  Antisense strand to SEQ ID NO: 2222128
uuggacccuaauuaguccg

SEQ ID NO: 2222130 - RNA, 19 nt, Artificial Sequence
  Description of Artificial Sequence: Synthetic oligonucleotide
  Sense strand starting at position 3454 of SEQ ID NO: 1883864
caagaagaguguuggcuaa

SEQ ID NO: 2222131 - RNA, 19 nt, Artificial Sequence
  Description of Artificial Sequence: Synthetic oligonucleotide
  Antisense strand to SEQ ID NO: 2222130
uuagccaacacucuucuug

SEQ ID NO: 2222132 - RNA, 19 nt, Artificial Sequence
  Description of Artificial Sequence: Synthetic oligonucleotide
  Sense strand starting at position 3492 of SEQ ID NO: 1883864
gacguuuauuucuaugcgu

SEQ ID NO: 2222133 - RNA, 19 nt, Artificial Sequence
  Description of Artificial Sequence: Synthetic oligonucleotide
  Antisense strand to SEQ ID NO: 2222132
acgcauagaaauaaacguc

SEQ ID NO: 2222134 - RNA, 19 nt, Artificial Sequence
  Description of Artificial Sequence: Synthetic oligonucleotide
  Sense strand starting at position 3461 of SEQ ID NO: 1883864
aguguuggcuaauguaaca

SEQ ID NO: 2222135 - RNA, 19 nt, Artificial Sequence
  Description of Artificial Sequence: Synthetic oligonucleotide
  Antisense strand to SEQ ID NO: 2222134
uguuacauuagccaacacu

SEQ ID NO: 2222136 - RNA, 19 nt, Artificial Sequence
  Description of Artificial Sequence: Synthetic oligonucleotide
  Sense strand starting at position 2168 of SEQ ID NO: 1883864
gccuguagcuccgaccaau

SEQ ID NO: 2222137 - RNA, 19 nt, Artificial Sequence
  Description of Artificial Sequence: Synthetic oligonucleotide
  Antisense strand to SEQ ID NO: 2222136
auuggucggagcuacaggc

SEQ ID NO: 2222138 - RNA, 19 nt, Artificial Sequence
  Description of Artificial Sequence: Synthetic oligonucleotide
  Sense strand starting at position 3509 of SEQ ID NO: 1883864
gugcuugccuacuguaacu

SEQ ID NO: 2222139 - RNA, 19 nt, Artificial Sequence
  Description of Artificial Sequence: Synthetic oligonucleotide
  Antisense strand to SEQ ID NO: 2222138
aguuacaguaggcaagcac

SEQ ID NO: 2222140 - RNA, 19 nt, Artificial Sequence
  Description of Artificial Sequence: Synthetic oligonucleotide
  Sense strand starting at position 1700 of SEQ ID NO: 1883865
gaguuugugcuguaaauuu

SEQ ID NO: 2222141 - RNA, 19 nt, Artificial Sequence
  Description of Artificial Sequence: Synthetic oligonucleotide
  Antisense strand to SEQ ID NO: 2222140
aaauuuacagcacaaacuc

SEQ ID NO: 2222142 - RNA, 19 nt, Artificial Sequence
  Description of Artificial Sequence: Synthetic oligonucleotide
  Sense strand starting at position 517 of SEQ ID NO: 1883865
acucaaaggugagugaaua

SEQ ID NO: 2222143 - RNA, 19 nt, Artificial Sequence
  Description of Artificial Sequence: Synthetic oligonucleotide
  Antisense strand to SEQ ID NO: 2222142
uauucacucaccuuugagu

SEQ ID NO: 2222144 - RNA, 19 nt, Artificial Sequence
  Description of Artificial Sequence: Synthetic oligonucleotide
  Sense strand starting at position 3121 of SEQ ID NO: 1883865
gugaccucucccuaaugaa

SEQ ID NO: 2222145 - RNA, 19 nt, Artificial Sequence
  Description of Artificial Sequence: Synthetic oligonucleotide
  Antisense strand to SEQ ID NO: 2222144
uucauuagggagaggucac

SEQ ID NO: 2222146 - RNA, 19 nt, Artificial Sequence
  Description of Artificial Sequence: Synthetic oligonucleotide
  Sense strand starting at position 3835 of SEQ ID NO: 1883865
ugauaucuacuuuacaggu

SEQ ID NO: 2222147 - RNA, 19 nt, Artificial Sequence
  Description of Artificial Sequence: Synthetic oligonucleotide
  Antisense strand to SEQ ID NO: 2222146
accuguaaaguagauauca

SEQ ID NO: 2222148 - RNA, 19 nt, Artificial Sequence
  Description of Artificial Sequence: Synthetic oligonucleotide
  Sense strand starting at position 1147 of SEQ ID NO: 1883865
uucuuugaacccugaagag

SEQ ID NO: 2222149 - RNA, 19 nt, Artificial Sequence
  Description of Artificial Sequence: Synthetic oligonucleotide
  Antisense strand to SEQ ID NO: 2222148
cucuucaggguucaaagaa

SEQ ID NO: 2222150 - RNA, 19 nt, Artificial Sequence
  Description of Artificial Sequence: Synthetic oligonucleotide
  Sense strand starting at position 2535 of SEQ ID NO: 1883865
ggcccauuagauugcauuu

SEQ ID NO: 2222151 - RNA, 19 nt, Artificial Sequence
  Description of Artificial Sequence: Synthetic oligonucleotide
  Antisense strand to SEQ ID NO: 2222150
aaaugcaaucuaaugggcc

SEQ ID NO: 2222152 - RNA, 19 nt, Artificial Sequence
  Description of Artificial Sequence: Synthetic oligonucleotide
  Sense strand starting at position 518 of SEQ ID NO: 1883865
cucaaaggugagugaauaa

SEQ ID NO: 2222153 - RNA, 19 nt, Artificial Sequence
  Description of Artificial Sequence: Synthetic oligonucleotide
  Antisense strand to SEQ ID NO: 2222152
uuauucacucaccuuugag

SEQ ID NO: 2222154 - RNA, 19 nt, Artificial Sequence
  Description of Artificial Sequence: Synthetic oligonucleotide
  Sense strand starting at position 44 of SEQ ID NO: 1883865
auuauucugcaaggaaaua

SEQ ID NO: 2222155 - RNA, 19 nt, Artificial Sequence
  Description of Artificial Sequence: Synthetic oligonucleotide
  Antisense strand to SEQ ID NO: 2222154
uauuuccuugcagaauaau

SEQ ID NO: 2222156 - RNA, 19 nt, Artificial Sequence
  Description of Artificial Sequence: Synthetic oligonucleotide
  Sense strand starting at position 3721 of SEQ ID NO: 1883865
cugcaaaugcuggaacuaa

SEQ ID NO: 2222157 - RNA, 19 nt, Artificial Sequence
  Description of Artificial Sequence: Synthetic oligonucleotide
  Antisense strand to SEQ ID NO: 2222156
uuaguuccagcauuugcag

SEQ ID NO: 2222158 - RNA, 19 nt, Artificial Sequence
  Description of Artificial Sequence: Synthetic oligonucleotide
  Sense strand starting at position 41 of SEQ ID NO: 1883865
uguauuauucugcaaggaa

SEQ ID NO: 2222159 - RNA, 19 nt, Artificial Sequence
  Description of Artificial Sequence: Synthetic oligonucleotide
  Antisense strand to SEQ ID NO: 2222158
uuccuugcagaauaauaca

SEQ ID NO: 2222160 - RNA, 19 nt, Artificial Sequence
  Description of Artificial Sequence: Synthetic oligonucleotide
  Sense strand starting at position 2706 of SEQ ID NO: 1883865
caaccuauuguggaauugu

SEQ ID NO: 2222161 - RNA, 19 nt, Artificial Sequence
  Description of Artificial Sequence: Synthetic oligonucleotide
  Antisense strand to SEQ ID NO: 2222160
acaauuccacaauagguug

SEQ ID NO: 2222162 - RNA, 19 nt, Artificial Sequence
  Description of Artificial Sequence: Synthetic oligonucleotide
  Sense strand starting at position 1461 of SEQ ID NO: 1883865
aagaguagggcuugaaauc

SEQ ID NO: 2222163 - RNA, 19 nt, Artificial Sequence
  Description of Artificial Sequence: Synthetic oligonucleotide
  Antisense strand to SEQ ID NO: 2222162
gauuucaagcccuacucuu

SEQ ID NO: 2222164 - RNA, 19 nt, Artificial Sequence
  Description of Artificial Sequence: Synthetic oligonucleotide
  Sense strand starting at position 137 of SEQ ID NO: 1883865
uugugauauugacucaaac

SEQ ID NO: 2222165 - RNA, 19 nt, Artificial Sequence
  Description of Artificial Sequence: Synthetic oligonucleotide
  Antisense strand to SEQ ID NO: 2222164
guuugagucaauaucacaa

SEQ ID NO: 2222166 - RNA, 19 nt, Artificial Sequence
  Description of Artificial Sequence: Synthetic oligonucleotide
  Sense strand starting at position 2787 of SEQ ID NO: 1883865
uuuagaaaguagucauaug

SEQ ID NO: 2222167 - RNA, 19 nt, Artificial Sequence
  Description of Artificial Sequence: Synthetic oligonucleotide
  Antisense strand to SEQ ID NO: 2222166
cauaugacuacuuucuaaa

SEQ ID NO: 2222168 - RNA, 19 nt, Artificial Sequence
  Description of Artificial Sequence: Synthetic oligonucleotide
  Sense strand starting at position 2433 of SEQ ID NO: 1883865
uuaaguuaggcacauuacu

SEQ ID NO: 2222169 - RNA, 19 nt, Artificial Sequence
  Description of Artificial Sequence: Synthetic oligonucleotide
  Antisense strand to SEQ ID NO: 2222168
aguaaugugccuaacuuaa

SEQ ID NO: 2222170 - RNA, 19 nt, Artificial Sequence
  Description of Artificial Sequence: Synthetic oligonucleotide
  Sense strand starting at position 3013 of SEQ ID NO: 1883865
uccugaaauuucuagagau

SEQ ID NO: 2222171 - RNA, 19 nt, Artificial Sequence
  Description of Artificial Sequence: Synthetic oligonucleotide
  Antisense strand to SEQ ID NO: 2222170
aucucuagaaauuucagga

SEQ ID NO: 2222172 - RNA, 19 nt, Artificial Sequence
  Description of Artificial Sequence: Synthetic oligonucleotide
  Sense strand starting at position 1305 of SEQ ID NO: 1883865
ucagacuggcucugaggau

SEQ ID NO: 2222173 - RNA, 19 nt, Artificial Sequence
  Description of Artificial Sequence: Synthetic oligonucleotide
  Antisense strand to SEQ ID NO: 2222172
auccucagagccagucuga

SEQ ID NO: 2222174 - RNA, 19 nt, Artificial Sequence
  Description of Artificial Sequence: Synthetic oligonucleotide
  Sense strand starting at position 3779 of SEQ ID NO: 1883865
ugcagagagguucauguau

SEQ ID NO: 2222175 - RNA, 19 nt, Artificial Sequence
  Description of Artificial Sequence: Synthetic oligonucleotide
  Antisense strand to SEQ ID NO: 2222174
auacaugaaccucucugca

SEQ ID NO: 2222176 - RNA, 19 nt, Artificial Sequence
  Description of Artificial Sequence: Synthetic oligonucleotide
  Sense strand starting at position 1725 of SEQ ID NO: 1883865
uugguuucagugcaagaga

SEQ ID NO: 2222177 - RNA, 19 nt, Artificial Sequence
  Description of Artificial Sequence: Synthetic oligonucleotide
  Antisense strand to SEQ ID NO: 2222176
ucucuugcacugaaaccaa

SEQ ID NO: 2222178 - RNA, 19 nt, Artificial Sequence
  Description of Artificial Sequence: Synthetic oligonucleotide
  Sense strand starting at position 3559 of SEQ ID NO: 1883865
aguggcuuaccaugauaaa

SEQ ID NO: 2222179 - RNA, 19 nt, Artificial Sequence
  Description of Artificial Sequence: Synthetic oligonucleotide
  Antisense strand to SEQ ID NO: 2222178
uuuaucaugguaagccacu

SEQ ID NO: 2222180 - RNA, 19 nt, Artificial Sequence
  Description of Artificial Sequence: Synthetic oligonucleotide
  Sense strand starting at position 1285 of SEQ ID NO: 1883865
acugguauuggucagaguc

SEQ ID NO: 2222181 - RNA, 19 nt, Artificial Sequence
  Description of Artificial Sequence: Synthetic oligonucleotide
  Antisense strand to SEQ ID NO: 2222180
gacucugaccaauaccagu

SEQ ID NO: 2222182 - RNA, 19 nt, Artificial Sequence
  Description of Artificial Sequence: Synthetic oligonucleotide
  Sense strand starting at position 1318 of SEQ ID NO: 1883865
gaggauagcugacuaagcu

SEQ ID NO: 2222183 - RNA, 19 nt, Artificial Sequence
  Description of Artificial Sequence: Synthetic oligonucleotide
  Antisense strand to SEQ ID NO: 2222182
agcuuagucagcuauccuc

SEQ ID NO: 2222184 - RNA, 19 nt, Artificial Sequence
  Description of Artificial Sequence: Synthetic oligonucleotide
  Sense strand starting at position 3230 of SEQ ID NO: 1883865
guuuccuuuguugauaaca

SEQ ID NO: 2222185 - RNA, 19 nt, Artificial Sequence
  Description of Artificial Sequence: Synthetic oligonucleotide
  Antisense strand to SEQ ID NO: 2222184
uguuaucaacaaaggaaac

SEQ ID NO: 2222186 - RNA, 19 nt, Artificial Sequence
  Description of Artificial Sequence: Synthetic oligonucleotide
  Sense strand starting at position 3346 of SEQ ID NO: 1883865
gucauuacagagcaucgau

SEQ ID NO: 2222187 - RNA, 19 nt, Artificial Sequence
  Description of Artificial Sequence: Synthetic oligonucleotide
  Antisense strand to SEQ ID NO: 2222186
aucgaugcucuguaaugac

SEQ ID NO: 2222188 - RNA, 19 nt, Artificial Sequence
  Description of Artificial Sequence: Synthetic oligonucleotide
  Sense strand starting at position 2291 of SEQ ID NO: 1883865
uagauagcucuuggguaaa

SEQ ID NO: 2222189 - RNA, 19 nt, Artificial Sequence
  Description of Artificial Sequence: Synthetic oligonucleotide
  Antisense strand to SEQ ID NO: 2222188
uuuacccaagagcuaucua

SEQ ID NO: 2222190 - RNA, 19 nt, Artificial Sequence
  Description of Artificial Sequence: Synthetic oligonucleotide
  Sense strand starting at position 1798 of SEQ ID NO: 1883865
gggcuuaagcaaugaugac

SEQ ID NO: 2222191 - RNA, 19 nt, Artificial Sequence
  Description of Artificial Sequence: Synthetic oligonucleotide
  Antisense strand to SEQ ID NO: 2222190
gucaucauugcuuaagccc

SEQ ID NO: 2222192 - RNA, 19 nt, Artificial Sequence
  Description of Artificial Sequence: Synthetic oligonucleotide
  Sense strand starting at position 3190 of SEQ ID NO: 1883865
uuuggauguaagcagucau

SEQ ID NO: 2222193 - RNA, 19 nt, Artificial Sequence
  Description of Artificial Sequence: Synthetic oligonucleotide
  Antisense strand to SEQ ID NO: 2222192
augacugcuuacauccaaa

SEQ ID NO: 2222194 - RNA, 19 nt, Artificial Sequence
  Description of Artificial Sequence: Synthetic oligonucleotide
  Sense strand starting at position 3120 of SEQ ID NO: 1883865
ugugaccucucccuaauga

SEQ ID NO: 2222195 - RNA, 19 nt, Artificial Sequence
  Description of Artificial Sequence: Synthetic oligonucleotide
  Antisense strand to SEQ ID NO: 2222194
ucauuagggagaggucaca

SEQ ID NO: 2222196 - RNA, 19 nt, Artificial Sequence
  Description of Artificial Sequence: Synthetic oligonucleotide
  Sense strand starting at position 40 of SEQ ID NO: 1883865
auguauuauucugcaagga

SEQ ID NO: 2222197 - RNA, 19 nt, Artificial Sequence
  Description of Artificial Sequence: Synthetic oligonucleotide
  Antisense strand to SEQ ID NO: 2222196
uccuugcagaauaauacau

SEQ ID NO: 2222198 - RNA, 19 nt, Artificial Sequence
  Description of Artificial Sequence: Synthetic oligonucleotide
  Sense strand starting at position 183 of SEQ ID NO: 1883865
guugaaccuuuagcugaaa

SEQ ID NO: 2222199 - RNA, 19 nt, Artificial Sequence
  Description of Artificial Sequence: Synthetic oligonucleotide
  Antisense strand to SEQ ID NO: 2222198
uuucagcuaaagguucaac

SEQ ID NO: 2222200 - RNA, 19 nt, Artificial Sequence
  Description of Artificial Sequence: Synthetic oligonucleotide
  Sense strand starting at position 3277 of SEQ ID NO: 1883865
aaauauuucugggagucug

SEQ ID NO: 2222201 - RNA, 19 nt, Artificial Sequence
  Description of Artificial Sequence: Synthetic oligonucleotide
  Antisense strand to SEQ ID NO: 2222200
cagacucccagaaauauuu

SEQ ID NO: 2222202 - RNA, 19 nt, Artificial Sequence
  Description of Artificial Sequence: Synthetic oligonucleotide
  Sense strand starting at position 174 of SEQ ID NO: 1883865
uuuaaucucguugaaccuu

SEQ ID NO: 2222203 - RNA, 19 nt, Artificial Sequence
  Description of Artificial Sequence: Synthetic oligonucleotide
  Antisense strand to SEQ ID NO: 2222202
aagguucaacgagauuaaa

SEQ ID NO: 2222204 - RNA, 19 nt, Artificial Sequence
  Description of Artificial Sequence: Synthetic oligonucleotide
  Sense strand starting at position 1499 of SEQ ID NO: 1883865
aagcauguaugggcuaaga

SEQ ID NO: 2222205 - RNA, 19 nt, Artificial Sequence
  Description of Artificial Sequence: Synthetic oligonucleotide
  Antisense strand to SEQ ID NO: 2222204
ucuuagcccauacaugcuu

SEQ ID NO: 2222206 - RNA, 19 nt, Artificial Sequence
  Description of Artificial Sequence: Synthetic oligonucleotide
  Sense strand starting at position 3983 of SEQ ID NO: 1883865
uguuguaggcuccaacaua

SEQ ID NO: 2222207 - RNA, 19 nt, Artificial Sequence
  Description of Artificial Sequence: Synthetic oligonucleotide
  Antisense strand to SEQ ID NO: 2222206
uauguuggagccuacaaca

SEQ ID NO: 2222208 - RNA, 19 nt, Artificial Sequence
  Description of Artificial Sequence: Synthetic oligonucleotide
  Sense strand starting at position 1293 of SEQ ID NO: 1883865
uggucagaguccucagacu

SEQ ID NO: 2222209 - RNA, 19 nt, Artificial Sequence
  Description of Artificial Sequence: Synthetic oligonucleotide
  Antisense strand to SEQ ID NO: 2222208
agucugaggacucugacca

SEQ ID NO: 2222210 - RNA, 19 nt, Artificial Sequence
  Description of Artificial Sequence: Synthetic oligonucleotide
  Sense strand starting at position 3684 of SEQ ID NO: 1883865
acuugauggugguuacuca

SEQ ID NO: 2222211 - RNA, 19 nt, Artificial Sequence
  Description of Artificial Sequence: Synthetic oligonucleotide
  Antisense strand to SEQ ID NO: 2222210
ugaguaaccaccaucaagu

SEQ ID NO: 2222212 - RNA, 19 nt, Artificial Sequence
  Description of Artificial Sequence: Synthetic oligonucleotide
  Sense strand starting at position 99 of SEQ ID NO: 1883865
gcaguuuauccuuaucuua

SEQ ID NO: 2222213 - RNA, 19 nt, Artificial Sequence
  Description of Artificial Sequence: Synthetic oligonucleotide
  Antisense strand to SEQ ID NO: 2222212
uaagauaaggauaaacugc

SEQ ID NO: 2222214 - RNA, 19 nt, Artificial Sequence
  Description of Artificial Sequence: Synthetic oligonucleotide
  Sense strand starting at position 126 of SEQ ID NO: 1883865
cuaaauccuguuugugaua

SEQ ID NO: 2222215 - RNA, 19 nt, Artificial Sequence
  Description of Artificial Sequence: Synthetic oligonucleotide
  Antisense strand to SEQ ID NO: 2222214
uaucacaaacaggauuuag

SEQ ID NO: 2222216 - RNA, 19 nt, Artificial Sequence
  Description of Artificial Sequence: Synthetic oligonucleotide
  Sense strand starting at position 1501 of SEQ ID NO: 1883865
gcauguaugggcuaagagu

SEQ ID NO: 2222217 - RNA, 19 nt, Artificial Sequence
  Description of Artificial Sequence: Synthetic oligonucleotide
  Antisense strand to SEQ ID NO: 2222216
acucuuagcccauacaugc

SEQ ID NO: 2222218 - RNA, 19 nt, Artificial Sequence
  Description of Artificial Sequence: Synthetic oligonucleotide
  Sense strand starting at position 3227 of SEQ ID NO: 1883865
agaguuuccuuuguugaua

SEQ ID NO: 2222219 - RNA, 19 nt, Artificial Sequence
  Description of Artificial Sequence: Synthetic oligonucleotide
  Antisense strand to SEQ ID NO: 2222218
uaucaacaaaggaaacucu

SEQ ID NO: 2222220 - RNA, 19 nt, Artificial Sequence
  Description of Artificial Sequence: Synthetic oligonucleotide
  Sense strand starting at position 335 of SEQ ID NO: 1883866
ugcagucgcacuguaauau

SEQ ID NO: 2222221 - RNA, 19 nt, Artificial Sequence
  Description of Artificial Sequence: Synthetic oligonucleotide
  Antisense strand to SEQ ID NO: 2222220
auauuacagugcgacugca

SEQ ID NO: 2222222 - RNA, 19 nt, Artificial Sequence
  Description of Artificial Sequence: Synthetic oligonucleotide
  Sense strand starting at position 2583 of SEQ ID NO: 1883866
gaguuugugcuguaaauuu

SEQ ID NO: 2222223 - RNA, 19 nt, Artificial Sequence
  Description of Artificial Sequence: Synthetic oligonucleotide
  Antisense strand to SEQ ID NO: 2222222
aaauuuacagcacaaacuc

SEQ ID NO: 2222224 - RNA, 19 nt, Artificial Sequence
  Description of Artificial Sequence: Synthetic oligonucleotide
  Sense strand starting at position 188 of SEQ ID NO: 1883866
gugcaucguacuuuaugua

SEQ ID NO: 2222225 - RNA, 19 nt, Artificial Sequence
  Description of Artificial Sequence: Synthetic oligonucleotide
  Antisense strand to SEQ ID NO: 2222224
uacauaaaguacgaugcac

SEQ ID NO: 2222226 - RNA, 19 nt, Artificial Sequence
  Description of Artificial Sequence: Synthetic oligonucleotide
  Sense strand starting at position 1400 of SEQ ID NO: 1883866
acucaaaggugagugaaua

SEQ ID NO: 2222227 - RNA, 19 nt, Artificial Sequence
  Description of Artificial Sequence: Synthetic oligonucleotide
  Antisense strand to SEQ ID NO: 2222226
uauucacucaccuuugagu

SEQ ID NO: 2222228 - RNA, 19 nt, Artificial Sequence
  Description of Artificial Sequence: Synthetic oligonucleotide
  Sense strand starting at position 2030 of SEQ ID NO: 1883866
uucuuugaacccugaagag

SEQ ID NO: 2222229 - RNA, 19 nt, Artificial Sequence
  Description of Artificial Sequence: Synthetic oligonucleotide
  Antisense strand to SEQ ID NO: 2222228
cucuucaggguucaaagaa

SEQ ID NO: 2222230 - RNA, 19 nt, Artificial Sequence
  Description of Artificial Sequence: Synthetic oligonucleotide
  Sense strand starting at position 3418 of SEQ ID NO: 1883866
ggcccauuagauugcauuu

SEQ ID NO: 2222231 - RNA, 19 nt, Artificial Sequence
  Description of Artificial Sequence: Synthetic oligonucleotide
  Antisense strand to SEQ ID NO: 2222230
aaaugcaaucuaaugggcc

SEQ ID NO: 2222232 - RNA, 19 nt, Artificial Sequence
  Description of Artificial Sequence: Synthetic oligonucleotide
  Sense strand starting at position 301 of SEQ ID NO: 1883866
gguaaaucagauuaguucu

SEQ ID NO: 2222233 - RNA, 19 nt, Artificial Sequence
  Description of Artificial Sequence: Synthetic oligonucleotide
  Antisense strand to SEQ ID NO: 2222232
agaacuaaucugauuuacc

SEQ ID NO: 2222234 - RNA, 19 nt, Artificial Sequence
  Description of Artificial Sequence: Synthetic oligonucleotide
  Sense strand starting at position 1401 of SEQ ID NO: 1883866
cucaaaggugagugaauaa

SEQ ID NO: 2222235 - RNA, 19 nt, Artificial Sequence
  Description of Artificial Sequence: Synthetic oligonucleotide
  Antisense strand to SEQ ID NO: 2222234
uuauucacucaccuuugag

SEQ ID NO: 2222236 - RNA, 19 nt, Artificial Sequence
  Description of Artificial Sequence: Synthetic oligonucleotide
  Sense strand starting at position 927 of SEQ ID NO: 1883866
auuauucugcaaggaaaua

SEQ ID NO: 2222237 - RNA, 19 nt, Artificial Sequence
  Description of Artificial Sequence: Synthetic oligonucleotide
  Antisense strand to SEQ ID NO: 2222236
uauuuccuugcagaauaau

SEQ ID NO: 2222238 - RNA, 19 nt, Artificial Sequence
  Description of Artificial Sequence: Synthetic oligonucleotide
  Sense strand starting at position 333 of SEQ ID NO: 1883866
ucugcagucgcacuguaau

SEQ ID NO: 2222239 - RNA, 19 nt, Artificial Sequence
  Description of Artificial Sequence: Synthetic oligonucleotide
  Antisense strand to SEQ ID NO: 2222238
auuacagugcgacugcaga

SEQ ID NO: 2222240 - RNA, 19 nt, Artificial Sequence
  Description of Artificial Sequence: Synthetic oligonucleotide
  Sense strand starting at position 111 of SEQ ID NO: 1883866
ucuauuauaguugggauaa

SEQ ID NO: 2222241 - RNA, 19 nt, Artificial Sequence
  Description of Artificial Sequence: Synthetic oligonucleotide
  Antisense strand to SEQ ID NO: 2222240
uuaucccaacuauaauaga

SEQ ID NO: 2222242 - RNA, 19 nt, Artificial Sequence
  Description of Artificial Sequence: Synthetic oligonucleotide
  Sense strand starting at position 924 of SEQ ID NO: 1883866
uguauuauucugcaaggaa

SEQ ID NO: 2222243 - RNA, 19 nt, Artificial Sequence
  Description of Artificial Sequence: Synthetic oligonucleotide
  Antisense strand to SEQ ID NO: 2222242
uuccuugcagaauaauaca

SEQ ID NO: 2222244 - RNA, 19 nt, Artificial Sequence
  Description of Artificial Sequence: Synthetic oligonucleotide
  Sense strand starting at position 3589 of SEQ ID NO: 1883866
caaccuauuguggaauugu

SEQ ID NO: 2222245 - RNA, 19 nt, Artificial Sequence
  Description of Artificial Sequence: Synthetic oligonucleotide
  Antisense strand to SEQ ID NO: 2222244
acaauuccacaauagguug

SEQ ID NO: 2222246 - RNA, 19 nt, Artificial Sequence
  Description of Artificial Sequence: Synthetic oligonucleotide
  Sense strand starting at position 2344 of SEQ ID NO: 1883866
aagaguagggcuugaaauc

SEQ ID NO: 2222247 - RNA, 19 nt, Artificial Sequence
  Description of Artificial Sequence: Synthetic oligonucleotide
  Antisense strand to SEQ ID NO: 2222246
gauuucaagcccuacucuu

SEQ ID NO: 2222248 - RNA, 19 nt, Artificial Sequence
  Description of Artificial Sequence: Synthetic oligonucleotide
  Sense strand starting at position 1020 of SEQ ID NO: 1883866
uugugauauugacucaaac

SEQ ID NO: 2222249 - RNA, 19 nt, Artificial Sequence
  Description of Artificial Sequence: Synthetic oligonucleotide
  Antisense strand to SEQ ID NO: 2222248
guuugagucaauaucacaa

SEQ ID NO: 2222250 - RNA, 19 nt, Artificial Sequence
  Description of Artificial Sequence: Synthetic oligonucleotide
  Sense strand starting at position 3670 of SEQ ID NO: 1883866
uuuagaaaguagucauaug

SEQ ID NO: 2222251 - RNA, 19 nt, Artificial Sequence
  Description of Artificial Sequence: Synthetic oligonucleotide
  Antisense strand to SEQ ID NO: 2222250
cauaugacuacuuucuaaa

SEQ ID NO: 2222252 - RNA, 19 nt, Artificial Sequence
  Description of Artificial Sequence: Synthetic oligonucleotide
  Sense strand starting at position 3316 of SEQ ID NO: 1883866
uuaaguuaggcacauuacu

SEQ ID NO: 2222253 - RNA, 19 nt, Artificial Sequence
  Description of Artificial Sequence: Synthetic oligonucleotide
  Antisense strand to SEQ ID NO: 2222252
aguaaugugccuaacuuaa

SEQ ID NO: 2222254 - RNA, 19 nt, Artificial Sequence
  Description of Artificial Sequence: Synthetic oligonucleotide
  Sense strand starting at position 109 of SEQ ID NO: 1883866
auucuauuauaguugggau

SEQ ID NO: 2222255 - RNA, 19 nt, Artificial Sequence
  Description of Artificial Sequence: Synthetic oligonucleotide
  Antisense strand to SEQ ID NO: 2222254
aucccaacuauaauagaau

SEQ ID NO: 2222256 - RNA, 19 nt, Artificial Sequence
  Description of Artificial Sequence: Synthetic oligonucleotide
  Sense strand starting at position 3896 of SEQ ID NO: 1883866
uccugaaauuucuagagau

SEQ ID NO: 2222257 - RNA, 19 nt, Artificial Sequence
  Description of Artificial Sequence: Synthetic oligonucleotide
  Antisense strand to SEQ ID NO: 2222256
aucucuagaaauuucagga

SEQ ID NO: 2222258 - RNA, 19 nt, Artificial Sequence
  Description of Artificial Sequence: Synthetic oligonucleotide
  Sense strand starting at position 825 of SEQ ID NO: 1883866
aucuccuuucuggauugua

SEQ ID NO: 2222259 - RNA, 19 nt, Artificial Sequence
  Description of Artificial Sequence: Synthetic oligonucleotide
  Antisense strand to SEQ ID NO: 2222258
uacaauccagaaaggagau

SEQ ID NO: 2222260 - RNA, 19 nt, Artificial Sequence
  Description of Artificial Sequence: Synthetic oligonucleotide
  Sense strand starting at position 2188 of SEQ ID NO: 1883866
ucagacuggcucugaggau

SEQ ID NO: 2222261 - RNA, 19 nt, Artificial Sequence
  Description of Artificial Sequence: Synthetic oligonucleotide
  Antisense strand to SEQ ID NO: 2222260
auccucagagccagucuga

SEQ ID NO: 2222262 - RNA, 19 nt, Artificial Sequence
  Description of Artificial Sequence: Synthetic oligonucleotide
  Sense strand starting at position 441 of SEQ ID NO: 1883866
agcaaacagcuguaaucua

SEQ ID NO: 2222263 - RNA, 19 nt, Artificial Sequence
  Description of Artificial Sequence: Synthetic oligonucleotide
  Antisense strand to SEQ ID NO: 2222262
uagauuacagcuguuugcu

SEQ ID NO: 2222264 - RNA, 19 nt, Artificial Sequence
  Description of Artificial Sequence: Synthetic oligonucleotide
  Sense strand starting at position 732 of SEQ ID NO: 1883866
uccagaauccauggccaau

SEQ ID NO: 2222265 - RNA, 19 nt, Artificial Sequence
  Description of Artificial Sequence: Synthetic oligonucleotide
  Antisense strand to SEQ ID NO: 2222264
auuggccauggauucugga

SEQ ID NO: 2222266 - RNA, 19 nt, Artificial Sequence
  Description of Artificial Sequence: Synthetic oligonucleotide
  Sense strand starting at position 2608 of SEQ ID NO: 1883866
uugguuucagugcaagaga

SEQ ID NO: 2222267 - RNA, 19 nt, Artificial Sequence
  Description of Artificial Sequence: Synthetic oligonucleotide
  Antisense strand to SEQ ID NO: 2222266
ucucuugcacugaaaccaa

SEQ ID NO: 2222268 - RNA, 19 nt, Artificial Sequence
  Description of Artificial Sequence: Synthetic oligonucleotide
  Sense strand starting at position 2168 of SEQ ID NO: 1883866
acugguauuggucagaguc

SEQ ID NO: 2222269 - RNA, 19 nt, Artificial Sequence
  Description of Artificial Sequence: Synthetic oligonucleotide
  Antisense strand to SEQ ID NO: 2222268
gacucugaccaauaccagu

SEQ ID NO: 2222270 - RNA, 19 nt, Artificial Sequence
  Description of Artificial Sequence: Synthetic oligonucleotide
  Sense strand starting at position 2201 of SEQ ID NO: 1883866
gaggauagcugacuaagcu

SEQ ID NO: 2222271 - RNA, 19 nt, Artificial Sequence
  Description of Artificial Sequence: Synthetic oligonucleotide
  Antisense strand to SEQ ID NO: 2222270
agcuuagucagcuauccuc

SEQ ID NO: 2222272 - RNA, 19 nt, Artificial Sequence
  Description of Artificial Sequence: Synthetic oligonucleotide
  Sense strand starting at position 3174 of SEQ ID NO: 1883866
uagauagcucuuggguaaa

SEQ ID NO: 2222273 - RNA, 19 nt, Artificial Sequence
  Description of Artificial Sequence: Synthetic oligonucleotide
  Antisense strand to SEQ ID NO: 2222272
uuuacccaagagcuaucua

SEQ ID NO: 2222274 - RNA, 19 nt, Artificial Sequence
  Description of Artificial Sequence: Synthetic oligonucleotide
  Sense strand starting at position 2681 of SEQ ID NO: 1883866
gggcuuaagcaaugaugac

SEQ ID NO: 2222275 - RNA, 19 nt, Artificial Sequence
  Description of Artificial Sequence: Synthetic oligonucleotide
  Antisense strand to SEQ ID NO: 2222274
gucaucauugcuuaagccc

SEQ ID NO: 2222276 - RNA, 19 nt, Artificial Sequence
  Description of Artificial Sequence: Synthetic oligonucleotide
  Sense strand starting at position 923 of SEQ ID NO: 1883866
auguauuauucugcaagga

SEQ ID NO: 2222277 - RNA, 19 nt, Artificial Sequence
  Description of Artificial Sequence: Synthetic oligonucleotide
  Antisense strand to SEQ ID NO: 2222276
uccuugcagaauaauacau

SEQ ID NO: 2222278 - RNA, 19 nt, Artificial Sequence
  Description of Artificial Sequence: Synthetic oligonucleotide
  Sense strand starting at position 557 of SEQ ID NO: 1883866
uaggcauguuacucacaga

SEQ ID NO: 2222279 - RNA, 19 nt, Artificial Sequence
  Description of Artificial Sequence: Synthetic oligonucleotide
  Antisense strand to SEQ ID NO: 2222278
ucugugaguaacaugccua

SEQ ID NO: 2222280 - RNA, 19 nt, Artificial Sequence
  Description of Artificial Sequence: Synthetic oligonucleotide
  Sense strand starting at position 1066 of SEQ ID NO: 1883866
guugaaccuuuagcugaaa

SEQ ID NO: 2222281 - RNA, 19 nt, Artificial Sequence
  Description of Artificial Sequence: Synthetic oligonucleotide
  Antisense strand to SEQ ID NO: 2222280
uuucagcuaaagguucaac

SEQ ID NO: 2222282 - RNA, 19 nt, Artificial Sequence
  Description of Artificial Sequence: Synthetic oligonucleotide
  Sense strand starting at position 285 of SEQ ID NO: 1883866
ugaggaguguaucuaaggu

SEQ ID NO: 2222283 - RNA, 19 nt, Artificial Sequence
  Description of Artificial Sequence: Synthetic oligonucleotide
  Antisense strand to SEQ ID NO: 2222282
accuuagauacacuccuca

SEQ ID NO: 2222284 - RNA, 19 nt, Artificial Sequence
  Description of Artificial Sequence: Synthetic oligonucleotide
  Sense strand starting at position 1057 of SEQ ID NO: 1883866
uuuaaucucguugaaccuu

SEQ ID NO: 2222285 - RNA, 19 nt, Artificial Sequence
  Description of Artificial Sequence: Synthetic oligonucleotide
  Antisense strand to SEQ ID NO: 2222284
aagguucaacgagauuaaa

SEQ ID NO: 2222286 - RNA, 19 nt, Artificial Sequence
  Description of Artificial Sequence: Synthetic oligonucleotide
  Sense strand starting at position 2382 of SEQ ID NO: 1883866
aagcauguaugggcuaaga

SEQ ID NO: 2222287 - RNA, 19 nt, Artificial Sequence
  Description of Artificial Sequence: Synthetic oligonucleotide
  Antisense strand to SEQ ID NO: 2222286
ucuuagcccauacaugcuu

SEQ ID NO: 2222288 - RNA, 19 nt, Artificial Sequence
  Description of Artificial Sequence: Synthetic oligonucleotide
  Sense strand starting at position 2176 of SEQ ID NO: 1883866
uggucagaguccucagacu

SEQ ID NO: 2222289 - RNA, 19 nt, Artificial Sequence
  Description of Artificial Sequence: Synthetic oligonucleotide
  Antisense strand to SEQ ID NO: 2222288
agucugaggacucugacca

SEQ ID NO: 2222290 - RNA, 19 nt, Artificial Sequence
  Description of Artificial Sequence: Synthetic oligonucleotide
  Sense strand starting at position 982 of SEQ ID NO: 1883866
gcaguuuauccuuaucuua

SEQ ID NO: 2222291 - RNA, 19 nt, Artificial Sequence
  Description of Artificial Sequence: Synthetic oligonucleotide
  Antisense strand to SEQ ID NO: 2222290
uaagauaaggauaaacugc

SEQ ID NO: 2222292 - RNA, 19 nt, Artificial Sequence
  Description of Artificial Sequence: Synthetic oligonucleotide
  Sense strand starting at position 280 of SEQ ID NO: 1883866
ccgaaugaggaguguaucu

SEQ ID NO: 2222293 - RNA, 19 nt, Artificial Sequence
  Description of Artificial Sequence: Synthetic oligonucleotide
  Antisense strand to SEQ ID NO: 2222292
agauacacuccucauucgg

SEQ ID NO: 2222294 - RNA, 19 nt, Artificial Sequence
  Description of Artificial Sequence: Synthetic oligonucleotide
  Sense strand starting at position 171 of SEQ ID NO: 1883866
ggugcuguaacucaagagu

SEQ ID NO: 2222295 - RNA, 19 nt, Artificial Sequence
  Description of Artificial Sequence: Synthetic oligonucleotide
  Antisense strand to SEQ ID NO: 2222294
acucuugaguuacagcacc

SEQ ID NO: 2222296 - RNA, 19 nt, Artificial Sequence
  Description of Artificial Sequence: Synthetic oligonucleotide
  Sense strand starting at position 1009 of SEQ ID NO: 1883866
cuaaauccuguuugugaua

SEQ ID NO: 2222297 - RNA, 19 nt, Artificial Sequence
  Description of Artificial Sequence: Synthetic oligonucleotide
  Antisense strand to SEQ ID NO: 2222296
uaucacaaacaggauuuag

SEQ ID NO: 2222298 - RNA, 19 nt, Artificial Sequence
  Description of Artificial Sequence: Synthetic oligonucleotide
  Sense strand starting at position 2384 of SEQ ID NO: 1883866
gcauguaugggcuaagagu

SEQ ID NO: 2222299 - RNA, 19 nt, Artificial Sequence
  Description of Artificial Sequence: Synthetic oligonucleotide
  Antisense strand to SEQ ID NO: 2222298
acucuuagcccauacaugc

SEQ ID NO: 2222300 - RNA, 19 nt, Artificial Sequence
  Description of Artificial Sequence: Synthetic oligonucleotide
  Sense strand starting at position 3760 of SEQ ID NO: 1883867
auguaaucagcagaugauu

SEQ ID NO: 2222301 - RNA, 19 nt, Artificial Sequence
  Description of Artificial Sequence: Synthetic oligonucleotide
  Antisense strand to SEQ ID NO: 2222300
aaucaucugcugauuacau

SEQ ID NO: 2222302 - RNA, 19 nt, Artificial Sequence
  Description of Artificial Sequence: Synthetic oligonucleotide
  Sense strand starting at position 1106 of SEQ ID NO: 1883867
gcucuaaagcuggaagaau

SEQ ID NO: 2222303 - RNA, 19 nt, Artificial Sequence
  Description of Artificial Sequence: Synthetic oligonucleotide
  Antisense strand to SEQ ID NO: 2222302
auucuuccagcuuuagagc

SEQ ID NO: 2222304 - RNA, 19 nt, Artificial Sequence
  Description of Artificial Sequence: Synthetic oligonucleotide
  Sense strand starting at position 3765 of SEQ ID NO: 1883867
aucagcagaugauuaaauu

SEQ ID NO: 2222305 - RNA, 19 nt, Artificial Sequence
  Description of Artificial Sequence: Synthetic oligonucleotide
  Antisense strand to SEQ ID NO: 2222304
aauuuaaucaucugcugau

SEQ ID NO: 2222306 - RNA, 19 nt, Artificial Sequence
  Description of Artificial Sequence: Synthetic oligonucleotide
  Sense strand starting at position 3359 of SEQ ID NO: 1883867
uaauacuugggugaucuuu

SEQ ID NO: 2222307 - RNA, 19 nt, Artificial Sequence
  Description of Artificial Sequence: Synthetic oligonucleotide
  Antisense strand to SEQ ID NO: 2222306
aaagaucacccaaguauua

SEQ ID NO: 2222308 - RNA, 19 nt, Artificial Sequence
  Description of Artificial Sequence: Synthetic oligonucleotide
  Sense strand starting at position 3488 of SEQ ID NO: 1883867
ggacccauauaaucaguua

SEQ ID NO: 2222309 - RNA, 19 nt, Artificial Sequence
  Description of Artificial Sequence: Synthetic oligonucleotide
  Antisense strand to SEQ ID NO: 2222308
uaacugauuauaugggucc

SEQ ID NO: 2222310 - RNA, 19 nt, Artificial Sequence
  Description of Artificial Sequence: Synthetic oligonucleotide
  Sense strand starting at position 2850 of SEQ ID NO: 1883867
cuugucuguguuguguuaa

SEQ ID NO: 2222311 - RNA, 19 nt, Artificial Sequence
  Description of Artificial Sequence: Synthetic oligonucleotide
  Antisense strand to SEQ ID NO: 2222310
uuaacacaacacagacaag

SEQ ID NO: 2222312 - RNA, 19 nt, Artificial Sequence
  Description of Artificial Sequence: Synthetic oligonucleotide
  Sense strand starting at position 508 of SEQ ID NO: 1883867
gaucguauccuccaggaag

SEQ ID NO: 2222313 - RNA, 19 nt, Artificial Sequence
  Description of Artificial Sequence: Synthetic oligonucleotide
  Antisense strand to SEQ ID NO: 2222312
cuuccuggaggauacgauc

SEQ ID NO: 2222314 - RNA, 19 nt, Artificial Sequence
  Description of Artificial Sequence: Synthetic oligonucleotide
  Sense strand starting at position 542 of SEQ ID NO: 1883867
gagggagugaaaugcuuaa

SEQ ID NO: 2222315 - RNA, 19 nt, Artificial Sequence
  Description of Artificial Sequence: Synthetic oligonucleotide
  Antisense strand to SEQ ID NO: 2222314
uuaagcauuucacucccuc

SEQ ID NO: 2222316 - RNA, 19 nt, Artificial Sequence
  Description of Artificial Sequence: Synthetic oligonucleotide
  Sense strand starting at position 3511 of SEQ ID NO: 1883867
ugaugagcuaccgaaauuc

SEQ ID NO: 2222317 - RNA, 19 nt, Artificial Sequence
  Description of Artificial Sequence: Synthetic oligonucleotide
  Antisense strand to SEQ ID NO: 2222316
gaauuucgguagcucauca

SEQ ID NO: 2222318 - RNA, 19 nt, Artificial Sequence
  Description of Artificial Sequence: Synthetic oligonucleotide
  Sense strand starting at position 369 of SEQ ID NO: 1883867
ugugaaaucuaccugauau

SEQ ID NO: 2222319 - RNA, 19 nt, Artificial Sequence
  Description of Artificial Sequence: Synthetic oligonucleotide
  Antisense strand to SEQ ID NO: 2222318
auaucagguagauuucaca

SEQ ID NO: 2222320 - RNA, 19 nt, Artificial Sequence
  Description of Artificial Sequence: Synthetic oligonucleotide
  Sense strand starting at position 3406 of SEQ ID NO: 1883867
agucacuuugccuagaaau

SEQ ID NO: 2222321 - RNA, 19 nt, Artificial Sequence
  Description of Artificial Sequence: Synthetic oligonucleotide
  Antisense strand to SEQ ID NO: 2222320
auuucuaggcaaagugacu

SEQ ID NO: 2222322 - RNA, 19 nt, Artificial Sequence
  Description of Artificial Sequence: Synthetic oligonucleotide
  Sense strand starting at position 3499 of SEQ ID NO: 1883867
aucaguuaugggugaugag

SEQ ID NO: 2222323 - RNA, 19 nt, Artificial Sequence
  Description of Artificial Sequence: Synthetic oligonucleotide
  Antisense strand to SEQ ID NO: 2222322
cucaucacccauaacugau

SEQ ID NO: 2222324 - RNA, 19 nt, Artificial Sequence
  Description of Artificial Sequence: Synthetic oligonucleotide
  Sense strand starting at position 3549 of SEQ ID NO: 1883867
uagagaacauuguugaguu

SEQ ID NO: 2222325 - RNA, 19 nt, Artificial Sequence
  Description of Artificial Sequence: Synthetic oligonucleotide
  Antisense strand to SEQ ID NO: 2222324
aacucaacaauguucucua

SEQ ID NO: 2222326 - RNA, 19 nt, Artificial Sequence
  Description of Artificial Sequence: Synthetic oligonucleotide
  Sense strand starting at position 3143 of SEQ ID NO: 1883867
aucauacuugucuggaaug

SEQ ID NO: 2222327 - RNA, 19 nt, Artificial Sequence
  Description of Artificial Sequence: Synthetic oligonucleotide
  Antisense strand to SEQ ID NO: 2222326
cauuccagacaaguaugau

SEQ ID NO: 2222328 - RNA, 19 nt, Artificial Sequence
  Description of Artificial Sequence: Synthetic oligonucleotide
  Sense strand starting at position 1105 of SEQ ID NO: 1883867
ggcucuaaagcuggaagaa

SEQ ID NO: 2222329 - RNA, 19 nt, Artificial Sequence
  Description of Artificial Sequence: Synthetic oligonucleotide
  Antisense strand to SEQ ID NO: 2222328
uucuuccagcuuuagagcc

SEQ ID NO: 2222330 - RNA, 19 nt, Artificial Sequence
  Description of Artificial Sequence: Synthetic oligonucleotide
  Sense strand starting at position 3791 of SEQ ID NO: 1883867
caguguaugccauagauga

SEQ ID NO: 2222331 - RNA, 19 nt, Artificial Sequence
  Description of Artificial Sequence: Synthetic oligonucleotide
  Antisense strand to SEQ ID NO: 2222330
ucaucuauggcauacacug

SEQ ID NO: 2222332 - RNA, 19 nt, Artificial Sequence
  Description of Artificial Sequence: Synthetic oligonucleotide
  Sense strand starting at position 1329 of SEQ ID NO: 1883867
acgcguuacccgccauaau

SEQ ID NO: 2222333 - RNA, 19 nt, Artificial Sequence
  Description of Artificial Sequence: Synthetic oligonucleotide
  Antisense strand to SEQ ID NO: 2222332
auuauggcggguaacgcgu

SEQ ID NO: 2222334 - RNA, 19 nt, Artificial Sequence
  Description of Artificial Sequence: Synthetic oligonucleotide
  Sense strand starting at position 419 of SEQ ID NO: 1883867
auugcuaaggugggaauua

SEQ ID NO: 2222335 - RNA, 19 nt, Artificial Sequence
  Description of Artificial Sequence: Synthetic oligonucleotide
  Antisense strand to SEQ ID NO: 2222334
uaauucccaccuuagcaau

SEQ ID NO: 2222336 - RNA, 19 nt, Artificial Sequence
  Description of Artificial Sequence: Synthetic oligonucleotide
  Sense strand starting at position 3068 of SEQ ID NO: 1883867
uaaguuaauaguggugaga

SEQ ID NO: 2222337 - RNA, 19 nt, Artificial Sequence
  Description of Artificial Sequence: Synthetic oligonucleotide
  Antisense strand to SEQ ID NO: 2222336
ucucaccacuauuaacuua

SEQ ID NO: 2222338 - RNA, 19 nt, Artificial Sequence
  Description of Artificial Sequence: Synthetic oligonucleotide
  Sense strand starting at position 3497 of SEQ ID NO: 1883867
uaaucaguuaugggugaug

SEQ ID NO: 2222339 - RNA, 19 nt, Artificial Sequence
  Description of Artificial Sequence: Synthetic oligonucleotide
  Antisense strand to SEQ ID NO: 2222338
caucacccauaacugauua

SEQ ID NO: 2222340 - RNA, 19 nt, Artificial Sequence
  Description of Artificial Sequence: Synthetic oligonucleotide
  Sense strand starting at position 3357 of SEQ ID NO: 1883867
uuuaauacuugggugaucu

SEQ ID NO: 2222341 - RNA, 19 nt, Artificial Sequence
  Description of Artificial Sequence: Synthetic oligonucleotide
  Antisense strand to SEQ ID NO: 2222340
agaucacccaaguauuaaa

SEQ ID NO: 2222342 - RNA, 19 nt, Artificial Sequence
  Description of Artificial Sequence: Synthetic oligonucleotide
  Sense strand starting at position 2372 of SEQ ID NO: 1883867
gugagugagauucggaaca

SEQ ID NO: 2222343 - RNA, 19 nt, Artificial Sequence
  Description of Artificial Sequence: Synthetic oligonucleotide
  Antisense strand to SEQ ID NO: 2222342
uguuccgaaucucacucac

SEQ ID NO: 2222344 - RNA, 19 nt, Artificial Sequence
  Description of Artificial Sequence: Synthetic oligonucleotide
  Sense strand starting at position 3358 of SEQ ID NO: 1883867
uuaauacuugggugaucuu

SEQ ID NO: 2222345 - RNA, 19 nt, Artificial Sequence
  Description of Artificial Sequence: Synthetic oligonucleotide
  Antisense strand to SEQ ID NO: 2222344
aagaucacccaaguauuaa

SEQ ID NO: 2222346 - RNA, 19 nt, Artificial Sequence
  Description of Artificial Sequence: Synthetic oligonucleotide
  Sense strand starting at position 15 of SEQ ID NO: 1883867
ucaagacugucagauuuag

SEQ ID NO: 2222347 - RNA, 19 nt, Artificial Sequence
  Description of Artificial Sequence: Synthetic oligonucleotide
  Antisense strand to SEQ ID NO: 2222346
cuaaaucugacagucuuga

SEQ ID NO: 2222348 - RNA, 19 nt, Artificial Sequence
  Description of Artificial Sequence: Synthetic oligonucleotide
  Sense strand starting at position 3793 of SEQ ID NO: 1883867
guguaugccauagaugacu

SEQ ID NO: 2222349 - RNA, 19 nt, Artificial Sequence
  Description of Artificial Sequence: Synthetic oligonucleotide
  Antisense strand to SEQ ID NO: 2222348
agucaucuauggcauacac

SEQ ID NO: 2222350 - RNA, 19 nt, Artificial Sequence
  Description of Artificial Sequence: Synthetic oligonucleotide
  Sense strand starting at position 2614 of SEQ ID NO: 1883867
uggaaagagcuuggucuca

SEQ ID NO: 2222351 - RNA, 19 nt, Artificial Sequence
  Description of Artificial Sequence: Synthetic oligonucleotide
  Antisense strand to SEQ ID NO: 2222350
ugagaccaagcucuuucca

SEQ ID NO: 2222352 - RNA, 19 nt, Artificial Sequence
  Description of Artificial Sequence: Synthetic oligonucleotide
  Sense strand starting at position 1044 of SEQ ID NO: 1883867
ugcugucguguccauuuaa

SEQ ID NO: 2222353 - RNA, 19 nt, Artificial Sequence
  Description of Artificial Sequence: Synthetic oligonucleotide
  Antisense strand to SEQ ID NO: 2222352
uuaaauggacacgacagca

SEQ ID NO: 2222354 - RNA, 19 nt, Artificial Sequence
  Description of Artificial Sequence: Synthetic oligonucleotide
  Sense strand starting at position 1014 of SEQ ID NO: 1883867
guugcaaugcaauauuaau

SEQ ID NO: 2222355 - RNA, 19 nt, Artificial Sequence
  Description of Artificial Sequence: Synthetic oligonucleotide
  Antisense strand to SEQ ID NO: 2222354
auuaauauugcauugcaac

SEQ ID NO: 2222356 - RNA, 19 nt, Artificial Sequence
  Description of Artificial Sequence: Synthetic oligonucleotide
  Sense strand starting at position 3383 of SEQ ID NO: 1883867
ucaucuauucgugaacccu

SEQ ID NO: 2222357 - RNA, 19 nt, Artificial Sequence
  Description of Artificial Sequence: Synthetic oligonucleotide
  Antisense strand to SEQ ID NO: 2222356
aggguucacgaauagauga

SEQ ID NO: 2222358 - RNA, 19 nt, Artificial Sequence
  Description of Artificial Sequence: Synthetic oligonucleotide
  Sense strand starting at position 3553 of SEQ ID NO: 1883867
gaacauuguugaguucuua

SEQ ID NO: 2222359 - RNA, 19 nt, Artificial Sequence
  Description of Artificial Sequence: Synthetic oligonucleotide
  Antisense strand to SEQ ID NO: 2222358
uaagaacucaacaauguuc

SEQ ID NO: 2222360 - RNA, 19 nt, Artificial Sequence
  Description of Artificial Sequence: Synthetic oligonucleotide
  Sense strand starting at position 3755 of SEQ ID NO: 1883867
cgcaaauguaaucagcaga

SEQ ID NO: 2222361 - RNA, 19 nt, Artificial Sequence
  Description of Artificial Sequence: Synthetic oligonucleotide
  Antisense strand to SEQ ID NO: 2222360
ucugcugauuacauuugcg

SEQ ID NO: 2222362 - RNA, 19 nt, Artificial Sequence
  Description of Artificial Sequence: Synthetic oligonucleotide
  Sense strand starting at position 13 of SEQ ID NO: 1883867
acucaagacugucagauuu

SEQ ID NO: 2222363 - RNA, 19 nt, Artificial Sequence
  Description of Artificial Sequence: Synthetic oligonucleotide
  Antisense strand to SEQ ID NO: 2222362
aaaucugacagucuugagu

SEQ ID NO: 2222364 - RNA, 19 nt, Artificial Sequence
  Description of Artificial Sequence: Synthetic oligonucleotide
  Sense strand starting at position 3320 of SEQ ID NO: 1883867
uuucuuuaagguggcaaga

SEQ ID NO: 2222365 - RNA, 19 nt, Artificial Sequence
  Description of Artificial Sequence: Synthetic oligonucleotide
  Antisense strand to SEQ ID NO: 2222364
ucuugccaccuuaaagaaa

SEQ ID NO: 2222366 - RNA, 19 nt, Artificial Sequence
  Description of Artificial Sequence: Synthetic oligonucleotide
  Sense strand starting at position 2745 of SEQ ID NO: 1883867
uauuuaaguucguuguggu

SEQ ID NO: 2222367 - RNA, 19 nt, Artificial Sequence
  Description of Artificial Sequence: Synthetic oligonucleotide
  Antisense strand to SEQ ID NO: 2222366
accacaacgaacuuaaaua

SEQ ID NO: 2222368 - RNA, 19 nt, Artificial Sequence
  Description of Artificial Sequence: Synthetic oligonucleotide
  Sense strand starting at position 3745 of SEQ ID NO: 1883867
acaucacucccgcaaaugu

SEQ ID NO: 2222369 - RNA, 19 nt, Artificial Sequence
  Description of Artificial Sequence: Synthetic oligonucleotide
  Antisense strand to SEQ ID NO: 2222368
acauuugcgggagugaugu

SEQ ID NO: 2222370 - RNA, 19 nt, Artificial Sequence
  Description of Artificial Sequence: Synthetic oligonucleotide
  Sense strand starting at position 357 of SEQ ID NO: 1883867
ucgcaaaggaggugugaaa

SEQ ID NO: 2222371 - RNA, 19 nt, Artificial Sequence
  Description of Artificial Sequence: Synthetic oligonucleotide
  Antisense strand to SEQ ID NO: 2222370
uuucacaccuccuuugcga

SEQ ID NO: 2222372 - RNA, 19 nt, Artificial Sequence
  Description of Artificial Sequence: Synthetic oligonucleotide
  Sense strand starting at position 2746 of SEQ ID NO: 1883867
auuuaaguucguugugguu

SEQ ID NO: 2222373 - RNA, 19 nt, Artificial Sequence
  Description of Artificial Sequence: Synthetic oligonucleotide
  Antisense strand to SEQ ID NO: 2222372
aaccacaacgaacuuaaau

SEQ ID NO: 2222374 - RNA, 19 nt, Artificial Sequence
  Description of Artificial Sequence: Synthetic oligonucleotide
  Sense strand starting at position 2365 of SEQ ID NO: 1883867
cuccgaggugagugagauu

SEQ ID NO: 2222375 - RNA, 19 nt, Artificial Sequence
  Description of Artificial Sequence: Synthetic oligonucleotide
  Antisense strand to SEQ ID NO: 2222374
aaucucacucaccucggag

SEQ ID NO: 2222376 - RNA, 19 nt, Artificial Sequence
  Description of Artificial Sequence: Synthetic oligonucleotide
  Sense strand starting at position 3467 of SEQ ID NO: 1883867
guuauaaacuauccucugu

SEQ ID NO: 2222377 - RNA, 19 nt, Artificial Sequence
  Description of Artificial Sequence: Synthetic oligonucleotide
  Antisense strand to SEQ ID NO: 2222376
acagaggauaguuuauaac

SEQ ID NO: 2222378 - RNA, 19 nt, Artificial Sequence
  Description of Artificial Sequence: Synthetic oligonucleotide
  Sense strand starting at position 3404 of SEQ ID NO: 1883867
uuagucacuuugccuagaa

SEQ ID NO: 2222379 - RNA, 19 nt, Artificial Sequence
  Description of Artificial Sequence: Synthetic oligonucleotide
  Antisense strand to SEQ ID NO: 2222378
uucuaggcaaagugacuaa

SEQ ID NO: 2222380 - RNA, 19 nt, Artificial Sequence
  Description of Artificial Sequence: Synthetic oligonucleotide
  Sense strand starting at position 1679 of SEQ ID NO: 1883868
gcucuaaagcuggaagaau

SEQ ID NO: 2222381 - RNA, 19 nt, Artificial Sequence
  Description of Artificial Sequence: Synthetic oligonucleotide
  Antisense strand to SEQ ID NO: 2222380
auucuuccagcuuuagagc

SEQ ID NO: 2222382 - RNA, 19 nt, Artificial Sequence
  Description of Artificial Sequence: Synthetic oligonucleotide
  Sense strand starting at position 3932 of SEQ ID NO: 1883868
uaauacuugggugaucuuu

SEQ ID NO: 2222383 - RNA, 19 nt, Artificial Sequence
  Description of Artificial Sequence: Synthetic oligonucleotide
  Antisense strand to SEQ ID NO: 2222382
aaagaucacccaaguauua

SEQ ID NO: 2222384 - RNA, 19 nt, Artificial Sequence
  Description of Artificial Sequence: Synthetic oligonucleotide
  Sense strand starting at position 3423 of SEQ ID NO: 1883868
cuugucuguguuguguuaa

SEQ ID NO: 2222385 - RNA, 19 nt, Artificial Sequence
  Description of Artificial Sequence: Synthetic oligonucleotide
  Antisense strand to SEQ ID NO: 2222384
uuaacacaacacagacaag

SEQ ID NO: 2222386 - RNA, 19 nt, Artificial Sequence
  Description of Artificial Sequence: Synthetic oligonucleotide
  Sense strand starting at position 1081 of SEQ ID NO: 1883868
gaucguauccuccaggaag

SEQ ID NO: 2222387 - RNA, 19 nt, Artificial Sequence
  Description of Artificial Sequence: Synthetic oligonucleotide
  Antisense strand to SEQ ID NO: 2222386
cuuccuggaggauacgauc

SEQ ID NO: 2222388 - RNA, 19 nt, Artificial Sequence
  Description of Artificial Sequence: Synthetic oligonucleotide
  Sense strand starting at position 1115 of SEQ ID NO: 1883868
gagggagugaaaugcuuaa

SEQ ID NO: 2222389 - RNA, 19 nt, Artificial Sequence
  Description of Artificial Sequence: Synthetic oligonucleotide
  Antisense strand to SEQ ID NO: 2222388
uuaagcauuucacucccuc

SEQ ID NO: 2222390 - RNA, 19 nt, Artificial Sequence
  Description of Artificial Sequence: Synthetic oligonucleotide
  Sense strand starting at position 942 of SEQ ID NO: 1883868
ugugaaaucuaccugauau

SEQ ID NO: 2222391 - RNA, 19 nt, Artificial Sequence
  Description of Artificial Sequence: Synthetic oligonucleotide
  Antisense strand to SEQ ID NO: 2222390
auaucagguagauuucaca

SEQ ID NO: 2222392 - RNA, 19 nt, Artificial Sequence
  Description of Artificial Sequence: Synthetic oligonucleotide
  Sense strand starting at position 3979 of SEQ ID NO: 1883868
agucacuuugccuagaaau

SEQ ID NO: 2222393 - RNA, 19 nt, Artificial Sequence
  Description of Artificial Sequence: Synthetic oligonucleotide
  Antisense strand to SEQ ID NO: 2222392
auuucuaggcaaagugacu

SEQ ID NO: 2222394 - RNA, 19 nt, Artificial Sequence
  Description of Artificial Sequence: Synthetic oligonucleotide
  Sense strand starting at position 3716 of SEQ ID NO: 1883868
aucauacuugucuggaaug

SEQ ID NO: 2222395 - RNA, 19 nt, Artificial Sequence
  Description of Artificial Sequence: Synthetic oligonucleotide
  Antisense strand to SEQ ID NO: 2222394
cauuccagacaaguaugau

SEQ ID NO: 2222396 - RNA, 19 nt, Artificial Sequence
  Description of Artificial Sequence: Synthetic oligonucleotide
  Sense strand starting at position 55 of SEQ ID NO: 1883868
ggucauucuugacuuggaa

SEQ ID NO: 2222397 - RNA, 19 nt, Artificial Sequence
  Description of Artificial Sequence: Synthetic oligonucleotide
  Antisense strand to SEQ ID NO: 2222396
uuccaagucaagaaugacc

SEQ ID NO: 2222398 - RNA, 19 nt, Artificial Sequence
  Description of Artificial Sequence: Synthetic oligonucleotide
  Sense strand starting at position 1678 of SEQ ID NO: 1883868
ggcucuaaagcuggaagaa

SEQ ID NO: 2222399 - RNA, 19 nt, Artificial Sequence
  Description of Artificial Sequence: Synthetic oligonucleotide
  Antisense strand to SEQ ID NO: 2222398
uucuuccagcuuuagagcc

SEQ ID NO: 2222400 - RNA, 19 nt, Artificial Sequence
  Description of Artificial Sequence: Synthetic oligonucleotide
  Sense strand starting at position 1902 of SEQ ID NO: 1883868
acgcguuacccgccauaau

SEQ ID NO: 2222401 - RNA, 19 nt, Artificial Sequence
  Description of Artificial Sequence: Synthetic oligonucleotide
  Antisense strand to SEQ ID NO: 2222400
auuauggcggguaacgcgu

SEQ ID NO: 2222402 - RNA, 19 nt, Artificial Sequence
  Description of Artificial Sequence: Synthetic oligonucleotide
  Sense strand starting at position 992 of SEQ ID NO: 1883868
auugcuaaggugggaauua

SEQ ID NO: 2222403 - RNA, 19 nt, Artificial Sequence
  Description of Artificial Sequence: Synthetic oligonucleotide
  Antisense strand to SEQ ID NO: 2222402
uaauucccaccuuagcaau

SEQ ID NO: 2222404 - RNA, 19 nt, Artificial Sequence
  Description of Artificial Sequence: Synthetic oligonucleotide
  Sense strand starting at position 3641 of SEQ ID NO: 1883868
uaaguuaauaguggugaga

SEQ ID NO: 2222405 - RNA, 19 nt, Artificial Sequence
  Description of Artificial Sequence: Synthetic oligonucleotide
  Antisense strand to SEQ ID NO: 2222404
ucucaccacuauuaacuua

SEQ ID NO: 2222406 - RNA, 19 nt, Artificial Sequence
  Description of Artificial Sequence: Synthetic oligonucleotide
  Sense strand starting at position 140 of SEQ ID NO: 1883868
uugguaucaggguaugcaa

SEQ ID NO: 2222407 - RNA, 19 nt, Artificial Sequence
  Description of Artificial Sequence: Synthetic oligonucleotide
  Antisense strand to SEQ ID NO: 2222406
uugcauacccugauaccaa

SEQ ID NO: 2222408 - RNA, 19 nt, Artificial Sequence
  Description of Artificial Sequence: Synthetic oligonucleotide
  Sense strand starting at position 3930 of SEQ ID NO: 1883868
uuuaauacuugggugaucu

SEQ ID NO: 2222409 - RNA, 19 nt, Artificial Sequence
  Description of Artificial Sequence: Synthetic oligonucleotide
  Antisense strand to SEQ ID NO: 2222408
agaucacccaaguauuaaa

SEQ ID NO: 2222410 - RNA, 19 nt, Artificial Sequence
  Description of Artificial Sequence: Synthetic oligonucleotide
  Sense strand starting at position 2945 of SEQ ID NO: 1883868
gugagugagauucggaaca

SEQ ID NO: 2222411 - RNA, 19 nt, Artificial Sequence
  Description of Artificial Sequence: Synthetic oligonucleotide
  Antisense strand to SEQ ID NO: 2222410
uguuccgaaucucacucac

SEQ ID NO: 2222412 - RNA, 19 nt, Artificial Sequence
  Description of Artificial Sequence: Synthetic oligonucleotide
  Sense strand starting at position 3931 of SEQ ID NO: 1883868
uuaauacuugggugaucuu

SEQ ID NO: 2222413 - RNA, 19 nt, Artificial Sequence
  Description of Artificial Sequence: Synthetic oligonucleotide
  Antisense strand to SEQ ID NO: 2222412
aagaucacccaaguauuaa

SEQ ID NO: 2222414 - RNA, 19 nt, Artificial Sequence
  Description of Artificial Sequence: Synthetic oligonucleotide
  Sense strand starting at position 588 of SEQ ID NO: 1883868
ucaagacugucagauuuag

SEQ ID NO: 2222415 - RNA, 19 nt, Artificial Sequence
  Description of Artificial Sequence: Synthetic oligonucleotide
  Antisense strand to SEQ ID NO: 2222414
cuaaaucugacagucuuga

SEQ ID NO: 2222416 - RNA, 19 nt, Artificial Sequence
  Description of Artificial Sequence: Synthetic oligonucleotide
  Sense strand starting at position 3187 of SEQ ID NO: 1883868
uggaaagagcuuggucuca

SEQ ID NO: 2222417 - RNA, 19 nt, Artificial Sequence
  Description of Artificial Sequence: Synthetic oligonucleotide
  Antisense strand to SEQ ID NO: 2222416
ugagaccaagcucuuucca

SEQ ID NO: 2222418 - RNA, 19 nt, Artificial Sequence
  Description of Artificial Sequence: Synthetic oligonucleotide
  Sense strand starting at position 1617 of SEQ ID NO: 1883868
ugcugucguguccauuuaa

SEQ ID NO: 2222419 - RNA, 19 nt, Artificial Sequence
  Description of Artificial Sequence: Synthetic oligonucleotide
  Antisense strand to SEQ ID NO: 2222418
uuaaauggacacgacagca

SEQ ID NO: 2222420 - RNA, 19 nt, Artificial Sequence
  Description of Artificial Sequence: Synthetic oligonucleotide
  Sense strand starting at position 1587 of SEQ ID NO: 1883868
guugcaaugcaauauuaau

SEQ ID NO: 2222421 - RNA, 19 nt, Artificial Sequence
  Description of Artificial Sequence: Synthetic oligonucleotide
  Antisense strand to SEQ ID NO: 2222420
auuaauauugcauugcaac

SEQ ID NO: 2222422 - RNA, 19 nt, Artificial Sequence
  Description of Artificial Sequence: Synthetic oligonucleotide
  Sense strand starting at position 3956 of SEQ ID NO: 1883868
ucaucuauucgugaacccu

SEQ ID NO: 2222423 - RNA, 19 nt, Artificial Sequence
  Description of Artificial Sequence: Synthetic oligonucleotide
  Antisense strand to SEQ ID NO: 2222422
aggguucacgaauagauga

SEQ ID NO: 2222424 - RNA, 19 nt, Artificial Sequence
  Description of Artificial Sequence: Synthetic oligonucleotide
  Sense strand starting at position 586 of SEQ ID NO: 1883868
acucaagacugucagauuu

SEQ ID NO: 2222425 - RNA, 19 nt, Artificial Sequence
  Description of Artificial Sequence: Synthetic oligonucleotide
  Antisense strand to SEQ ID NO: 2222424
aaaucugacagucuugagu

SEQ ID NO: 2222426 - RNA, 19 nt, Artificial Sequence
  Description of Artificial Sequence: Synthetic oligonucleotide
  Sense strand starting at position 3893 of SEQ ID NO: 1883868
uuucuuuaagguggcaaga

SEQ ID NO: 2222427 - RNA, 19 nt, Artificial Sequence
  Description of Artificial Sequence: Synthetic oligonucleotide
  Antisense strand to SEQ ID NO: 2222426
ucuugccaccuuaaagaaa

SEQ ID NO: 2222428 - RNA, 19 nt, Artificial Sequence
  Description of Artificial Sequence: Synthetic oligonucleotide
  Sense strand starting at position 3318 of SEQ ID NO: 1883868
uauuuaaguucguuguggu

SEQ ID NO: 2222429 - RNA, 19 nt, Artificial Sequence
  Description of Artificial Sequence: Synthetic oligonucleotide
  Antisense strand to SEQ ID NO: 2222428
accacaacgaacuuaaaua

SEQ ID NO: 2222430 - RNA, 19 nt, Artificial Sequence
  Description of Artificial Sequence: Synthetic oligonucleotide
  Sense strand starting at position 930 of SEQ ID NO: 1883868
ucgcaaaggaggugugaaa

SEQ ID NO: 2222431 - RNA, 19 nt, Artificial Sequence
  Description of Artificial Sequence: Synthetic oligonucleotide
  Antisense strand to SEQ ID NO: 2222430
uuucacaccuccuuugcga

SEQ ID NO: 2222432 - RNA, 19 nt, Artificial Sequence
  Description of Artificial Sequence: Synthetic oligonucleotide
  Sense strand starting at position 3319 of SEQ ID NO: 1883868
auuuaaguucguugugguu

SEQ ID NO: 2222433 - RNA, 19 nt, Artificial Sequence
  Description of Artificial Sequence: Synthetic oligonucleotide
  Antisense strand to SEQ ID NO: 2222432
aaccacaacgaacuuaaau

SEQ ID NO: 2222434 - RNA, 19 nt, Artificial Sequence
  Description of Artificial Sequence: Synthetic oligonucleotide
  Sense strand starting at position 2938 of SEQ ID NO: 1883868
cuccgaggugagugagauu

SEQ ID NO: 2222435 - RNA, 19 nt, Artificial Sequence
  Description of Artificial Sequence: Synthetic oligonucleotide
  Antisense strand to SEQ ID NO: 2222434
aaucucacucaccucggag

SEQ ID NO: 2222436 - RNA, 19 nt, Artificial Sequence
  Description of Artificial Sequence: Synthetic oligonucleotide
  Sense strand starting at position 3977 of SEQ ID NO: 1883868
uuagucacuuugccuagaa

SEQ ID NO: 2222437 - RNA, 19 nt, Artificial Sequence
  Description of Artificial Sequence: Synthetic oligonucleotide
  Antisense strand to SEQ ID NO: 2222436
uucuaggcaaagugacuaa

SEQ ID NO: 2222438 - RNA, 19 nt, Artificial Sequence
  Description of Artificial Sequence: Synthetic oligonucleotide
  Sense strand starting at position 1869 of SEQ ID NO: 1883868
cguaauguauaucucuaag

SEQ ID NO: 2222439 - RNA, 19 nt, Artificial Sequence
  Description of Artificial Sequence: Synthetic oligonucleotide
  Antisense strand to SEQ ID NO: 2222438
cuuagagauauacauuacg

SEQ ID NO: 2222440 - RNA, 19 nt, Artificial Sequence
  Description of Artificial Sequence: Synthetic oligonucleotide
  Sense strand starting at position 135 of SEQ ID NO: 1883868
cuaauuugguaucagggua

SEQ ID NO: 2222441 - RNA, 19 nt, Artificial Sequence
  Description of Artificial Sequence: Synthetic oligonucleotide
  Antisense strand to SEQ ID NO: 2222440
uacccugauaccaaauuag

SEQ ID NO: 2222442 - RNA, 19 nt, Artificial Sequence
  Description of Artificial Sequence: Synthetic oligonucleotide
  Sense strand starting at position 415 of SEQ ID NO: 1883868
ggcacgagauuggugugaa

SEQ ID NO: 2222443 - RNA, 19 nt, Artificial Sequence
  Description of Artificial Sequence: Synthetic oligonucleotide
  Antisense strand to SEQ ID NO: 2222442
uucacaccaaucucgugcc

SEQ ID NO: 2222444 - RNA, 19 nt, Artificial Sequence
  Description of Artificial Sequence: Synthetic oligonucleotide
  Sense strand starting at position 1813 of SEQ ID NO: 1883868
gugacaaaucguuguggga

SEQ ID NO: 2222445 - RNA, 19 nt, Artificial Sequence
  Description of Artificial Sequence: Synthetic oligonucleotide
  Antisense strand to SEQ ID NO: 2222444
ucccacaacgauuugucac

SEQ ID NO: 2222446 - RNA, 19 nt, Artificial Sequence
  Description of Artificial Sequence: Synthetic oligonucleotide
  Sense strand starting at position 1854 of SEQ ID NO: 1883868
uucagaaacguauagcgua

SEQ ID NO: 2222447 - RNA, 19 nt, Artificial Sequence
  Description of Artificial Sequence: Synthetic oligonucleotide
  Antisense strand to SEQ ID NO: 2222446
uacgcuauacguuucugaa

SEQ ID NO: 2222448 - RNA, 19 nt, Artificial Sequence
  Description of Artificial Sequence: Synthetic oligonucleotide
  Sense strand starting at position 3453 of SEQ ID NO: 1883868
agaaauugcccgugacuug

SEQ ID NO: 2222449 - RNA, 19 nt, Artificial Sequence
  Description of Artificial Sequence: Synthetic oligonucleotide
  Antisense strand to SEQ ID NO: 2222448
caagucacgggcaauuucu

SEQ ID NO: 2222450 - RNA, 19 nt, Artificial Sequence
  Description of Artificial Sequence: Synthetic oligonucleotide
  Sense strand starting at position 3413 of SEQ ID NO: 1883868
ggaguugggacuugucugu

SEQ ID NO: 2222451 - RNA, 19 nt, Artificial Sequence
  Description of Artificial Sequence: Synthetic oligonucleotide
  Antisense strand to SEQ ID NO: 2222450
acagacaagucccaacucc

SEQ ID NO: 2222452 - RNA, 19 nt, Artificial Sequence
  Description of Artificial Sequence: Synthetic oligonucleotide
  Sense strand starting at position 3267 of SEQ ID NO: 1883868
uugccuaggucccuuaaau

SEQ ID NO: 2222453 - RNA, 19 nt, Artificial Sequence
  Description of Artificial Sequence: Synthetic oligonucleotide
  Antisense strand to SEQ ID NO: 2222452
auuuaagggaccuaggcaa

SEQ ID NO: 2222454 - RNA, 19 nt, Artificial Sequence
  Description of Artificial Sequence: Synthetic oligonucleotide
  Sense strand starting at position 3454 of SEQ ID NO: 1883868
gaaauugcccgugacuugu

SEQ ID NO: 2222455 - RNA, 19 nt, Artificial Sequence
  Description of Artificial Sequence: Synthetic oligonucleotide
  Antisense strand to SEQ ID NO: 2222454
acaagucacgggcaauuuc

SEQ ID NO: 2222456 - RNA, 19 nt, Artificial Sequence
  Description of Artificial Sequence: Synthetic oligonucleotide
  Sense strand starting at position 3637 of SEQ ID NO: 1883868
gauuuaaguuaauaguggu

SEQ ID NO: 2222457 - RNA, 19 nt, Artificial Sequence
  Description of Artificial Sequence: Synthetic oligonucleotide
  Antisense strand to SEQ ID NO: 2222456
accacuauuaacuuaaauc

SEQ ID NO: 2222458 - RNA, 19 nt, Artificial Sequence
  Description of Artificial Sequence: Synthetic oligonucleotide
  Sense strand starting at position 1149 of SEQ ID NO: 1883868
uggaguuucugggugcuga

SEQ ID NO: 2222459 - RNA, 19 nt, Artificial Sequence
  Description of Artificial Sequence: Synthetic oligonucleotide
  Antisense strand to SEQ ID NO: 2222458
ucagcacccagaaacucca

SEQ ID NO: 2222460 - RNA, 19 nt, Artificial Sequence
  Description of Artificial Sequence: Synthetic oligonucleotide
  Sense strand starting at position 2196 of SEQ ID NO: 1883869
gcucuaaagcuggaagaau

SEQ ID NO: 2222461 - RNA, 19 nt, Artificial Sequence
  Description of Artificial Sequence: Synthetic oligonucleotide
  Antisense strand to SEQ ID NO: 2222460
auucuuccagcuuuagagc

SEQ ID NO: 2222462 - RNA, 19 nt, Artificial Sequence
  Description of Artificial Sequence: Synthetic oligonucleotide
  Sense strand starting at position 200 of SEQ ID NO: 1883869
ccaugugagaucugaugaa

SEQ ID NO: 2222463 - RNA, 19 nt, Artificial Sequence
  Description of Artificial Sequence: Synthetic oligonucleotide
  Antisense strand to SEQ ID NO: 2222462
uucaucagaucucacaugg

SEQ ID NO: 2222464 - RNA, 19 nt, Artificial Sequence
  Description of Artificial Sequence: Synthetic oligonucleotide
  Sense strand starting at position 3940 of SEQ ID NO: 1883869
cuugucuguguuguguuaa

SEQ ID NO: 2222465 - RNA, 19 nt, Artificial Sequence
  Description of Artificial Sequence: Synthetic oligonucleotide
  Antisense strand to SEQ ID NO: 2222464
uuaacacaacacagacaag

SEQ ID NO: 2222466 - RNA, 19 nt, Artificial Sequence
  Description of Artificial Sequence: Synthetic oligonucleotide
  Sense strand starting at position 1598 of SEQ ID NO: 1883869
gaucguauccuccaggaag

SEQ ID NO: 2222467 - RNA, 19 nt, Artificial Sequence
  Description of Artificial Sequence: Synthetic oligonucleotide
  Antisense strand to SEQ ID NO: 2222466
cuuccuggaggauacgauc

SEQ ID NO: 2222468 - RNA, 19 nt, Artificial Sequence
  Description of Artificial Sequence: Synthetic oligonucleotide
  Sense strand starting at position 1632 of SEQ ID NO: 1883869
gagggagugaaaugcuuaa

SEQ ID NO: 2222469 - RNA, 19 nt, Artificial Sequence
  Description of Artificial Sequence: Synthetic oligonucleotide
  Antisense strand to SEQ ID NO: 2222468
uuaagcauuucacucccuc

SEQ ID NO: 2222470 - RNA, 19 nt, Artificial Sequence
  Description of Artificial Sequence: Synthetic oligonucleotide
  Sense strand starting at position 1459 of SEQ ID NO: 1883869
ugugaaaucuaccugauau

SEQ ID NO: 2222471 - RNA, 19 nt, Artificial Sequence
  Description of Artificial Sequence: Synthetic oligonucleotide
  Antisense strand to SEQ ID NO: 2222470
auaucagguagauuucaca

SEQ ID NO: 2222472 - RNA, 19 nt, Artificial Sequence
  Description of Artificial Sequence: Synthetic oligonucleotide
  Sense strand starting at position 236 of SEQ ID NO: 1883869
cuaucaccucuguagacuu

SEQ ID NO: 2222473 - RNA, 19 nt, Artificial Sequence
  Description of Artificial Sequence: Synthetic oligonucleotide
  Antisense strand to SEQ ID NO: 2222472
aagucuacagaggugauag

SEQ ID NO: 2222474 - RNA, 19 nt, Artificial Sequence
  Description of Artificial Sequence: Synthetic oligonucleotide
  Sense strand starting at position 572 of SEQ ID NO: 1883869
ggucauucuugacuuggaa

SEQ ID NO: 2222475 - RNA, 19 nt, Artificial Sequence
  Description of Artificial Sequence: Synthetic oligonucleotide
  Antisense strand to SEQ ID NO: 2222474
uuccaagucaagaaugacc

SEQ ID NO: 2222476 - RNA, 19 nt, Artificial Sequence
  Description of Artificial Sequence: Synthetic oligonucleotide
  Sense strand starting at position 2195 of SEQ ID NO: 1883869
ggcucuaaagcuggaagaa

SEQ ID NO: 2222477 - RNA, 19 nt, Artificial Sequence
  Description of Artificial Sequence: Synthetic oligonucleotide
  Antisense strand to SEQ ID NO: 2222476
uucuuccagcuuuagagcc

SEQ ID NO: 2222478 - RNA, 19 nt, Artificial Sequence
  Description of Artificial Sequence: Synthetic oligonucleotide
  Sense strand starting at position 2419 of SEQ ID NO: 1883869
acgcguuacccgccauaau

SEQ ID NO: 2222479 - RNA, 19 nt, Artificial Sequence
  Description of Artificial Sequence: Synthetic oligonucleotide
  Antisense strand to SEQ ID NO: 2222478
auuauggcggguaacgcgu

SEQ ID NO: 2222480 - RNA, 19 nt, Artificial Sequence
  Description of Artificial Sequence: Synthetic oligonucleotide
  Sense strand starting at position 1509 of SEQ ID NO: 1883869
auugcuaaggugggaauua

SEQ ID NO: 2222481 - RNA, 19 nt, Artificial Sequence
  Description of Artificial Sequence: Synthetic oligonucleotide
  Antisense strand to SEQ ID NO: 2222480
uaauucccaccuuagcaau

SEQ ID NO: 2222482 - RNA, 19 nt, Artificial Sequence
  Description of Artificial Sequence: Synthetic oligonucleotide
  Sense strand starting at position 657 of SEQ ID NO: 1883869
uugguaucaggguaugcaa

SEQ ID NO: 2222483 - RNA, 19 nt, Artificial Sequence
  Description of Artificial Sequence: Synthetic oligonucleotide
  Antisense strand to SEQ ID NO: 2222482
uugcauacccugauaccaa

SEQ ID NO: 2222484 - RNA, 19 nt, Artificial Sequence
  Description of Artificial Sequence: Synthetic oligonucleotide
  Sense strand starting at position 3462 of SEQ ID NO: 1883869
gugagugagauucggaaca

SEQ ID NO: 2222485 - RNA, 19 nt, Artificial Sequence
  Description of Artificial Sequence: Synthetic oligonucleotide
  Antisense strand to SEQ ID NO: 2222484
uguuccgaaucucacucac

SEQ ID NO: 2222486 - RNA, 19 nt, Artificial Sequence
  Description of Artificial Sequence: Synthetic oligonucleotide
  Sense strand starting at position 1105 of SEQ ID NO: 1883869
ucaagacugucagauuuag

SEQ ID NO: 2222487 - RNA, 19 nt, Artificial Sequence
  Description of Artificial Sequence: Synthetic oligonucleotide
  Antisense strand to SEQ ID NO: 2222486
cuaaaucugacagucuuga

SEQ ID NO: 2222488 - RNA, 19 nt, Artificial Sequence
  Description of Artificial Sequence: Synthetic oligonucleotide
  Sense strand starting at position 3704 of SEQ ID NO: 1883869
uggaaagagcuuggucuca

SEQ ID NO: 2222489 - RNA, 19 nt, Artificial Sequence
  Description of Artificial Sequence: Synthetic oligonucleotide
  Antisense strand to SEQ ID NO: 2222488
ugagaccaagcucuuucca

SEQ ID NO: 2222490 - RNA, 19 nt, Artificial Sequence
  Description of Artificial Sequence: Synthetic oligonucleotide
  Sense strand starting at position 2134 of SEQ ID NO: 1883869
ugcugucguguccauuuaa

SEQ ID NO: 2222491 - RNA, 19 nt, Artificial Sequence
  Description of Artificial Sequence: Synthetic oligonucleotide
  Antisense strand to SEQ ID NO: 2222490
uuaaauggacacgacagca

SEQ ID NO: 2222492 - RNA, 19 nt, Artificial Sequence
  Description of Artificial Sequence: Synthetic oligonucleotide
  Sense strand starting at position 2104 of SEQ ID NO: 1883869
guugcaaugcaauauuaau

SEQ ID NO: 2222493 - RNA, 19 nt, Artificial Sequence
  Description of Artificial Sequence: Synthetic oligonucleotide
  Antisense strand to SEQ ID NO: 2222492
auuaauauugcauugcaac

SEQ ID NO: 2222494 - RNA, 19 nt, Artificial Sequence
  Description of Artificial Sequence: Synthetic oligonucleotide
  Sense strand starting at position 1103 of SEQ ID NO: 1883869
acucaagacugucagauuu

SEQ ID NO: 2222495 - RNA, 19 nt, Artificial Sequence
  Description of Artificial Sequence: Synthetic oligonucleotide
  Antisense strand to SEQ ID NO: 2222494
aaaucugacagucuugagu

SEQ ID NO: 2222496 - RNA, 19 nt, Artificial Sequence
  Description of Artificial Sequence: Synthetic oligonucleotide
  Sense strand starting at position 3835 of SEQ ID NO: 1883869
uauuuaaguucguuguggu

SEQ ID NO: 2222497 - RNA, 19 nt, Artificial Sequence
  Description of Artificial Sequence: Synthetic oligonucleotide
  Antisense strand to SEQ ID NO: 2222496
accacaacgaacuuaaaua

SEQ ID NO: 2222498 - RNA, 19 nt, Artificial Sequence
  Description of Artificial Sequence: Synthetic oligonucleotide
  Sense strand starting at position 1447 of SEQ ID NO: 1883869
ucgcaaaggaggugugaaa

SEQ ID NO: 2222499 - RNA, 19 nt, Artificial Sequence
  Description of Artificial Sequence: Synthetic oligonucleotide
  Antisense strand to SEQ ID NO: 2222498
uuucacaccuccuuugcga

SEQ ID NO: 2222500 - RNA, 19 nt, Artificial Sequence
  Description of Artificial Sequence: Synthetic oligonucleotide
  Sense strand starting at position 3836 of SEQ ID NO: 1883869
auuuaaguucguugugguu

SEQ ID NO: 2222501 - RNA, 19 nt, Artificial Sequence
  Description of Artificial Sequence: Synthetic oligonucleotide
  Antisense strand to SEQ ID NO: 2222500
aaccacaacgaacuuaaau

SEQ ID NO: 2222502 - RNA, 19 nt, Artificial Sequence
  Description of Artificial Sequence: Synthetic oligonucleotide
  Sense strand starting at position 3455 of SEQ ID NO: 1883869
cuccgaggugagugagauu

SEQ ID NO: 2222503 - RNA, 19 nt, Artificial Sequence
  Description of Artificial Sequence: Synthetic oligonucleotide
  Antisense strand to SEQ ID NO: 2222502
aaucucacucaccucggag

SEQ ID NO: 2222504 - RNA, 19 nt, Artificial Sequence
  Description of Artificial Sequence: Synthetic oligonucleotide
  Sense strand starting at position 2386 of SEQ ID NO: 1883869
cguaauguauaucucuaag

SEQ ID NO: 2222505 - RNA, 19 nt, Artificial Sequence
  Description of Artificial Sequence: Synthetic oligonucleotide
  Antisense strand to SEQ ID NO: 2222504
cuuagagauauacauuacg

SEQ ID NO: 2222506 - RNA, 19 nt, Artificial Sequence
  Description of Artificial Sequence: Synthetic oligonucleotide
  Sense strand starting at position 652 of SEQ ID NO: 1883869
cuaauuugguaucagggua

SEQ ID NO: 2222507 - RNA, 19 nt, Artificial Sequence
  Description of Artificial Sequence: Synthetic oligonucleotide
  Antisense strand to SEQ ID NO: 2222506
uacccugauaccaaauuag

SEQ ID NO: 2222508 - RNA, 19 nt, Artificial Sequence
  Description of Artificial Sequence: Synthetic oligonucleotide
  Sense strand starting at position 932 of SEQ ID NO: 1883869
ggcacgagauuggugugaa

SEQ ID NO: 2222509 - RNA, 19 nt, Artificial Sequence
  Description of Artificial Sequence: Synthetic oligonucleotide
  Antisense strand to SEQ ID NO: 2222508
uucacaccaaucucgugcc

SEQ ID NO: 2222510 - RNA, 19 nt, Artificial Sequence
  Description of Artificial Sequence: Synthetic oligonucleotide
  Sense strand starting at position 2330 of SEQ ID NO: 1883869
gugacaaaucguuguggga

SEQ ID NO: 2222511 - RNA, 19 nt, Artificial Sequence
  Description of Artificial Sequence: Synthetic oligonucleotide
  Antisense strand to SEQ ID NO: 2222510
ucccacaacgauuugucac

SEQ ID NO: 2222512 - RNA, 19 nt, Artificial Sequence
  Description of Artificial Sequence: Synthetic oligonucleotide
  Sense strand starting at position 2371 of SEQ ID NO: 1883869
uucagaaacguauagcgua

SEQ ID NO: 2222513 - RNA, 19 nt, Artificial Sequence
  Description of Artificial Sequence: Synthetic oligonucleotide
  Antisense strand to SEQ ID NO: 2222512
uacgcuauacguuucugaa

SEQ ID NO: 2222514 - RNA, 19 nt, Artificial Sequence
  Description of Artificial Sequence: Synthetic oligonucleotide
  Sense strand starting at position 3970 of SEQ ID NO: 1883869
agaaauugcccgugacuug

SEQ ID NO: 2222515 - RNA, 19 nt, Artificial Sequence
  Description of Artificial Sequence: Synthetic oligonucleotide
  Antisense strand to SEQ ID NO: 2222514
caagucacgggcaauuucu

SEQ ID NO: 2222516 - RNA, 19 nt, Artificial Sequence
  Description of Artificial Sequence: Synthetic oligonucleotide
  Sense strand starting at position 392 of SEQ ID NO: 1883869
cuaaguuuguuccuauauu

SEQ ID NO: 2222517 - RNA, 19 nt, Artificial Sequence
  Description of Artificial Sequence: Synthetic oligonucleotide
  Antisense strand to SEQ ID NO: 2222516
aauauaggaacaaacuuag

SEQ ID NO: 2222518 - RNA, 19 nt, Artificial Sequence
  Description of Artificial Sequence: Synthetic oligonucleotide
  Sense strand starting at position 3930 of SEQ ID NO: 1883869
ggaguugggacuugucugu

SEQ ID NO: 2222519 - RNA, 19 nt, Artificial Sequence
  Description of Artificial Sequence: Synthetic oligonucleotide
  Antisense strand to SEQ ID NO: 2222518
acagacaagucccaacucc

SEQ ID NO: 2222520 - RNA, 19 nt, Artificial Sequence
  Description of Artificial Sequence: Synthetic oligonucleotide
  Sense strand starting at position 3784 of SEQ ID NO: 1883869
uugccuaggucccuuaaau

SEQ ID NO: 2222521 - RNA, 19 nt, Artificial Sequence
  Description of Artificial Sequence: Synthetic oligonucleotide
  Antisense strand to SEQ ID NO: 2222520
auuuaagggaccuaggcaa

SEQ ID NO: 2222522 - RNA, 19 nt, Artificial Sequence
  Description of Artificial Sequence: Synthetic oligonucleotide
  Sense strand starting at position 3971 of SEQ ID NO: 1883869
gaaauugcccgugacuugu

SEQ ID NO: 2222523 - RNA, 19 nt, Artificial Sequence
  Description of Artificial Sequence: Synthetic oligonucleotide
  Antisense strand to SEQ ID NO: 2222522
acaagucacgggcaauuuc

SEQ ID NO: 2222524 - RNA, 19 nt, Artificial Sequence
  Description of Artificial Sequence: Synthetic oligonucleotide
  Sense strand starting at position 1666 of SEQ ID NO: 1883869
uggaguuucugggugcuga

SEQ ID NO: 2222525 - RNA, 19 nt, Artificial Sequence
  Description of Artificial Sequence: Synthetic oligonucleotide
  Antisense strand to SEQ ID NO: 2222524
ucagcacccagaaacucca

SEQ ID NO: 2222526 - RNA, 19 nt, Artificial Sequence
  Description of Artificial Sequence: Synthetic oligonucleotide
  Sense strand starting at position 2376 of SEQ ID NO: 1883869
aaacguauagcguaaugua

SEQ ID NO: 2222527 - RNA, 19 nt, Artificial Sequence
  Description of Artificial Sequence: Synthetic oligonucleotide
  Antisense strand to SEQ ID NO: 2222526
uacauuacgcuauacguuu

SEQ ID NO: 2222528 - RNA, 19 nt, Artificial Sequence
  Description of Artificial Sequence: Synthetic oligonucleotide
  Sense strand starting at position 3862 of SEQ ID NO: 1883869
gcucauggugcuuaucuua

SEQ ID NO: 2222529 - RNA, 19 nt, Artificial Sequence
  Description of Artificial Sequence: Synthetic oligonucleotide
  Antisense strand to SEQ ID NO: 2222528
uaagauaagcaccaugagc

SEQ ID NO: 2222530 - RNA, 19 nt, Artificial Sequence
  Description of Artificial Sequence: Synthetic oligonucleotide
  Sense strand starting at position 2185 of SEQ ID NO: 1883869
uauuacgucuggcucuaaa

SEQ ID NO: 2222531 - RNA, 19 nt, Artificial Sequence
  Description of Artificial Sequence: Synthetic oligonucleotide
  Antisense strand to SEQ ID NO: 2222530
uuuagagccagacguaaua

SEQ ID NO: 2222532 - RNA, 19 nt, Artificial Sequence
  Description of Artificial Sequence: Synthetic oligonucleotide
  Sense strand starting at position 2392 of SEQ ID NO: 1883869
guauaucucuaagaagaaa

SEQ ID NO: 2222533 - RNA, 19 nt, Artificial Sequence
  Description of Artificial Sequence: Synthetic oligonucleotide
  Antisense strand to SEQ ID NO: 2222532
uuucuucuuagagauauac

SEQ ID NO: 2222534 - RNA, 19 nt, Artificial Sequence
  Description of Artificial Sequence: Synthetic oligonucleotide
  Sense strand starting at position 3803 of SEQ ID NO: 1883869
cccugagccugucuguaaa

SEQ ID NO: 2222535 - RNA, 19 nt, Artificial Sequence
  Description of Artificial Sequence: Synthetic oligonucleotide
  Antisense strand to SEQ ID NO: 2222534
uuuacagacaggcucaggg

SEQ ID NO: 2222536 - RNA, 19 nt, Artificial Sequence
  Description of Artificial Sequence: Synthetic oligonucleotide
  Sense strand starting at position 390 of SEQ ID NO: 1883869
gccuaaguuuguuccuaua

SEQ ID NO: 2222537 - RNA, 19 nt, Artificial Sequence
  Description of Artificial Sequence: Synthetic oligonucleotide
  Antisense strand to SEQ ID NO: 2222536
uauaggaacaaacuuaggc

SEQ ID NO: 2222538 - RNA, 19 nt, Artificial Sequence
  Description of Artificial Sequence: Synthetic oligonucleotide
  Sense strand starting at position 2422 of SEQ ID NO: 1883869
cguuacccgccauaaugua

SEQ ID NO: 2222539 - RNA, 19 nt, Artificial Sequence
  Description of Artificial Sequence: Synthetic oligonucleotide
  Antisense strand to SEQ ID NO: 2222538
uacauuauggcggguaacg

SEQ ID NO: 2222540 - RNA, 19 nt, Artificial Sequence
  Description of Artificial Sequence: Synthetic oligonucleotide
  Sense strand starting at position 2783 of SEQ ID NO: 1883870
ucuucacggcgaguguuau

SEQ ID NO: 2222541 - RNA, 19 nt, Artificial Sequence
  Description of Artificial Sequence: Synthetic oligonucleotide
  Antisense strand to SEQ ID NO: 2222540
auaacacucgccgugaaga

SEQ ID NO: 2222542 - RNA, 19 nt, Artificial Sequence
  Description of Artificial Sequence: Synthetic oligonucleotide
  Sense strand starting at position 955 of SEQ ID NO: 1883870
aguaucaagaagugagauu

SEQ ID NO: 2222543 - RNA, 19 nt, Artificial Sequence
  Description of Artificial Sequence: Synthetic oligonucleotide
  Antisense strand to SEQ ID NO: 2222542
aaucucacuucuugauacu

SEQ ID NO: 2222544 - RNA, 19 nt, Artificial Sequence
  Description of Artificial Sequence: Synthetic oligonucleotide
  Sense strand starting at position 2715 of SEQ ID NO: 1883870
ggaguuguuccuucgcucu

SEQ ID NO: 2222545 - RNA, 19 nt, Artificial Sequence
  Description of Artificial Sequence: Synthetic oligonucleotide
  Antisense strand to SEQ ID NO: 2222544
agagcgaaggaacaacucc

SEQ ID NO: 2222546 - RNA, 19 nt, Artificial Sequence
  Description of Artificial Sequence: Synthetic oligonucleotide
  Sense strand starting at position 2370 of SEQ ID NO: 1883870
aguuauggccauuacagga

SEQ ID NO: 2222547 - RNA, 19 nt, Artificial Sequence
  Description of Artificial Sequence: Synthetic oligonucleotide
  Antisense strand to SEQ ID NO: 2222546
uccuguaauggccauaacu

SEQ ID NO: 2222548 - RNA, 19 nt, Artificial Sequence
  Description of Artificial Sequence: Synthetic oligonucleotide
  Sense strand starting at position 884 of SEQ ID NO: 1883870
uugagugcugcucugguuu

SEQ ID NO: 2222549 - RNA, 19 nt, Artificial Sequence
  Description of Artificial Sequence: Synthetic oligonucleotide
  Antisense strand to SEQ ID NO: 2222548
aaaccagagcagcacucaa

SEQ ID NO: 2222550 - RNA, 19 nt, Artificial Sequence
  Description of Artificial Sequence: Synthetic oligonucleotide
  Sense strand starting at position 2024 of SEQ ID NO: 1883870
ucguaacuccgcuccgaau

SEQ ID NO: 2222551 - RNA, 19 nt, Artificial Sequence
  Description of Artificial Sequence: Synthetic oligonucleotide
  Antisense strand to SEQ ID NO: 2222550
auucggagcggaguuacga
